United States Patent Application Publication US 2013/0034624 A1 - sequence listing, part 10

SEQ ID NO: 37912 - DNA, 1547 bp, Bovine  19866880539254
  misc_feature (1)..(1): n is a, c, g, or t
nacgcctttgtgcatgcatggtcagtcatgtccaactctttgtagccccatggactgtagccttccaggctcctctgtccatgggattctccaggcaagaatactggagcgggttgtcattaccttcttcaagggaaccctctgacccaagggtggaacctgcatcacaggcagattctttacccattgagccacctggaaagccctctgatgcccttggcagtcttacagttcaggtaggactgaactgtgggatctgatgccatctccacgtggacagtgttggaactgagttgaattgcaggacacttacctggagctggagaattgcttggacgcccaccccccagagcacacaccttgacatcggcaagcagaatcttaactagccttgagagttgccttaggcattgtttttaggaatctgaatagtcacttaaaacttgccagacccaccgttagttggcaggttgctgagacaaagaaagaaagcagtggtcttaatgacttgggcagttacgcaaaaatgtggattatcaggtattccaagggggccaagggagtcgcagaggccaagcagcaggtctgcttcattctactcactaaagtgtgttgtgaagacagatttctatatggcagcttcttgaatatgagacatgcaggtggtctccttttgcaaagacaggcaccatgaaaaacaaattttttaaaaataaggagacaggattgtgtgggatcctcacagatacttttcgagtttctgtaaagttttatttttaaaacacccaaagcaaatggcaaaatgctaacatttgtcaaatatcagcactgagtacatgaatgtgtgcgctcttctctgggtttgaaatgttctataataaatgatttttaaaaatcaaaaggaaaaaaaaataagtgccccatggagttagtcttggcagttgaaatgagcgagatcaggtaatgaccacagatggaaaccacctcctccctcccattcagagtaagtctctattgtaccagctgtcagaaaaatgaaccatggaactttttgcaaagagttggtataaactggcaagccttgtttttgtcaaccttggggggtttgcttggttcatatgatagttttttttttttttttccttgttttggtctgttctgatttaattctttaaaagtggatgtaacttatctttacaagtacattccctgctagtgcacaattgctatggctggatctgtgatttcattgcatgcatttaaactttatgtattctagttattgggctccccaggtggcgctagtagtaaagaacccatctgctaacgcaggagacataatagacaggggttcgatccctgggaagatcccctggaggagggaatggcaatccactccagtattcttgcctggaaaatcccatggacagaggagtctggtggtctatagccattggggtcacaaagagtcggacatgactgaagcataaacttaattcaagcacacacattccagttactggggcttccctagtggctcctgtctg

SEQ ID NO: 37913 - DNA, 1652 bp, Bovine  19866880566490
  misc_feature (1)..(1): n is a, c, g, or t
ncaaggagtttgagtgcaacaacagcgagagcggctacctgtactgctgcggcacctgctattaccgcttctgttgcaagaagcgccacgagaagctggatcagcgccagtgcaccaactaccagagcccggtgtgggtgcagacgcccagcaccaaggtggtgtcgccggggcccgagaacaagtacgacccggagaaggacaagaccaacttcaccgtctacatcacctgcggggtgatcgccttcgtcatcgtggccggcgtcttcgccaaggtctcctacgacaaggcccaccgcccgccgcgggagatgaacatccacaggtgagagcggccgcccggggtgagtggggggccccgccggtccccccagcctctctcccggctgctcacccctcttgtcaggcatccctgtcctcctggcatctcacccaccgccctccccgggctgccttcactctcttaagtcaacttccctcccctgcctctttgacgggcaataaatcagagtcttcggcgccctctgctccatttcttcagaaccgggaacgcacgctttggttggtagggacatttacagggccaaatagatattggtggaatcccagagtttgagtgtaagaattgcgcaccttccaataatcccgggtggggttccagggtgcaggtttcatggcaggtgggcacctcgctgtaggcgcttattgcatttggttttctgaatcaagccagagcagtcatcttggatatggggagctgaacagtgttggaaccttactgaaaagagtgtggactgaatgttcccgggtgtttagagagatgggggtgatagggaaagggagcctcctgggtaagcaggaattcaaatctgtgcattccgtcttgaccaagggcagatggtttctcttcattgcatcctgtcgagtaggatgcttatctgccctgctgagactggaggacttgttcttttaagccctgtgggcagaactcagagtgaatgctgcttgctatgttcaacccggtgggcacctttcactgcttacaccagggaggcagtggggggctgcctcctgccaaaacttacgccaagggctcaagatatggttgtccaacgttccaccctgactgcctcccaccccaccaccctagcttccggagcaccccttgggaggtccaagccgagggaatggggaaaccaggctctctttacaactcaggaaaccatgcacccaggggacacaagctcagctctgataaatggctggacatggttcagcagagtctttcaaggaacgaaccctgccctggaatgtgcctccgtttctggcacatgatgtgggcactgccctagtcatggagaccaccccccagaccagccctccttctgagtttgcctgcaggctcccacccagagtcctagagcttcagctcatctctgcactcggcttgttatccttttagcctgaaaaccttcttccctcactgctgaggacattaatcacctgtaccttgatgaagagagagaaaggcagatagaaatttctgggcatctcttttttttccccctggatactgaagggtgttgagaaaagatgatgctctgtgactgattttgagtcaaaatccacaaagtatgagtacttgaatactg

SEQ ID NO: 37914 - DNA, 1015 bp, Bovine  19866880572975
  misc_feature (1)..(1): n is a, c, g, or t
ncagctgatgtggagtagttaatagatattggatgaaagaatgataaattgaagttcaggaacataggtttatcggggcatctaggattaatcatgtgatcagaggtgagtagacagatacacaggagagggtttttttgtaccatgattccagtttatcagtttttcaagggatctctcctgggtccaagaagtggagccagtctttgtccccggtggtctcttcctggtgaatgggatcaggaggatacttggtgaccacacagaaaaggtggaccttctgtatgtgctatttctatacagttctggtgatcccataacctggcctccatttctttaaggctgtttttacgtaaagggtcaaaaatcgaccagccagaatcagagtccctgttggacttcctagtgacacgatgatagattttcctcctccagtttccctttgtgaatattcacacagaccctcaccccgccatttacacttgttaccacaacaacgcctcctgagtgtcgggttgttttgggttgagttgggctgcttgctcacagcatacttgggacaggcgctttaatctcctcagtaagtcgctcagatcaccctgcaagatgggttacttctggaaagccatcctggagacagctaatcctgtccttcttgcaggcttgacttacggagatggcatctgctgatctcgctttctgagagcagtcttattttgagtactgcagtgcttcgtccaccttctacaattactgcgactaaaaatacttcagagggtgaagaatcttcaaggggactttgcaacctggcctgtcctccttgtatcttgatgccatatttcaaggcagtatccttgttgctgtgctaagctgcgtattacccgatagaccaatatttcagatgatagttgattgtaggccagcctttatgctgacctttctgatctttttgccttttccctacaaacgcatccaagactcatgttgctgttattctcctaacccagtacaacca

SEQ ID NO: 37915 - DNA, 1846 bp, Bovine  19866880595576
  misc_feature (1)..(1): n is a, c, g, or t
nttgtgatggttattttctgcatcaacttgacttggtcccgggtccccagatattttcctaaacattatttctgggtgtgtctgtgagggtgtttccagaagagattagagtttgactcagtagactgtgtgaaagaatagaaaataacagaacatatgcatattggactctgtgcccagttcctgtcacagagctcctaaaacccttgtaagttgctaagtgataacaatgctaggagcatctcatattctcacatttgactttgatctcttctctgacacatgggctcctaaaactcttgtaaatttctgagtcataagagcactaggatggtcttttgtcctatggaggtgacttcaggtgggcttctggctgggagctggtcaccaggaagccaagccatgatgaagaatgttcagttttaagtcccatctccacgctccatcttccagagaggggaggggggttggaaatggagttaataattgattgtgctcttgtgaggaagcctccataaaatcccaactgcagagggtttgggagcctccaggttggcacatacttccgccccggaagggagcccccagccctgtggagacagacctcctgtgcctgagaccctcctggatcttgcctgaggtgtctcctcatctcgctgttcatcttcatcctttatgatgctgttgttgctgtttagtcgctcagtcatttccgactctttgcaatgccatggactgtagcctgccaggctcctgtgtccatggcattttcctggcaaaaatactggagtgggcttccatttccttctccagtgggttttcccgacccagggaaggaacctgtatctcttgcactggcaggtggattcttcattgctaagccacctgggaagcccatcctttatgaagccctttaataaactaggaaatgtaagcatttccccaagttcgatgagctgctctagtaaattaatcaaatcttaagaggaggttgtgggaacttctgatttgaaaccagaggttgttattgcccagtcctttcctgatttcaccactagtaacacaagcatctcaaataacatttttcctgaaagttttgtctacaagttcagggaaattgccaccaggagactggtgctgcttgagtgtctgggtgggaaaattcctctgggggacatgggggcatcagacaactctgctaagtcgcttcagtcgtgtccgactcttagcgaccccatggactgcagcccaccaggctcctccgtccacgggattttccaggcaagagtactggagtgcggtgccattgccttctccgacaactgtagcagcatccattattccagcacatgtctatctccagttgttgggactccttactcaccacgcaacttccaagctgaaatttggcttcgtgcggaaatgtcaaagcagagtaaatgtgctcactggtctggaggacacaagtgactatcccctctggcagttatgtttctcatggtaaattaatgaattggtagaattttgttagctcagcctttctgaacttaattaacgttggaacactgaggaactgggctttggggatcttgtaaaactgaggatgagaattcagattctggtgactcaggcaaagtggcaccactctgggaagccccttggcacacttcatactatccgtcccatctccactcacagtgcagaatcagggggagggtctcactgtcaggaaggctagggaaaggatgtccaggatggaaggaagctgccgaggtaaacggggtacacagctggacagctgtggacaagcctgcaggtctggcttgtctggtcacatgctatgcaa

SEQ ID NO: 37916 - DNA, 1774 bp, Bovine  19866880653701
  misc_feature (1)..(1): n is a, c, g, or t
nctaaccctgtgctagcccttccaaccccaggatgtaagaatctaatatgtagttccatgctatcaaatgtatgcagggcaacccattaagagggccaagtgtgaaggacctcttggctttcaaagtagtgcagccatttaagtcaccagaggaagtcaagtggcttaattctgattattctttggaatgcctagaaagtactctagagaggcatgctaaagaacagggaatgagggctctttgggaaaagccccagtagtcaaactgcctgccaagaattggcagcgataactgaaagaccgaagtcattagtctctttctctttatttccagatcatttgccagttttcccaacaccatttgttggataatctaccccttacttactgatctgaaatgccaacttcgtcatgaaacacattctcatatggtcttggatctattactgaggttttgtattttgtttcttgttattctctgtgaagtacagagtttgaaacatattttttaaatcaagtgaattaattacattattcagatcttcaacctccctatttttgcctagtgatctgtcagagatttaaaaaaatatataacagtttcctcaccaccattctaattctgtcaatttcttcatgaatagcaaatattttgcttttatatattttgatgcaacattattgcccggataaaagtttgttatctgcgatgtagtcactgtgagttacaacttttgtcaaagcaaaatgaggcttccggttttaaaatcatagagaaaagatggtttggtttccatttcttttcaaaagcattccaaacaacaaagagaaactgaaaccaaaatttcatctttcatgaaatcagaagacttctacggcaccaagcaatgtagctttatgtgaaaagggagcgtgaatggatgatgctaaatggtgtagcactgagggtaaggttgacatgacttacagcagagcgggagactgaggagaagcaggtgacatttcctggctgagagccggaaagccttaggaattggagaaagcaaatagcaaagaaaccaggggagaggtaaggctgacaaccagaggattatgggaaagtctttataagaagcaattagatccaatgtcccctaccttgcccaccagtatcctgtatactcagcagttattccccaatataatgcaagagacaaataacttttcaaaaattgaatgtgagagccttataactcatatacattgaccacagagtagggccaggtgagatggactttgaccacagggaaataaagtcaaagcctattcatagaatgatgggaacatctcctatcagctgcagaattctgggagataagcgggagaaaccacatccttctatgcacagccaaagaaagaacctgcccacactgacttttggttcccgaagaaaagctccatggccacgtgtttacagtgaagtcagcagcttccttggatgtagatttcagttagttttttagtgctttagtctcagatatgaacagcagagagccaccagacctccaaagaaaactcccgatacaaaaaaaagaatcaaaacaaacaaaatcagcatgactgaaaataacgcagagttttgaagattaatttctttaagctttaaagaaattgtaattagtctcttcagaaatggtaaaatatcgtgcaactgtgaaacaagtatatttataaaagggacagggggcagcagtcagagaaccagaaacagacttggaaattaaaaatgtcaaac

SEQ ID NO: 37917 - DNA, 1183 bp, Bovine  19866880722869
  misc_feature (1)..(1): n is a, c, g, or t
nttctgcagagctccttgttttcctgtttccaaccccctggcttcagaaccccacgctccactgtacctatttaattgtcacattcacattctggcttccttgagtccttggcatcacttagaaagaagagaggatttgctagcagtgaggccctggttcccagaggctccagaggagcaaggggaaagctctagcaaggaggctggagttggcacgtgctcccagccgtgggaaagtgacacaggaggtgctggatagaaggcattgtccccattaccactgacattcaagtgcagttgaaaagtgagcaaggaaagaaacccttggtgtgaatttgaaggaaacaagagaaggactcctcacaggatcatccttctgggctgatgcagcctggcctttatgtggggagaggtgaactttaaggtttcacacgtgtctgcagggctaaggaagatgctgtgtccttagcgggctggattctggggcatctgtccgccccagttgatttggtgcagctggccatcctggcgctgtgcctggttcagagcatctcctggatcctctccagtgtactatggggatcgataaacacttaaatgtcatgcttccaggagccatccgtcatagtaaatgttgttcaataaatgtcaccagagagtaacaaaccctctcctccagaaggccctcaggccatcactccctcttgtgaccctcccactaggatcatcacagggcctctcctggcttcaaatttaatagcaaaagatgagggagggcctgtttctgagcttggaacaaagtggggggtcttcttcctggagtgctggcatccaggagctggcttcctagcctcatgtcctttgtcacatgtcacctctggtgctgtttcctgaacatttctggttctcattacttccagagctggataggattgtagctcctaacctgctctgattggaaacacctaatttaatagttctgacggatacactgtgaacagaagtgacacgtgtcacttttagactgaagcatttaactgctgaaagatcctctgcagatctctcttttgataccatttagtgtactggctcctctgttagcctgggttcctaagtgactccagtgaattgagccctattcagggacacggagcatagacaaaatacacttttacgtttaacc

SEQ ID NO: 37918 - DNA, 1176 bp, Bovine  19866880796489
  misc_feature (1)..(1): n is a, c, g, or t
ncaaaggctgaaagaggtaacagaattgaacaactttcaaggagaacttagtgtattggaagatgcagagacatggtggggggcagagagagagagatggagagagctaggttgacttcagggtcaccaatggaagtggaaaaggactaggaatagagatttggaagatgtggagaactgagactcagaaaagacaagtgaggcactggccctgggcataaaatgttaggggagccaaaaaattcagtagtcaagacaaattctttctttcttttttttgactgaatcatgtggcatgtgagatttcagttcccgaccagggatggaaccatacccgctgcacaggaagcacagggtcccgaccactggaccacctgggaagtccccagacatctcttttatatcttgcccatcctgggccttccttgacattcaagacctaatcagatcagattttactcagtttaaaaaaaaaaaaaaaggattttgcaagatctccaggtgggggagcagtccttaaaagagtcaggtccatacaaagaattagtactcttatcacattgggatcagatttacacatggccaaatagtttttatttgatttttacactacttcctggaaggagcatatgttgtaaaacttgaagatctcatttgattgtcctacacctagatggaaaatgctaacgatcagccaacttggaagatgttgcaaagaatcagaaaggccaatggatgtaatttagagaccctcctttcataatgtgccaatcaagaaccagagaagggaatttgtttacctagggttacacagctattaatggtacatccaggatgagacctgagatattctgacagacagattagagcatttacctcgacattagaagttctcatagtaggataagggaggtacatctccactgagaaatcctaagtaaatgtcaagttgttttttagagtttagcaacactggtgtatgcaaattgcatgcttctattcagaagatacggcatgtctggattaatcttctttatttgtactttaagtagaaatgactagtcatgtatttcactaactgaaccacattgaatggaaaataaaatccctgccccagagccctttctgacactaatgtatgcatgtttatctttgccttcacattctactagacag

SEQ ID NO: 37919 - DNA, 2235 bp, Bovine  19866880798559
  misc_feature (1)..(1): n is a, c, g, or t
ntcggacacgactgaagtgactgagcacaatatgtgaattatgtattcatatacaatatgtagtagtgttagtcactcagtctatacaaccctttgcgaccccatggactgtagcccaccaggctcctctgtccgtgggatcctccaggcaagaatactggagtgggttgccatttccttctccaggggatcttcccaacccagggatcaaacacaggtctcctgcactgcaggcagattctttaccatctgagctacagggaagctatacatatattcatcaagccctttctatctgcattttcttatgctagccttgcaaaagctatctaaggtagcaatgatcacatccacttaacaaatgaaaaaattaaggcacgggagaagttaagtaatttgtgcaaagccaaatataaggatagcaatatacctcacatcccgttcagattctgtgggggaatcagtgaattgctgtacacagaaagtgcttagactggtgcctgatacagaggaaatgctaaataagggttttgtggtttctgatggcggttactccaccgcctgccacaccctgcagagggtggaggaaagcatagaaatctgaaccaggggaaaagaaatgatctgattatttgccttgcaaagtaagtcaccccccggggttcttcaccagccaggctatcgggcttgacaaaccgactgtaggtctgcagaggcagctacagcagagcaagcaacagtctcaaaagcctccaagtccaggcctcctggtcactcaggccctgcacagacaatgctcagcttccaaaggagaccagaagaaaagccccatcagctcaagcacccccggcggctcggtggacagcctgccctccggccctctgcttctcaggccttcatcccacatcaacctctgcagagccttccccctctggaaatttcatctcgccctgacctggtctgcacgtcccaggtccctcctaggagagccttccctataggccacctagggagtcctcacccagtcctgttaccgtagcagggacctctccagtctcaccctggggctcccaaccagtgagaagagaggcttatcctcctggagttggtgtgagaacggagggtcagcctggctttcttgttggcttcagggtacagactcgcattcactcttcatcacctcacacctggcttctgacagcacaacgtgtgtaactgctaacagagatggagaccctgcccctccactgcagtgacattcctcactggctccttatcaccatgataagtaacatgaaaagcacaggggtgccatcgggaaaggggggagaagagaaggtgaacgtgctgctttgcccccagttcaggaacatctgggcccggggctggggtaggcccctctgtgcccctctgaccttcagctgtgggttcctggcctcgggtctcataggatacccacacataggcctcggggtgctcccagaggtacccctgctgtcttggaaccgaggatgctaaaaaaaagtctacacttgctttctcctacatccagaacaaacaggcctcctaggtcccatggccaacacctgccctggactgagctagtgcagactctgagtgatccactttttggcagccaccaccatcacggtcacacactccactgacccagggacccacatctccagatttccgagcctggggttgggaggagtggctctgcccacacaccagcctcatccaaatctccctgaaacctgaagaccaactgcagagaagcttcattaatttttcaccagcttcatctactagaggctgagcagagctgagccaaagccctatcacaagcgcctctgcccgcggcccaccaagggttaacccattagcccacatcctggtgagctcaccccgctggagccagctctgcgctgggattcgctgcacgcggctcctggaggggccagggaggcttcttcctgggggctagggtgcaggacttgagcaggaactcactgcccgcttcctcctggcgccagttgtgtgcgatccccaggactcccccatcttccccgggggacgttgagcacagtaagtaaggaggccactggccctctgcccctccttccacttccccggaggaaggagccagttttaacttcgctttagagcgccttgagtctgtgagccggaggtgggaggtagatgcgcacagccggctaaggggaggagggctgg

SEQ ID NO: 37920 - DNA, 760 bp, Bovine  19866880799023
  misc_feature (1)..(1): n is a, c, g, or t
ntgtgcatctacgctcatcaccaagagccttgtggaagctcaaggctgttaagacctgggaaaagatgcgaaccatcctccacttctgattttcaaatctaaaacaggctaaagtgatggaagaagagtgtagggtttatatattagactggattcgattctgcacataatagattctcagtgtgttatagaatgaaagatccaagctttatcatgtttcccccgtgatgggccctctcagggcacatgataatcatagctactttcagccttgtgacagctcttgaaagtatcccattttataaatggataagctgttgctcagaaatgctcaattacatgcccaagttcatatgagcatcagagatggactcaaacccaagtctgtttgattccaaatcccagagtctttccaccaggcaacactgcctccgtggctgttaccgagtaacatggagaggactgttaacgtagccactggaaagcctctctcttctgaaaggccggaaggtagtcactaagaggaaaggccagcagactgtttgccaagatgtctcataaactggtattactgaccttgaggaatttcccatgttcctccatttgactccatctgactcttagacactacagaatctgaagagggatccatctctcagtagagacattttaaccaagcacggagtacctgatgtattaatataaaactcaaatgtctctttcttcgttcacagagattactaacacgaagacctaaaaa

SEQ ID NO: 37921 - DNA, 758 bp, Bovine  19866880808465
  misc_feature (1)..(1): n is a, c, g, or t
ntcttgacatggtgttaacattcaagagcaacagtcaaatacctaaacataattaaaaagtaattagaatctttaattggtcttttggaagaaaaagggatctatgaaacgattgtggcatacaacaaattttaaaaattaagagaatttaaaaatttaaaaacttttatctttctcacccttagttccttgtgtatcgtcagaagctgcttcccccagcactctcctttctcataacactcccccaaattcagccaactggcctcggcaggcctccccctgccccctggattctgtaatcagcttacgctgatgtgttctttggattctcttgttctccttttaccaagactttgaacatcaaagtagagttctagaagtgactcactgaggtagaaagtagaagaggggaaggggaagaggacagatggtttggattagatgcagtcttgctgatgtcccatcaccctgcacgcttaccgttgtgacctagcgccagaaatggttgagcatctccccaccccacaagccgagaggcacccgccgagccccattgcaaggagatgctgcctgactcagactccaagtctacaaactggaatttagacatttgctttggttttccccagagccaccttctacaagcttatagaatggagagctcaacacagattttcattaaaaagcagtcctgctgtttatatgtgatttgctccaggacagtctaattggtgtgcaaaaatcattgaatttgaagc

SEQ ID NO: 37922 - DNA, 878 bp, Bovine  19866880813949
  misc_feature (1)..(1): n is a, c, g, or t
ntaaaaaaaagaaaaaaagaaaatgccagctgaaggcaagaaagaacaatatcaatcatggggccacttagcgtcagctcaaattggcccaactacaactggtccccttatagaacaatacaataactgatgctcccagtgacgactctgagtcataaaggaaggcttaaatggctcccttcattctacagaagatgtcagaaaacgtgaaatgcagttgtcaaagatgttcaatgaaaatgattgaagtaagaaaaggtttccacatttgaagggcaagcttcctaaacaggcccattcaaaacagactagctcctgagacatcgtaattgtggagaattgttagaattataatatttcatctgcacatgttctcttgtgttagaatataaggaacttgagagtggggactggggggtatatttctggcttccgtgatacctaaaatagcctggctttcacagtggcaaccacatgttgtcatcgtcataatcacactcaagtgtcctcagaacaagcctgcagactggtcctgtgcttacccctactctgtggctctatgagctccctcctggctaggcaggactacatttcccagaattcccttcacagagtgtttcctgttgggatgggtcacagggtttgagggcagaagtgaaggagggtctgccattttgtttttacgctcccatctagcactagccttgggggagcctgagggttcttgtggctgctgtgcctttccctggaccttctgccagctctgccatttcctgggattggtgtgtatttagttatgtgatgaagggggacaacttctcctgccggacagccacttcactgaagttggaggcagcttaaacggatatgggttcaag

SEQ ID NO: 37923 - DNA, 1736 bp, Bovine  19866880826645
  misc_feature (1)..(1): n is a, c, g, or t
nagcaggactgagacttgtccaagacctgttgggtgcactatgggatgctgtaccaggaaagggaccctacttctgtttctctttaattgtatagggccggcatgagggtgattttgcagacaacaaataaacattatggactcaggaatgaaccaggttggaatttaattggcaaatagagagatgctctcatgtttagaggaagaaacatgctgagagctgggtacccaggtgctgtgcttaatcactcagttttttccgactctttgcaatgttatggactgcatcccgccaggctcctctgtccatggagattctccaggcaagaatagtggggtgggtagcctatcccttctccaggggatctttccaacccaggaattgaaccagggtctcctgcattacaggcagattctttaccagctgagccaccagggaagcccagtgtattcaggtatggcttcccaaagatgtgagccaggagatggaccttgaaaaatgactcacttttattaaggagatgttcagtggatcatagactcaatggaatgagtttgagcaagctctgggagttggtgatagacagggaagtctggcgtcctgcagtccatggggttgcaaagagtcggacacgactgagtgactgaactgaactgaggtggatcatagaatatcaacttcacggaacgttatggggtcattaaaattataattagaaatactgagtagcaacttggaaacatgatattctattaagtgagcatggcagaataaaactctctgctatgatcatgaccatggaaactccacatttatggaagtgggaatgatcacgaccatgcaaactccacacttataaaagtaagatgaaaagaaagctggaaaataaatacaaaggacatgtttttgtggtgcaagtccaggcgaattttctttccaatttccatttcctttgggatttgttgttattattacaaaaccatttttaaagcaatgggggctgggaaggagatgaacattcctagccagaaaaacaaccttgtcccagacttgagaatatgaaggtagttcgcttgtatcctagggttcccgcagttgaatttttgtctgttgaacagctgagcaccactagaccaaaaaccaggatggaatgtgcccgacaggcccaaactcaggcaggcagccactccttgacttagcgatagagacaccagaatcttagcaggtccgttctccctaggaggtgcaggagaaagagcggcttttggtgtgcgaatgttggtgggagggtatttgaggggctgagaggatgcaacctgagtcaaccgtctttgctctgatggttttggcagcagtcaaacccgttgtccagcacccagcaccactttctccagaaaaaactaaggagtggagagctgtctatcaactaagctgttcattttactttaattggtcctgaactggtcaacatggacatggagatgcttgctcttctcacatcctgtgctctggtccatagcatccagtgaaagcccaaacgtcccagcagcccaaacaggggtgcccagctgccttccagacccaagagataagcaactcatttgcaaatgaattatgggccagcagaggctgtgaggcaccctcatttttcttacagagagcaaccttgggagagtatcctgaggggtggaagaatatggaaattcaagaagtctcaggtactgaggctgccttt

SEQ ID NO: 37924 - DNA, 1696 bp, Bovine  19866880837724
  misc_feature (1)..(1): n is a, c, g, or t
ntttcctagagaaaaaaataggaagcaaaggaatcagcatttacttctagaaaggttagctttaatgatgagtaagaactccttcaaatagaaccatgaaggaagcaaatataggtaaaaaatacagatggatctgggctttccaagtggcaccaatggtaaagaacccacctgccaatgcaggagacatcagaaatgtgggttcgatccttgggtcatgaagatcccctgcaggagggcatgacaacccactccagtattcttgtctggagaagcccatggacagaggagactggtggactatggtccatggggttgcaacatgactgaagtgacttaagcaagcacacatagatgaatttagaagaccaagggggcacccatgagatagatcatctctgagggcctccattatctctgagccccagctgcccctgaaggtaatgatggtgggttgggtggagtgaatggaggtcaggggcagccgctgaaggaaagtgagagaaggtcgaccggagaattaaaagacgactgagtggcagtggctgccccgcagaggctgaatggttcataaatgtgtaatggaaccaatctgccatggtgatgcaattttccccaagtatcatcctgcagcactgggccaaggagagagaagaacgaatgattgggttgacacagcactggggacagaggcgcagctgcagaaggaagaccaggaaatgagggtgaggaggacttgatgagagggtccttgaagggatgggtgatgaaacccagccaaagaaggggagatgggcaagcccaagtgaggtctgacagcctgcaaaatcaggtgtcaaatatatccagtgtgtagtcagccatgaggctttgtgttagtcaatgtcctctggataaacagaaccaattccttgtaagtctcattacaaggaattgactcacaattccaagattatggaagctaaggagctccaggacctgctgtcctcaagctgcagatccatgaaaacagtgctgtggttccattccaagtccaaaagcccaagaaccaggagagccagacttgtaaggacaagtccacatgtccgggaggagacaaatgtcttagtttaagcagtcaggcagagagaaaaaaggccaccttcctctgcctttttgttctaatcaggccaatgaatcaacacccacgggcactggatgatgcccacccatactgaggaaggccatctgctttaccgagtccacagatacaaatgctgatctcttctgaaaacactctcccagacagaaatgatgtttaaccagatatctgggcatcccacagtccagccaagttagcacatagattaaccatcccaaacttgataacagtagctctgatcctaatccctggcatgtatgcagtgggcactcacaaggagctttacatgtgtggtttcatcgagtcctctctcagtttacagaagagtaactgcagctccaggaagctaagtcactctggacttcactcatgccaaagcttatgctcttaaacatacggccagtgagatttctgagcatgtggtttcatagtttgaggcatcccaagggatgaacaaggaataggaggcggcagtgggtgtggattgcagaagtgaatggaggttgagtcattgaggctgagcacatcagagcagtctgcgactgtgaagttgaa

SEQ ID NO: 37925 - DNA, 1316 bp, Bovine  19866880857248
  misc_feature (1)..(1): n is a, c, g, or t
nggctgagtctgaaaataagatgccatttcgtaaattatagcttttgtttgttcttttaaaggacatcattgttccctgattaaataagaagaagacttggttaaagtcttacttgctcagtcgtgtctgagtctttgcaaccccatggactgtagcccaccaggctcctctgtccatggaattctccaggcaggaatactggagtgggttgccatttccttctccaggggatcttcccgacccagggattgaatccaggtctcctgcattgcagagagattctttaccatctgagccaccagggaattatctctcacatgggggaaaaaaaaaaaccagcttgagaggcttcttatttttgtagatctcatctgcttttccttttgacttcagcactgagagccaggctggagacggatgctgagaacaggaagggtgtgtgaagagtccttgcccttgcttctaaccgttgccggtaccaggagcccaggctctagaagcggtgtccatggaggccctccccaaggccctggaggttgaagagaagtctccagagtccaaggaccttctgcccagccagacagccagctccctgtgcatcagctccagaagtgagtccgtctggaccgccactccccggagtaactgggaaatctaccgcaaacccgtcattatcatgtctgtgggtggtgccatcctcctcttcggtgtggtcatcacctgcttggcctacaccctgaacctgggcgatatgagcctcaaggtcctgaagatggtggggcctgccttcctgtctctgggactcatgatgctggtatgtgggctggtctgggtgcccatcattaagaagaaacagaagcagaaacaaaagtcagtgttcttccagaacctcaagtccttcttcctgaaccgctgatgacaaccttgccctctgtccaccctaccaccccaacaccttgtccaggagaaagtgtgatggccatagtccaacacctctggtcccttgggtggtggagtctgccataaaactgatgcaggcaaaccctcttctgggccccatgggaaaaagcaagctcagggctgcgccctccgtgtggctgggaggcaccgggatgatctcatttagtctctgttgtgtcctacgctcccccgcccagatcctggctgcggccgtcgccttccatggcttcacctcggcctgtgcatccaggtgtcactcatctaatgaatgtgctctgccaagcactatgcatgttgggaaattccttgagatggactatccctcctgcttacacttctgagtgcctgaactgga

SEQ ID NO: 37926 - DNA, 1996 bp, Bovine  19866880859061
  misc_feature (1)..(1): n is a, c, g, or t
nctggatgccatggagtcattcagtgtgatcttttgaagagtatttttattctgcggaaaattctcatgaagtaacattataacatcttcataagaaaataaagtggggtgggggatatgcacggggttgctctcaaaaggtttatggggattatgagtcatttcctatactattctgtgttcccaggtggctggtaaagaatctgtctgcagtgtgggagacccgggttcaatccgtgggtcggcaaggtcctctggagaagggaatggctacccaccccaggggaggcttcccaggtggtactagtggtaaaacaacccgcctgcctgtgcaggtagatgtaagatacgtgggtttgatccctgggtcgggaagagtcccctggaggaggaaatggcaaccgactccagtattcttgcctggagaatcccacggacagaggagcctggggggctacagcccccctcggtcacaaagagttggacatgactgagtgactaacacttctgtgtttttcaaactttctttcatggacaggtattcctcttataatccgaaatactctatattagaaagagagtgcatttcgatgggagggagttactagcaaaaaaagtcgcaatgcaagatgggctcgcccacagcatcatctagccaccttgggcctccaaatctgtgcagcgtctcttctgcttgttctcttcccttctctcacaccagcagagagggaaggcaacaaccctactccagccaggtctctgcagcctccacacccctaaaaccttcttcttgttccacgaagatggctttcctggagtgacatttaaaggaacagaacaagactgacacgagccccaccctcgcccaatagggatgacttctctgcaactttaaggggacaccacgggggcttgcgtaccgaagcagcagctggtgcgccgctctccttgaacgaacaggggctgctgtgagtcagtggctcgcccgcggtggtcctccacccacaggctgcttcaggaccagtggggctggacagatgtacacagaccccacagctgtcagccaaggggaagaggccgcgcgattttctgctcatttaggggcaattagccatcaaccccctcgtctccttgagtgtgaactttaaataagatgttccagctgaagtggggagaggaagcagctctgctgtgactggggagagaatcattgtgttgcgtgtttgcatctgctcaacggcagctctgggagccggcttcacgcaagtgagacagacggaggaggggagtctgggggagccgggctggaggcagctgccttcaccccggctgacggagcagggcttcggttatcccttctaactcacgtgatgtgtgtaacgcagactggtgcctgagcctctgagagccccaagggcagagctgctgttgctttggttgctctgtcgtgtcgggctctttgtgagcccacgtactgtagcccgccaggcttctctgtctgtgcaattttccaggcaagaatactggagtgggttgtcatttccttctccagaggatgttcccgacccagggatggaacctgtgtcccctgcattggcaagtggattctcaatcactgaaccatcagggaagtcccagcctcattttcgaagttaaaaaaaaaaaaaaaggtatattttgggataaaaatagcgaagaccagcaaagagaagcccacacctgggtttccagttgggaagggcctcgatttggtggaaggacgtctcaggataacaaacaagcccatctcaggccttcagggcttgaggacagatgggcctgcaaagggcgctcggctgactctccctaagctctgggtgcagaggcctggaatacaggctctcaaccagtctttctgtgttttaaccctaatgtgttaatacttaagtgcttgatacatgacactctctgtaattatttgcatttaatgggaaataatgcctcgtctaggaatcca

SEQ ID NO: 37927 - DNA, 2584 bp, Bovine  19866880881676
  misc_feature (1)..(1): n is a, c, g, or t
naatctctagtaagaaatgcttcatcgcctttaggacctctgagttagcagccatgagttcggaccaggaaatggccatctttggggaggctgctccttacctccgaaagtctgaaaaggagcgcattgaagcccagaataagccttttgatgccaagacatctgtctttgtggccgagcccaaggaatcttttgtcaaagggactatccagagcagagaaggtgggaaagtgacagtgaagaccgaaggaggagcggtgagtagtccaggagctggccacatgctactgattattttgtttggccacttggttgacataagcagttatccttcctgtttaccagactctgacagtgaaagaggatcaagtcttccccatgaatcctcccaaattcgacaagatcgaggacatggccatgatgacccacttgcacgagcctgctgtgctgtacaacctcaaagagcgttatgcagcctggatgatctacgtgagtgctccccaaaccccaaagtggttttgaccactagaccctgtcagctcactgtactacaaatgggtcacagacagtgattcactgcactttcactagtaatgtaactaactaagaggttcacgattgctactgtaaggcccagcccaacagctggcacataatcttttgtcttcccaggcaaagccactgtccacatggactgggtttgccacagatcccctgaacaaacacggtagcagctactgtttacatctcaaccacatgcctgcgtctcccctcatccccattcctgctgcagaatcatccagaggaaaaacataaacttatgtttcaacacttaaaagtaatgtttttaaagaccaattttcaatccccccaaataacagcaatttgtatctctgtgttctggtcccttctgagtggagcacttccttgatggaatcttgccaacttccccaggcagagttcaaccttgtgtcctggtgtttctgccctgcaataatgctgacaatgttttttcagcatgaatcatttacatgtccatctcctacacagactgggaattcctcaaggaacagtatcatatgttcaaagaaaaataacgtttatatttcattcttagggccttgcagagacttttcacataacacaaactcagtaatactaattgaatttactacgttaggtggacatttctgtacagttttgtggttgctgctttggccccaccacacagcttacaagaccttagttccctgaccagggattgaactcatgccccctgcatcgggaattcaaagacctaaccatgggaccatcagggaattctcatcatttctgaatgctgtagtcactgctgctattcagctggacaacacctaaacaggtgtgcctgtgattagtgtcagaatccattctgtttggttggcagttaccctagaccagatgtcaaaaatattggaaatccagctgttgtaatcgtaatgtattcccatcattctgtgttctgtttcttcacaattcaggagtggtttacaaatatttccccagtattgctgcataccttcatgtttgcctttttaaatgtctgaatcatactatcttaagaagatttttccatagttcacctacctatttcatactgttgagtacttaggtaccataaattcattttcctagatcataaattcattttcatgaatttgaactatcttaaatatactcctattttctaaactatggtaaaaatgtattaaacattttttaaaaaacccacaattttggatctcctactgtgtgaaaatcactgtgacaaatcccaagaggaataagaatctaaactgtatgcctcaccctcaagattttgctatcttgttgaacctttcaactagtttccatgctgataccttgaagatgtgtagaccacttacttagagtgttctttttctgttaaaattcattaaataactgagctgtgcaaataacaggaaaggtgtctggttagttattctttgttattcgcttgcatagacctactcgggcctcttctgcgtcaccgtcaacccctacaagtggctgccggtgtacaaccctgagggtggtgacggcctaccgaggcaaaaagcgccaggaggccccgccccacatcttctccatctctgacaacgcctatcagttcatgctgactggtgagttggatgtttccacgtgcatctttttaggagatgagactctaggagagagagactaaccacaggagaaagagactctactcatctcaacacactctttgaggtggtcctctaaatgccattgcccttttcccagaaccaaccaaaacatactccagagtataaggtgtatctggaattagagcggtcatactatgaatcttcctggaatgctgtctcagctagaccattctaaggcacaatggcaccttggggaaaggactgagagatttcctcttcagagagagcagaacatcaacatgagcctttagttttccctgaaaatacgactaaggctatgtttacttccaaagctaccacctttactatactgactccttctcccacactaaaaatat

SEQ ID NO: 37928 - DNA, 1042 bp, Bovine  19866880926946
  misc_feature (1)..(1): n is a, c, g, or t
ntagcaccatttgggaggcccacatgcatatgatgatcaatcgctgtcccttcatctttgacatcctgtctttttctattctccccccctccatccttaagaggtctaaagaattagtgtcttgttagcttctccagtattgttgcctggagaattccatggacagaggagcctggcaggctatagtccacaaagatttgaacatgactgagtgattgacactttccctacctcttccaccttcttccatcttcttttgtacctctgggcttttgtacccttcatggctcagaatgcccttcccaccttgctggcatgatggggaccctcttggctttcagttcacccagaccaggatcagcacttgcagttctaggcaattcttctgcactcttccagcagcccatgagtgtctattatcagccttagtctcttgggcattacttgattttctaatcagtttcgcccactggacgatgagctccttgagagcgggggtggcttgctcacctctcaatctgcatcatcttgcacgctgctcagaacacagcagaagctccaaccatttttattgaaagaatcaatggtttctctatttctttttttttctggtttctctattggattgtataaaatgtacagaaatggatctgtttcagcaagactggcatattcgctcgaactggttcatacccaacgagagtctaattggactgcccaatccttccaaaaccctgccaatcattcttttgtgtgaataggcacaggtgattggttctaatcaaagtcattagggtggctctggaatgatcccactgccatatgtagataattacggcagaagtctaaattttgggtgttagccaatctaaatggcattagcatgaggaattaacatagaacaaaaggagaaggatggttcggtatttggacataaataataacagctagagcttatagagcatttcctatgtgcctggcactcccctaagtggtttacatgtattaattcatttatttaacataacagtgatgggaggag

SEQ ID NO: 37929 - DNA, 1040 bp, Bovine  19866881023822
  misc_feature (1)..(1): n is a, c, g, or t
nctggaccccagggcgggcagagagtggccttggggaccaaaggtggagccgggctctggttctggagagccctggacatcaggcgcctgcctttcccacctggaccccacttcccaccaggatctcagcctcatctggccctttcctttgtacctgcccaggctgagactcaagctgccggaccataggttgtccccgggtccccgctgagctcagtgttcccgaacagctttggcaacgcttccctggggctgtctgttcagtgagggcctgccgaggcctccaggggcaggggctctgcccagaacatggcttcagggaagggctccctgttgacattcagttctgaaccagcccactcacattccaaccggttccttcctcctcctcaccctgtgttgattcattagagtcttggagatgagaatcattctgaggaacagtgtggcttttttttttttttttttaatggctagtgaacagatgggtcaggaagcttttaggatgctgtaggtgcagtgggtgaggccagagatgccgggggtcttcactctgctgcccagggatgaaggatggaggaatttaaggtgcagatgggcatggagaagtgctcagggctatgggaaaaaaaacctgagctgatgtcattagggaaaaagaaacgtattcatgaccccaggtaacctaatcaaaatgggcctacatcttgagttcttctgcttatttctagaaacatcaagggaacactgtgtcctaccttttctgcctacagaaattaattacaaacccaaagagccctgttttgtccgcacaggccacgtaattgcggcagcgggaccactctgccaactgatttagtgagttgtcttcccaggttcctggtcaatgaattgtcaaatcgcttcaaacactccattttttgaggcactgtgggctgactagaatgaattgatctaaaccgagagtcaacttgtattttgtttttatttttttaaacttcaaatatagcagtttgagggaaaggataaaagaaatgcat

SEQ ID NO: 37930 - DNA, 1288 bp, Bovine  19866881061116
  misc_feature (1)..(1): n is a, c, g, or t
ncaggaggagaagggggtgacggaggaatgagatggttggatggtatcatcgactcaatggacatgagtttaagcaaactccggggagatggtgaaggacagggaaagcctggcgtgctgcagtccatggggttgcaaagagttggacatgacttggcaagtaaacaataccaccaaaacctttgttgagcaaggtcagcgtgagtcctgctttacatgaaaaaaagatccatctgtttgtaggagccacactcagcctgagcctcatatttttccagcttatctccgtgaagctgtgctgtgtccagggtgatttgcccaggtcagctcttctgcatcaggtgcttacactatagacccatctgctgctaactgcagctgtcactcagagtgaaactcaccagctgatcaaagttcccctcttcctgaatagaaaatgaaatctgaaaaggaacgccgtgatgttgtcacctttcgggcaaagccttttatgagcggggaaggtcggcattggtgggtctcattttcatatcccgcctgagccctggcagcccagctggtggctggtggcagctgagaggttccaggaaggtggaagaatcaaagctctctcttgccaccagagagttaagccccaaagggcctgtatggaacgattacttggaatgctgcaaggggctttttattctctttcaggtcagctttgctgatatccaggggctaagtataactgtaagcatgtgaatttcaataaatatgtttccttcaattacccagctggacagtttaatgcaccagagcctgcaatcatacaaaagctgccagggaattgttgtgatttagataatttctaatctccactctgcttaacctgcaggggccatgggcagcctcagacaccagggggtggagagagggaggtagggagtgtctgttctcatcaacccagagatggaggtcctcggctcagcctcagagatggatgctgtgctcagacagagaggctgaaaaatatcgtggagggtgaaagtgtgtgtggtggggagcaagggatagtttaggagtcggggaccatggcgggggggggggggcgggcagtggaagagtggatggcaaagtagaactgctacccagcttgggggctaagaagcagaagacccccagtgaggactcacatctgggtccttgatcttataccctacacctcttctgcaaattccagaggtactgtcccagtcaacagggaccaccattgaatgtatatttgtcagtgcagttggtagaccac

SEQ ID NO: 37931 - DNA, 1156 bp, Bovine  19866881111779
  misc_feature (1)..(1): n is a, c, g, or t
ntgtgggagagatttcccctaaatgctgagcccctagatggtaggaacagtgttctctttaccccgggtctctgccgtgactgaggcatgctgagtccttaattaatgcacatttggtgttgagtgaatgaaacctgctcttgtggtactggggcccttgcagagagcgtggacctctccagctatagcagcatctctgtacatgtctctttcctctcgtgtatttttctctctctatgtttatgattgctccatcctctaaactccagctgcattcactgcctgcaccgtccttgtattctgatatttatcattttgtctgtacatcctgcctttgcagctaaagcacccctttatttgaccatgggagctgtgttatgtacttatttgggccacctgtatagatacactctccttggtgtgtgtctttcgatggggaggttgatccccctgatattaattacttgccactgaactgggggccaacagtgaccacttttcactgcagtgacattcctcacggcacctcctgtagtatctgcctggcataggggcctacttggggagcctgcattttgaaagggctcagagttcattggtatgaaatgaatcgcagaaagaaaccacaaccacaatcttttaatacctgtcccgccaggcatggcagcctctcctctatatccccactgggcccaacaccagatgatgctgtggctgtaactgaatactgggtctccatccatcaaagggccagtgaaagtcgcccagccagcttgctcactggtttggtgaatctcactgtgtgatctctttctctttcagggctctggctgacatcctaagacaacagggaccaatccccatagcacactgtgaaagagaaactatctcggccatcgatagctctcccaaagagaacacgccggtccgatcgtcctccaaaaaccactatacccccgtgcgcacggccaagcagactccaggtaagtgagtgctgatcactttgcatctctgctgaggctggtgagagggttctgtggtgtttctgcttcagccaggcaggtcgtggagccctgacgtggtgggcttgtggaagagtctggggactgtcccccctggggagagagtggtgtgggagactgccgccagtgagtgt

SEQ ID NO: 37932 - DNA, 953 bp, Bovine  19866881118578
  misc_feature (1)..(1): n is a, c, g, or t
ntacagccttgttaatttttttttttcctcatgagaagagacacattcctggcagaaacatttatagaagggctgttccatgcaggagtgggccacaaatcttagctgtgaatgccacaggaaggtcgtgcttctggaaagctcaccttgcagagcaagcccccctctgatgctggttttgaggactccttgccccactcccgatgtatttttcaagttctgcaccttccgcatctctctggaaacagaacccagggacagctggggctgggtgagaaccttggggcctcctgtggaagcctcttgcttaacagaccccaggagaacgaagtgcccccacccacaactgtgagcagcagaggagagaacacaggagctgacttcactcctggttacaaaagcgtgcctagactcacacagctggaactctcgactcattcaaattcctcttttccctcctgtagcttgtctgtgattctagcttggagccaaattaataatttatttaggatagtaactgaaaaccatgcgtcatcctgacgtagcatctgcaagagggagagaggagccctcccctccttgtctcgagccgggctcagcctccaaatcaatttcctgggtcctctttaggaggcagggaactgatagaattgttccaactgctgggcattttcatccagtgttcacgaggctcgatgacttagcctgggcccctccagaaagcagagtctgaaaccagggtttacatggggtggttcatctggggacatgatcccaacgggtggaggattgagagaataaacaggaaggcgaggaagctaatccagtggttaatgagctggtgataactgtggataatgggaactcagtcctgctgagaacgtgggaaaggaccctgaaattgcctgcctgcgatgccgaaccagggtgcgtttatctcccgaatcccaaat

SEQ ID NO: 37933 - DNA, 1771 bp, Bovine  19866881327028
  misc_feature (1)..(1): n is a, c, g, or t
nataacgcttcagagtatcttacgagctaacacacattgaagccatttatggctatctgttatgcaaatagaatcctaaataacgagactgagtcttggggaatggggggcaaacaaaaccacaaagccaagtcagtctctgtctataaaagtaaacaaaatcagaccaaaaatggaaggaaggcttattccttcctgtaattcataattctgtgtggaactctgcccctcccttccaacatcattttgtcaggatagacgtgaacggtgccaaaggcctggctgtccggagctgtttcgataaccccttctatgttgacgtggtgcacaccgtaagggtcctcagagtagccgccatcgtgagtgtggccagcgaagaagcacaccacgcacttgtgagaccaaatgaccgccagggcgtctctgtaattccaggccaggcacacactgtcagaggcctcggggtaaatgggaagatggcctgtttaagagaagaagagttatgaaccaatcaagaaatacctctttcacaaaaaacaggctaacaacgagtactcaggaaaaagaaaatgtgtactgctactcatcctggactgagaacagagagaatcaacatacgcaaaaaactagatactctacagccacgtctctggagcataaagaaggggggagacggttcatacccaaggggacagcagccgctgtacaggcagaaatcctgagatctacggcctagggtctcaagatgtactaacaccaggggagacagagggcgacctggcgggggcggtcagcaaaggcagccaccggtcaggcagatgccatgctggaatccagtcttgccaactttcctacatgtatatgagtgtcacacacatagaacgagctgctcagaagtaacagaacagtctagggaggcgcccatggattatatgtcatttgtatcctcgatgttttataaagaactgacttgtgtcactttaaacacttccaggtcaagatggtcacagccattgtacacgagaaaactaagttagagcagggaacattcacaccagcttccccaggagacagaggcagaacttcagattctcgatgccaagacacgtgtgaggccacatcacatggcaggtgcggtttcatgcccaaggatgggcactatagctcactggtctttacttcttcccagtaaatcactttctttttttctctgctaccatttatttttattctgaatatttttattctgcttaaaaactattagtttatttaaaaaaaaaaaaagggaggcggtaacagagggttggcacacagacagagacacacacacaccccatcaccaccactctcgagctgtgataagggctgagagtccaaggaggccacgtgactttctagacccactgttatgctggacacatctatcaagtcccagtggtgtctgacacagtcacttgttcccttctccttgaaatacttggctccagaacaccgccatgcccctactcttctcccaaccttgactgctcctgatactcaccctcctttactgcagtctcacttctctgggtcctacccgggctgcctgaatgcttgctcctcgggatacactacactatctacccctaatagcatagtgacctcttagtaatttacgattttaaacatcaggtctattcaacttccacatttagatatccaacccaaacttcgacttccaagtttctgacaagtatgtccacaatgcttactcagtctctctccctgatgt

SEQ ID NO: 37934 - DNA, 1569 bp, Bovine  19866881351287
  misc_feature (1)..(1): n is a, c, g, or t
natctggtagaagatgtggtagcttctctcagccttcagctggaaggtcactcttgacttttcagcagatctaggaacgcaaacacaggagtgtcttccaaactgttgccccaatgtcccaaaacatctgattctaggaatcttacttacatgtttcaatatctgcagaggccagctttcccgtggtaccaaaatggatgcggatgaacttgccctgtcggggaagggagaccaagtaacctgactccaggttgttcctacccacctggggagtgcaacagagcctttttccccaggaacttgcagttaagtgtccttgtcgcctctctccctgctttgctgtgccttcctccatccccttgttccacactgcatccacatgccaccccagtcagcagagtcatattctgttcaagatgcaaatcaaaccatatcacttccctctaacaggatcctgacttctggaatgaaaccagacccttctcctggcctgcatgctcccaggctccaggtcccctcccactgcccctcctcacttccccacctcatctcgcagagcctgccttactccagccactcagaccccctggagatcccttgactccaccagtcccctccctgcctctgaactgtgtcccgcctcaccctgtggatctcgggttcacaggtcagagccccccaggagggctcccctgctggccctgtctaaaggagacccggccccctttactgtcccatttactagggaactgtcagactgttttgtagacttgtttcctcctcctttcattatccacccccggactgcaggttcctggaagcagggatcgtgcctcctcgctggccttggaggacaccccagcttgacccagcacagactcacaaagcgggacgagttgtcgttcctcacggtcttggcattcccgaaggcctccagcagtgggttggcgctgatgatctggtcttccagtgtcccctggagcagggagtcagggcaggaagagccccatgtgagggtgagctccgatgcccctcctgcccagttggtccctcccctgctccctgctttccaacctagggcccaaccacatcatcagcacctcactcagagccctgttgccaagtcacgtttggctctggttgggtatcttgacatgaacctcatttaacccttcagttccttcattctccaggtggtgaggccacctgtgttcacaccatattgctgtgatatattcattttgaaaggcaagtggatgcgacagttctccctgggtggtgtgtgtgactctggtgtatgtcagattgactttcttcagcggagccttagagctcgttttcttggcaatcgccggatctggtcctgtgagatcaccaatgcgctggatcgtctaggagagccggctgtcctgtgcgatttccaaccctgccagcactccttccctgaggagatgggcacctcccaccccacacatgccctatgcctccttactctgaagttaagacaagggttggcagtagaagcagagccagcctgcctcctcttcttaccctcatcttggagtcctt

SEQ ID NO: 37935 - DNA, 3163 bp, Bovine  19866881382176
  misc_feature (1)..(1): n is a, c, g, or t
natgaggtggccaaaggactggagtttcagctttagcatcattcctttccaaagaaatcccagggctgatctcctttcagaatggactggttggctctccttatagtccaagggactctcaagagtcttctcccaacaccacagttcaaaagcatcaattcttcagcactcagccttcttcacagtccaactctcacatccatacatgaccataggaaaaaccctagccttgactagacaaacctttgttggcaaagtgatgtctctgcttttgaatatgctatctaggttggtcataactttccttccaaggagtaagcgtcttttaatttcatggctgcagtcaccatctgcagtgattttggagccccccaaaataaagtctgacactgttttcccatctatttcccatgaagtgatgggaccagatgccatgatcttcgttttctgagtgttgagctttaagacaactttttcactctcctctttcaggggcaggctaaagatgaacaaaggccccctcccttcggggcacaagttccctttgatagggtgtaagaaggggtggctgtaaagggtgagcactggtttctctctaaagccagtctctttctttctccctgtaataaatcttcctctgcctgggtgccctgctcactctcttttcctccgcacttgccttacccctgtgtttttgctttcactcacttttatgtttctatttaaagttcacttcttataagaagcaaagggttgggtcttggttttttagccagtctgacagtctcttcattttaattggaatctttggtcaaattaggtttactgtgactgccaacttggttgtggtcaagtccgtaagcttgctgtttgttttctagttttgccatcttttccttgccccctttctttctttttctgctttcttttcacttaatgacatgcattttaggattccactttattgcctttgttggaaattgttgactataatgcttttaaaaaaaatggcaatgacttcagggtctatagcacacatcttgagctcaccacagtctatctggacgtgatgctgtgccgtttcatgtgacggaagagcttgacgatggcaagctgccatttccctcctgctggcctttaagcttccgtggtcatttatttttcttatatgtatgttataaacctccaatacattatcatcattttgttcaaatgattatcttttaaagagatttaaataataaggaaaagtcttaattatctaccaagttagcaccattcccagggctcctccctcctttctgcaggttttatttccatccagcatcatgtgtattctctaaattcactccagccttcgtatggtcaggggttcaagactggagaaggagcccgtctgcacaggaggcggcggaaaccggaagtggcttggtggtgatagttggggaggaaccatgtgggaggaggctccagcgactagccctgcgtggggcaggaggggacagggcaggctgccccccgagccctggccaggtctgtccgtggactgtgctttctatggagtttaggagagaaatgtcactttgctatctctctgcccagatctttctttttattcatagttaattgctgcatttctttagcttccataatgtcccacttaatccttaagatgttctgccttgaattcgagtttaatgaagttaaatcgctcatgtgcttctcctgctggcttgtgattgccgaaggagacaaggctgagcgttgttctctgtattccagccgctattatgtccccagaacaatgccttgcacacaatgagagattaataaatttgggtgactcctgttaacaaaggcgcttactttcatgtgacacaatctatgtgtgatttaatgctctttcatcacggactacagtgctgagtgtcctctgctctactcttgaggacttcgtaggcatgcagtctcaattttgagatctaaataggtgtgtcaacagtatggggggtcacacaagaaattctcagcttgggtttttttcactgtcataacatttatggttctgttgaagcacaagcaatttcctcaataaagaaggaaagaagggaacagctgcccgggatgataactcggctgcctgagggacactggcagccacagtctgggcagtttggatgctaataaggggcggggggcaggacgtggctggtgatggaccttgtggaaatatgtcttcaacaggcgaggagccgggagctgctgccttgcagaggtttgactgaaagctgtctggaatctcaatctgagagcagagctgggaggcagtttctattaacaggggatgtgcctgctgtttattgctcctgatagagctggcgcccagctagacacctgttgatcacgtgtcaggacatcagggcagaaatatcagctcctggaggaaagtctttcagcagatatatgagaaacccagaaaaatcaatacccctaatacaaagatgtttctggaggtgttccttttagaatgaagagacacaccacgctcttgccaatactttggatattagaaacaatatttctttttaaagaagaagtggatctaaagcacagtgtggcttaaaaaaatacaaacaaaagctctcacctctggctgagggagctccagggtcatcctaagcccccgatgggccctgtggacagaggctccaagagcctcctttccccttctccccgatggtcacctgcgtcatcatggtgatgctctcagggtcccagcttatcgatgcttttcctggtcccccaaccccagatgtgtccagtgagttctggaacatcaactgtccctatttttactttcctacaaagccggcttaaactcaatattaaaagaaaactaagatggcatctggtctcatcacttcatggcacatggaagaggaaaatgtggaagcagtgacagatttcctcttcttgggctctgagatcactgcagatggtgactgcaaccatgaaatcagaagacaactgcttcttggcaggaaagctatgacaaactgagacggtgtattataaagctgagacattgctttgacgacaaaggtctgtatagtcacagctctggtctttccagtagccatgcaccataaaaataggctgcgca

SEQ ID NO: 37936 - DNA, 1067 bp, Bovine  19866881636576
  misc_feature (1)..(1): n is a, c, g, or t
natgtccatcactgactcgatggacatgagtctgagtaagctctgggagttcatgatggatagggaagcctggcatcctgcagtccatggagtcgcaaacagttggacaccagtgagtgcctgaactgaaccaaagaagaaaaagtaacaaatctcagcaaattatctttctagtcccctctacaagccttgtggtgaacaaggtcagcctggaaataaaataaactatatgaaagagagcagagaaggagatagcagcaagcctagggatgatctaaaactcctgtcaaaatgagaaagttcaccctaagaatgcaaacacaggaaaaatgttctggtaggtcagagtactgactacacgcaattcaaagcgacagtcttctgaaatattgcatctgggtgagaagaaggtagaagttaaggaagaatcttgggagattggctgataaaaagaacaaccacagcaaggcgggaatggggccctataagacaaaagaacacaaaaatgtctaaggacattcatctccttcctaataataatatctgttagataaattgcattttctatactagtagaaaagataccatttcaataggaatctgatcacttccaccagtcataaaatagataagagacttccctggtggtccaatggttaagaattcaccttgaaatgcagaggactccaattctacccctggtcagggaactaagatcccacatgccttggagaagtagagcctgcctgccactactaagatccagtgcagccaaacagataaagaaaacagacagaaggaataggaataaacacacaggaatctaccgttaaaaaacataagatgagacttcaaacacctctgctaataacaattttcttccaatcccgcacaaaaataaacatgaagcaaaagaaaagtgaacacgacactctgaactgagttagatttaaaaacgcgtttgtggttatttaaaaaaaaaaaaaaaaaaaaacaccttgaaacagaacttcaaaacattaaaaacaagggcaaaagggagacagaaatttagagagaattcactg

SEQ ID NO: 37937 - DNA, 683 bp, Bovine  19866882085498
  misc_feature (1)..(1): n is a, c, g, or t
ntggggctccaagagtctgaacagaagcaagctcacaggttgaagacttttaaggaggcaagggttggggatgagactgtccctgccccttcggggctctgaccaaaagaagtagaaagttctggaagtcctatcttcctggctttctctcacttctgtgggaggggagcaggcacatgtattcctatttgcaagacaaggaacctgcagctcagactttcagtgtcttgcataagatcacaaagacaaacacagggtgaaaatctcatgagctccatgaacggaagctagatcaggttgactggtcagtgatgttcagatagtaaaaccaagactttctcctgggctggacacagcaggacaccacatcagacacggcatctgcccatgtgtggatttcatttttagtggcctgctgcagtttcctttcactcaatgtttgtctaagagtgttttgctgacagctgcctttccagggcttgggttgaggaactggattaggaacactgtatgctaaaggtcagagtcacagtaattagcgcaacaggcttgaagagcggcagcaaccaggacggggagctgctgagtctccggagttcctaaggctctcaatctttgttttggaaaaggtcccagcatagacggaagcccagtgaatgtgtgtgtgtgtgtgtgtgtgtgtg

SEQ ID NO: 37938 - DNA, 695 bp, Bovine  19866880264364
  misc_feature (1)..(1): n is a, c, g, or t
ncttttttatttattttttaatttaattttatttttaaactttacataattgtattagttttgccaaatatcaaaatgaatccgtcacaggtatacatgtgttccccatcctgaaccctcctccctcctccctcaccataccatccctcttggtcgtcccagtgcactagccccaagcatccagtatcgtgcatcgaacctggactggcaactcgtttcatacatgatattttacatgtttcaatgccattctcccaaacatacaaattcttgagcctcactggatatttactgaacctgagtctctagggtccaaggcataggtgttttatttcataaggagtacaggtccttgtaagagcagacatgtctgtgaaacacaggaatagtctagaatcttcttccaacagcctttctgacaggagagcctcaaccagtgtaacaattttgaaagctatttcctagttcaaaagaacgttgagtggtttcaggttttaaaaaacttaaaatacaatacaatgggaaagtcatctttgagagaaggatggaattaaatgaaaatggaacacttagcaattattttcaaaagccagatgattttcaaaaaaaacacccagcacggcagagccctgagggcatccattgtgctaataaatttgctaataaagaagacttatttggaattcaaagaaaag

SEQ ID NO: 37939 - DNA, 1590 bp, Bovine  19866880473225
  misc_feature (1)..(1): n is a, c, g, or t
ntattcttggggggagaatgccatggacagaggaacctgctgggctatagtccacagggttgcaaagattcggacatgactgaatgactaacactgtcacttttcaaagcacattttcatggtgatgctttcctcaccgatctaacgctcatggcaagatggtgagtcttcagggctgcagtggtggtgagagggtggatggaaggaatgcttataacattgaatccagcatggatgtcctctgaagactttgaattcatccctcctcctcatgcaaaggaacttgcccccttttggtatcatttaacacagtcagtcattcgctgtaggcttctatttgctaaaccagtcaacacacttttagaatcacatgtggtttcctgagccagatcagagaatggcaacacgtgcatcaaaatataagctatctgaaaatactccctcttcaaccgagcaccttcaacatccattttcattaacatggtaaaaaaggttgacgtgaattagtaaattcctgcaattccttatcctgtaatcctcattctctgtgctctggttctatgtttcactctacctgagtttgaattctggtcatcagccaaaccatatggagactcagcacatgactgtcagctttcttctgcaagggaggtaagctttcctagcaaaggcaaggcgaggcgagtatcttggaaggtttgagggcaggacgggcatggattctgcaagtcctctatgtgtcctaataatcattcttctaattgtctgggtcctagtttttcctgattcttgtcctagtcattttacttaaacatagtgaggtcgtgcatttaactaataataaaataaggccgccctagaacttacctctaggcttggttttcagtgaccgcaggctccatccatctggggtttcatactgtgctttgaggaaaacttttggcttagatggtgaagagtctgcctgagatgtgggagacctgggttcgatccctgggtcaggaagattccctggagcagggcatggcaacccactcaagtattcttgcctggaaaatcccatggatggaggagcctggcaggctgcagtccatgagcttgcaaagactcagacatgacttcactttttacttttaaggtttgagagtgctgttagaacaattctcttgcctaataccccagagatttgctccaggtgaacacagatcggagattacctgtctcaccactggataccttgtggtgttggcctcccaacctggaatctgaacttttgttactgcctcagtttgattttttagggaatatgcatgcaagtatactgtaataatcacatgggttggtggggggcttgtgatttttaaaaagttgaacaaaatgctatgttactgggcattatgatatttatgctgattatatgtaagttcttagacttgtctgtaaagtcctgacaaaatgatgttaggccatcccttcagagaatatagctcatcggatagtgtgacaacatgtgctgagaatttcatctaataattacccatcttcaatccactttaaaatagacacacataagtcaaaaaaaaaaaaaaa

SEQ ID NO: 37940 - DNA, 3756 bp, Bovine  19866880481231
  misc_feature (1)..(1): n is a, c, g, or t
ntgggagctgctgtataacagggagctcaacccacgctctgtgaccactgagaggggcgcgatgggaaggagagtggcagggaggttccagagggaggggacgtatgtagacctatggctgattcatgttgtatggcagaaaccaacacagcattgtaaagcaagtatcccccaattaaaagaaaacagaagcaatgttgtaacaaattcaataaagacttaaaaaaaatcaatcttatgggaaaactccagtgaactttttggccagctcaatacatgcctcccctaggtactttctcagtaatgcatgtctcctttacaagttgccacttgcccagccccctgggtctctaggtcctggggctgagtttctacacagagttggttccttcaaggactctgcctctctgggcctgccccatagccttgagctagcaggcctgtccctctaccactgcagaaacacccatgagaacagacctccccctgggtcctgctcatggtttgtatcccttaattgcttcccacttgtcttttcaggcctggccccagaactggatttactgtccacgtgcagatagatttacctttagacctgacatgtgaccgtgtctccctggaacgcaagtggatggctcatatgaattttggtttgcactgacccctttcattttgctgtttctggcttctttgagtaaatacgacacccaggaaattccactctctaaaacatacccgctgttataagcttccacgggcgtccatactagcttatggcctggacgtcaagcctcagacagtggtcagtgtatatccagaacgtttttgtgcccaggtcacttcactctcaaggtaaaaaggcctaggggtggctatagccccagggtccaggtggcagacacgtggtagagatacgtgacctattctgtgccttgttacccgtttaccaaagctctcttgagcagccttgacaggaacataggaaaaatgtaaaaaatagcttgttcaatttctattgctttccgtgtgctctgggtggggggaagaaattagaggaagagagaatttctacaacagttctctatgtatcgtccatggaaatagtttttcatcagcaagaatttgcatgaatgaagacttccaagaatgaattcttctgaaaagacagatgtaggtcatttctagaaggtcttctaaccccagaactctgcaccctccttgtctccaagccctggttatctctctgccacatttttatcatgttaggaagttagcacatcctgacagatgataagagcatgggctttaggggctgacagttcagttcaacacacatatgttgcctgcactaggttccaaataagacagaatccctcttgttgtgaccttatagtcgcgtgggcaacactcgaacaggtaatttcaacatgatgggcaagctatgaggaaactacgcagagtgctccagaggcagccatcgcctaccaactgcatgtccttgggcaaatggcaacctctctcagagccccagtgtctacaaatatgaaaccgaatcaaagttcctgctgcctaaggattgctctgagaactaaatgtgataacatttgtaaaacacataacagtgtcttacacacagagggcacgccacaaatggtggccattaggctatcgaacaaggccagaacccagagttcctgttctatctgtgcttggctgagtgggtctcactctcccactacaaactgaattttcacacgacccaatcactgcagtaattctaacaataacccactgtaatacttgcccttgttcacaggagagactggacaagaaatgatgactatattagcacaaatccacaattgcaacttgaaaaacatctcaaagaacattttgtgctcacagtgggcctgggccactgtttaatatgtgaagtgtgaagtgtctacattatcactgtaacttttccctcaacttccccctgtctgctgcaaatcattagactaaaggtcttctctctctttgtctttgtctgtagcagccttcttgtggctttgtctaagggtcacattcagggcagcctcttggtagaagtctccaaggttgtatgctttagaggccactgccaaaataacttcaaagagtcatccatgtactggacactggtccttaattaggtcttaggtgtctcttttttgatgttaacaagtacccaaatacatgacctttggttggttttttcttcctgacgatattcgactatgttagagaaaaggcggcttaaggacatactagtaggctttatttaaagccttactgtaaacttgttttctcagttctttgatttcctcctgtttcttcactgagatagtcatctatcaggtgaccattcctaatgggtgctctttactcctagaagtcatcatcttatgagctcatggcttggggaatgactgacataggtggttaatatcattgtgcttaaaaactggggtgccattttgttagctttataaatgtttgaattatacttactaatataaatttcatgcattcccatgtatctgccatgaattcctcaagatacctgaaatgcagtctacaccaaaaatcaaatcatgactacagtaacattagtctaagaatgacccctagtagcccttactcagagggcagaaccaagagccaagagagtaaaacaaaaagtcaaggagaattattctccggctttcaggcctaatgagttagccaagctggatgtcaaaactgctttggactgataagtcctctgtgttttccgttttcaccccatttgagctggaatccctgaactgtgatctcgtgcctgcccaccattgtatcttgagagtgtgggggcaaactacttgtctctgtagttccacaggaccacagttagagagggagtgtgccctcggagcctcatcagaacctgatttagaagattttttttttttttttggacttttgagttgatattgaaaagggataggttggagcaggtacaggtattttgtgtgtgaaacagatgtggattgttgtgggggagagggtggactgcagtagtcagaattctaccccagtgtctttcaatcttgtataatcaaatcatctgcccctttaagtgctggtggaaactaagaatgtgattacatccctatgattatgttacatgtcaaaacggagattgttcagctgggcctaatcaacgaattacaacgaattgagctgtgtacaagcagagagtggtacctggctgacagcaagaaaaggaagacctctgtccgacctctgtcctataaccagaaggaactgccttctgctaataacacaaatgagcttggaagcaagttcttccttgttcaggcctccataagagcatgccgccggtcagcattttgatttcacctctgtgtggatcccaggagtggaccagctctgctttctagacttctgacagacaaaactgtgagctaataaatgggtgttacttgaagataccaagtttatggtcatttatcacagagcagttggagaagactcttgagagtcccttggactgcaaggagatccaaccagtccatcctaaaggaaatcagtcctgaatattcattggaaggactgatgctgaagctgaagctccaatactttggccacctgatgtgaagagctgactcattagaaaagaccctgatgctgggaaagactgaaggcaggaggagaaggggacaacagagg

SEQ ID NO: 37941 - DNA, 1359 bp, Bovine  19866880528403
  misc_feature (1)..(1): n is a, c, g, or t
ngggcaccaggccctctgaggtttttttaaggtccagtgaattccgccttggacaggaaggtctgctaccacttgcctgtccagtaatacactttacaaggccaatattagatctaccataagccagatgctaattataaggcattaagtaagcaaatcggagaaggcaatggcaccccactccagtactcttgcctggaaaatcctatggatggaggagccttgtaggctgcagtccatggggtcgctaagagtcggacacgactgagcgacttcactttcacttttcactttcctctttcctgcattggagaaggaaatggcaattcactccagtgttcttgcctggagaatcccaggaacagaggagcctggtaggctgccatctatggggtcgcacagagtcagacacgactgaagcgacttagcagcagcagcaagtaagcaaatagtgccccgagctactagagaagaaaaatcccactaaagataaaaaggcttatgattttaaagatcaaatcaagctccactcgttttacctgctaaacccatcagaaccatactaggaatgtcagtgatggtttttatagtttttggaaacactttggtctctggattgtaattagcaataaaaaaaggaagatatcaaaccactcaccttgttacttggaaggctaaatgtagatgtcttcaatatactttatatgttcttaatacttgaggagaactttttgaatctgtgcattttatttttccaatcttattttacaaattcatattctataaataatagagtagtagatagataaacttaaggcactttgccatttggtaattaaatgaagggcagaagatttcaaaaagtacgtgtacccaaacccacaacaaactaaaactatgaactcaatttctaatgtatccggtggtcagagactctgtactgctgccagaattgccaaataattttaataaagttgggtttgaacataattcaaagttgtctttctctttagcttgatcagattttcatataattcatgacttcttagatttaggtagactaccaaaaacgctgcagaagatgcttttacgacacaagaatataagaagaccgaaaaccgcattcaagaggaacttacctttgggggtttttatatgtgttcaccaactggccagagatagcaacccaagggtctctggccctagggcagttcatagacatgatccgttttgcctgaaaattgtctgtggggtctgtatgtgtttatatatgaattggatttcaacagttaaaaactgggggtttcgcggaaggaggaatggactttgaagtatctggcaagactggacctgcactgc

SEQ ID NO: 37942 - DNA, 811 bp, Bovine  19866880641847
  misc_feature (1)..(1): n is a, c, g, or t
nggaagcccattgagagattattattatgtattaggcactgacctggagaaggaaatggcaacccactccagtattcttgcctggagaatcccagggaccgaggagtctggtgggctgccgtctatggggtcgcacagagtcagacacgaataaagcgacttagcagcagcagcaggcactgacctagaaaatttctcattattatctcagtttaattccaacaagtcactgagatccacttgaattagagaggtgatttatctgagtaagatcaggaatacatgaaggggagtagaacccctttatgtgggaagcagtagttgagagctcagatctgcagtcaaatgagctagcttcaaatcctcggttggccaatttccatccatctgtaatgtggttaagttacctaaccctttctaagtcttttctaagtcagcttccttacctgtaaatcattgtacttcacacagttattgtgcttacctgctcacaagcaagcactaaataaatggaagctactgctattggtatttcctgatctgaagggacagcgctaacattcacggtcttaacactacaggccttttcactggttggcaatctccaccacccccacccccaaccactcttctctaaaaccaaatgctttagacgtggggaaaatttctacctaacagtacccacatttgaaagtcacttcacttgatgaaagttatatttcatgagataaggtctgccttgtgcatgatatgcagtcaaataatttacagaattaactaacaaataaaggacctgcaatattacatctaa

SEQ ID NO: 37943 - DNA, 1416 bp, Bovine  19866880702237
  misc_feature (1)..(1): n is a, c, g, or t
ncataccctccctctgggtcgtcccagtgcaccagccccaagcatccagtatcgtgcatcgaacctggactttctttagttatgaaaagagtatgttccagattggagactgggatggggagccctcccagtacaacatgggtctctgcatccaggtggttcaggggcattcacaagaatggttagaaagcaaagccacttgggagtttaagacaggctgagggccctccacttgtaaagaacaccttggcatcatggaaagtgtggaagagtcaaacttcagctctgccccgagccactgcgtgagccctaagcacctcagtgtccccatctgaagaaatattggagtgacagcatctttgcccaaattatctcatagaatattaccaagaatcaacatagaatagcatctcaaacatacataagaaataaagtgctgttcaaacgttaaggtatctttaaagacatttatcaatgtgtgagaaaattatattaggaattaactatgcagaggaaaaacctaaacactagaagacacttaagacatgaccttttaataaacacacatcttctttcagcacattccaacaaaagaaaaaatgtatgaaataatctcaacccttgataagccggatttctaaagctggtgactcatttatatgcaaatcactgaaaacatctgccagtggtttcaaccaagtttatgttgatcacatttctaattgcggtttcttggtgagctggttgactcatcaagcacatcaataaactgacctatataggaagtaatttggaaattatttgggaacgttctgtgattgatgttcccaaaggtttctaattagcctttagaaatcgcctgaggtattgattgctttgtaatgtcatctaactgactgttggttcattcaagagcacctagttgggactatgagtagaaatgatgtccttgggcagacttttttagttctttggtaaaagtgattatgaagtgatccctggaatgagtgtatataaatacacatatagaacaacccaggctcctaagggggcagccttacgaaaaatgctggaaatcaggacatccctgtgcagccactaagcagccatgtgactttggcctctgttttctcatttatcaactggggtatctggatccagttccatcctcagacctgagcaagaagggccttgctctgggcctgactgtggatctcattggccacaccgtctgttctcctgccttcagtggggtggggagaccacagggtcaaaaaaatctgcctgcctgaagcctaaattctgcactagctagtcatactctggacccctggaatccctgaattcctgtccagggaccgtaactctgggtagacttcttcccctgggcctaccctctcaaaaaggaacacaccc

SEQ ID NO: 37944 - DNA, 828 bp, Bovine  19866880774655
  misc_feature (1)..(1): n is a, c, g, or t
naagaacaaagaaagaagcaaaaattggccattgaagcttggaaaaaacagagaagtatagaaatgtcaatgaaaaacgcttcccagttaaaagaggaagaagagaaagagaaaaagcagcagagagagcgtcagcgccagtgtaaactgaaattgctgctggaaacgtacacccaacagaagaaagaacaggaagaatttttgagacttgaaaaggagatacgggaaaagacagaaaaggcagaaaaaaggaaaactgctgctgatgaaatttccaggtttcaagaaagagtaagtaaatacatttcctgaataatttttcagtgatacacatggaggtattacttccaggctcaattcggcaaaaattaattgaatgcttcttacgtatctggcctggacctagcattagtacaccaaaataagtaggctgtgctccctgctttctagtaggttatagtctagtggggatgagtggtgtgcagataggggacttcgctgtgatacggtaaacagtgtggtgcttgaggtgcggacagacagcttggggaggtggagtgcacggagggaagctcacacagctgcgtgaggcagaaggcgatacttgagtcttgaaagggaaggaaagagctccttcctagcagaagaaacagcgtgaatgggcggcttggaggagcgtaacagtagcttatgggggaaactgtaaacacttcaatattcttagggggagatggaagccagtatcgagggggatacggaagccagcaggagcacgagactggaaaggcagccacagtccaggccatgaaggtcttgtctgctctgcca

SEQ ID NO: 37945 - DNA, 1465 bp, Bovine  19866880814272
  misc_feature (1)..(1): n is a, c, g, or t
nagaccggttttcttggataactgttgaatggattaacttcaaatgggagtcctgggagggctgtgaacagcacagcaagtgagcagctgtttctgttaaaatacgttgccagcccggacacgggctccgccgccgattgcttggcccgtcacccttaggcgggctggccaggctctccccagatacacagccgtgggaatgaactcctccgggcccttccttcagtccccagcccatctcccgagcacttctcttaccctgcctgctgctcctctctagctcgtgaccggggcatctcagctcttgcctgcagcttctggcctccccctcacccgtcatcagccctggtgcctggtgagctgcccccgtggccacccctgcactctgcttcgcactcacacttgggtcactctgggtcacacccccggtcctgcgggaccctgagccctcaccccaaggctagtgcacgtgtgtatgtgggtgtacacttgcctcaagagaaaggtactaacagacttgttttacaaacaccttttaatgggttttcagtagatctgaccagttctgcaatagtccttcgttgtacaagttcagcatttttggttattgactcattgactgacatctattaagacctactcagtaggagtgctaggcttcacattcagaagttactggttactttcagtcttgaagtggacgtaagggtgatctgactgtgaggtctgtctccccacacataggtgagttgaccacactttatctccatggttgagatagacattttcccgccaagtccacacgagcatttcctgaagctgtcagaagagaaacgtcattcccagatggatcactgcttcataaagtgcctgcacgttgtcaagtgcaagcactggaagtagagtttggtgtacagtgtatttatgtccattgaaagagcaaaggagaaactaaatatatagaagctctggaagagtgagcaagaaaatgataacgtagaattcttctgaagaagggattctggcagcttgggagtcgggggaagaagggaaatttttcactgtttgtacttttgtaactttggaattttaaattctgtgaatattatggcttaaaaaaaaaagtaaaatctatttttaaatgttaagtccttgaaaaggaggtggggctaagatgctatcacctggaatcttgagcgaactgaatccgctcaaagtgaatccgtgggaaatcatggaagaaagaagtggagctccgcagtagaggattaggtgtggtagctattgttgttgcttcctgaaaatatattgtccaccactcatgaatgtgcacctgctgggtctctggcccatggctgggaaggaagtgggcaggtggatgacaggccaaagtaagatgctcgtgggaagcttcgtgctgtagtgaatctgagactgccagctgcattccttctacctaaacaca

SEQ ID NO: 37946 - DNA, 1117 bp, Bovine  19866880848431
  misc_feature (1)..(1): n is a, c, g, or t
ncctgctttctaatttaaaatgctaccagtgtagcaaaggatgaacatattttcaacccctttaattctaaaatgtttgaagaccaaatagctactccttcaccaatatttatcaatggattaagcactgaagtttaagattttgcagatttctctgttggggttcttatattggagttgtcctacagctttttaagtgtccctctatatttagatcggcaaattttaaacagtaatgttaaagttattaacctgagagtaaggtaaatgtccttttctggttgtctgcctactctgttgtgttcagatagttacaccacaattaagccgagttgggtatcatcaaagtgctgagtttggcatagataatgcatttatttaatctgtgcctatcaaaacttcatgatatttaaagactattaccacaaataacctgtgatgaaactattgaaatatattaaaaagttttaaatcaccactgttacttgttgtagaaaataatactgacttaatctagtctgtaacttgttaaagtttgatggcttgtctatgcttaataggtatgtatataaaaattagaaaatacatgtctacctgcatatgattactacgtaaacttttccttctcctatataatttgtagctcatcttttttctttaatccttttataacttgttgcaacagtttgaatttctcaaatgtttatatttggacacttggctgagaatacttatttaaacatcattagctgtatatatttttaaagtagaataaataatgggaagggacttgatatgcaagtttatactaaaattccaactgtgtgaagatacatttaaaaatattacttttctaataatctaaacattctttttattaaagaagcagatggtctggggttcacagctttattcctggtttgatgataatcaactttgaaaacacagtggactgaaaagcaattttattcttttaaaggtttcctttaaatctctatactatccatttttgcttcagtttgtaaatgtgtaacatttttttgttaaataggacaaagcagaccctatgactattgttttcaaaaattaaacaaatttatatatatatatatttatt

SEQ ID NO: 37947 - DNA, 944 bp, Bovine  19866880887216
  misc_feature (1)..(1): n is a, c, g, or t
nctgaagcagttcctgaggcatggccttttatttaaaaaaaaaaaaagaagaagcattcagaatcagatgctgaggacttggtcacaaggcagcctcggggcttctgttaggcccgacagtttgtgtccaaccctgtaggactgcacagtgataacggcagcagtgaggtcctcgaagatcctaaagctcttctaaattgcctgagagagtaaattcattttacttgcttcagtgttcatgcatttcactgtattctagttctctgatggttggtaacctgagtgtaaccgtgataaacagctccagcaaggcacagggattaatcacgacacaccagaactccatcaggccaactaaataagagtttaccagatctagaaatacaccaataatcaccactgccagagatagaggtcttccttcccactgtagaacatgaagcttatagctaatccacacttaaaaaaataagtatctctgtgtttctggtttgttaattcagcagcgtccctctctgcaacacacagttgtgactcgaggccaaacaagagtaaaccaccatctggtgaagtcttgctccggtggaccaaggttaaaccttattatagaacagctgaggtttcgctgactacgtcaaaagtccttatatttagaaaccttgctcagtttgccttggtcgctgtccctctcatcagtcactgctggttagacaccgctgggtgcaatggggagaggcccgctgctctgggtgcttcccacgggggcacgcaccggggctccccatgctggaccccactccacaccccccactgctgagcccacctgattcactcccaggggccacgaccccagggacacacacctctctctactgcctcgggtacccactctcgggcatcactgaagcagccacagtatttattttgatgtaattctcatagat

SEQ ID NO: 37948 - DNA, 1030 bp, Bovine  19866880969145
  misc_feature (1)..(1): n is a, c, g, or t
nctacataaggtgagtttctgtctcatgtatcaccaagataggaaaaaggaactgtcctttaagcgatgtcacagcatctaacgtaagatacatcccaattagaaactacacattggagcaagaaaaagtgcatcttagaatcaatggcatacagtaataatagtaacacaagctaaaatttgtgtgtagttcctatgttccaggcactgtttaagttctttatttgtattgtctcattcagccctcacaagagcttcataaaggcagatgttattagtattattatcccactttttacagaaggaaatgaaagtagagtgagtcagtaacttgcccaaggccacataggtgttagtggaaccaaatgtctgagtctaaattcctactcctgcatcatcgcagctcctctggaaattacacaaaatacacagaaacaacaaaaaagtcacttgtcatcctactgctgaaagacagcatccagatctgacactgttccttccagtcataaaaataacaatacattgtccatgtgatttttaatgatcagtatttttaaagcaatagtgtacagaggaaccaaatggaactatgtatatattaataagtatcaccctcaaatttctatccaacattttagaataaatccaccatgagccctttgacatctcagccattcctctccttgcttcatcccttacggggttaacccaagctttcccaaggttttccccttttccatatggtgtctaagaaggtcaccaagtaatgtgtttctcgtatgagtgccaaatgcctctcttagaccctggacgctgtaacatgattctgctgaattcttgcagaaaatgctcacagacccctcgagataccgtatggcaagcaaccagatgtcatcataaaagcatgactcagatttccaggcagccaacagcctcagaggacaaagctcctccaaggccctggagtgcttgcaacacggctgactggttggaacgggtatctccaggtcagagaacccatcccagaggg

SEQ ID NO: 37949 - DNA, 1875 bp, Bovine  19866881024048
  misc_feature (1)..(1): n is a, c, g, or t
ncttccgattgagagaagctcaaggccgaagcagagctgaggatctaaatacaagagtggcctactggtcagtaggagaagccctcattctcctggtggttagcatagggcaggtatttcttttgaaaagcttcttctccgataaaagaaccacaacaactcgtgttggatcgtaatttgagaattgatgcaccattgccgctgtaatattgctgtcctccaattaattttaggtaccgaagaactcaatatggcaacatttttagaaccttactcatacacttgttgggggtgggtgtacaatgcatatcccaagctgtggaaaggacacctttttttatttgtaaaggtagaaaaactttgggacttattttgggctattcataaatattcaacacaatgatttacacttttctgggttgtttctatctactcacacgctaacctttggtaattttgattcctcttatccttttaaaagtacttttcttgtaagcagtggatattttaaacaaagccttcaatttaatgttaatgtggaggaagaaaattaccttttagttgtttatagtaaataaagttttgtttttaagaaaaccaaatgtgattaactgtagcccaagccctattcctgcattgtttaattttatgaggaaaaaaaatctaccatagaaatattagttaatattgatataattttaaattgacacatcatggtttaatttatttctcagtagcttggaaaatgtcatttttgttgtttgggtttattctatgatctaccaccagatatgttattttttttttttcataaagacaggaactagtgtgtttcagtaacagagtttacagacaccttaaaaatcagactgttgttaacaggtagaataatcacagagtaatttaagacactacaatggggagcaaatgacatgagaaaactttcagtgagttatcagcacacattacattttcagtgcttttacaaagaaaaaaggtgatctgtttcattaaacattgaattggctaattcttgctctaatgtggctttaatgtcgggagtcactcctagctttaattgacagttgttaatataaaagtgaaagtgtaacggtgccatatgttttattccagtgggtgtgatgcactgagaagtgagtttctttgggttttttctttctttttcttctttgttttttgggggtttttttgtttgttttttgtcttgcacatacaatttgtacaatccctgatatagcagccctaagatgatttaaaaatttagaatgctgtgtgtgtttcttatttgataatcttcattgattgtactgcatttaatgagtattaaatagtgcattttctgtacactaaaaaaaaaaaaaaaaaaggttatcatgaccctgtgctctaacctctttatctttctttagttcattctcaggttgctcatggtggcaaggtggctgcaagaagccgctggcttacaacccccttccagcttcaagacagtaaggaaaacaaagtacctctactgcaactctaggggaaaagtctcattgcttctcatggtctttgatttcatcacatgctcattcttataccaagcagtgtggtcaaagaattgcacattcagattagaaagacctgagtcccacattcaccccaggaacagttgtgaagccttatgtgaacagatggcttaaattcaggacaaggatgggtatatacagcaaaatcagggtacctgattcatgcttagtcactcagctgtgtctgacattttgcaatcctgtggatggtagaccatcaggctcctctgtccgtggaattctccaggcaagactggagtaggttgccattcccttctccagagaa

SEQ ID NO: 37950 - DNA, 722 bp, Bovine  19866881024381
  misc_feature (1)..(1): n is a, c, g, or t
natgtgtatgtgaagccaccatatataagtacttactgtatacaagaccctgtgttaagtacttcgtgtacattatcgagcctcagtacatggcactagaactatcttacagataagataaagcttacaggtgatgaacttgtctaagatcatacagttattaaatgacaaatctcagatgtaagtccaagccaaaaattcacaataaccactgctactgtgtccatgtgatccacagaattctctgtgagactgagccaaatcagcaggcagtgaacactgtgaaaattcctgcagtcaaaaacacatcaagtatctaatttaaatttatggagtaacagccaaacttacttgctcatggagtcctcccctttcctccatacctttaaactgctcttagacatattaccctttagacaccatgatgtactaacctttacaacatttttaaatgttctctgtcactcaacagttttaggctgtattaagtgaaaatgaaagttgctcagttactaggactctccaagaaggaattcaaatgcttacatgtcaaagttatgggcagaattggtaacccaagaaatcttaccagcaaaataacttctggaatacaaatatttccacttaagtcagatgtgcttaaaaatggagggagcatttaggtacaaagatttcaaatgagtaaaacaaattaaggtgtcatatagcatcttaaaatgccc

SEQ ID NO: 37951 - DNA, 1256 bp, Bovine  19866881050393
  misc_feature (1)..(1): n is a, c, g, or t
ntatggtctgtaattcatttaaaaagattgtttttttttacatcacctgtctgggtataggtgctaggatgtattcatgtcagaaagctaattttatgtttgtgcttttgaaataaagactgttgaatatatatgagtttattaaaaccaggatttttaatattcctaattccagtctctaactgttaaactccttaacattcatcctcatagatttcggcttctaaacttgtacaagcttttatttatgtccacagctaagaaaacttgcaaagtatgttttttgtgttatttgttaaaactattatggtgtttactatgaggagaagaggggaggagaaaatagggtgccatggataaaaatgaagccaaaagctgtggctcttattagggtacagtcatttcagtagcccgcatggcaattgaatagttatattgggaagttttcttcactaaatggaaaccggcgattagattttccatagtgagggcctctttaatattgctagacttctcagtgtgagaagtccacatatcatctaacccctctattaaatatctttctcttaagctgtggggaagtgccctgtgaagcagcatctgtcacggtacttttattttttggggggaacatggttgctttacactgccatgtcagcttctgctgtacagcagcatgaaccaggcgtagatatatatatatccccttttctggcttcccttcccatttaggtcaccacagggccctgaacagagctctctgccccacacagcaggccctcattagtcatctcttctttacagagcagtgcatatatgtcaatcccagtctcccagtccatcccacccctccccccattcttcacgcctgtgactctatctctgctctgctaataagatcacctataccattttccttggtggcacttccctggtggctcagaggttaaagcgtctgcctgtaatgcgggagacccgggttcgatccctgggtcgggaagatcccctggagaaggaaatggtaacccacttcagtattcttgcctggagaaatcccatggatggagaagcctggcaggccacagtccatggggtcgcaaagagtcagacacgactgaacgacttcactttcactttcaccataccattttcctagactccacatatatgcatcaatatacaatgtttgtttttctctttctgacttacctcactctgtatgacagactctaggtccatccacgtctccgcaaatg

SEQ ID NO: 37952 - DNA, 1330 bp, Bovine  19866881058427
  misc_feature (1)..(1): n is a, c, g, or t
ncctggaaaaacgtctgctagtctctggcccaggtcctcacagaaagctggttctttctgctgctgtgactgtccagataaattcgccctccaactgcggctttgacacggagcgaggggttcatccctctgggatctagtgcccccggtggttttccaagtcgtaattagacttcagaaacgtgactctttttacctcaatctctgaagcaaactttcctacaaatttaacctcaggtcatatcatcaggaactttaaatgtctgaaaaacctttcacttcctgatgctttttatttctccaacctggacacttcacctccattcatgaggctacttcctgctcccaccagccggaagaagaagctgaaagaggcggagtgcttacacccctgggaggtggagccacccgctgactcattgcgtggatacttggaactttcaacgtgggcagcaggccctgaagagacatacataattagtgtatactcgctagcaaaatagccagaaggtcctgtgagcaggtccaattaaatcttcctaaattaggaccctgacctctcaataacctccttatatttgcatgaattcatctgcacagtcatgatgccattttcatgacagggtttgccttaagagaaagaaaaagacatgaatgacagaggcctcaagtgtatcagcgtctagaatacaaggaaggatggaaacatgttgtttttcttcctaacaaacttccttaggtattttctaccccagtcggtcggtgtaaagcacgctgactcacaaatgcagggcagttggggctgggtggggggtggctggggatatacaactgggtatattcctgtactcctgagacacacctcctgcatgagggagataaaggctgatcaagatgaatctcttcatctatagtcttcaaggaggaagtttagggacagtccaggcaagtgggcttgcatctgtgggcaaggcagaagggaaacccagtcagctttacctgtgggctggggtgacatgcctccttctcactcatctgaaacagcccttcatatgggactgctaatgaatgtacaagcatatagggagctcaagaagaccatgctgttaattaaagaaccactcacaatgtcaggggaatttctacaattataactttaaacagatgttcagtattttgaggctaacaaagtatagctgctgctgtgctgtgctcagtcgtgtctctttgcatggactgtatggactgaaggctgccaggctcctctgtccgtgggattttccaggcaggaatactggaatgggttaccatttcctactctggggatctt

SEQ ID NO: 37953 - DNA, 1670 bp, Bovine  19866881145800
  misc_feature (1)..(1): n is a, c, g, or t
nccatatataaattatatataattaaatacatattatatatttattgttttattgtgccatatattaattatgtatctataatttaaattaaaaaataaatgatataccatatacaaaattatatatacatgtataatttactgtacccatatatgtgtgctgctgctgctgctaagtcacttcaatcgtgtccgactctgtgcatccccatagacggcagcccaccagggctcccccatccctgggattctccaggaaagaacactggagtgggttgccatttccttctccaatgcatgaaagtgaaagtgaagccactcagtcatgtctgacgcttcgcgactccatggactactagcccaccaggctcctccatccatgggattttccaggcaagagtactggagtggggtgccattgccttctccatatatactttttatatgtggagtgtatgtgtgtgtatatgtttattctttctcctcagaaggaagttaaaatctgctaactgaaggaaaagtggcccaggaatttggtgtggagagagtcttttatttgtcactgtatatatttttgtacagattgaattttttctctacaatctctctacaatttctttttattagtaatagttatttccaatagcacaatcctccccaagcctgattttctaaattaacagcacaaagagtttgcattcgttaaatttccttcagtatcattatctgaatatttaaagtacagactgacttcagtctgtgttaatttaaatggctgcaataaaggtattatttcccacatcccatctccctgtcactgtccttctctctttcctttccctctcttttacttccacttctcatcttcccctccttccctggctctcctccttccataaatgtggactattaattggctgtccaaggacctggccttcccagggcccatgcagaaaatcagggacaacagaacacagaggatcatctccccaggacccgcggagctagttagggcttctgtccgccagcccctggatgggaactgacactgcctgaacacgcactcctgggaacgggcagtgatctccacgtggtttttgcctggttgtttgcttcttgctgatgggtgaggacacatgtgcaccgacaggagttggcatgtgcccaggagcttatttactcaaggcttcaaatgaaggcaaaggtttattttgactctttcctgtggcatcagaaccctgcttatgagaacaggatgaggacacagcaggaagatagcagcaagaccaccaggtgcctcgaggcagatggtggaagaggtgacattggtttccgagggatctcacggcctgccaagctcacgggagcacagttagggttttccattttaggacagttacttctatgggaaataaccttggttcctgaccacatactttaatgataaaatctgaactggggcaactgtgtgaaccagaaagaattatgtcggatgatccagaaaactcatgtctaaagactagcaagtttcatgggaaagagttagaataaacctttgccttcatttgaaggcaaggcttcctctagagttttgtaggtgattacttgctgccatgggaccctgagcctcagtgacaagagctttcccatttaaggcccttttcatgtat

SEQ ID NO: 37954 - DNA, 1684 bp, Bovine  19866881243614
  misc_feature (1)..(1): n is a, c, g, or t
nacattgatttgaatgtattgaaccatccttaagaccctgatgctgggagggatcgggggcaggagaaggggacgacagaggatgagatggctggatagcatcactgactcgatggacgtgagtctgagtgaactccgggagttggtgatggatagggaggcctggcgtgctgtgattcatggcattgcaaagagtcggacacgactgagtgactgaactgactcactgactgggacaaatgccacttgatcgtggtgtatgatccttaactgttgaatttggtttgttagtattttgctgaggatttttgcatctatgttcattcgtgatactggcctgtgatcttctttttttattgtcagacctgtcttgttttttatccttaggaaaaaaggggtgttggaaacattctctggaacagaaaccaacaagatctggccacatgtatatgctttcctacaaacaaaacttccacaaagaagccaggaaacatcaagttactccatgaggaaatgtgcatgtaactaggaagatgagcagaagctccttgtcttgtgcatttacaggttccttgtcctaagactctggcctgtataaattgtttgaaaattatgttagtttcatttctgctgcttttaacctggaaattaaggatgtgccaaaagagtcaattatgaagattcatcttcttaaatgttcagtgtgttttatctagttaccttctaactagatacaattagaatttaattagcacaattataaaacattataaatgtctaactagacctttgaaaattgttgagtgtaactgaaagggcaattggtagtctaagttttgttcagaaaagaagtggtggataaagtttccttatttttctggagaagtagaacaagaaaaaacttccatatcacttgtggaaagtatcttatcagaggcttgtggatagtgatgcaaaaaaaagagacctctagcactgtgatacacagactatgggccactgtctatggaattcctgggggtgggaagcaactaaatttatagattagttgcaggatgcagattcactgctgccttttactgacctcaaacagattgccagatatttctccagcaaaatgggtttattcggaatcagcagataattgcaatttggagtctcaaccatggtgagccaggtgcaagtcctccccacagcatgggaatgacagtacttttatagaggagaaaacgaagttgggagggctgtagtaaacaagtctgtggcttttcgttggctgagtccttgccagaagtcttgccttcttccttttgggctatgctatcttcacaaggcatgagagctccccctcgtggtctcctgattattgaggtttctgggtttttttacactttatactagcagtctttcgatagccatatatcctgtattttgttgttttaaaacacaactttcactctactccagattttcagtttgcaataaaaatgtatcgaatagcacatagcaaaatgtattttcctatcacttttcttttgaaaatcctgtgtactgagggatatgacttgttagaaattgacattgtaaattcttgtaaaagcaccaaagttgaatttccaacagaatatgtaattaaactctcatgttttcagaagttactcaggttgaaaaatgtgcactttag

SEQ ID NO: 37955 - DNA, 1381 bp, Bovine  19866881293898
  misc_feature (1)..(1): n is a, c, g, or t
ntggactctgttgtggttcttaaatgtttatactgtatctctaaattctgtgaggcaaattaactatatgtactgtaggttatcttttttaaaaaaattcttcagtacaaaattgtatcatattaaaaatgtacacaaatcttcaaaagaagttaacagcttacacagcattgataaacttcaggtatttgaatacttagtgatcatttaaaaagcctggctgcttatggtagaacactaatataatgaacaaagtatctgggattgttctttgaaaatggaatatcccataatttttaaaaagaagaatgacttactttgtcttattcttacataaaatgtgccaattaaacttttgtggcctatacaaatgaaactaacttcacagcaagaataaacagcttaactaatacaataattttctaaagggagatttttgtgctgtgtggttcatgtatttttagatgctgctggggtaaataatagttatattggattatagttgcaaatcattagttgctttttttttttcctttctgcagagaaaacagtcttatctagaagacatttagtggttttgtttcttgtactgagataaatgatactgtaaattgtacttttataactgagttatttttagccatttgattttttttttagtttgttgcccctctgtgttaactgctctaattcaaactgatggttctttaattttttctaattagataagtaaacatttaagtaagaaaaaaataaaactactcaagtaaatttaatggtacagctccatacacagtcattcgtatatttgtatattcaggaagctggaaggaaatgtaacatttagaggttaagtactggggatttgctttgctttgctttgctttcttcattctgtgacctacttgaattgtaaggaagttagtataaaacttacttttattagtgatcagtttatcaataaatcacatccatcactgttaaaacaaaaaataaaataaaaaagctttactggatgcacagtggtggcatgttgaacagagagagagaggcaaaggacagaggcagggatctgattaataaatttatacaagtgagctttaaagggatctttttaataactcttcagtgtaaactatcacctaaaaattttaataatctttatattaatgccacaatattttatattatggcaatattattctaccacagttaaaaaaaaatgtccccaagtgtacaatgaccgtatataaaatgcattgacaaaaaatacacactgactgcaacaaatcacatttagtacatgtcgttaactcagcttcacaagtcagcaatctttgggcacacagtgtcacacatgactaaaagagaccaagtctac

SEQ ID NO: 37956 - DNA, 1709 bp, Bovine  19866881348877
  misc_feature (1)..(1): n is a, c, g, or t
ntgtcacctgtctgtgtttgcaaggtaaagaatgtagttaggtgaccttgctgcctagggaactgagttgctgctgtctgctttcccatagccgtttactcctccttcaggaacattcagtctgttttcagggactctggatccattcttgaaaatggaaaactgaagtttcaggggggaaatgatgggaggaaaaagaagtgggagaggaggatttactggagtgcgataaggaaatgaatgttgtttcttataacccagcatgtcttcacttcctgagccatctggacttattacttaaatggggaatgaaagagtttctaatgactttgagcttttaagatctgcatgctccctttttactaaatgaatgagcttcatttttggttcaggggctgtctggttctggcagaatgaatttgccaaatgataccccaaaagccagtctccccagcattgtccccaactagagagaactggtgaaaagatcagattccagctggaggcaatgcttttttttaaattgatttttgttattttcccctatcatttttatctgtggagctcagttattaaattttgggaccttgtgtccagttcatggctttaaaatcacattacagatttcactaccaggcaagacaagagtatattaattgggatagaacagtaaaaataatgtttctagtctcagcatcaagtgctcatttagtttttaggaaaatgatagagaagtctttctctattcttggcgaggtgtttctgaggggagtagaaggtcctttggtccaatccaccctcacaacaagactttaaaccaagagaagcaaaaagaagttacaaagccataagatagctccagctgcaggaactggagtctatagcttaatttgtttgaatagacatagaaatagaagctcatgttctttgagcataaaacatccagtaggttgaggatctacgaacttcctgtgattttcttgcatttgcagtacccaagctaatggccaaactttctcatcactgactttttgggcagcttgagtgggaatcaaatgcatcactggttatctgagaacagtacagtaatacttgatgaaagtgaagtgtgctgtacttgaagtccaaagatgcttttcacccaccttgggcacaacctgtgctttgcttctctagccaaggtgctgactttgtagaaatccacttatagccggttctgtctgcctcaggaccgacagttcccaaggacagggctgtgagcagggcacagggtagaaggtgccttcccagagcagtgttaagaccagtggctccaaagagactcgccttggtctccaatgaggctatgcaattcagacaacttccgcggtaatctattcaccaccttaagatatcactggaaaatatctatgagtgaagagagaaatatgggtgaatttctacattttaggggcctaggaaagttgatgaaagaaggcaaatatcaaactcaactacagataatgatatcaagtctaagtaacaaatatgccttaatgaaactcccatcacccaaagcttacactttttaaaatttctattttattttttatgagttgctttttgaagtcagaaaacataagcagagtaaaaatatgtctccatgatgtcaaatctgggtaaaaagtggaacaaatcagacaggcagggacacgacaggatctgcttca

SEQ ID NO: 37957 - DNA, 1571 bp, Bovine  19866881355740
  misc_feature (1)..(1): n is a, c, g, or t
nggaaagattgagggcaggaggagaaggggacggcagagcatcctctgtcgttggttggatggcatcaccaactcgatggacatgagtttgagcaggctccgggagttggtgatggacagggaagcctggggtgctgcagtccatgggatcacaaagagtcggacagactgagtgactgaaatgaactgaactgaactgaagtggtgagtgatatcaccacaaactgaatgcagagcagaaaggagaatctagtctttctgtgttaaactagctagatattaaagagattttaaaaaaatataaaacaatgtcacatattatttattttttgtttggaaaaagttttatttttcataaaaccatgttatttatgttaacgtgggatgcaagttttattattttaaaataagttaataaatgtttttaaatcacctaattttaatttcaaatacagtaaatacaagtagatagagattcccttggagaaggcaatggcatcccactctagtactcttgcctggaaaatcccatggacggaggagcctggtgggctgcagtccatggggtcactaagagtcagacacgactgagcggcttcactttcccttttcaccttcatgcattggagaaggaaatggcaacccactctagtgttcttgcctggagaatcccagggaccggggagcctgatgggctgctgtctatggggtcgcacagagttggacacaactgaagcggcttagcagcagcaacgtagattccctggtggctcagagggtgaagaatctgcctgcagtgcaggagacctgagtttgatccctgggtctgaaagatcccctggagaagggaatggctactcattcccttggagaattccatggacagaggggactggtgcgctatagtctatggggtcccaaagagtctggacaggactgagcaacttttacttttcataatttacataaacaaaagctgttcgggatgttcaataatttttaagagagtaaagttctcctgagccaaaaagtttgaaacagctattgagccaaatttatttttcttctataaaagcatccaaggggatctcaatggaaactctttcctggtccctgacccactttgctttctgaacccttgtgatttatgaccaatcaacagcttgaccaggtgaacaaatatactgtagggacttgggtgaagccctttgtctatttgagagtaaacagtggatggcttccatgaagactaagttaaaatctagaaaaaacaagctctcagaattccattcaagtagccaacgctagtcaaatgcggaaagaggaacagatgagacattattaaaacaaagatgttttaggcattcataataagacacagtaaaaacagcattgtccttgaagcaagcattcttggaagttaagattttctttcttgctcttcgacagatcacacctctctgggactcagtttttgcatctgtggtttacactagaatctaatattcattcattcatacacctattcattccttctttctttaattcaacaaatatgtattaaacatctc

SEQ ID NO: 37958 - DNA, 1310 bp, Bovine  19866881437604
  misc_feature (1)..(1): n is a, c, g, or t
natagtcgaggaaaactcctaaacttgttggcatgggaagaactctattttcaggttcattagaagaagtaggtgacttgggaataaagactttcttcatacctatagtaaccaacgtaaagggctgcgaagaatcgacacaggcgtcctcactgccgctgtcgtgcccgctgtcctgctcgtacctaaaacacagcacagacagagcaggatctcacctgcatcatcacccgaaggcctgcaagtcgcttcagaacattttcaccagatgatatacattgagttcaattaaaatcaattgtaactgcttttacatcaaaacctttctgctaaaccataatcagttagaaacgtaaggactacacagtgtcacttagaattacaccacagactcagacccaaattctgtcataaagtatcacccatttttacctatatatatataaacaaacagatgagaagttagaaataattagtaattttggcctatcaaaaataaagcaggggaggatgaaatggaaggggcttgacaaatattgaatatttatagcataaaatcatatataagaaaacagaaaccaacacagatctcctaatccaaaaactttatcagactatgtaaaataaatgggcactacaaaataaagcaggagaaaaaagcatgtttcattctgctgctaagaactgttatttcctggttgggattttctacatggctctatgatgcaagcaagcatcatgaagagttttagtctcctttgattataaaacagtgaaaccttaaagaaaattttgatacaaagttccttccacttttccccgtgcagggtgcttcttatgttagtacacttgtgagcacaggacatcaaccatttccatcaggtcttttcacttctagtatttctcatgttgtaaacttttttaacattgttaataatttaccaagtagacacgccactgtgtttaagaaactatttccgtattgcaattttcactattgtttcaatttctcatcttagggcaacaagtttttcctgtcactcagattgttactctgggatttctgtagaggtaagtgatcaaaaactgtctgtctggactagttcacactacatcatgtaacacaactaaactgtacagaacattaaatagtcactctcaagtaactgaaattctttgccatgggagcatgtttaccgtgaccaaatttttaaagtacttataggactgtttaaagaaactgtatccatttagcaccaattgtgaaatatggcatttagaggcaaggggaatggcaaccaactccagta

SEQ ID NO: 37959 - DNA, 1233 bp, Bovine  19866881668101
  misc_feature (1)..(1): n is a, c, g, or t
nggtgtgcttaaaaacaatccctggtgtttgttctcatctcaggagcgcgggcttggtttttgttacctatcggatttcaggaaggctgacttgagatgcggcgttgccatttcctgggccctcacttattcttttttttccggcgctgtcagccagatcctttgttgtgcctgctctgcattcattctctctgccctcacacctccagacagtgggatggggatttttcccgggccttgcaggaagagctccggacggccaccgtctcaggcatcagataaagggcagctttaaccagccagtgggtgtcggggctgggtcggcgccacgccgggagcagacaggcttttgtgtcggtgtttgtctcggcggccgtccgacccccgggcaggaggcgcgggccgcgacccccaaggaggcggggcctccgagccgggctccgcctggtgtggatttcacggtcgccgccgccgccctcgtttgttccgttacatcgccctgtcctgagctaagaacgccagtcgtggctacccaggagccctccatggccttccttccacccaactctgcattttgcttttccccctcgctttctcgtttttcctcgttaacagcatcctggcagggcgcttggcaaaactcaggctaaaaacagagaaaagagaggaaaaggacaaattcggtgcacctgcctccttcctccagagtttgcgaaggatcttaaccatgtctgagtcgggggaggttagtgaatttggctacatcatggaattgttagccagaggcaaggtaagtgccggggcgcgcggagctgcggcctgggttccgcccccaaccccaccccccgcccccagctccgggcactacttggcctgtggctgcagatgtcccgggccctggcagcccccggggagggcgggactggagtcccaggtccgtgtcctcagccaggacgcccagccgctgctgaaagcaaaccagacgtctgacctcccaccctctccacccccattaatagcgcggcatctctgaaatgagccaaaaaggacttggccagctgggtgacggcgggggctctggggaccgaaaggggcaagggcttagcctgcgaagatgggcaggagggccgggcgttggccagggggcgctcctcgacgcgcccagggctcctaagcgtggttgacatcgtgtggttgacctggtctgtccaggcgcaaagtgcggagggaagg

SEQ ID NO: 37960 - DNA, 1598 bp, Bovine  19866880160489
  misc_feature (1)..(1): n is a, c, g, or t
nccttgactagatggacctttgttggcaaagtaatgtctctgcttttgaatatgctatctaggttggtcataactttccttccaaggagtaagcatcttttaatttcatggctgcagtcaccatctgcagtgactttggagcccccccaaataaagtctgacactgtttccactgtttccccatctatttgccatgaagtgatagaaccggatgccatgatcttaattttctgaatgttgagctttaagccaacttttccactctcctgtttcactttcatcaagaggctttttagttcctcttcactttctgccataagggtggtgtcatctgcatatctgagcttattgatatttctcctggcaatcttgactctagtttgtgcttcctccagcccagcatttctcatgatgtactctgctgcgattacatattattatacaatattatgtattatattgtaatattacccccattttacagatgaggacacagtggtctagagatgtcatgtgacttgcccaaggccttactgctgtaagtggtatacccaaggttagaatggaggtctgactgcaaagtccaggattttaaatactactctccactgccttgtggtgaaagctattgatatccagatatttaccaacctgtaacttgttcattaagaaaggcaggtctctaaagacattgaggccaacattgttagattttacagatgcgtaaaatttttaaaatatttgggagtcaaaggggtgtcaagtttttgctttgctaaatgaacacattcttcttttgtttaaaaaaaaagcctatttcaccatttttcttgaatagtttaaaaatcaaaacattaagaattaaataaacttagaatttaaaagctggataaatataaccccatgaacaaaccactgcacggttcttgcttttctctttttgcttcaaatcactgaaaacagagtcccaacctattgactggcaccagggtaagaattaatactgggagtatctatcctttggccacttattaacaacactttgattttgaatatagcttggaaaaaaataggatggtatttcttagaatcatttataactcagactttccactaacttcatctggtttctatcctcccccaccatacaattagtctgaatatttgaggttttcctattgtctccagtaaggttcttggagacaaggtcaaactaagggcaagtctcacaggtcagagtattgttttgaaccatatgaaggtttctctaaataatttttaaaaaataaaatcactgagtaactgaagttttttcagtgttcaaaccacataggtgactaggttggggccaaaactcaagaccatattttaaagatgatcggtgatttaataatggtaattcatcacagcacaaatgggcaaagagaatccactccagccatgaggaaggcatggatctgatcaatgtttgggtgagcctgatttgtttggggccagtgacctttccctgctctggaattttttcagaccttttttttgaccacagcatcacacagttcttagtttatgagtcacagggtatctccagggcaatgcct

SEQ ID NO: 37961 - DNA, 1970 bp, Bovine  19866880347744
  misc_feature (1)..(1): n is a, c, g, or t
nactgatttcctttaggatggactggctggatctccttgcagtccaagggactctcaagagtcttctccaacaccacagttcaaaagcatcaattcttcagcgctcaactttctttatagtccaactctcacatccatacatgacacatggagaaaccatagccttgactagatggcccttcattggcaaagtaacgtctctgctttttcatatgctgtctaggttggttatagcttttcttccaaggagcaagcgtcttttaatttcatggctgcagtcaccatctgcagtgattctggagcccaagaaaataaagtctgtcactgtttccattatttccccatctatttgccatgaagtgatgggaccagatgccatgatcttagttttttttgaatgttgagttttaagccagctttttcactctcctctttcactttcatcaagagattctttagttcttcttcactttcttccataagggtggtgtcatctgcatatctgaggctattgatatttctcctggcaatcttgatcccagcttgtgcttcatccagcctggcatttcgcatgatgtactctgcatatgagttaaataagcagggtgacaatatacagccttgagatacagccttcccaatttgtaaccagtctattgttccatgtccagttataactgttgcttcttgagctgcatacagatttctcaggaggcaggtaagggtgatctagtattcctatctcttgaagaattttcccattttttgtaatccacacagtcaaaggctttggtgcaatcaataaagcagaaatagatgtttttctggaactctcttgctttttggatgatccagtggatgttggcaatttggtctctggtttctctgccttttctaaatccagcttgaacatctggaagttcatggttcaggtactgttgaagcctggcttagagaattttgagaaggatgcctcttctccagggcatcttcccaacccagggatcaaacttggggctcccgcattgcaggaaaattctttaccatataagcctccagggaaacacattcatttactatctctcattaataaattattaagtggtttactattaaagtacttgctacctgtacctatattttgaagattctatctctgaaacacatccaaaaagtttaagaccttcaaactttaaagaataaaacgaggacatatatatatatatagtgtatgtgtgcatggttgtcagaattctcagtctagggtggctctgagttggtacacccgagtggctgagtgtgcgggggctatgggggtcactcaggccatgcaagagcaggctgttcttgaacattcggtgaattcaaagattctttgatcccgagttaacctcaatgagggcaagaatactcagaagagagcagaagagagaaatgctcaaggcattcatcagacccccagtggctgactgcagctaattcagccttgtagaatttctttgcaatgcctcacagtctattttttatcccaatattttcactacttgatgacagctggtttttctatttgatttctgtctgtgtgtaccagggtgtgatcagaaggaaacaactttatcctccagttttccccttagtcttgaaatgcaaccaatctaactaaacccgcatttaccaaaagttaggtgcgtatgacatcacttttggatgccaaacacttcagtttttcagcatagagtaagtccttaggactctgcccagctgcctggggaaatgccatgtggggaacacggccttctttgtaacgctcatgccaggcactgttgttccctccgtgggctgtccttaaaagacgggctgtgaaattagcctctcctttccaatgagcactatcaaaagcgcagcattctcagttgtccaggagtaacatttcagaagaaatgctagttaaataacttcttagggtcata

SEQ ID NO: 37962 - DNA, 1717 bp, Bovine  19866880398487
  misc_feature (1)..(1): n is a, c, g, or t
natagctttgaactagcttagctccaaatatttcattggttaattacaattacttagcatgatatgagtaaacaggacccagaagggcaattacagaaaataatagtaataatcacaaatatcagctgatgggataaatgccatctggttctgtgtatgtggaagagattgcatttctctcacaaactcacagcccatgtgtagtctggtttgcagatgagcttctaggatactggatggatttacagtttgggggcagacactgctccaggttgtgtgctttggaggtaagagggagtacattagccattggaggtggcacatatttggtgaagatttcctccatgggcctgcagccagtgcattcttctttagtaggaaaaaaaaaaaagacttcattgttgctccttctataaatgttacaaggcctatattccacaactgtaaatatctgtgtttatatgactccattcttgcataaacctggtgggttatttaatttttttgctgatggttgttgatattttgaaggttgttgtgtctgtttttcttggttccatcacatttgtgtgttagctgctcagtcatgttcagctctttgcaactccatggactgtagaccaccaggcttctctgtccatggaattttctaggcaagaatactagagtgggttgccattcccttctccaggggatcttcccatatacctattaaaatcaacccaatgtgtgtgtgtgtgtgtgtgtgtgtgtgtgttactcaatcatgttggactctttgcaactgcatggactgtagcctgccagtctcctctgttcatgggattctccaggcaacaacactggagtgggttgccatgccctcctccagcggatcttcctgacccagggattgaacccaggtagcctacgttgcagatagattctttaccatctgagccatgagggaagcccaattgacccaataccatatgtcaaaagtgtaaaatgttgcctctccttttgaactttgacgtcattctaaaggagtccatgtccttgtggatgacccctctacatcattgaccccacccactctaaggacatttacctctattcctctgaaactgcctattttcagggctgccgcttgcattttcttatcatcccaaaatcttacatttcaaaaaaatctgagaatgttactctcttctatattcttttaactgttcagattttccactcccctatcaaattttgctttcctctctgaatggattgtattcctggttcttgacttctggagctcacccaagagtatctctctcttctgttttcacttcaagcttgtctgacccaggtcccacttccttgcctgtatcttcaacttccaatggcctggcggaaccagggctccagccttctctcttcctataagcatgaggtttggagccactgtatccatacatctgcaatgccagcccctctagttggtctcttcagcagtcctggtccaccatgtctcttctctgcggtcagcccacctgcagtccatttgcctggcctggcacaccaggcttgacatgaccctgggccctgcctgcctatcatacctcagcaacatctctatatcctttccaccctcagaatactgcccgtgccccagcccccatgccctagtaacactgtgttaaaggggtctgcccttgcccctctctccaccccaacatttccacaa

SEQ ID NO: 37963 - DNA, 1245 bp, Bovine  19866880421871
  misc_feature (1)..(1): n is a, c, g, or t
ntttctccatagcaggcacgggaagctaagctgactcacacagtttgcagtaacagttacagtattgcaccagaaatacaatgatacaacaaaaaaaacaaccaaagaagcattttcaactaattttaaacagagggccatctgagtcatagtttttcacagcagggaatgatggcttccatcagtggtaagcttaatgagctatgaaggtaggtttgttaactgaattattcacagagctttcaatagtcatcttccctcttgactacttttgaaaacaattacctcatcttaaacaaaataatccgttaaccttcatctcaacagaacagaaaacagctaagcacagaaggatactgaaatagacccctggcattggaaagcagttctgcactgcttctctctctcagaatatgggcacgtcctgtgagccaggtgctcatcacagctggtgagcagcctccagtgcccggtcctcagggagctagcaagctggcagggaggctggaactgagcagacgcctagggactaggcgacaaaagaggatataggagcccagggagagtagaacactggtctgggtgtgagcgcagaggacagggagtaggtaaggatgtgacagtgagaccggaaaattgagcaggagctcgctagttaaaaaacgaagtaagatcagtctaagtaagagcagcatcacaggatggggttctgagaagagaacttgagaccttctcaaggaaatgaaaactaatatgaatggagcatgaagatctagtctgatactgccttcagcttatgtcaaattatctaaggcttggtaatccacattagagattgtagacattttttcaagggcaactgaagggtcttcagcaacagactaacctaatcagatctgcattattaaaagaccactctggccccattgttcagaatggatctaaggactgggaaagaggttgctgctcagtacaggcaagaacttaaagcttggactacagtgatttcctaaagctaccagatcatatcattttcctgctcaaaacccttctaagcttcttactactatcacactgaaatttaatttccttattttggccaacaagcttatatacttcagtgcattcctatattttacatcttcatgtctcacttttacccattgggacccagccacactggtctgatttcagccccttgaatgggtcaaagtatgttctcagggctttcgtatttgctattcc

SEQ ID NO: 37964 - DNA, 1773 bp, Bovine  19866880442789
  misc_feature (1)..(1): n is a, c, g, or t
nctaacacagggaggaaacacaggcttagagaggttaagtaatttgcagagtaggattgccgaggtgctcttgactgactacagagctagagtgagctctctcaggtgtgatgtcagaggacttgttttcaggcaaaggctcctgctgctggaaacagcggaaggagagcagggccccggcagccggttgcccctgcctttggggtggagggaaaacactgctctcacttcccttcgaaggaggacgagtgggaagttaggagtgtgggattaatgaactacaatatgtaaaatagatatgcaacaaggatttaacaggaaattatagccattgttttatggcaccccactccagttctcttgcctggagaatcccatggacggaggagcctggtgggctgcagtccatggggtctcgaagagttggacacgactgatcgacttcactttcacttttcactttcatgcattggagaaggaaatggcaactcactccagtgttcttgcctggagaatcccagggacgggggagcctggtgggctgccgtttctggggtcgcacagagtcggacatgactgaagcgacttagtagtagttagggagcatgagggcttcccaggtggcgctaatggtaaagaaccttctgccaatgcaggagatataagagatacggtttcgatccctgggtcaggaagatcccctggagaagggcatggcaacccactccagtattcttgcctggagaatcccatggacagaggagactgcaggctacagtccatggggtcacaaagagtcagacacaactaaaatgataacatgcacccaagggattataatctgctaaagtatggaatcactatgtctacagctgaaactaacaggatactgtaaatccactatactacaataaaaaaaagaaaaatttccacattgctttacttaaaatggataaccaacaaggacctactgtaaagcacagggaactctgttcaatgttatatggcagcctggatgggagaggagtttgaggggagaacagatacatgtacatatatggctgagtccctttgctgttcactatcaatatccctttgctgaaattatcacaacattgttaattggctatactccaatacaaaataagttaaaaaaatttttttaatttttttaaaagattcaactcgagcttaaagctgcaccaagaggaagaattcagcatttgagtttggttggctttgctttaacaatgggcctaataatctatcgtcactgaaagaccgtttcctccgcacctgcattcaaaatgcatacaggggccagtgtttaagggagaattgctcacagcctctcatttgctcaaatgcagcctattctgagccatgtcacagtttaaggatgtcaaggtgtctcaaagtcaggaggtggaaacaagggagaagtgaggctaatcattccttggttcttgaaatttcaaaggaggagttggaaccaaaaattgaaagaaggttaaagattgagctgtgggttttcagttagaatttttgtcatttcttctgggagaaacaagaaaattgacggcctttgatagatctctgcatgggaagttttgtcactgtttggagagtcttcagaaataaactctgattgtaaatcaactacatctcaattaaaaaataaaataaatatgaaaaaaataagttgaatctcctcccaagattcttaagttgagccttgctgcagatcatagcaatgtgatgggcaagatgact

SEQ ID NO: 37965 - DNA, 3705 bp, Bovine  19866880539651
  misc_feature (1)..(1): n is a, c, g, or t
ncagctctactgaagcaacctctatggctggtcttcctagcttccccacatttctttccccaaggacagcagaggaagcgcagagtcctaaccactggaccactgtggaattccccagagagtccttctaaaaacatcaatcctatcatgtctctcttctgcttgagtcttcagtatctccccttcacctgaagaaggaaatcaaaactccttagctggacatgagcggatattggttcacatttcccatctcatttcatgcatccttttctcctattgtacccaaactacctgtaggtcccaaacaggcatgttctttacaccattccctctgtttgagtacatttcccttttcttcacctagctagttgctacttatcatttgaaattcagcatgaagttacctctttgagtcagccttcctgatttctgtaagcagatggttttatttttacctctgtgctctcaaaaaaccatacctgcatagcattttctggtttggttttacatgactgtcccattcagtcacctctttattcaaaagatcagttcgtactgagtgaatgctatattctaagctctattctgggcactaaggatatggttaggtataaaaaggcaaaaatatttgttctcaagaagcaaaggggagacaatggaagaaaataagcaaaataaatccagggtagttagatgatgataagtgcagtggaataaaataattcaggagtagccaaacagaggcttgaggtgggaactgcaggactgaacaggcagtcaaggaaggcatctttgaaatgacacctgaagaaggtgaggagtgagcctcctggacctctgctggagaagcatcctggcctatagaatagcaagtggagaactctgaatgtgggagtgggtctgtcctgctctagaaaaggccagaattcttggagcacggtcagcaagagttggagacaggagccagaccagagagcaggaacagagcactaggtggctagaggggatgagctgccgcacatttgaatccctctgccacaggatccctctgtctaatgtttggaggatgaagagccagggtggaggcagggagactggttaggaggcctctgccagtgtccagatgaaaggctgtcccattagcctgggagtgacatgagagctgggacaaaatcccatttatgtttgaaaccccagcatagaaccaaacacataacagcaggcactcaaggacactgactaaatgaatgaatcaagttgttcagtcaagaaaccagagctcctagagtcatcactgtttgtttttctaggacaagataactgcaggattttgtttccagtgggtaggctttattttctgtttttcctaattgaatggcctgtaggccacattttgaggatggtgtgggtgtttgcatgggggccaacaccactgaagtctgacagtgaaattgattttaaattaccttcggacatctgaaatttgtgtcttaaaaagatcagtaaaaaaaaatcacacatttcttcaaggcaggctgccttaggtaatcaagctccccccagccaagaccccaggagcatcttagaatacagacaaaacttgtttggaatttaagtcaggcaagcctggtaggctacagtccacagggtcgcaaagagtcggacacgactgagggatctcacttcacttcacttctgactatcaaaacccatcattctggttctaatttaaggatcaaaaaggaaaatgcattttaaaaatgattccaaaataatatttagataagatcattgagaaggattcatgaacctgtgaattcatttttctaagaaaagggaaatacacagggaggtgtcggaggaacttggtagtaaataattcattagttcggttcagttcagtctctcagtcatgtccaattctttgcgaccccatggactacgagcacaccaggcctccctgtccatcaccaactcccagagttcactcaaactcacgcctatcgagtcagtgatgccatccaaccatcttcatcctctgttgtccccttctcctcctgccttcaatcgtgcatgtagagtctgctcttgtgttgttgcaagaggatgcttgctatgaccagtgtgttctcttgggaaaactctattagcctttgcctgcttcattccgtattccaaggccaaatttgcctgttactccaggtgtttcttgactttctacatttgcattccagtcctctataatgaaaaggacatcttttgggggtgttcgttctagaaggtcttgtagatcttcatagaactattcaacttcagctacttcagcttcttcagccttactggttggggcatagacttggattcagttcaattcagttcagtcacccagtcctctctgactctttgcgaccccatgaactgcagcacaccaggcctccctgtccatcaccaactctcggagtccacccaaacccatgtccatcgagtcagtgatgccatccaaccatttcatcctctgtcatccccttctcctcctgccctcaatctttcccagcattagggtcttttcaaatgagtcagctctttgcatcaggtggccaaagtattggagtttcagcttcaacatcagtccctccaatgaacccccaggactgatctcctttaggatggactggttggatctccttgcagtccaagggacttcaagagttttctccaacaccacagttcaaaagcctcaattcttcagcactcagctttctttatagtccaattctcacatccatacgtgaccactggaaaaaccatagccctgactagacggacctttgttggcaaagtaatgtctctgcttttcgtgatattgaataatttgccttggaaacaaacagagatcattctgtttttgagattgcatccaactactgcatttcgaactcttttgttaactatgatggctactccatttcttttaagggattcttgcccacagtagtatatacaatggtcatctgagtaaaatttgcccattccagtacattttagttcactgattcctaaaatgtcgatgttcactcttgccatctcctgtttgaccacttccaatttaccttgatttgtggacctaacattccaggttcctagccaatatcattcttacagcatctgactttactttcatcaccagtcacatccataactggaccttgtttttgcttcaactctgtctcttcattcttctggagttatttctccactcttctccagtggcatattggacacctatcaacctggggagttcatctttcaggtcatatgtttttgccttttcatacttttcatggggttctcaaggcaagactactaaagtggtttatcaatcccttctccagtggacaagcttttgtcattactctccaccatgtcgcatccatcttgggttatcctacatgctcatcgttcatttagttagataaggccgtggtccatatgatcagtctggttagtattctgtgattgtggtttttattctgcctgccctctgaaggataatgattcaagtcttatggatgcttcctgatggtagagactgactgtgggggaaactgggtcttgttctgatgggtggggctcaagtcaaacaacagggagggaacaccaactccagccttcaacaaatattaaagatttacgagcaggccctgc

SEQ ID NO: 37966 - DNA, 2003 bp, Bovine  19866880548029
  misc_feature (1)..(1): n is a, c, g, or t
ntaagccagagtacttttaaaagcaatacttacgaaaagactgcttgagccacagctttctttcattagccgcttatgattcttaagatgatctaaattatagcaaactctacagaatatgctgtaatcatatgactctgtggtaaatggtaactgcaaatgtggctttaatcactgcctatattcatctggtatatatattaatgcagccatactgttgtttaaagccagtgcccactctgactgataagagcctgtgtgactgtaccaattgtcaatctgaaaatttctttggtgttacggatacataaatatgttgctaactcaattagctaacacatgtagggaatgtcaggtatacacaggatctctgtgattggcactgcaaggaaacacaaatggaaatggagtgcttatgctctctccaacagctcacaaggagtaatccagatagcctcaacttaacaaatatttggttttaacatgaactagtatctttccctcaccatcacccctagcaaatataccagttagactatgaccacatgcactgatcatcttttagtctcattatttccatattttatctttctcataggacaaaagacccattatgaatcattaagtcttcattattttctctttttatttagttaattctcactatatcaaagatcccaaccaatatatactgcttaaatcagcattagaattcatctgaatttgtattccttaaatgctgacaggatgacacggaaaggtaatataaggataagcatcaaaagaaatctgtacaggtgttaaaaatatggaaagcatgcaattgcaaattaacattaaacagcttaaacaacaaaaaaataatcagtggtactctacagtataattccatagctaatctaaacattttaataatagatttgttatccttataaacagagattatatggcaaagaaatgaaatgatttttaccattttgaaaaagtacacacatccagataatgccactgcctatcaatatcctacagagcttctaaatattcttacaccagtgaggtatttattcctttgttattaatttgtaccactattttctctcacttactttaataacaagtgttgaagaatacctggggatatactgtattaggtagtaaataagaaaattcttttaaatcaactttagtaattaaataagattacaaagcaatttaaagactatgaccatatgcactgatcatcttttagtctcattatttctacattttatctttctcataggacaaaagatccatttatgaatcactaagtcctcattactttctcttatcattagttaattctcaccacatcaaaaatctaataaccacagattgactcttaacttctgaatggtttcagtttcagaacaagcaatttattgtcagaacaagaaattcactgaacttgagaaataatgcagtctggagtaagcaagtcatacctatctaatcttctctttctactttttgagacaacagattccctaaagccaaagtcatgtttcataattttcttatcctttttggaaagcagaatctcagaaggaaatcaaaggtgctgtggttgtggggctggtgcaatagctgaattttagaggaaaaggatgaatattacaaaggattattcagatcccttaaatgcctctgtactctaatcagaactgccaactcttaaagacaactctctggtaaaagcaacgtgagtgagtgaacgtggctctctagtataaactgattttattaataaaaagcaactttttacatatgtggcacatgtagttctggttaggaccagcagctaatttttaacccttattactggagctctccctaggaagaaaataattatctcaatctggttagtttcattaaaaaccggctaagggttataaatattaaaagcctattgtgaataaaataacgaaggctatcagacaaaagttgaaagtatacaattaggg

SEQ ID NO: 37967 - DNA, 1171 bp, Bovine  19866880557159
  misc_feature (1)..(1): n is a, c, g, or t
ntacctaacaaggctccctgatggcccaggctgaaggagcctgctcacctccctgtcacttgaataaaagctgactgtggctgaggcatggctggatttgactggaaaccaggaaagaggcttggggaccagggaggtggagaagagaagactaagttctaggcattttccctctacatcccctcccctagccaccagcatcacagcacaggtggatggcggcctacctgccctcttccttcactggcacagttctcagaccatggacaagtcaggtcatgaaaagaggccacggaaagtccatgttcttctccatgagctcagacaatgggagtggagttgttcacttcctgcctctctgcctcttctttcccgtggcctgaaagtcactctcaggaactaggatcttgttttaaaatcttaagcaatgagaacgccaccaatgaaatcagatccctacagttgcctagcccaaactttgtggctttacattcttctattaatatctcaggactctttagaaacgtaggtgtcatcagctgggtggttataatatagatgaatgtttaaaaacagctgctaaagtacagtgcctgttgtaaacatcatggtggatggtgggccagcatgattcatttcacatacatgtagaaaaccctacaaagaaagtttaagtcctttacttcctctccttcatatcaagcttgatcatcacttctgttgctctgcccagtcatcacttacagagttgtctcccctgctcatttgcctatctcgaattccctgatgtttctcatcatatataaagcttgtgtcagaccaggataaaaataacaagcccaggaaacaacagcgaagtaagctgacatgaagaactatggtactagccaactaaactcaattcttggaagaggattttgtaatagctttttctttatactgtaagccccacttatccaaatgaggttatctctgggaactttttgaagcaaaagtcactaaaagataagaagtggcaaacattcaagtcaaaacttcagctgctgagtccaaatatgctctttatcttcagggaaactccaacgttttgaaagatctcagtggtagggtttgtatctaggcccacgtgctgtgccgtgttcaatttggactagcagcagctgcaggccta

SEQ ID NO: 37968 - DNA, 1138 bp, Bovine  19866880814776
  misc_feature (1)..(1): n is a, c, g, or t
ntgaacattacacatatgtgagtatacactcaaacacacttttaaaaatgttcatagtcaaagcctaggaaaaagtgaatcattacaagtaaaattcttatggaataactaagagatttaataacgttgtaagcaagagacaattaagtatttcacaaataaaatgtaatgagtattacctttgttactcaaccaaagttaaagtattcaaattaaggcattataatcattagtcacagatatcagaattaagaaactaagacggcagcagaaccagatatgcattataccaaagcctgtcatctcaggttgcaaagtaagaggttgtacggcatgcatcaaatagggtgcaagtaacaggcactggatatataaaaagcttcttcatccgagccttggaactttaagaacaagggtttatactcaataggcaaaagtatttacaaaataccaatctttgtgaataggtaagggacaagcatcaaacctacaggagagtggcacctagaaatatgaattttttacaagatccctgacagactctaatgtgcaaatgtgtttgggaaaaacagaaaaagcaggcaacataatgttatatatttatacttttgaaatccttgctggctaaagcatatcatttgaacagataatccttcctttcattaacttttcctacatttaagtacagtaatttttgtaaggcttatgttgaaaagctattttttaaagtagaaagcagagttattttaagaataagcatggccttttaattgtgggggaaagaaagaggattatcttccagtttaggaataatttacctttaaaggtgctaaaaagaacattcatatgattaatttattaaaagtaataagaatcagaacactttggatattttttaaagtacttagagaaagaaaattaataatgaaaaagtgtggtcaattaacagctgaaaagcttaagttactcaagttcaaacttgagttatccaagctactaataactcatctcctttcatccttttaactgaaaagcatgagatctatttctctcagaaatgtcacattaaataaattatggtacagccacagaataaatctatcaagaaggagattttaaatcaaattgttaagaatat

SEQ ID NO: 37969 - DNA, 3971 bp, Bovine  19866880863418
  misc_feature (1)..(1): n is a, c, g, or t
nttcaactgtcctttatagcattatttacaagcttaatatttcaaaataatatctaaaaataaattgtgaaacacccaaataaaggactatgcaactatttataaagtgttatttatcaaaaaactttattaacctaggaaaacagcttaggttaaggtgaaaaaagaaaagtagaaaaccaaataaattattacaattttgtttcaactcacaagaacaaaaatattgcaaagacaacaaaagtcaggactttgaaagcagatgaaaaaaaagtaactgagcaaaccaaagaatctgaatcctaagtcagcaatgagaaagaaaaagacattgattttcacagcaagacctgcaaagattcaggaactaactctagctcccaaaacatttcaaccagtcaagtataaacataagccctcagacaggagactaatgtcttctctgaaaactcagatttcaaaaacaaaaacccaaaaaagcaaaaagataaagatactgaccatcagagactgaaaaatgcttaaccacagtcaagtatacaatcagcaggttctacccatatgcacagacctctgaattgtcttttcagtggcccacactctcatgaattaataatggccagggatcaacaaatatttgagaagtcaaaggcaaaagacaaaaacaacaaacttaaaagatcaacttggagaaaatagactatgcacaaaaagaaagcctatcaatcaatctaccattaatattaagatattttgagagacagagggagaaaaaaacactgcatcactacatgaataagaataggatgctaggggcatcccaagtggttcaggggttgagaatccgccttgcaatgcaagggaaaccggtttcatccctggtctgagaagatcccacatgccactgagttattaagcccatgagcctagagcctgtgctctgcaacaaaagaagccaccgcactaatggaagagcagcccccgctcgctgcaactaaagaaagcccacacgcaacaacaaagatgtttcaaccacaggtcaaaaataaaaataaatctttttgaaaattttttttaaagaaaagactcgatactacagttaaatactgaagaaaagccttcttatatattcaaaaacgtaacagtagaaataaaaaagtgaatagaagaactctgaagccgaagaatctccagataatggaaaacaaagagataggaaaagaaaaaggaatcagcataaggagatccaatttttgaataagaggtccaaaaggcacatgaagacaaagtaaaaaaaaaaaaaaaaaaaaaaaacaagaaaataccccagaaatgaaggatttatacttccagattaagaaggtacaaataaatgcttggtacaatggataacagaccgacacatcttaagaaattcacaatggtgacaaagctcataaatgcttccacagagctgggggcagggcgggtgggaaacctatgcaggtatgcacacacaaactttaatattttgagagaaggctgtggtcaatttttcttatacatatcacccattcttactagtcacttctttcttgccttcactctcagttatataattgtacaattgttttcatactcaattgactttatactgaagtgtacaaaaagactttaagaatgttaaaacattaataaatcacttgagacactataataaacacatgctggttcatttgtgcagtgaaatggtaacccactccagagagtcccagagagtctacagacttagtgaccaaacaaaaacaacaaatctacttgttagtatgtttgaaaatttaacttaataaaaactttaaaagttattttaaagatgctgattggctgtccctcagataactaaggataaaaaaaaatctttgtattagatataaaaataacttaaaaaacctgttcttctgtccattccccagtatcagtctgagtccttgatcattttgtgcccatagtactccaacagtttcctatctggactctgactcacattccccaccctttatactctgtggcccaccctggttaccaactgttttttctgaaaaccagatttgcttatgctattcttatacccaagaattttcaaatggcttcctattacctatccatacatctgtagggtacttgcacattagtctttcacatcatttctaccatttccaggcttctctcctctatctttcatcgattctcaacacttctttcacactatctgggttttgttcacattgttttctctgcctacaatcttctccactctcctctctcctagtaatgcaaacttaattcatttttcatcacatcccatttgaatccttctagtactctgcaatgtaggataacccactctcccctctgaactccttactgtattttgttaatatacgaatataagactttcacaatacaatatggttatcagtttgtatgtacacatcactcagatcatgagctccctgaacacaaagactgttttactgtagcacagggctgggcacaatgaaggcattcagatatattaataaagttgggtgagtttttttccttctatctccttctcaccaatcctaataattacagttccaaatggtagagaagtggacaagagcttggactttattcagctacaccatacactgccaccaaaacagtattacttgtaactcactgtcctaatcacgaacaggcagtaattcctccaactcatcttcctggtttctaggctttctaaaattaaactacaccctacaaagccatgtcttctattctccaaaaagaactaactctctgattcaataaggctgatttcttaaataatttgactacagctatcaaattcaagtccttattccttcagaagtaaatcagaatggaacaatcaatctcctctcacatgatcaaaagaaacttcaaaataattttttgatagattgtatgtataacttattcactatggctatcttcaataaaagaccagaccctagcagtttcttcttattctttgcttttagaagtttactgcaagaaaacacaaaatatacaaaaactgggaaggttaaaaaggcagttctcatttctgtcggaagaaaatgaaaagcaccattgccaacaaactatttcctcatcaagataacttctctaactattcattccaattgtaaaagacagtatattcaatgtctaaataagtaggtatcatcaaaaataacttgatgaccatttaaaataagagagacatcaaacactttcaaaatatttacagcagaacaagaaccaaatacttacccaaagtaggatgtaaattaaaattaaattctctatacagaactgtgtccagcagagcggctacatctgcggatatagcacatgcattgcataaggcagtattttggaggacagggctataagccccaaaagggacacagaaaagttcctgactataaaaattccctgagtgtatagctccaactaaaaatcactcccagtcactgacatcccagtgtcactccacacaagaatcaagaattaagacttaagataaaggaagaagagtttataatcaggttttgagaaagtttgtgggatgttgtgtatcacacaagtatgaaaatatattattattctttggaatgatcatatggaatagagaagcaaaaagtcagacctgatacccaagtggtatcaacctacaagttcctcactaacatgctccttttaaatattcatttaaaaaatcaatgactttatcctaattttgttgagtctttcttggcgactctcaaagaatacctaagattcttgaggacaccttaaactgtaagagacatcacatcaatgatttcagtgtcacacagataatacagggtatgccatctaccttaccattttttaacagaaaatcaggaaaaataagtctccaattctgataaaaatta

SEQ ID NO: 37970 - DNA, 3498 bp, Bovine  19866880913243
  misc_feature (1)..(1): n is a, c, g, or t
nactgattggtcagctagaaaaaaatgcaaggagggctgaatttttcttaacattaagtagcaacagcgaaataataattataagctgtatgtgtacagagatttggaaatttttattcattgctttatccccacaaagtctggcatgaatgtggagtgtgagaattatctattatataaatgaatgaatgaggtgaggtaaataagcagtactcctacaggcttcctgaaaagtatccaaaaggctaaaagaaaggcacaatagacctcttcagtgcatcacaggcaactgacttgatttatggtacacacaggtacttgtgtcttcttgagaacttagtgcatagtgtgtccaataaatatttagactcatggggacatgggtctgaacgcacaactagactccagggaggaaaatcctttcgtatgacactacatcttattttagactcttaattcacttctcatgcccttccttctgatttgaatttgctccctcaaagatgagtattgctgagatgagttgaaatctgcatccgtgtctccaattcaatgaactgtgtgtctgcaacagcacacttgagaaaactgggacaccagcttcccaaggcatggtttgggaaaaggaatcacagacctacatgaccccggccctaaaaatactggtgtggctgctggagtttccaggaacctgggagactcagtccaaacttagaaggtggagtctgcctggacagaatgctatgacatcagtcccctctcccaaattctaacctaatcttagttctctcttctccttggctgtcaagaatctgggtgccaaatctagaccaatcccaacaatacagaaccctatggcttttatcttatgtcttagaattacatgagagattatcttacctttagtttcattttattttctactcttctctttttgctccggcattatcacagtttttacagtgtgtttctctggaaattactttggatatcttttggcttaatatcaataaatgcaactccaagtgccagtctgggaggtttcccaagtgaaacctgaatatggagtgaaacctgtcgtgtgtgagctcttagctcactggctggggcaggtctcaccatgtgaagttaatcatccaagagaaaacttcatccctaacactgagaacacctctctgtttgggtgggagatcatgggtggtggtggcggcggggggaccctgctggtgacaagtcagagctccagagacactgtcattcaaatgaatctgctccgacttggaacctaaactccagagtcagcagcagctctgttctcgggcatctggaaacaactacccagtggaaacctgctgtttgcaagatgtttgctttcattaactatttgtggctgtgtttctaaaagccttatggcaagtcctggtcatcacaaggaaacctgaagacttgaagattcgcttacctcaccagtgtgaaggtttctgggctacatacattctggctccagaaaagtcctctaaagaggtgatggctggctcaattcttctcttattcaactcaaacaggctaataaacattgggaactgaaggcttttttatccagcaagttctaggtgatgaatttaacagaatttaaagccctgtttaaaaatggcatgattgacttggaggaatatattcatacaaaagatgggggaggggtggaaatttgaagaaaagtggtatcaagtaaccagataataagtatttgatgaataaatggtggaatgaataaactggtaggctaagacactatcagttctttataaacccttcatttggcctgttttgaagactggctatctaaagtcttaataaataaaaataaccaaaaaaattccatttttcccctttaatagtattttaatcgaaaggttatttttaatgtctacatccatttcctttgccttcagctactccaagttggttcttagctgatccacagaaggatgttactgctaaagggttcaggtgtctctgcttctgttttattaccaatgcagtaagaaaattgcaacccactccagtattcttggcaacccactccagtactcttgcctggaaaatcccatggacggaggagcctggtagtctgcagtccatggggtcactaagagtaggacacgactgagcaacttcactttcacttttcactttcatgtattggagaaggaaatggcaatccactccagtattcttgcctggagaatcccagggatgggggagcctggtgggctgccgtctatggggtcgcacagagttggacacgactgaagtgacttagcagcagcagcagcagccagtattctttcctggagaatcccatggacagaggagcctggctggctacagtccatgaggtcacaaagagttggactcgatgaagcaactaacacttcagtaatcacaggttggcccagattattccaggcatgagcagtttgaagaagccagtccttggtaacctagaggcattaatacagcttctaaaattgtgaatcttccccacccccagagcatcagcttggactgtgagcatctgttacatctacccactggttatactgtaccttatctattcatggttgaggagtgttatgattgattcaacctcccaagcatctccacagcccctgctgtgttgctctgctgcaagcctctattcttatagttaggaatacaaggaatggaatgaaaagaagtggggggtaggggtggctcagcccttctgggtggccatctcctaaatagaaatctatactcgctcatataaataccactctaagtttttcaaattctccaatcacatttacacattcaaaactatctttatttccatgttgtcctggatgaaacacagatggagatatccgttgtacaacaaaattataaagtcaacgctaaagcaaacattgctgttaatccacaaaacattttttagtttacttgatgccaaatagcattgatacttccaaaccaagcaatatatcaaagaaaaccaaatattctctgggctactaatagagaatgcccagtaagtacaatttagagatcacccctgcaggaggaagacagctcctctccaagctccagcattcacttctaaagccttctcagtggattctattgtggtatcacacctccagcccccactccatcccccagttacttaagggcatcatatttctactataaatgctaaagaatcaagttttgttttttattttttaaagaatttcaaaaagttactcagttcatgaaggagaaactaccacactgtgagctccttaaagacaagactaagtcatcttattcacttttgatggccacgtggcctgctgctgagcccaacagaagatacaaaaatttactaactggagtcatattactgagttcatgggtttaattttgaagtaaaagtctgtcaagacccaacctttgttaaatactaattgttaa

SEQ ID NO: 37971 - DNA, 2538 bp, Bovine  19866881036484
  misc_feature (1)..(1): n is a, c, g, or t
natctcctgtaacgtaaaaagtgaatctttagtttccctaactagacgtttggacagtatatacatattaggtaagaaataaagccccccccccccaaaaaaagaaataaagcccaaaaccctttgcaatgtaatttaaaacaaaactatcacaacacactttggaaaaaacttcatttaggtaaaaagttttattaatgagctaagactagcacatctaacaataatcataatgctaatttttaagtatacttgaaggttttctttaaagtttattattttttagtactctccaactgaatttacctttgtggaaatgaaacaggtaggaaatgctaaacaaatggaaataaaatttattggccactataattgtaatacataccacagttatattacagattaaaaaattcttcaaaagggcctgaaaatatataatgctcattctgagacacaaagaatatttttcttagtaatttattttgagcatcagaaaacaataaaaagggaaccagttctgcattgccattagaaagcttcaaatatttaaataccaggcccacctccaactgtatttacaactattaaagtttgtaagtagatggaaaaagtctatcacaaaataatgctgcaaatttaataggaaaatctaacaagttaaatttaaaaaaataaaataacattaaaagccatttatacatgtaattaaggactttataaaaatgcatatggttaataaaatacaaaagtcacttgtaggcattggcaatgaaaaatggacacaaattagatgaatttctctttatctgtgcttcagttctgaacaactgtgcttttaaaattttagaacaatcaaaatacaataaatccttccacagtcatcaagttaggttccttaaaatgactagtaacaacagctactatttgttgaacaattacattctatacctaaacctcaccataacccttaaagaaaattaacatataccagtcagatgataaagctagagctagagtgatatcactgacctcagtaataactaaatggcaaaactaatttacacatctgagtctttctgatttcaaagcctcagattccttcccttgagccatgctgccttccagcaagatacagcagcccttgaaaaacttaggacttttggaaagcaagaattggtggaaatatgtctcaagtaaaccttgaaatgaccaataaataatcttatgctcagaaaaagagagccctataaaaagcctataatatcatttaaaatgtctttaactactgatcctgcccatgtaagatttctatcaatatatttttttaaatgttcaagccttactgattttatgcctgggtcactgaccctccccaagtttcctcatgatctcaaagatcaaaagtgattttccttcactcgtatcctttagtgtagctgggaaactatcctaacattcacagattaggaaaattcatatacttctgacaaaacaaatactgctgtaattttttcctaaaatttagaatacttataaagctatgaccactataatttcacatgaaatgcacatgccacccgttctcccatataaaaacatatctcagattttaacgtctcagcagataaaggtatatattttctgaggtctggacttctctcaccatttattgtacctagacttcactgtaaaaatccttatttctactctgttttcttttccattctcttctgttctcaatcaccgaattctccccactccactctttttaaatttattcctgtcaagaataaattctaacaaagttgtttgggtttgcaatctgcattacaaatcctccaaattgttaaaagtaacaaaagggaaagattctataactttgaccatggatttctaagcatttgtgctttcagaaattctgggccatatgggagtactcatttaacaaaatttgatcttcagtgtagagaagtctgattatctttttcagctttaaatgaatttctctatcactaaaagggcttccccatggctcagtggtaaagaatctgcccgcatgaaatacaggagctgcaggagacatgtgtcttatcctttggtgggcaagatcccggggaggagggcatggcagccactccagcatttttgcctggagaatcccatggacagaggagcctggtgggatatggtccatacggttacaaagagtcagacatgactgcagtgacttagcaggctatcactaaagattcaaaatgtcaaatactatgtttctaaaaacatacaaatgagaaattagttttaacaaacacatatggctagagggagtctaaaaaattgcaattccttatatttccataatagtaacatctccttgcccaagcactgttaccatacaaattgatttaactgaatcaaaaattttattaggaattagaaattgattagaaattttgttattttagaaaagatacatatgtatcacagtaacatttaccttgacaatatttaatattaacacagaataattaagtatca

SEQ ID NO: 37972 - DNA, 713 bp, Bovine  19866881122599
  misc_feature (1)..(1): n is a, c, g, or t
natgtttggatgttacagcactaaaagatggctcaataggccagactaacctgtgttagcaactagaataatctccagaaaagaaaattactttgggatttaagatgatcaaaactgattacttttcaagaggcttagaaacccaaagctgtaaacacagctggggaaatacttgaatgtgggtccataaaaactccagtgaataatccatccttctgcctcatgacgtggacattacaccacatacatgagcctatggggaagcagtaaatatttttatacaaccttgtttgtgaagagaggagaaaaatgtatagacatgcccacccacatctttgatgtgtgttaatatctttcttgttttattgaagtaaaggctaaaggattacattcagcccagcaagtaaactgtagcacgggaatattataaccaaacttataaaaactggatttatcttctcaaatttagagtgccaataggattatttttattggatgaaaaatcactgttttactattttttgaccaaaagttaatagaactggggccagttttctctatataggataatttgaacctttctgtccccaggaggataaacatctattagtatatattaacaatgaatatctctggtagtaggattaggagtgttggctatttacttctctttgatttttgttgttttttaaatttttcaaaagagcatatat

SEQ ID NO: 37973 - DNA, 704 bp, Bovine  19866881205426
  misc_feature (1)..(1): n is a, c, g, or t
nctggactggcatctcgtttatacatgacattttacatgtttcaatgccattctcccaaatcttcccaccctctccctctccgacagagtccataagactgttctatacttttaattcttattagggaaacaaaagagccaaaaagtgatagacactgaaatcagacgctctccaatgggactagactcataccagagtctgcaacttacaaagaattaagttgctctgaaactaaggtcctttggggtcatctatgacctaagagtaaccattatatgataggaagaatgggaaattgcttgtaagctgtgaatcctaaatgggtctaagtattaatagttcttctgtttgaatcaacagtgacaaacccttaggtcagcagaggtctgagactgtctatctcctgaaaagaacaggagaagggcgaaccgagccacatgcaatgtgtcacctcaggtgccaaggactcacccggagtgtccccttctcatgagccgtctcaggcttccccaaattgctctaatggaatgcactgggggtttgtacctttcctaatcatgtagaagatgggaaaaaggattccacttacttgcctacactttttatgagttaaagtgtgaaaggaactatcaagacctttggaaacttattaagctgaattcttgtcaccagtaacacatttactgctttttaaaacagttat

SEQ ID NO: 37974 - DNA, 1594 bp, Bovine  19866881240212
  misc_feature (1)..(1): n is a, c, g, or t
nggacgggggagcctggtgggctgccgtctatggggtccagagtcggacacaactgaagcgacttagcagcagcagcagcagcaaaggagcaatgagaggctgatctcaaagtatgaaagcatttcctagaatttatccctctaaggggcccttggaacttactggcactctacgtctgcagagcacaggattcttgggtatggaaaatggtgaacgcctcagggaaggtgcagacagactgtacaaactttctctcctactgaaaatgctcaggagagaaaacctgtgcgagagccacacaatgaaatagtacacagcaatgagaatgacctccagtttcataaaacaacaatacagatgaatctcacaaataaaacgttgaatgaaagaatctgtaacaaagaacatattatacgatcctatttatgtaaaatataaaagccagggaaaactatctgtttttagaattcagggaggaagaaaaagcaggacttccagagttgctgctcatattttatttcttgacctaggtgctgattacacagatgttttcagttagtaaaaattcattgagttgtactttcctacaatattatattttacttcaataaaaactctttaaaatgccattataccaggccacatttcctgcatcctgggaagaacagagctatctacttagagttcttattacaaattagcatttacccaaagccagagcaggaccatataagaagcttataggagttatcaaattatctcatttgactacacttaacttcggctaccagtaaaggttagggccttcatttcagagaggctggaaagaacaacttttaaaggctattcattttaaaacacacatatgttttaggggggatagaaactttttttgtaattttttccccccatctcttgagaaatgatgttacttcaaacagaactgccaagtttaagaggcccttttctgtacacaggccagctgggccgtaagttgcatgaaaggagggacaagcagctccttcagagagcagaacagaacaccacagggagctggggaccaggcatccagtgaaatctccagccatttgtctttatctggccaccttttgtgatttaagagccctctctgccatgttatcatcaatcaattatgattgagcagcatctaaaaaaccagagtttttaaaatgcaactatccgtgacctaaatttcctgctggttctgttggccccaggttagaccagtttgtctgtcatcaagggagccaataaaaataataaaaacaggtcagccttgggctttctgaagcctatataaaaaatattcacactcctccaatcagtgccaactcaacatgtccactctttgcttgagttctcagtaaatttcgtctttaataacaaaatatcccataggctgtatacattaactaaaaaccaatatttcccctctgtgcttgcttgttttttaatctagctaagcaacaatttcacaactagcaggccactgaaatgaagtcattttgctgactccagaaaaggagttacattttggtaaattaaaggatatatgagaagatggaaatataa

SEQ ID NO: 37975 - DNA, 1188 bp, Bovine  19866881306228
  misc_feature (1)..(1): n is a, c, g, or t
ntgtggtttgagaacactgccctcttgatggtcaggcttgccctaaggatttaattgtacttctgagcaagagttcttaactagcatgcatgggatacagagaaatcaagaagtctctgaacctaaatatgtgcataaatatacatgtattttctaggcaagagtccactgtttgcagcaaattttcaaagggcttactgcttcaaagaaagttgcgaacctctattctaaaaaaaaaaaacaaaaggaatggaacacatatccttgcagaaatctatgaatgtagttttctcacaacagagattctaataagaacaaagcagaagatattttaagactgaaatctctaggaaaacacgtacaatgtgactattttatatttccaaattaaagacagatgtacttggtggtatgattatctaactcaggtcataaactgaatagacggctgtaacaattctgcatgaaaattgatcttacatttttttaagttacttaggaaaaagccttagaagacatgtagaatggatttagccatatcagatgggaaggaaggacattttagatcgagaggagaacaagagtgggagtaaatattatacacctgggatttccaaatatacctatctaccaatctgtttgcaacaggaacagcaggatccaccttttggtagagattaccatattttaagctcagttgcattttttaagtgtatcactgataggaaaagacatgcttctacaggtaatttaaaaaaataaagaccttcatatgtgcaatcacataaaatcttacaagccacacaatatagcaatatgcattcagagtgctcaaatgctttgaagaacaggtacattttttcagtatacaaatctcatttttttcagtatacaaattaagatagaacagtaagtagtgcaagaacaaacgaggaagtcaattttagatttaatgctcatttaacatccacatcaaaagtcttaggtttgtctattataagaaacccaagcaggtttaaatattttagtaattctacactgtaatagaattttattattcctctcaaaagagtttgaattggtttaaaagaattatgacattggaaaaaagcttaaaaaaagaacttcagttcagtcgctcagtcatgtccaactctttgcgaccccaagaaccgcagcatgccaggc

SEQ ID NO: 37976 - DNA, 2682 bp, Bovine  19866881309971
  misc_feature (1)..(1): n is a, c, g, or t
ncaggacccaatcaaacttgatggacagcatgtgggtcataccagacccttcataacaaggtttcttcctctctttccagctttatctggccacagaccctctggaacccccaaaggacacagctattgcactcctgtttgtctgtatacctgattttctttcttgaaatgctgttttcttctctgacaggtaaatactattcatgcatcacactttgcctgatccctccatgctgagacagttgtcccagagcccacagcatcttcctttattttttcaccaactcttttacatgatgggctttcccgatggctcagcaggtaaagaatctgcctgcaatgcagaaggtgcggaagatgcaggttcgattcctgggtcaggaagatcccctacaggaggaaatggcaacctactccagtagttttgcctgggaaatcctatggacagaggagcctggcgggctatagtccaaagggtcgcaaagagtcggacacgactgagcacacactggacttttacatgatttgtttgcatctgggtctgcctgctggactgtgcgccctttgagagctgagcccaggacctactcattgtagcctggtacttggtcggtgtctggcatccagcagatactcaacaaagtttgcgtaactggactgaattggtgtaaggttggctcagttaataaacatgttttaagaattcaccttcattgtgtgtggtagactggtttaggaatataggcggtggaagaaagaaaacggctcaaaattctggcttgggtgtctgacaatctgaaactgaaaacctgacaacactgtcctgttgatgagaagaggataaaccttgaaaatgcacttttaatacaggatggttggaatgccaatttagataggtacccacatgtaactggtgtgttcaaatagagcctagggagagagcagtaaatttactttgtaaggattaagtctcctgccctgctgtaatttgaggcttttaggcttctcatatggtataaacatccctctattaattgaaaacagtgctggttaacatatacatctcagtttcaaagcactttttattcctgtactatccttggaaaatatgttctgatgcacgtgtggctagcctcttctgctatctcaggatcagtgctttgtagaaggttattaaatgatacattcaagacaactcctgtcttatcaaaggaagtaggaggaacattgctggaaaagaaccaagctcccgcctctcagaggagaaaaccaaggcccaggagactgagtgacgtccccaaatcacacagcctccaggcacaggcagcatcatgtggaaggtcccgagtccgaaagaatttggagagggtgcaggggaggcaggaaagctggcgagggcttggtgggccggcgccagggattgacattgcattcccagcttagtgggcagcagctgaagggttttactcaggagcatgccaggatctgacccatgttttcaaacataaagaccatgttgctgcccggaggagaaaggccacttagaggctctggcagtccacaggtgtgagatgatggcggcccaggtgccggtgtgacgatggagtgaaaaagaagcgaacggatttgaggtttttagaattggaggcatttttagaattagaatctagaggacttgctattgtgggtggtcaggaagaaggcagtcaaggatgattcttatgtttctgggcttatgtggatgcagggactatttgtgagatggggaaaaaaaataagggcgaggaaccaagaatccactgctggccaggtggtcaagtgaggcttgagacggaacagtacaatagatgtggactgccccacatctggcaggagtaagcatggtggcagtgatgttgttggctttttgattggtgttttgtttgtttcttttttaaaccactggtgtattcactaccaccccagtggggttaccaaggccaaagggaaacatcagaattatggtgtagtttctacaaaggctggtttgactacagagagagtggcaaaaacatttgttgggaattgatgcacatgtcttgaatgttccatttaagtcggcattcacagaaatgatgatcagttctgatgactctcctatacgattagtctgtggcctgctttagattacaatgccgctgctgctattaatgatgatggagcttgtacagaagtttttactgaatgtttccacgcctccaaagggaatagtcttaattttaataaataaacagctattcagtaataaatactggcatccttatttgataacttattgtttggatgttacttagccattctttaaaagtggatacatttacaatatagttcaaaagtgtctttcattgtcagtagaaactcaagatcattttaagagaatatgccttgattttgttttacagcctcttgatttttggccagctatgtgctctgacactcttctactgctctctactgttcaaaattattcagcagccagctaagcttgcacacatagcaatccactgctactgctgctgctaagtcacttcagtcgtgtccgactctgtgcaaccccatgtactgctgcctaccaggctcatctgtccacgggattttccaggaaagagtacggagtgggggccatgccttctccgagcaatc

SEQ ID NO: 37977 - DNA, 1693 bp, Bovine  19866881355333
  misc_feature (1)..(1): n is a, c, g, or t
nttcaaatcatccatgtaggagtatattttctcccccgtgctgcggattgaatgttcatgtcccaccccacccccacaaaagtcatgcgttgagaggtgattaggtttaatgtggtcacaagggtggagcccctctgatgggattgtgtgtgtgtatatgctcattcagccatgtccaactctttgctaccccgtggacttcagcctgccaggcttctctgtccatgggattctccaggcaagaatactggagtgggtagcctttcccttctccaggggatcttcccaatccagggactgagcccactgagtctcctgcattggcaggcagattctttaccactgagccaccaaagaagccatgatgggattgtgaagtgaagttgctcagtcgtgtctgactctctgcgaccccatggactctagcctaccaggcttctccgtctatgggattctccaggcaagaatactggagtgggttactatttctttctccaggggatcttcctgacccagggatggaacttgggtctcccacattggaggcaggtgctttaacctctgagccactagggaagcctcttttatgatgggattagtgcccttaaaagaagaggaagagacttgacacctctctctcttcttccctcccctctctctgccatatgaggatacagcaagaaatcacctgcaaactaaaaagagggctctcatcaggaacataattggctgccaccttgaacttggcctctcctgtctccagaaatgtaacaaatcaatttctgttgtttaagacacaggttttattatagcatcttgagctaagataccctacatagtctcttgaaggtttttagtacacaacacagcatgtaggaccttcagtctcagctaactctcaatatacagcacattctcaataaaaacacaaggaataaaagagcccagtgtatcctccctggtcgaaggagaacctactcgggtttactctcaccttgattctcttcctgccccaagatctctctcagcttctcccagactgtatactctaccctagaagttctggcaaagcgtttttaaaactaaatattcctgataaagattttggaacatttcttgatatcttagtgtggcaaagaaatgattccttctcttttataaatgtttttttttttttcctttggaagaatctcagttgatattattggatcccccccaaaaaaatcaacttggcatatataatattaaccagctatgagtctggaagaaattcaaaaaccagacagaagtttttgatttttaaagcatatttaatcatgttttaaagcaaaatgaaagaccacaaatctattcagacattccaaacagtgaaggaataatttttatcaaaatctgtagccttactcacgcagaaagaaattgtccctaagcagtgctgacaactctgtctgagacatgaatctaaaaacactgcacattttttcaattatattttggaagcattgagtgtgctcaatgaaattccagaattaatccactctggttttgcaatagacactgactcatccaaactcctcccctctttccttttggcaaagtctctctcttctactacccgctttaacacacacacacacacacacataacttaagctagaaccaagactggaaacagcaaaatattcagttaacc

SEQ ID NO: 37978 - DNA, 951 bp, Bovine  19866881412103
  misc_feature (1)..(1): n is a, c, g, or t
ngtatacctgtgttagttttttaaggctaaattttaactatgtctgaagtactctgtcagcctcaaagtttctgttctctcttgtgtcaggctgaattgattggactattcatgttaaataataacaagctgtatcttctttacatttagtgttaggcttaatgctgttaatagtctgtgttttcagtattaaaaaataaagttactatggaattgcagctaccattatatggtggttgtaattccataataacttaattttttagtactgaaaacacaggctatttaacagtgttaaacctaacactacatggacagaggagcctggcgggctacagtccatggggttgcaaagagtcggacacaactgagcaaccaagaacaaacaaaaacaaacagaacaaattatatggtggttaagtaaaagtcataattctaccttatgttttgcatttgcaccaagctaaaattcagaacttgcaacacgtaaaaatacatttttctttgacagtggacattcctctggttatgatagtcgttctgcacgtgcttttccatatggcaatggtaagtgttattttttaattgctcggattcaatttaaaccagtaaagtacttaaatactttaaaatagtagaaccatgctcccatggtttaaagtactatcttaaaaggaattaaaaaatacttactctagaaataattaatcttacatatattccaggttacttaacagaatatttttcatttctttagtaaggatgtaattgtccctccttccttaggtagctatagtgtcatctccatttgtgtatcaagttccctgcacgcatgtatctatttcttagctttcaagactattcatttggttagtttttaattatccctatgctaatagtgccacacttactataaaactctttaattttagttttatagtaaatctatat

SEQ ID NO: 37979 - DNA, 1184 bp, Bovine  19866881492629
  misc_feature (1)..(1): n is a, c, g, or t
naaatccaaactggcccacttctgtgccaacaaggcaggtattgtgatagacagcccccagtaaaatcaaacagaggacgaggatgagcaattgctcacttaagtttcccgataggaggactagtgtgggccaggcaaaaccacagatggccgcaaaagatcttgcagtcttcgaccatcaggtgtctgcggtcccgtggggtgttgccccagggtaaccagggggaaacaataaaggggacggagttgctgaaagcctagcaaacatgtgctggaggacagcatgaaactctccttcatactccagtcttcgatgctttgggggactcacacagcctgggagactgaagtcacatagcagaaagagggcaagtggactacagacagcccacaattccagaaacaactctaagcttcaaatgcaaatgctgcacttccagaggaacgagaactcagccatcctaggccaggagggttggcgggtgggaggggcccagggtgggctcagcacctccacctgggcaatgcagaggccaccatgacagccagtgtaagaagcacgcacctggatccgtgtgcaagtctattgacacgaataaccctggtgcgccgtgtacacatcagatgaacatgaaagctgcaacatctggaaaaatgtcaccatctgccactcggagaggaacactgaaaggatcagcaggacaggagcagtatggggtccgagtttaaaaaaaaaagtgttggcagcagctgccagctctccactgctgagaacagcagcgatcctcctgacatggcagtttatggactctcacaaatcccggctgacccctcacaaaggcaggggtccacaaaccgagtggctccaatggccatcgctcatcaagcacatttaggagcttttgttcccatctcttctgcagcctcacaatggccagcgcacaccaggtcccactgcaagaaagaaagggaggtggcggctcgtggagatctcagcagaaggattttcctcgtgcctgactcctctgacctgctcatcgtttgattttatccacagagatgagcttgcacgtgcggctcttagtgctggtttagatgaaaccccaaacccagtgggggtcatgtgctcacgtcagaccaaggtgatgcttatatcttcacatgttaatacaaatctaagttaa

SEQ ID NO: 37980 - DNA, 3092 bp, Bovine  19866881522169
  misc_feature (1)..(1): n is a, c, g, or t
naagaaaaagtgggagaaggccaagaagaaaagaaaatttttgattaatgattatgttaaagtgctatttaaatcaaactgagaaaaaaaaataaaaaaaataaatcaaactgagttgacattttctttccaaacatctccaaatgaatttttctccctaggtaacctgtagtggaatttctaggcttcattggtgtgtgtgtgtgtgtgtgtgacacagagaatgtatgtgtacatacatgtatttgtgttttggcaagtgtgtgaatgtgtgtgacacatattctcaacaaaagagaaaaaaatctctgtactatttcaaatgaactgatgtaaatggaagcttctaggctcttttactgaaaggctgggtccctttattaaactgctcaaatgtcctccagctcggcccactcatttgtgccttactaataatctgtgggactgaggctgtgtggggctttctggttttaattactctaggcagacccagcctcaaggcttcggcccccagtggtgatcactgcttgggaagaaaataatttcacagcagcactgcactgttcttaaggaaggaggccccacagaagagaaacaaccttcttgaatttctatggtttgggaagatttctcgcacttggcagccaactgttagaagagtcgcggagtgagattttcccgggcctgcctgcgcgtgcaattgcccgtcctctgctgcatctccagggatgcacggaggctcctttgcacgtggacaaggctcagaacctttgttcaagcgcaggtgagctcaaaggccttgctctgctctgtcaccttatcccatgtccagctttccccatcacacccaggccaagagaaagtcagggtcgcctgctgaacagtcctggcagcttttttgcttgcaagtgccagctgaaggccacaagaatcaaaatgttttccttatgcaaccctcccaggcagcatagcttccatagaactggaggaaagccatatagagtgttgctaattgcatggccaatcatcccctgaggttgacgggccctgcctcgtactccatcttggaggccagtgggaatatcagtgtttctacaataactgcttcaaattctttctcctcttattccaaaaaataagaatttctttgccagagaaatagcacataatgtgttaggagctggcctgtcagcaacccagaaaggataggatgaaactgtcatctgagggtcagacaggaaatatatgaccaagggagggattcttccttatcacttttggcacatgttagacttctgtctgatgaacaactcttcctttgtcctttctcttcatctgaaaattcttcccgagcatccttaccctcggccaagccacagaggacagtaatgcctaaggcgttctgttccaccacctgtctcccctggaatgtctgtgggttggctgaatagcttagggattttttttctttgctgaagggtcattaagctataggaaatttactttaggggagtgtgtgaatgtgagtgattagataaaatacaaaatgttccagtaatctgttctaaaaacaacttaatatgctacagttttatattgtttgatgttattgttacttaaagtaggagaaagggataggagaggaagaatgaggagggagaagaaggaaaagaagactgaagaggtagagaaagttaggggagggggaagacaggagaagaggaaggaggagaacagagacaaaatgatatagagatagtatttatagagagagagaaagaggtcagaagcacaagacagacagaagggttagggacctactgcaaattactaatcttgtatgaagagtcatatcaacctaataactatggaaagtgactgttccacatttatgttagtgttttacttatttgtccaaccactcacccatcataaccctaacccatgcagccaatgatttgctcagaagtgactcttattaagcccattatcatggctccacagccatagtttctacctttaggatgatgtctcctggcaggagccggccatctctggctatcaccccatcacgataaatgtgctggacaatgatatggaccagaggggtttcactgcctcccacaagcctaatgggagaggttttcattgggatccgttcgattgatcttgatgctggtaatttcaccatctggaatcaggtgatacaaccttggaaagactaaaatggacaaagacagtgtttatttaagaacacccaccaacggccatttccaaccacttctcttcttgccaggcttttggttccagccaaactaaactattcatcattctttgtacatgttttccatcttcctgcctctgagccagcataagtttctctgcctggaatgttttccatcctaggcctaaacccaatttttccttcaaggcctgcatgaaatgatcccttccaattaaattctgccctcctccctcctcccccactctctctcaacttcctatttcccacaaagctgtatttctcagggcactgagccttctattactattattattactcatggccatttcttatacctaccattggactctaagatccttgtttcttaggtctgtgcacagacctctgtacacaggagactttgtcccatgtttattgagtaaagaggaatgaatgaacagtcattatggaatgaaccacagtttgctcacttacttaccgaggcgaaaaaacagaacaaacctgttctgctctttctgattattttgaaggtttcctcctgggaggccctgtctttcagtctcactgaaaagcaggctctctccccacccctgctgtcagggaagggaagtcaaacggcctaattcacaatcaggaaccccccgggcccagctggtggtgtcaaggtgttcgtccctgatccgcttgcattgctgaattcagagccagaaggagattcagagatctaggctggggtttccaaaccttacattttcagtgaggacccttaccctggaaagtctttcacaggttaccctgcccccatcccctgagcccacacacagaagatcatttcaggctgtgcagt

SEQ ID NO: 37981 - DNA, 1218 bp, Bovine  19866881570034
  misc_feature (1)..(1): n is a, c, g, or t
naaaacattttatcaagtgaaggctcaaaaaggaatcccggtttgtatttaaggtaaggttgttttttaaaacctcatttaaaaattagaggccaacctattcccacctgccaaatgtactcaaaccaaacatcgtactttgattcatttaatcctttgccagcatattgtcatcagcaatgcccatgtttaacattgaaatcacacatttgggatttttaaggcgctccttcataggccaagagttcacactctgatgcaggtgagcaaacctcaagtttatctgtcctgtgaatatttgatttctgtatctagccctgagcaaggttgctcccaaatcttttcctgaacttctaaaacacttaactggcttccctataaggctctagttacgtctcactagaatgacaacccagccacttcctgaaggcttacacaagaactttacaagagtaggaactaaggagaggtgatctgagccagaccctcaatcacacatgccccagcatctgcgcgaaaggaaaatgtgctgctgtgtcgctttgtgtctagccagggccacccaaaagctgggtgaagaggggaagagaggggaagccacggaagttttgcctctgcaggttcccagtgctgctgctaaccaatttggaaaacgggaccttcccgtggctccagggtgtgtgaacacaagccccttctccctgtccgctgggcttcctgctgcatgtatgacccacaccaccatacatggcagccctgtaagctcctcaacaggagtgcccatattcaggctttcattcctgcctgaggattactgtgttttcagttacaaaagggaaggcgaattatttcaaatagacccacaatcacacatgggtctcattaagattgttagtgcccagaatcagcccgagagagtgaaacagtggtctacgaactataattgtttcctcccacacctccccaaggatgtcacattggaactcaccgcggtaattccagccacatgacccaagaggggaaccagtcgttgggtggggctgtgtcttggtcagagtccagggctgccaggctgctgtcatcttcctggggctcatactctttgacttccaaagctttcagtaccactgaagaaggacgtgcttttcaataaaccaactgcctcactccggctgacttcagtcagttcaatcccattcacattcaacaaaatgtcac

SEQ ID NO: 37982 - DNA, 758 bp, Bovine  19866881658959
  misc_feature (1)..(1): n is a, c, g, or t
ngagacatcggagaagccgcaagaattctgcgattattgatatgtttaaatttaaatttcagtgctttaagttatggtagaggttattccttactctttctctacttctccacttctgtttaagttgttttggagttagagcgtttttgactgcaagtatacgtgtgtgtgtttatgatccttcaagacgctactgtgtacgcctcttgaagaatgtgatctgcccctatgcctttcatcaaggtcttctcaactatgagagtttcctttttcaaggcttaacagaaaaactgggtctctaattaccaccaaacttcctccaaattgagctaaacaatgtacatttctgttgccagctgggacataattcttcataattattgtacaaaagagcctgtgacagttgcaacaaagtaattggctaaacaggtatgcatttccttgaaacatctgtttgaaactctgggtcatttgaagtgtatgtaaaattgtctcatcttctaattagtttctcaccagccaaaatatcattgccaaagtcgttttaagtaggatacaggagctaaggttctgttctgtagcaaaacctgatataaccactcagttctccaaaggcaagcatcatttcatctataaatgctgtcatttgtgacaagagaatggagcagcattttccttctaataataatatattttccttattatttaagacatttctcatttacctagtcaaaaagcatccgacaagacacatactt

SEQ ID NO: 37983 - DNA, 1536 bp, Bovine  19866881768093
  misc_feature (1)..(1): n is a, c, g, or t
ntaatactgtactgcatatttgaaagtccctaagagagtaaacttttaaaattcttatcacaagaaaaaaatctggtgatgaatgtctattatatttgttgtggtgatgatttgctaatacaatcaaatgtcaaatcattatggtctacacctaaaactaaaataatgctgtatgccaattatttctcaatttttttaaagaaacatcaaaaagatattttcaatgacctgattcaatcaattaggggaagtttggcttaaggcaagttactcagtctctttctcttaacttgaactgtggtgttgggagaggactcttgagagtccctcggactgcaaagagatcaaatcaatcaaacctaaaggaaatcaagcctgaatattcattggaagaactgacgctgaagctgaagctccaatactttggccacctgatgcaaagagccaactcattagaaaagaccctgatgctggcaaagactgaaggcagaaggagaagggggtgacagaggaggagatagttggatggcatcaccgacttaatggctgtgagtttgagcaagctccaggagatgaagacagggaagcctggcatgctgcagtccatggggtcacaaagagtcagacatgactgagcgactgaacaacaacaacaaacagttgttttcagagttaaatgaaataatacattttaaatattgagtacaacgtttgaaaaaatttaggcactcattgttaccatccttccttctcactgacctagacaataggtgcatttggtgaaaagtacatagaaaatgcctactctataggaacttacagaagaaattaaaacatatcaatgttagataatgaccctaagtgctaaaatgaaacagttaaggctcttcagggatttatgtcatcatttttttacttggcctcaaatctaataaaatttattcattctttctttatgcgatttattagcacttttgaagtgcctggtgcactactacttttaaggaatttacagtatagtaggggaaatggacggggcttcccaggtgcctcagtgggtaaagaacctgcttgcaatgcagaagacaccagagatatggtttcgattcttgggtcaggaagatcccctggaggagggcacagcaacccactccagcattcttgcctggagaatcccatggaccagaggagcctggagggctacagtcaatagtgcaaagagctggacaggactgaagcaactgagcacagcacaggggaaatggacacacacaaattactggggtataatgttttggcattttgatagaaatattaaaagaaaagtatggttcattgggaatggaagacaagaagctctgtagaggttccaaagtgagagacagcagttttccttcctaagagcacagaatcctaccttaagctagcttaataagggagtagtgtttttatttaaatctaatttgttttctaaatttattttcaattggaggataatggctttacaacgttgtgctggtttctgccacacaagga

SEQ ID NO: 37984 - DNA, 1422 bp, Bovine  19866881833899
  misc_feature (1)..(1): n is a, c, g, or t
ncctagaggttttctttcggagagctggccatagagattagtatctcctttgtttaaatgcagtacgagaacacagattttaattgacctgctcaaggtcacacaggaattagcagtcgagccagaagtggggcccagtgctcgaatttcccttctctggccgtatcagcccacactgctgttttatgtacactcagtaaatatttacagccttcaatatcttccccactgcagttaggacaagaagtactttcatatacgtgcatgtgcatgcaaaacagatgtgaaaaatgtaaacttgaattatatggacacaacgccgctgatagttaagtacagagtaaaacccagaaaacctaagattcaagactacagttttgtcctttcccacctcttggtggttcttcaaagttctgaaccgagagtacacctttgactaagagacctaaaatctgtgcccacctagaagagcactgatgagaaaggatgaggaaagccttctctgtgtttcgaccttgccaagttcatgatgccctaaaacagcccattataagatggctgagttttgtgttgaaaagaatattgatcaaatcatgccccacttcctgagacatttgttatgttaaatcacatataactcacaccaagatagtgattctacttctctttatatgtgtgttagttgctcagtcatgtccgactctttgcaaccccccatagactataagctcgtgaaactcctcctgtccgtggaattattcaggcaagaatactggagtgggttgtcatttccttccccttttgttgctagtatataggaataatattgattttgctagtataaccaagttctgtaaccttgctaatctcaacacttagttttaacactttttaaaggggatttcattcatatgtaaatagttaagttatttgtgaataaacactgttttatttctttccaaaccccacagcctttcttcatttttcttgctttgctgcactggtagaacctccagtacaagttgaagggtgatggtataaagggatatttttaccttttttccaacctaattttagggagaaaatattcagtctttcaccattaagtatgtaagtgtgatgttatctttagtttttcttttaataaatgctctttatcagtcaaaaactattttattcttaacttgctaagttttcataaatggctattaaatttttcagattttattgtggtaagaaacacatgaaacttatcatcttaacatttttaagtgtacagctctgttcagttcagttgctcaaatgtcttcaacttgttgcgaccccatggactgcaacacgccaggcctccctgtccatcaccaactgccagagttgagtcggttacgccatccaaccatctatcctctgtgtccctttctc

SEQ ID NO: 37985 - DNA, 1392 bp, Bovine  19866881924576
  misc_feature (1)..(1): n is a, c, g, or t
ntaaaagttaacttaaaacagagagagagggaagagggagacagaataagaggaaaaatcagaatttcaacatttttttctccttccagggaaaaaatagagtctagctctctgggcaagtaggccatctatctgggagggagaacccacgttttccccaggtagtacattccagagagtgaataaactgtcaagagatgctggactggggccatagaaatacatgacgttaaaatgcaatgatagaagctgttgacaatccttcgaaagatgccagagggtttaagaggcagacgcaatactcgcaggtgctgctgccacaccggctgagttgtagagttcctgtcttttgctgctggaaaagctgaggcaacacaatgacttgcccagggtcacacaccatgcttgggacagaaataaccctgactcccccttcctggctctaatcagctgacaacgccactttattactgtactatcattccaatctgaatcatgtaaattgctcctaattgcaggtctgcggtgaactgtaacctccgtgtgacttctagctgccagaccatcgagctaggaagtgactgaagtttcacaaactcctaaacatgggatgaactgctggggcagggagtgggggagtgtttgaaaacttgactctgaaagttctgagaagcatcatatttggatttttttttaatgaatttgaaatgtcacctctcatttattaaatttgaacaaagaagcacttgggatccaaatggatgacattcagaaaagcattcaggaataaatctcagatattttccaagcattcaatcttcacacagttccttttcatgctcattaagtgactgtttttgtatttaaacatcctaggttatcacatgtgaaatgtaaaagataaatgaacagactagtgatgaccagtgggagagggaaaaggggaggggtaagatggggtaggggaaaaggtgaaagtcactcagttgtgtccaaccagtcacgtccgactctctgcaaccccatggactgtagtcccccaggctcctctgtccatggaattctccaggccagaatactggagtgggtagccattcccttctccaggggatcttcccaacctagggatggaacccaggtctcctacattgcaagtggattctttaccatctgagccaccaaggaagccctaagtgtaggggactaagaggtaaaaaccagtatatataaaataaataagaaaaaaagatatattgtacagcacagggaaatatggctgtgattttgtaagaactttaaatggaataaaatatagagactaaaataacattgcaaatcaactatacttcaattttttgaaagctgtcaaaatgataaaagtaaataaacttt

SEQ ID NO: 37986 - DNA, 885 bp, Bovine  19866882017423
  misc_feature (1)..(1): n is a, c, g, or t
nctgggctgagggagaagttgaattcaggagtggttgtcacagaggcttcgctgagcccatgggaggctctagagtcctaagaagagtcctcaatggaggtaagggagccagccctttgtagtccccactttgagcagccatgggatgcaataagagaatatataactttgggcaagatagtttcattatgcacagcacttcttagaagggaaccgttgagctgtggcctatgagttccagcacagggtcactattatagcattcacaacaccaatgtgatgcttgaaaaattgtacatatttccacttacagtctgtgtggacagtccaaattgttgaactaacctcttcctcagttactacatctgaaaatgaagtacctacaaccataaaggtgttttaagaataaattacagctaaaggaattagaccagattctagcttagagtaagcaattcataaattagttgttattcatttttatagtcagggccttcgaaatatattcaacatggtaaaatatctaataatatggctgtttttcattagtctcagttttcatatttgcaaattcacctgcttgctaaaatttactaataacctccaaagccatattcatggtgcttttgcagtcattcaaggacatgcacaaaggggtggaaaggcacagtggagcccagcatacagagtcccagttgaggtccagcaaggggatgataatataccctcttgtttcagctctcgtactaaaagcaagtgtcctttctgtggtctactgggtccacatttatcatatttttgtgctttttcttggtgatttctctatttaaaatggcctccaaatgtagtgcttacgtattgtctagagttccaagtacaagaagg

SEQ ID NO: 37987 - DNA, 2633 bp, Bovine  19866880441929
  misc_feature (1)..(1): n is a, c, g, or t
ncattctgccttgaagatattctaggtcatataatatcctccatcacagcagtccccaactattttggcaccagagactgatttcatggaagacaatttccccatggcctgaggataggggaatggttacaggatgatgtaagggcattgcatttattgtgccttttatttctaatctaatgccactgcagagttggggaagtatcagttcaaggtcttggaggctggagaccccagctcttatgaggaagatccaataccaattaagatggggaactgaaaactctcagctaaaattgatcatggaagtgtattagttgagcaaaatgccaatcaagtgatgtgctccaagatgaagtctgagaggctaatgaggcaagcgagctcatctttggcacgctaacagacagcatattgtcccatggcttccagttcatattttctacttaaaattaaatactcaaacaattcttcggttgtgatccactgagagaccagtggcaagggagccactctgattacaatccagctttatggggctagtctgcaagacagggtgactgacaggaagccaaaccacataccaactgatgagctaaagcagggtgatccaaacaagtcaggcagagaaaacatcacaagaccccattatttggcaagctgaagcactgtgagacattgctgatggctgagaagtgacagcagggaaggagaaacaaactaaaaaaaaaaaaaaaaaaaaaaaaaccctagagaagcacgaatgctattgaataggcagagctcgatttgtgcaaaaatgtcatgtagtccttgaggcagaggcaaaactgcacagtgacaggtcttgtaggcagcggccatagctggagactaacaaacagttcgtaaatattctccacggcttgcagtgcaagtaagaagtttgtgttcaaccaagcttacaggaaaacattgacatcgagtcttttgaaaggtagctctccaatggtattattatctttttgctgagtctcaaagcttagcaatgaattacggagtaatcacttaaattgtaaattatagtttgcttagtataatcactaaattgtaattatgcacaattagtgagatttagcgctgttaattgttgaaatatgtaaatagcattcattctttcttttgtccaggtgtactgccatgagatttccaaacgtaaaatgtcatcgttgtataattgttgacagtaaaatgaaaataaggagaagagaacctttcacatacctgtggtgacatcacttctctgttttgcccttgctgagatccacccacagattcagacaacacatctctgtccctgaaaacattttaattgctttccccaagtagccgcaatgaccaggaggacacccttgattcactgacacatttaggaagcagaaagggcagggctaactatatagccagagctcgagcaagggaaaaggaggatgttagaaaaattttaagatttggtgcttgggcaaatgtttagatggtgaatccacacatagatacagggcaactgtaatctactatttcaaaccgacagtaacaatagcttctaccttcccaatgccagcctgctgctgctttgaattgcatttcaaaacaatctttggtagaatgctgtaagaagtataacagctacaggatgctacaatgtgttacataaaaatctctttcaacagtctgaaattattatgaaaacacaagctatacacatttaagcactttctatagggtatctcaaagacttcatgtgttaatgtgtattatatattgccaaggaatgaatatatgggatgcaacatcttgacatgtccaaaacttatttggttgcatatctcctctatggcattttttacaaactaaaatttcagtgaaataggcttcaatcaatcactttctgttttataatttagaatttgcattaatctgaatgggcttccctgatagctcagttggtaaagaatctacctgcaatgcagcagaccccagttcaattcctgggtcaggaagatcccctagagaagggacaggctacccactccagtaatgttgggcttcccttgtggctcacatggtaaagaatccatcccctggagaagggaatggatatccactccagtattctggcctggagaattgcatggactgtatagttcatggggtcataaaaaatcgcacactactgagcgactttcactttcactttgatctgaatatgtatgtgtctctttttctagactatattttcttttaggagatgagtgggatattgcctctctctctattgctgggatataacacaattcttccccatagtgggaactcaataaatgtttattaaatgatgataattgcattagggtaattataaagctatgccaggtggcccaatggtaaagaatccatctgccaaggcaggaaatgcaggagatgtgagttccttccctgggttgggaagatcccccggagtagaaaatgtcaacccactccagtattcttgcctggaaaggtccatggacgaaagagtggggcaggcatgactgagcatgcacacataattctaaagctactagcaaatacggaatagatccaatgctgatttt

SEQ ID NO: 37988 - DNA, 3590 bp, Bovine  19866880465541
  misc_feature (1)..(1): n is a, c, g, or t
ntatttcgtcccctaccagacagttctgatcatgatatgacctagccttctcaaggagtctctcacaaacaggaggtgatggcctgagtttctgcacatctacaagacacctgtctgatcactcctttgcatatcattccatggcaaacaaatattgccttgctgaatatgtgagcaaacagtacaaagtacacatgctttctaaatccaagatctagactccattattgactgaacaggggcctctgaggcccatcagctgtctagaaggccccatgtcaggtatttccaatctatgtttctgaatcactggatgccacgttacgggttctccagagcttccctagtggcttagtggtaaagaatccacctgcaatgcaggagacttgagagacacaggttctatccctggatctggcagatcacctagagaaggaagtggcaacccactccagtactcttgcctggagaatcccacagacagaggatactggcgggctacagtctatgtgactgcagagagtcagacacgactgagtggttaacactaacacttaggcattctccaaacttactgattctctcattccagggatatcatgaatactcctgggtctgtatttcttgtttggaaatcagacattcacttccttctttccttgaaaaacatggtagcttgcacctcaagaatggtcataacagacttaaagaagcaccacaacagaatctttaataaatatggagatctctccaaaacagttctactcttttacctttctttggctgaagtgattaatgctgtttaccttggccatggaattcattcaggttaatcttaattttctgttcatggtttgaacagaggatacaacttccctagattttcttatagtccaaggaaaagtctatgcattgctgacatatactagattaatgcattggaccaaggtaaatattgataagaaaaacttaaaaagaaattcacctggattcctaaggtaggaccaaatgatatgtgatttgtgcagctactttagtttggagactatggggatgagtttaccagataaaatacaggatgtttatttaaatgtgaatatcaggtaaacaacaaataatgtttttcacataggtatgtcccgtgtaacatatgatgcatacttacattaactgttatgtgcaatccttatttttatttactatattcagcaacttaatgtgagaggaagagttgaagtcaacattgtagtatggccacattctgtttctcaaaatcctgttgatatttgtgtaaatttaatactgcatgaataaattcaatgaatttgaactcagcctctttggactgattactcagtaaagcataccaaagccaaagcattgtaggaacaaaagatggatatttttccatcatcacttacattaaagtaagtttttaataaatctctttcaaagtatgcattgatacacatttatttgtgtcttattttatgcactttaccctttacacctaaattccatagaattcagggacacttttgcactcagcttgtagaaagtgcttttaatattatatctgcctaataaatattttggaatgaaggtataaatatattaataaaaaatgaattattacacaagaatactattactgtcacatatataggatatatattttttttaatcaggataatttattcacaattaaaacatctgcatgtaaatacatttactgatgatcaactaaatattttgaaatatgaaactgatggttcatttaagcatgatgaattagagataaaattcaatatgatctggattaatatagtgcaacatctaagtgaggttagttagaaatctcaggaaataacttctaacatatttttgcaatttgacttatattggcttaatataaagggaatcaactctagagtatctgtgcaaatgtgtttttgagaatgaccaacaaaaatggggttagttactcaacagctgtgctttatagtttctatatatattttttctacatagtgattgctaaactatattgtacatttctacatctgtgatgcttttcctcatgtggctgtagagttgctgaaatagagtgagtgcttcattattacatgatctttgttgacaaactctagtcttgggtgatttttactttatcccaaacagtgctattattcagtattataaactccattaaaaaggtgtggtttttatgaattaattgtaaatgaattttctacttccatctttactgacttgagaagttcttctcagggagtgaagtcagcagtgtgtagagtggaaagccacctttttctattccttaaatatatgaacagtaaaacaacaacaacaaaaaaaaaaacaccacagcttaacaaaggttcctctaaacaacacaccaggatgttggagaattccacacatcagtgcctgtaaagatgggtgatttggaacacacagaggagacacaaccaagggaacaatggagtaagtgcctacagtctcgtccctctgaccatgacagctgagcccgcagctttagagaacccaggagcatcaaggtaggcagcacacatgactctggcccccgaccctctgtggcacccacagccacagataactagggcagcagtggcaatggggtctgggatcccatccgctcagatgttgagatgcccacccccaggctcctgaactccatccacagtagcggagccttcaaaccttaaaacaacaggtacagtagaggtttctgaacagcaccggctcccctccaaagatcctccttaccccacaatcagtggcagactgtgcctgcaactcaggggattccagagtcaagggaatatagcccaccatcctggtgtttgacagtggctctggcagaagcaacacagccagaaccccagagggcaagaagtgatggcaaagacacggagtcatacctcttacaaagacagtagtggatgcaaagtgtccctctccaaccaaagacagcacagctaagagaaactaaaaccttatgctatcgcaccatctgctggaaaacaagagaaaaactccaactgccaatagaaacttcaaatcaccagcagagaagtaattcagcaagaaccatgaagaaccacagtaacactgtatcacagcaagaaaatgacaattttccagacaccaaacttaaaatcatagaatactgcagtgtaactgatacggaattcaaaatatgtgtcattaagaaattcagtaagcgaccaataaactcaaaagggcaattcagtgagcactggaataaaattaatgaacaaatggcaacatttattgaagagattaaaaatctaaagccaaacagaaattctggaactgagtaactaatagatgaagaatgcattaaaagcattggaaatagagcatattgtgtaaaagggaattagagagcttgaagagaaagctagaaaggatacatgtagaagaaagataaataagaagtaaaaaaaataaaaaaaatctacaaggtctttctgaaacttttagggaagggaatatctgggtatcttataaggagaagggagggg

SEQ ID NO: 37989 - DNA, 2030 bp, Bovine  19866880674289
  misc_feature (1)..(1): n is a, c, g, or t
ntagtttacccctgctgctaagttgcttcagtcgtgtccgactctgtgtgacctcatagacagcagcccaccaggctcccccatccctgggattctccaggcaaaaacactggagtgggttgcccatttccttctccaagtttagccctactgactccatattgaaacattttaaggtataatcatttttaatgataccttctaagttatgcttctttagaatgtgcatcttaaatagtaaacatgaaagtattctagtcacattgaagagtaccaagcagtcagaggaaatataccagtttgtgttagttcctttagggtgacagcatgtgtaaggcaatgcagttcattcactgtcaggactttggagaaggcctctccttccctgcttatataggtagtggaggggatcatcttacaaatgcaatgtgacaaagaccagatgaaagaatattttatcagactgataatgtatatggaacaaagagaatgaaaataccccaagattgctcactggaaaaaggaaaaataaaaataatagtgaaagattttttaattctgtttaggtctagttctacctcagaacatctctccacctttttttgtgccacatttaagtgggaaagtgaagatgtatgtcagatttattttaacttaagaaaatggaaggtttgaagagagaagccttttgtaccaagtgtggtatagtctgcacctgtgtgctcattggtgtctgactttttgtgatcccatgggctgtaaccttcccctctgtctacaggtttatcctttcaagaatactccagtgggttgccatttcctcctccgggggatcttcccatgccaggaatggaacccacgtctcttgaggcttctccattgacaggcagattatgtaccactgagccaccgacaaagctgctggtgtagactgaggcatatttcgatactctgaagttagaatgtataacttggtgaattgtgtataattggtgtgtatatatatatgtgtgtatatatataattgtgtataatgtataattggtgaatctttcaggatgataatactacagatggactttgaatatgtattggtgatttcatacttttaagaaagaatgtaaacattgaggaaagaatttaaagaaattattctaagcaaacatttttaaagtacctatatcattatcataaaagaaaaaacacaatacatatccttgagaaacatattattgtgggctctatctgctctgtactctcagggaattacaatcaaattcatgataatactattgagattgaatattacaaatatttgcaaatgatatctaaatgtatagatatgtagagatcttatacactaattatatacattttatcatttcaaattaagatttctttaaaataataatgaggtaaagtctacttgaaaaaattttacttatatacacaaatgtcattcatagaaaataatagtaaaaaatgttatctatcttatgcaatgccatgttatacagtaaattctgagtttgattcccagatattgaacttaagattctctttcacatttcactggaagagaggccccaaactctttactgtaattacttcttttttggttctgttagaatcagaacataatgattatggataccttcacttctgacaataacatgcaatttagctaaaggaatatgacctttgtatgagggagaatagattttctcacatgttagcagtaacatcttggtatttgaggacatttgcacacattcatgaagaataatgtcttctcagtgaaaagtctatgcatcttagaaaaaattagtatgatagatatactttctaaattgacacatgaaggagtgtttgggaaacttgccttttgcattgaacctttaataaaaaggttcatttgttatttaaatcttaagtttccttcatgctcaatttgatctgagagaaaaggtttaaactaataatgaaattaccttattctaagacaggctttacaataaaacttcctgttt

SEQ ID NO: 37990 - DNA, 1758 bp, Bovine  19866880814846
  misc_feature (1)..(1): n is a, c, g, or t
nattgatgttttccatatattccattgggaaatagttttttcataaaagctttagattcctgaatttaataaaaattccagaagagggagatgtttgctctcaaataatttttttttcagtgtgaatgaattgaattttataaaacaaaggaaaagaaaactatatgtcatctttaatatatgagaattatagatggtaaatctctgtggttgttaaaagtgtatcttaactctgtaatatattataggtacttttgctgtatgaggttaagattttgtatcaatttatttgtcttaattatgtttcctaaaacatgttcctatttattcaaacatttttatagtgtcttatcagttcagtctctcagtcatgtccgactctttgcagctgcatggactgcagcatgccaggctgccctgtccatcaccaacgcctggacaaggaagagtttgagagccctccttccttcttattttgtcattatattcttagtcataatcgaagaatagttttacagtgtcaaatatatatccacatctatgtgagaatattcctgaaaagaatatgagaaaagaatgctcaatatagagatgtaaaagttcactccactcatatagttatttcaaagactctcaagtatattcaaatacaacatacttttgaatatattaatcacctagtagtttaatcacctggtcactagctgttacactttaatgtaatactccattactccaacacccataacactggaggacccagcctggctttatcatgatgcctttatgtctcactctgtgtatcccactactttgcaattgtgtttactgcccagaactgacagaacactaggattttccccagaaaccacttatttatcctgaatttatatcttgcgtcttcccctcttgggaacttttctttctcacactgttaattcccatacagtgtgttttatagtgcattttacctgccataatcagagaactgtaatatctttattatactgacaaattttttttccctctactttgtcaattcacggggcctgtatcgctttgtattgtatcttggaatatcacgtagtattcactcaataaatagttaattattttatgagtttgtgctatcctccttacatgtcatatactcctatcttaaagtatccatgcttttgacacactgttatttatgttatgttcatttttcaagtacaagctcacattttcctccatcactgaccacttcaactcattattccaatcatccttgatgattctgtactgtatttttagatgtatctattttaaacattccagtgcttagcatttatacattatcgtctgttgcttggtgactcatattgtccttattattagatttcagctcttcaaatcagtaatacagaattatgcttcttatgaatctctaatggtttccaggtcagaactagatgcaaaatatgtgctcaaaaaatgttgatgggtttattaaaatgatcagagagaatgaagagatgacacatggcaagtcgtattttaaatgattttatacaggggaacaaattttagctgtcttttaaaagtttcaaatattaggagacaaaaatagtgcccttgaacataagtgatagacagctggctgataatgtgatgatgaatcatttgacactcctttcaatttcttcctttctaactcttaatatgggatgtgtgctattaatcagaagcagagtcctgcatagtttgtggggtgga

SEQ ID NO: 37991 - DNA, 1772 bp, Bovine  19866880872355
  misc_feature (1)..(1): n is a, c, g, or t
nacttctgaccttattaacatatacatcctttgggttattgtattcctgcttatgattagagagattatgtctaggatgtcctaaatatataatagtacaaaccctcagaaaagtccatcctaaaagacatttgctgttgtttttcagtcactaagttgtgtccgactgtttgatatcccatggactgcagcaccccaggtccccctgtccttcactatcttatggagttcactcaaattcatgtctattggatctgtgatgttatctaaccatctcatcctctgctctctctttctccttttgccttcaatctttgccagcatcactggtaaagaattcacctgcaatgtaggagaccctggtatgattcctgggtcggaaagatccactggagatgggataggctacccacttcagtagtcttgggcttccctgatggctcagctagtaaagaatcctcctacaatgtgggagacctgggtttgaaccctgagttgggaagatacactggacaagggaccagctacccacttcagtattctggtccagaattccatggactgtatggtcatggggttgcaaacaatcagacatgattgagtgacttccactttcactttttttgccagcatcagcgtcttttccaatgagtcagctctttgcaacaagtgggccaagtattggaccttcagcatcagtccttccaatgagtaaccaggtttgatttcctttaggactgactggtttgatctccttgctgtccaagggatactcaagagtcttctccagtactacaattcaaaagcatcaattctttggcacttctttatactctgactctcacacccatacataattactggaaaaatcatagctttgactaaaagatatccctctacttaaaagtacagatgtatcacttcaaacactccagtaagttttagtattactaaatgtcctatctatagctctagatgtatatctcacatatagaatttgaaaccaggaaaatcatttaattcttaaacattgtgaattataaaacacttcccaagattcaaatataaaatgaaatatagctacattaggatgatatgctgttaaaaacaatgattttgtaaaattcatatttacaaattttaataagaaacagtttcagagaaatgtttaataatgtttgagttgtttgtataagaacaaaatctgtaaatatgatacaataaaaagaaagaatattatataagtaaacatgttatatataacatgttttcatttccaggtatgagaattagatcatatttacctcatgggtttgttttttttttgcataaaaatgatagtgtgagtcaacaaatatgaacacacctattattgtaagaatgcccattcttgtatttaaagatctctttagaagtttcaccctgctttgacaatcttcaaaaaatacatattctgagagctgttccagcaatgaggaagcctttcagcatggggctgttatcttggctggcaatactgatagctctgcctgcaataaaaagccactgctgggaaaaaacatgtagtggtccttgaggtttaaatcttactggcaaacagaagcctattttgtgtgaaagcactaggagaaaagattccaggcagtgggtaggaaatggcttaccttaaaatgattgcattttacagagagaacatagaaatctatagtatattgggcttcctctgttgcatgtctagatcaaaactcctaacaatcaacatgacactatat

SEQ ID NO: 37992 - DNA, 1374 bp, Bovine  19866881007316
  misc_feature (1)..(1): n is a, c, g, or t
ncatcctgctctgcctgatagcctatttgataggttgctctatttcatagcctctgtttgatgacaggattcatctgtgtggtaatcttctctgagattttaaataaagagaacaagctcttattatgtgattttctcccaaataaatctataagttttctccaatggattttgcacaatagggcacagcaaggatacatagatgtcactggttgctttctgtaactgttcagcttatctcttccttttcatgcctacccccttcagaaaatgacttcccccttcctatcctagaactattcttcatctttctttttctaagagttaacatttactctcctacttttactatgaccaaaacagtgaagaaattgtaagaaaaattaaagatatgggaaaagaaaatatcaggaaaacttagccttttttaatataaatttatttatttaacttggaggttaattactttacaatattgtattggttttgccatacatcaacatgaatccgctataaatattatttccactatacaggactcctttatggaaaaagtactttctgagaatacaagtgataacaaaggcatgtggcatagagtctggtaaaaaacaaacacttaaaaatcagatgaaataacagcaatgtataaaaaataagataaacatatagctatacactgtattgtttcatatttttaaaaaattttaaatcctattttattgttttatgtttaaatatttgtttcacaaatcagcttgtatttattctttgattatgtatattctatttttaaaaataaacttgctgttgtttcaatctagataaataatatctcacaacagtgtttagcaatgcagaaataatcctaaaagggcaaatgctgtaactcaaaagttaattacaagtcactcaagctaagtaattctaattaataataataatatgacaagaaatacacttcctttgcaggctaatattaagacacaaacaaaacacgttattctcttttctgatggaagttttattccatgtcaataaaataactgctttataatctgtggggctatttatcaagaagagcacaagatatacttgaagcgtacctcttcttttttaatgatatgatagtagatcatactagccaactttaagcttcacactggatctttcatgcattgcattaaaattgatattttgacaacataaaagcttatctgcattttatagtcacttaataataatatgagaacctgaccaggccaagattttgccttcttcatggagataaatgtcttaataaacctccctttcatcttcatctaagttttacatgtgtgcctggtacttcattgaatgcagagaacagtaaaa

SEQ ID NO: 37993 - DNA, 1792 bp, Bovine  19866881092568
  misc_feature (1)..(1): n is a, c, g, or t
naacaactttatcaaccacaacaaaagtgcagtgagtgtttttttaaaaaggcaatttgagtcctttaatgatcttttcagttaatattaatgttaaatattgaaaaaccatgtcacagaaagagtttagataaaatggcttgtccatgacctctgcccatctctcaggtaaaaattcaacagtaaaaatgaattgtccttggaatgttagtcttgtctccttagtaaaagtcttagtaaagactagtaaaagtcttaaaactaggtcaaataaataaatatgataaatttaaatttgcaatttaaacattatcttagaaaaatagcaagttaaatattattttagataatttgatctattaagagcatccctatttcaaaagacccctaaaaactagcagcttcttggtttgttaaagagacatcaaggaacagaggatcaggtgctttatttaatcacatggaaacataaaattgcagactgctaatggagacagattcagtcaaatgtaaaagcagaaatttaaacttcaggttatttttcattttacttaatatttattttatttttaacaagttgtatgtactttagttatatagaatgatgctttgattacttatactttgtgaaaaggttactacagttaaactaattaacatatccatctcctcacatagttatgttttttgatgggatggtgatagaaactaagatttactttcttagcaaatctaatgggatcgttggatggcattatcaactcaatggacatgagtttgagcaagctctgagagatagtgaaggacagggaagtctggcatgtggcagtccatgggatcacaaaaagttggacatgagttagtaactaacagaagcaacatattaagtcaccatgctgtactttatatctctagatttattcatcctacataactgaaacttcgtactgtttgatgaatctctcctcatatcccccaccttctcattgttgatacccagctataggatgctattatgatttttaattttttatattccacatataaatgagatcatgtggcatttttttctgtgtctggcttatttcacttagcataaactcctccagattcatccaagttgaatccagtgctatgttggtggaaatgtaaattggtataggcattataaaaactagtgtggcggtctcttaaaaaaaaaaaaacaaaacaacaaactattgtatatcttcatagtatacaaaatactgtatatcttcagagtatatccaagggaaacaaagctagtactctaaggtgatatctgcatttccatgtttatcacaacattattcagaatagccaagatatggaaacaacctgagtatgtgtcagtggatgaacagataaagctattcttttcctgggattatagccagatagtttgagacagaaatttgcttgttcttttgacactgttgcgttttgctgtatcaaatatgtcgctacatagactactaattctacttttagcaaagttatcatttttcaaagaccagatgtcctcaattacacactacaacaaactacatacaccttaatttgtggtctggcctctctccagttgttattccctcatttttcctttctgacatttgaagtcttctcaatctaatcaactaactgtaattccagagcccatgcacaaagcatgatgacagtgctaacccaacacccttcacttgtttactccataaaactgagattccatgagtaaaaggctttcatgagaagtttttcatttccaatgact

SEQ ID NO: 37994 - DNA, 911 bp, Bovine  19866881128855
  misc_feature (1)..(1): n is a, c, g, or t
ntgcattcatccatccatccttgtcgccatccattcatttatctgcgtgtctacaaacctacacatacattcacttacccccaactcacctatacatttgaccatataccttcccactaatcttatcttttaatgcatctaactatatacccagttggagagctgcagaccatggggtagcgaagagtcggacacgactgagcgacttcactttcacttttccctttcatgcattggagaaggacatggcaacccactccagtgttcttgcctggaaaatcccagggacgggggagcctggtgggctgccgtctatggggtcgcacagagtcagacacgactgaagcgatttagcagcagcagcaggcatatacccagtttattcatttttaaaatacaaaaatgatagctaatttatagtgttgtggtaaataattaagatgggaaatgcatagtaatgtacataaaacattaaaggttaccaaataaatattagctattgttaatgttatcaaaatatttttcaatttttacaagaaatgtatcactctcaccctttattcttatctacaaaacccatattaaatcattttaacacacaaatagtttagttttttcatttctaaataattctcagacctatatttcaaatttttatatttgcttaaagtataaaactgttatgatatatgaagcaaaataaaattagaaggctagtgtgaaaactcacatacttgaaattcagatactggacaactgtatatatgcttaaaatggccaagagtataaaatagtggcagaaaaacttgactgtaacaagttacacagaaatactgtgaaaggatacccttgctcagtgatctgctgtgtgcatgtgagatttatttgaagtagagccttcaaggtaatat

SEQ ID NO: 37995 - DNA, 1168 bp, Bovine  19866881136090
  misc_feature (1)..(1): n is a, c, g, or t
naaattaatttgaacataatccaccaattttaatatcattttcactcaaaactaccttagcctaatccttagatttaatttgaataacattaatttttaacaaaaaatttttgttttattatatttgttcggattcttgaagtgttattatactcgtatgaagttgatgtagtttcgatctcttattctaacatcttttctcaatcttaatctggcatgtatttatcagtagaactttcaaacctttaattagattttgtttacatgccattcttaggaatgttactgaatttccaattttagcctaaacttttacatgataaacctgtctgataacatgagaggtatttgtaaaactttcacgccatatatatttttatactttgataaaataatatatgtcatcttgtttaaaactattttatttcattttcattcagataataaaatatgtttcagggttttagcatatttaaaataaatttattcagaaaatgtatcaagtgacttttcttgccctctataagaagatagataaagcactgttcaaaaataatggaaatatatattaaaaaatcatccaatattgaacacttgaccatagttatgaattcagttgttacagtggatagagtcaatatcagtgggcagagattatcaagaaactgaatcattattagatatcaattataaattaagctcactggtcagagaatgtgtaaaatccagggctataagattccagaaattctaaaatggaaagaataatatcatacttaatatacttataaataatctttcttccaagaaatagatatatcaaagtaaatactactaggatttaatctcaaataatgtattttataatgattcaaatgtttacttgtaggtctgaactttagagtactattcctaattactttcttcattttatacattcatgaaattcatattcagaaactgttattaaagtaccagatacacatacagtctgagattcaaatctatacaaatacctaaggattatttaatgtcatatgagttcagagcagtaaaataaattttttcaataattatgacttattaactcaaaacatacctgtttagaagtcccattaaatagtcttttcaaaaattgttcaatgaaggaatgtaagttaaatgtgga

SEQ ID NO: 37996 - DNA, 901 bp, Bovine  19866882010194
  misc_feature (1)..(1): n is a, c, g, or t
ncatttttatttcattcaatagttgataatcaattcttcaaacatgattttcatgccacattaatcaacatttattttcattttaataacagaaaaatcatccaaccttaataaaaataaaaaagaaaggtaatttctagagtaacaattataagaacaattgccatttcagtgatgcagggctcagaaggaatctttaatgcacctaaaccttaagtaccagaaactgtgcttctcaggttaagtatcaacacagagaatctgatttccaaacatggatcaaatatccctctgcttttaacatctgggaaactaggaaacagagaggaaacacagatgctaggcaagcacttctttactttgatcaacatcctcattcagagaaaggctgagtatatattccaataatgtctgttgtataaatagtcatgtaatatagggcaaactgagaataagtgaaatagcaaatatggatatgatcaaaagtattctataaaaatgtaacaaatagttattctgaaataagagtttcaattgttatctctattggagaaggaaaaggcaacccactacagttttcttgcctggagaatcccagggatggtgaagcctggtgggctgccatctatggggtcacacagagtcagacacgactgaagtaacttagcagcagcagcaactattgcaggaagacaagattgttttaaaagtaatcttgtagtaaaagaaatatgtctacaggctgtattcataaaaccagtacaggtgattaaaggactgagtatctatgatcttaggatgccctcatgctgccactgaaccaactgcaatgtctacatttctatttcaaaatagaagattaaaaaaaacacacacacacacacacacacacagtgggcca

SEQ ID NO: 37997 - DNA, 1931 bp, Bovine  19866880138062
  misc_feature (1)..(1): n is a, c, g, or t
ntccctccccataccctctctctgggtcatcccagtgcaccagccccaagcatccagtatcgtgcatcgaacctggactggtgactcgtttcatatatgatattatccatgtttcaatgccattctcccaaatcattcccaccctctccctctcccacagaggccaaaagactgttctacacatcaagtgtctcttttgctgtctcatatacatggttattgttaccatctttctaaattccatatatatgtgttagtatactgtattggtgtttttctttctggcttacttcactttgtataataggctccagtttcatccacctcattagaactgattcaaatgaattctttttaatggctgagtagtactccattgtgtatatgtaccacagctttcttatccattcatctgctgatggacgtctaggttgcttccatgtcctgtctattataaacagtgctgcgatgaacattggggtacacgttttaattacatttactttattcaagcatgaatcttttgtctccttcacacaaaatctataaagcattgaaaacatttcaatcttaaaactgtggattggaaaactcaaagtagatcaatattaacaatttatacatgaaaaatgggatttttaaacaaaaaccatttctgtgaaattttatctcttcattctatacattttgtaatttggtcttatcaagtaataatcttgtgcctaatattttaagtactgaaaaacaaagggagacacaggagaattagttttgagccacaacttagtgttggactatcaaagcatatgaggttagtgcagagaataatttttaattgcaattggagaattgcatttcccatctgtttgtcagttgtcttatctatgcatggaatgcttttgtctcttagctgcaaaagtcttattaagtcattaaatttcatgattctgtcaaatgtaaggcatattttctgtttaaattatgccttggaaataaagccagttcttcacaaatgcataaaaatattttgccagcacctcttcccatgaacacaggtatcttcaagttgtaaattatttttaggctgaaagtctgaagaaacattggcacagggcacatacatgagattccttataaagtttgatatgaaatataattatggtggataaaatacttttaaaatcatcataaactgaataatactctaaaaaacaaacttgtttaacagagaagcatggccttatctttgaaaacagtattttaagtacaatagtttataaagtcaagaaatgataagtatgtactatgtgcttagctccatagatacaatataggacaatactggcagctcttgttaaaattcatggttctgtatgatttaagatcactttaaggaaaagactggttaaaaagacttaacagtaatgaagtaacctaatgtcagacattaagtttaaggataatcactgtatttagtttggagatcatgtcttactaggttaaatctctactcacttatttcaagactattaaattaaaaagtgaaaaagaaaaaaaaaaaaaccttcttgattctagtaattagtctatgtaaaaactttcattccatacatattgtcagttagatagctatcagtatatactgataaactaaaagtcatttcaaaaaatgctagaatgaattaaaatgatttatgatgaaagtgagatggaacagatgaatttacccaaaaatattgtgtgactcagttttgaataatcatatatttctgtcaatttacaaaaattatcattgaaatattaataagatggttgaaatctttttggaaataacattgtgatcgtctcaaagtagaaattatttgaagatctggaactatttactatgaaggaaagcaactttaaaatacaacattgagtctataatattc

SEQ ID NO: 37998 - DNA, 2477 bp, Bovine  19866880565549
  misc_feature (1)..(1): n is a, c, g, or t
naaaattttaaaatgttcaatttaagtcaataaatagtaaggacatagagtaagcaaatatgataagtatagattatgttatgtcatcttcattcactaagttgtgtctgacgctttttgaccccatggactgtagccccccaggctcctctgtccatgaaattctccaggcaaaaatgctggagtgggttgccatttccttttccaggggatcttcccaacccaaggatcgaactcacatttccttcactggcaagcagattctttaccactgagctacctgagcttcccaagtataggtcaaacatactaccaatggcctctataaataaataacatataaagtaattaaatctgtctctcacaatacgttagcctgtattgtgaagttaaataagatcttgccttgagaagttaaggcctaaaagtggtggtgatggtacaggggacacatatgaagggagtgggaaataattgtctttactgcaataagatatgactttaagataaagtagcattttgcctaatagatttgcagaacttgtttttacttgaatccaatccaaattttattgcaaatttcatttatatttaattggaaagtttccttccatcacagggacattttttttttccctctacattcctgcacccttcccatgcaacttcagaatatagattatacttaggctatttatgaatagttaaatttaatcaacaaggtaaacactcacggagcaattattgcaattagccactttgatgttaatcatttctatttgtgtttttcagccttcacttcttatgtctttaacagaagtcactttactgtccttatgagatgccaactttttgagtcatgaacatcggttaaaaataaaaggggatcaccttgagctccaaaaatgcaaatcaactggaaaaacaccagctggccttaatcattcaacattgcagtttagtctgcatcatgtcagcaggctggcaggtattctgtatatagaaacagaacttagcaaatgtagctgctgttactttcttgtcaaaagtggatttctcccttccctagctgtatccaaacacacacacacacatacacatacacacacccattacacacaaatatacatttggagaatactagtatgttagtgaaagttactaactagactaagggcattagattagaagatctactcttcaattttgtactaaaatagcttaaaaggccaaatgtgctttgctgtattttcaataaattatcagtagcaataaaattttaaaagacaaataaaaatcattaattacatactctttccttaagagaaatgagtgccagatgatggtcatgatatttaacctgaggttatgctccagtttaaaaatattcagctgcaaatcactctggtaaaatctcagtatgttctgattctctccctatccattttttgtgtccttatttttaaagcatataataaatcactgtctccttttctatgttactctgtccccaaaaagataaaacaagataatatatgcaaccccaaacaaccatatcttataataagtaaaggttaaaaccatttatacagtgactcatatagacatcaagtgctgcaaatatatcaggcgtatgatgctatcatttgggaaattgacccactgtaattttccccatgaaatgggacaccatatgaaactaaacatggcagaagcataaaacatatcctgtcatccatgagtaactacctctatcttttatttatccagttatctctcttttctttgtttattccctatattaagtcaccacatgtcatcacctggataatcagattgctgcacagtttcttcttttcacccctaatcttcagttgccccctttgattctgtaataacttgcatgaatattttgactgttgatctctcaaacatttctctataaaagaatagaaatagatgctttttggcattggaaatctctaaatatatgaattggaacaactctgagatgacatcaagatattaattcatatatttaaaccctcactgtagccaggtactgtttctaagtacagtggaaactattggaaatccagaccaattagtatgaagtttattagttttgaagcaccaagtacaattaatggagttactcaatatcaaagagcaaaatatgatcacatgcccttacaagcaaggaaaagatatacgttaaatatctgagtcatttcctgtatatcttatagttgttaatatttctggtgtaactttatattcaaaacagggaaatatcaaagatactgttagtaagtttcacttgattatcacacatcacatgaagtagactacataataacttgccaaagtgtgaaaattggatgtccctagttatttttcttactatatttaaatacatgcaatgtcactttactttgtgtattaagtttaattgtaatatataccaaaaaggaaaa

SEQ ID NO: 37999 - DNA, 1057 bp, Bovine  19866880594629
  misc_feature (1)..(1): n is a, c, g, or t
ngagataaagagtttctgtgtaataaaaattatgtggaagttatgagggattaaaaagtctctgacttagcaagtataactgaaaaaattaaagtctcagtcaaattacaaatattaaaaaaataaataaataaaactaaatctactaagggaagctataaggtcccagatcttgatcaaaattcatggatttcataactcatgttctttaaagctgactgttctgaggtggttatcttttccttgttgcttttatagtatcacagcaaagcaaagaaggtatcatgacaaatatttttataaacttattcaaaataatcagtcatatattaaattgcattgtaaatgacttaagatgagctgtgtttaatgaaagttcatatttataaaaattaattttgaactttagtatattgatacatgtacatttaataaattctacataagaatgcattaagcacagaaatgtaggtgattttttccaaatacataacttcttatttattaaagaaaagaacaaaagctcttaaatctttttatacattttatatataattcacacttttagcagtatttgcatagtgattattataatactaatatcttaaaagggatcttttttccaaagcccacttttaaatgttgcaccaaaacttcatatgctgtgataatgctggtttaatatattcctcacctgaattggaggcactcactcattactcccatcacatactctgacatctcttgtctaagaattgcatcttttctgatattcagtatttgacaggataataagagttaaccaaacattttcccatttagctgttgccaaaactcacccctgtctcatttttatgtttgctgtagaaatgaaaggatgaccaatttgctaataaatgagtgctttcccatcaggcacattacaatgtacaactatattgggatcattttttaaaaagaaaaagacttttttttcccccataggacaatgcagtcacagtttatgagctaaaaataagttctaattcagacagagcttttcaagcctttatctgtt

SEQ ID NO: 38000 - DNA, 1170 bp, Bovine  19866880705022
  misc_feature (1)..(1): n is a, c, g, or t
ngtgatactgatgattatacaggcaaactacatactcagtaaataatcctgaaaggtataaaatgtgattacattttttgttttattgttaaaggaaaattattgttggaataaaaattatgaaatacctattatttatacgtaaagcaacatttcccatattgtccaaatattgtcttacagataaatcttttctagcttggtgaaaataaatgaaacattaattattgtgtctctgatgcctgaaacaatttagctactttatcaatatgccttttgggcaaatcaccccagtgattctgtgattatcataaatgctgcacacaggcaatttttgcctgaaattgaagattacattattaattccacatagattcttcatcctaaaaatcaacctacccatgttttctcatctcaaaccaagtattcaaaattaatcaactctctgaagcatcatgtttagtgacaggacagtaatgtgtctgccataaccaatcagctgaaacatcattataaggcaggtatttcaaagataagactttaaaaattaatgagcaaagggagtaaaacatgtacatttcaacctttcttttctttgaaggatctaaagaggacagatatgaaaactcagtcttcttcaaaggtagttatttaaatttcaaataaactgttttacattgctaaattctagataaaattaagtatcatgtatcaatgtccttaacagcaataaatattccttctacaatctatttttattctttgtaaatctattttttacattaactccctctaatcctctacatactattttttcacattcaatacactcttcatcctatcaacatccccaaattttcttcatcctatcaacatccccaaattttcttcatcctgtcaacatcctcaaatttgttagctttcaaagactttatatcattagaagcatatgaacatatgctggtagagctaccaaaagcatattttaattattctaacctgttagactgttttctttttattattaacctagttgtatattggtatttgaagttcactttttgtaagctgcatccatttgcagagtacttgtttatccaatctaataagctctacattttggctttcatctttagaccatttacatttagcttaatatggctaggtata

SEQ ID NO: 38001 - DNA, 1456 bp, Bovine  19866880798763
  misc_feature (1)..(1): n is a, c, g, or t
ntgataatagttaacctagtgggtacaaaacggtatctcattatggctttgatttgcatttccctgataatggtaacaataagcatcttttatatgtttgctacccatttttatatcaaatgcaaagatattactgtgcacagattttctttcctggattttttctctacttgtaaaaggcatataagatcccttgacattaattgagttataaatttctcagaggcatttctgtcaaagctggtaataatttcacaggtacataattatattaagctctctttcaatctagtgtctaccagggacttgttctatttgtgaaaataaaaataaaaaggtgatgactcaagtaatttctatttcctgttattgaacaattgcgccttaatcttaccctcagctagtggaaaaatctatctacttaattttattagtaaatgattttgtggtatctgatcacatctaatacatctaataagaagatgatagatagcatttacatttccaggaaatatcaagtgtggataccaaccaagtattaattcagataatgtgagaaagaatttataatagtgctctggaagcagctaaaccaacaagcacagttttttactgattatgtcagcaacatgaaaagcaatattgttaaatattcagtagttaaaagaagtgatttctctagcattcttcttcaaaataaaatccaaagctcttaaaagctgaactagtcatataacagcaatggtttcccttatagcatttagatgaatggtggaaagacacatataaaagtcatcttaagagtttgaagcccaagcctttctcattattcttacaaattaaaattgtgtgagatttctactgtttaaaattgtattttaaagagcaaactgtgacatgggttgcttatttttgttgtttccaacatcagctgaatgaagaaaatagaaaaatatcaatatatagcaactccctgtggatcagctcctatagatccaaacaaagggagtcaacagagtacagcactgggaattcactattatccctgtgcttaattccaggcggacaggtccatcacggatacctgcttcagcctgactagtagatgcatgtcagagcaagagagaagcagcctcctctctgctccttggaacaatagacccagggagaagctcctctcaccttcatcgcaccatccagggaagctggaaaaaattcttaatcagctgaaatagcaccttgtacagcacaagaggtagaggcccagaagtcaatgtaccgccaaataaagcattcctggccataattgtacagccccatttttctaaagagtctataataaatgattctactgcttttccctgtatatctcagtcaccataaaattcatcatttatcattttgctcattatatgtcatctgaactaaacctcaccgttttccataaatttatttg

SEQ ID NO: 38002 - DNA, 1485 bp, Bovine  19866880811654
  misc_feature (1)..(1): n is a, c, g, or t
ncccttagttgtctgggaaaattaaatgatgcttaacttacaccatgtaacattcatatcatatatttactcatgggtgcgtgtgcgtgctaaggcacgtcagtaatgtctgactctttgtgacactatgcgctgcagcccgccaggctcctctgtccttgggattctccaggcaagaaaactggagtgggttgccatgccctcctccaggggatcttcctgactcagggatcgaacttgcatctcttacgtctttttcattggcaggtgggttctttgccactagcgccacctgggaagcccatatttatacatacattcaatatctaacaaatgtgaagctcacactaattattagacaggttaagtgtggggatgttttagatgcaattcatttcaagggaagagctcttgaaaaatgatacaatttttttaggttaaaaatggatcactgatgtgaaagttttcagtaaaaatgcaaagtatttaagtaacaaaatatttctgtataataaaacagctttcaaaagcacaataaagagatatataatttaatgaaatataaattcatcttcctactagatagcactaagacaacatatttttttctagaaaaagtacaaatatgaaattttaataaactgattaaattcaattgtattatgattcactttcatgtactaactagtcaagataaaccatcttaatgatcagaaatcatgttaaatagagcataagtaataaatttcctatttagccttctctaccattggcattttatcagactagattgctagcactcagttcagttcagttcagtcactcagtcgactctttgtgaccccatgaactgcaacacgtcaggcctccctgtccattaccaactcccggagtccacccaaactcatgtccactgagtcggtgatgccatccagccaccttatcctagttgtccccttctcctcctgccctcaatctttcccaacatcagggtcttttcaaatgagtcagctcttcacatcaggtggccaaaatattggagtttcagtttcaacataagtccttctaatgaacacccaggactgatctcctttaggatggactggttggatctccttgcagtccaaaggaatctcaagagtcttctccaaaaccacaactcaaaagcatcaattcttcagtgctcagcctttctttatagtccaactctaacatccatacttgactactagaaaaaccataaccttaactagacagacctttgttggaaaagtaatgtctttggtttttaatatgctgtctagcttggtcataactttccttccaaggagcaagtgtcttttaattttatgctgcaatcaccatctgcagtgattttggagcccccccaaaaataaagtctgacactgtttgcacaatttccccatctatttcccatgaagtgatgggacggatgccagatcttcattttttgcatgtgagctt

SEQ ID NO: 38003 - DNA, 844 bp, Bovine  19866880815070
  misc_feature (1)..(1): n is a, c, g, or t
nctttattatttaaatttggcatcactgggcaaagctatactttaaagttgtaagctttattatgctggtatatcaggcaaatgagtgtttgatggggtgtgctaatgtgagctaaaaataaaatcccatctgttcatgtttcaaaccacactgcatcaataccctgcatattgggtactacactaatttaatgaaacacaaataaaaatttgcttactttttaactctttctataacagtaaaatcctgctagttttaagaggaaacaattcatgtatgagtttctggaaggcaacatatttgcgtatttgtcaagataagatgaacataaataaaagtaaacaatccaatgtctgttttaaatccaagaaaaataaaatacttaagaatgtataccataaaagttgaatcatttcatcaagtgcttgaataacataatatgttttaagtaagtatatactcaaatatttttcacatatagaatgatttgtcaactggaaaatgcatatcctttgtgaattgttatgcttcctggctaagtaaacactatttcttcttttatttcactttcgcaatcagtcttcatatcctcttaggcatcaaacccgttcctaaaaattttctatgccgtaagtgttctggttggattctactgagtaaactacctgatgataaacagaaaaaattattcttacaaatccattgtgttgtttgctatatttccacaatgtacatttgctaaaagaatttttaaattaacaatatttaatatttgttatgggatattttattttcttatgatcaggagacacatttaaagtgaaatatatcagatcagatcag

SEQ ID NO: 38004 - DNA, 1283 bp, Bovine  19866880986078
  misc_feature (1)..(1): n is a, c, g, or t
natttcagtaccattcagactgtctttcaatgataggctcagctcacaactttatgagtcagttgggaccaatgttgtttagctctaaatctctggccagggccatcatgatgcagccatacatgagcagtaggctgccttatgcttataaactgatgatatatattttcaagtcctgagatactgccttcactattgcctaaacttcgattctctaatgataaaaacagtaactgtccacagggcaaattcttggaagtcttccgtcttcgtccatttcttccattcctttcctctggtcatgactctggtcctgtttctccttttactactccaacctcatcagaacacctgaaactcttgtttccatctgggggctcccatttccatttctcatataacctgctcagttaggttttcatggataatattggcaatctgaattgtgttcttcttgagcatattttgctcattaatctagatgaaattcaataccttcctcactgagtctgattcaggagttccatgtggcaaagtattgactctctgcacattgtgctgtgctgtacttagttgctcagtcatgtctgattctttgtaacctcatggactttagcccaccaggctcctctgtccatggggatgctccaggcaagaatactggagtgggttgccatttccttctccaggggattttcccaacccagggattgaacccaagtctcccacattgcaggcagttgcttaaagacatcaaaccatctttatataattaaaaaagaattaatgacatttaccacgaatattcagttggtgagccagccttatcctataagtgaaaaatgcattttgttgaacataacaattgcctaaatttaccatggcatttcctgctcagctttcaaataaattatacaaagtatgttttttcttcttttcataaatgttgactgattaagctaaattttttttcttagaattctcttttagatactgaaaatagggagagcttaaaatgaaaatgtcactaaataagtgattgaatttgacaacacatatatttgtcaatggaatgaaagtataggaaatactttggaaaagtaaaaacattaggtgaaatcacctcactaaatgaagaccaaagtcattttagaaagtatacaaaaattgttgaaataatgtatgatagattttttttctttttacaaatctaacattaacagtgaaaacatactcttacattggagaagataatgagtaggagtaacattttctgaaatcag

SEQ ID NO: 38005 - DNA, 1613 bp, Bovine  19866881001383
  misc_feature (1)..(1): n is a, c, g, or t
ntgttgcccttaacctgttactgaaaccctggtcccttcttcctaaaagaacttttaaatattgattgctttgccactttccattagatagagcatatggattataaattgtccttgttagttatcacttacagttcctgtgcaatcctaatatcgttctcattccaactacctccattaaactcacttctcatcatgattgtctatgaattcctctgttgtaatgagactagacacccggctagaattcagggcagtagttttggttgatagatgtaaaatcagagagaacaaaggatgaggtaaaaattcatgtagcaaagaatgttgatggatgaactgggttacatttaatacaaaaaagaagagattactgaattccaagtattgaactggtaaagggaaaacatttatttcacttacaatttcttctcagtatttctactttaggtttgaatatttaatgtcttctatttcctcttttatcaggaaatcactaatttagaacttgacagaagctatctctgttacttgctactctggctgtgtaaaattgacttttcaagagtgtaatccacttctgaagtaccccatgatattaaagtatctattcagttaatattaattaagtataccttgaaattttgctagaaaaaggattgcttcatagaaatgctgaactcagttcatttaaaaaaaattaattgtcctattaatggtttggggttattctcttgtggaagtgaataaaattagaactgaattatttattaaacaagaatgattcatagagctttaaggacacataattttaagagattccatttttcacagtctttgaaagatataccattctggttctacatttaagatctgcaattttgacactaaaagcacagaaaactttattaatctcaaaaatagacattggtatatagtattaataatattccatcaggccaaagtaatgtgtatatcatgaaagcatttaaaaaatttgtacacagaattaagaagaggtactttatttataaatgtctcatgaaagatacagtgactatttgaatataattttagttacatatttgcagccactttatacatagttttctaatgccactaaactgaaacagcatatggattatatttttagggcaacctaaaaattttaagtaaaaaaaaaaaaatcacaaatctgagtggaaagaataaataacattttctagcaatacagaaggtgttactctgttttaataatcatagtatggaatgtgatgagacaaaaaaaattcagaggaaaatgagaaaattctacatagggagtgtaaatttcaagaaataattcttattcacttacatgatgtcaaattttatactttgagatttatattttccacatgaaagtaaactttttatagtagcctagataattttaattttaaaatctcattacttcagtcctgtacacatattttttatttaatggtttggatatccaatttaaaatcccaacttcattaatatgtgtaaacacaggaagcaaaaatcagtaagtttattcagtgttagtggatgattttagaataaacatctgtttgagagaaagtgcaacc

SEQ ID NO: 38006 - DNA, 1031 bp, Bovine  19866881081748
  misc_feature (1)..(1): n is a, c, g, or t
nttttcccagctttcctgatgcccaatatgtttcaacacctaatatatacctgcagcatgaactgtataattgttgattcttaaaacttagcctagaatattttgagcccctaatttttctttctttatagctctcactccaggcttattttagtacaaagcatagagctggtattcagtaatacaaagtctgaagccagaatgtctgttataaaatcctagctctgacaatagctgtgtaactttcgttaagtctcctaaactctcttagtctctttccatgtatagaaaattgtgataataatagtatgagttcaaataagtaaaggacttagtgtagcgtttggtacattgcacataccacataaaatttacaattattattactattaccaaatagctattcctattaggatgaagaccagatacatatgcagaaatgtggaaccactgtagtcagaataaggaccttgaggttgggtaaaatgaagtatttccttataataaataaaataaagtcaaacaaaaatgtaggttaatttatgaaaaccagatatatgatgcacaattaaatgtaatttttaattgtcaaaaattatgttcatcttcactaccaccgacagaaaaaatacatggtatattaggctgaatcgttcactagtatgacttaacatatcttctgtttcattgtgtcatggctttggtgtagctgctttgacactttggatttagatcattgcaagaacatttagagggtataatgtcacctaatgaatcattaatactgctataacagcatgcttttccattatactttcttcctgaatggtaacctgacttgaccttaaagggttctgggaaataatagaatcatagctcatctggttgtacatatgataatagggacagatgtacatagatcattctttctatttcatcggcagtggaatggatccatttgatgatacccatcaagatgagtagatgtatgctatattcaatcactcttggggctccacacagctttcttc

SEQ ID NO: 38007 - DNA, 1276 bp, Bovine  19866881105076
  misc_feature (1)..(1): n is a, c, g, or t
naaatgactatcatcaaaaagtctccaaataataaatattagaaagtatgtggagaaaaaagaaccctcctacactgttggaaaaacagtatgaaggtgccttaaaaaactcaaaatagaactaccatatgatcctgcaatcccaatatatccaaagaaaaccataattcaaaaagataaatgcaccccaatcttctttgcagcacatttacaatagccaggacatggaagtaaactaaatgtccattggcagaggaatggatgaagaagatgtgttacatatatcaacagaatgactcagccatagtaaagaaagaaataatgccatttgaagcaatatagatgggcctacagattataatattgagtgaagacagtcagacagtgtaagacaaatatcatatcactcatatatggaacctaatttttaaaatgatacaaatgaacttatttacaaaacaaaatcagactcacagactgtgtcaacaaacttatggttgctaaaagagaaagacggagttggggagggataaattaagagtttgggattaacctagaaatactactatatatgaaatagaatatcaatgaggatctattgtatagcacagggaactctactcaatattctgtaataaccctatgggcatagaatctaaacaagaatggatatatgtatatttatagctgaatcactttgctgtatacctgaaactaaaacaacattgtaaatcaactatcctccaatataagacaaaaattaaattaaaaactcaagtaaatccttaagtctccaccagatggtaaagaatccaccttctaagcaggagacaggagatataggtttgatccctaggttgggaagattcccctggaggaggaaatgataacccattccagtattcttgtatggataatcccatggacagaagatcccagtgagctatagtgcatgaggttgcaagagttggacatgcatattcttaagtaccagagagaacatttactattgggctaatgaaaaatcatcacttgcctttgacattttagtctgtacaaaattgaagacattaatttgtcacaacattaatttgaactggattttttaaggactagaccaaactagccttttataaagaaactaggtaaacaattttacctatgaaaaatcaatatgataaggcttcaatcagttcagttgctcagacgtgtctgactctttgcgaccccatggactgcagcatgccaggcctccctgtccatcacaaactcccag

SEQ ID NO: 38008 - DNA, 1576 bp, Bovine  19866881231967
  misc_feature (1)..(1): n is a, c, g, or t
nttcgatgcacgatactggattcttggggctggtgcactgggacgacccagagggagggtacggggagggaggagggaggagcgttcaggatggggaacacaggtatacctgtggtggattcattttgatatttggcaaaactaatacaatattgtaaagtttaaaaataaaataaaataaaaaataataaaataataataaaaaaaaggaagtacaatatgttacattaaggctgattgcctttctaaaatctccctctattttttacaaattcttctctttttcctatttcttaccattcttctgtatttgtctgggactgttttgaaatattttatccttagcaaattatcgctttatactaaatactaggaaacaattactcacccaacaatgctgatgaacagcgaagttacaacccttgctcttctgtggtatttactatattctgtttgtttcaacaggcttgagcgcatttctgattgcatgtcttgctctcagtccaagatgatcatattccaaagttaaactaatgtatttcctgcccaactgattttattctctagttatccctacatagttaattttgcacacttcttctttcttgattattaaaaattagagaccttggcatcattttatttctttcctttcattattttcaggtaataatcttagagaaaattgaaataatgtttttcctttgagcatccttggaattgtaccttatttgtctattttctctttgccctcttagttctcatttttataactgcatccagtggtttttctacaagctctctgatagaattttcttagaccaatttatctgaaaccactagtaagatactttttttttctaaacaagctttaacttatcactttctgtatgaagatgtatgagttttcttgtctgagtctgaaaatgttatttatttattatttggtatttattcaattttggtatttattattggtatttattcacttttattctatactgtaccaaaactgccctaattggaaagattactcagcaaaacaacactgtttctggatatatacattcttcattttcacagattatttacattcttaagactaagtattttcttactttaatgggaactttattttctatgtttcagattaatatctaaattccttatgtactacctcttgcagtcactgttctgttgcatatttgtaaccctcattgcagttataatcagcaccaaattgtattactttgttgtttctagttttacaatatttcatcagattgttgactatatcaaaatagagtaacataatttgtttttggttcccctatagcatgaattgtatagagagactcttgatgttttagcagattaataatctatttatttagaactcatttatatacaccagctattcacaacctatagtggcatcttggaaaattgaatctagaggacagtcactggttatctcaagcagaaaatatatctttgatagtttacaagtgacattcttgtttatataatacactgtcagaggaaaaattgtggggactgtggaaagatcaaaatg

SEQ ID NO: 38009 - DNA, 703 bp, Bovine  19866881233642
  misc_feature (1)..(1): n is a, c, g, or t
natatgtcatattgcatggaactaccttcctgaagatgttttaaaatattttttcagagttgacataagatagcagatggataatctgcttgaaggcagctgaggtcatatatcattaagcatcagggaaattccatatgtaaccaaacatctgcatttgcaaaatggagctgaaagctttccccccccaaaaaaaaagactccaagcccaatttcttgccaatttaacatctggaaaatgtagaaaaggtaatcatgaaaaccgagtcagtgaatttttgagctgaaaggatcctaagagatcaggctttttaactaaataattttgcagatgaaaaaacagagccaaaaaaaaaaattaaacactttgcgtaagttcatgtaactagttactgacaaaagtgaagctgagattcatcttttgccagtgctttattatcatgctgccatccttagtttatccaacttactaaatactgtggacattatatagtttggacattagggctgtattctaaatgtaataccaaagttcccaatcattttaaacaaagtttctgtaattatattggaaaaacgacagtcaaaattatctttcatacatggccagagaatgctttctcctgaaggaaataatattaaattaggataacaagatctttataaaacaaaagtttccatttgcagaattaaatatttagag

SEQ ID NO: 38010 - DNA, 1606 bp, Bovine  19866881380328
  misc_feature (1)..(1): n is a, c, g, or t
natagtttagaaaaatgaatgggttatagcattaaatgggcttccctggtagctcagctggtaaataaccctcctgcaatgcaggagacaccagtttgattcctgggtcaggaagatctgctggagaacggataggctacccaatccagcattcttgtgcttgtctggtggcttagatggtaaagaatcagcctgcaacgtgggagatctgagttcgatcgctggattgggaagatcccctggagaagggaacagctacccatccagtattctggcctggaaaattccatggatgatatagtccatggggtcacaaagagtcagacatttctgagtgacttgcactttcactctcacagtattatataaaagggaataaagccagtacagtcttcccaggtggcacactggtaaagaatctgcctgccagtgcaggagatgcaagagatgcaggtttatcccctgggtcccgggatgatccccttggagtagaaaatggcaaccctctccagtattcttgcctggaatatttcatggacagaggagcctgttggtctacagtccatggggttgcaaaagtgtcagacacaacttagtgagtaaagaataacaactaagaaatcacaacatgagtactgtactcttataagctagtatggaagttttcaatgtatatatatttcttgcagaaaatttcttttgtgacaatttgaattacccaagcaaatatcactactaacttttattttttattagatgtataatatgatacttttccttatcctaagaataagacatattttctcacataattcatctaacaacatgctttaagaaaaagtataactgcttaaaaatgtttttccctgaaggaccagcaccatatgttcataaacaattaaacctgaaaatattttctattttttttctcagtggtttatttgttgatttttttgaagcctaaaatagattgcaattactaaaagaaaatggttttgaaaaataccaatagaagttgtctggcatattggcttttgcttcatcatgagcaagtaccagattaatagtggaaaatacattaaatccttcagatatatttgggaattgacactatgatcccagaaatggtagtaaagggttttaaagagatgcctaatgttttctctgtaattaaaattttgattgtaggtttatatgtcacattgatttcttatggatcaactctttctggaagacatttttattatgataacaaaccaacacattttttatagttcaactcttttagaaaatattagatttcttttaaagcaatcattcaacaaatcacaaagttttcccacccatttactatacttaatgccttgaaatttttcttttctctctgacctttataagaacacaaatttaaagcattaaatagtgaatgtcagagtgctttcctggaggcataaagagctcactcatagtgtggttattacacaactcacatacctttatataatttctgctctaggaaataaaaggttaaacacactttttataatccaaagccaaacagtgaaaaatggaagggctgtttttcaacctctttttattatctgta

SEQ ID NO: 38011 - DNA, 968 bp, Bovine  19866881781468
  misc_feature (1)..(1): n is a, c, g, or t
ncacaaagagttcgacgtgatggagtgaataaacccagcacagcaagaaattaatattttaaaatgaatagtcttcttctatgaaaaattaagtcactttagttatcttgctaataaacatttgaaagcaaaagaatattatatatatatatatgagagatatggattgttttaccagaaatgaaaatgtagaagtcatgcataatttagtaaatatgagagtactacagtaatcacagtgatgcctttcatcatcaattttaaaacaaatatgcaagaggtatcttatattaatgtgtttttattatttacaggattttagatgatctggtgtacaaaattctttgctgaatcaggagtgtctctgtagtagcttctcacaattaaactacaaacagataatagttttgaaaccaaatatatgaagaaaaaagtataaacttctcattattattttaaataaaagccaaacacaaggtacttgtgatagacttttaagaaaagtgatcttgccatctgctaccccagtgtggtgcaatattaaacacatcagagacttgaacagaataagaagaaaaatacctgctcagcacatttccctaacacagtcctttcaatagtttagaaatgaaaagcaagttgagaagttttgtaaatttttgagaaatcagcatcatgtaaatcttttcagagtactgaaacactttcatataatgagaaagagtatttacatgacagattaaaaaggaacaacatttcctatatcaaatagttaaatattagtgtaggatttaatgattattacataacataaaatgtacttagaggtttttttttcctaaaaacataaaatttgatgtttgtcagacatattgtagatgttattatttataaagcaagatgtatttatatgctatttaattttatttcactttgcaatcagttcatctacacttaataataagaga

SEQ ID NO: 38012 - DNA, 1440 bp, Bovine  19866880380021
  misc_feature (1)..(1): n is a, c, g, or t
nctatctgtcaccacgtatttaaattgcacgcttgctgactattggtattttttttcttagttttgatactatgattcttttgccacaattttcatctgtattagactactttagcttgacacagaaataaaagttaattagtttctatggtgacctgtgcattaaacatcactgttctttcagatttgtaaatacattccaacttagtattcagaatgcaatgtgtataagcattcagtacaaatagtgggcatttgtttgcagttaagatggaatcggggcttgagccagatgatataattcattggagtatacagtgtcagtggaagatgccctaaatttgacatctctgtgctatatactcgtcacatttaaagctacacgtcttttttaatttttctctgctttaagatttgatacaaccagctacagtcgatttgatcgcaaaggagctggacatgacttagcaactaaacaactactactctacacaaactattttaaccttctgggctcattttaggtgcaaaacgctaaaaacgaacccttcttgttttgcctatagttgatacttcttctaaaatagtaattctcacacttgtgtgtgcagaagaaacacctgtgtgacctctttaaaacatgaatttctcaattccacctgcagagtgtgaaattcagtatatctaggatggaaccaatgaacctatactgtcatcaaccaccttttttaattataatgtttattttgttagggtcatttttctgaaaaaacagagtgtaacctgaaaactcttttatcaaatagaatcaaagagatttaaatgatcgggttatcggcatagcatgattttaatattcttgtgaaaatgattctttatatcacaaattataaaaatcacatttctcacagtattactctaatgttaacttctttggagcaataaatgataatcttcagaaagaaatcttacagaaagaccaaatatatcagttattgattgaaattaataacaggttatatgatcctctgaataaagccctttcacaaaaagccaatgatttacatgaaaaaaagagactaaattttactatccactattttctacagacaatattctttctgtctcatgggaaaggcaagctgtaatacattatgctttgggattctaatcagaaacctataaacaatgtataacttacaaatgcccttcagtgcattagaatacttttagtacagctttaaaattttaaatcaattctgccattcacaccatattatttatcttcaatttctccatattttaaatgtcactgtgtcatattaagtaataaaaagtttaaaagattataacctgaacttgccagatattcacttcattaccaggcctgaaatctttgcctttttctattttcgctgtcaaagagagtcttacttctgg

SEQ ID NO: 38013 - DNA, 1081 bp, Bovine  19866880382521
  misc_feature (1)..(1): n is a, c, g, or t
nttatataatgtgactggttgacagttttgcttttctctttgaaaaattaacaatgaatttgatttctttgaagcttcagactcttatttttatatgcaaagttgtccacagattctatattatgctattctttttgaataaaatcttaaatgaacattacttagctctttattcataaaacctttttatattcttataaaattcttatccagatgatttattcttttgctgattaaagatgaagaagaccataagtttattaattgttagatttatatctgcaaccttaaagtgaatggatcaaatgtaaatcccatatcatatgcaaatgtacaataaacttatgtaatctaataatttattaaggaaacaatggtatgtactaaaaattattttgcaacacacataacataaaatttgcattgtaaaccaaggtactgtcacttatgcatgaaaacatgtttgtagcctcaaagctactctaatcctatacatacacataaagagctttatagtatggagaaagcattgcaatttccttgaatggaaggtattaattttaagccacaaaaccaaaccaaatcccatcacacatcacttaaaaatctagaatccctaatgttcagcaagtttactatcttgagccttgaattaaacttgtagaattcatatcctacatggaagcattcatcctctggcttagacaatgtggtcattctgatattgtattaatatcacttgagggccaatattatcaaaattttactttcaattctcacacttttctttgtcttggtattaattttggttccattaccttagaagtagacacaggtgatcatttattttacatgccacctaacgaaaatcccatggaagtaggagcctggtaggctgcagtccatggggtcgcgaggagtcagacacgactgagcgacttgactttcacttttcaccttcatgcattggagagggaaatggcaacccactccagtgttcttgcctggagaatcccagggatggagaagcctggttggctgccgtctatggagtcgcacagagtcggacacgactgaagcg

SEQ ID NO: 38014 - DNA, 1569 bp, Bovine  19866880405071
  misc_feature (1)..(1): n is a, c, g, or t
ntacacagacagaaagcatcatgttattagaaatgtgagtatctgaagaataatactgtaaaatcagacaggcagtggccattaaagatattttccagttcaaggaaagaggttcagattaaagtatgaaagtccggtcttaaggcaggaatgaattccagtgtaaaatgatacatgtcttcctttcacagttgctttttatgttgctttaaaacatgtcaaaataatccccaacagaggagcctaaaaggaatgtcagctctgtggttatgtaaatcgaattgagtgctttacagcaggtttaagatttttataactcagaagttgttaacagccagctggtttgtatctgttttttatggttattcttgtcatatgcagcctccacaatttttaattatattttatggtatgtgttttcctcctcttgaatcccttagccactctttgcttcacaagagattttccactgggaagggaacaagcacagctacgggactccatcactggaaatacagttgtataattacttaccactaacagctctatagtgtgaaattcaagtaactttccattgcaaatacataatcttctattagagcattaaaattgctttaatgtaacaatagctgcttgtaagtttgtgagcagtccttccctagtaagatcaaaaacatgatgattgtgtcactgtttgtatttcaagtttcttaaaaaataataatatagatattatcctttttctttctttttttcttccttccctccctccatcgcttcctctctctttctttccatttctctcactttttgggtattcgtcttgtaaattgatatctgcctcatagttaagttctaaatactttgttttctaattttgattacacagaaagatagtaacttactttatattatggtcccaagaatctcatactctggttgtaagatattgctacagctcctaaggtattaatgaggcatcctgagatttctgataccctaattggagagttgggctaaatttttcttttaaggaaaatgaagagagtaaagaaaaatgtttggaatctggaaaatgtactaaaataatttaaaatgtccacatatatcaaaaaatgggggtgtgttgtttcatagagacattttttagagaaatcaaatctttgaagcaatactttgtttttgtattactcttttgcaaaatgaaaacatgccaatgaaccttattcttcaaatcatagagtttccagatttgggaatacaaagatgtaagttttagacatttaaatatctgaatgagaatatattgctgctaatagttcagacatattaagaatattcagaccaagtgaagattaaaataagtaactgtgatttgatattcatcatataaatatgtactgaatctttattcaaatttcaagtcaatttgattctgtcataggagatccatgatacataatacgcaatggaaactatttactatcttgtccttaggattgattcatataatctgattttattatattacagaccattattaaaccaatattactatcaccaaacagt

SEQ ID NO: 38015 - DNA, 1218 bp, Bovine  19866880420624
  misc_feature (1)..(1): n is a, c, g, or t
naaaagaatcaattaaaatgaattcctatcttatctatatattttacaagaaatcatgacagtttttggcttaaaaaagaaaaaaaagggaagtttatagcttcatacaaaaatgactcacataagagaaatttctccaacttgctactacattatgatataaaagttcacttctattttcacaaatttatatagcttatttctctattcatgacttttctgatactttataacaaggtcctagtcaaacatggagaagttataagtatatacattttgaacatattatgtcaataaaatattcagtgataaaacttttgaaatattttcacttaatatttccattatcaaagtatgtacaaaagtcttcattacttatttactttttatgttatcagttaaaattagagttaaacaccatttggatatagaaataatgcattggaataaatgttatttgaatatgaaaattgcattagaaatttatacataatgaattattttttctttctatttcatgtaaaatatgcaaggattgcattttcacattagatcccagttttgaggttaattaactaataaatgaaagagggaaaaattttcacattcattattttggaccgaatttgagttctgcttatacctattacctacttttgtttctctgttcagttgagccaaattcttttatttacatcttaattactagttaataaatgggaaagagacattttccaaatatacttcagtttccctctcaaatcagtagagaagcacttattttttcacattatcaaggtataaaatataaagttaaaattctgactaaatcttcctgataaaatattatagacaaaatactacctatttccacatctcttttggatcatgggatatcagtccttgggtaagggtaaataccaatcatccatatgagaattttccatagattggattttctcactacataaaatgctcctagccatctccgccaatcatcatttggtaaatactcatgatgttaactcatttgggtaataaatagagcaaacaattaagaaactaagtctgatgaaaaatatacaatatataaccaagtcagctgtaagtgatttttgcataatttataacatcctgctcctctattagcatgaataaataagaattgaaaataggccatttcagaacaagacatgcccatatttattaaaggtataa

SEQ ID NO: 38016 - DNA, 675 bp, Bovine  19866880442573
  misc_feature (1)..(1): n is a, c, g, or t
ngtggctcagatggtaaagcgtctgcctgcaatgagggagacccgagtttgatccctgggtcaggaagatcccctggagatctttacaataacttctgagcaatgaagccttgtatttttctctttatagagaagtgattttgaggaatccagggctaagtttcttacaagagggcattcaattgaattgagcatattttctcttaatttccatatttttaagtccaagtgactctgacatagaaactgctactatttgagtgttattgctacagctatgagaattagctaagattgataataacatctataacaatcttatataatacatgtatgtatactatatgcatgcataagatttaaaggaacaaatttaaattagacagcattgtacacaagaagtaaacatttcttgttggaatagattttaaaaattttgcatgcatgacctttatgcttattacaaatatattcagagttaggcaactcatcctttatgtgattgaaaacatatgttttccacaattttttaatttcttgtatgtacttagcttttaacctaggaaaaagaaatgtgtaaatagtttaatgattccttttggagaacaggtttgtacagagtagagtagactgacagccccaggtgatgacacttgcccttctttggaacttggt

SEQ ID NO: 38017 - DNA, 2006 bp, Bovine  19866880521244
  misc_feature (1)..(1): n is a, c, g, or t
ngtaaggaaacaggtgctcccaaagagattccagagggagtgtggccccaccgataacttgagatggacgtgtgctgcttgtttttgaatggtggctcagacggtaaagcgtctgtctacaatgtgggagacccgggttcgagccctgggttgagaagatcccctggagaaggaaatggcaatccactgcagtactattgcctggaaaatcccatggacagaggaacctggtaggctacagtctatggggttgcaaagagttggacaagactgagtgacttcactttcactttcagaactgtgacagaattaattttttatttattgtagtcacaatataagtggtaatttgttacagtagccacaggaaactaacagtgttcagtacaagttttaaaattaaacaaattatgtgatgaatttcaaatttaggttaaagtgctcactagtatctgactcttgtgaccccatggacttttccaggggtcacggaattctccaagccagaatagtagagtgggttagccttttccttccccaggggatcttcccaacccagcgaccgaacccaggtctcctgcattgcaggctgattctttaccaactgagctatcagccttccaaaaaggaaaaagaagataaattacttaaagataaattactttcttttcaagaaaaatttaaagggaaaagtacttgaaattctggtagctcagtgataaagaaatgcctgccaatgcaagagatgtgagtttggacccctgggttgggaagatcccataaagaaggaaatggcaacccaccacggtattcttgcctggaaaatcccatggacagaggagcctggcaggctgcttgagtccatggggtctcaacagagtcagataggacttagccactaaacagcaacaacaaacaacatgcatcagatactgataagtcaaatgcattactttcaaaatgtccaatgattaagtttcacaagtatttcctacatacagatgtatgaaaatacatatttatatatactgcataaacattaatgtcttaaatgttttgtatcatatttattctttgagtaaggcattcaaaagatttttatgtttaaattattagtgaagatgatcaactcatttgtgactgttttacttgttattcttacttgggagcctctccagggaatacaatgcatttgttatgataaagttctcaatatggaaaacacatttccacataatgaatttttcccttggaagttggaaagcttaatgaatttaaaatattacaaatgttgatactacaaaaaaaaaaaaaaacaggtagtttggatgctgttgccagttggtaatatttagaaagaaaaataaagcctataaactttgaaaatgtctttgaattataaatccacatgagaatactttcctatttttttaagatgaaaatatttcaacagaattgactcttgctaatactgccctagtatagtattatttccacaatagtaaaactgcatttataggttcttactttttaaccatagtgcctttgtgtttacaattgcttttttttaatcctgaacgcatattatttgcctacaaggccacagtgagagaaaagatgtgtctaagaagcaaaactatgaatcatctattcatttaacttgaatgtatttgggaaaaataggtaatggataactttttttaatgaaaaaggcaaatactgagagtcactgagttatttcttaaaacttacatgaaaattgtgtttcaaaactagtttgcattctgccctaaagataaagtcaagaaattggccaaatatgctatctcaaattgcactcctggcacaggaggggagtatttagaagtcctaagtaaccctttccttaattgtaaaatacacatgattctataaaaagtatgaatgttacggaaattctgttgctaggatgaatttatttcaaactggtatttattatcaaaaatgatttatgatatgtgctcagt

SEQ ID NO: 38018 - DNA, 983 bp, Bovine  19866880522307
  misc_feature (1)..(1): n is a, c, g, or t
nacttcactttcacttttcactttaatgcattggagaaggaaatggcaacccactccagtgttcttgcctggagaatcccagggatgggggagcctggtgggctgccgtctatggggtcgcacagagtcaaacacaactgaagcgacttagcagcagtagcagcagcagctagtcaacaaattgcctttctctttaaattagccagctttaaatttgttacttgtaaattggttaaatgaagatcaattaataaaatctctactgaaaaatataaaataactcagtatttcttataatgagtatatttcatttgttaagatatatgtgatctaattcacatacacatattttgataataatccaattcttctgatttaaaagaaatacattactacttcagaagctgttagtgcatatattttcttaaagattcttatttatggattttaacaaattaaaattgtgttagaagatacataatcaatcatggaaataatttcctcagtgatgtagcttattaacagttgaaggtatagattcaagaggagctattaagatacattaaattccatttccttaaatttattgcaaaatgccatgttaaatatgacattgtattaaattcaagcttcaggatttgaagttcagctgattgcaagttgctgaagagctaggatgctacccctcagcttgatagtacagaaatactgacctaaattaaggggctgagaaatgaggtcctatttagataaagcaagttattcaatgggaataacaccatctaggcatttttcatgcatacaactgaaatgatgatcttgtgatccaggaaggggggtcagcaagccaacggtattaataagcttttagaacagcagctgatatttgggaggtttcggctatatttggatgtcaatcaacagaacgagaatgggatttctatggggagggggaaggagtctttgtaggataagagtcaggt

SEQ ID NO: 38019 - DNA, 4926 bp, Bovine  19866880529662
  misc_feature (1)..(1): n is a, c, g, or t
ntcctggcctcatatttaagtatttaacttactttgagtttaattttgtgtatggtgtcaggaagtgttctaatttcattcttttacatgtagctgtccagttttaccagaaccatttattgaagaggctgtcttttctccattgtatattcttgcctcctttgtcaaagataaggtattcataggtgtgtgggcttatctctgggctttctatcttgttccattggtctatatttctgttttttcaacctaaagggatgggaagaggtaggaggaaggttcaaaggggagaggacatatgtatacctatggcttattcatattgatgtatcacaaaaaccaacacaatattgtaaagcaattatccttcaataatatatatatataaaataaccatttaagactccagttagtaggctaaatgcaatttttcaaaacaaattaaacactgaagaactgcctttaattaaaatggtctgtacagaaactgactttcctctttggtaaattttgaaatttaattttaaagtcttcttataatgagctacttttcacaaaaaaatctgaattatgttttgcaccttatcataagttgaactatttaacaaaattatgattatggtacagaacagcaatgctgctgctgctgctaagtcgcttcagtcagtcgtgtccgactctgtacgaccccagagacgacagcccaccaggctcccccgtccctgggattctccaggcaagaacactggagtgggttgccatttccttctccaacagaatagcaaaaaacaaaaatataaaaatgacttgtttttaatggcttatttgtgtcaattctataggggattatttggtatatttacatatttttatctactttaagtctaaaaaaaataaagtataagaatttaagaatagaaggcttaatttttaaatatgtcaaatatccttcggctgtgaaattcacttttgaaaattacctccatggtgtgcatttacttgggttaatattaacatgtttaaactctggctttgaaaaagacttcatgttcttatttatccaaaaaaatcaagttaatactgcatattgaaaatcacagaaaagaaatgggaagaaaccatagactattaagattatgatgcagttatatcaaatagaaaaaatataaatagaaaataaattttaaatgtcaatatataatcacataaagagacccaaatgccaaaaaatatggtagacaggaaaggaataaaatattatatgatgagatggttggatggcatcatcaacttgatggacatgaggatgctccaggatttggtgagggacagaaagcctggagtgctgcagtccatggggtcgcaaagacttggatacaactgagtgactgaactgaactgaacagaaaataaaatttatttttctgtatatatttgaatcaaagaatgcgatagtacaaaatagacacaaaagtcattcattttttgttcattatatatcaaacacttataatatgccaggaattcttgtctgctatgacaatatagcagtgaagaaaacagatacaaacatatattcttgggtagtttatattctcattggattgtgtgtagaaaaaataataagcaaataaagtgacaccacatattaaataaaatatctgtcatataaaggcaatagagaatttggcatatacccagtggatgtgtgtacatatggcatgtatgttaggagggtacactggaaagattttgctgatgaggtaacactgtcacacaatcctctctttttacagaagaggaaactgaggttcaggatgattaaatggaatgcttgaggtcacagtaagtctttaggtaaagagctggactcagaacacacttatttgacttggttctcaatgcttcgcaaggtacaacagtacccttttagttgaaaaaactgcctcggctgtgcaacgaagcaaagacaaacatgaacagtgggtgtggacgaaaggtggatagttcaattgaccagaggagaaggtatgcataggaaagcatcaggactcagggagaattaggtaggccgcagcagcagcagcagcagcagggagatgagaatgaaaattctcagatgtcaggatgattagtttggtcatcatcttgggcaggggagagataggattaaaatgatatatatgagatagtcagaaggaggaaaaggaactcatcatggggaataatcatcccaagttctgtcatccaccacattgacactgatatgaccagggcaagaatcctaattctcatatttcatgccactggaaaactgataaaatagaaaaaaaaaaaaaacttgtgtgttttatcattagagttttctaagatgatgactgaagaacaaattggtttccagagatagacatgacaagacaattacgtcgagtgaggatacactgcacactctcccacatatctgaatccagttccttgtaaactcacccttctatatatacagtatcgagttttccgcaattaaaggaaaactatgataatctttttcaaagttttcacctaaaaagatataacttactcattcttaagagaaggcaagaggttaccagtgaatatagctcacgtagagttcttagaaaagcaagggggtgcttggtagattgaccaagaaatacctcctcaagtcatgatataataaggtttctgaaacataacaagtttggctttaatattttattgaaaatctaaatctgggaatgtgttttaatactgctatttctattctatgccaaatatatattactattctgtagcaccttaaataagtgctaccatacagactactatacacatcagcagacagcaaaacagtgtctacggtcctgacattgaaaaacatgaactggtgaaaaacaccccatccttagcctctattcttttttttttattttattttatttttaaactttacataattgtattagttttgccaaatatcaaaatgaatccaccacaggtatacatgtgttccccatcctgaaccctcctctattcttgctattcacttttcttcactactcacaattcttatattcacaagaattcctcattactggccacaaaaataacaatgtatattatataggtaatgatttctacatgatgccataaaagctttgatttctaataccatttagaatgtctgaataaatacatgcaaaaaatacttattttctttagcttgatagtatcacagagcatgataagcctttattttgcctatggagggttttatttttcttatcaaaaccataaaattatatactaagttgcaatatgtaaagtaaacactatatgatttttatttgtgtaagatgtctatatagagcatattatttactttaattatttttggtttcttactccaaaattttcaagctaaattctatttgtatgtggatgatttaaaacctggtaaatgtgttaaaataaattttcaagcagcttagtatgcatagacagcttttaaaaattcaaaacagccctcatagcaaatgtcatttctttcatggttacaaaatgcaaactccaagtgttttatcctaatgaataaatgagtttgtcctttatgtataaaatatagtttgtgtttgttgcacaagtttttaataatagatgaattttaggtttgctccaacgtattcaataaagtgtgattaattttggtttttcaaaaatgcaaactagacattactatacttactttgtaaaatgcacagcttgcaacattattgtctcagtgggatcttaaattgaattgtaaaatgtgtcttatttccagtttgatttatgtaagagatagcagtggataatgtcccttttgaagtttcactgctttgtgtgaacaaacaatataaacctaaaattcataatagagtttattagaaccccaagctaactttccagttatgtttgaccgaaaggaaaacttatgatggattcagaataccacattttcaatgaaacaacatttttgaagtttcctattatgacagattatacgatacattttgacattttctgtgatttttattatgatatttcaagtaattaccaaatcatttttttttcctctaaaaaagctttcctgtgccctgagaattaatctatgataccatttagctttggctttttgaagtaaatatcaccagataaaagccagctggatctgaataataggatacttgaatgaatgtattagtgtttgaaaaagagagtacaaatcttctaaaaagattaatttccataaaaaagatagctcccagatctacaaaagaatgaattcaaaaacataataaactctcagaaagaaagggtagattaaagtcaagccgcagcaccttgttactgcagctgttgcgaagcaatgattctgtatcagttacatttggttggtcctgcagggctcttcaaagctttgtgtgaaaagctgaatatgggacacatgtgacagtgtaataacttccgtgattaattttgatgcaacaccactttcattctgatcttattctcaatatttacagtttgagagaagctacaaaggttctgatgggaatatatgaattgagtaaggacactttttttttctccttcatttattgaagatgtggatatgaatttttctttgtcatgaaaattttgcagctttattacgcgacatagttgctgacatcatcaggtaaaaagacctgagttggccaatggactttattttcaatatcctgtttcaaacatgttctctaaaaagggccatgagttctgttcacactacttttctacctgagtctgtacaattactaataaaagcaaagtttgaccgtgaataatttcctctgggaggcaaaatgtaccagtccatcttggatg

SEQ ID NO: 38020 - DNA, 3001 bp, Bovine  19866880530515
  misc_feature (1)..(1): n is a, c, g, or t
ngactatattttctgtgttgtacaccatatgtttgttgcatgtttatttgtacccatagtttggttcctctaacccccttcacctagttgctcctcgcccaaccctcttccctcaggtaaccgctagtttgttttctgttatctgtgaatctatttctgttgtgtttgtttatttgttttattttttaagactctaaataaaagtgaagagacacagtatttgcctctctttgtctgctttatttcactaaatataatactctccagggttatccatattgttaacaaaatggtaaaaaacagtcatagcagatggatatgcacattttttttaatccagtcaattactgaagggcatgttggttgcttccaagatttggcaattttgaaaacaacttctataaatgtccatgtgcaaatttttgtgtaaacatcagtgttcaactcttttgggtaaaaatcatatgattgtatggtaagaacatgtttagtttcattagaaaccaccaaactgtatactaaaatgggcattaaattctgcattccacaagcaacgaataaaaattgtaacaaggccatttatgtaaaacatgctccagagactcccctaaactcacacgttttatattcagaaaaacaggataataattatgtcaaatatggataatgcagtgtgaggtgtcttttacttactttaaaaattaatagtctattctgtcaatgcatttaaagtactttgatttaaaaatacattataaagtaatatgaatgaaaaagtatatacagatacacacccatttaaaaatgtaaacatacctcccacacacatatacagagagagagagtcagagcattgtgtacaatatacatatgtgatgtttgtatgttatcttccaattcctgtttattttttaatctacaaaaaacttccaattttattatttcatttagttttttatatccatatggtattatccatttttaggtatagaaacaatcagaaagatcgagttaaagcaagatgacagagctagttaagtggcagaaacataatttaacccttgtggtcttttgaaaacaaatcagatactaatttccatacctcaaggctcataacaaagcacaaatatgcacacatacccatgaacataaacataaccatactttcaagcacatacacaaaatttgaaatataccatttaattcatctccttcttagtggatataatggagaactttaagttaaccagcctgcttaaatattgtacccatagttctaattactataagtgactttttcttataatctattttctatatcacttagctttttaaagttagaactacttgtgcaataagaaaaatggattgattgagtgatggtgacttaagaggatcttggttttggccaaatcagtcgtataattaaacaattaccttaataacagatgtctcaactctggatgggggactctgaacttgtgctgctgccgccatatttgcaatggtgctaagatggttcatctggctcattgccatggtgacagatgcctggaggtaggctgacaggaattagagggtggggcatcatcataaaaggaagctccagtcctgtaaaaaatgcacatgtatcagcatctctctattcaaatagaatgatgaaatatagtatatctcactaattaaaatggttaagaacataatcattgaaaattgaagcatttaaaaatgttctaataatgacaatcaaaggaaaaatatttgtcctctttgtatgcaacaatgcccatttatcactcagggaaattaaagtaaaaactaaccagtttggtgtcatgttttatcactcaccactcttcattggtttttaatacaaacagttaattttttgctacattattctgatcaatctaattcttgttttaaatactatggttttctttatcataattaactatctaaatgtaatatacatttcaactacgtcctatattttactatctgatcattacttttttttttcttttacagctattatttttagtgctaaaaaatgccatcgtaccatttggcagaaggtggctctgctgaagatggtggagaggatgactaactggaaggctatgcactccaggtatgcgggggtgggtaacagaagccttagatccctggggtggggaagagtacagtgtttctttatcccaagaaccatcactgctgcctgtggggaatgaatataaattatttgtctacagtattattccaaatcttctaatgactaatttgaaatgatgttttaaaaaacatatcacatttggaaagtggctaagtgatttcttgggaaacaagctcaagtagataagtttctcctaaaccatattttccttttgtttttctattttttgaatgtagtttttttttttatattttattccatattttatttttttattttttttttaattttttttctttaatagaaaattatttaactagtatacatgtgttccccatcctgaaccctcctccctcctccctctccacaccatccctctgggtcgtcccagtgcaccagccccaagcatccagcatcgtgcattgaacctggactggcatctcgtttcatacatgacgtttatgaggtaccatttcacaccagtcagaaaggctgcgatccaaaagtctacaagcaagaaatgctggggaagatgtggagaaaactcttacactgttggtgggaatgcaaactagtacagccactatggggaagagtgtggagagtccttaaaaaactggaaataggactgccatacaacccagcaatcccactgctgggcatacacaccgaggaaaccagaagtgaaagagacatgtgtaccccaatgttcattgcagcactgtttataatagccaggacatggaagcaacctagatgtccatcagcagatgaatgggtaagaaagctgtggtacatatacacaatggagtattactcagccat

SEQ ID NO: 38021 - DNA, 1788 bp, Bovine  19866880530922
  misc_feature (1)..(1): n is a, c, g, or t
nagcctggtaggctgcagtcctggggtcgctaagagtcgacacgactgagcgacttcgctttcacttttcactttcatgccttggagaaggaaatggcaactccagtattcttgcctggagaatcccagggacgggggtgcctggtgggctgccctctatggggtcgcacagagtcgaacatgactgaagcgacttagcagcagcagcagcagcagcagcagagcatgaggttcaactggggcagagggcccttttacttggatctattgcaagtattgtctattgtttatctcaaatgtaaatatttacggagtacctattatatccaagacatgaagctatagagaaaaccaaagaacgtatttcaaatgatgtacctattgaatagatttttaacatcctaggagtgatgtgaagtaacaagtacgcacacacatcaattgcaccaaaggaaggtagactggaaaaggagctacattgaaaatacaaagatgaattccagttggggatatcatgactaatttgcattttaaatagactttgaagaactggttggatttaaacaaataaggtgaataaggcattctaggaatagtcagcttttgaaaagggataaaggtggatttaggatggtagatggactagagacatttgtattttattctatatgctatgagaggtatggtgaggttttgagaagaggtatggtataatcacttgactaatttgggtatacacttaattgaaacattcctgcttgtttaaataatacctatctagtgatgggcttgtcaaaacacagaatatggatggatttagaggaaattaaatatttagtggcctcaagttcttgtctaacaccatactcatttaaggataggcatttcccagaacaaaagatggattataaaagctgggtatttattccttaattgctacagaagctagtctccagttaaagctctgagctttagctgatgtaagagtgtttcagcaaaagttaagtttaatagaatgcattaattcttccctgtaacaaccagaacatagcacaaattttagaatgcatttacagcatgtcaaaagggcaggcatttataaggatagaacaaaccaccttgctgctttagctagaatataggaatatagatgactatattgtaaaataattgacttcatagctcttttcaagaaataaatgccatatacatttatgaagtaaatggagaaaatgtcaaatagttatggagaaaatatcaaattttatggagaaattttatggagcaaatatcaaaaactgttggctattgggaattgagtcatatttaggattttagtctttacaaactttatttttcaagtgaagaacagaagatagaatcctggaaagaattagtttttccttctaggagaaatattaaataaaagtttaaaactattaggtgagacacacagacacagaaaaagaaccaccaatttccaaatatcctaaaataagaaagtggacaaccttaggtgaaagaatgtgagttatattttcgctggtttgtttttcactgagaacatggttttcttgatatgttcaagaaatacctataagttagcgaacatttgtcacccctccaattaccttcagtactgtagattagctgtctggttgattcctttccaataaactaccattgaaagtgtttacaagttcaatttcaaggagtttggagacagaatagtcccagatggaaatgagagaccctgggtttaagcagctttggactctagggcagtag

SEQ ID NO: 38022 - DNA, 1163 bp, Bovine  19866880611872
  misc_feature (1)..(1): n is a, c, g, or t
ncgtggcagacatatccccttaaatgtgcatgtgttaagggtatgtaatgtcaccattcagagaactaacaattcctagtttctcattaccaaaactagacattttacatttcattgtttccatattattattactacttcaagcttgctattgtaaatcaggcattttgctaagtgctttagttatatcattttacttttcttactgtcttcatttttaaagatgaaatgaaagtgttagttgctcagtcaggctagtctgtctcttgtgtttcccaggcaagaatactggagtgggttgccattcctttctccaagggatcttcctgactcaggggttgaacctgggtcaccagaattgcagacagattctttactatctgagccaccagggtacttggtgaggataagaacattgtccaagactacacagttactaagagtagactcagaaactaaactcatgtaattcaaaaaatccatgttcttagccaagatgtgtcctgcctcacatttttgttttctcttaacccttaaatttaaccctcctcagaatcagaccagatttagtactgatgactgtctcatcttagttcatgttattccttctacctgaaatgtcatttcccctcttatgtacagtgcaaatcttagccattactcaaagccccattgttcttttaagactacttataaagcacatatattatatatagaaagtaggatgtggtatacacatgtacaaatatattcagaaaatatatatgactgattctacaaaaaaaaaacattttcaattgtttcctttcacattaaattacattttccccatcatcttaaatccttttcagtcttactattttttctatataattttgaattttctgatgttcactaatagctttctgattaactggctttatgtattcttctgtttgcaagaaatttcttttatgggttctccattattcagaaaattttatagacaaggttataatttatgaaacagggagatcattcttgaaaaaaactgaatagatttttaactacttcattaaagcaacccataaataaaacaaaatacaatgccaagataacttttgtagttgagtttctagcaattaccttttttccctttactggtacgatgtaatataaaagat

SEQ ID NO: 38023 - DNA, 1735 bp, Bovine  19866880660980
  misc_feature (1)..(1): n is a, c, g, or t
nctaccaggtttgtcatgaggaccccagagttctgctgtgatcgttccttgacatggcattcttttggcaattacttgctccaacactatttgtttgtacttgtgaatgtattcaattcaatccagaagacatttattgagcattattatcagactctgggggacatcgagttaaataaggcttgatttttatattcatggcaatgatcaccatgtagattgttttataaacatgattaggttggaatgtaatgctattgttattgttttgcttttctcagtaactaggctgtaggctccttgaaagcaaaaatcttttcttaatgatctttgtgcacagtgttagttgctcagtcatgtccttctctttgccaccccagggactatagcccaccaggctcctctgtccatgtaattctccaggcaagaatactggagtgggttgccattcccttccccaagagatcttcccagcccagggatagaacccgggtctcctgcattgcaggtggagtctttaccatctgagccaccaagggttcagtatctgcagagctcccaggcagggagtcacagtcagactccaggaaagatggatgcatctgccacagtcactttccatcatgaccagagggctcatctactcaccgggaagcgtggcacccagccttggccagtaaggtcaggggaggaaattggaaaaaaagccttaccttctctcaaccccagaaataatgacctttaattaaaaagttgttttttttttcttcagctgactatttttaaaactttctatttaacagtggagcatggctgattaatgatgtgatagcttcaggtatactgtaaagtgattcagttgcacatacatatgtatctattcttttgcaaacccttcctatttaggttattacagaatattgagcagagttccctgttctatacagtagtaggtcctttttggttatctattttaaatacagtaatgcatacttgttaagaatatctttagtttaatattatattttatttgttaaaatgtaagacatcaataaggcttccctggtggctcatcggtaaagaatccacctgcaatgcaggaggcgcgggaactgcaggttcaattcctgggttgggaaggtaccctggaagaggaaatggcaacccactgcagtattcttgcctggagaatcccatggacagaggagcctggaagtctgcagtccacagggtcgcacagagtcgaacacaactggagcaacttagcagagcacacaagacattagtacaacacattgttcttaaccttataaatattaatttattcaatctgaataataagactatgaggtaaattcctattttagaatggggaagaagaggcacagagaggttaagtaacttggtcaaagtcactcagtgttttgaggaacactttaataatgactcaagatttcatcctctggcattaaatatattgacaccaagaaagttaaaagaaaatgtaaagctaaagcaatttcaacgtatgcaaacatttcttgcacactattcttccaggtttttcttacagaaaatttttttaatcactgatttgattccacttggaatatgaattacaccttctgaggattatcatcatcatcctcatgctcaattgtgtctgactctttgcaatcccatggactgtaactcaccaggctcctctgtccgtgggattttcccaagcaagaat

SEQ ID NO: 38024 - DNA, 1475 bp, Bovine  19866880676764
  misc_feature (1)..(1): n is a, c, g, or t
ntatggtgtgggagaagactctttagagtcccttggacagcaaggagatcaaaccaatcaatcctaaaggaaatcaactctgagtattcattggaaggactgtgatgctgaatctccaacacctcggccacctcatgcaaaaagccaattcactggaaaagaccctgatgctgggaaagattgaaggcaggaggagaagctgatgacagaggatgagatggttggctggcatcactgactgaatggacatgagtctgagcaaactccaagaaatagtggaggacagggaagcctggcgtgctgcagtccagggggtctcaaagagttgaacacgactgagtgactgaacaacaacaacaacaattctttaagtatttggttgctcgtatgtcaaacactgatgtaactttctggttcctattaatgaagctcgcagtactgtgatcagactctctcctctccttagagcccatcacactgctccatttcttctctgagtccaagtgttttcccactgcctgcctgtctgctaagtggcttcatcatgtccagctctgtgaccacatggactgtagcccaccagtctcctctgtccatacaattctccaggcaataatactagagtgggttgtttttccactaagctcctcatttacatggatcagagcaggtctaacttcacaactttccagatgtagcagatctgcttgaatcttaaggtgaacaccatttatgctctagttttctatatcactttctaaagaggccaagtttccataacactggtaatgcaaagatcataatgaaaatgtatttccttattatgtaaggggtgcttatgaaatcccagtacatttctcacagccagattaaacattttattgcctttatttttcatcaagtatgcaaattctttttagcaggtttcacttttgatttaaaaccatttttcatgaaaaactaaatcatttacggccatatggtctcatgacaatgcatagttaagaaaaactcagtgaattttatacaggaatgccttttggatagcctttcaagtgaaagaaacacacttgctagccacagaatgaggtgctttaaggaaaaactctgacatgtcaataaatataatgtgggcatttgccaaagagaaaagatgtaggtcaatacaatccccttccttttatagagaaaaaaagtgatggcttggttcctagcaggaggagtcaaaacaatgtactcccatatgttattttatatatggaagcaaaaattaaaaaaaaaaaagacatgctagggaaaaatgtaaaatgaagttaaggactgacagcaccaacactcaatctgctggtattctgtgctgacatgttccacatggtttctctcatggatacaaaagagttcaggcaagggaactgccaataataaaagtggctatcatttagtgagaacctactgtgttctttcttcctgggtga

SEQ ID NO: 38025 - DNA, 1183 bp, Bovine  19866880692854
  misc_feature (1)..(1): n is a, c, g, or t
ncaggcagggcacaaggcagattcaaccagcagatttgctattttagggaaagccatctgtttagatttctctccagtaaaactgcccagtctcagtatattcgcccataaattttgtgtctgagtttcaaagtccatgcaactttgtattgaatagaaggaaaaatcccactaagtgaaaaaattgtggtaacaacagctcaagtcatctggtgacagcaggtctgtctaccctggggctaccctctgagttgggctcggacaccacttgacctgtgctgtcctgggaaatgggtgaacatcaaacaacacgcaagtggtcaaagtagctaccattatacattttgctgcccaaccgaagttgtctgtttagccagatatttttagacccgctctcacaatttttatgttaatagaaagtacaggggaggaaatctacagagatgtcattggtagtagcatattaaaggcagtggcaggttggaacacccttttagtgacatggaaaatcctttcagctacacacatagtctttcaacacagcagcatgggcttagcagactaattcgaagaaacagtattgtagaaagttctgttctgcaatcaggaatgtgaaaaaaattaccactccttggcccactggcagagctactgagattttcaacctagaagagaaagacggctaatgtgcctatctagccttttggaaatggcaactcactccagtgttcttgcctggagaatcctagtgatgggggaacctcatgggcttccatctatggggttgcacagagttggacatgactgaagcgacttagcagcagcagcagccttttcctccagtactcttgcctggaaaatcccatggatggaggagcctggtgggctgcagtccatgaagttgctaagagtcggacacgactgaacgacttcactttcatttttctctctcacttttcactttcacgcattggagaagaaaatggcaacccattccagtgttcttgcctggagaatcccagggacaggggaacctcatgggcttccatctatggggtcgcacggagtcggacacgactaaagcgacttagcagcagcagcagcagcagccttttcctctctctcatatactcttcctgtggtaatggtgggttatttgaattactacataattaaaaagcat

SEQ ID NO: 38026 - DNA, 1238 bp, Bovine  19866880733337
  misc_feature (1)..(1): n is a, c, g, or t
nctaaagatgattgcttacgttgtctctttgaaaagaaacagtaattgctgaattacttatttggattgtttattcgcatggcactagaagctcaatacccagtaccttgccattgactgtttgttttcctcctacatgattgaagcaaatggggttgccatgtttccctcttcaggataacacacggcttccatagacacattcatatagatcattattgatagtcattaactttaacttgttgttcataattaattaaatggtaggttcatgatgttgtctgtgaaacactttgtcctatacgtttagcagttaaaggaataaaacaatgtaaattttccaacagttataaaacaacacaattctgaacatctctcaagtaaccaaaaggttaccttaagaattcagggttttgctttttaagttttgtttgaaaaagacttctccaagtaagaacaaaattgcgacatggctatctcatggaagatggttccaaagaatgaaccgtttgaccatattcattactcagaacatatcccaccatcaacatttaccttgttttgcttactctagtagctaaatctatgtgaagtcacattacttagaacagtgctctacacccagcgtgccagctgcctgaaagcctcatcctgggaactgactaactattgcttcatagtaactaataaaaaacctattagttctgcaagttttgaaagaaagaattattttaaaatgaccacgtcacatatatcagaagaaagtgtggattatttatagtggatatttattaaatgagagaaaaggagcttccccttttaaatattgaagagaactttagagttgaagcagaggggaagttgtttgtaaagaaaatactcttggatgtcatacataaaataagcagacaaatatgaatgaccttcaaaattatctaaacatgcactgtaaagtgtgtaaaaagcagcagttcatagactgataataacattatttttacccaataaaaattcacatcagtttctactctgatgtgtatttgaccttgttggatgaaaatgaggcattcagaaagaaaattatacaaacactcaactttggtcatttgttcagatattcatcagtcttccatttcagttgataaatatctcactaaatctgcttcgcttgaataatcagtatttttctattttagttttatgactttaactcaagcttttcaaagggcaattatgaa

SEQ ID NO: 38027 - DNA, 1191 bp, Bovine  19866880769965
  misc_feature (1)..(1): n is a, c, g, or t
naggatgataaatatatggtctaataattcaggtgaaatagacattcttccatttcagaagcagaatctatgcagagagacacctgcacattttgagaagtatacgaagttataattttatgacagacagcagcatagcattccatttacaatctttttacaaaggtggatgataacagaagctaggacaatacaataaaatactatgtctgcaataaaaagtcagacttcactcttctgaaatgggctcatgcagatcactatatctctgtttacgggggattttaagatagtcacaaaacaaaactgccaagcatgaaagaataattcctttaacagctgttcaggaaggtcaaaaacacagaaactactgaaggttacaaaagtatagctagaactcttgggagttgagctccattgcaatggaaatttcagaatcatcttctggttgtgcccgccagatgtgagcatgcttgttgattgtttgcaagatgtttagagtccagttctgccggctgactttccacctcctgccatcgcgacggaggggacagagttcataaataaaagcacagatgtctctgatgcttcattcaaaagagaaacaaacacagatcaataggaacaatctgacaccaatatcccaatttctgtccagacaccagcaataggaaggcgattgtccacaatcttgaaaatttgttctccaaatgcactattgacagaaaagctggacataataagaaatcaaatgaagctgaataaatacctgtactgagggccagatatgaaaactacatttgatgaaaaataaccaaagggaggcaaaaagtatagatcaaaaggtcatcatatgaaacattgctgtttttgtggttcgtgactctggattgaaatataaaatcagcctaaagtcagacttgttttttctttgctatttaagttgaatagatttctctctacttttgaactgatagagctttgcctgtcttactttaaaaaaaaattctcaatgaaaaccaaattttatgaaatataaggaatgaggtagtgtaattttgactttgaagtcatcttggggaactcccaatgtaaacagtttctgcaattccatttaagagcatagaagtgattaaaagagaaattaatattagtcggtgtactgtgaccatgaacatgtttgtcaaggtg

SEQ ID NO: 38028 - DNA, 1662 bp, Bovine  19866880777991
  misc_feature (1)..(1): n is a, c, g, or t
nctatcagagaagatggtagtcagttgtccaatatgtactggctaaataaattaatatagggagcctctgacacttgacaaatataatacggtaaagattacatttacaatcactgaaatttggactatattttagtgtaaatatcacaagtggaatttggtgacctgcttttaaaacaatgtgattgaaatttatccttagtcttcatggtaaaataatggtacttcaagactaaagtcttaaatttttacacaaacttaaagtaatcatctcctggatgcttgctatttttggctggtataatatttcccaattatcagtaaaatattttcccatgtaatttcatcatctttgtcacatatacccctatgcttagaaaaaataattagtggttaatgaaaacaattggctcattaagaaaggagaaattcccttcaagggagttttaggaaacatggagagatttttaagtctattgaattcacacacttgccttattttcgacttcatgtataattcatttttgacaagaagacattctcgctgctacataaagggcagagagtggggatgggtgggaagaagaggatgcaaaaggaataatttacatataaaatgtagagaaacttcatagcagaagtggttgtgtaccaagtataacagtggttggaaaattatatagaagaaagcacagcattttctaagacatcatgtataatataacatattgtcacgccatcattatgacatcataatgtgattattattacagtaacaaaaactggctttcctatattaaaataatttttttctatggtacttgtattagtttgcttggactttcataacaaagtactatattgctattgctattgctaagtcacttcagtcgtgtccgactctgtgcgaccccatagacggcagcccaccaggcttccccatccctgggattctccaggcaagaacactggagtgggttgccatttccttctccaatgcatgaaagtggaaagtgaaagggaagtcgctcagttgtgtcggacccttagcgaccccatggactgcagccttccaggctcctccatccatgggattttccaggcaacagtactggagtggggtgccattgccttctccgaagtactatattatgggtgacttaagcaagaggaatttatttacccacaattttggagactagaagttcaagatgaaggtgtcagcagggttggtggcttctgagagtattttccttggcttgtaggaaaccatcttttctctatgcttcacaggtcttccctttgtcttcatttcctgtaggattactggtcatatcagattagcatccaccctaactgaccttatttaaccttagttaccttgttaaaaaagaaaaaaagaaacagaaagaaaaaatcaaaatgtacaaacactctgaaaaaagttctgctgctgctgctgctaagtcgcttcagtcatgtccgactctgtgcgaccccagagacggcagcccaccaggctcctccgtccatgggaccctccaggcaagagcactggagtgggttgccatcagcagtttctaaatcaaacatataggtataaaatgatccagcaattctacccctagaaatttctccaggataaataaaaatttatgatta

SEQ ID NO: 38029 - DNA, 1833 bp, Bovine  19866880815354
  misc_feature (1)..(1): n is a, c, g, or t
nttctgcttctgttagggtccataccatttctgaaatggctagtgttggggaaatgtcagatgctggcaaagatatgtagcaacaggaactctcattcattgctgaagggaatgcaaaatggtagtcacttgagaagacagtgtggtggtttcttacaaaactcaacacacttatactgaatgatgcaataactgtatttttggtacttattcaaaagagttgaaaatttgtctccaccaaaacaaacaaacaaacaaaaaaaaaaaacctgcacacagatgtttatatcagatatactcataatgggcaaaacttggaagcggcaaagatgtccttcagtaggtacatcccagaaaatggaatatgattgattcagtgctaaaaagaaatgacatggaggagctgtaagtgcaaattattacttgaaagaagccaatctgaaaaggttacatactgaatgattccaagtatgtgatattctggataaggcaaaattgaaaacagtaaaagatcagcagtttctaggagctgggaagagagatgcaatattgttgaaatttcttttaaagcacctctgtaagtcatatcttctagttatccaaagtcaactagcaaattagcaggtgaaatgaatgttctgaatttaatgatgcctaagatctctccttatatgaactctaattccagatatgaaatcagttctcatcttacaaaacatcatcccttctttcactcttctaggttctcattttgatttggggactaaattaggaaatttctctttaagtgactgagatatatttaatggcttatgagactttgaaaaacagatgttattctagggaagaaaagaaatcctcaagtttaggcattttgcctatgattctaagttttttgaatatcatgaaagtgaaccacagcatttatttatgattatgtcatacacatatggaatatggcatggctgtgttatcaggttctctatgaattcttcttatgatcttgcaactgtatctgattacctaagttagaatggcctacattaagcaggaaagaagtccacgaaagggcagcgagaggagagaaacgtgaagtggcatcttcttgtttaagactgaaattttgtatcactgcactgggtgattgacttattttccacagttataaagtccaagtttagccacttctactccaaggtaaaaattcccaattctgttcactcagattatattttaacccttcagacatctatcattttctttattttctttagattggaagatctctaagatctaaaatgaatattctttatcattactcaatatgtcttctatatcttgttatgaaaccagataataaaagctatttcaaattttggttatgtgtcacaaagtttaatgtgtttataatgatcaactctttgttaaatatattatataaagcatttaatgattgttttaaatatatttgagttcatatttgaataatgacaagaataaaaagtttttgcaaaaagagtttgatctgaaaaaattttagtagtgattaagataagtaaaagctgagtttataaagcaggttgggtaacaaaacaatagacagtactgactgcaaaggaaatctcattctaaacaatgcagccaacctgcagaaaagacacataaaaagaaaggaaattactgaagctgttacacatacaacatgcccagctgggagtccagctgctcaaggaagctggtgattcttgatctttggggagttcctaatcagaatacaagttagaaatataatagaaaacataaaagaaatttaaaattagtcagctcttattt

SEQ ID NO: 38030 - DNA, 1625 bp, Bovine  19866880819092
  misc_feature (1)..(1): n is a, c, g, or t
ncccatgtagtgaggtactcatatctcaaaattcttgaattgtgagataatgccatgctttctaatttatgatcatttaaaatagtacctcattttttctttacagcaatcagatatgagattgtttcccctgctttcaacatgagaaatatgcgcttggactgcttaactggcttgcaccaaagcagaacattgttaggtcatgatgctgtcttgtacttggacttctgactcaagttccaagttattaagactctgttctcatccttgtgtcttttgactttttgtgaaaacagtctactagatctctgagagatgaaagactgacaaaggtgattggagtaaaatattttaagaaaaaaattcagaagagacagaacccatatttcatgtcagaggtgggcggactatggctttaggccaaatccagcctgccacttgtcagtggcttctgtgtatcttgtgaacagaaaatggttttgcattttgaaatgattgaaaaaataaaaagatgaataatattttgtgacacctgaaaatcatatgaaattcaaatttcagtgtccataaagttttaatggaacaaagccacaatcatccatttatttataatctatggctactttcacactataacagcacagttgagttgtgtgacagagatcatatggcccctaacgcctaaaatatttactatctggacctttacaataaagtttgctgagtcctgttttaagcaacagagttagtagcatcatttattaagattgtttcaaatagtctagctctgctttttccagagagtctatttaactcataacaaatttatagagtatcactaatgagctaatattattctttcaattagctgtgtcctatatttatgatgttatcctatgggggaaagtgatggctcaaatttcaaacaaagcacaactgaattttggggacatacccgttaatcaaatttgtggctacctgtttcagagatgaatgatgatgttgaaagttgatagaaatgatagttacccatctctatacattattcaattattcttatacttctccctaaggcaggtatttatcattcccattttttaagtttggaaaatgagcattaatgtagctaagttaccaccaaaatttaagagaatcctcactatgaaatggagtaggaagtggaatataaattgtcctgaatctagagttcatgctttcaaccattatgctccactatctacagtacttctcatacataaatattaatttcattcatattttaatacttttattacaaactgggcttctgttcatattttaatacttttataacaaactgggcttccccagtggctcagtggtaaagaatctgccttcagtgcaggagaggcaggatttgtggtttcaattcttggattgggaatatcccctggagaatggcatggtgacccactccagtatgcttgcctggagaatcccatgggcagaggagcctggtgggctccagttcatatagggttgcaaagatttggatacaactgaagcaactgagcacacacacatacattaacaaacatttttaaaaggatgtaaatacaaaacaaagaattttaaagttttcatta

SEQ ID NO: 38031 - DNA, 1264 bp, Bovine  19866880852967
  misc_feature (1)..(1): n is a, c, g, or t
ntccgaacaaatgcagaaaatcaagaagttagcttctaaggcagtaaaaattaattgccaaaattaattccatatttaacacattacacaatgatctggtcctgtctctacttcatagaatggagcatttctatcaccaatatgcaaataggcttgaaaatatagcatacagttttctttggatggaaatggctccctgcatttacagtctataaggcactctgcaggtgtcagagtggaagtgatgatgttcttcttttccactacaataaaccaacattttttatgtgggaagcagaaggaacaaacatctcttgactgcatattatacaataaaaaccttgtacattatcccagttggttctgacaccgtatctctgaggaagttacttctacccacagtttacagatgtagaacgttaagttaaaaagctgaataactttgactagttcctgggttaatctaactccaagtcaatgtgctcttgcattagactcagtgttgtctattctagaacacactttccagatacatctccttaaatactctagaaaggcactataacaaatccaacttttcttcagaaaactgtaaggcaggattacatagctagagacaaaatgggtcactataactttcaacaatactaaactgatgatgcatccacctaggccacaattaggaagaccatggtgtctaagtctctaaaaatagtattgccagagcagaagcaatatggaatctgcaccattattcccaccagaagatatggctgaaagatggtgtaaatatgcaaccctcacactgacaaagtacagaacatgaataggtaacaaaatcatcacggggattatgtccatactacaggcaaaccaaataattaagcttgcgacatgaatttaggaaagaaaatggtttttccacttttttcagtctcaggataatcacaaaaaaagtcttacaatatttgtattaaaagtctcaataaatacatatatgaacagacacatacatacacattcatacaaagacatatgtattttagtgatgctatagaaagctgttttctatttatatgtagcatgatcttagttgtgaaatgtgaagtctaaactgaatgtagttgtggcagacttccctttgtggtattaaggctatctgaagatcactacaaaagaaaaggaaaaaatgaagcaacaataggaagtatatagaaaatatttcattatatttttttcattgcagttaaacaaactaagaagt

SEQ ID NO: 38032 - DNA, 966 bp, Bovine  19866880865352
  misc_feature (1)..(1): n is a, c, g, or t
natgctttctttttattcacagtgaatcatttatgttatctattcaaatggctatggaattgacaaaagttaagatcagtttctctttgccaacttactatatttccacctaagattcagttttgtttctgttttttaaatatgtgggtacataaatatgtcagtgtagctatcatggcacaatggttgctttttttggcaaaaactgaaaataatttttgacttattggatttaaattgaaattacttgtcccaaacaaattccctctccaccctctcatttctgccacagtaacctgtatgcaaatggtaaattactccaggaaaatgcaaaatgcttatcatgctgtatagtgactaaaaacaattccaaacacactggtttaaagtcactgtaagagggcagtattttaaagacacactttccacaaaaagaagtgtgcctacaccacagggtgtaaagccgcttctgagatctaaaacttagtgggctcagcacacgaaacctccctcctggtgagtgttaaatgtgttcattgagtggctggactgggcatcattttcaatgtttattttaggaaaataaagcacctctctgcaaagccgcgatagcgtagctgaagaattccatcctattaggaagcgcataacttattctccttcctgttatatgcaaagtctaaaatagaatagtgtctggtttacacaaatatcaacttttgaaacattatccgttggccaattataatcgggataaatgttctaacagctaatattttatatacatttcctattgaaggaagtgctttgtatgttgtaagtaatacattagtccaaaatttgttttaatcaaattaaattatatatgtggcatatgtgatatatatactatgtccactgtaaataaaatttcgaacattatgtgttgtttctttattaaaaaggagaaagaaagcctacttgtat

SEQ ID NO: 38033 - DNA, 1225 bp, Bovine  19866880868047
  misc_feature (1)..(1): n is a, c, g, or t
nctcctctacaaatgccatttctgaaatgcagtggcccaaacctgcattttcagtatgcttccttcagctctgcacattgcagttttgaacatagttaatgcttgctaaagattaaacaaatttggggaccaggttcagagaaaaagaaatatgaattccaggtatccttacttcttgtacagtttggctttgatacttattaagggctaataatctgatttttttatacctcatttctcatctgcaaactggagttaaaatggtgatatactatgtgtgtcttataggattactttatgtatcaaaaaacatgagattattttgaaaactgagcagtctgctacaaacacttggcgatgttactaatctgtatcttctacactgtggataaggctggtgtggtatgtagagtacataagcattgtgtaagcctgcttttgcaaacacagggtggcgggaggaaattggaaccctgggtaaaatacatagtaagttccaaatgaacatgagataataaaaaggcttgtaatatgtatttatcagtcggcttatggaaataagcaagaatgaccatctatgaatgtgaccttaaaaactgttaccaataagtgaatatctctgtgaatatagttaaatatcatcagagaagaagtctgagtcactgtttacccacaaaaatccaaatttatttctcatttactaaaaaagcaatgaactaggtatctttaagacacaaagtgaaatgcagaaacctgtaaattatgttcccaagcatgttaagataacactcatgccagtcaaatagttctacttttttatttcttatcctgcaaaaacatctctttagtataggtggtattttacttctaagatgaaattttaccagcttaacattttttttctttaattttcctcccttgctatgtcttgctaggtacctaagaaggacaaagctggaacactgaaggcctgatcatggcatttatctaggactctgggataaaaggaatcaaatgggtggacccatccacaattaatcatgaatggtgatgtctttattggctactgaccttgcaatgagttgcatgagttataagaaggttctctgttacctcagtccctattctcttgaaggaggatataaatcacttgagcctcatgaatttctcatatttacaaagtagtcttccaaattttccacagaggatgcaggagaaccactca

SEQ ID NO: 38034 - DNA, 1481 bp, Bovine  19866880978147
  misc_feature (1)..(1): n is a, c, g, or t
ntttgcttgctaagctattgaaggtagatgtttatttaagcccagaattatttttttgcttcctgtttcagagtactctaagctaatcaagaatataattcattggtggcaaacttttggacatgattttgcaagaaatgtaggtttaaatgcactatgattttcacttcaatttgctaccataaaggtgacatctatatgaaaatgatatgcactttagagttcttttaaattgagaacatatttcatattttccaaagttctttaaatatgaataatttgagttttgcacatgcattccttgtactttgcttgatttttaaaacagaatattataaaatgggattgagtgggaaaacatggattttgtgttgcttcattcacttacagttaaaaatattcttttgataaaaaggaagagaaagaaaaggttaaggcagaaaccaaatcttgcctactgtgtgcacaagtacatacatgtgtgtgggtaaacatatatacttataatttagagttgactgtgttgccagtggcagctctgaagccaaaggggttagattgtggggcaatatcatggcattatggggcttacggggcttccctggtggctcagcggcaaagaatcaacctgcaatgcaggtgatgcaggagacttgggatcagttcctgggttgggaagatttcctggaagaggacatggcaacccactccagtattcttgcctgaagaatcccatggacagaatttatggcatcgccaagagttgaacacaactgatgcgactgaacactgcacaacacagcacatcgtggctcttggtcatcacacagaagattaaatatttctgtaaagttgtggagagcagtaaactggggatttaggctcccattcttcaaacactataaaacagcaagaaatgaacaaacattcacagcttattacgaaatctgaatttttccttatactctcctctttggattactatatgcatcctctttccctatctacacttcatcatctcacacaggagcccttctgatttttacttttatctttatacctcactaaaattttatttctttttatttctatttcatttttatgctatgtatcttcaatttcttctccaaaccctagttactcccttaactaccacacatcaatacccctttcattctatcactatttctcattttcttttatatttgatctttctggattctgtgctttgatgtataagtgatttcacatatatctgaaccaacacttatcaaatagataagcttttgctctaggatacagaatgatatgcatcattatatcctgggaagaccatgtgataagtaagtgggatcatttggggaaagcaactgtgtctatagttacatgccataattataaatgtaataattatattgaattattaaatctcatgtttaaatatatgcatacctatgaaaatatcttgattatgtagtaat

SEQ ID NO: 38035 - DNA, 2205 bp, Bovine  19866881036357
  misc_feature (1)..(1): n is a, c, g, or t
nttataacctaagtatgatttttgcatctgagagtaaaacgtccaatgtactgttgccaatatgatggttctcttgcctattttaaatttgataaattatgggggtgccagtaggctctacataaagagcctactacaaaaggcagcagctttacttgcttagaccatatcaacagtattgtgcccatttatggttactgtgtcttgagaggccacaacagaaagcagtgtgaccagattgaataatcagtactgaaacttattttcttaagattggttgaaggaaatgaagacatatagagaagtcatggggctttagggatgctgtctttggatattaaaaaggatatagattaattgttcattgttctaggagataggacaaaaagtttcacttatgaaaaaaaagatttacagggcaaaaaagaaagtatgaaaattagcctactgagaagctatgtggaccaccaggctttgatatctcactataaatattttgactattgtctcccaggtgtgttatagagtatttttgtttttttacatttaagacaatttcataagcattgttattatgagtagtagtagttctaactttcagcatgaagacaaaataaaaataaataatcccaaggagtcattttatctaaaacattttatttgatattttattttggaaacatgtaacttagcaagtttcacaagtttatattcctttccaatactatacagaaacaatgtaactgatgaattagttttttgaaatctgaaatgcacacatttgattaaatcaaatttagatgtataaatttgggtaattttatacatgattgtctatttgagtaacacttcattaatcattctgttgtgcagaaatggccgtaacattccagggcacagtttaaataacgttcagtcttctttcttggagtttaaattaatcctttggcagatctaggcaacaaaataataaaagcattaaattttacttctaatacattaaatttaaaagatcccagggaatcaattttgctctgtattaacacattttccagtgattaagttcatgtttacttaagacaaaatgatggagccaaagtattactgttatactttataataaacaactatgaaacacttatggagagatttcacaaaactttgtctttttctttttcttttcactgtttattttcagttctgtagtgtctttatattctttttcattattgtcatcattcttattcattatactttccaaaacatttcatatccatcactagttatttgtacttgaattttcagttgtcatttcaaacttgtcagtgattaaaactgagcacattattgtttcttccataccaaactcagctgatttttctgtttatcttaatggtaatttctgttttaaataatcacacaggctaaagagctgggagagttcttataattgctaaggcaatctaatagaacaaaaccagcttacacacaatatggaatattattttacagattcatttaaagttataacttagtttttaagcattcgtatattatattatcttcccaaaatttttatgacatgaaataaaacctcagttcataaatgaggaaattgagagccaaatttgttgctcaagatcagaaaagctagaaaatggcagagtgaaaatttgaatgcatgactacacattcttgatctttgtactgtattcatttaaggggctattattatcacatgacaccaatgcatatgcttactttatctagtaaaaatagaatgactttgttacttattataactgtaaataaaattattactaaaaatgtgtctaataggtaaacctcagttgaatatacatattttatgtcagatctgaaatactgatacgctgtatggtcagagctcttgtttataattataacccttctaacattaagcaggtgactggactaaatgtaagtcagacataaaatgccctgcatgtagcaacatagcgaatcaagcaaattatcaaacagcaaagctcattttgtcctctgggcaatttctgctgccagcacttatacatcaaaacttcactcaatgtacgattgattttattttattttggttatttttaattccctacagcaagctatgttacttttgtagaatgctgtctgcatcattagtttcctaagaaattatagttggtttagtca

SEQ ID NO: 38036 - DNA, 898 bp, Bovine  19866881046806
  misc_feature (1)..(1): n is a, c, g, or t
nggcatctgaaaggaatgtacctggactatattatcttattttctggaaaaatgccttcactgaattatgatttaattttatgccctccacttttataaaaggtcatttttgaagaatagtcattcatccatttgcagagccattctgtatcttttgcaaaagctagtgaaagactttgaatatcacataacccgaagtctctcttaagagcattcatgtgacacatttttcctatcatttagtgacagggaaatatatttttttccctccagttaagtttctattctgcttttggaggagtatttaaaacaatgtaatccaaaatgttcttctttttgactgttttaaaaagtgcaaaattaattttacttctttattgttacaattagttcatcctccaaaaggaaagggtcttttttctgatcttaggataaaatatcatttgcctttcttaaacaatggtttgttcttcacctaatggacactgactcttctcccatcatgtttccgtcttcacattacctgcaagaaaacttgaagacaattttgtgccctagctccactaagtgcatcaggcttaacgggatgccttttgtttagtaatctctgctggatcatctcactccttcttttgttgcctttactgtacttcccttgttaggtttgctgttgcacatctgaccatagagttaatgtctgcataaaccatttttaaatagccccttctttttattggttaaagaaaaatgaataaacaacttggaacagctatcacagatttttggtacatggatattcttatatttattattgcaactccattttttgttttccccctttaaaatcatgcaattgctttctgggagtaggcgtgatatgaggatattttataatatt

SEQ ID NO: 38037 - DNA, 966 bp, Bovine  19866881052836
  misc_feature (1)..(1): n is a, c, g, or t
nttactttactaagtatgataatctctagggtccatctatatgcatatgtgtcagttgctcagtggtgcaactgcaacccccatgggtggtagcccatcaggctcctctgtccatagaattatccaggcaagaatactgaagtgggttgccatttccttctccagggggttttcccaacccagagaccgaacctgggtctccaggcattgcaagcatattccttactgtctgagccacctgggaagcccacatatgactatatctggaacatatattttctcagtttctatatgattttgaaaggaattgaatttaagaatgctgggctaccaaagtggttccagccagctctccccactagaacaccagcaagatgccaataggcttcaccaggagctgtgactcacattggggaaattattttcaacaacagaagggcaggcatttttccaggagagcatttaatcacttctgtagggtggggtacaatttgaaaaatgcctctgaacattcctggtgtacctccccattgaaagagagcatgtagttctctggaaaaatatttcttctctattaaaatctggattggagagggtacaatttgaaaagcccctgagttatttttacacccctataaccaccccttcccacacactctctgggggtaggattcaccctggccagctgaaaaatcatttcagtgaccccttgcaaatacatatattttccactgcagttgaaaaaatcttcatgcctatgatctgcatgataaatgaacatccaaaagtatgtcagcctaatgttgaaacgattacacgatttatatgtggttccatttgaaattcatgtctttgatatcttggcactctagtaatatattccttttcctaaaaccattttacaatcaagttattctaattaattttcaggaaggattttgccatttatatatatatatatatata

SEQ ID NO: 38038 - DNA, 4117 bp, Bovine  19866881138467
  misc_feature (1)..(1): n is a, c, g, or t
ncttgggttttttttttctattattttccttatagtttatcacaggatattgatcatacttccctgtgctattaccttgttatttatccatcctatataataatctgtataataatctacatctgcaaattccagactcccagcccttccctccccacctctctcccccttggcaatcacaagtctgtgggacagtgtggagaggcttcttagaaaactatttactaattttttcttgacccttcatcagccacctctcggtgtttggtatttctatgtttaattcttggcaacatctcataaggaaccctttaaaacagttccccaaggatggtcactcttttcctttgacctcttttcttcctctcttgctgtgaaataaaactctcagagctatttgaatacatcagtcaaagaaacaattatcagtaaaattgatgaattataataacaatatcttcccattttgtaatactttttcatttttatcattggaatgaatcattttgtctagtcagtaatgactagatgaccaacatctaaacaattttaataggtatttttggaagaattctttctagaagtttagataacagttgcctacttattggccaatgggggtttttttaaacaattttttaatttttcaaataaataccatttttaaaaattactttccatttgcacttgttacaaaatattggctatattccctgtgttgtacaatatatacttgaacctatcttacacgatagtttgtatctcccaggcaatgttgttttctgaggcttaacttctgtaacctaggagcactgatgaccttcaaaaggctgttgtgaagattaaatgctaaaatggatataatgacatgttgtgaataataacgtgctgtgcacacctgagttactctcactctctcctctgtagaggagacatgctcctctgtagacatgctctcctctgtctgctaacacccttgccaactctctcatcctttctttacctggacaacaccagtgggctgttccggtggtcaagtgctttggaaatcatcagcagttagagctacaatttagaccttactttgctgaaaggatgaaagtaatcagaagggaacttccttagacttcaccacactgacctcctatgggcatcttcatctccaccccctgcttctgtctagagccagccctgccctggtgcctccatcccacccctctcccatctgaataacactctaggaaccctccctctgcttcattagtgtttcattctctactcgatcattaccatcagcaagtaaacatctaatttctctccttccattctcttttaaactcactttgatgatccatctgactttgatcttgcaatgccgcttggttagaggccaggttgctaaagctggtggtcagttctcagcttccatctccctgaactattagctgcatttgacataaccactcactccgtctatcttgatatgctttcctccaatggctttctctacagtgaacaggttttccttccatctgctagccttcttctttgctgattcctttcctcaggacttttaaggatgaagcgaaggtgtttgggactcatcgcttcttcatctacacacactcagtaactccagtttcacagatttagagatcatctggatgtaaagagttggacacagttgctcacaatgcagtggttagatgccaaagacttccagatttctgtttccattccataactctctccagactcataaatccaactgcatccccaacatttccactgggccatacagaaatagctcaaacaccacagcaatttgcaactcttgctgcctgctgacctagcaagtgatggtaactccattcttctaggtatttaggccaaaactcttggatttattctcacctccattctctcactcacgccttattttcagtgagtcaggaaaccctttcgaattgatctttaaaatatttctagaattcagtcacttttcacacctccactgctaccaccctgatgagctgctctcatttcctgcctgataaactgtaatagtctctatctggtctcattacttttcctcttgatcacctaacaaatctgtgaattcctaacacagaagacagagtgatcctataaaacacaagtcatatcatggtgatcccatgctcacaaccccaaaatggctccccgtttcttacaacggccttgttccttacaatggtgcatgagacctggcatcccagctcttctctgaaccttctctgttgcaatgacactgacttccttgaagttcttcaccatgccaggcagagaggggcaatttaggggcatttgacgggttgttccctccacctggtttactcttctcccagataatattaacttcccatctccaatctttgttcagataccctcttgttaacaagacctgttctgacaactgctttcatggctgcccactccactctccttacctcactactttttttttcctttttttttttttttttaagatcttttacttaagtctttgtgtgtgtggagtataattgctttacaatgttgtgttagtttctgctgtatgacaaagctttatgtatacatatatctcctccgtcttgaacttcccttccacactcccatcccatcccattaggtcaacagagtaccaaactgagattcctgcactatgcagcagcttcccacgagctcggacgtgactgaaatgacttagcaggcgtgcaagcattggagaaggaaatggcagcccgctccagtattcttgcctggagaatcccagggacaggggagcctggtgggctgccgtctgtggggtcacacagagtcagacatgactgaagcaacttagcagcagcagcagcagcccacgagctatctatttcacacatggtagtgtatatatattaatgctgctctcccatttcactccaccttccccttccccccacccatgtccacatgttctctacatctgcatctttattcctgccctgcaaataggtttatctctaccatttttctagattccacatatatgtgttaagatatgatatttgtattactctttctgacttaattcactctgtttaatagactctagggccatccacatcactataaatgacccaattttgttccttttatggctaaataatattccattctatgtatgttccacatcttctttattcatccatctctccatggacatttaggttgcttccatgccctggctactgtaaacagtgttgcaatgaacattggggcacaaattctttttgtttttaaaaagcattttcaccttacaatatgcaataaaattatgtatttgttatatttattgtttacagactatttcctcctattagaatataaacatggtgtgaggcagaatctttgttttgttcactgctgtatattaaagatttctgaacagtgcctgacacatggtaagcacacagaaatacttctgcatgaaagaaagcagggatttcttataaaatgcatcctgtgttttaaatggactttagcagttgtcctcaatcactcagttgcaaattcctttaaggacacatttttatctctgtatccgcatgagtaaatgatggactaaaacaagaaaggagggaaggtggatgttgattgctaattacacaactgctcttaactttattcactattcagatgcttctaaaagagaagatttttaagaacagaaacctgaaggaatgaaattcacacatagtcacacaacactgtaaaacagatttgctaagacaaaagtaacacaacattgaaaatatttaggcatttttcatgcttatatggtactagatttatgtttaaatttcttcatcaatagtaataagataattcagtagcgatagatgaaatttcacacaagatagtcattaatttttacagatatcatctcataatgaccttggaaaatttggttctgttgttactagacaaaattttataatgcacaagtattatactatatgtcatgtgagctttcgattaaggttaatattactgaaataactacatctgctttcctctcactgtgatgttatca

SEQ ID NO: 38039 - DNA, 1073 bp, Bovine  19866881144948
  misc_feature (1)..(1): n is a, c, g, or t
nttggggatgagcagatatatactaccatataaaaaatagataaaataggcctgctgtatagcacaggaaactatattcaatattttataataacctataatggaaaagaatctgaaaaagaatatatatatgtataattgaatactttgctatacaccttaaacattgtaaatcaactatacttcaatttaaaaaatcttgaccatagttatttcaagattatgttaaattcaaatatgccactttaaataatctcattaaaattagttgaaggactttttcaacacgttgtcaacattttgtataagaaccccttctcgctctctctccccactccacccccagtggctcagagagagagactcacataaacacactagaagcttggtcaggaaattagacatcttatctttgggtctgttcaataaggaccaataacctaggcctgcagcactcttcatgataactgcctttacaaaatgaaattttgacttcttcacagcttagctacaagaagacaggatcagtggactgcatttctgtaaatatgaggatagtgaaagatttcagcatctgacaggggaataaacaactgataaaaaaaatctttgaaatgttctcttagtgcaagcaacattttttatgtggacttacatttttattattgtttactttcttgatagactgaaggtatactaaacatgaagcacataaactgaatgaagaatacaaatatcaataactacaaaaaaggacatgaaccttttaagaaatacttgttaaggtccaattatccttgatattttaactgtgctcactctgttgaggtttggaatcattgagtaatatttattaccttaataacatcaacaaaaatcataaagaaaaggaaaaaaaatcttgaattatattgaagttttacaattaacaaaaatgtcagcaccagatcttttagcttctaaagagtaaatgatagcttgatagttttcaaagtcaggaattgcagctacgtggacgaaaagaaagaaaaaaacagcatctagattttaaaataatatatcctaaatcttag

SEQ ID NO: 38040 - DNA, 1799 bp, Bovine  19866881172655
  misc_feature (1)..(1): n is a, c, g, or t
ncttaatactctaatgatagtatacgaaagcttaaaaaaggaagaaaagaacttgaacatttattgagggcttttgttttgtaccagtaaatatattctaagttcagtatcagagtgtgcatgtgtgtagtcagctaaggtaggtatgttgttaccatcctcaccttacagacacagaccctgatgatgcaaaatgagataaagtgactgcctgagttcacactactggtaagcaactaagtgaggtagtccaacatcatcaaacttgagctcttaactattaaatcttattcaactttttgattatacagtaagctaccctatggcaccccactccagtactcttgcctggaaaactccatggacggaggagcctggtaggctacagtccatggggttgctaagagttggaaacgactgagcaacttcactttcactcttcactttcatgcactggagaaggaaatggcaacccactctagtgttcttgccttgagaatcccagggacggggggaagcctggttgggctgctgtctatggagtcacacagagtcggacccaactgaagcgacttagcagcagcagtagcagcaaattatatatatattattttataatcagttatataaatagatataatttgcttttgccatatactattattatatattggagaaggccatggcaccccactccagtactcttgcctggaaaatcccatgggcagaggagcctggtgggctacagtccatggggtcgcgaagagtcggacacgactgagcaacttcactttcacttttcactttcatgcattggagaaggaaatggcaacccactccagtgttcttgcctggagaatcccagggacagggggagcctggtgagctgccgtctatggggttgcacagagtcagacatgactgaagtgactcagcagcagcagtattatatataccctaaaatgtatcctctgtttagagccattttgatagctttttaaaaaataatgcattactaagccatgaagctttggatcctaatagaagttttgaatccttctattcaataaatttttgaaatctactctacagcaggcactctctgagttttagtacccatagtaccccatgagagaaaatgtctctgcctcagaggacttacatttcagtgaagaagatgcaaaatatgccactaaacaaataaacagatgacaatattacataataaacgacatgaagaattttaaggagggaataaaaagtttgagtttggagggctagtccagacaagatgtgaagagaacggttttccccagtgatgactgaacaaaggtgaaatgaatgtaggagtgagccatgcaaaacctgggaggaaaagcattcaggagggaaacagagagccaagtgcctggtgcagaaacaaattggtgccttaagaaataaatggccactcacgttgtatataatctcagtagggagtggcagagaatgagccctgagagacaggtgagtattgctaacatcacaaggggttacataaactatgtcagataattacacatggaacaaatcagtctaattttcttcacaatatttaattttaagatacacttatgtgttgccctcacgtagtattaaacctagatattctaattagaagcaattgaacctgcatgccaaaaatatttgtcttcctaaatagtttaattaaacatagaaaaattttgctttactttgactatttatcttagtgaatacaaagtgactgcacaacaggaatgaagatatttgataagtgg

SEQ ID NO: 38041 - DNA, 1810 bp, Bovine  19866881200174
  misc_feature (1)..(1): n is a, c, g, or t
ncccaagaatactggagtgggtagcctatcccttctctagcagaacttcccaacgcacccaggaatccaaccggggtctcctgcatcgcaggcagattctttaacaactgggcttccccttgtgcctcaggtggtaaagaatccgcctgtgatgcgggagacctgggttcaatccctgggttgggaagatcccctggagaagggaaaagctacccgctgcagtattctggcctagagaattccatggactgtacagcccatgaggttgcaaagagtcggacaggactgagcgactttcactttcagtttctttaccaactgagctatgaaggaagcccattatagggattaaatgagcttacatatgtaaaagaacttactaactgaaatctaataagtgccaatagatggtaacaattactaacactttaatatactgaaaactgtattctcattaatgtgtgagaatgtgcataagtgtgtgtaactaccccaaatgagaaaaatatttatcagaagccaatggaggaattaaaatcagaaagaccagagacaaaaattcaaaaacatcaatcagttatcttttgctaccttgtttctttaatcagacttaagcctttgctaaacacaaggtttcaacaaccttgacaattaaactactttaaataaaattcaagaagacaagggggaagaggaggagaaaacaaaaaaaagggctaggttgaaagaatatcaggttggggagcaaaacttgggttcctatgaaaagcattagcagatctttaatgcagccattaaaagttttctgttcaaagagttattggagaaagtactctagttaacaactgaacaattaaacataaactactatatcacgaaacacaggagcagtcagactcagaaatttaagaaaatgtatttagtggttgaggttaatcagagtcccacattcccttaagaggccagttgtatagattagaactctactaggcttttagagtgaaaacagataagaaataaattttagagacagcagttgttcaacattttaaagaacaattcatcattaatttgctaatgtttgatataatttgcatggccatctcaaaaaatatagccatgtatgtttccaaagactgcaaaacataaagttcattaataatcacataatttttcaactctaaaagggatttaagtgactcacttactggcaacagtacactgaggtttgattctctaatgtaaaatcttaggttgcaaataccaaatgctattgttaaaagtctcctgtgtgaagtagattggtgaatacacgtcaaaaaaaatcatgatcaaacctggcacttttgttgacagactttgtagtgaggtcgaaggtgtaattaggccagaaaattactttctcactactaaaattgttcccttcaggtcttgagttatcagtccagaaaatttcattaaacactaaattcactttaagacaactgtcaaaattaagcagaggtgagtcaagtcaaggtcctaatattcaaatctttcatttggatttgagagtcaatgtaaaataaaaactgctatctattcatttttctatcaagactcaactttttgaaaatttcagaaacaacatgtttttttccctttgaaaaacaaaatgaagtagaataacaaaataaatgtagaatttgaaatgcttaataggcataaattgttgaaattgtttctacttcctgttcattgagatcttaatatgaaactggtaaaaatgccaagtggtcacaagtattggcaaatacaatgcaaagagaaa

SEQ ID NO: 38042 - DNA, 778 bp, Bovine  19866881225102
  misc_feature (1)..(1): n is a, c, g, or t
nattttttaagctctataatcatgaaattgtgtcactaaattcatgaaagtgacatgctccagctattctcagtggagagtgatcttctggacaatattcacctagatatcttcccactcaggttagaaactcatattctcggactggactacagagagtatttgggctaatactggaagcttcagttctctattttaaccttgagttaagcagaaagagttgtttaacattcaggtaaatacggaacaatgcagacgacaaattaggcagaagcgatgccttgaataaatgttgcagtatgaatgcatgagaatgatggtaaggttgtagccagtggctgaacctgcatctcctgagtctcctgcattgttaggtggattctttaccacttgagccacttggtaagctttagccagtagccagggatcagtgaagtccagggtgaatgttgggaaagcagtgaaaataaagctaaatgggagatggtgccaaattacaaagagctgtgaatacagggtaaggagtttgcattgtatcttgtaaatcgacatctctgagatttgggggcatgcattttgaattgggcagtctgatatttttaagtatttgctcaaggaaagaaattgagaaaagtatcagatattttgataaaaggtaagttctgtcagaatcccacacggatcaagggaagaattagaagtttgcaggctgcctgtggtatttcagtctgtgtggtttctagccaaatgaatgggatgggcagagaagagggacatg

SEQ ID NO: 38043 - DNA, 1548 bp, Bovine  19866881364195
  misc_feature (1)..(1): n is a, c, g, or t
ngtcattcacatccccctccctcctcctcgctcccctttagccaactgggaattcaacaatacaatcttgactggagtcttcagactataccattagcttattgagcaactgcacctgcttttaaattttaatgatgcatttttaatatgataaatagagtatacttgaacagttttatgcaggtcggataaactgatttttgttactcttccaaatatcactttctgaagaatagacttctaatcataagcttgatttagttacagaggtgcctgtggctttcaaacgactccctgttttgtcccagtgaacagaaaaatagagattgggagaaagtgtattaagggttttataaatggaaacattttaacttagaattgatgagttaaaagaaaaataagctttaccaatactctcactgacagtgtttaaggaaacttctgtttactgaaacacgataaaggtgacgtgtagaaattaccatggaagtgattcaagactccattattccattgcttaggaaaacagaattcaagaagatttgctatggaaattgcctgattaagccaagaaatcatctggaaatcagactgatttaaaacctgggctcttctagcacatcctagacacctttaatcttataattccacagggagctgacagtgacccaggagtgacagaaggaaagaattttattgcggaggggaagactacgtaatccgtgaagtaaaatagaatacagaggtggaagatcgaggcaattccccaggtaattttaattaccccagttatctagatatttcacagaaagagaagatacttgatttaaatgaatagaatattaagttagtttctgaagttttactttagtttcttaaaaaacattttttgaaacaccattatctttttaggtgtcatttctttgtaaatataaaaatctatcactggataagaaatattttgtgtttcctgaataagtgacattcctcatttgcttaaattttttttgttgttgttctttctgatatgagtgctattgcacatacatttatctttgtgtggctcttttgaagtgttgcatatatattttttaaaaatacagaagaagctgcatagctgaaatctgaaacaatcatcttaaaatagtcttcatttaaaggtaggtatagaaggtatcagaaagtatcaatgttttctgaaaaggagcattagcaaaattgctttaataaatcttatgcaataatacaatattataaaaatggtccaatttagtcctaaatttctcataaagcataacacaaagtcctatagaactacaaagtagtatcttgaaaacacatacaatatgcatatgcatttatatcaaaataactagcgttcaaacaagattacggacaatgcaggcaattttaaaaggaaaaaaaatcctttttaacatgtatatataggaatagagaaaataaaaatcatatgataagaatctcattttttggatgagacaattcaccagaagagtgtgcatttttttagaccaggaagaagaatca

SEQ ID NO: 38044 - DNA, 695 bp, Bovine  19866881373917
  misc_feature (1)..(1): n is a, c, g, or t
ntctttactgataatggagaaggaaaaattaaaacaggtaaacgtccattccctgtagaagacactgcatttcaggatggtttttctgagaggtaacatttttgaaattttgggtttggtgacacacagcttgctgtcttgactgactgacttctctccacctattattaattttgacggggataaatgattctgtgatttgggtttattacttggtgccccttaacggttttactttatctgagcactgcaagtggagttaaaaaactggagacacttctctgaaaaactcttttgaaatgagagtgaaactgttctgtcactttaattaccacgaagttgcacagaggtaccaaatttggcaacagagccttagatagaaggtgggttcgggggaggatgctactattgacattgttctgttacagcaattttagatggacaaattgcagttgagaaaatttcatgactcggtaaaatgagcaatgatgacatctgtggatgcgggtctgttcatatctttgcagagcctttagggaaataaatatctcggaacattcggtgaagtgaagctcactcaataaatcaacctgacacaataacacttctggcacatgagccctacttctccccagcaacacctacccctctgtgttcctgtgctaccaaatggtgtctccccacaggcctctaaa

SEQ ID NO: 38045 - DNA, 1167 bp, Bovine  19866881457027
  misc_feature (1)..(1): n is a, c, g, or t
naattgtcttaactagtgttagaaatacttcacctttattcctctttttccttttggaaagttttagtactaacatagggagacaccctaaatttcacaacccaattcaatttttcagctacaatgaaagaataactattcatgctttaaatattttcatttatgaattatttcctattgaaaggtagcaaaagagccatcaattctgctgcacaataataaatgcatgacgagaatgatctagtcattacatttttatctagaagcctacctttagtttgagtattttgaagcagtgagccttttgatttagtttttaaagcctctggcaggtggcaaaattttgttccaacaacattcatgtgatttagaacaaaggaattctttcaagaggtttgtggttttacctttataccactttcaaagaaaatgagatgatcatttctttcacattaaaattaaaataaacataaggggtaggaaaaattacacattagagcaaataattgcacttaaaaaggggcttttcatagatttattcagaccatactttatactcataaaaacaaagtgttcacctgcataactttttcacaatatgataatttaatccttactttgcatgtcttctatttgatattaaaaattcctactttaaattcaactgtacaagctcattactgctttgtataaaacataacaccttatatgctatgatcttaatataagtgatttaggttatacaattactaacccatgtaattctaaaatactgaatagtttttctaagtgcctgagataaatgcatttctgacataactgttacttgagaaaaagaaagtctataaaaaattatttgactaaagtatacctgactttaaaaaccagctttaatttcaattatcatcgaatatgaataggactcacctcttaaagttttggttactggtgttttaattcttccagaaaaaaacttagtgggcttccagaaaaaaaatattttgataaaatattactctcgaaaaaatactcacggtaaacttattttactaagtatacacaaatattttttaaccagcaataacatatatagccctatttcagggccaggagagaatagtttagacatgataaataagatgccaacaaaattaacagagcttgtca

SEQ ID NO: 38046 - DNA, 685 bp, Bovine  19866881472526
  misc_feature (1)..(1): n is a, c, g, or t
ntgtgatttgggggtgtaattgtttcctgagcttacaacattaaagctgtgatagacacagatttcaaaataaggaaactctgatggggctccatcgagcctcaagccccaagtagagaggagacttagcattcttcctaagttgggaagaacagcagcactgtggcagtggtcataggaatcctcctgctattatctctgaaggctccagtatcatggatcggaactagaagaggcccagaggagtctccctagaatttataattttgcattaaaccaaaaagcaaaccaacaaacaaaaaatacaaggaaaaataaaaaaggattcaatttgtctgggagactgatcctagacaggtgaaagataagatttcatctcacaagaggagacaggttgtggttgcgagagaaggcaaggtataccggtattttgagtcctaaatttataattgtggcatcaaaaccctataatttggaaaagtaattgtgatgaagatgtttgcatttctgtgatcattttttcttttctttttttctatttagcatgtggtaagttccttaagaaattacagtgtttcagcagtgagaaagaaccgagggagatttcatttgttttcttttgccacacttggtcaaccaattcattctaggggatgacgtataatggtgtttataatactaaaat

SEQ ID NO: 38047 - DNA, 479 bp, Bovine  19866881647808
  misc_feature (1)..(1): n is a, c, g, or t
ngtgaaattgtagtatttattatagctttagcttatttttactttaattgctttttttgtctaggaacaaaggatgcaaagacaatatttaatacttttacttaaagaaatattttaatttatgcaaattttatgcttttaaagcttaagtattcaattgaaagtttctataaactgagacacaacatattcagtcattttacttaatgtataatttcaatctttggaacatgatgtattattctttgaagaatttcattaaagtaaaatccattgagcaagtaagatttgaatacattgttgtacaataaattaatttatttcaacagcttaattcttttatcatatttatatgcttgcctttccagagtatgctataagatggagaataatggagacagtaaagaattgcttaggggagaatctcataattattactgaaacaaaatagataatgagttttattcagacataataag

SEQ ID NO: 38048 - DNA, 1572 bp, Bovine  19866881717626
  misc_feature (1)..(1): n is a, c, g, or t
nccaggtttttgtgaacagttgttaaacatagcccattatgaaaaattaaaagtacatacattccccaattagataaattctatttaaaacaagggtaataagtgatcaacacttatcattctaataatttcactggagtttactattattaattctctggatgttatttctctcttttatctgtatgattgaaatagtttataatgatgtactaccttgaattcctttcaaattctccatttagtgatttcacattggtagcttgaaatcaggtaagactggagtacttatgtcacagaaataagcattctttacaaatcagagcttgggatattttttaaatttttaccagcaccccactgtatacattccatctaaaatcaccatagaagttatataaattttaaatctaaaatgaagtaaggcttgaagggattctttttagagaaatacattgagttgacactttctacatcttcagtaaagatgtttgtggaatattattttctcctttaaaaacatgtctgactttatgggaatactctgatgtgtgaattagaccacgtgaactaaatgcaagtctgttagaactcattcactactcaagaatagagatcagcagaaaataagaggtaaaatttagtaggctaatgagatatgatggaattttctgagagttaattcatttgtaataaggaggaaggtctggactactgaatggggaaacaagcttttactatataggaaggtgtttacattacatatatctattgctacaattttgatctttgtctgaaaaaaaaactaaacctttcacaagctaatcatcttccttatcttcttattctgactaattagtaattataaatcccctattttaaaacaggatctaggacacaagaattgttaaaaagttaaatcaggctgggctgaatgcctaaagaaactaaaaatttagtttaacactcctgggatttttatgtatgtctctgtatctatgattgagtttattagacataactaattgaaaagaaaagataaaatatctggaaattaaacctcacataatgttagtcagagataaggaaatatttttttaaatgaaagtccaatgtacagaaaaaaagtctatcaaggtaacttaattagagggtttttttgttttgttttgttttttgaaacaaatttaaggggttcaaacttacctgcacttaaaattaatacatagagacagaaaacttactccctgaacccaaaactcaagtactttggccacctcatgcgaagagttgactcattggaaaagaccctcatgctgcgagggattggggggcaaggaggaaaaggggacgacagaggatgagatggctggatggcatcaatcgatggacttgagtttgagtgaactccaggagttggtgatggacagggaggcctggcgtgctgcaattcacagggtcgcaaagagtcggacacaactgagcgactgaactgaactgaactgaatggagttcagttcgttgctcagtcatgtctgactttttgtgaccccatgaactacagtacaccag

SEQ ID NO: 38049 - DNA, 1950 bp, Bovine  19866881766176
  misc_feature (1)..(1): n is a, c, g, or t
ncactcttttcgctgtgctgcagttctaaggaacttggctttcatcccagtgtgtctccagtgtttgagtgcaggctgcggacactgacccaggccatcacgtcgcctcttccttctaaaaacagttttgaaatataacaaaatgcactctttctcagcgtgatgactgtggaagaaagtcataggattcagttctagaataactgcacagaccaacctggctgaacttgttttgtttaagagctgatcaaatctgtatcatcatacaaacttttctgcttgcttggccttgttttaaaaacaataccttcaagctgttgggactaaatccaatattacacaacacaaaggttaaccttttagaaaatattgctcagtagaaacatgaacagtggaattagtcttccaacactaagcattttcatcctgaagaattgctcaataatttttctgtagtagtcatagttttaattaaaacattttaatcacgcatgtgctcagagacagaggtagaaagcaattctaaacaaatctgaaagagaacaaggtattaaaagttccatggaaggtgcggttcaagggtgttgtttcatggtttattgagataaaaaacactgcaaaagtaaagacaagaagacaatacttttggccttttgacttagaaaattttctagaccaaggctttactttgtaaggtaataatatgaatagggtttgtcattgccagtggttgctctttaaatgtttctgaaagggaagaatttctttttaatgagaaatccttatagaggaactaataattccacttactataatttctagatatactaaaaataaattatgctcataaaacatattttagtcctatggttatctgattaaaaaactccagaaaaaggatgattttagacacaacttttgaattgtccatatatttcatttctttaaaaatctctgtgtataaaaatgaagcctacaaatggcctggtaataaagtaaagaggctgattccagactttcttatcaaataaaactggtttgcctctttgcaatcctatggactgtagcctgcccggctccatttgtccaagggattctccaggcaagaatactggagtgggttgtcatgccctccccaggggatcttcccaacccagggatcgaaactgtgtctcatgtctcctgcactggcaggcaggttctttaccactagtgctacctgggaagcccaaaactggcttgaattctcactaaaccactcgctagtatgacgctgggaaacttaccaaagcactctgtgcttcactgatctcatttaaaaaacagagttaaagagagattaacattaagagatacatagcacagggcttccctgatggctcagtggtaaagaatccccttgcaatgcaggaggcaggggttggattcctgggtcaggaagatcccttggagaagaaatggcaacccactccagtattcttgcctagagaatcccatggacagaggaactgtcaggctacagttcctggggttgcaagagtctgacacaactgagggactaagccaccaccagcagcataatatataacacaatggggctgttctgcagatttaatgaggaaatgtctacaatgagcttggtcaaatgatagtaaatgatcagtattatcttactaatgtttactattattttgatcacttagaatacataatataacagacaaaaaaggcaggattcttaaagtacatgaaaaggctaagtatcttttaataaatgccatattctagttttttaatggagaagctatgtaataaagcaatttctttcaaacctctgcaaaaaaaaaaaaacaacccactatttttcataaaaaacagaaaagctaccctacatgcttaataaaagactttaagctaaatagaatttaacaacctaatgtattcactttt

SEQ ID NO: 38050 - DNA, 1179 bp, Bovine  19866881816205
  misc_feature (1)..(1): n is a, c, g, or t
nctaatgatgttttgtagaaatgtgttgtcaagtacccagtcctcggcccaaacaggtaaagttgcaaaatatctaagaatttagtgtgatctaacgttttaaggctggctttaaagagggtgttcagatgtgaggaaagcttttaactattaaattacactattagatatgaatggatgggaggaataaaaaggaaatatagactttcttttgagaaagctgatttgagccttattgcatctttacaaatggtgggaaaaccttaaagctctcttcatgaaatgaatgtctagtgggtttgattgttttttgttcatgatttttaaattttatttttattgaagtatagttgatttacaatgttctgttagtttcaagtgtatagcaaagtgatttatatatgtatatatatgtgtatctgtgtttgtgtatactttttcagattcttttcccttatagattattacaatacactaagtatagtcctctgtgctatatagtaggttatctattttatatatagtaatgtgtatatgttaatcccaaattcctaacttaccccataattcatgacttatttttgaataagaattttaagaatagttgaagcagaaacttcaaaatgtaaggataaatggtacatgtaaggaacccttaatccttatgtatgatagttgtaatttttaaacttgagaaatttgcctgtttacaatcatgagcaaatgcatgaatttggtgccatgtgaagatttagcacataggatgcattttggtttaaaatctctaaatataaaatgttcaaatagagaaatgaggactcctagttaaaaggacacatagaaagtatatatggacacttgtaaaatttcaccgaactgttagatagggtgtttgttaagaatcaggttgtgaaaggacattgctaaacaggatgtgaaagcaccaccaggcatcttacaaatactcagcatatcagaaaacagacaaagattcaacgcaaattttcaacttgttgaaagatgctctttgatattgaactggtatttttttccccataaatgcttctcattggtgtgcctaagtttaagagagatttcaaaatcatatctaagaacttaccatgaaatgtgctcatacacttgaaattttacttctcaagttattatcagaaacatttt

SEQ ID NO: 38051 - DNA, 737 bp, Bovine  19866882007720
  misc_feature (1)..(1): n is a, c, g, or t
nctgggaaaacgttaattgcaagaggacaaggaaaagggctgaaacaagaaatgcaatcattaagtgtaatgttgcagttgtctatgcctcattataacatgcatacaaggcaataaaatgcatgtttcacaaacaaatcttttgacaactatagttcaagagcctccagctgtcttgcttttttacatctttttctcttggtttagtaatcattactgaagcttaactttggattaccagaatagtccttcatattatgtaagaatcggggagattttagagaggaaaagtttgttttaaaaatttaaaaatatctgtttcccaaagttaaccagaatttctcgctaatgttttgttttgaaaatgacacttaatagaggcaggaacgtgggagggatcaactcaatttcaacaaagacactcctttcacaaaccaatgttgaaaatatttagctcctttagaactcctttccaccaagaaaaagcactgatcgaaaaataaggttcatcttccacctttagatttgttaatggtttccctggactacagatgtcatatcctaatttttgtaagggacaaatatagttaatcagatgagaaggtcatcaagtctaagtacagcttgaaactggtgaactatcagactcatgagtaaggcagccagaaaggggggaaaaaaaaggtaacagattcagcattgtccaaaagttccagaccaggattaatgtgtaagat

SEQ ID NO: 38052 - DNA, 1382 bp, Bovine  19866880464344
  misc_feature (1)..(1): n is a, c, g, or t
ntatataagattttattttctgaggataaagaattaatgaaagttatgatgccttcctttagggattttaaatgaggatattagatgacaaagacatgaatacacataattttaattcactgttactttcagaatgatggaaatgtatgtacagtgcaacaataatatgaagaaaggtatatgtgtataaaccacagagtggttcacctatcttgtaggttccagatgtattaagactggaggtttaccacaaatcctaatatcacctggacgaggtgaaaagaatgaacaacagatttcttttctaaggagagtcaaaacttcaagccacatgcttgaggtgttgaatattaaatcagcaatcagtcaatggataaaggaatcatttttttccttctgtcttatatagtagcttcttcctaagcatctgaaatgaagcttggtagacaagtaactacatcataccttgcaaatggaacatgctcctacttgagactccttttttatgacagaactcaatgtttccggctttctcgtttcttatttttcgttccatagccccagtttattcttgcctatgatattctgtgatctccttcttatggccttccactatagaaggctgtccttttgcccactcagacttggcattcaggatattccttttgttttgttctaatgacctccgttctgcttaaatttttttttcagtagattcacgtttgtctacattattacctagattgtgacatataatttttcatgccttgattacctggcccagattctcttcttttcttcttgcatcttgctataaaaactttgggattatattagggatatgtaataattttcttatattgctcaaaaatctgatttgtatttgattatttcatctaagtttgcagattttgagcaaagactttatttttattctcggtgtatccgcagagcccattgtgtctagtcctctccttctcccagggccagtgggaagcatcctgactaagtctgtgattagaggattaacatggagcatatttggaaaatacttccagcagtagtgcaagtgaatgctttggtagaggatgaaagacacaaggtgagtcccttggtgtcaggctttcctctcattgcagtgtgatcttctatgcttaggtacttgactttaataagctccattaaaaatacaggtattatttaggagaataatcccctaagaattattgacacaacctctattgttattatatacgttacacattgttatattctactgacataaccattgagagcacacttggaatacaggacaaaggcacagaaaaatgggaggccctgttagagggaagtgatgaaagcattttattagtaccatacat

SEQ ID NO: 38053 - DNA, 2847 bp, Bovine  19866880493892
  misc_feature (1)..(1): n is a, c, g, or t
naactgtatgctaattaaaagaaaccagccacaaaagggccacatattttaaggttccactcatgtgaaatgtctacattaggcaaatccagatacagaagatagatgagtattttccagggacttgggggaagaagggaaggaaagtgactgctctctgggataatgaaaattttctggagttagagggcggtgattgttgcataactttatgaacatactataaaacactgaattttatactttaaaaaaagataaagtttatggcatgtaatttatactcaataaaaaaggagacccctgagaagatgcagccttctttgacacagtgttatcttagcaggtggtgggtggacctacagtagtcatggatgaaggacaaagaggtggggcaggtgtacagaattggagactagaaatctcaagaccctttctattgtctaaatccctccaatgaacatatattacttttacaattcaaaatgacagagggaaaatattgcatttaggtttgagatgttaaaactaaagaaatgttctgacaaatatagttaggaaaagagcagcaatataaataagctaaaattatatcttaatgtgatatttttcccatgaaaataaactgtagatgcctatgtaatatatacacaacgcattaatgttaggttcagtatgcagtgacagtccttatgaaaagatttgcttctatattttattagttcttgaataatatacattaatagaaagagcaccatgctaataataaatgcctgagttttctctgtttctcttatcagttttaccagatattaaataggaacttgggaaaagtgtgactctaactggcaccacatatgctatccatccacatgctgagcacagagaaagatcctctattataacaatatcatatatacatgtttgagtgggaaatgctctttctgaaaaattattaccattttttgatgactagtttccatgcagtatcttttaaatcaaactattatatgcaggaaaagtctgatcccaaagttctttctcactgggacactgtgctctctgagattttcatgagtttggagtttcaaaaaataaatacttacgcaaagacaatgactatgaaatcaagccagttccatgggtcacgaagaaaagtgaattctcctacacagaatcctcttgcaaggattttcacaagtgactcaaaagtatatattccagtaaaagtgtacctaggtaaaagagtccattgtgatattaatccattgtgaaaagaacatggtaccaggtaagcctttataattatttttctcagatcaaccaaaggaagacactgattagagtatggctgatgattaaggggcccattctaactattagaataaattacaattaagatctttccagaaaatcttgaaatgtatatgtcagaaacactcccagaaagtagaggtattttaaagtaaaggtatttactaagaacacaggtatgagatctgcctagaaaattcctgtattgttcctatctgaaatacatccaaggacgtgacatgtctaagaacaggcagggtatctggtaagatctttttttctagaaaagactgtaacatgtattattcttttctaatgttagcaggttaataaaggagaaaaactaattgaaagtacagtaactatagaacatgggaagataatcaccacaatttttatacatgcaataacttcctggtatgaaaaaggaaggataacaaccatagtaagactatattaaaatgtacttatacccacttactctacattcttggtccagtctggaggattactcatggtcataaatatgcagttcgtcagaatagtgcacatgataagcatgctgaatgcggtagcttagagtcaaggaatatgatcaaagaacacatggtaactttgaatatctgataacgacatttgttgaaatgctgacaattttccttagaaaataattctaaaagagcctatagacttaaaaaaaaaaaaaacctctccgaacaaaagagtaatggataaaagcaatttatcctaaaatactaaaattgccatgatgatgatgatataatgaacgcatgcatgcatgctaagtcacttccgtcacgtccaactctttacaaacctatggactgtagctcaccaggctcctctgtccatggggttctacaggcaagaatattggagtggattgccatgccctcctccaggagatcctcctgacccagggatcaaacctgcatctcttacgtctcttgcattagctggtgggttctttaccactggcaccacctgggaagccccaaattgccaaactcccaatctatgcagagatctgcaccaaattatactgagattgatagacctgagtcttctcaggtaggaaagaaaactctatgtttaaataaaatagccaaaaactacattttaaagaaccactgtaagtaagcattttaaaaaggatatgcatgtactaaaatcttaatagatattcttctgagaggactgaaaggagagagcatgtacaaagcaggtgtggcattgaaacggaagattgctttccctttgttcaacactatgaaagtctgcaggagcaaaaagaaaacagtatgaattgaaattccaaaatttcaatctagtacattaatagctacagtttacctctgcatgtggtagagtcatattaaagaaacactgccatcagactcaagcaatatggttccaaagccattgatggagatattcacgtcatgttagccaatgaactccaagtccattgtccatttcttcaataaaataagaagtgagccatttatgggtatg

SEQ ID NO: 38054 - DNA, 4011 bp, Bovine  19866880513394
  misc_feature (1)..(1): n is a, c, g, or t
ncataggtcttcaggcactctgtctatcaaatctaatcccttgaatctatttgtcacttccactgtataatcataaggggtttgatttaggtcataccctgaatggtctagtagttttccctactttcttcaatttcagactgaatttgacaataaggagttcatgatctgagccacagtcagctcccagtcttgattttgctgactatatagagcttctccatctttggctgcaaagaatataatcaatccgatttcagtgttgaccatctggtgatggccacatgtattcttcctttgtgttgttggaagagggtgtttgctatgaccagtgtgttctcttcacaaaactctgctagcctttcactgccctgcttctttttgtactccaaggccaaatttgcctgttactccaggtatttcttgacttcctacttctgcattcccgtcccttctaatgaaaaggacatctgttttgggtgttagttctagaaggtcttgcaggtcttcatagaaactttcaacttcagcttcttcagcattactggttgctgaaacattacattcaagaataacatagacttacataaagatacactgacttataatggttttataatttttatacctgtttctcatatgggaatgctctgaaatgtaaaatgtagatattctgttttaaaaataaatggtgacatcgaggtttacagtttagtatttgcaaagttatattgaaggaaatattggaatcatgactagaggtcaagttctgagctttagtacagtgccttccaccacttcattatgtttaacatgagttactttgatagtagatggaagaattgagcataataagcctacatatatttgctcttttttgaaaaaggaaccagcttagccaataagtctaaatgtgtctctgtttttttatggttctcataaagacacactgataagagttcaagagaatgaaccaggcctttgcgtgaagaaatttttagttcatagtttgtgtggggaaaatgggaaattaaattacaaagtctgagaggtttcctataattagtggctattgtattacttttgcttatgacaatatgaggaaagggaaaaatggaagaggaattgctatttcatttctttattattttcctaattgctttttttaaaaactaaaacagcttattcttcaaagaagccaagccataatcatttcatcaataatattaacctgtcatttcattcaggaaatatgaggcaagttttgatcttaattttaagaaaactaggagattctcatctctcttttattgtcttgtaagcatacttgcagaataatgaggtcaatacacaggaaatgtctcagacttatttctgtggatgttatataaatatctacaaaataataatcaattgagtgatgactgcatatactttccaaaaatcttgtcatgaagattctgttcttgacatctgagaaattatgatatcttacaaacagaaaaaagagcaaataaatatatatcaatatatattagatatattataataatacattatatttactttaaaataatgtagaattattgtgttatttcaaggttgactaggaaacataaatgctttcaatcagtggtgaggccaatctactcagtcaatggcacatagaggtttgtgactaggccaatcatgagccctacaattaattcctacagttagttttcctgcctttccttaagactgtgatacttacaggatcatgtttgcaatccttatcattaagaaaacctcccagactcatttttactagcaaagtaataataacaatagtaataaattgagcatctcccagtacatgaatttataccactgctaaattttaaagcagtggtaaagttagtgtaaactactaacatgtagtttacatgtacaactacaaaatagcatatacattaaaatgtggacataaaagattgaaaatttaaaggcaataatttttcaaaaaatcttcaaacatccttcttagatgtgcataatccacttggagacagcagaatatgcccttcccatgttcaaatcacaatttatttgacttgctcaggcctcaaaaccaccaccaaaacttccctggagaactctggaaagcatgtccctatctattcctgccttcatactgcaaaaatacttttagaacacagaatactttaggttttgaaactagcaatttttttcaacatcaaaattaattgtaatatctgtattacatctttctaggtgtcatgaaattaactattgggttggcaaaaaaattccttcagattttcctggctgtaaatgattattatagtaagcatttataggtatttggaaaagacccaaatgaactttttggccaacccaacacaaaatttagtgcaggtgaaatatgtactaaatttatatttatataaaataattagaagactgattttttttctcagtgtggtgaaaaagaaaacacataaaatttttgtcatatccttcaccagttttacagaaaattacatatttgagataacccatttagaaatataacgtggtgttttattttgaaacaaaaacaagaagtctttacatatggaagccccaagcttttaggagacattacatatgtcgatattttacagaactgggaatgtttgtgtttcaaaaaagaagttatagttgatgcaaaatacctgccgatactttttttgggaaagggaaaaaatggaaataaaactttggttttttttgcccaaagaattactctatatatttcaaaatcagtcaaaagacagccttcgacttgaggaacataggactgtattaggaccaagtcagacaaatgagcttttgaaatccagtcctatcattttctgattgtgtgtaatgaattagtgtcttatctaagatcaagtttgctcatctaagaagtgatgacaacaacagtgcttttcctcataatgttattgtgtgcattacaatagacagtgcatgtaaagccatctatttatatagatggtgctgaaaggagtactgaacataagaaggactcaataaaagagtaaaactcaaaatgctaaggttcaattctgtgcttatgtggataactggctagggtcatggaagactgtctgagagtataatatatctttccatggagaaataaatgctaagtgttcctatatggatccaatccactgcattagctttagaaggatcacatttcaatcaaccaacctaaactagcacagacacatacttaattgaaaaatgatcaaccatatcatattatttagaatcaatgaatcatcattaaaagcatattttgatatgctttataaggcttttaaagctttataaagcttttcagtttatttccgtttagttggtcaatcgtgtctgactctttgcaaacccattgactgcagcatgccaggcttccctatctaacaccaactcccggagcttcctcaaactaatgtccattgagtcagtgatgccatccgaccatctcatcctctgttgtccccttctcctcttactttgaatctttcccagcaacagggtcttttccagtgagtcagttctgtgcaacaggtagccaaagtattgaagtttcagcttcaacatcagttcttccaatgaatattcaggactgatttcctttaggatggactggtttgatctccttgcagtccaagggactctcaagagtcttctccaacagtttgaaagcatcaattcttcagtgctcagctttctttatagtccaactctcacattcatacatgactactggaaaaaccagtctagctttgactagaggaaccttcgttggcaaagtaatgtctctgctttttaatatgctgtctaggttggccataccttttcttccaaggaccaaacctcttttaatttcatggctgcagtcaccatctgcagtacttttcagttcagttcagttcagttcagtcgcctcagttgtgt

SEQ ID NO: 38055 - DNA, 1735 bp, Bovine  19866880546508
  misc_feature (1)..(1): n is a, c, g, or t
ncctatttgccatgaagtgatgggaccagatgccatgatctttgttttttgaatgttgagttttaagccagctttttcactctcctctttccatgtctggttctcactgttacttcttgacctgcatacaggtttctcagaaggcaggtaaggtggtctggtattcccatctctttaacaattttctagtttgttgtaattcacacagtgaaaggctttggtgtaatcagtgaagcagaaatagatgttttttctggaattcccttagtttttctatgatccagtgcatgttagcaatttgatctgttgttcctctgccttttctaaatctagcttgtacatctggaagttcttggttcatgtactgttcatgtactgttcaagcctagcttgaaggattttgagcatatggtgtgtataaacaattattaatggtcctttaataagtattttgtgcatgattgaagcaagttatttgaaaaacaggtaaattttttgatgtgcagttattagttttcactaatttacaaagagggttccaagttgatatatgttaatatttctattccatatttctctctttaaaattgcttaacaccccatccttgcaatattctttgagagtcttgggcataagcagacattgctattatgaaaatgtccctctctgtggttacaaatgactgaaccaagggaaaataaatccattggatagactgagtatctttttatttacatttttggaaatagaatttataggtgggagtttaaattgaaaaatcaaataaagttgaagcaggggtagcattttgttctatatacattcttagaagtgagcatagaaagtcattctttagatacctaatgcagtaggaattaaaagaaaagccaagaaaactgtgatgtcatgaaaggtataaggagttgtcccagtgattattttgcatttttatatttcagaattaagaaatggactatgtatcctctccttggatgtctggagattatcatttgtgtagttaaaatatctcttacaagccacttatttaaagctgttactagtttgattctcacaatgatttatactccattattgttaaccaagttatttttttcccttactttccactaatagcaagtaatggattcaactattaaaaaactcaattttacacaacagaggaaaattctggattagtgtatctgtgtgtatgttacatatgtatgtgatttctgtcttatgacataccatatcaataggataaatttacctaaggttggcactataagagacaaaatatatatacagaaaatgctgcaatatcaagtacaaaatttctgatcactgcttgcagtagtagaattgcagtgagggttaaagagaatgtataaagaatagtcagttgtcactgagtagagtcacttgaagagttggttttgacagaaattgggctggaaaaaatcagcaaaagaacatatttctatgtaaaaggaaataatgtttcataaatggagaattgatacatgaaattatatttaatgaaggctaattcaagtggcctgtagaataacttgaaatagataaagactagaattgagaaaaacctgtaaagactactggagcaatccacagatagaattacaaaaatggctaccttgatgtaggtgtatgaacaatggataatatttaaataactgaggaaaactatgtaagaaaattattttttctaaggaa

SEQ ID NO: 38056 - DNA, 1039 bp, Bovine  19866880579831
  misc_feature (1)..(1): n is a, c, g, or t
ncctggggagaagtttttaatttgtcaaaatagctgcctatgacttacatttgtttttagatatcttttgtgtacatttgggacagctcccatctgttatgatctaatcaatttatttgtcgtatatatgcataaagcattcacaaatgtgttctatttcccaaagagaaggatacttagagtttgtgctaacttagcatatgttggtgctctaacagtctaaggtatactataaggtaaaaagcagcaaaatatgcctgataaaacacactcactttcttattgatatagtagggatccaggtcctccaggggctctgacaccatctctggagggacgtctccataaataaaaggaaggttctttccggcttccaagtcactatttggctttgggccatgttcatcatcgtctttcttgtctggtttgggattcttagccttttcttctgcaatgcgtctttcaatagccgcaagggattctctggtgaagaagttgaagctgtcaggtcctggtggcacaagcactgtttgctccatcttgtcatcctgcacattttaatcaccatttactctgcatatgaagtcctaaagagaaagaatacagatattttaaggagctttaaagatcttaatatctgcaacctcctgttatgcaatacaaactagaggactgaaaagttcgtttccaattaaattcaaatggaataattaaatataagttctttttttttttttttgtagctagaacatttaacttgagatctttagcatgaccctttaagcaaacttttaaacatgcaagacagtattgtcaactataggcacaaagtcatttagatctctagaacttattcatcttatgcaactgaaatttaatgtcaatgaacagcaactctctattttcccctcccccagcttcttgcaaccaccattccactttctgtttctatgagtttggcttaaccaacatgttttctatctcagcttttttgttataaacgtcccatgtttattaatccaatccttatgctttgctg

SEQ ID NO: 38057 - DNA, 1854 bp, Bovine  19866880588660
  misc_feature (1)..(1): n is a, c, g, or t
ntgatcttcgtttctgaatgttgagctttaagccaactttttcactctccactttcactttcatcaagaggtttttgagttcctcttcactttctgccataagggtggtgttaacaccatttttacacagcaagtacaatcttgatagtctttacagatttactgttatgagtgatgcctatataagtctaacttttattcatatccttacacattactataacctatataaaatttttatatacttagagtagacctctgtggtttcctacattatttgcttggtgagaaagatgacagagataaataaaaaagattaaggggagcaacagccaagagaaacttaagaccaacagaataaaatcatcagtatgctgaaaacaacaacattttccctactttctattacttaacaattgatgggcagaaaaagataaatggcaaagtgaaaaagatacaattttctctgaataataatttttttctgtcccatggcaccttctatttgacatctgctcaaagtctcagctttacatccacagataagctctatttttataaattcagaaaataaggtgtactgagatgataaaggctatggcgggcaggggatcccatgactataaatcttctatcacatctattcaccttaataaaccaccttagtcttagatattgtgaccatgtgcccttaaacagtaatatctaaaatgattactttcttcaaggttacattttaaatgttaatttatgggaagcaagagctctgtagaattatcatttgcagtatgtcaatctcttactttgaagtccagggaagatgtttgtaaacagtgaaaactcaactttatttatttatttttttgcaatcattttggtttcaaaatacatcaaaatatacctcagagacaaaagagtcatattataatatttgacatgttcttcaaacaggagtggtttcttatgtttataagacatttttgcacaccttccttagattttgatgacataatttacaattataatacatttccccagtataaggaaaggttcagttttcatatgaaatcaacttaaaaatactttctcactggttcttctgttaatcagatcaataataagcaatcattcaataatataacaaattatttatttatatttgaaaatatatgtgtatcccaaacttaatgcattattttatgactctttttaaatttcaaaataaataaccaaattaacaccacaaagttattgccatgagattaaaagcctaatatggaacgctaaaacgttcttttataaaaatatttataatttttctttaacaatacctagttcaaaattaagtggaattttttgataaatttcagaaaatatgtttacacacttaacaaggtttcctcaacagtcaaaaaacaaaaaaaagacttaatattttacattagaacttcaatattggtcctatgtaaatggaaagtgtcttactgggagcatatgaaaaagctttactataatatcttagactttgtgttaaagacagatacaggcatgaattttgaaagagattctaacaatttatattaaaataataatataccaataaaattcaaaatgtaaataatgcaaaattcaaattcaatactataataaaatacaaataatatgtgcatttgaaattaattgccatcctcaaaaacttagccatacaaaaaaatatactaagtggtgctttgattaataccatatggaggtaacagtcatttggtgcaaataaaactaatgctttttgttgttattgttttttctgcatttagacataatatcctatatcaaataaaaatattaattcaggtt

SEQ ID NO: 38058 - DNA, 3742 bp, Bovine  19866880619825
  misc_feature (1)..(1): n is a, c, g, or t
ntccttaatgagctggctgttagttttagagagcgtatttttttatatacccttacaacatctggttataaatttataatttatttaggaccttgattttatatgtattctgtcccctatttaaaggtgagaacctgtgcttatgagttcacctgtttattagtggtacttaatgtaaaaagcattttgcagtgtgtgagtagtatcgccagtatgtccaaaagttttaacacttatttaataatttttgaggcagctctccttctacattttcccacattgcctattaaatataccagccatctggaatcctagttgtagttcaagaattcatttaaataaaatcccgcaatttagttggttgataatccattatgtaccatgttactgaagaaacaatttcactgactaactttttagagaattaggccatatgtaaaatttatccattggccacctagtctgtagatgtatcagaaaacaattgaagtgtctgtacaagtatgtagatatatacttcttattgaaagggagtgtacagtacatataggaacaaagtatagcatgtcatgataagcacagttgagaaaataagaaaaaataaagtataaattagttgtgtaaatcaagcatttaaaaaactataataattattctgccaagatttctgaatgaaaagtcataaattgatagtttaaaataaaatgtataaatcttctttcttgcaaatttgagcttaggaaatacataaattatttcacacatgttaaaatgtccctagctttgattataaatcaaacccaaattgaatatattagtagaattgagttgtaacatgggccttgatattaaaagctgcatgatctttatcattctcagtttctttcagaaatcatttagaaacaagaggatcgggtgaatcagagttcacagaacagtggtctctgtcttttgagtgtgtaggtgctcagttgctcagtcctgtctgaccctttgtgaccccataaactgtagcccaccaggcttctctatccattggcttatcccaggaatactggagtgggttgccatttcctcccccaggggatcttcccgacccagggatcaaacccacttctcctgaagctcctgcattagcaggtggattcttcaccactgagacacctgggaagcccctctctttctagtacgtgaatccaaatatctctatgtggcagccataggtctctatttacttagctcagctgattatcttgaaaatatttgtgtttgtctcttttaggtagataatttcagtggtctctttctaagctagaattttatagaagaaacaggattctggttgcctgaaatttgacagttgtcctatttgtattactagggatatgcatcagccttctctttctccacacaatgatggtcatcatggtggtttccctgtaaatttctgattgattatccttaacatagactttaggcattgtacaggaaaaactgtagctaatgtaaatgttcctttctcctgaataaaaataaccagtgacctctaatggcaactgaggtgggggactttttgcagataagtgattcacccattaacagtatgtcattgataccatttccagacatatgctctctggaatttggtgacttgcagatgtttcaaggggaagctgtcagcagagttgtccttttgatatgcaataattccaggatgtcctgcatgtatcatcacatgatctaatcaaagtcttaaatctagtaggtgaagagtaaatacatatattgtgtctttagtgtcacttcaataaatattgctgatgtgacaatcattatggttttttggtcactaaacataggtgccacaattcaagaatataattaatatcctcattatcaatcattgcaagtcagcagtaacttattgtgactcactacatttatttaaggtgaccatcaggatgtaaactttggatgtattttgatgtatgtatcacattttctagtttctgagtcacttactgaaataaactgaaagcaggttttcatgcctactttgttgtattctggtattacaattttccattttttttcttactgtctgtaccagtatagttgtgaaatatatcttagtctttgtgaaggtaaaacaaaatttttttatctaagattcactgtttgtaaaaggtgtctcattttgcaaattgtttttgctggattgattgatctcatttgatattcatgtcagccctaagaagcaaactgaaatattatcacagttgtataaataaagatatcggtggtcagaatgaacaagtcactcagccatcatcagcttctgtatggcagagcagcctcttcctgatgcgcatcctgaacatctttccatcatgagcatcatctccttaagcaaagcatgtcagtgcaaaccctcacataatacaaatacagagtgactagctctcaaactttaatgtacactgaaatcacctggaggtcttgttaaaaacatatcattatgttctcagcccctacagataatgacttgaataggaactagaattggcactttacataaacacttgtaggtgacaagtggacagaaaatcacactatgtgaaattctgattttaaaaaagtatgccccaaatctttagtggtttatagaataacttagaaccgatgttatttgaacataacagagacacttatgttgggtaagttttatgcctgagtgtctagaatttcttatgtaaaacacaagctgatttagataacagtgcatgctgtttcttgattacattacttcataccctcaagtagtagaagcagtgttcttctgtgtgcatatttttgaatgcctaagattaagatgaatttatttaagccataatttctgttctccttctctctctcctcactccctttccattttactgtgaataagcaggtggtatggagtaggtttatgacaggatttaaaatgaaaagcaattagaagagtaattaaaatggaaactgacaacatgtctcgatgtgcttgctgcataaagtataaatattccaggaactttttattcagttactaaaaaaattatgaatcacagggaagcatagagtgtttgctctcaccagctccctcatcactccattgctttatcagctgtgtcctgagcaagagccaagaagggaaatggaaagtatatttatttagagaaacaactgctactcccagacaatggccaagaaaaaaaatcctccatctattgcaaatattgaatccttcactgtgttaggtgaagaaatgacctttataatggattatttccccatgaattaagcagaactcaaagttctgaagtgttaaaaacagacggtgtgtagagttccactttcatcatgccagactgagctccacaaacctgttctcccatgaaactgatctctggtctaaaaaagaaagaaagaaagaaaaaaaaaacacaatgatttaagatctctggaaatgattataagatcataaggccactgagaaaaacagatttgagagaatctactgaaattagtaaatactgggagaatctgtagtgtttgaaccaagccttttttctcccagctcagcccacactggtgaattgaaaacacagggctcactctccaaccagctttattcaaagggcaattttcccaggagatgcaggctgtctgcatttctcatcctgccaagatatctgttgctgag

SEQ ID NO: 38059 - DNA, 2185 bp, Bovine  19866880691444
  misc_feature (1)..(1): n is a, c, g, or t
ntggaaaattcctggatggaggagcctggtaggctacagtccatgggggacaaagagtcagacatgactaagcaactaacacacacatacacacaagcgtttatttcatttaaaggaacttggaaacattacataaatctaaacaacaatttatatctttctgaagttcatcaaatatttataaatttatcattcaccaaatattcatcgaatactgaatttggcaattagcaatatttagcaataattttttattaaatatcagcagactttattaaacaaattttaatctatttattaatatctagctctttcttttattctccaccattgccacattacttttctctgacttctttaaaagaaatctttctttacaaatataaaagcggagcattctagatatatttatcaacaaatacttgttaaataatgctatctttcaagaaagtggtgttaggcatattgagagacaagaaagaaagaaaaggattcataaatcacaagaaacttgttaggttatttaggagaaaaaaaactgatatagcagaaataatacagtgtataagaactgagaattgaaactgagaagcagaatatgtaaagcaaatataaattcagagaaagaggtggttagtgatggtgagaagtcttctgtgaaccagagaggacattagagaatgactcattgccaacttgtttattaagcttttcaaatgtttcttttagaagagacagccattatggacattcgtgtttttaagaccagtacttaacattcaaaacacgtttcaaaacaataaatatataatataaacttaataggatctatgtcttggacttctgtagtattttattgtgaatttgaaatattctccacataaattcttctactattgtactgtgtacaagtcatagtcaaggtaggaaaacagaacccaattattgttaaaacaaaataataagagaattttatagaggaaattagttagtctgatattagaaaacaaaacaaaacaagaatgctaacatggaaagaaatagtaactgtaagaagtgggtaagagccctaactaaggctaggaccaaaaggaagagagggttatcagaagttagcagttcagaggaatgaccctgcagatctagaacaaagaatttgaggggctatgctgtagggttaacattaatctctggaacctcaaagaagacccctgcgtagctgggcccagaccctgagggaggaaggccagctaggatgctgacattgctgccaaggccacttctaagaggagtgaaaaacctgggaactaggggtgattgctactgcacctggtagagggccaaggctggagcaacgccaacaagaacaaacaaacagataaaggaaattcctttctcccctctcctgtttttttgcacttgctctagtgtccctatggcagaacctaaaggggagccaactggcaaagaaaggtggttggcagaggaccagccacagcatcaaaatactccatatggaggatgaactcatagctgacaacagtttaataactaacacaattatgttctaagatgagaactggaatgtaaacatttcacaataaacttaccattttactatgattgaaatccctcccacatgattttattgtactgcatttagcttttgttattgctaaatgtgcatctctcagtaggaaaaagaaaattcttgaaaggtgagtgaatgtaataatatttaatataatcaccaactatttaaagattatcactgaaaggaagaaaacattttactttctttagagttgtgtttagtgaaagcagaattttcactggtaaattaatacagatgagaaggaattagggactacagatcatccatatgtgtgctaatgaataaccactacataccaaatgagaaagacagagtaaaagaaggctaaaagatgatgctaacgagcagcagctgtggaccattcctcatgcttttcctacttttgtaggtgaagcagaaaatcccggtctgtaattaaggtgctggctggattagagttattttaaggctctgctgggggggagatctgctttcaagctcagccctttaagtttaaggacaggctcaggtccttgatggtcactgaccagaaacacaaactcctggctacatgggaatcccttaaggtag

SEQ ID NO: 38060 - DNA, 1730 bp, Bovine  19866880740314
  misc_feature (1)..(1): n is a, c, g, or t
nttggttgtcatggaaacatgacacctatttcttatcatcatgaattgtacttattggctctgacttctgtagacattagtaatttctaactttatagccatatatatgaatattagatactagaagtcttttcatctccaaaatacttggtacctctaatgaaaaataaaatggaagtaaggtattatttcacttaacagttcatcaacttgtttatcaggaaccctatcaaagatttacttctctatatgcatgactcagcaactactcttgagttacatgatcaaatttcttgtgcacataacactgcctatgtgtcttttggcttttcatttcgattctagttgtataattctaattgacttgacaataaaggtacattttctgtttcctctttttccttttggcctcttcctgtaaaaaattattttaccattaccataaaatgtgtgaattaatgatgctctaaaagtgggagaaatctttgctgctagaaatgttagctgctatctcttctgtgagaaaaactaggcaaatttttgtttttgtacattttcccccatatcatttggtatttcttactcctggtcgaggtataggcttttgtggcttttttgatcctaattttttcattgcattatagtatttcttctgttcttctgtcataaagatgtcttgacctccaaagtatagaaaagaaaaataaaaactggttaaaactgtgtaccttccttctttcaatgttaaacttagaaaagggaccattaaaaaaggaaacacaaaattcaaccaattagcattatttgcctaggatttgaaattgaaaaattaaaactagttttagatactataatcttctttatttcaatcatccaaaattgactttatgatttttattattattttatggaggaaaacaatcccacaaactgagaggttaagtattttacccaagactgtaaactcaggaagtagtactatttggttcactgagtcactaaatacttggttccttacactagacacactgtctttcagaattttcagacaatgattttcttattcatatgtagcaaagagttaaagtaggtatattgcgtgatggtttcgagttactcataaagagccactgtcactctgccaagaattggaacaaaaggctagaaaggaaactggagaaattggtagaagagttaggggaaaagtcaaagtcataagtttggcaggtatgtgacaggccagtagttacagacaactggaattcaagctaataagtgaaatgaaatagcttgataatgatgacagagtaatattagtaataacaaaggagggcatgttctataatgaaagagcctcatacaatggaagcaattatataataggaaaacagactgaacaaatgagatgaaggatcagtacatgaaggaagaaatataaatggcaaaaaaaagcccttgaaaacatattcaaacctactaataataaaagacatgaaaatgaaaattaaatacaattttcatatatcaaataccaagtatcaaaaaacagagagaatgcttgatgctagtgtatcagtggtgacctgagcacagccatattggtactatgagtaggaaagcaaaacactttactctggaaatttatcttaaagaaatcgttaaaggctccagtttttttggcacaaagagttttgaccaggcactatttaatccttaaagggtaaaaataa

SEQ ID NO: 38061 - DNA, 839 bp, Bovine  19866880752926
  misc_feature (1)..(1): n is a, c, g, or t
naaacatgattttattttttgatgacttttatttttagattctattacaatgtgcaggtctcaagtataactacaatataatttatgacaaactcaaacattttgagcattcatatattatgaaatttataaagaattctatgtaaacagcattattatattcatggctattcatttatttttatgaagcaactcaattattttcctcaagaatataacataacaaaccacagttattaaaagaaattggtggcctctatacataggtcctaaacccaagccagttacttggccattctaatttagctggcccactttcatcattcccattaacatttctctgaaattgctatttagaactgctttatttacatatgcatttcctcttaacttttgaataaagctatcaaaattctataaaatcatgctgaacatttagagttgaagttttcatcagttagcatttagaaacagccaacaagttacttacatcttttgcaaactacgtaacagtcaaaaagataaaatgagattctcccatgtttatctccattggatgaatggatttgtgttcaaatctgttccctgccactttattccaatttaaattgtacagtgtaactatcattttatatcattagattaaatgtgttcaatgatagtgcgacttaaatattagcatgacagtgctgagaatggtatcttattattagtaccaaacagtaatctgtatgaaaagagaagtctaacttcccttcaagcttgtaatatattaaatgagcacttggttccaaaatattggtattaattgataaaaagttacaattagacattcctgg

SEQ ID NO: 38062 - DNA, 1497 bp, Bovine  19866880764304
  misc_feature (1)..(1): n is a, c, g, or t
naagatgaactactattgaaaaaccaatatatcatagtctattttggtattaatttgacttaatctaactgtcatgaggctattgatatattgtacgtgctgagatagttctttattggcttcatcatacatcaaatctgtgtaccacagaaatctatttgtggatttaaaaacaaaatatctgtctactgaaatattaaaatgcaaaatactcttccagacacagaggaataaagaagttgatatataggaacatgtatgcagaaattagaataagacaaagtcctggccaacaaaaaaagataataggttgatgtagatggtgaggaaaatgatacttaaaaataaaggacaaaagtgtgtctgctttttactatttttgtttgtgtctagctgaatttttaaatttatctttgtatggtttagtacagagacagctagagtcaagagtttgaataggaaaatggtatatattatgtccattttaattaacatcacactgaaatgtgtaacagtgtagtatcctcctagttttgacatataactactaagcttcagaagtaactgtagaaaaacacagaaaataggagactcttttttagttggtgttattttttttttttttgctttaaagagatttaactataattacaaaaaaggggcttcattaacttttctctgattatataaacttcaactctattttacatatatataatgaatataatacatatatgtataactgaatcactttgctatacacttgaaactaacacaacattgtaaattaactatacttcaataaataagtaacatatttaaagcctctctacgtcaggaattattctaaggaccagggatacagcagtaaacaaaacaccatccctactatcatacaacatatactctagctgtggggagacatacaataaaaaataaatataaataaaacaatacagggagtaaataccacaacacagaaaacagaaagaaccaaacagggttaaataaatggagaaaggtacgattcgaactgtgtagttagatatggcctcaggtgaggcagtgtttgaaaaaaacatgtgtagtcatagagcaagaaatatctgggtaaaaagcattccaaggaagaagcatagcaaatgcaaagaccttgatgtggcatcgttaatgttatatccaacaaactgaaacagaaactgaacaactgaaacagagcaactaagagaaggaaagtggtaggagacatagtcagaaaatttgaaagccagaacatgtacagccttttaatggctattgtaaagccactggattttactgtatgtggaaaaggaaggccactgaagtagttttaaagagagtaacatgatctcaatgacatttttgaaaggatttctcctagatgctgtcatggagaaaactataaatttgtaatgaatggaaacaggaagactagctgggagactaacgaaatagtacaagtagggaggtgattgt

SEQ ID NO: 38063 - DNA, 1499 bp, Bovine  19866880781348
  misc_feature (1)..(1): n is a, c, g, or t
naatggaagcacttaatccaaatgaaactggcttgcctataacttttagacagctgagtgcagactgtaaattattaatcattaaatcataattcagtaaaagcatttctgtggggaatttatgaagtatgatccaggcactgtgttttctggtgattgatcttaatatagcacaaatgcctggaaaatatagaaagattaatagttaatctgtccattagactgcttttctaaaaaattgaattgctaaagtaagattttggcaagaattgtatcaaagtcaactcaagtttggactgtaacaagtataattcaaaacatgccacatttataacctgatgatttaaagtggcacagctagaaatatttctacatatgaggacaacagaaatatttctacatgtgaggactgactgaaaggcagctgttagggcagatcaaacatctgatgaaaatagctactgtattcccgtgtgtatataaactctagctgccaaaaactggttcagccttcactccaattgctgcataactaatattcttggatttttcctgtgttggaatatctttactccggtatagctaaaattttctttaatacaactttttcttgcccctgagattatttcaccctttcctgacttaaatgatttgatttttggctcttgtctttatactctctacagttgtgttctgcccagggtttagccaattttggttaattctcctcattgtgtgtgccaaccccttcacagatcactgccttgtcatggtgaaggagcttgtataactcaatgaagctataagccatgctgtgtagggccatccaaaatggacaggtcatagcagagaattctgactaaatgtgatcccctggaggagggaatggctaaatgaagcagcgcaaaggctaactgaattcttccaagataatgcactggtcatagcaaacaccctttttcaacaacacaagagatgactttacacatggacatcaaaaaatggtcaataccaaaatcaaattgattacattctttgtagccaaagattgagaagctgtatacagtcagcaaaaacaagagtaggagctgactgtggctcagatcatcagcttctcatagcaaaattcaggcttaagctaaagaaaaccaggaaaaccactaggccagccaggtatgacttaaatcaaatcccctatgaatatgcagtggaggtaatgaatagatccaaaggattagatctagttaacagtgtgcctgaagaactatggactgaggtccataatattgcacaggaggcagtgaacaaactatcccaaagaaaaagaaaagcatgaagacaaagtggttgtcggaggaggctttacaaatagctggaaaaaagaagagaagtgaaaagcaagggagaaagtgaaaggtacatacaactaaatgcagagttccaaagactagcaaggagagccaagaaggccttcttcaatgaacagtgcataaaacaga

SEQ ID NO: 38064 - DNA, 2148 bp, Bovine  19866880792827
  misc_feature (1)..(1): n is a, c, g, or t
nccataaagtttctatccactctccacagagaatccggaatacattcaggaaggaatggaagaaatcatgcatgtgccagtgtggaagctgacagtcttcatttatgctgcagacatattttttatattttgaaccatacaggttaaggccaaccacagcagaaaagaatataaaggtgaacaacagcaggaccaagtctttcagggccacaattgagttacaaagagtcagcatcagaatcttaaatgttggccagtatcttcccagtctaaaaattcgtaactgatggagcaatgtaaaaaacaacaaaaataagaaaaaaataacaaaaactctagtcactattaattacactgtacatttacaatttttattagcattatacacataaacatgtgtagtctctaatgtaatattcactcgtgagcattattaatactaaacactgaaaattcagtttatatacaatttttaatacacttacatattctacagttttttatactaaattgaagtatactttctattgatctgtcaattccctttttttttcaatattatactattaataattactccagttttgttttaatatctggtaaagcaagtatccattctttattttctttttccaaaatatattgaatattttcccacatttcaacatatagatgatattggaaaagtctcaagggtccgttgaagccccttgatagctctattgtatgcatgagtgctaagttacctcagttgtgtctgactgtgaccccacagactgtagccttgccagactcctctgtccatgggatttccagacaagaatactattgtgtatttacctttaaaattaacatgagagaccaaatgaaacattctaggtttagtctaaatatttcacttaatcactagatttaaaaatttttattcacatggcacaaaatcactttaatatttgagtcatttaaaatccacatattgtttttgtatgtgctataccttccccaactttttctggtatgcagttggcttttgggactcaagggttaggacttaatacttatccatgtaaaacttaatcatcttaggttcaatctgttactagtctttcagatattttgatacaatcttttattatattgtctgtatttcccagtcttgcttcatttataaattcaataaatacaacttttatattttcctcttactcattagataagcctatggataaagacagggttctgaagaattatttggataagattaaatctacctaattgttctcatttctgctacattccttcaacttgttaacagaataagacagtagattatttatcaaatacccaacatttccataaatattattctaataacattatttctttgcttagttttctgatgtttttactaccacctacattttatgcatatattgattctgacttaataaccttcatagcaacattctattagcctgacagtccttcttttataaaattttcaaatttacatttagatatactcacctgattctaattctttagttacacattggcattcagctttttggactctgtattactctgtttctcaaaactgacccagtaatcctgaccctgctttatagaactatatctcaaattcactgtatatatggcttgtttcttttaatgcctgggccaaacagcattagagactacttactcttttctgggttactttctaagcttgttatatatgaattatttcatttaacagttccaacataccatcaggataggtattactattcttcccactttatgcctgagaaaactgaaatgaatttttataaaataaaatttaggtcttgtattctacttaccaccctgaatgatcgtaaaatagccagtccatgaaaatttgttagataaagttctgctaaaccatggaacacaattaggctatcataaatgttccagcctacttggaaatatccatatggatacatggcaattattttaaaaatcatttctgctgtgaaaattccaataaacacctaaataaaacaaaacacagggataagaatatgattccaatagctctatcagaaccctcatacacagaataaattttcactggcactttcttcatattttctctggcaa

SEQ ID NO: 38065 - DNA, 700 bp, Bovine  19866880810363
  misc_feature (1)..(1): n is a, c, g, or t
ntcaattaaaaaaaatttttttttaattacagttttaaaaaaagaatttgcccttatcaatatcccaggaatactagtacttaaggcccttgtcagaaactataacatcaaactgtttttgactcatcaaaagtcagagaagtagagttggcaaaggatactttgcagttcagtcttttttgtagtttttacacactccattattggataagcagagagccttatttgggaccacatggaaactcaatagaaacacacaatggtcaaattctagagagacccactgcaggtttgatttgatcataatcatgttgtcttcaacaatgttctatagaatcataagatgctgcagcttaaaaaactaccagtgtttgttaacaggctgactgaacagttgtagtttaaaaccaaacatcatctaaatatgtatctttgggacagtaaagaaggaaaaataccttaagtgaaaattggctttaaatcaaattgagaaagggttttaaatgagatcatgtttttcagatgaaaaatacatgggaattgctacctaaatactgactatgaaacttggcacatattataaattgctaaactagaaagtagttggacaaatactgtatgctatcacttatgtgtgtaatcctaaaaatacaacaaactagtgaatataacacaaaagaagtagacttacagatataga

SEQ ID NO: 38066 - DNA, 1407 bp, Bovine  19866880873740
  misc_feature (1)..(1): n is a, c, g, or t
ntggttaccatgttgaggcagatcagaacccatgatggctatatcaaaagcttggtttgttactaggtcaaagatacatccttggaatttgttctgcaaagaaccaaaaatgataggaaattgtacagtaaattttcaaagtagtatccataaatgattacattaacaaaacaaattttaaaggtacctgtcttcaaaacttgcataaattatccttggttataagatcttgctttgtttaaggaatatgattaatgggctagatctaagtcagagtacatgacaacttgctgttgactttcagtgtaccaattcttcaattaaccttgtaaactaacatttgcttttaagtctatccaccctagtatgtcatacaggaattgccaggatcacaaggtaatttttttactaagaaactctcagagacaaaaaaaaaagaaaatctcagttccattacctacagtgtttcaaggtaataaaatgacatctctaaatttctactttgtcaccttattttgactaatgtgttggcatcattgtcttacactggtattactgctataatatcagagatgtatactttcctgtctcttccatgtatagaatatatacttccaaacatatccatatttaacatatcacttttcttatcaatctcactgaacagtactgtgcttttcatgaaactcaatttcaaaatcactttattggttacataagcaagttttaagacactctatcaagatcaagtagggtactgagaaaattaaatactagagctttaaattcatagattatggttctgtaggtctggatgaaacctggccatgtgtccatttaaaaagtgctggataatcctcatgtaggcagctggtactaaacatattcccatttttaggatgctctgtcttcagccacaactttggtctacagtgttatacaaaacagaaattgagatacataaaatgcatttaaatttattttaactattagaggaatacaaactatttaactgctaagactcactatttacacctgagcctattctggtctttgatcttatggcaggataaagtttagattcatgaccagtctgactgcttccctggtgttctgtctgttgtaatatcaaaggtctacaaggttggtttcacctgactgaagacacctatcactacatgctgtgactacatcatacagtcatcaagataatcaaatttcagtcaaaagtacattttattttgattctctatagaacatttgtactaatagtaagatgtacagctaatgtagagtaaaagcatatataattattttttcatttttatagaaaaggaaaatatatgaaagactattaagagctgtgatagtgttcaaaatacatatattcagtttataaggactttt

SEQ ID NO: 38067 - DNA, 1276 bp, Bovine  19866880895847
  misc_feature (1)..(1): n is a, c, g, or t
nctggaattacaatacagtgtgataaggggccaaaggaagtaaaaaccattaatgacaaagaagggaatgagaatgaaacaatgaagtcagctgagttatctaggcagatccagatgatgtgagctatgcaagcctaccaagctgacacatggcccttcaccttatctcatggggccatctgtattaatacaattgaatgaataagtctttattttatacttcactttaaatgtgtggatacacttagatttctttggattcaagatttgaaagctgaaatcaagtttttattcctctccttttccaaatattttgcctaccatccagattaaaaagctgcttctactgtgtatacacaaagcacacattaaaataagcttttattttaaaacctacaccagccagcttaggccatgagcagaacactgattacctatacctatttcttgaattcttttcatatccatctgcaggtcccacatttttcttcaaaactgttctcacctttctcacttctccatcttcacgatcgccatctagttctgacacctgttactaccaacttgtactactgtcttccaattgtctctttcttttaattcatgtaagatgaattaattttcttcaactctcatttaaagttatttaatgactttccactgattatcacgtatttgccttaccttgatgttcaaatcactcctcaatctacatgtctagttttaacttcactagctacctagccttcatgccaatccaactaatgtagtcaccatatgctaataacactaccagagaattgagacaccatttcctctgaaattccttgtccaattcctccccttctgaaacacttttcttctcactagctgtatttcaagcagtacttttggcatgcagcctcacttccactcagtttagcctccaagatagagatgtttcctcttttgaattcaaaaatcagaattctagtactggacaggactatagagatactttactactgcattctcatttggcaaatgagaaaaatgagctaagccagctttggttcagaatgtagactatgagtggcatccagtgcttcttccaccccactgcactgattgtccctagagtcgctcctacttatctgctacccagactgctctgcactagagttaattgcattcccgtaattttgacagatggtaggctttttctttacttcagataaaaaaatatatttgtgaattctccaaggctttgagtacttgaatataggactataaaaat

SEQ ID NO: 38068 - DNA, 1326 bp, Bovine  19866880916120
  misc_feature (1)..(1): n is a, c, g, or t
ngctggggtattattcctcttaatacttctttcttgggatgagttaagctgggaaatggctttgctcttgaacttaaagtcactctttcctcaaaacattgatgctctagcacctataatagcttttcactatttggcagtctaccccaaattctatctaaaagaaaatccaatataatgtttctatcttcatttggaagaatagaaagggaattatttaaaaaataaagatatcaacattttatacaaaaaaagttaagctgaatactaattaatccagtcttagactgtaagagaattcttttttctttttttgtaataacttaaagaattcttctttatttaaaaaaaaaacacattatggcagggtatcagattacttttttcctaataaatttaaaaacacagagtgggaaaaaagtgcaaaatcagcaaattgccctccatttagcaaaaaaatgggaagagatttgctagggatgctgcctctgacagaaattaagcactgtataatttgattctatacattcattagaataacaaggagaaagatagcttctctggtggttcagatggtaaagaatctgcctgccaatgaaggagacacaagagacaggggtttgatttcctggagaagaaatccagtattcttatgcctggaaaattccaagacttccagagaagccttgtgggctacagtccatggggtcacaaggagatggtagctgtggacaattcaaggtcaggaattagtagctatgtttaggtcaaggtcagatccagatcttaagcttaatctcatcctctggaagatctatagttcattatctctgaagatatatcactgattatataaggaagatacttgattatgaaattaatgttttatttatttaataagcttcaggtgttgggtgtgcttacagctcaaatatttgtttcaaccacatctgttgcttttattctttgaatgtaagggaattctttagggtatggattcctaacaccctccccaccctgccgcgggaatatttcctgtcagtgttgtttttaaatttgagaacatagaacttttagtttggtggtgtcttaatcgggtcctgtgttcctggtttattaagcacaaaacgtatgtagcctggttttctcaaaagctaactaagatcttccttaccacaaaaggaattcacctgtactttttatctagctggagttttcagatgcaaaacaatgcagaatagagtagttggtctgttttagtccatatttaagaaggagaaggcaaagaagaggaagaggcagagatggaggaggagggggagaaag

SEQ ID NO: 38069 - DNA, 1309 bp, Bovine  19866880970430
  misc_feature (1)..(1): n is a, c, g, or t
ntaaattcctttcggacttgtttagtcttttttgaggcttgcattgaagtgtatttaagtcaggtctagaccagcctttaataaaggttggagatcctgaaacttaattgtcccaggacccattctctcagatttcataatattgtgctcactatgattgatgtctacaaatatttgtttcacacattttctcatgttttctagttatttacagtgagatggcaattcccacatcaatcttttgtaaatgtaaacagaagatcctgactttaattttaaataatcttaaataaattcctctcccccacccccaatgattgcatctcacattagtaacagcttagaatttgatttttttctcttccacattagcatattcaattttcatgcattaaaccaacacagataagtagaagtaactaagatatggagaacataaccatgatggaataatgatataaccaaagctctaccacagccaacaatatagaatctccagatcacctagctgaattactctataatttcagaggaaattagtcagatgcaagtaatactctataggacttattgataacataagaaccactgagataaagcaatataaaacaaataaaaacatatggagattattttagttctgtcttacaaatacctataaaggcttactataataatcatttacagtctagttaggatagtgtatcacatttccatcttcttgttaaagaagatttgtgtacagagttgagaggtttatgcctgtaatatatgacttggccttgagggtcatccttctagagcagcaatcaattgtgttaataattctggcagattgaggtgaatgtacaaaggctgttatattgtaggtttagcataagtctgttatcaggcaaaaataaaaagtgctcactattttttttcatctaaaataaaaaaaaggtaatgtgatcgtactggagattaatgatggctgttccaggaaggtgcttagagcctcctgacatttcttgtcattggtgttaagaaaatggaatagagtggactcatatcctacaagttgttccattggcgctccatcagcactcaacaccgcctcatgagcacttgtctaattataaggtggcctcgtgataagctgtctttgcttctgaacatactctacagtgaatgaattgttctggatttacatactcactgttttaaaacattttatatttctgtttagcactacaattctgattattgctatgatttgtgtggagtttcagtagataataatgcaggccaattcaagctaatgcacatg

SEQ ID NO: 38070 - DNA, 789 bp, Bovine  19866881043450
  misc_feature (1)..(1): n is a, c, g, or t
naaagaaataaaagagaattgatgcttgaaaaatacagattaacagggttgccagaaaaaatacagcacacgcagttaaatttgaatttcagataaacaagatatccattcttaatttttatttgtgaaatctagcagatctattgctgctgttgctaagtcgcatcagtcgtgtccgactctgtgtgaccccatagatggaagcccaccaggctcccccgtccctgggattctccaggcaagaacacccgagtgggttgccatttccttctccaatgcatgaaagtgaaaagtgaaagtgaagtcactcagtcgtgtccgactcttagtggccccatggactgtagcctagcaggctcctccatccatgggattttccaggcaagagtactggagtggggtgctatcgccttctccaagcagatctactagtgattctttatttctcctcaaaaactagggaaaccaaggcacagactgactgacagagaagatagcttcaaattgaatttgtagtctctgccttcagaccaatggtgcatcctgttcacctcttagccatgaagcttgttaactttaaaaatggagttaagtgtatatatcaagttggaatcaaaaatattttaaatctttacctgtatgtatacttaagattacattgaatggttttatctccaggacatgggaagtagaaagaaaataacacagacacatagacatgagttcaaaattgatagaaagaggaaggaagggagtatgtccaagaggccaccagagtcacatgggctc

SEQ ID NO: 38071 - DNA, 1326 bp, Bovine  19866881053792
  misc_feature (1)..(1): n is a, c, g, or t
nagctgtcttataaattatagtggattcaggttatccctataataatgtcatgttcactgacttgtgtttgcttttcagagtgagagaggaagggctggaattataactaagtgagagcgctgagcttaattttaatctcatgcagtggccaggagcagagcacgtgtgtgacctttatccatgggatgggttaagacagggcaactgtcgtcctggatatcctgttctcttggtttgatgacatacaagtctatattccttcgtctaagtcctatgggtccccttcttgatttctctagctatgtttgtttttttttttaatttttgtatttcagatcctcctctacatgaacaggataaagatagtggaagcaagcaatttctttctatccttcttattcttatcagctcacaagtcagctcaaaaaaggcttgacaataactgtagaaagacattgcatggttaggttttcaagcaacttcacaaagaagataataaaatttgcaagatatgttggtaaaatttcattcgcaagagctgcttcttatacaggcaggatgatgtgttaactaacgaaagtggtgagcagtagtgctcagaaaataaatgtgtatctcctttcactgaagagtacaaaccttcttcagtttcagagtagtgatgggaaaggtcagaggaaaaatggagacactgagataaagctactgaatactctacatgatgtcattgttttggtgggtcagaaagttggtcaggttaagaaatggtgatagccttattatatgtccacagaaggtatcgtattgcatcacagaagtatatttttgatggtatttttcctattattattgtagaggtgtgtatatttttctaggcaatctgaaaactcatatcttttaaataaattcactgcaggactttgagatttctattcctctggcatcttgcaagtattgaaccactgcagaagtagacagtggtgatcaaaagggccataagagttacaaatgaaaagagaattcaaacaagccaacacgatgacttactatgttcaggaggtcctacaggcaaatccttttattgaactctgtaattgggggatatcctgtggtgtgagagctcctatacacattcattcttctttttttttttttttttccatagaaaggggcagaaagaaggagccgttctgtttctgctgcttcttagatttgccctttcgaattgctgagatgtgattttggtctgtaagctgaccatgaaggatgacacatttgaccaaggtcaaagagatttgaatatttcatatccctgcatgtgtaac

SEQ ID NO: 38072 - DNA, 1674 bp, Bovine  19866881059391
  misc_feature (1)..(1): n is a, c, g, or t
ntaacggagtggtgaatttgatgttccaaacccagaaaagatatgacttctacttggttctgaactgaactttgtgcttctaacattaactagctaaagggatagcatggagggtcatgggttacataaatggaccccattgtctacacaagaaagttaatgaaggggacatactggaaatctctgctatccctggcatctagcatgtaactgagcatggttgtagtttaatagtttcttcggttgattaattgattgcttgatatttagtgatcttttgttgttgtttaattccattctaccaaatgcctgcaactgtatgtcttttgttgttcagtcactgagtcatgtccaactctgcaactccatggactgcagcattccaggcttccctgtccctcaccatcccccagagattgcccaacttcatgtccattgaatttgtgatgccatccaaccattttattctctgttgccctcttctcctcctgccttcaatctttcagagcatcagggtcttttcgaatgagttggctgttcgcataaggtaaccaaagcattggaccttcagcttctgcatcagttcttccaatgagtattcgaggttgatttcctttaagattgattggtttgatctccttgcagtccaagggacaccaagagtcttctccagcacaacagttcaaaagcatcaattcttcagcactctgccttctttatggtcctgctctcacatccatacatgactactgaaaacaccttaaccttgattgtatggacctttgtcagcaaagtgatgtctttggtttttaacacactctctaggtttgtcatagcttacctgccaagaggcgatcttctaatctcaaggctgcagttacgggtcaactgtatgtctatgccaactaattagaaattgctggtatttttatcatatgcaacttactttctgcatttggccctactttgtaatatctaaaacactagatatttttatactaggattttttgaattttgaggagcaaaacattctgaatgtttcttacttctgccaaaaaattatataataacatataaaactgactatatgtggaaaataaatttggctcaattgaatattctgggcacaacttagtatctcctacacaaaaacttattctggcagatgttctgcaaggtctaaattggtcatttaaaaggatactttcaacactcgattcattaagtggcatagagactccatttgcaggtaaccccttctaacagatccatcaggatacagtcttcttaaaatcaatcattctccatgtgccattcttatctttctcttaaaatgtggagggtatagtaacaatgctgcctttttttttccctagtcacaagttttctctattctttataacacagagttctgatatcccaagtaaccacttgttcaagtgcttgaaattatgttagaccattttttgaggaagatttggcctggagggattccttgagtctacttttaagaaaagttaggatgactcagtttctcagtgagaaaacatattgtgacaataaatgtttctaaccaaatatcagccctgctgcctgagtttctggttttataacaagagcattgagctataaaacagtagacccagatttcaatttcaaacttccacaaacta

SEQ ID NO: 38073 - DNA, 1420 bp, Bovine  19866881197450
  misc_feature (1)..(1): n is a, c, g, or t
nacaaatgccactgctgctgctaagtcacttcagtcgtgtccgactctgtgcgaccccatacacagcagcccaccaggctcccccgtccctgggattctccaggcaagaacactggagtcggttgccatttccttctccaatgcatgaaagtgaaaagtgaaagtgaagtcactcagccatgccactagacatactcaattctaagacacatatttcttcacatgttaaacctttgaaattgacatgcttctggtagtcaatggcattttatagtttgccagaattttccccttttcttagaggtacataaaataatatcactttcctttgatatcataaataaactttgtattttgaatcgaaagttgaaagtgaataaatgcagttaaaaagtcaataaccattcattgtgtgccaggaatatactaagcacttgaaatatattttctttttttaattttcatagctaccctatagattaagcttatacaacactatcataatgtgaatgagaaaatagaggcttagtaaaaataagaccttttgttctaaggtccttctgtgtagaaatggttgaaaaaggaattgtgcaaacaggctgagtccagaggctttattcttaaaggctagtttttgtattatgcttatttggctagtagagtttagagcaagctaaaattttctagtctaatgaacaagaaaccctgtgcaaaataacttacacactaacaagaagcttaataaagatgtgaaagcaatcaacagtagcttatttggcaggaagaataagcattttatttgacttctttctctttcaggggctgggaatagaagcagagatgaatttagtgtaacttgacacagagaaaggtatttagagatatttgaaggaaaagagagatttttttttcctttttgtcatattccactagttttatttttgagatttcacatataagttatatcatgcagcatttttctttttctgatttatttcacccagcataatacatatatgtcttctttatccattcatctgttgatagatagatacttagattgctttcatgtcttggcaattgtaaataatgttgctatgaaacattgaggtccatgtatcttcttaaatgattgtaccagtttaactcccaccaacagtgtatgagggttcccttctgagagattattttaagaaaaaaatctttgaagtttatttaatattcattataaggcaaattctcagataaataaagccaaaatctaggggaaaagtctaactgtaagaattttagaagcctaaaagctgctggagagggcaaccagaggggaggaagacaggaggtcaagacagataaaatttttaaaatttaatgaacaggaatatagtctgctttttccagttttggtgcttctttttaa

SEQ ID NO: 38074 - DNA, 1687 bp, Bovine  19866881220805
  misc_feature (1)..(1): n is a, c, g, or t
ntaccatggttatagtggtagggaagggaagtcaatgagggatttgtgataaatatatatttgatctttggtctctcactcctggcacactgctcctaaagcttttagaatctctgaagtgatgactgactgtgtttcgtatgatgatgaggtgactgatggctgggggcccaagatagcttcaaaatgagggttactcaccagaaacaccaaaagtgtgagtaaaagatggaaattttaaccacacaccctgacctccaatgaggggaatagggctagagattgagttaatcatcaatcacccatgatttaatcaatcatgcctatgtaattgttagatagttagaataggaaaaaggagtccataatggcggtggctaaaagacaaagaaaggaaaaagcccctgaaaacagaacaaaggaaggtccaaggaccagagtgagaatctcaggtaaaacagccctcctgactagcccaatttacagagggcaagctcagggggaggagaaaaaaacatacaaaaagaggagccaaaattgagtcaggagctcttcttctcttcacatcttttgggccggcctaccctcacacctctaggatgtcttttccttctgcttgccgattaaaactgagctgtattaccgatccatccatcacttcaaatttttgctgcagtgagacagaactgaggaaattacaaactcccctgacataatgatacctgtgtaaaagctctttaaatggtggatttggagggcttctgggttggtgactacatcaaagtgcttggagagtagcacgcctggagaaggcatggaggctccacaacccctcccacacttggcctatgcatcttttagatttgactgtccatgggttgtatcctttataataaaaaggtacatttaagtaatgtaactttctgagttctatacacccttctagaaaattaacaaacctgagtagggaatcatgagaacccccaacttataagcagtttgtccaaggtacacatggcaaccagggacttataactggcctctgaagtaggggaagtcttgtggcactgaagccttaacctttggaatctgtgctaatgccagatagttaaactgaattgtagcaatccccattggagtccagagaggtatggcaattattgtctaaaagttttgctaactttcccctttcctacttcttttgcaagagacagcaggctgtttgctcctattggagtctttaggttactggctctttgagcaacatgttctggatatatgactaaaagaaaactcaaggaattcaccaccattttgttcctcaagtgcaaaagttcctggactgtctgccttctctttcaaagccctcttatgtttcattgtacgtattatttccaggatttttagctatatttagagagaggaattgagaaaatgtgcctattccatcttcatctagagatagaatttccaagtcagttttgaatattaggatcacctttcctacatgagaacagtggttttccttctccaccttcgagtttttttccctcccagctttccattcctaattatgcaagattgactcagaaacaattttttcattaaataacctcatgaggtcactattaccagctgtgaatgtttccaccattctttcctttgctagtaagaattttctctgaag

SEQ ID NO: 38075 - DNA, 809 bp, Bovine  19866881224523
  misc_feature (1)..(1): n is a, c, g, or t
ngtttaacacaaaaacactgtagtgtagtaattgtatccactctttgcatttcgactgccacatttgtcacgtttttacaaaatctgttagtggattcatcttttttttagtccatatgttgtttattatatgtgactatttttgtaaatggggtttctgttgggaaatagattaaaggacctcttaaacaggtatgccactgggggttatggcaatcacatggccctcccatctgcacaaagacatggtttgcatgagggcatgctacacttagagatcatgcatgaaaaaagtcacaaggaacacagtgagctcttaaattccatctatgtttctgggaggggtgattaggtgataactggaggtgctttgctgatcttgttttgtcaaatccaatccctagaccaagtatgtcattttagggggatagcccattaaatcttagcaggtgcaaacttcactcaaatgtcaggaatcttaagtgttacatttctgtttattgtatttaaaaaatactgaataatgagtattgcttctcccttaaagacggaattgaccaaaagaaccctttataaatttctgcttaatcctgcactttgtttagccatcttcagctcagtaaggttgacaatgtatatgttaatgaaatgctatttattatgtaaatagtcattttaccctgtggtgcacgtttgagcaaacaaataatgacctaagcacagtatttattgcatcaaatatgtaccacaagaaatgtagagtgcaagctttacacaggtaatataatgtattctgtaccattataaat

SEQ ID NO: 38076 - DNA, 1372 bp, Bovine  19866881250997
  misc_feature (1)..(1): n is a, c, g, or t
naactggtaagcatattgaatagaaagatagattttcaattttatactgcactagttgattttgttgacatgttcacatttgccttttatacttaaaaatctagtttacacctagatactaacattgtcacaacaagaaagacattcaaaaatatgtagaatgtgaatgccacatgatacatatttcctgtgtcttttgaaaatgatccagtcataagagctctaaaatgatctaattgtgagtcttcttcatcatctctaattcctccttctctgtgaacatttgccacatggctgtgactgatggtaatgtgacttcgagacttcagcagaaaggaactatttccatttgctttctcttatgattatgagctcatggagagatacaaagtgcaaaatgaaggggatatattctgtttgacagcagttagtaacaataagctgtcatcctttaaaaggaatacagtaaatatttctttaaagtagcttctctaataactcacagtaatggaaagcaacatgatgcctcaactttttgctacccttcaactgggtgacaaggaatctgacaaaaagaagcctctcacacgagcccagaaaattaaagaaattgttccttgatttcttctcttccattctacaaaagactttaactctgactattctgttgatatatatcatctgtagtccattcaatgagcaaaggcatttgaatgagttttcagtttataaatgttactttgctttcaagtaccctttgcatcatcttctcatgccatagtattttctttgaggtgaatatcttgtttgaggttagagcaagtgataaatctctgggactgattagtgcccagaagttgagacatattttattaaggcattaaagtcaaactcaaagagagagattaacaagttaaaaatgtgcaatttgacctgagtgatgcaaattatttataataaatttcattggatttacataagagaacagtaagaactatttggaaaggtggttcattttcttagttttcattaaaaataaagtgaaaaaaaaaaaaaagaaaggcccatagacatttaacttccttgtcaactagcagggattagagttacaaaaagtatttcatatacatatcctgtcattctgatctaagaaagtgtaagaaagtaatttctctacctctattggttgaaaaagtcaatcctatataggagaccagaataatttatttcattacatatactcaatactctttatattttacttgtttggcaggctttgtatttgtcagctatgaggttagggaaaatggtaaaaaaaaaaaaaaaaaaaaaagactaaacaccataagattaaatcacttccagccaaaaa

SEQ ID NO: 38077 - DNA, 677 bp, Bovine  19866881252002
  misc_feature (1)..(1): n is a, c, g, or t
nctttgctttcaaatagtgcactttttttttcctatggggggaagaaatagaacaaagcacctaagcagtactcaatttttcttagcaaactgaagctgcactgttttattctgataaatgatgctaatgaagcttagggacttttacaggtgtgtaattcttcatttcactacattattgttttcccttattttttggtaaagcacatacatgctttaaacagtttgttagacagccaactttttcacagcatttttttagcacaatatatttagaaaatgtgtaaccaaagatgaatctaccacaaatcctcttttttctcatagtgcctctcatccttagttttattgttgcagacaattcagtgaatcagggggctttgtctggtcctcttctagtttacatttgccaaaactaacaaatgtgaactagttcattgtaatactagagtccatcttttggggtgaaatcacctcttgggcttggaaaagggaggatatgaaaaaatatcatagattaacttaatctatcaaatgcagtttggtcatgcgggaatgttacttcttgaaactgaacaggctaccactttatggcagaaacatttcacaatgtcctattagtaaagtcagtctgtagaggcccaaatgtactcttgcctggaaaatcccatggacaa

SEQ ID NO: 38078 - DNA, 986 bp, Bovine  19866881260362
  misc_feature (1)..(1): n is a, c, g, or t
nctaagctttcttgcaaaggttctgaaaactgccagccaccccatggtttctgttgatagagatgcatccacaatgcttaatcaatgctctgtcttggttgataacctgcaaacatcttctctaacacacagaatgggagcttaatcttcaagatgggggactgagagagagagtaatggtaccaccaggaattgggtgctatagtcataagtgtgacaccatccatcagctctaggcttcctgtggatacaccctccacatagaagtagcatccacttatcaccaccccagtggtgaggcttgaatacattacctttaatgaaaggtcacttagggtcaagtgcaattatatgagtggatgccgtttaaaactggaaaacctcataaagtcttgaaattaatgttaagttatacatatttcagaattccctgcaagccccaaccaggagcagaaagacattgttttaaaatcatcctttatctttttaaatttctttgggatgctggttttgacattaagatttaactgggctaaaagctgccatgtagcccatgaaaaattatcttgctacctaagaagaaaaacatttgaaatgtacaggtcccattcatcatgaatgtggcttttttttaaaggatgaaaatagaagagtattgtgatttttaaaaaaaaaatacataattttaaaacttgaagagattaagatgcacttacatttagtctcatttattttgtacattgttatacaagttatacagattcacagatgggaaatatattcaaggtcatacaagaaaagaatatttaatggtaaaagtcagactccaagtattttattccagttgaaaatatatgtcacagcactgtagtgctttgcttcataatttcttgataagtataggatgataaaatactatcaattgatatgcactaggtaaaaatgtcaagtcatacatttagaaatttcaaggacactaaaaatgt

SEQ ID NO: 38079 - DNA, 841 bp, Bovine  19866881272289
  misc_feature (1)..(1): n is a, c, g, or t
ntctaacaacgtggaaattcactgctgctgctaagttgcttcagtcatgtccaactctgtgcaaccccatagacagcagcctactaggctccccccatccctgggattctccaggcaagaacactggagtgggttgccgtttcctcctccactaggactgagatttagaacgtgacttggcaatgtgccccccctctttttcttcttgacacagcatctttatgttaagttgatatcttgaaatataatgggctctctttatccatggctttgcatctgcatgatgcaagggcttgagcatgggcagattttggtattttcagggactgccctggaaccagtcccccctgcatgtaccaagggacaactgtatagttcactcacttaatattacttaaaagttgtaatattaaatacacttactcatttatggctattttagactatgagctttacattcagagtctatcaatgttatatttacaggcaacatttaagggatggatggatattatgtatgcagcagttgattctgttaacgtaagtattggtaaacataacaccgaactctacagttttgaaaagcttctttgttgagttaggctgtttccaaacagcagctccaagaagctcttgctacgggcatgctcactgaagaaaatccacctggtagttgcctcggttacctgtgtggcatttggaaacagagcttgacttaaattctgtgactctactgtatcagacaagcttgcatctgacttgcagcgagccactttatctctctgagcctgtttattgatccataaaaagaaaataattcaccactacctcatggggctat

SEQ ID NO: 38080 - DNA, 1340 bp, Bovine  19866881283259
  misc_feature (1)..(1): n is a, c, g, or t
nttgctttttgatgttgagttgtatgagctatttatgtatgtagaatatgagcgacttatcactcttttgaggtttttttccctaatttactcatttcatagtaacattaagcttttcaaatagctctggatttgcctctgttcaacagaattaaagagatattgcatggctcttagttctacaaatactttccataagaaaattgagtagttctgctggattatcattttaggagaataaaatgcctatgaagtctgtggtattttgaaaagacatttttaaagctgaaaatatgccaaacataaagcatgatgtttgcctttaacaaatctcaaagacagctacttgctttgggctgatgaagtattaattgttgaatacaccaactctgtgaagggctgttggtatattatgggcttgccgtaaatctagttatattctagagtaagtcccatcactgcatgaagtagagtttttgcactattccccatacatcttactttctataatttagttacaagctatataatctactctttaaaaatatcctttatgaaaatcaaaaagaatttttaaaaaattgacggtagcttccaccatcatcactggcttgtttgtgtactgagtgcctctaactcttatgtactaatatgatcactttatagtgtcaggagccaagtaacttagtggcacacaaaatcaatggtggggctgggattcaaactcaactctgtttgaatcataatattaataaaagtaacttaaacatcatatcctatttcaccattctctctacaaacttctgatgtttttcccccagctttttatcttagataaccaccataaatcccatcctcccaatgctaaatcagtactaaattagcttatttattacaaaaactacactattattcagtgaattagtttagtgtctattaagtagcatatcctgtcaacataacagagtgatcaaagattcagtgttttggaattagtttataaataagacaaattaccttgaatgaaagacaaaaacatggaggatacttacatcaacaattaagaagtctagccaacaccaggcattggtgaaatatgtttgatagccatatgccacccattttagaagcatttccagaatgaaaatgtaagtgaaaaccttgtcagcatattccaacattgttttgattgtctttcgctggtcaatatatatatcctcaaatgcctataaagaaaagttacgcattttagttttctgaaacttttatgctacagctattataggctattttcccgattacatagtttttcctattttcatataataaaatacatttca

SEQ ID NO: 38081 - DNA, 1554 bp, Bovine  19866881300067
  misc_feature (1)..(1): n is a, c, g, or t
ntcttaacatttgtgtatactttctaatagacatagacttgttttcatcagaggcatcagcggatctttcaaaatatctagtgtcagcaaaggatctgtgacttagttttagaaatgaaactaaatgtaattagaagtacaattaaatgtaaaaatattaattcaaggacagaaatctaaggaatataagcaagaaactacagacaaatggctacattttcagtaatggctgatagaaggaaagattagaatgataggaaagagaatggtgcctcagggtggggggaaaagagagagggaagagaggctgtggaaagggagtcaagtgtaaatgataaaggaaaaatacagagaaggcaaagacggagaatactgcattgagtatagctgctggtttacattttcataagagctttagtggaatgataggaataaaattctgaataaagaataaaggaacctgagaaaatggagattgctgcttatttaagtttaggcagtagattcatttcctagacttcctactctgaagtggttctccagagacactggttcagagaggtcagtgatttttgagaagcacagtgcccgctcagtgtttctttaaatagtcacttgccttggcttcactgatctagagtcttctggtcttccgcttaatttccctccactgtgtaggttaatcatccctgaagttagaatccccaagacttaggcctaggttcttttcactctcattttatgtgctttctaaataatctcatacatttatacgggttcacttgttttgcttatttctggtacaatataggagatggataaacatgttaaatcagtgaaataattatttatttgagtatttatactaatcagctccattgtattttaataattttagtgcaaaatttttgagaatatatgaatttttaatatatattttaaatataaattgttatttaggttattcaaataccagcaagtgacctattacatcttcaaagatggcctttttgttgttgttatttcaatatgacattacattaataaatattcccaatttgattaaaatactttcacatttcttactgaaagtttatatgtttgtcttttatatgccaggtggtagtgagagctttgattaaaacaactttacccacattgaatgtgtttctggtctgccttatgatctggctggcttttggcatcataggagtacacttatttgctggcaaattctatgagtgcattgacccaacaagtggagaaaggtttcctctatctgaagtcatgaacagaagtcaatgtgaaagccttgtatttaatgaatccatgccatgggagaatgcaaaactaaattttgataatgttggaatcagttttctttcactgcttcaagtagtaagtacctgtttgaatttttgaaatatgtttattcaaattgtaggtgaacataaaggacaaaatgtggatgcttaataaaagttagttttaaattatcttagcaattgttagtagatacaggttatgggacatagtatactaagctcatttaga

SEQ ID NO: 38082 - DNA, 1008 bp, Bovine  19866881387032
  misc_feature (1)..(1): n is a, c, g, or t
nccaatcataatgccattatctcatttgaatggggttcaatgggcagatctttttctttgctttaaaagtctcattaagttgcaagttggcacaattcttggacagaatattttattacaggaactctgaaagcattatatgttccacttattgcaataagtgaagtttatcttctgggaaaagtaaacgcagatcttggcttaagttaccttcagcacaacagacactagtcacaattttcttgttctacttgtttctcacaggtaacaaatattaagtaaaggcaaatgtcaagagggcattttaggtgcataaaagggaatttggacacaggttttctgctatagaaatgagtttaggaatgacatcacagtaatggtgagggagcattctctttgctcctcatgctggccctttaagggtcgggctgacctctgctccagcgttcacagaggctcacacatgggagattgatgagaactctagcttctcctctgctgccccatcctgtgttcttatctatggatgaagatgtatagagctcttcattgctggtttggattttggcctatatttcagaaaactgtatttatgttcttttttatttcccatctccctgtttctccaaccctattctcctcctgacataggtcctcaacctatttcttgctttattactgagctcatttagttcagacaatcttacagccattgaagaagacactgatgcaaacaacctccagattgcagtggccagaattaagaagggaataaagtacgtgaaacaaaccttacgggagtttgttctaaaagcattttccaaaaagccaaagatttccaaagagattagacaaacagaagatctaaattgtaaaaaggaaaactacatctctaaccgcacacttgctgaaatgagcaaggatcacaaattccacaaagaaaaagataaaaccagtggttttggaaacagcatggacaaatacttaatggaagaaagtgatggtcag

SEQ ID NO: 38083 - DNA, 926 bp, Bovine  19866881426942
  misc_feature (1)..(1): n is a, c, g, or t
nacttacaaacatatcccagttctgtaccactcgtgcttcttacttccctaaagctctctgatctccttgagaaaagtctgtgggtcttaaacatcattgcattccaggaggaagaataatgcctggcatgtagtaagtatttactaaggtaactaacatgttgtcctttactggtcagagggattaatttttaagtaaaaaaaaaaaatgccacaatatttttaacttccaacacatttattaaaaataatgaccatccatttaagcattaggtgtcagatcacttaccagagcaccactgctgagcaagatcatgagaacaatgaagctttcaaaccaactgtgctcaactatcctgaagcaggttttcctgatgttccaccagatttttcctttccctgattctatgttaacttggcagcatgggaacctctgtacgcaacctggcaagaaagacatgcatgtaaaatctggatattcagaataaataaaatacttaagaaatattatttaatgcaaagtgctccctatgacaattcctcaaccaaatactttcaagcacatctgaagcttcaaataattttaacttgggtgttgctttttcttatctcctaaatctccatggcgttttcttaatatttgtcagtaatttctaacttggatatatttgtgttttctatatttctctagttcctcatcaacgtcttctacagtatttaaaccacatactgttatttattattgcagccctaatacaatcctaatcctgatacacaatgagcagtaaataatgattggtgaatcaatataaatctcaagataatattgcatttcatgaccttcttgatgtgaatttagtctataatctggtgcggcttcaactcctctgtaaaaaagcacttttgagaaacagcattctaagtaa

SEQ ID NO: 38084 - DNA, 838 bp, Bovine  19866881465661
  misc_feature (1)..(1): n is a, c, g, or t
nctaatatgctggtctttgaaaatatcctaggttagtcagactttcaggcaagaacacaggctctggtgttcctctttctagcacaatctgttcaagaccactctaagtaatttattactttgtaaaaatgttattacattcccgcagtgcaccctggtgaaactgggcttttcaaatgttaattattcattgaaaaatgatccctgtgacccagttttcctgatagtgttgttcctatgaggagaacaaatcctgtgcttgaatcttgcttagttggcgtactggaacgtgatgttcagtcatttaacctcagtttccattcttttatgaaaagggtaaaggggacatactgatcttgcactctgtagttctctcagtgagggacggcaactagctctactttgattccctctccctcacctctgccatcttcctgctcccttcttattcctcttccagacggggaatgtcatatctttttaatttggaatatttctctacctgtcaatttttctcttaagagtacattcaaaataggtgtatagagcacaggagaatttttagggcagtgaaactgtcattgtgtaatggtgagtacatgttatcatacaattgtcaaaacccatgttatatgtagttaaagaagtgaaccctaagtaaccatggattttaattaatagtgatcatcaatattggcttatcagttgtccaaatgtactacactagtgcaagatgttagaaaataggggaaatctgaggggccaagtgtatatatgggaactctgtacatttcactgtttttgtgtgtggtgtgtaaactgcttccaaaaatctatg

SEQ ID NO: 38085 - DNA, 3279 bp, Bovine  19866880371181
  misc_feature (1)..(1): n is a, c, g, or t
ngaattctaaaacgctagtggtcctccgccctgggagaaacatgacggaggacaagtccgtcagagtggagtcagcaaactgaaccaactgctattaaaatatattacccctgcaaagcttataacagatgatcataataacatgtttctgcaactttccttagattctcacaagaagcctttaaatattaagcattaacttcatagtaaattttcttatcttcttatggattaaatatttgttcttatactcgctcattcattaactgagaagtactgaacctttaacatgctttgaccatatgaacacacatataaagcagcacccactctgagagagcatacattttcacagagaggtggacatgtatataaaaatcagtaaatccagggagtaccagatactctttgatatcagtccaataaacattcactgaatgatttctggtcttccctgacagctcaattagtaaagaatcctcctgcaatgcaggagaccccagtttgattcctgggttgggaagatctggtggagaagggataggctacccacttcagtattctgcctggataattccatgaactgtatagttccatggggtagcaaagagtcagacatgaatgagtaactttcactcagagtatatcttttttttttccctcctgagcagaagtaggattatgttgggcttccctggtggctcagcggtaaagggtctgcctgcagtgcaggaaacctgggttcaatccctgggtcaggaatatcccctggggagggcatgacagcccaatccagtattcttgcctggaaaatcccacggacagaggagcctggcaggctatagtccatggggtcgcaaaaagtcagacatgactgagttgactaagcagcagcagcaggattatgatgggcaactcaccctattctacaaaatcatattcataaaagcattgatggtagtcctgtttgctttgcctgtgattgactcaggaagaggctttggccaatgtaatgtgaggggaagtcagctgaggtgcttctgggaatgcttagtgaacaactcctcttcctcctctataaagaagctgcaatgggatgactggaactgtggcagctatactgcaaccagacagaaagctacactgaccatagacgggcaaagcagtaatatggcaagacatatgaggcatttttgtggggttggtgggcagcaaaattaatcaaccctagggctaacttatgcctggactgaaagtgctttaggaaacttagaactcaaaaagaaaatttttaataaattagaagcttcatattaaattgtcacaggttattcttttgccagctactctcctctctgtaaaattgcagttttatttctcattacttgaattctggtccacgtatgaaaagcaaatgaatacctcagagggtgatttgattatccttttatagttactacatctgcactaatgtattgagggttattatgctgtttattttctataatttttcccaattaacagttattaccaggagctatctttgttaagtgaatgttgctgcatacatcagagaaagtgtagtgatataatgtagacaactgcagaaaagggctttttatacaatggtcgggaactaaaacatcaccttaatgcaattaaaactgtacatgttcacaagagcatggtgtcaataaaggccgaattaactgacattaggagaattactcttgcctggcaaatcccatggacggaggagcctggtaggctgcagtccatggggtcgctggagtcggacatgactgatcgacttcgctttcacttttcactttcatgcattggagaaggacatggcaaaccacttcagtgttcttgcctggagaatcccagggacgggggaacctggtgggctgctgtctctggggtcgcacagagtcggacacgactgaagtgacttagcagcagcagcggcggcagcagcagcaggagaatttagcttaattaaaaattataattcagaagtattctaaggcatctttttttcttaaaggagaaacattcttctaatggtttctgactaaaaatgtagatacagaatagaaatgatatctgggaaaatactatagaagcttctataaaatttataagaatgcactcaacatagaagggaagattttgctgttattaagatgtagtcaggttacagccagctgctgacatttgttccatctgagctgaagctaggtggaacatcaccgtgtttataaattcttacagtccaatatgagagaacacattttgttttgaacaagtgagtagtgacagacaagctgtccatagagtatacagatgacagatcaagaggaaaatgagctctgagatagttttacagcatccttcactggaaaaatggccatgtgacatgcgtgctgtgcacagtgggcttcggtattagtgttcatgctgctggaaaatgtattgcttgaactaaatgcaccctctattgagcacaaatgattcaaccacaatttaatagggagatcattacttctgcaaaaggattttcaagattagctgtgaggaatcgaatcattgtctacagaggaaatggagatgttacttgctcagcattgtaaaattgtatggcaacatagacagacatggtctattatttatgtcaataagtagaaggataaattttttaaaaaagtgcatgcttcagttgagttgtaaatactaatacttctacttagccttattaatccccgaggattacttattttccttaagacatcttattttcagcttccaatggtactctgaaaagcaatctgttgagggaatggagttgagatatttcgccatcatgtactcctttcacctgtttaaagtgatggttttcatcacgttgttccccttccactgactgatcagagttgtataggaggactggctaagtgccttgtagcctaccaggtgatctaagtagtctatataagaagagaaagaatagatttaatttaaattattgaattagatgggctgcccaatattaaggaatgggtattgtggctgctgccagtgtctaatagtcagtgtgtgatgctgctcatgtcacataatcagtaattctaaactttcaacttcttggcatataagtattaagctggacaggctttccatgatagctatgacaaactttatggttattagaggccaaatacattttaaaagttacatgtatcatacattttttggtacaaaggattcaattatata

SEQ ID NO: 38086 - DNA, 2365 bp, Bovine  19866880499151
  misc_feature (1)..(1): n is a, c, g, or t
ntcaaaccccatatctattatgtctcctgcattggcaggtgggttctttaccaccagcaccacctgggaagccctatctatctcctgcctcacttcaatcctgggagaacccagtattcaacaatcaatcctctcttcttactgcggccatcaatgaccattcatggattaccaaattcatggtagtagtcagtatcactcttatgagttccaaatatgtactagctggttgctcatatgcatttagatataaaaatcacagctcaaatgaattatgtccaaaacagaagtcacagtcttttttccaaaatatgcttcttccccaggattagcacagattgtttctttcccttactcttcacatgaaatccaggaccagtctgtattctctctaccctcctcactctcatatctatctcctccttttcatctccattattaacttggttaaatctttcatctctttcctgaattatagagaatcacatagcttgtatccctgcctcagcttttcctgtcctttaattcatcctacccactgctgtagtaattatatttatcaagtaaaaaaatagataaaataacacccctgcttcaaaatcttcaaattttttcacagattgatggacagagtccaagttctttggcaaagtattcaaggccccattgatctggcacttgcctcctttctaggatcagttttgctaattgctatgcacacttcagttctaatcaaccacttaacctctccagagcaactccttctgcctggaatgttcctctctctcagaggccaatactttctgtttttaggttcaaattaagacttccctcctctacatagtattataactccctcccccgccccaactcaaatttattttattaattacaaattgtattcctcttatttctattcaaatttccaacataacacataaaacatgatgttgcccttattgtcttctacacatttgtctccccaagtacctcataaagataggggttctctattatgtatttcaacatatggcacataacaagtgctcaataagtgtctgctaaattaataaacaaaagaaaaaataaagggataaatggatgagcaaatgtaattgtcaatattgaatgatccctaaagacccccagcgaagtatttcactagacagtaaataaatgcttgattctatatacattgacagtaattaaaagcatagattctccagtcaagttgcttggattctctgcttggtcacttatttaggtgactttgggaaagttacttcatttctatgcaaagaaattggaatgtaatagttccctcttcattgttttcttaggaagattagctgaacatgcttatgttattaagacttatgaggatgaaatgagaatatagtaaatgttacatacattgttaaaaatgctcttaaagagggcttcctttgtggctcagtggtaaagaatctgcctgccactgcaagagacataaattcaacccctggtccaggaagatcccacacgcaatggagcaaataagcccatgtgctgcaactattgagcctgtgctctagagcccaagagccacaactactgagcccatgtgctgtaagtactgaagcccatgagcgctagagcccgcactccacaacaagagaaaccactgccatgagaagcccatataccacactggagagtagcctccacttgccacaactagggaaagtctgcatggcaacaaagacccagcacagccaaaaatgaataaatgaataaaattataaaataataaaatatgaacaaataaagacatttaatcttaaagatataagattagaggcaagaatttgaaagaatattctttctgtttgtatatattgaaaaactctgaagttaaattgttataaatagtatttctgtagtttctgataattttcagcatacaggtaaaaatatacctatttattgaaaatagcaaatttctttcttgcttgtttgagcaaatgcttgctattatcagtttttacttcctaatgagttttctctatactgggatgcaggactagagagggattatgtaggtcactgtggcttttgttgaatcaaaccctggtgaattcaacataaaaatatattactttaatatgcagaatccattggcactggtgggctacactactgatttttattttgccctaactgtcaccaacaattttatgatttaagcccataataagtaaaatttttaaagttaaaataaatctgtaattgttgttgttgttcagtcactaagtcatgtccaactctttgcaacccatggactgcaacaaaccaggactgcaacaaatccagtccttcactatct

SEQ ID NO: 38087 - DNA, 1634 bp, Bovine  19866880592950
  misc_feature (1)..(1): n is a, c, g, or t
naactacttacaatgcccattctgtaagtcctttcttctcttctcttctgacttcattttggcctttatgtaccattgacacctttataagaggtaaagagaaccttatttaggaattatgctggataagaaccaatatcaattaaaatactcctcactcataggcaaaaattcttatcataaagatggcttttaagaacatctttatagaaaatactccatagaagtttctttttactatatcaatattagctccagagaaaaataaaatactctcaagtacattgattgatccaaatgatgggaggcctagaaaatatttaataacaagcagtgacaatcatgtctttccttatatggcctctaacagctatagttggtgaatagctttaaaagtcacaatggaaacattgttcttgattcagaaactcagaaatttagacaactgtattccagtttcagtggtgaacagtgtgtttcttttttttttttttaaattggaagtggtaaaagtgtgttctgttttctgtctcagaaaaatcatgtcctgaagaatggaggcaggaacttatctcctatgacttctttaacatgaaaaattcatcaacatccaatattacctgacagttcatcaaactgctaattccaaatggttaaacagaatacacctgtggtgcacaatccaatctttcaatgtgaatttggcttcagatcctatgacaaattgcatatttattcaaatgtcttaaaattttcatagaataatttccagtgaatgcttctgtagcaaagtgcttaagtcatgcttcagaataaattttttatcttatgtaactgaactttttttttttaatatagaaagttaaggaagtttctgatgtcatataaattggcaaacatggaaactgtactaaattattttcaactttcaatttttgtcattattaaatctttttttaaaatggtattcaaattctgtttcagaaatcctaaataaatataacagccgtgcctatctctcaggtttactaggccaatcttatttagcctataatgactgtcaggtcttcttttaagtttgtcatatttatgtattaaggcagtattttctgatcttttaaggaaatacttttctacgtgtgtatttaaatcatttgcttaaatactctgtggcaataaggcctttaactcatattctacaaatacataaaatataacttaaaattgaactaattatgctacatattgaataactataaataaaatataatttgagtgaacttccataatgaatttagaagcattctttaaaactgatgataaatgtgacactgctgtttaaatgaagtctgagacactatcagctgtaagagtgatgctttgtcataacaaactgtgtaaaaatataaatctaaggtttaggtggaagaagcactttgaccagctggttgggattcaagtctaggtcttttgctacattaaatttattgtcatttaaaattctcatccatattgcacttccacaggaaaatattttcacttgattacataaccaaattaatgcaattctaatatcaatatggttcagtattcaatgaataaaaatttttctatactattaagtttatacagca

SEQ ID NO: 38088 - DNA, 1867 bp, Bovine  19866880642800
  misc_feature (1)..(1): n is a, c, g, or t
nttgtgatacaccatgctgagtcttctgtctatggggagcaatgattgcttcgttgttattcatctggtaggagcctcactgtttctctctgtgaacaacacaaagatttcataggtgcatcatttctggcacaaaccagacagcctgtctcattaacatgctcacccagagttgctgtaactatcagtaagaaactgtgttaaataaatgattttgctttttcacctgctaggctctaatagcatctccaaagtaatcttggtctaacagcttgagtcttttccaaaagtgatcaagtgatcaattctttttaacactaaaaggtaaacttcaacactgtgcaaaattccaggtgcaggagcagttgccgtgaatagaagcaaaaatttaatatgagtcatgcaatttcatatgggtacctactaagaaattttttaaagtcattacactgtgtctgaaagagacaaggcagggtacctaaagtaaatcaggcagttgatctaaaaatagatttttattcattctgaaaatatttcttaaacatttaacatttgccaggatttgctaggcacagaagataaagtaacacataagattggcatggtcataacttgcatcaaaagtacatttttagtaaaggagagagacaaatacagatggaatcatttaattataatttgatgggaactgaatacaggagaaggcaatggcaccccactccagtactcttgcctggaaaatctcatggacagaagagcctggtgggctgcagtccatggggtcgctaagagtcggacacgactgagccccttactttcacttttcacttttatgcattggagaaggaaatgacaacccactccacagtgttcttgcctggagaatcccagggacgggggagcctggtgggctcccgtctatggggtcgcacagagtcggacacaactgaagcgacttagcagcagcagcagcagtaatataatagaacttccctgctggctcagaggttaaagcatttgcctgcaatgtgggagacaattatgtgatataatagactatttcagtgtgcgagatagcaagtaggttggaaatatagatgtgtctcattttcactgaaattaatgcttctaaataacttaccatagagtttgataaagatttatgtatataatttggtgtttaatattgtcaatgtgtttatttttgagcacatccacatgtatttttaaaagaattcatttaaactgtatatatatgacaaaataatgatatattacacctcagaagtgtttatgacaaataaaacccatcacactgaatgtttatgattaaaactcaggaaatgagaaagctaaattgttaaagcacttaattatcatttcacatttattatttgtttacatatttttagagcaaatagtaatttaagaacaggatttatctgttatgacaagatttcacttttaccatttcggattttttctttaattttgtagccttatcatattgtgttaattttatttaaaggagttatatctgggcatttgaaaaaatgttggtgtactttgtttcatgttattttatgaaaaatacagcaacaaacaccctatgggttaattgaatccacagttaagactcacatgttaattaattttaaagaaagcctaatacactatgcaaagtgccaagtctagatgtcaatttcatttttattttaattagatcatccaatttgtgaaggtacttatggtccagtaagtgaaggagacggaagggtgggaagttcattaagattgccatgatgcttctgggaagaagaacaaaacctatgtttgaaatagaagtacttcagttatttataggatt

SEQ ID NO: 38089 - DNA, 1349 bp, Bovine  19866880675219
  misc_feature (1)..(1): n is a, c, g, or t
ntagattggatttgcctagaagaccaccaaatgcaagtagatgattgatatattgtttggatttcaaagaagtcagagtagagatgtaaacctgggcaacatcagctgccaccctcaatcaagacaaattcatcttatcaaaaaacttccagtaatattgaacctcaaaaggcaagagcttagggacctcgatccttttcctcctgagatcctccttattgtgaatgtacctgcaagctgtctagcttcatataccaagcaggacttagaggagccgtctttgccaggccacataggttctgtgtgccttaccccagagagtgggtacctggtgcccaaagacaggtgtaagtaatggaagtcactcaagggaattcattccaaataaaatctgttctgagctgactttctctctccacctcttgaagtagagaaaacatgactgaagtgacttagcagcagcagcagcagcaacaccaccaatgtaatgcggccgtgacaggtcaagacaaaaaagagcactccataatcctgtgtgaaaccagacaaaagcacgaatgttgtccacaccctagaatgagtaaacacccctgtattctggctaatgaatgctgccactccaccgacagcttcagcctccatccgtccctcccaccttctacagaagaataattaagataaacatagacttgtcttgcttcctgacagcatccagtccagatcaaagccctgcttccttcaactctcaccaaaaccacctaaaaacagcccaaatcccacaataagccctctccaggaccccctttctgaggcacttcctggttccccaggaggatggagctttctcacagccacgagactagttcaacttctactgtgtccctggtggtctgtggctcaagagctttgacagaaaaggacataaaatttcagcattcattactcatcataataaataagggaaaatattagtgaaacttccgatttatctatatctgaacgtgtttatatgtttgcaggcactggggcaacaggtaacactatttcttcagtgggtcatgaaggaaactgaaagccagcggaccagtggtcaaaagtaggaaaccagctcacagactcaactctggcctgagcctgactgtgtgccctttggaaagtggcttcacttcccttggccctggtatcttcattcatcctagacgtgttcgttgagtaccttccagagatgagcacactctgccttgctgtttcagctctcagacaagtggctttcatggtctatctggtgctatgtaatttgcatttttgtcccttttgttgctgatttttgctgtttaaaatgattccat

SEQ ID NO: 38090 - DNA, 815 bp, Bovine  19866880740310
  misc_feature (1)..(1): n is a, c, g, or t
nccttctccggggatcttcccacccggaattgaactggagtctcctgtgtctcctgcattgcaagtggattctttacctgctgagccattggggaagccactaacaggagagttcttaaagcagtacttcgtcttaaatgaacgaagcactaaagtagaacttacccacctgtcaggtcagcactggagcttctggggagcacatgtttttcagaaatatctggcagaaaaaaaaaaaagaaatatctggcaggtcatatacctccttaccaccacttagtcatatcagggtgccctacgtgcccccctccacactgtagaaatgacgcaagtccatctgatctctttattaaatcatctttgctaaaaataactctgcatatcaacatcaacgttaagggagaaataaaaagtttaaatactgtcagtttgaatttaagtttgcataaaaataaaaacgaggcgatggcctaggctacaaagagttggcctacagaaggtcttagggtttcaattcaattacagcaaaacatctgtctctgttgttgttgaatctgctccttatccctttagtgctttctttgcaaacccagtaagcttcttaagaaaaaaaaaaaaatagaaaaccacatctgtcgacattggaaagaggtaactaccagggaacaaaattaatcacagggtcagtggagatttttgtaatggtttaagctctccctcacatgtactgcctcctgtccactctgcttccgccctgaggatacccgctagtttacattcctttggcaggaagccagaagaacactcggatagca

SEQ ID NO: 38091 - DNA, 1706 bp, Bovine  19866880779595
  misc_feature (1)..(1): n is a, c, g, or t
nttatctctaaatggaatctttttcacaaatacttaacacgaaaacatgcacactgtcaatctacaaaatgaatgctgaacattggagtttttttctacttaccaaacatttatttaatacctacccgaccctatttacttagttccaccaaagttactaaagattgctacgggatacatacatttcattcagtgttttccactcaaccccatgtctggaagtatctttgtttataaattaagagcccacatcccattgtggatgttcttttccttcttttggcatgccttttgcagaacctcggaagcacagtacatatagctctactttaacatccattgcacttattattgactatagctgccatttcactgttcctactatgctgtgcactgactgatggcaggaatgtcagtttgtattcattcttttagtatatctaacacctaataaagtacccagtacatgtaggaggtcaataaacatttggtaaacaaaggcaactaattaaatacctccaaaaaggtatgaaagctacaagatgctattattgaaaattaatgtataatagcaacttagtattaggatgggaagactgacgtttagatttttttatcctgcttggtgtcaataatgcacgaaacaatagtaaaataggataaaagacttgattggagacggaagaaggaagctcttcaagaggatctcagctgtgtgagagtccatggtgccaccttgatgctaatattcttcctcagaagcatccaatgctgtcagggaatctgacagctggctagcactaaggaacagagttgccctgaataattggcactgaaaagtttttactgaaagtgaaaagtcagtcgtgtccgactctttgcgaccccatggactgtagcttaccatgctcctctgtccatgggattctccaagcaagagtactggagtgggttgccatttccttctccagaggatcttcctgacccagggattgaacctggatctccctcattgtaggcagatgctttaccatctgagccaccatgggcataggcaagcttaatttttcactcaaatgcagataatttacatttagaaagcaaggagagtccagataaagtaggtacaaagcccttccctatggaaattggttttccatattatgcatgcttgtgacccttactgatagagccaaattctcctaagaccttaaagtctttccttgaggtaaatcagtcaactttcacattttctttaggacaggataggtgattggctgactccagtttagtctggtaccatccaacttatagttaagagttggtggttttcgttggttgtttttaacataatctgactccaaacacattttatcaattgggatttcctcttcaaacataaatactccagtagaacaaattaaacataatgtacacagtgggaaataaaatccttgaataggtgtcaatgacatggttgttctccagaatgattctaccaacctgccctcctagggattttctcctctgtatccgaggtgaatctgcactgagactgcctatgcatctgccttgcaaggcgtcctcttctgagtgtagagaaaaggaagtctggtccatgtcagtcttacagtcatgataacaaccatcaaaggccatggcttgagttgcctcaatactgtacattctagaaatcaacaaaaaga

SEQ ID NO: 38092 - DNA, 1416 bp, Bovine  19866880793146
  misc_feature (1)..(1): n is a, c, g, or t
ntgaattagtgtgaataactattttggaatacgttttataatcaatggtttggtataagcaaattttgcactgtttttgaagaaaatatttgattgttaatgtcataatttagtaaagcattcatttcttttataagtatcatcatcgtatcaagggaagaaaagaagatatgtaatttaggtcagaccaacacatcttaagcattaaaagatgtgtgtttgaaagatgtcagtctccacatgttctggaaataaaaaccagacaaacaatacaataaaacttcatgcatcccatagaagtctgaataaccaatcacttaaaatttcaccatctgctcttactgaagcagcaagattgaggcgttttctggccatgatgatcagaatgtaacagaatgagaaacactaacaggattccctccacacaccctttcttatttactgctgtggttcttaatgaaaacctgagctctacaaagaaaaggggaggatgtcccccgccccatctcctaattgagtgcgtatagccagtaatagctttttgctgccctgggcagcatgacattacctcatttggcctcgcacagctattatttcaggaagcagctagtgaagtgccccaatccatctgcttgcttttcatgggctgatgcttttcttgatgttgacagctgtcttaatattcctgggccacctgccacatagcaaatactgtgccgtaatgcacacacagaaatgtatccctctggtggactttttaaaacaaaaagcatttctaaaccatgcttgcatccttgttgaaagacttcagggtcagcactttgttctcatacttttgaggagtaatgtgcttatgctttgggaatggtagttcagttacagtgtgatgagcttgagcttttctcacatatcaaataagctattgaattgtactctttttgtagaagtcatggtggtcacaggaagcagaagacgagaataaactgacagttatctcctctagtgagccttcatggaaatttctagactaagttggcatgtgtgcatactaagttgcttcagttgtgtccaactctgtgagaccccctgtactgtgacctaccaggctccactgtccatggaattccccaggcaagaagcctgggtgtgggttgccatttcctcctccaggagatcttcccaacccagggatcgaacccatgtcttatatgtctcctgcattggagactaagttggagttcatcctatgtatgctcatagaaggactttctcttttcctatctgctttgctcatctgttcaccccatcagacttgcgtcttgagggaaagctcttggttttatcactgtatctctaagaatgagtgtgtttctgatccatagtcagcactcaaggacaaatccaggttttaaggta

SEQ ID NO: 38093 - DNA, 1855 bp, Bovine  19866880806816
  misc_feature (1)..(1): n is a, c, g, or t
ncttgataagaatgccgggagaatttttctttgccattggagtttgggggaatacaaggcacttgttttggatccattcctggaaaagcttaaggtgagataccggctggttggtacttgttctagggagagaacaccagaatgtggttctaaaactgaatttagtatttagcgcaaatagaaaacacacaatatagtattataattagaagcatgcacagtagatctctgacaacccaggcttgaatcttagctctctctcgtctccagatactgtaactttggttaaatcaacatctctatggttcagttttttcatctgtaaaaatgtggataataatatcactcttcttttcttaggaaagttgaataagctaatacatgtgaataatgccaggatcataggatgccctggtggctcagatggtaaagaatctgcctgcaatgctggagatccaggttcgatccctgggtttggaagatccccccggagaaggaaatagtaacccactccagtattcttcctgaaaaataccatggacagaggagcctggtgggctgcagtccatgtgggtgcaaagagttggacacgactcagtgactaaacacacacacacacgctttcactaacagcagagcttgtctttgaatcacatatgtgccttatgggatggggcctgcttgggtatttttccaaaggcactttgtctaaaattttaagatgtcaacagaagggtgaatagctggaaacagagactaatgaaatgatcatgaactctaaaaggtacagactttgttagaaaattttcaggaaagagatgtgtactaactgggaggggtcccaaaagaagctaggaaagcaatgaaagagttagttttaattacccaggaagttcaaatcatcaatgacagatcaagggagtactgagtgagatctatccttctgctttcctagccttctttgcataacctatctgactctaaatgggtcagagaccttttatggacagtggtgacgaggaagttctagcttatatgatcatgatagaagaagcagagtcaagaaaaatgaagtgtttttttctatttgaaatccatggtgtctggctcttttaatctaatagtttggcgttagacattaacttgaggttttgaatataatatcgaaagttgtaagagaatcactgacaattttgcaagtctcttttgaatgcctaatttgtgtgcaagattctgtgaagaagaagatgctgaaacaaaagggatcaatttacatcctgaataaattagttgctactcaacaaaagttttatgatatgtctgtttggttcagtgacttggggcataatgcatatatcatcacaaaatgtcacctgtagactgtggatataaaaaataaccagtggtcttaggacagacagcttcttatgagatgttctcaaggctttccaaagataattaagtggggctaatctttgtcagatgtttgaagaaaggacaaaggatgatttttggtttatactaaaatatccactctgtctacaggaagagtatttaaattgacagtgcttttataacctcacctcgtggactcatctttctttaacttgttttcagtttcaaagtacattttaatataccactatacatgaattctggcactagaatatcatcaaccctattaatcaactgactctccttatgggtttccatgatggtgtcattttttgagtaatatgaaatcagataagctctcactgatgatgtatctcactaaatcactctctgagtgctgataatataatgacaataacatattagcataattcatcatcacatgtacctttgctctggg

SEQ ID NO: 38094 - DNA, 3211 bp, Bovine  19866880836169
  misc_feature (1)..(1): n is a, c, g, or t
ncacagtactccccactgttagaatgagctaatgagcagttgcttcaggaccaaaaataagtcttaaggatcaataatttgattactttaaaattccataaaatccctcagctcatcaggttctggaactcctgcacgacaaccccctgggtgggcagcataaaacaagacaccaagacaccaggggagatctgatgtgtccattaatttaggggatacaacggtgtctgctgcataccacctggttttacagatctgaaaagaggccccgagtctaaaaatcagaacaaaagcaaatccaaacctaggcgagtatgaaactgagggaaaataagcataccaagaaatgtatagagagagccaagaataaaaattccttctttaatccctggagtctaaattactgctatattccttcctcctggtccttttctctttataaaataatcaactccaagtcactatatctgcctgactcatttggaattagaaacacattgctggtcatcctctccaaagcactttgtgacacagaccatattatccctaagggacatgtccaagatctgacctttgtagatccagagtgttccatatactagagccaggacatgagaagactgcattatgttatgcaacttttctacctttcatctgtttatttgatattatttcaacttatatctcaaaagcagtgctttactctttcccaggttagatacctttgagagtctatctgtctcacatcggctctgccagttaatcccactgtctatgacaaccccaagagctgttcaccctatgtctaacaataactgtatcatatatttaaaattttcaaagagggtagattttatgttgtgtcttatcacaaaaaaattaataattataaagagggcatgaggaaactctgagaggagacaagtatgtccagggccttgataagtctgatgggtatatacttattcccaaatgcctcaattgtatacaataaatacgtacagctttctacatgccaatcatgcttcaataaagtggtttttataaagagaacctctacccaattccatgctatgtctgaagaaaatatttcatctgaaaacatttgagtgaacataattttcagactgttttaaatttatgtaaataattctttactatacacgtgtattagtctgcagagtaactatatatttactgctacaaatgaaatgttaataagctattggctgaatgagattccagatttccactcctgaagtgctttttagtctagtcattctgtgacaaggaaaatgggaaacgtgacacgggctctacagtaagacagagtcacccatcgaactacagctctgcacctgggcacagtgcctacgctctgagaccctcagtttctgtatctgtaatgtgggagtcataaaactctctatctcatcattgttgtgaagattaagtacaagtatgcatgtaaagccattagtaagcacctgaagatgttagcaatatcataatgaggatgatgatattatctttacaagctaatcttaatttttttaacctaatttaaagagaatagattttctttgaaggaaattatgtgtattaaaaactatgtgttaacattttcaaaaatagccaaaacttctatttgcagcagtagtttaacatggcaatttctggcaatttttccaatgtatattctcatagactgtctatatcaagtatctcctgactttttagctatagtgtttttttcttttcacatttcctactatttgaagaattcaactagtgaaatcttggagttctgcctgctttagtcgcagtcaccttggaagataccatcacattttctgctgaacatttctagaagcaaacttcggctccacttttttttttaaatcaggagggaaattcttaaaatcattcagtactaggtgggagatgctctgaatcatgatgcttaacttcctcaatgcacgtggttatcatgaacaaaaagagaaaaagacgcaggctttatcatgttttgtctggcgtgccttttagtgctcaaggaagaagtggctagagaaaacccgtggcccttgtacattagaattgtgtactaaatacctcaaaagctacctgtccactgctcagacaacttagtacccaatcttcagttggctctgctacacttcttttaggtagaactggtttttcaactcagttttttattaacaaggatcactgtggacaaaaaaaaaagctcccttattccctgtgattcttctctcccattctggctcctgctgcccaaccaagtgaggcgttgcaacagtggtgcttgtgaccctgacagatagaaacttaggggacagagcacacagagcccacctggacccaaggatcacccttcactgcatcatcaattctttcaaaaggtggctttggaggccatgccagatagtttagagtttatatgggtaaagattattttggaaatatactgcagtggtataacttcttaactatgagaaaacatggccctctgaacacactaaagaagtctccagagctggtcagaaaagtgagcaacatctgataagcaagccctgatatcctgcagaactctctagcgtccttctatttcctcttccctgtgttttccagtcctggaacattctagacctcctgcctccaggctgacctcctttacctcatgctagttcttgatacattcaccaaaaaaataaaaacctttctaaaatgctaatctaatcacactcactaggcctaaaattcattccttctggtcaagtcaagaaaaaaagtgtgaacgcctcaacatggcatataaggcccttcattttctggctctggattcatcttcccaagctctaatatcctgattttactgcatttccaaaacatatcagtttcacttatatgagggtttctcaacttcagcaccagtaatattttaggctgatgattccttgctgtggaggctgtccagtgaattgtagggattgaacagcctccctggcctctacccactagctgtctgtagcctgacaacctcccaccctcccaaagtcataacaatccaaaatgtctccagacactgccagatgccccctgcatgagctcatccccaacactggctcccatccttgctttttaaaatgttaacctcttgctaaaacacccatctttcttcttcacc

SEQ ID NO: 38095 - DNA, 720 bp, Bovine  19866880859689
  misc_feature (1)..(1): n is a, c, g, or t
nagctaaggagttctaaggaaagattatctttctcacgggcttctgtataatgttcatggatttttaaatttcaaataaaagtgatcgaagcaggttaaaaaaatgaaaggaaaaggaaataaagttctgatagacattaaattgtttagagagagaaatctcagctctttatttaaccatttgacttcaattaagttagaacttattatcattattatttatacatgcaatacaatgtttaatgaatgttgaattcagttttaatgttctttaatgtagaactttcttcagatggcatgatagtgaatttaattgtgtgattcaggaaagtgaaaataaatttctctaatgaatgaaataaaatatttctgaagtgtgacttatatcccaattaaaccttttatttctgacattttaacattattctggttttagttttctttttatttaaaatgccaatgctatcatgcagtgtttaggtttttctaataaaaatgtatttaattgcagtgccacttcaacctttaatacacttgtgacccagctgtaaaaatctccaatttgttttccagggtgggaaaattcccataaggtggacagccccagaagctatcgcctacagaaaattctcctcagcaagtgatgcatggagctatggcattgtcatgtgggaggtcatgtcctatggagagagaccttattgggaaatgtctaaccaa

SEQ ID NO: 38096 - DNA, 1177 bp, Bovine  19866880860398
  misc_feature (1)..(1): n is a, c, g, or t
natactggatgcttggggctagtgcactgggacgacccagaggatggtatggggagggaggagggaggagggttcaggatcgggaacacatgtatacctgtgatggattcattttgatatttggcaaaactaatacaattttgtaaagtttaaaaataaaaaaaattaaaaaaaactaggttgcaaaatagcttatcactaattttttcttaagacaattatttctttagtaaataaataaaagaaacatacactggttattttagtgatttctttttctcttaaaatttccataaataatttgacatgtttaaatgaaataaaaataattcaataattcattcaacatgccaataaggtaaaggacagctacagtgtataaaagaggtcagaatacttattcagcccacttttggagtgttcttgggaagtttccaatggaagcagtctggggaggaaggctggaggcactctattgtaagtggcagactggcacaatgattgctgggatgcagagcaccccacatcccattggttcagtcgggtatattagatgttctgaaaattgctaacacacctccaagccaaattgcacactgacatgttgataccaacttcatcatgatctaaccagtggatccctggaagcagtctgggacaggctgccctattgaaattgcacatataaatcagctgaagtaaaaactccttgcatgaccctgaaacatttcttgaggtctggaatgcattcaccttttaaggtttttactactgatgaagagatatacccatttgttcctagaagctggacacccttgtatctttttctttcaggttacagaaaatggcccttatttttgtagaagaatattaaagtaaggctctttctatttcaattatagccaaggcccaaaaggccaaggagaaaaaaaataatacaaagtaagtatcttacattacaaaactctcctccattacagcaaggctttataagggagattcaaaaacaaaggaacaaaattgctggttttgtcacctgttgcttagtacccagatcactgaagagacccggatggaagtaactattttgggagaatgtatcatcgttggagtgttggggcaccccctcatgtcaaatctagtgaggaaccttgataagaatgccgggagaattttt

SEQ ID NO: 38097 - DNA, 830 bp, Bovine  19866880985673
  misc_feature (1)..(1): n is a, c, g, or t
naactccgggggttggtgatggacagggaggcctggcgtgctgcaattcatagggtcgcaaagagtcggacacgactgagcacctgaactgaactgaactgaactgaacagtgtgcatgtgcttgtgtacatgtaaatctgtatgagttgtgtgtgcacacatgtgtgtatgagtgcgtgagagtatgtgaatgtgtgtgtgtgtatacatatgagtgtgcatgagtgtgatcgtgtatgtgtgtgtgtgtgcatgcttttatagagagtatagaaaggcagaagaaagcacttatgctgctgcccacttgggggatgttggatgatcctgtcacacagattcaagaagatgcaagtgtattcctgataatttaccataaataggactgtaaaactgcctttgttctctcattaaagaaataatgcaatgcaacaacagatttattggccctgtttctggttcaagccaagaggaataaatcttgattcttccttgatggagatagtctttgcgtaggacaagtatccaggtgctatcacagctgccttgaaacattcatggcttcctgaggatatgggtgattttgttcttatcattgatcaaatagcagagtaaatcacttgcataaaataacacctggtggagctctgtgatttgctctcattttctatagttattaattgttgtttacaaatcatgactgcatgtacaaaaaagcttgtgttttctcctattggctcctggctcataatttctacttcatgttctcatagtagcttcaaaagtatttagtgcatatgttacacttttattttatttatagtcactg

SEQ ID NO: 38098 - DNA, 1742 bp, Bovine  19866881126947
  misc_feature (1)..(1): n is a, c, g, or t
naaaataattttagatatatccttgaactggtgtaattgtagaagaaagcattggaaatctgatgagatttctaagaaatatgatttgcctcattgcagatcctctgaaattaatgtgagaaatgtctttatttgcattaaaattgcccaatcaatccactgatgcaccttagcacaatgttgtgtatcaaagctttatgaattgaaacaagaacttatatcagtaatttccctattacagagtagattttcagtgccaagtgaagagtcagtcttccaaatactgctaatgacactcttgccatcagactatcagactgttttttatgcagaagattgagcctagaaaagcttcttattgtcactttaaaattcagctacattttgaataaaccagaaaagttcactgctaaaagtaataagcagtatatttcactataaaatataaaaatactttgtgatgcaaccaacactttcctctattttatatttactaactgtacatttgcatattaagtgcaatttgtctatatcttcctaaaaaataattcagcaattgccttatttgaaaagcatttccagattcactttgaacatattcacacaagtaaagattccattgttaataggtgttttccttttgtttttaaacatgaagtgaaaatgaaaacagatatgaactaccttaccatttacatgcagtatgtcttaatgtaaacagagaaaataagtgatgactatgaagatttccacgtttattttgtaattattcattttccatttaataaaaacattaaactcattacatgttaaaataaaatatatttttaaagaaacatagctatttttccaaaataaacaaaagtttgttgaggagtgtaaacttgatatatattttaattgatatttctattaaaattactataatttacatgcaattataaggaataatacacagtgggttcttttataatccttacatactttatccattttttactcaatgggatcattttgcaaaactaaagtttattatcataaccaggatattgacattaatataatctaacaattttattcagcttcttcacttttacttgtccttatttggtgtgtgtgtgtgtgtttatgtatacatgtgtgttctatagactcttagcatctgggtaggtttgtgtaacaagattctgaacaatactaatcctgcaagaatcttttgttttgttcttttataatcacacccacttctctccatcccttttcctctggaaaatattaatctcatttctatttcaataaatttaatctttttaaaatagtatgtaaatggaattataccgtgtgtaaccttttgagactagttttttcattcagcataatttcccctggagattcatccaagttgtatcaatactatattgctttttactgctgagttgtatttcatggtatgtatgtatctcagtttatcttaccattcatctgcggaaaaatatcttggctgattccatttttagctattaaacataaaactacaatgtacattcatgtacaggtttttatgtgaacagtgtcagactttatttttttaggcttcaaaatcactgcagatggtaattgcagccatgaaattaaaacacgcttactcctgggaaagaaagttatgactaacctagatagcatattcaaaagcagaaacattactttgccaacaaaggtccgtctagtcaaggctatggttt

SEQ ID NO: 38099 - DNA, 1804 bp, Bovine  19866881134071
  misc_feature (1)..(1): n is a, c, g, or t
nttctatgcctcaatttctctgggtaatagggaatgtcagtttttaaaaatacatttttatttgttttaaaatatatttttagaaaataaatatgtttctctaacagcaatggtcaagatagatagaaaagcgcgactatgaaaagaacttgggcagacattgtaataaccaagattttctcttaacatccaataatctattatcattcaaactggaatactgagttcataatctttatatttacgtataaaaaggacctcttattctccccaccttgccaaccaagtgtttgcatccagctcctgtcttcaagctctctggaatcaatggccaaataaaggatttcatgacagattctcagatttaaagcccaaatcttctagatcccttcagtagtgctgacaattcatttgacctcaatattttctgataagtttttttttttaatatgtatttgggtgaaattaatgactttaaggaacattatagaaatttgccaaaatgggaaacttctttggattctaattctatgcatgataaatggggatctttattactacatttaaccttcagcacatttttctttaaaatacagattcaaatgtaaaatctagcatttgcagacattgtactaatttgttccagtcaccctttataacccttaaggctttgagttcataaaacggacatgaattacaatatgaggtctaatatttccatcactggtacacataatttctttccagatcttctttgcgctcctgaggaaaaactctgtgcatagtgcagattgaattgctaaaaatcccgatgagaaatgagaaatatagaagtaaaaagcaaatatgtcatacatgtttatttcagataaatataattttccctccctaaaacgaatttatcttttaaaccagggcaattgggcagaacaaatagattcttttctttgaaaaagaaaacagctatttatgttgaatgttctatctaatagaggtatattgggaactgtaacaattgcaaatagatatgataaaaaagaaataaatgatgttcaacttctgattttagcttctgcactagactatgaaatcagagttatttacttttcatgtaccgccatcatagttttgttgatctaatctatgtccaataaagacacgatcaagaactattacaaatcccaccaactttgtagcattcatcaatctactggcatttttctacttaaaagaccttaaaagtagactatgattgatgacttatactttcttaaagagaatttatgaatttcttctttctgctttgcttttaggagtattttggaaaggctaagtctaatgtaattctgccataattactgcatcactggatgagaagttgtaccacagctgccagagcagttccagtaactgcttaaactctgacttcagcttgttgattgtcttttaaggaaaagctcaggacaacataatctaaacaagtgattgcagggccttagaaaaggaaatgcttaattacttagtaattcatattgtaattcatgttctttttatgaactcaaaggaaataatgctataaaaatggagaactgtatatgtttaatatttatagaagcatgttggaaaatgaagttcctactaataaaatacaaataatttagctgccacagctggaaatctctaactgtagcacatatttctgtaattgctctaatccttatatattctcttgctcttttggcaggcagaccagtaatgattgtggtggaatatatgggagaaatggatctctagactccttttt

SEQ ID NO: 38100 - DNA, 1543 bp, Bovine  19866881179707
  misc_feature (1)..(1): n is a, c, g, or t
ntaaacatagtactgtacacaatctgcagggcagcggaacttgcagatgcagaggcccaactaggtgtttgctgagaaaagtacaggtgtaagtggaactgtgcagtccacacctttgtttaagggtcaactctgtaaggaaagattaggaaaatcaagttattttctgtttgcatgtggttttcattctcctacaactttcctaaacttgtttatgcagtcaatttttatttttctttgatcatttctcacaatttccagcaatcacgcaactttcatccaatcccagattttgctgccctgtacagtccatagggtcacccagagtcagacatgattgggcacacacacacacacacacacatacacacacacacagctggtttggagctaactactatggaaagtgaattcttttttcttataagtcattgctattatcttatttaaatttagttcccttttgttacttagagtttttgaaatcatcttttctggaagttaatttggatggttttcttctctcctttgtttttccccctttatcacttcaacctagattttcctttcctttaaatctcaaacagatttttacttttgttatgaacaaaatgatcagcagacttggtgcttacattaaattggatccagtaaaataaaatcaagggtttcatttaatacaccacacacacacacctctacaccaacaggcacacaggaatgtgtgcatgcacccacactataataaaataaactaacataaataactgtgattctctttcagaaacatgatggtcacttcacagtcatccagttggtcggtatgctccgaggcattgcatcaggaatgaagtatctttctgatatgggttatgttcaccgagatctagcagctaggaatatattggtcaacagcaacttagtatgcaaagtttctgatttcggtctctcccgagtgctggaagatgatccagaagctgcttatacaacaactgtaagtttatccatccttttcaaatatagtttgtttacttttattgtttgcaatattattagagtaattccagtttgtattatggtctaaagacagaaggaaagattgccccaaaataggatctagacaaggactgagagacattggttttccatgccaattctataaacagcctaccaggcacttcatgaggagaggttggcagggatgattatggaacatacctaatgatacatatacaattagcgatttgtagataatttaatctgcacaaagtttactgagtttagattgctctcatttgactacatggtctcatatctggttatacttaagtgctaagaaatctcttccttcactgaatctgacacacatttacatggacaactgttttatacccacttctagaggagggactctctctcatttgaatattgctaagcaacccatcttaaacttacatagaaaatcttatgcctctttgctctcaattatggaaatgaggtcatatttacctaaaaagaacattaaaagatatattaagagaca

SEQ ID NO: 38101 - DNA, 1295 bp, Bovine  19866881282974
  misc_feature (1)..(1): n is a, c, g, or t
nttaagtaaatgtatatatatttaaaccctttaaaaaactcccttcctcctcaaaattctttataatatacttaatcctcttagggatttccctggtagctcagacgtttaagaatctgactgcaatgtaggacacctgcacccctggagaacggaatggctactcatccagtattcttgcctggagaattccatggacagaggagcctggtggggtatagtccatgggctcacaaagagttggaaatgatggagcgactaatactaacactcttaggtgtgttttaaaaaagaaagaccctatacctttatatttgttcagtaaagggcatctgaaatgtagaaatatgaaattgcaatccagtgtaagttttcatgaaccttgattaatgttttacctttcaattctccactgcagtgatcagcctgagtggatatgatggaggcaaacaagactctggtgacagaatttgttctcacaggactcacagatctcccagggctgaaggtccccctgttcctggtgttcctggtcatctacctcaccaccatggtgggcaaccttgggctgatttttctcatctggaaggacccccatcttcacacccccatgtattcattcctgggcagcttggcctttgcagatgcttgctcatcatcttctgtgattcccaaaatgcttgtcaacatcttagacaagagtcaaatgatgtctctctttgagtgcatggcccaatactatttttttggttccagtgccaccacagaatgtttcctcctggtggtgatggcctatgaccgctatgcagccatatgcagccccttactttacccagtggtgatgtccaacagactctgcacttgcttgataagtgcatcatatgcaattggttttctgcatcctataatacatgtaggattattatctagattaactttctgcaggtctaatacaatacatcatttctactgtgaaatcttgccactttttacaatttcttgcactgacccatctattaatgctttggtgctttttatttttgccgcttttatacaggcttttacttttattaccatcatggcctcatacacctatgtcctctttgccatactgaaaaagaagtctgaaaagggcaggagcaaagccttctccacctgcagtgcccaccttctctctgtttccttgttctatggcactctcttcttcatgtatgtgcatcctgggtctgaccaggatcaatatcaggataaaatgtattcactgttctacacgattaaattcccctgctaaaccc

SEQ ID NO: 38102 - DNA, 743 bp, Bovine  19866881328003
  misc_feature (1)..(1): n is a, c, g, or t
naatatgctctatttttaattttaaactcatcagagtaagttgcttctatctgtcattgaaaacagagtcatttcagaaatggaaaaaagtgttttaatagatttgtttttattagtgattttcctcaaactacatttttggaaaaaaatttaaacatggtaaaacttaagacatattttttttcgccaaactgacagagttaatatatctctctgggatatctaataatattctactgttagaaacaaaagaaagcctaacaaatcccttttacttgaaaatcacatggatatttctcaggatttaggatttgtttgattatagatttagtcgctattttataagcattaaataacctgatctaggtcacctctgagttgaaagctggccacagtctattttaaaaatttgaaataactgtgtaagagctatgttggcatgccaaatgagatatcccagctcattcccactgcatcaactaacatctttcaatcgacaaactgcactttggcacaaacagaaggatggactcctgccacttttttggtccctagtaaaagagttatgaacatatgcagtgtgttgctcatttttagagcttgaggatagcaggtttaatgccaataaaagggcaatgaatggatggagacttgaaagccaaataggcttagcagggagatgtacaaggccatttagcaaggcctatatacgccaggttggaattctctgacatctcatattt

SEQ ID NO: 38103 - DNA, 1363 bp, Bovine  19866881368872
  misc_feature (1)..(1): n is a, c, g, or t
ngtgttggagaagactcttgagagtcccttgaactgtggtgttggagaagactcttgagagtcccttggacttggagatccaaccagtcaatcctaaaggaaatcagtcctgaatattcattggaaggactgatgctaaagctgaaactccagtactttggccacctcatgcaaaaagttgactcactggaaaagactctggtgctggaagggattgggggcaggaggaaaaggggacaacagaggatgagatggctggatggcatcaccgactcgatggacgtgagtttgagtgaactcagagttggtgattgacagggaggcctggcatgctgcaattcatggggtcacaaagagtcagacacgactgagcaactgaactgaactgaagtagatgatttaacatctctattgtttacttccacatctgtaaaatgggaccaaaatggctcctacccaacaggaatgctaaaaagattaatttttaaatctataaagcatttagatagtgtgtaactcacagtaagccacattaaatggtagctgatcccctggagaaggaaatggcaacccactccagtattcttgcctgggaaatcccatggacagaggaacctggaaggctacagtccatggggtcgccagagtgggacaggacttaacaactaaaccaccacattattggtaatatagtttaccatttcactttcatggcaactctcatgcataccccttgaagctcagacaggttcattaacccacatgaagacctctaaatcatagtaagtggcatggctgatattcaaattgaggtctgtcttacagacttgtggcattttttgtttctttgctttttatttgctatatcacagggagtaagtcagactattacactttgtcttatctgaattaaatagcattacattaatgacaacctgaataaaataacacagtactctttaaaaatagggaaaatattttgctaagtggaataaatcacctcttattttgtcaaatttggagagatccagatatgccacaatacctagcaaaaatactaatctaaaagacagagaggaaacatgttaattatttattttatgttttctgacttccttgcattaatttagcatgaacatttcaagttattccttctgttttctatctctctctagaagaaaaaagatgattttgaagttggttatgaatctttgcaaagcatttaaaataatttaagtatgctgttgaagtccttgtatgagtatttatgggtgtttatatctggaaataagtgcccacaataaatttaaagaccagatatttattttttacctatgataaatcacactctgtaattattcat

SEQ ID NO: 38104 - DNA, 1612 bp, Bovine  19866881401627
  misc_feature (1)..(1): n is a, c, g, or t
naataaataaatcctagctcttggtggagatctattatttactggttgagagcacagcctttggagtcggaaagctccagaagcatatcttgattcctctaaaactgtgtgaccttggtaaagttactccccaactgctcctacttcacctctgtaaaatgaaggtgataaagtactgtcctcttcaggttacagtgagaattaagtaatataatatgttgggtggttagcacaaagccaacagataagaaacactcattaaacgttagctatcatcatccttgggcttccctagtggctcagatggtaaagaatctgcctgcagtgcaggagacccagtttaatcgctgggtcagaaagatctcctggagaagggaaaggctatccattccggcattcttgccaggagaattccatggatagaggagcctggaagttcatgggatcacagagagttggacaggtttgagtgactaaccacacacatacacacacacaccatcagcatcattcatctacatgaaaggatatgatttgtacatcaaccccttcttttccagggttaaagtcagtagaggggagcacattgtgagaaattcctcatacagaaaacctcctggcaaaactttcttttgcaatgccaaggaaaccagccagcgcagagcagaaagggtaaagttcaagattatttgtcataaacttgcattttgccaagttacacaaacttcatacaagggttgcaatactgccaggagagggcatggatgaggatagcctttttcacattccaaaaaggatccagtagtgaaagcaaggcagtaccttcccggtcttcttgaatcgtttccgctcttccactgtggtgaggtagttcacagctgcatactcaatgactgacaggaagacaaagagggagctgacccacaggtacacatccacagccttgatgtaggacacctggggcatggaggcactcaccccggagaggatcgtggacatggtcagcaccgtggtgattcctgccattcaagaacagtggtgaacatctcagtgacagcaccattcagcttcaggttccagagccagaggacaccaggggggacatttccaggtcgctatctgctgatcacaagtgtgtgagggccgggaatctcagcaagtcacccgagtacagcttgagcctaagccagaacctcccgttgggtttctcttcctgtgtctttttcttaccctcagccccactgtccatgatgttccccttccctccagctaaaagtttccagagtcagacatgtccctaaagattcatggctcctaccctcagctgggcctcttttaaccatcccagaaaagtaaaaacgtattccattttttaaaattctctgagattgtctataccaattttttcagatcctgcatatatgcattaatacacaatatttgtttttctctttctgacttacttcactctgtatgaccatctctaggtccatccatgtctctgcatatgacccagttttgctcctttgtatggctgagtaatattatattgtaaagagaagaaggggacaacagaggatgagatggctggatggcatcaccgactcgacgg

SEQ ID NO: 38105 - DNA, 1099 bp, Bovine  19866881495683
  misc_feature (1)..(1): n is a, c, g, or t
ntcttgcctgaaaagtcccttggacagagaaactcgagggctgcagtccaaagggtcacaaagagttggacactactgagcaactaagcacaagcaattataaaaagcacctgatacatagaaggtatttaattaattggtggtaataatcatagcttgcaatttctgaatttactgtgagtcaattattttagattattgactcatttaatcttcaaaataattctctaaggttgatactatttttattcccatttatagataaaaggctttctagaaaatttaagcaacttgcccaaggttgtatgttaagtcacttcagttgtgcctgactctttgagaccctgtggattgtagcccaccagtctcctctgtccatgagattctccaggcaaaaataccagagtaggttgccgtgccctcctccaggggattttcctgacccagggatcgagcctacttctcttacgtctcttgcattggcaggtgggttttttaccactagtgccaccagagaagccccaacccctgatagaactgaagttggagacccctgttttccccaaagtgtgtgcttttacccctgagctatactgtagaagtcttaattttcaaaggagtctctataccacacaagctctatgaaatgagatcaaagcatctttaattatgtatgcctctgtgtcacagtagaagtgtttctattatttcctatcagcaagaatgtggattgactcactgttgtttgaaagtataaatcttttcagcagtactttttgtcttgatgttaaaaatttataaaatgtactgtattatatttcttaaaaatgtttaaggcagtagcttaaaataaaattctaatggtccacatatttagcctattaccaaaaacatgccacaggcacactgaaggcacaaatttcctcgctattttctaagatttttaacttttttttaatgtatcacagtataatgttttatgttattttcatccgagttcaaaataactgttgtttactacataataggagtacattgtaatgctaggagctatactggctccaaagatgacaccaggggtattgcagttcttccaaca

SEQ ID NO: 38106 - DNA, 881 bp, Bovine  19866881600803
  misc_feature (1)..(1): n is a, c, g, or t
ngaagggcctgagttggaggtgaggtcaccttggtcgccactgggaaggtccaggctcacctgttctggggtctccagagctcctctctcaggtggtgtgtcaagtggtacacgaatgagtgtcccattctagactgcagctagagtactgctttgagttcatgtcacagtaaaagatcagggtattgatccttgtgaggtttgtcacaactgttcagaatctgaggggtttgaggaagaggactttgggataatacagcagttgctgatgtcacgtgtagatggacagctcaggtcacgtcaaaccgcctgagattctcactttgtagcctgtgattgaactgtaattatggctctcgttttgggaacaagtgataggaacaggaagtaaatcagcttccaggtagatagaaaaattataggagagggttgacattatggggaaagaactgtcagaagctctaagacggcaaagccatggagcttcatgatcatatctattaccctcctccctgctcctagtttctctccaaagaggtctgacattgagacaccagatgtttgggctaaaatgcatgctgtttgactgtcttaaaagtgcagcttttacttaccttttaatttgaaacccagaaatagccataaccacctgttttatattctgctaatggtcattaaaaaaaatacaagtactactctactgctggcagtcactgtttatgaatggacagttttccagatggttgtttggaaattgtcagtgtggaactctgtttttatccctgcagaagcagggttggagatgctgggtggggctccaggccagtagatgaaagtcagtttaatctgtaatgtactgtaccttcagttgggattccctg

SEQ ID NO: 38107 - DNA, 940 bp, Bovine  19866881689361
  misc_feature (1)..(1): n is a, c, g, or t
nagagcttgctctcttttaatcatgtaagagcacagtgaaagggtggttttctacaggccaggaagggacctctcaccagggaattgaataagccaaagccttgatgctggacttttcgccttcggaacttggagaaataaattcctattgcttaagccagtcagtctatggcattttgtcatggcagcccaaactgattaacagagtcaggtgaagaaaatttctaataggtattttagtttggatgtctgaaaatctgattatatgcttaaaaattagaatttgcggcttgaaaataaaagttttataaactatatctcagtaataggtcttcatccatcataaactccatgttctatgaagtttctttagtgttagaatccactggaggagctcttaaattatgttaacatctttcttaagatgaacatgagggcttgagatacctccaagtaagctgaccaacatcagggagctctgtctttacaattctttttgctctgaacttcttttgataacattgtaccaaaaaaatctttatcaatattttccatctatatgaaaaatgcagctcatagtatgagggctcagaaatactgtcagtgctatggcactacaaaaagagatgttatttttggatttacaaagatggcagggaaccaatattttccactttcttataggaagtaactcatcttagaaattcagtgaaaaaggctgcatctgacatgaactttgagcaagtatattgatagaaatgacaagatatagaaaggagtcactgaaatctggaaaaggaactcagattagaccaaaacagacaattatcttagatattttttatgaattctttactgagaagaaattagaatttaatattagaatactattttcttgtattgagtagacttacgattaatgtaatgtctgataaaatgt

SEQ ID NO: 38108 - DNA, 849 bp, Bovine  19866881759234
  misc_feature (1)..(1): n is a, c, g, or t
ntttacaaattgtataattaaaactttcatcactgacaaatgcagtcttccacttttttttgttttgtctttttagttagaggtacttatgtgaaatagtttctgagtctgttaccaatggtttgtatgactagaaatactgtctcattgaggcagaaaattttggaacaccagagttgacataagggaggcttttgtttttgttttagtaaatttatttagctaacatgtaagaaataattatattaattttaaatcctcttttagggaagtaattatcttctccttttcctggaacaaattcagaaattctgctaggcctcacccttaaatcttcctctttttaagcagccccccttttatcccttgattttctccagcccccttatactttgtatccagagttgctttccctagggagtatcctggaatttgttgcagtgagatttaatctatatgaaagaaatcattaaatcacataaactctagctaatggaaggcatttttttatactttcattcagtgtaatggaatacttcagtaattaagtatatgaaatagtgacaaagtcacaaaggtgctatagctttttgtatttatggatttctgtaccaaatacaatagtgtgtcccatataatatatggctatgccaaaatgaaaactgaccttatttcaaaaggatcatgccattaatgtttaggggaaaaggtcaatgcattattttcaggcctaagaatcctaaaacagtcattgcatctgaatgaaaaagataaaaaaaaagtcactgatgtctttggctgacatttgtgaggagtggaaaatgaataaattcactcacagtgattgat

SEQ ID NO: 38109 - DNA, 2620 bp, Bovine  19866880187830
  misc_feature (1)..(1): n is a, c, g, or t
nggtgtacatgtgtcccccatcctgaccttccctcccacctccctccccatcccatccctcagggtcatcccagtgcactggccctgagcaccctgtctcatgcatcaaacctggactggtgatctatttcacatatgataatatacatgtttcaatgctattctctcaaatcatcccaccctcgccttctcccacagagcccaaaagtctgttctttacatctgtgtctctttcgctgtctcacatatagggtcatcgttaccatctttctaaattccatatatatgcgttaatatactgtattggtgtttttctttctgtttcatccacctcattaggactgattcaaatgcattctgtttagtagctgagtaatatcccattgtgtatatgcaccaagtttcttgaaaggggctgaaaccatcacatgcgagtaaggaagcctcgaaaatcaggaagccttcaacacaagcagtgctgggagaagagagcgaggggttgagcagccctgcccccgggcgccacgcccatggctgtagtctcctcctgacacacaggagggttcccgtgtctgctgtgggatctgtctgcccacctggagccagagccccgagggtggaggggcaggcactcaggtgaagttcagcaaacaccactggacacgttagtggagagggagctttgggaaccaggcagggaggtgttcaagcaggagcggggctggaagtgccgctgctgtgggtcaatgcaggcttggccggccctggagtcagtgacccatgatgccagagtggagactgcagccccttgtctgagcgtcagcagaagaagcctgatcaggagacttgagagaggcagtgggggcccgggctttgctgggacagaagccccggaagaggggtagatgaatcaggaaggtacaagtggtggtttagtcgctaagtcgtgtctgactcttgcggcctcatggactgtagcccgccaggctcctccgtccctgggattctccaggcaagaatactggagtgggttgccatttccttctccaggggatcttcccaacccaggaatcgaacccagatctcccacactgcagcagatgctttaacctctgagccaccagggaaacccaataaaatatgttttaatctaagataaatcttgggcagcaggtgagtgtgcacataaacgaaatgaaagttttaagttaaaataaataaaaatcagctattttgtcttaatttaatgaaaatatagacaatgtataccaaacaaatttatgattattggctaatgtgatattctatcttctgtatctatcaattgttcaactcaatatcacttcagttcaagaaatattaaacatttattaagggaagagaccatttcctaagttcatatgtttctataacctatgttgagaagcaaaattgatgctcaaaaatgttatgttggatttaatttcattttttaaagttcaggattgaaatgaatatctagcatttgttaatgactttaattccaaacagaaaaagacacatgattactatgtattcaataagggctctgaatcacagtagtgggaaatactagcataattcaaaactctagtttcccactggagagaccagacctctggccaaaaatgagtagcaaggaaatacaatctgcttgcttatgacagaagtgcttgaacaagtaatgtctgttccagcagtggacataatagcctggtgtgatactgataaatgttacggtgattttcccatcagcttagtaaagacatatcattttcagcatggatcataacatagtttaattcatgctgcaaagcagaatcagtatgaggatttgagcattgggagagctgttatagaaaggcttaattccccattcaaaattttgagcctaaatattattgaaatccagatggctgatttaaagcataccacaaaggataattgtagaatgtccctaaagtgttgggatgtaattgaagtatcatttgacttttcatttgcaagataagcagtttttcatggcatccttcttatatttgtctaaaaaggatttcttagtgggaccagaaagtttagtagtgaaatagaacttttgaagcagttgcagtcaagttgagaagtagttttccagatgagacaagaagaacaaaacatgatagataagaggatgaagacctctagcaaaataaatcagtttcttctactgtagagggaatttgttcagtgaagtttaattctctgatgactattaattcatataattttgcagtgtgtatgacatccatgcttcattgtgtcagtgaagccattgaatatttgagtgataaattgaaaatattagagattgatgatccaattaatgagattagcagaagcagagtagagagcaaaaaatttaagtgaaaggagacaaaagttctctacctgttttaaaatctattaatttttgtgggcattaacaggtgaaaaactttgaaaatgcactgaaagttttatatttaccagtaagaaaaataaagccattttaatggctgtctttttattattttattttcaataaaaaagtcatagaagcaatcactaggctacatatcatatt

SEQ ID NO: 38110 - DNA, 1262 bp, Bovine  19866880511966
  misc_feature (1)..(1): n is a, c, g, or t
ntcaaggctatggtttttcccagtggtcatgtatggatgtgagagttggattgtgaagaaggctgagtgccgaagaattgatgcttttgaactgtggtcttggagaagactcttgagagtcccttggactgcaaggagatccaaccagtccattctgaaggagatcggccctgggatttctttggaaggaatgacgcttaagctgaaactccagtactttggccacctaatgtgaagagctgactcattggaaaagactctgatgctgggagagatttggggcaggaggagtaggggacgacagaggatgagatggcgggatggcatcactgactcgacggacgtgagtctgagtgaactccggaagttggtgatggacagggaggcctggcgtgctgcgattcatggggtcgcagagttggacatgactgagcgactgaactgaactgaactgaagctccttatacatgccattattttgaaaacatttagaatacttgagtcattgaaaaaagacacacacacacaaattccaacatctacttgatgatgaatcaataaagcaccaggaaatctagttttattgtatgctgcttccaccaacaaatgcaatttgtaggctgtgaatgagttgtggtgcattggctgcctaaacaaattgcagaggcaataatccgaagttcacttttgaagctggcggtgtttttttctgaagttaaatgcaatgacgactattacatttgtgtcttattaaccagcttcaaatagagctacaaagcagtttgttcccactttaagggaagccctagagacattcttttgctatgaaaggatttgtctttgccacactgtttgataaatttccacgtactgcaatgaatgaaagaaggggaattttggcatgtgtttaaaaggaaaagaaacatttgtgtagtgtattttttcccctaattggatagtaagaaatggatcaaaatataaatgttatgggtctatttgcccctgagatgcttgggatttagaatggacaattgggattaaagactaaaactctgtaaatcaaatgcaatttttaaaaaatgaatttgcttcagatttggtaaacagaagttaaaatatgaaatggtctatataactgatgattatctataatacaaggtagagataataatatatttacaattgtgccattttaaaataatatttgattgaatattttctgaatcagcaatgaaaacactcattccatgcccacaaaacaa

SEQ ID NO: 38111 - DNA, 2119 bp, Bovine  19866880794111
  misc_feature (1)..(1): n is a, c, g, or t
nagctgctttgtgcagtatgcctgtaacagcttctccatgaaagccctggctgctatggctctggggctatattagtgtggcatcatggttatgttagatgaggttatgtcatttctatgttatggctatgttatggttatgttgtggctgctgctagggctgctgcatcagacagaagagaggctatgttatggctgctgtgccatccaggagagaataaatgtgtttgtagttcctttgactcctcaagtctccttccagcctcttagctcacgccttgcctaccctgggttcagcaaacagtgtggacactgtgaacagcaagacaattggtgctatgaataggatgaagagttatacaatgagtaacccaaagtctgaggaactgacttcattagacttccttcatctgttactgttttgttattattatctgaaagaagttttaggataagtaaaggtaggtactgaaatacctcatagtgattctaaaacaattgtggacatatgacatacacataccttttggaaattctcactaatagtaatttaacatttgcttcctttttcttcccagctgccttatctctaaactgtccgtttaaaaatctccttgaaatctctattgcctatccttttcattttttttgcccttgaaatttatattatctacagatttagagctgtgaacatgaagatttcttcccctgaaatagtcttgctgatggatattgtccaagcaatttgtgtaacactaccaacccactcatgtaagagtgcttttgcttttctgttccaggtcattgtagaacatactccaaatcaataaaaagtgtggagaaatagtgccttaaggaaaaaagccctgttaagcaatgtttgaatatatgtttcttcacagaagagtccataaaaaaagtggatattatgttttgcttatggaagtttaaagctgttacagacaaagactgttatataaacattaaaggaatactattttgaaatatgttaataccttgaatgtgaaagttttatttttaattattatttatgtctaactgaaaaaatattgtttaattgagatagaccagagttcaatagttcacagttagatgttagatgcctggagtatctacagtagtgaatcatctgaaaacattactacttttggcatttgactttagaaacagttatagctcctataattactcttgatatataaaagaaacttaacactcgtcccaaagttgtttaactataaaattaatctctagtgtattacctcatgaagacgagttaaccctgtttatctttctgtgccgagagataacatgagtgagtagccaactgaatgttaaagatttaaaacagttgtcaaacactatattcccctcatctggttagggattgctgaaacatcagcattagagatcatagatcatttattttgattttaacattcatctgggatagcattcatgattgacaatcttataattgctgaccatgttctcagttttcttcctacaaccagaatcacatcattgtgttaacagatatcaggcaaatcacttactttgtagacttggtcaaatatcattaatgcttcaggtataatatttttacagccaatttccttgtaatccctgggatgtaccctatctggtcttccatatttttagccacacaatattgtagtatcaaatccctcttcctaaaaaaaaaaaaaaaaaaccctcttccttttacattttagtgtctgtaacaaacatatgctactatgcccttttgttttatatcaagtggtttgagtttgtttagtaaagctttagatgtgattttttttcatagaactaaaatagtgctatatattatattacatattagatatcataatttctatatgagctattttaaatttcgtttgaaaattaccattttgtattgaatttggggttttttccttccccaatgttcttatctattttcaggtttcctagcaaaagtaagtctaagacatcattttcactatatgctgggaattaaatgtatacataagatgaaaaattttggggtaagtttaatttgtcaatttttctcatatgattactataacat

SEQ ID NO: 38112 - DNA, 840 bp, Bovine  19866880928157
  misc_feature (1)..(1): n is a, c, g, or t
natcaattctagttttaagagaataaaagtaaaccattagctgcttaaaataaatgaaaatatttctatttaaaattaaataaaaatactgcagtccctcaggagagattcttagattttacttttccaagtgacctactttttaagcagttgtaattacttccaatcatctttctattcaatttattaaatgaaggctttgctttttaatggataatctgcattctattaaagattgaaagcaatgcctatggcttagttattcttcactgaagcaaactctttttggggactcaatgcttatcttatagttaaaatgcacatttcaggaaattaatttcaggcttgaaagacaagaggcatgcatatatccaatatggttacagcacaagaaagcaagcaactttgatttctaaagtactaattgtcacgttctggaactcccttgagataatgtaagttagatcctaattttcaaagaagcctacatagaaataataagtacaaaataacagacccagtatgtgtgcttgatgtcattagaatgctaataggaaatgcttcagttaatgaaaggcaagagttcacatcatatttaaacaaaggcactgtgaacaattaaggttttgaaatacttaataaaataattgtattttcttattttctttttaaatctgaaatagttatcatatacttagataaatgaaggagatttgatggcacatcgtttcttttcttatcaagtctaaattgtgaataggtaatggtcatgactggggcttccttggtggctcagtggtaagaattcacctgccaatgcaggagaccccggttcaatcc

SEQ ID NO: 38113 - DNA, 1215 bp, Bovine  19866881013803
  misc_feature (1)..(1): n is a, c, g, or t
naaacaacccacctgccagtgcaggcgacttaagagatgctggtttgatccctgggttgagaagacccccctggagaagggaatggctactcactccaagtattcttgcctggagaatcccatggacagaggagcctggtgggctgcagtccatgggggtcatgaagagtcggacatgactgaagtgacttagtatgcatgcattgatacatgatctttacctagagatctttagatccttaaattttcagcaaagtcaatgattagattaaaactttattttaaaaaatatctcatcacttattttaaaagtttctatgtcacactatttataggaaatcatgtcgttaagataatgcttcatttcaaaacatactggagcccatggggctttatatgacatgtttaaggaatgtataattttcatcatcccccacactataatgtgcaacattatttgcctttgagaagaattaatgaaaacataacttgacattatgattatggacatctgtctttgtttatattcatctcggcttaatgcagaaatgtcaaagaaagtatgtagggtgaatactgtgtatctttcagttttactctcattgctcagcacaaagagatgaaaaaggcattgtgcttcttgtgtggtaggaatttagctaatggatatataaagcaaacaaagctggaaggaaaagttttattgctccatcctggaccatatggatttttgtggtttttgtttttactttattggatgttgttgttgttgttgtttaaaggatgcttaatttgaaagatctggaacctcactaaaatttggattcataccaacacaaaacttggtcttaaaacatactaaaactttgcttattctcttgccaaggaaaaggagtcacacatgtttggatatctctgtagaaatccaaaggactgacaataaggaggaaaatactttctgcttaagctattgcaaatttttccctttacaacaggaaaaaaaagaaaatatttgatgataaacatgactacataatattaactatttttactaatatttaatagctaatactgttttaaccaaggctactaatgatataaatatcccaggattcatattttgttttagtcagatttaactgcccaatagttgttttcttgatatatggacttacagaatcaaattgccttttcactagctccttttattccagg

SEQ ID NO: 38114 - DNA, 1170 bp, Bovine  19866881135023
  misc_feature (1)..(1): n is a, c, g, or t
nctgtgggtgggcttaaaccaatctaaaacctgaaatcttttatcatcaatgctgactgtcagaggctctgtctacatgaagccaaaatagccagatggaaagtgaaaagcaacatccatcatctaaacatttccctttcccattgccaagcctgtagatacttggaaacaacgtcacggttgcctggatgttttacttttaatctagaggttttggtattgtgtagatacaatctcagcatgtaacttcctgtacaaaattcccagatcggcacaatgctagatacattagaaaaataacacacacacacacatattacattgaactgtattatcttaaaccatgaataatgcattatgttcagtactatagcagatattgtgctgaataaccacaattgaaaacaaaaaataatcacatacatgcacatattagtgtcctaaagtgtaagtgttagtcgcccagtcgtgctcaactctttgtgaccccatggactgcagcccaccaggctcttctgtccgtaagattttccaggcaagaatactggagtgggttgccatttccttctccaggggatcttctcgactcagggattgaacccaggtctcctgtattgataggcagattctttattgctgagcccctctatgatcatatctaattttacttctcttggccttggattcctgttccttaatgtccgtgtcttttacttccttgtctcttattttttctcattcttcttctctacttttttcctttctgccttcctctgagggctgctttcctgtccacctgctgcctgcctccgccctgccagttggtgttatctctatgccgggggtgtcttgtccccctcctggccagtaacctggccctggcttggtcaagccagagagcgccacctagaggccatcccaggacccacactccaatcatcccagtagccctccagtgctcataacatccaggaccactcctcagacttcatggcctagactttaggacattccaaacccacagcccccgtctcaccatgactcacctactgaccagtgacttcggccattcacatctgttctgggttccctcagctcacagggcaggagcaggctaggctgttctgtctgccaaacctcatcacagctgccttcccactgggctgagga

SEQ ID NO: 38115 - DNA, 718 bp, Bovine  19866881192141
  misc_feature (1)..(1): n is a, c, g, or t
ntctaaaaaatgaatgcatattttagacctgtttccaaatatatagcaaaattatggcaaacagatattttttttaaaaaagagagaaaacatattgatgaggggtaaagataaatagtcattcctgtttgttagaaattttccatataaatatcatagtagctaatactaaattcaactgattatgaaaataatctcatttattagctgtaaacaagctattttgactcacctctcattcttccctctcacaatttccttcttgagcttattttaacgagatggatggcatatggtgatctctttccaaccctaagcttcagcaggaaactggcttgcagctggaattcataatgtgctgatgcatcccaggacttgctttagttacatgtggcacttcaaagaaggttcaaagggaccaatagagagaattctgggacagactcagaatggcaaaaggatcaacatgtgaggtgctgtctttgaagaaccacatgtagcagtagacgcagagcctgggtgcatgttgtacattttacttgaagtgccaacttaatgtacaaagtgggacctgggaagaattagagcaccaatgagcctgcttcactaagacggaaaataacattccttgttatttaaacatgcagaagaactctttatgacatctaaatttaggaaatatagcaaagacagaaggaaaggaaaagagaagaaaatt

SEQ ID NO: 38116 - DNA, 1747 bp, Bovine  19866881213189
  misc_feature (1)..(1): n is a, c, g, or t
ncagctgagccactaggaagccctgatttatgtttacattgattataatacagagaccttcttctcattttctgttgcaggtggtgtttcactgtcttttttggtaaaatatcacgttgccaattcctataagagccttgatttatctgtcttgtcttagggtcctcatgatatcagtcaatcaaccaatgtctcagtttattctcaaagttcttggtattttagaaatactaccctttcttgattgggcttccccagtgtctcagtcagtaaagaattctcttgcaatgcaggagatcgcctacaacacaggagacccaggttcaatctctgagtctggaaaatgccctagagaagaaaatggcaattcgctccagtattctaggctgggaaattccagagacagaggagcctggatggccacagcctatggggttccaagagttagacacgacttggtaactaagccaccaccaccagcacccttccttgattatacctgtgctgtcagttgactcagagcttgaattcttggtagggatttcagagaaagacactctcataaattgctgcataacatataaactttttaataaaaactcctggttccttttgtcccagactggcttccccttacctaaagtaattttatcttccttcccaaatgtacaacacatttaacctttgctcaggtacacaaagagtcccatccagtcacttcatctggctaaaaatgtatcttactcatgaggtcttcttgcttcctctgatatatcgaataatagactaaactttcttttcctgtcctctccttcaaatttgtataccaaacacacaatggtaaaatagggacaaaacttttctttttattaggaggaaaaaaaaaaattgatgaaagatacagcttaaagcaattctgaaatcccaagagaaggaaaatgccattcatgactttaccaatcacctttaaaacaatttctaatttatggtactgccacatcaactgtatttatatgtgtggcttatctcagttttctgcacattaatttggattccactttttgatatgctgtttaaaatggagtatttattttgataaatttgataaatcttgataattaagaaaaaaatgttggcataactaccctgaaatgaaaattggtatttatactaattaaaaaaaatgatattgagattagaagttctgagatgcagagataatttatgatatatactcattttttgtgaattttaaaacttctatttctgtatcctcaggtatagttgctcatttcttggtattcagttgaatctggaactaaatcttcacaataaatgaagaaaattaatatataaaataacattttcctcttagaatgaactttgcagacaacacaattttatatgttatattgttattctgaattcttaatgtttttgtttaatattttggtgaaaagaaaaaataaatattccaatataagaagaaataaaataataaaagtaatgcttggaattgctatttctaacacctatccagttaggaagagaaagacaattcaatgtgtgctccctgctagaaaagctaatctaatagttttgatacagatgcatgaatattgaagtcaatgtgtgtgtgtgcatgcactcagtcatgtctgagtctttgtgaccccattcactgtagcccgccaggctcctctgtccatgggattttccatgcaagaatcaatacatacaagttaaa

SEQ ID NO: 38117 - DNA, 1519 bp, Bovine  19866880556764
  misc_feature (1)..(1): n is a, c, g, or t
natacagctgtcttacaaggttgggtctataaaagccatctttagaatgaaaaagaaatcttcatttcatgacaaagaaagtcccagctcatctgactgttgtgcaagatcaatgattttgtgtcccagagcctgacattcctcaataggtaggacgctgatgactcggcattttggtaattgtgcacatacactcagaagtttttgagcaagggaaatggaaatgcttttaataaaaaaaaaaagagaagaaatcagtaacatacgagtgtcccagcagcatggcaaactagttcaagttgtataattccccttggcattttctaagagcacagaggcgcagcttgggggagtgaagagagaagaaaaattctaagcacagggcaaagaagtctaagaggcgacggattgggcagtgatgcatgaaactgaccacaggatccctcaatagggctcaggccaagctgttgacatctccctcgcccatcttgctcttacatcatgctctcaatttgggtggagaagtgtggcaagctcaatcctgcagacttcacgtggtttgcctgtaaggtacatctgtcctggatggcaagttggagttactgaggttgggtggagaagacactggggtaaaatcgggttgtggtgagagaaggggtggaagaggattttaaagagaagtcagggctggatggaatctcccctcattctgtacggataggcaggggccctgaaaacctagacacacctctgcgactcttgctttactcgtgacacctgtgcccagagctctcacaactctatcccaggaacaggagccacgcacagaagaacgcttcattctccttttcagtctggggatgtgagaagaggtagggttcatcagctgcctgcttacatctttccaagtctcactgagggacagagaggaacagcccaatttggtcatcgtcactatgccacaggccatctgtgctttctaaactggatgcgggaatttaattacacaggcttataagagtacaaactaggattattaaaattcatcattctggggtactattcaacatcagaaaaccaaatgccaaaagctctctgtcaaagctacaatgtgaactctgcaaatcagcccaagttaggagcccagatgaactcgctcacattacatggagctttaatggttcccaaatgttgactatgcaagagccgacccaaaggaatatttccacttaccacatttcacaaagtaaaaagattatttttaggttcttcctttatattctggggaaaaaactatcctcactgatctcaaagtacattacaaatgcaactgggctttgaacaaggactctcgctcgcggcctctctctcgcttttgttctttcatggattcagaaggactgtcatggggaacttgaaatcatctccaccatcaggagaagaaaaaaggaacgaatccggggagagggaatggtaactgtagtgcggctgtgtactctcagggttttaaataaaaacg

SEQ ID NO: 38118 - DNA, 2447 bp, Bovine  19866880581881
  misc_feature (1)..(1): n is a, c, g, or t
ngttaaaatttaataaaatttgtaatttttattactctatcaaaggaattattaagtaaaactgacattttgttttaagtatgtgacttgaccaccagcatggtttgatgttcctgccttgatctgtattaagctcttgggctcattgttgcttttgtaccatcagtccaagtgtcaagcagttttcccagtacaaaccatgagagtcaaattatttaacactatttaatcaccctatgtatttagtgccaagcatttgtgtttagtgacaatacaccaggcgtattttactgtcagtcacatgaaagaatttatttatcaatgattagttggtgctgatgttggatagatacaagaaaaagctatgtctgtagatatgagatattaatatccagagatgttaactttgtcttcatgattgcagttaaacttttaatttaatgtgtgttgttaagaaatagcctgggctgatttcttttactaactttaatgacttttcatctagcaggtattcagcaatgtcagcctctatgagtcttctggctaccttgcgtatctttctagttggtgcagtatgaaaacctattctttaagatgcttttctaaatttatgtatacacttctgtattttaaatagataaccagcaaggacctactatatagcacagggaactctgctcagtggtacatggcagcttggatgggaggggagtttgggggagaatggatacctctatatgtatggctgagtccctttgctgtctacctgaaactatcacaacattgttaatcagctatactctaatataaaataaaaagcttaaaaaataaagttatttttgaagacttctctagattttaaatttagacaagtcttaaataattttgaaatgctatttgcaaaataagacaaaaaatgttcttactttcatatatgcctaagaaaaacattagaatttcaaaataacttattggatgattttaaggttacacagatgatagcaggtaaaataaaaatagcttgtaataatacagtagaagtattgagaacaaagtgagttaacctgtgaaaacatacatatctataccccaaaatatcatagaaaaatctagaaacaagaataaataagtacatattccattatgtcagggcaatgacattgtcacatgttatatagattcttatgagaaagtgagagtgaaaatggcaaataattgtcatcatgttattatgaaaatagctttgatctcatggacttccagaatcttggggactcccaggtgtccctggaccatactctgataaccacagatgtagagtgagggtaggcatcagagagtctggttgtttctcaatattcttgtttccagccccttttctcccctattctcaaaggcacctggtgcttccagcttctgaaactttatagggttccacagcaagaagcagcctgcttttgggtttccctgaaaggattcacaggtgtaaaattcagcctcctccagttagctaagtcagttaccactcttccttctgttttctaatatcaacatttttactgtggtattttcctgtcctgttctcttagaccttctgggttaatacctttctctctctctctctctttctttttttggtcccattgccattgtttcagtgggattttgggagtgagcttaggaaatcctgtttttaaacaccatatttgacttgaaattctgctatctgcttttttgatcttctaggattatttttaataacagaaaatttaaagattaatttaaaaatatgaagttaatgttaatatttagccacttatatatgaacacatgtgtgctcagttctgtctgactcttttgcaaccccatggactgtagcccaccaggctcctctgtccatggaatttttcaggcaagaatactggagtgggttgccatttcctactccaggggatcttcccaacccagggagagaacccacgtctcttgcatctcctgcactggcaggcacattctttaccacttgcgccacctaagaagccccatttatcaagttaggcaaacccaaatattctctctgcttaggcctcatcagagacaaagagaataaaaaattatagctatgtagcccagacatcaggattttgaaatttattacatgcttctgacatttagtgaggactgagaactactgccctggattcttctgattgagcaggtagcctgtgagcacttgaactccagagagcacactcagcatacagcttctagaccaccaccagcagcagcaccacctgggggcttgtgagaaatgcacattctcaagtcgcattccagactgactgaatcaaggcccaacaatctgttctagcacaccctccacataattctgatgctctctgaccttgagaaccacagaggatgactgccgctctctaagaagcatt

SEQ ID NO: 38119 - DNA, 1327 bp, Bovine  19866880608223
  misc_feature (1)..(1): n is a, c, g, or t
naaagagaaaagaaagtttttctctttttggtcttggtctgcacttatatacctcacttctgctgttgtaagaaaattaaatatgatgcatataatatagctgtaggcttaaatagatcaattttaagagatcaagtgtataatttagacttttggctatatttaaaggcataaaaatgaacatttaaaaaagtcatcgcaagagcaactatgggtttgcacacaatgtaagtaaatgtgagcaaaatgaccctgagaatagcatctatttgaaaaatcatgaacatttccagaggtgattggacattagagtgactttgtaagcaacaattctgcttaaaggaaaaagctgaaagaatctcacataggtaatccgttttagagaaaagagtgctaatgaaatgcaagctttatttaccaaaaaaaaatggagaaaaaagcaatgtgattcacaggagtgttaaaacttatttaaaacactattttggaagtgaagaacttctagggctgcatcttatagtttggaagaaagaacaagaactttgaagtcaaatagccttgggcagaatccctctgattcttagtaggttgtggccttgtgaagaaacaatctttcagagctgtttcccatctataaagtagggctaatgtctacttcacaaaactgttattaaaattaaatgaggtaatgcatgaaaagcactttgtgcagtgcacacaacaacatattgagtcctcatgaaatgttgagttcccttttccttttcccttctgtctttctgtgacccttcctaatctctctgtttctggaagtgtcttgctatataatatacagatgtttaggacctattctattactgaacatttttatattggattggtcaaaatgttagcttgggtttttttttaacatcttacagagaaccctgacgaactttttggccaaccccagtagcactgtgtggacgcttcaagtcttttgcttatagtcttttcaatcaaaggaagaaactgagtggttctgtgaggtaaacctgttgtgttttgtttattaattcattcaagagatatttatcgagcatgtattatatcaggcattgtgctagatcttaaagatagactcaggagaaaaaatgagacaagagccttccccatgaggagcttagtggtcttctagttagcaaagagtttatccctccagtgatcacttctataagccatacctattcttctggaagaaaagatagaaaggggagaggtgctcctggtagaggaaataagaatgacaataggaagcaaatctttgtgggccccagagagagctatg

SEQ ID NO: 38120 - DNA, 1394 bp, Bovine  19866880610789
  misc_feature (1)..(1): n is a, c, g, or t
nctgccatggcttcctttcaagacaataacaagtcccatgctgtttcttctcactgtaggtcagtgcagctgaacggccagcccctagtgatggtggacgatgggaccctcccagaactgaaggccccgccccctgcgggccggccggacattggtcatgcctccagtcaccatgggcttttatgtggtcaagaacgtcaaacgctttggcctgccgctaccgataaatccccttacactcacgagtcaccagcaggcctgccagactactttccactcttctgccctaatggtatcagtattttttcaggcatcttctgagcaaccaaccagtctctgccagcccatcctgctggaatcaacactgacatgctctccaaagagacaaataccctagcatgagcttagcctaagtaggtcactcccaccctaagggaagaagtggacgtccccggcacctgtgttagcacgaatgcatgtgtgtgaagctgtctgcagccttgtccatgcaccatgagaacgagctgacggtgcgtgcccaggacagatacaactccccacaatcctgctcgcgtagcagagtaactacagaccttggcctgtggctgctgccctcggcagaagatgaggaaggaaaaaaccctgtggacctttgagagtccagtcccgcctaactcctttcctttgtctgttccctgctgttgccttgggtttcatatcacctctcctcccataggggagcaagtgggtgagtcagtgctggcctgctgggcgagctgtttatgtaatttcctggctgatgtatgagtgtgtgcatctgggtttctgacagtggcatcaatcactagctattcctctgggaagcgggtgcttctaaagtaaaattgcaatcatactccagattttgcaagaaggttctattcctttgtgaatccagattcccccagggttgggacgggagtcaggtaacagtattcattgagtggagagcaatgtattaggcaccagagaaagcaatcatcatctgtcacgtagctgcaagggagagttttagagaaagcacacccaaccaccaaacacagacacacagacacacacacacacatacacaccccaactgaaccaagaaaatagacctatctcaactttgagagaatattaagggcttgatagggcaagcctttaatggtttggttgaccaaaaccatctttaaaaaaggtacaaatcaaaggtcatcagagctgtaagacacaactgaatctaacaactttctgctgcttcccaagtagctgagtgctctcaatagcttatattaggcagaagactaatgtgctcataaaagatgaccagatccatgctctcccagaccagcttatttgagcacaaaaaaaca

SEQ ID NO: 38121 - DNA, 923 bp, Bovine  19866880781815
  misc_feature (1)..(1): n is a, c, g, or t
naataagaaacctgggctctaaacaaccatcaggtgatttaatcaatgtgtaacgtgacacacttaagcatgtataactacactaaaaatattgaaaaagaaaagagcctgacattctgtataccagattgctatcagcggctttctttgggtaatgaaatttatagttaatacttactttcttctttgggcttttctccattttccaaatgcttcagtaaacagggacttcttttgaatacatcaactgttaatacacaccactgtaagagtggctctgaaaaggcagttaccttcatgacggaggcgatctgcttccactgctccggagtcgggtcagtcccagtcgggttgtgcgcacaggcatggaggacaaagatggagaactcgggagctttctggggagaaggaagccatgtcagctctgacgccagcagggacgtggtggggcagagtcaggggcacacaggacaggcactccctcctaagtgccatttcagaaaagagcaccggcttggggaggatgctcagactcttcacttatcaactgatccaaagactgtcccccactctgcctgaaaccttggcattctgtccactttttctcttctaatcacccacctccaaatcattcaggaaaccctggaggtctagtcctctcttcgctgcatcccaatagtgataggaccgaatgtctttaaatccagcagcaataaagacaccattatgattctctgcaaacaaaggggtaaaacgttaaatgaacactaggaggcataaacggaaaggacacaaggcagcttccagggccgtcacaggctccacgtctactgggggacacgaggtgagaggttaagatggagaggaatgactgtaaccaagaacaagttcaaccagttgtcgtcatgctgatttacacccca

SEQ ID NO: 38122 - DNA, 1144 bp, Bovine  19866880794676
  misc_feature (1)..(1): n is a, c, g, or t
nattgactttctgaatgtacaaaatcccagaaacaatataatcaacctggcattttattatgctatcatatgatggcataatgtaccatcaccttttttttcaatgcaatattggcttactgcaatatgtgctcactcaacaatatcaatatttttatctcaaataactcattcaggaagataagcaatttaaataagccatgaattgaaacatgcttcctccaccacacaccacatagtatctttgtgatttttagcccattgagaagcgggttggactttttccccttcactgttctaaatactgtttatacatgcactgacctctgtctagctttctgtgccaccttaagtcagagactgtaatgaaggaaatttcacacaaaagctatgtaacccacacctttaagaaaagtgacaagaactggtagttagcccctttagcatattattagtttaaatatagaaggaagagaggttcaaagtgagctagaaagtgaaagagccattttataagcacaaggagataaacactggctccctttctttctcaaacaaaaagcacagtgcaataaccctgtctagacaacaacagtgtgactacagaaatactgcagccttggctctaacatagaagagaagcaaagtatttttatgctaattggtaccattaagatatgctgatcatttcaacggaagtgttgttttgtttgtttcaagataatacactatctttgtgaagaaatgacagtcagcatatgtgatatgtggagcctttggactaaatgttcttccaaggaagtctctctcctgtacatgctttggagaagcaccagggaagtgacaaaaaaataatacatgaggtataatatttggccacattgtatacagggttagaagtaaagatgcaaaaaaagtctagtggaactgacttcaaaaggcctaggaagatagataaactgagtgtgtaggaaagcataacagtagttttttctggaaaacaggaattttgaaaatgttttaaaaggcttagtgtctagtagagtcctttaacctcataggaatcctgcacgctgttattcatacttgtaagctccctgcaggtaggaacagaacattatttatctatgtatttccaagtatc

SEQ ID NO: 38123 - DNA, 1877 bp, Bovine  19866880852158
  misc_feature (1)..(1): n is a, c, g, or t
natgagacacatagcattagcaccatccttctcagatgaggagagtaagcttccgagagagcaggtaacttgtctaaacaccacaagtaaaagggtgatgcaggatttaactgaagtctctccatagagcccaaactctttctactacattctttccctcacgagttctttttaataggtatatttcatagtctattttatacagaaaaaagtaaattagcttctatttgaacctactttgaaagcctctgcctagacagtctgagataaacaactggtccaaagaagcaagcctagaagatgataattgagtttgtgtgtggctgcgggcggatgagtcacacgctctccggctcttaagaggtaagctgcctctctgttgaattaggaaacccaagtgtaattgttggcaggattctccccaaatcctgttctgatgagcagaagacaagagcaaatggagaaaggcagaccatagcctgaggagatgaacaatctggcgaacgagtcagggaatgtctttttttatgagcaaggaggtatttatatggtttgccttgagtcagtcgcctctgatgctgggaaaacagactgggaacagctggaccacactttggaccagttgccacaacaacttgatacatttgtctctggtgtcatttgatcactttgaatgctgttattacctctgtgtggatgtttgactttcaggcttacttcgtgcagtgagcacgtctgtttgattgtgttcctcagattacatggagtgttgattatatcttttgggagtttgggttctaggattacaggacatggcaatctcacaggtgcctggatccgaggctcccatagaaccactgttgtatttaccattatcagaactctgatttccaagaataaatcacacctgatggtatctgggaaaatcgtacagatattcaaagtcatctccaaaatttcagtttctcctcgccgatgatttttgtgagcaacaccttgcaaacttgatctcagcacagaagtgatggttgttactcttatttagtatttacctttttcttggacaagttaggcaagacccagtttgaaggtttgcaaagtaaattgaatgcatttgtgtgatttaaagagctgcttaaatctttcctccaaagaagtttagaaatgactggtctcttgataaattgaaagtgagcccagctactgtcacaagaagaaaggctgaaggttctgcatgaatcatttaccccaacagacatttgttctccttaagaaaattggctgttttctcttttctgataagaaatgatcccagctcccaaatttatggcagctgaaactgaaggatatatttatattaccaggccagtgccccccaccacaacattctctaaatgtcatagttgggcttctttctaaggaacaaaatctcagagaattcaagtaagcaaagagaaaaaaaaaattatgtcattagaagctagggaggatgattttgagcatgtgcaggatgtaatttcattattgtctagagttacacggctgtttctggaatcagggagtttcctaaacagaatatattgttgttagatggcagcataactgtggttttctgctggtatttttagtgcggaggtggatagctgtttcctgtaatttccaccccccctttttttctctcttcccacttcattttgtataaataaaaggaatcaaaagagtaacaaaagaaccaccaccaacaaacatttctgttaaagttctaaacttggcctaaaattcaaggaattcaaattttctatcatttgaaaaaattcatttatattgtgtgtaattaacatagattttcaatgcttgttcaacttttacataagacg

SEQ ID NO: 38124 - DNA, 1028 bp, Bovine  19866880865212
  misc_feature (1)..(1): n is a, c, g, or t
nccctccaaagtctaagagccactagtctagatgcttgaagatcctgccagttctaatatttgatttttctagtcttaatctcagcgtctctcatttaagtgcttcctggtacatagtctatgtgtaactagagatacatggaagaatacatttggcgagaggctgtgtgtgacagaaagtagtgtgatagagattatcagtgttataggaatccagggagagagactggtggagtctggaggtggggcttgagctgaaccttggggaatgagaccagggctcattctggttctgtactctgactctgttacctaggtggttttaaaagcatactggtggcaggatcccataccaggcttgttatcccataccaccctcttgcccttttatttcctttccctccaattccttcccttcaagggtatttttaaaaagctcctccttgtgactccaaaggacagccaacgttgagaaccataaagtgcagaggaagagaaaggaatatttgtctagaacactaggagtccagggacaaaggttggaggtaaacaggtctggtgctgctgctgctgcgtcacttcagttgtgtccaattctgtgcgaccccatagacagcagcccaccaggctcccccgtccctgggattctctgggcaagaacactggagtgggttgccatttctttctccaatgcatgaaagtgaaaagtgaaagtgaagacgcctcttagcgaccccatggaccgcagcctaccaggctccgccgtccatgggattttccaggcaagagtactggagtggggtgccattgccttctccgaagcaggtctaggttgtaaaaagacctacctgagtagagctgggaacatgttggatagatcaggcaggctgatttggcagccagggcaggggaagccccttgagggtttgcgcagaggagttacccaataagggtatttgaagaagatagacctggttggagtgtaggagggggatgagctcaggtttttgcaaagtccaattaggtat

SEQ ID NO: 38125 - DNA, 2366 bp, Bovine  19866880867526
  misc_feature (1)..(1): n is a, c, g, or t
naaatcttaatgatctctccttaggtcctagtagtggaaaaagggtagatttcctacccaaacaaattcatgcaagattggtttatataagacagtggtgaggctgtttgaagaagagataggagacaggatttgaagtctagtggcttgagttttatgaccctcagccattcacttaacctttctgattttctttcttcacctgtaaaatgagattgctaagaacagagctctctctatctgtatctgtgtgttctgcatctatggattcaaccaaacactgattgaaaatattccagaaaaaaagcactttagaaggttaaaaaaagcaaaacttgaatttgccaggtactggcaactatttacctagcattttcattgtattaggtattataagtaatctagagatgatttacagagaaggcaatggcaccccactccagtactcttgcctggaaaatcccatggacggaggagcctggtaggctgcagtccatggggtcgctagagtcggacacgactgagcgacttccctttcggttttcactttcatgcattggagaaggaaatggcaacccactccagtgttcttgcctggagaatcccagggacgggggagcctggtgggctgccgtctatggggtcgcacagagtcggacatgactgaagcgacttagcagcagcagcagagatgatttaaagtacaatacatgggaagaatgtgcctgggttatactataaacactacacggttttgtatatgggccttaagcaactgcagactttgatatccacaccagttcccggaactagtacttggtagtaaccgttgtatatcctccttccctcttaaggagattaggaagatcacatgagactctgatttgttcattgctagtgaatggtagttcttattgccataattattgttgtttcagttattatggttgttttttaataacaattcattttactggagaagcttcatgttacctttattctcaacttgttctttgctttcttcctctttcctctttctttgaaccctggagaatagataggtgatatttttggcacctgaaagacaatgactcaattgctaaaaacagctgtggtttccaaatttggactgccacttaagaatgtttagttttctgagcagtgggtgaattctggttatatgaaaatctccatgatgcatttgaaaaccaaacagagacagtgtttggacaacccactcatctgggtgattcacacactcgctcctttcgattagaatgagaataattgtctgtactttgagagatgagggaaagagttgagaatctcacaatgcagccaatagtccgatgggaaagtgagagatgtttaggatacagtgcagatggtatagtgtggatagctgggcagactccaaaacaataacataagaaccaagatgaaccattttggctcaagtcacttggactctatgatttgtatcttcatttcctagaggaatcagaggaggaaataacactttttgatattattttcagcaattcaataagcacaggaaggagttggtgaaatcccagtcataagggaagtattttcaaaaatactgtccttatgattgtattttgaatactaaataaactgaacaattggcttccctactatttgaatatttccttccctcctcccttccttctttcttccttcatttataaactataacattcttgtgtattccaaactcctgaggataaaacaatgagcaagaaggatatggtggttatactcacagactttatggtctagtgggaaaatagttaatgaaacaaacaatgatagtaagatgcaatgactcacataacagtggaattcagggtgcttcaggagcccatggtgggatatatctactgtagtttgtaaaggaagggaaatttcagatattagggaagccaatattttttgttaatatcatcatatttatgattgcttataataataaagagtaattcttttgaaatcttaatagatacagtaacattatagcactttttccaatatatcttagtggcaggatcatggacataggtaaggcagagaagtatttaatcctttggaagtaatgaacagattaaaaaggaaacttttttctcaatcaatctctggtttacctactagttatatcaaagtatatcaaaggggaagagagtagaagaataacagttactcttaaaggtcatagaataactggatgcacaattaaaggaaaatgaggacaatgacaatgttaaccttctctaatgaagaaaactgaaaatgaaaacacactagtggttaagaatggttgtattaccacggaaaaaaatcagtgt

SEQ ID NO: 38126 - DNA, 1633 bp, Bovine  19866880900982
  misc_feature (1)..(1): n is a, c, g, or t
nctaaaggttctctcttgataaacatttagctagcatactctcagtgactcatcggtggttcaggctggggcatcttgccatgccagcccctggggcacacacagcaacacttgggccttgtcctgaccccctttcacactgttcattaaattaagccagctctgagaacctcacaggaaaatatgatggctttggacaagagccacttactgtagaggtcagtttcatccaggatctctgacttgatgatctcctctatgatgtcctccagtgtgacgatgcccatcacctcatagaaggggtccccttctccctcgttattcacccgctggacaatggccaggtgagactttcctagagacaaaggaagtcacagttaagcatctgggatattttcagagaaatttccttttgagaaaatgatactaaattgctctctgaccaatcttgggactgaaccactgaacccattccaggatctctttaaaacatgaagtctgtatacaacctcttataaatgcaaactttatacttttatatcactatcgcttttgaagcaagttacttggacttccctggtagtccagtgattaagaatttgtgtgcctaacagggcacatgggtttgatccatggtctgggaagattccacatacctcgaaacaactaagcccatatgccacaaccactgagcctgtgctctagagccctcgtgctgcatctagagaaagcccatgtgtgggaacaaagatccagtatagccacaaataaataaataaatagaaagttatctgatatacacaacgccatttaatttttttttcctgtaattttcctatattaagaagtatatctaagctgaaggaggatgaataatctaattgagagaattagaatttggagttagaagaactaggttagaagcctgcaaacctcctcgcccccatccctaactatcttagtgactatctgtgcaactcaccctggacaaaccagtatgttaaacctgtactgaatctcaagcttctcatccagcattagaagataatactaaaatggtgattttcaatatggctcccagaggctttgatatgcctcccattgagaagcatggtctaatcaactccctcgggcttgtggctgcttcaatcaatcgagaacagggaaagtgaaagtgttagtcgctcagttgtgtctgactctttgtgacctaatggactgtaacccatcaggctcctctgtccatgaaattctccaagcccaagggatcttcctgacccagggatcaagcccgggtctcctgccttacaggcagattctttaccacttgagccaccagggaagcccagagaacagagaaatgtctgcaatgaggcttctgagaatgcatcataaaaggcatatagcttctgctgcagaaacactctaaagaagtctgacaactaccgtgaggccaccatggtgaaggggacccatgtcggtgcttaggtgacagtcccagctaagcctggcctttccaccatgccaccaaagtgccggacaggttagagaagaagccttctatggcggtggatcctgccccacctgctggcattctcctcaatcatctagacgtttcaaccacgggcacaat

SEQ ID NO: 38127 - DNA, 3783 bp, Bovine  19866880914818
  misc_feature (1)..(1): n is a, c, g, or t
nttttcctgtggtctgtatggatgtgagagttagactgtgaagaaggctgagcaccgaagaattgatgcttttgaactgtggtgttggagaagactcttgagagtcccttggactgcaaggagatccaaccagtccattgtgaaggagatcagccctgggatttctttggaaggaatgatgctgaagctgaaactccagtactttggctacctcatgtgaagagttgactcattggaaaagactctgatgctgggagggattgggggcgggaggagaaggggatgacagaggatgagatggctggatggcatcactgactcgatggacgtgagtctgagtgaactccgggagttggtgatggacagggaggcctggtgtgctgcgattcatggggttgcgaagagtcggacccgactgagcgactgaactgaactgaactgaacccaccaagtctgtgataatttgttatgcatatgtgctaagtcgcttcagtcatgtccaactctttgcaagcctatggactgtagcctgccaggctcctctgtccatggatttcccaggcaagaatactggtgtgggttgccatttcctcctccaggggatcttggattgaaccctcttcacctgcagctcctgcactgcaggcagattctttatcgctgagccaccagggaagcccaacaaaagcttagtaggaatcagcaaatgcaacacaaagcagcacagctccaagtctaaactctctagcaggcagcagcacagctcagagagcttgctagctagcagacagcaactgtacagtaaagtgcacgcacaccagcagtcagcagaactagttagcaagctagcagaaggaaggaaagaccctcagtggctgtggtcatcatctgaacattctactcacagcaccagttgtattatggtaccctgtgagaggcaggatcaacctctttcaccaaaaatttcattaggatgttgagattgattttaccacagatgaatcaagaggataaaaaaggctttattattcatggaatgaggctttctggaggtgagcagggcaggctcccaagcaggtccaagaatagcttgagagagtgaggaggagggactagctttagctttcattgtggaaataggttagggtgtagatggggtgatagtggcccatgatagttaccatgggccaaggctactgtgttttgaaacttaccaatgccaaagtgggtagcaggcaggctgtcttgctggcttgcccatttgtggggcacaaaggtgaacaggggcggtaaggcttgaaagctgctggaaactttttattccagtggatctttgatcagttgtaggaaatcctccatcattatctcttcagatgctgcttctgccttgttctctctctcttgttcttctggagctgtaactacatgtatgttagatcttttgactgtgtcccacatgtttccatgttctgtttattttctttctcttcatatttttttttctcttctctactacctctagcagtcctttttctttttgtgcttcagtttggatattttctgttgatatctctttgagcttacttcctgtctttggttaggtcagtttatttttatatatgtccattgggttcttaatcttatattttattttcagttttagaatgtccatttaattctttatataaatttcacttgcctgttgaaattttgtatctttttatctctatcttttcctttcttttgtttaatgtatgaatcatttaaagtccttgtctgctaattccagtatctagatcacctgttttgctctgcttttattggttaccagtcaagtggttatatttttgtatacctagtaatttttgtttgaatgtcagatgctttatattaaacacacatactcacaccccaataacaactttagaaggttcagataatggaatttttttttttttttaccagagaagtaagagtctaagaaggttgaatagcggccaccttaatcctgttgcaaacttatttaggtcaagactggttttaagttttggtgagatctagtccatctttgttttacttattccgaggacatggtcctttatggtttttcactgacagcatgagaagaagggggaaatcctatgtttagaaccaatattaagttttcactctactttccagagatatttgaattattctttcaccttttgaaatttcaaaatatctcacatcttttggggaaagactggctgtaggcttgaaatcacaactgccaagactactggttactctatttcctaagagcagctttctgaagcctaaattcttagtctctggctgtgtccatatcggaaaatgcaatgaggaaaaaagtgataatagatggtagcattaatctgtcattccctccaatgctttcacctcccactggttatattcaagaccctttatctcctaaatatccatagactctagaaaattctactctactttctggaagttttggcttaccttcagaatttagcgaatactttgaggaagaaactgatcttgtgtttgaggcttttcaaatcctcagttttgtcactccatcccaagcagttatcaaagatatggctcatttctctgccctatagtagcattcctgtgcttgccctgacttcaaatctcagctactggcttgtgccccaaaatgacaaatgtctcccaaaccctgtgcattctaagattacttctgaatggttctctgctctctggaattttgcctctgatatttcttattgcctttgctgctcttttttctttttcctcactgcatggcatgagagatcttatttcctgaccagggattgaatcatggcactgtgccccctgcagtggagggtccagcacctaccactggactgccagggaagttccacatttgtagctctttgatggttttaaatatgtgatttttgtaatttatccaaattttagttgtttttcagtctgcttcagactacttcatcctacatggaaacataagtattcatgtccatattaaaaaaaaatcttttggaaggttgtggagcaatgttttgaagaccactaaactagaaattgattaaatagataattctggtaagtatttggcatgtttaaggaaataagtgctatgaaagtcaaggttaaagaaactagttttgggagtacactttctgaaggcactgttgtctaagatgattatctaaatgttaagcaggaattagttgggcattgttgagggtagattttttgaaaaaattttggactctcttagctagcagactgcatctggccaattcctcatgctttccagatagtcggtcctgagcatttggaaactgtgtactgtgctttctggtgttctgaggtctgaatgtgcccatatcatacttcctatttgcccttcatgttaacccacctttcctaaaatccttattatttcatgtaaatttagatgttagattcttggaaacagtccttttcaaattggatctgccaactggattcaactttgggttctaattgcacaagcctagggtagcattgttttaaaggaactttactttccagtggagtagttcacttttctaggacactggaatgaggaaaggaaaggtttgttaaggtcccttacctgtgctatgtcagagaggagtgcagcttctttcaggagtctgggagagtgaaaagtgttttcacaagtctttgaggctgtgaaagattactttagttaattcttcaggactacaacaattt

SEQ ID NO: 38128 - DNA, 1500 bp, Bovine  19866880989815
  misc_feature (1)..(1): n is a, c, g, or t
nttattgtgttaacctgctgttggtcaggagaaggcaatggcaacccactccagtactcttgcctggaaaattcccatggacggaggagcctggtgggctgcagtccatggtgtcactaagagtcggacatgactgagcgacttcactttcacttttcactttcatgcattggagaaggaaatggcaacccactccagtgttcttgcctggtgaatcttggggacgggggagcctggtgggctgccgtctatggggtcgcacagagtcggacacgactgaagcgacttagcagcagcagtagcagctgttggtcactcaactcttaattagcacctttagaggcatacatgagtgactcagaggctgaggtgtgctctttctgcagaggatgatattttcctctgggctcagttgacttcgagtttcttggaactcgtccttttaaggcaggataaggccattttttctactttctctcattaacccatccagagggggccctaagggaccccttagaaacaaagtcctttttcctacaagagagaaggaaatcattgcaatcttgttgacaatgctaaaggctgttgcgtacaagcatgtagttctctcaggtttctgaatgtcctgtactggtttagaaggattccgaaacagtgaatagttttataatcatggagtagatacaacagcaaaagtagaaatcaaaaaggttaataaatttgactacctaaacgtttttaatttttgtacatcagagtacaatgtaaacagacggaattagtcaaagaaaactgggggaaattttgcaatatacctgaaaacaaaggatcactatctttaataaataaatagttttaaaaaatcaatagaaaaacaggtaaagggcatgaacagtcagttcacaaaggaagaaatgaaatggcaaagaggccaataagaaaaatactgtgcctcagtgtgaattttttaaaaatacaaattaatacaacattgaaatccaattatcacctcttgggtttgggaagtgatagtttaaaccttaaactgtaaccttttaaaaggttattattaatatctgatgttcttagggatatgtggaaatgggtgctctcacgcataggtgatcagagcaaactgatgcaagctttctagataatatcagtattatcaaaatgtattagtcaggataggcgaggttataccgtgataacgaaggaactgcaaaattccatggctttcactaagaaaatgtatttctctttcacactacttatctgtcacggctcagctgtagctctgttccatatcattctcattccagatcaatagagcagccttaatcaagaacattgtcagacttctggcagaggggaaagagacgtggcaaaatatggactgcttactaaagcctcggcccagaggttttaacatgtccacccacattgcgttgaccaacaccagccatgtgatcactctaggctcaacagagcagggacaaa

SEQ ID NO: 38129 - DNA, 1364 bp, Bovine  19866881029115
  misc_feature (1)..(1): n is a, c, g, or t
ntgtttttttttaaaaaaaaaaatctgttgatgcttacatacaagtaactcaaaccagctgaccttcaaaatgtcaaacttcacatgtggtcaagcttcagacagactctaagctaaatttggaaaaaaaacagttcaaataatgaactggtaaagcaaataaagtaaaatatttggatgatgattcagttgagtaaccactagtgaccccaaactgccacttgttatggatagatgccttgtaagatttttgagttgggagagttcagaaacaacccaattatggttgggtgtctttccaaattgaccagaggatagaagtgagatgaggaggagtgcctgatccactaacgattgaaattctgaggcctttgggaatactctaaataagtctatcacacacacgattcataaactcttggattaaatgatgaatttttcagattagagactaaaacctttgcaggactgagaattatgggctctcctctccctatacatcttccactatataattcaaaataaaaacgatgccaacctgtataaaaaaaaagtgtaagaaagtcaaagaaatatctaattttccccatgacaatcacttcaatgctttcaaaaaataatattatttttttaaatctggtacatctattttccctagaaccctaagcatacgattagtttgcctttggagtaatcagcactctctgaatcccagagctatattgtttgggtttcttatcattaaaaatccctgactttcatagagtgactactgtggaaactctcagtaagtactttttttttccttggcatacaaaaagtcactttacattactagacaactatctacaattaaaagagacagagagaaaatatgacttctcagtgagactcctgttgagtcttttcatccctcacacaacagactactcaaggataagcaagacacacatgttatgcaccatgaaaaatttatcttggcttatggaaaaccaaaaagccaaatttacataagtcaagtcttaacaaccaaggaccttccacactaacctttccttttaccacttcagtatcagaataaaaattccactgttcatttataggttatttgaggttaactaaaaatgagcatgatgtagtttctagaaagtagccttgattgaagacagaatacactgtgacattctgaagacagaataatgtctattgccttcagtccctgaccagtgataggagagtttacattagagtgatctcaaagaccctttgcaattcttaaattttgtaattacaggatctcctctggctcaataaagtcaaggaaagggttatattagtgtaaaatgaatgatttgataaccctg

SEQ ID NO: 38130 - DNA, 2234 bp, Bovine  19866881104778
  misc_feature (1)..(1): n is a, c, g, or t
ntaaatacatgatacagtcatatgtaaggcaaggctatcttttaaaataaatgttagaagtgacaaaaataaaatttaccgtataagtattttattgttcccttgggcttcagaggactggaatatccccctttcctttaactttctgccttctttagaatcaattttataatttaaaccattgttttttcacagtaagcattttacaatagaacttctttagtaataactctctaaaagagccaaaataagacatattaaaatagaaaatgctaatgtattccagaacactggcatgagattatgttgctgccagtcatttactggagagatctgtaaggaagctgaagccaatgagagttttatttctaaaaccaatgagagttttatttctaagtcatagcccagcctctgtgttggatgactagagtacagaaatatttaattcaattcaataaatttttcattgagcacctatcatgtccaaggctgtgctagatctacagagtgaagataagaaaattctttcactcaaagaccttattaaacaagaaagtatatacaagaaataatgatgcctgttacagaggcacaaagcacttaaggaaaggagtaacatccttcttccctacaagtattctccatgatagtcaagtatagagtaaaataaaatgtgattcaggagtcaaaacatcttcatattgcactgattaaaagctagggtttgaagttagactgcaaagagttacaatctgactatagttctttgcagctatttgaccttggacaaattaacttctctgagccttagctcacagtagggatagtagtttgtggtgggaattactacaagttaaccaatattcagttttctagttctgggtacataggaggattgtactttcctgttcctgtttttatctctttgaccacaagatctgccatctagctatttaccagtaaaaaataggctgtatgattgcctaagaactgtaattggaactaaaatagaaaaagttacaagaagcactgagtagagaataactgacttcctgaaaatgctgggcaaggcttcacaaaagaggtgcttttcaagttgagtcttttttttttttttaatgagcatggtgtttctgctttcaagttgagtcttaaaggatgaagatggctaggcatctgagtgagacagcgctgcttatacaaccaaaaaaacaacatcatattctggaaaagacaagttgttcaggcatatagaatatcctaggtcagttttcattccaatcccaaagaaaggtaataacaaagaatgctcaaactacttcacaattgcactcatctcacacactagcaaagtaatgctcaaaattctccaagccaggctccaacagtacatgaaccatgaacttccagatgttcaagctggatttagaaaaggcagaggaaccattcaaattgccaacatccgttggatcatcaaaaaagcaagagagttccagaaaaatatctacttctgctttattgactatgccaaagcctttgactgtgaggaccaaacaaactgtggaaaattcttcaagagatgggaatatcacaccacctgacctgccttctgagaaatctgtatgcaggtcaggaagcaacagttagaactggacatgaaacaacagaatggttccaaatcgggaaaggagtacatcaagactgtatgttgtcaccctgcttatttaacttccatgcagagtacatcatgtgaaatgccaggatagatgaagcacaaactggaatcaagattgctgggagaaatattaataacctcagatacgcaaatggcaccacccttatgacagaaagcaaagaactaaaaagcctcttgatgaaagtgaaagaggagagtgaaaaagttggcttaaaactcaacattcagaaaacgaagatcatggcatctggttccatcacttcatgatgaatagatggggaaacaatggaaagtaagagactttattttcggggactccaaaatcactgcatatggtaactgcagccatgaaattaaaagatgcttgctccttggaagaaaagctatgaccaatctagacagcatattaaaaagcagagacattactttgccaacaaaggtccatctagtcaaagctgtggtttttccagtagtcaggtccggatgtaagagttggactataaagaaagctgattgctgaagaactgatgcttttgaa

SEQ ID NO: 38131 - DNA, 1674 bp, Bovine  19866881421639
  misc_feature (1)..(1): n is a, c, g, or t
nggcttctgcctggcctcccattgtctgagacagggacaaaccactcgggaccacagactgaccaggtgacctgtttctggtccaatctagtctggggtcctggtttttcatctgaacaaagttctcctaagaactgcagctctgccctcaactacacatttcactactaacagccacttctaattatacagctatagttcctctccattaaggcagcttctttattacatttgtgaagggcaaatcaggctggtcaagcaaatatcttttaagatggaatcctggcagatgcagatgaagataatgagtcagtggctacatgatatgcctggggtcttccagccccatgtcctcacatggagcggcacagagaggttgttcagtgttgctgagggttttctttcaaaaatactctgctcagcaggtttcactgtgacagttgggttggctgctggaggccccttgaatcagaagaatatggcctttgcttagtggtctcagaactcagctgcagggcctagcaagtagtccgtttgtactgagtgttttcatgaacattcttcccttaaagagtgatgtgaaatgagaaataacacagaccatcatggagagagctagagagagacttgccttttcactagcatcagctaaatatccatagatctccacagtcacttttgtgaacacagattaacatcgttgtttagattttggtgtagttcagatgttccatgcttggttgacagatcaaatgaaaagcagctcattctgctcctggtcttctctcttaccttttcatcatccactggctgtaagctcttctggcagtacccagaaacatgttccttgagtccaattttccaaggggtataaattgcttccaggagaaaaaaaatgtacagcattctaggaagctccagaaggctagcaaggagttggaaagaaggcattttacagccctttttcaatatatggcataaatataagcttaccaggacacattcacatgcatgcataaattagaattctctgctgccaatatgcaagggtagttttcccatcaggactttgagattctttgatgccctacccttggcatactgctgtgtctgcagcacctacatgtctgtcatgtaatagatattcaatagtgttttgtggatagaaaataatagccacagaagtatccttggtgagatgtgtcaattatcttgccacttttcgctaattaagtataaaagggagacatggaacaccatttatttctccttctcaggagacttattatcacagaggaagatgaagacaattccagaactaaccattctattctgaaaagctatggagaagcaggggctctggccatagtcatttgttaatgccctagacctgggatgtgcatataggatgtgggtttaaagaggagaatgaatattcttccctctctctttaaagttccttcaagaaactacccatatgctctcaggagaaaatccaaaaaactcagattcacaagttagtgtttatcttgttgaatatatattctttatatttcactgtgctaggctctgtagaggtcacaaataggaatttgataacattcttgtaaatgtgtaggtacagctacatacccggtcctttacaaatgacttatgtggtctcacaggcatttt

SEQ ID NO: 38132 - DNA, 774 bp, Bovine  19866881431395
  misc_feature (1)..(1): n is a, c, g, or t
ngcttagtggattctaactgattattccttcttcagaaatgttttcctttacaccatcttattggcaaaatgtgaacactggataactaactctggatgtggggagataggaaacttcttgcacactgatgggagtgtaaattggttgacccattctggagagtgatctagcaatatttagtgaaattacatatgtgtattccctacaacctagcaaccccactctgggaataaattcccaaacaactcacaaaaggctcatcaaaggacctgaatgaggataggcagtaaagaattgattttaatactaaggaattaggcacctagatgttcagcacagggaaatgaacaggtaaaataaggaaggcagcagttagatgcaacaaactaaatgtacatacaacatggataggctttaagtagaatgatacatgagaaacaaacaaaaaaacaaaagcatagctatagcattataaccattagcacaaataaaatatacacacatgaaacaatatattttataaggataaaaaatatcaaaggacatatatcaaacacattagaggtgatgcctataaggtaatcactgaaagaagaaaattaaacaaaaggctttaaagggaccaatgctcataaacactttcttgcattcaaggcaatacttaatccattttctggaaagtgaaaggcagaaatatttattggggtgtgctgattacaggctagatagtgttggtctgcctctccaccttgggaggcaaagaatatctatcc

SEQ ID NO: 38133 - DNA, 871 bp, Bovine  19866881783487
  misc_feature (1)..(1): n is a, c, g, or t
ntgatatttaatactctcagattcagaagctacaggataatacaggacaagattacacgcatgtgttggagagttagtgtgaaagaatacagcatatttaaaacagttctatcactgaagttctcctggaattcctccatcaccttcatacaaccttaagagtttacttcaaaaaccttctagattagctaaggctaacattatttcccataccatgtaaatcattcacatgaagatattaagacatgtttagcatcaggcaaaaatacaatccattttttaaaaaatataatgaggtctacttgtttctattgactgagttgtcactaggaccgtaaggttgtttagaagatcctcagagctagaatatcatctgccgtcatctgagggatggctgtttaagagagatcgtgagctagaatgcagaatatgagggcatacctcatctcaacgctgtcagtatgatcaactaagatggaatacctaagaatgagggcttatttgtgaggtaggggcaatagccatcatttttagtacacttttaagcagctgtcatttccatcactttattaatttcttactatactgacatttgaatcactttattaattttttcctctactgttatcttagttgtccaatttaaaaataaagactataccaataactgaccactagcaggaaacaattatcatacactgctacccatatacatgaaattctgtaaacagttggggagagaggttgagtgatctatttctgagattttggaggcccagtttcctcatcctattcccacaaactttcatcgcagacatttcaaacattattccacagtatacaaaataagtaaacatcaccaagcagaaat

SEQ ID NO: 38134 - DNA, 931 bp, Bovine  19866881894935
  misc_feature (1)..(1): n is a, c, g, or t
natgaaggtcaggaaagatccctctagcacctttatataaggactttagttaagctccattaaatgaggacttgattccagaaaatggatggatttataaattactgtgtacacaggactcatcaaggacacagacactgtgtaaatacacatcatttgaattctcttctgacttgcaggaagatttggaaggagaccaatctaacacttcttataattagtgaggtagaaattgattagcagttagtggtctgcacacacattgcctgggtgtgaatcctggtttcatcattgacgcactgttgaccttgctgtgccttaatttccttagctgtaaaattagaataataaatgtgcatttttaaaaatatttgtgacctaatatttgtaaagcacttggaaaggtgtctggcaaatgataggctcttaaagtaaagcaaatgttacctagatcactctctttgtccaaactacatgagattgtgattggcaatctaacattagaattggttgcttttatttggatatgtttgtggtggtaggtaataggccagatgtgtgctaagcagtagggaaaggtctatttagaatttaaaatctacatgggtagctcacgttaatgtaattagcattcagagtagtttgtttatccactcagcacaggagcaattcttgtcattttctagagaagctattaatacatgaacaacaacaaaaaaacacagggagagtgtgctttgatacaaaaccaagccagttatatgaaatgttatatggcagagaaattcctagaaagtatctgtgttagaggttctgggagtagttggtatgagtcagcaaggattttctgaacatttactgtttgggacatggtgagaggcttaatgaatattgtgtctactgtgagacaagaagaggttatcatagtcat

SEQ ID NO: 38135 - DNA, 1453 bp, Bovine  19866880363689
  misc_feature (1)..(1): n is a, c, g, or t
nctcagatggtaaagaatctgcctgtagtgtaggagacccaggttcagtccctgggtcaggaagatgccctggagaagggaatggctacccactccagtattcttgcctggagaatttcatggacagaggagcctggagggctatagtccatgaggtcacacagagttggacgtgactgagcaactaacactttcctgcttataaataccattcttgtagagctgcattatgaatattaaaattcacttgtttctctgattttattataagtaagcaaaaagaagctacattaattagaatgactttgcagaacaaaacttaggaatttgttccagctcttattggccacagaaaagtatttgtgtcttctggaaagcatgatctggtttattatcaaatgtgttagacatccaaacctaaaattgacaaatctgagggttttgtttttcccacttccttccctttaggcttgaaacccagcattcccaccttgccttgccatactataagatgtctggtttgtctatggcggaagttttgaaccgagtggactgggcagtagaggatggatcacagaaatacgagcggggattaatcttctacattaatcattcactttatgaaaacctggatgaagaattaagtgaagtgaatacaacttcctgcttagttagatctagtatttttaacttttcactttagctttttatgcaattctgttttaaaaattaagttccaagtattttcattggtagtatagtcttttttttctaaaaaaggtaactagggtgcactttttcttcattaataatactcatagaattacagcttgaaaaagaacttagaatcatcttctcatactttctcattacatagacagggagatgcgggccactgtggttgagtgacctgcccatgtgacagtggcatgtctttagaagaatggcagagaacctgggccttgcctgccttctcatccacagccctttacaaaaccctagttgctcctctctccaagtgtctaaaacttttttataaaatcctggcccagcaaccttcagacgtttttaaggattgtttttagcccctcatgtattttttatttttcggttgttctgggtctttgttcctgtgcaggctttctctcgttgcactgtacagaggctaccctttgttgtggtacatggccttctcatggtggtggtttctctcgtggagcacaggctcttgggtgcccgggcgtcagttgcagctcttggtctccggagcatgggctttagtagttgtggtacatgagcttttagttgctccacagcatgtgggatcttcccagaccggggattgaacctgtgtcccctgaattggcaggtggattcttatctgctgtaccaccagggacgtcctccctttcatgtatttttaaatagttgaatacaaatatgcagaattggg

SEQ ID NO: 38136 - DNA, 2594 bp, Bovine  19866880374416
  misc_feature (1)..(1): n is a, c, g, or t
ntctgactttttgactcccctgacagtatttcttggctcttagaatctaccctccccttcattttatgcacagatagattactcttcctgatcagctcggaaacctccagtgcttcccactgcctaccaaataaactcttaatttcttcacgcgcgcgcgcgcacagacacacacacacatacacacacacacacacacacacacacatacacactattcccattgagtaaaacctctggctgttcccttagctcacccgatgaaagctgctatcacagctggaataccttaagaggctttgtgtttccatctgccactgcctgagaggaccaggtcctggctggctcaaacaggatgagacccgtgtctccgtggagcagagccgcccagcaacccacagacagcagcatcaccatggtggcttcagcacagaggcagagctggccagagccactgatccccagccagcctgcacatctgtgagaataaatgcttattgttgtctgccaccgtgattttttaagtacttattaagcaatgtttttgcagcgatagcaagccgacccacctggctagctacctctctcctcacctgaaccctgcagtcttttcagtgtctctttcagagtgtgaatcacttctacctttcctggtggttcagtggaaaagaatctacctgccgatacaagagacacggggtttgatctctgagtcgagaagatctcctggagaaggaaatagcaacccactccagtatttctgcctgggaaatcctatggaaagagcagcctggtgggcaacagtctgtggggtcacaaaaacagtcagacacaatttagcaactaaagaacaacaacaaaaaagccttataaatccccagtgtaaatatataaaattgagtgtatattttattttaaaatatggctatgtatttattagatcagatcagtcgctcagtcgtgtcctactctttgcgaccccatgaatcgcagcgcgccaggcctccctgtccatcaccaactcctggagttcactgagactcacgtccattgagtcagtgatgccatccagccatctcgtcctctgttgtccccttctcctcttgcccccaatccctcccagcatcagagtcttttccaatgagtcaactcttcacatgaggtggccaaagtactggagtttcagctttagcatcattccttccaaagaaatcccagggctgatctccttcagaagggactggttggatctccttgcagtccaagggactctcaagagtcttctccaacaccacagttcaaaattatatagcctcatatttttacagtacatataatttttctattttatccaaaaatataaatatgtacatatatttcttcagaaaccctaaaatacagactttctagaattgaaaacattttatttaacttactttttacaaagcttccaagataagccactataaacatctgtgattatagtgtttagttttatggagttaagatatagggggtcccctagagtaagagctttacatgaaaacagtggtagagatttctcccaacttcttagttctgcgataaatctattcactgggattcatacatttgtataaaaagtccataagtggggaagttaattgatcagtttttccaagaacatacaaatcccattgcatgggaaatcctatacgagggccaaccatttgactagactttggatatgtactatgcatattttgtgtctgtttattttttctgttctcatccacagaaaggaatagacaaagaattttacctacttgccacaatatttgatgaaaatcgaagttatctcttagataaaaatatcaggatatttaccacagagcctgaaaatgtggatacagaggatccaaacttccaagagtctaacaagatgtattgtaagagaacacttaacttaaatgtattaagcagtttaatttcactaggcctaaagaattacagattttttaagagaaacatattttcccctcaatggttggctaatatgtttcatgttttctttaaatataatttcccaataaaaatagtgcctacttgggtgattatgttacattctatcaaatgtttaccaatgcttttttggtgcaatacattattttagctattactaaatatgatacagaaaagacatatttctctattgccaaagtaatggagtggataggtggggtgtttcttgagttggttggttggtttctgaagacttttaagtgtggagggaaaaaagaatggtctagaatctggagacttggactctggtctcaacattttcattcattagcttcatgacagtgaacaagtctctctgaccttagtttcatcaaatctaaaaaaagggggttggcttgggtaatcttgatatcttacatgaatgaactgcttaatgaatagtccttggttgactccaagagatgtcaagtaccaataaattaaacaatcttttctttgtcacaatatcttgcagcgataaatggatacatgtatggaaatctgcctggactagatatgtgccttgggagacaatgtttcaggcaagttcttag

SEQ ID NO: 38137 - DNA, 1207 bp, Bovine  19866880418897
  misc_feature (1)..(1): n is a, c, g, or t
nccagcctgatgcaggcccgtgatgggttttgtagttgagcccacccttatggttttgttttcttcacttggcattgtttgcgtgtgtgtgtatatacccatagcctattttaaaaaaagaggggtgggggaaagcaagcccaggacacagaaaaccaagccactgaacttctccccggccagagagacgtttgtcaaacattccaggaggctcgctgggcagtctgattccctggcctccctcctagtctgcagctcctggcttggggaagctgccaaaatactctgtctatgagctgtcgctctcagttcctggtgctgcaaaaggcaaaaagttcagaagtgaagccttaacctttttctggtctgcttcttatacagcaaatgacatgctggcttaaaatggagtccagggaccttcctggcctcgaatcttgggggcctttgtagacatgaccgagtggtatgtttgctggagcaagttagagggtgcatcactgtcccagtgggcattagacagagggtcatgggtaccccccatgcacctctgcacaccccattcccatgttgaccatttacttcacagtcattgactcaaaagagtgttcctatcttaaatgctgtggagtttgtttttcttggtgttttcttttatattgaataatagcagtgaaatatgtctggttacgtctgtagagcttggttatgtttgatggccaaacactcaagagaaagtcaattattgaaggaaaaaaaaaaggcggggtggggggaaaggagatgaaaacagtgaaaaagataaatgtggatttgaatttaaattctgactctcttggaagggaaaaaagagaagtctctgctttagttttgatgcattcctgcttcagtggagaacgcttctgtttggggtattcctttctgtgggggcaggcaaaaagtctagacctgactaggtctttagcatttgtaaggcatttaatggtagtctgtgcttacctggtttggcctcagatactgcatttgagatactgtacgttttgttttctttttcttttcttaaactgaactattctctccctaaaatgttatgggatattatcccaagaagtatttcgtttgttgcaaatctagatgttttccttcctgtattctccggaagacttcctctctgtttatctctgtcttgaaactcttctgcccccctttg

SEQ ID NO: 38138 - DNA, 1183 bp, Bovine  19866880450223
  misc_feature (1)..(1): n is a, c, g, or t
nacctaggaaatttacctttaaaatgtttaaaacgtgtattaaggaaagttttaatttagcttattagacaagctttaaaaacaatttactaaaatataattttgtattcttttcattttgtaaattacagctttagggttcagtttggaaagtggttggggctctggaagagctggaccaagctacagtatgccagttcatgctgcagtacagatgacaactgaacaggtgttcttttttaaaattttgtaacctgaaagtgaattttaaatgttgaagattgatgtttaaaaatgagataagtatgcatgtgctagtgttagtgatttatgctttgatgtttttgtattacttgaaaaattttaagtgtccataatttttaaaaaattgaagcttgaaacttattccttcagtaagattgcaaattcaatgctacaaaaaactagttccaaatcttaggccttagtctttttcttacttttgtctactttgtgatccaggatactattacattgggttatgtgaagtatgtgaagtcactcagtctgactctttgtgaccccatggactgtagcccagcaggctcctccatccatggaattctccaggccagaatacaggagtaggtagctgttcgcttttccaggggatcttcctaacccagggatcgaacccaggtctcctgtattgcaggcggattctttaccatctgagtcaccaaggaagcctgagaaaacttgagtgggtagcctatcccttctccaggggatcttcccaacccaggaatcaaactggggtctcctacattgcaggcagattctttaccaactgagttaccagggaagcccttttaatctagccataagcaatccttctgttgtctgaaattctatattatctctgacacaacgctgtattgtcttctgttccaattgagaaaaaatttatacccacttcatgctaagtcctgttccaagactcttatatgcatttttctatttatttttcaaaataaccttgaatggtatctttattctatttttcacatgagtaaactgaggtttgttgaacttagataactttctcacagtcatatacccaggaatgggcatggtttaaattagattacctaattctggaggctgcgctcttatcacagaacttcagtctgacctccccagt

SEQ ID NO: 38139 - DNA, 2626 bp, Bovine  19866880502587
  misc_feature (1)..(1): n is a, c, g, or t
naatttatttaaaagattctattgtaggacaagttattatctgttaggggtcgacatgggtcctcttgaaattttttttcacttcacttgaaaaaaaaattaaatctctgtgccatgaatctccacccgcagtcttaacatctttctacagaatgcctagtactatctgcttgtttgagtatttggcaaatcatgggtaataattctaagccttggtcagaacttttcaattagtatcccgtgtgactactgggctctgttctgctctcagctccagaattaaaccctttcttttttggcagtgcttcagaggcattttttgaacagggtcctacaagaatcggagggtcgtataaaaagctggtttatcgtgagtacacagatgcctccttctctaatcaaaaacagagaggccctgaagaggaacatcttggcatcctgggtaagtctgcacagaatacataaatactagcgtactcttgggctttcccggtggctcagcggttaagaatctgcctgccaatgcaggagatgcaggttctatctctgggttgggaagaccctctggtgaaggaagtggcaacccactccagtattcttgcttggggaatcccatggacaggggagcctggggggctacagtgcatggggccacaaagagtcagacacaacttagcaactaaatgacaacaatgtactcttcctctaaactacaaccaacttaagaacagaagcttcagaacctgaagcatgatttctacatacaaactattcatggaggagcaaacatcaataaaatgcagtagccaatcactttcccaatgtaaatttactcacagtaaatcttcaatatgaaaagccaggctgacttcaattgagtgtcttttttctttcttcaaagaggtaaggggtgactttgttttactagacagtgaagctattagcttctgcttttagttaaaggtacattcccttagaaataaaatccagctgctactaatgagacaggtgggtttgttttagagcctccttctccccaggcagaacccagagatcttttcttgcgaaggcacatgggcagaatagcaagcgcgtggattcagtctgttctcactgtctgtcctcacctattagccatgtgacctttgaaatactcaactctctgtgcctgccccctttctataaaacgagaatgatagtaacaacagtatccctacctcataaagcagtcataaggattcaatgagttaattcatataaatactcaggagaacatataggaaactctcaataaatatcattttatatattacataaaatacttgtgtactatgtatctgtttttattctttttttagtaataatattaattttggtgatggaaaatacacaacagtgttgcttttcacagccaagacaaatttaacttaccccctttgggtggtcaatgtttatggcattctcttagaggtccgtctagtcaaggctatggtttttccagtggtcatgtatggatgtgaaagttagactgtgaagaaagctgagtgtcaaagaattgatgcttttgaactgtggtgttggagaagactcttgagagtcccttggactgcaaggagatccaaccagtccattctaaaggagatcagtcctgggtgttctttggaaggactgatgctaaagctgaaactccagtactttggccacctgatgcaaagagttgactcattggaaaagaccctgatgctgtgagggattgggggcaggaggagaaggggacgacagaggatgagatggctggatggcatctccgactctatggacatgagtttgagtgaactccgggagttggttgatggaagggaggcctggcatgctgcgatttatggggtctccaagagtcggacatgactgagcgactgaactgaattgaactgaacttggctcttgggaccaaatagcacacgtctggtccacagtaaactaggatgaggagatgcaggtactgagtagttttatagatgtgtgaagcttgtgaactgacttggttaaacatggtaacacatttcattacttgaagttaactcaaaaaacccttctcatctctttccagactccccatgtcaaattgataatggactttaaaaaaaccaagctttccatttgccacaataagcatgttgcttccagaggttctttttagagtacaagacagaggaatcaattgtcttatgtattctgtaggttagatatcagggaggataataattctctctttatccccaggtcctgtcatttctgcagaggtgggagacaccatcagagtcaccttccataacaaagcagcacatcccctcagtattgagcccattggagtgagagttgataagaaaaatgagggcacatactattcaccaagtggaagtgagtacaatgtttggtaatcaagcaataatgtttataacccactgtgctggtcacctcaggaaaacggccctgaaaaaaccaaagtcaggaacttctgagcaatcttctcatataccatcctcaggcatcatgccaggaagcaagtcaatctcctctcctaccatttgcagttggtttgtagaattctgtcctatcttaatcg

SEQ ID NO: 38140 - DNA, 2013 bp, Bovine  19866880524864
  misc_feature (1)..(1): n is a, c, g, or t
nccaggattcattctcatcaaaaatcaggaagaggagaacacggtgaactatgttttctttggtgtcttttcgacatacaatcaaaggacctaccagtccactattaagatcctggagagacaaagcaagatgatgaactgtgtccacagctaaaaaactcccccagacaaggaaaagagtgggaacaagtttttgtttgagtgaggttagatcctgagttttgaatgattagggttctaactctgagcataaggaacaatatttgacttgctaaattctcttccttttttctttttttcaaatcagaatttccacaaataacttgctaaattcttgattggaaaaaaaaaatcatcatctcactcattagagttgaggtccaaagtgaacaacaaactcttgaaagggattttagatacattcctgagtagatttagctttatctttgaaattttaattaaaaaacagaacttcggttttaattagaattcccttgcattggagttggttgacagacttgtctaaaggtcatggatcctcccccaccaatgatacatttgttcttgcagccactttcagttgggattcctggttcgtttgtatttattttcttttggggttgaatgtctgtgtctgctcttggttttggtggaaagcaggccaaaaataactaaaaggccagaaaatgagctctttttttttttaatacaaatgaactggacctcaagttgagagtttttaaaagataaatactgtgtgtccattaatttgtaactaattacagaattttaaaacttcatccttaattttctggaaactaaatcttattcaatgaaacaaagaagagggtattatcatataattatacatatatatgtgtttatcccatatatatatattccatatatatatatgtacttcaatccacagtaacatgttggaaaatatcctaaatctaagtaatcataatgtaataattttttgctcttgaaaaatgcaaacttgtatagaattaaaacctaagcagtatttagaaagtttacataaaactgagattttaaagaaaaataaaaccttgcttttgtcgtaatttctaagtataaaaactggaatttgaagcttaccttaaccatgtccacggtcgaatagtaaaaccaaggtatgcactcaaagtcatttgaggtaggaccagatctttcaggaacctgccaaacgtatgttcggatctctcctgaaataggtaaatgcaatgggtttaaacagaatcttttaaatcgcatttctttacggaaaaccagaaaatgaacaaaccctaaagctatacagatattaaacagcatagtccctcgttttcactcctggctccacagcttctggctttgtgatcttagtcaatgtgtttacatggtttagacttctgtttcttcatgctcagtcaggaagatcccctggaggaggatgcaaccaactccagtgtccttgcctggatgatcccagggacagagaagcttgacaggctacagtccatatggggtcacagagagttgaacatgactgagcgcctaacacttttacttcactttgcttttcctcatgcacataaaatgggaatttagggattagacaagacggtgaagggaagcccttggtgttacgtcatctgacccacagggcaaggttgatgtcactgtcagggttggttgttagattctcagcattacaggatcaaaactttataatgggggcttctctgatgactcagcagtaaagaatttgcctgccaatgtagggaacatgggttcagtccctggtctaggaagatcccatgtgccaagggacagcaaagtccatgtgccacaaatactgagccagtgctctagagctctagagcaacaagagaaaccatcgcaatgagaagcccgtgcaccgcaactagagagtagcccctgttcactgatactagagaaagcccagcacagccaaaaataaacaagtaaactaaaaaaaaaaac

SEQ ID NO: 38141 - DNA, 1274 bp, Bovine  19866880627433
  misc_feature (1)..(1): n is a, c, g, or t
naattctgtcctatcttaatcggggtgattattgacaatactgaaagtaacttacttggattgtatcaattacacatttccagagttctatttgggtaactgctaaatttgaaaaaatattcttatagttataagattagatgtacattttagaatgttttaaaaatataaaatttgtagccaaacattatatccatagttctatagccaaccactattatatttttgtataaatccttcactcttccatctgtgcacataatattttgatatcatagtatttaaatatgaaaaagtgaaagtgttagtcattcagtcatgtctgactctgtgaccccatggactgtagccctccctgacccaagctcctctgtccatggggttttcaaggcaagaataatggagtgggaagccattcccttctccagggggtcttcctgacccagggattaaacccatgtctcctgctttgcaggtggagtgtctatagtctgagccagcagggaagccctagtatataaatatacttattgctataattttgtacccagggtttggtttcttaacattataaatattttataggtataattttaacgatacaaaatattccactatatggaagtatttaggtatttttgtaggtcaaggctagccaatgaagacactcttctgggtctttgatttcttatatcctcacatgtaggaagaggctagggagttttgtgggatctcttttgtaagggcaataaccccattcagaaaggctctactctcataacctaatcacctctcacctcaaatactatcatattggacattaggattcccatatatgaattttggagaaacataaacattcagaccatagcaggcaccaatctcagacagaggtgtagagaagacttcctgggggaaatcatacttatttgtgacctgacaccagtgaacaagtaggattctagtctaatttataaaggagcacaaaagtgggttgtcctagactaaacccagtctactccatggctcaaatgaccacatcagaaagcaaacttaacctcccccatgtgacctttcttataggtgggcctcctccttcaggctcccatgtggcacccaaaggaacattcacctatgagtggactgtccccagggaagtgggacccacctacaaggatcctgtctgtctagctaagatgtattattctgctgtggatcccaccaaagatatatttactgggcttatcgggccaagaaaatatgccggaatggaa

SEQ ID NO: 38142 - DNA, 1732 bp, Bovine  19866880714126
  misc_feature (1)..(1): n is a, c, g, or t
nccctgagcgactgaactgaactgaaacctccttaaggtcctggtaatacaaaactacccacaaaagcccttaccatgagcttcgaactttcagtgaggaggtatattaatccttccacaccatgttggacagtgtcactactcacactgagttttcctgaaaaagagtaaatattatccattactccatgttttcaaacactgcaataaaaaataattttggtaataacctcctgttcattcgccattcccaggcaaatgccttcagttatttcccaccatgtaatcttctttacaaaacacagatgcgtggcgacaataccaggtgtactatctctctcctgagcgcgcagctacttccagcctaacagaagacacaatatcgaaaacctcccctcatccattgggggaaaaatagttcagtaaaagcagatgtctgagcaacgaacaacagccaaacagttgcgtatttatggttcaccgaactattccacacacttggatgcatataaccatcatagtgtatctggcagatggtgttatgtccattacacgccaaaacccacaagctttaaaaaaaaactcagtatttagagcacgggcaggatctgcgccctgacttaagaccccttctgcttttattatgccacaacgggggagggggggggggaggataaaaaacccttgtcccaagaaccccgtcctctccagggagatagagaacggcccacacttccccgagaagattgcaccgctgtgcctccccgtttcttactggcagcgccttcgtagatcttggggttcgagccacgcctcaggaactccaccgcaattcgcccaaactctgcgaccactgcaacggaagccaggagaccctgagcgccaggcgctcccccgatcccctccccagaccgcagggaaccaccctccgccgccgcgcgccctgacccgcgctgtccactttcggcaggaaggccaggtgctccttatgctcctccgacaggtccagcagcatcttccctgggtagccaatttcactgtgcagcgacaaccccaccctcgcgacttccggggcctgagtccaagcgtaaagaggctccggagcttccgcgcccggaggtttgggttccggctgaaagccgtcctacactcaaatgccttcctaggagcagactgggagcaggagatctttcagtttgtaaatcagatgtcgcctgcggggctcagaatgccttgatctgaggaagatgaaaataagtttaaaattcgactcgcccccttgcggagcttacattaataatgttgctgctgctgctgctaagtcgcttcagtcgtgtccgactctgtgcgaccccagagacggcagcccacgaggttcccctgtccctgggattctccaggcaagaacactggagtgggttgccatttccttctcccgtgcatgaaagggaaaagtggaagtgaagtcgctcagtcgtgtccgactcttaccgaccccatggactgcagcctaccaggctcctctgtccatgggattttccaggcaagagtactggagtggggtgccattgccttctccgtacattaataatgttagtagctaacatttatgaagcactatgtcaagaactgttcttaggtttattaacttgtttagagctcacaagaaccttatgaggtaggtacccttactgtccccgatagagataagtaaactgagacaggtcaagca

SEQ ID NO: 38143 - DNA, 1259 bp, Bovine  19866880794722
  misc_feature (1)..(1): n is a, c, g, or t
nattaatccttcactattagatatttgctgctgctgctgctgctgctaagtcgcttcagtcgtgtccgactctgtgcgaccccatagaaggcagcccactagggctcctcccggtccctgggattctcaggcaagaacactggagtgggttgcccatttccttctctgatgcatgaaagtgaaaagtgaaagtgaagttgctcagttatgtctgactcttagtgaccccatggactgcagcctaccaggctcctttcattcatgggatttttccaggcaagagtactggagtggggtgccattgccttctcctattagatacttagccataccattattgttgagagttgaaaaacacaaagactatagaaatgagactggttttcgtatgtgatttgaggtactagtttctgtcccttattcatggagaattaacacagttctctctaatttcctaagtttctaatttctctaataacctgttacctcccttagcccaaaccatacctggaatatttaattataaagaattcttttatttccaatgaataattgaaaaaatgcagtgcattaaaaatatttcacaaattatttgtttgtgattatgacattcattggaactaaaagaatgagcgtagtttaaaaccaaactcaaggaattatctttttaaatgataaagtatgaggagatgttcatattgttttacaaaaggtttaatagagttagagtaaattttttccagaaatcagaacatttgcagagcagaaatgcagagaaggatggagcatgtttatcaaataatgcaaataaagttatcagtggtttgtagcttatgaaaacagcataacaaactcttccattaccgaagccatttcaaccatctgttcaaaaaccacaattccatacaagggcaggtttataaaggtaaaaagctgaaaggaagttcttggcttaaattctcagttccccagtgtttaaaccctatgtgcttggatggatgttaatggccacaggaccatctcagcaagtagacctgaacagctgcctgttttttttttttcggacttggagagtctgggaagtgtttctgtaatgaacagaagtggtacccttgagaataacttactaaatataaaatagaaaccattattaaaataagactttttttagaaacttggtattataatcaacattttcatatacagtgtatatgaccccagctgtttataaatcttttgacatgtatttggcatcttaa

SEQ ID NO: 38144 - DNA, 1453 bp, Bovine  19866880820108
  misc_feature (1)..(1): n is a, c, g, or t
nacgtgaaacagacttacccgatttaccacagattgggacttgaacccatgtggttgtgccctgcccctttctttccttcctcttacacagggacaactttgaagtcaatatgagaaaaaaagcaaagtgaaatggcttgaaaattatctcatgtatgattcagcctcagaacaatctcataaaacatcattttaaggacgtgacatttttaaagactttgccaaagtatgacatgttttagttttctgctcccacctgaaattttttacctcatttttataaactgttcatttttcaagtactttctaaaatacctggagttaagaaaaacagttatgtgtctttaactgaatttagttctatagtgtgatgccacatatccaccctcctccccctttggggggcatttttaaaaccttttgattcttgtgtgactttttatctctctttgtatattttcaattgttagattaaattgtatgatctggggaaaacattacactagtctgggaatcaggaaatgagagtttagaccataggtcttttgggataataaatcctcagtgatgatgaaggaaaatgtgtcatttttttgtgtttgttttgggacttccaaccacctcaaggatagaaatctgaaacagcaatatgtgtaatgctttccttcctctttgaagggggatattttgtgaataggtagctatttgtatatgatataatcctactgggacaacagtatcctagctatacagttgtataatggtaggatttttagtctgatgtggacttttattttttggtttgcatggtgtttaatgtgaggggtgaaagaagggtgaggtagcaaggaagttattagcaaaagaaaagaaaggattatttttaggcccatctttcttgggtgtgggcttgggtggagtgggtagggaaccacaagggttttatcatgcagattgcctgtttctctggaggattgagaaggccagcacagataactggtgcttgagcgaaatttccagactggttgattaagattacattatgggagaggttaaaactgcagttaaatcaggtattaaaactaggattggtatcataggttttttttagcgtgagtgacaccatttggggactatggttttctttttcacagaccaaagcgatgctttcctgaacctgagatgaggatcctgggcaggaggcaaaggcggagacagatcacagggcaggcctaatgctttagccactctggtcttccggcacttaggagcacaaactgagccaaggcctaaaggaggaggaaacaattatctcctgggaaaggcctctgtaatctggaacaccacagatttctcagagtgggagttgagaaaagaatgtctcccggttcttgatgaaacttttcagtctgtttcaaggacttgcacctgggaaaaagcactggtttctgga

SEQ ID NO: 38145 - DNA, 2055 bp, Bovine  19866880841189
  misc_feature (1)..(1): n is a, c, g, or t
nggttgcatggttgacgctaacctgagtgttctcaattaggtcattgtaaaaaaaagggggaaaggatattcttggactccctgatactactgtgcctcatcgcctggggaccaaaagagctagaagaactcaaaaacttttcagtctctcctaagaaaatgaagtccgccaggatgttgtaagaaagcccctgaacaaagaaggtaaggaacctaggaccagagcactcaagttcattgtcctgttactccatgtgttctgcagcacaaacgtggatgtgctgctccaaaggaactgtactaagaaatataaggaagaggctgcaggatatcctaagcttttggccaagagaatgaagaaggccaaagaaaaacatcagcaacagactgtcaagagacagaggctgggcttcccaggtggctcagtggaaaagaattcacttgccaacacaggagacatgggttcgatccctgatccaggaagatcccacatgctacaggacaactaagcctgtgcaccacaactactgagcctgtgctcttgagcccatgttctgcaactactgagcttccatgccgccagctactgaggccctgcgtgccctagagcccatgctccagaacaagagaagccaccgcaatgagaaacccttgcagcccaactagagagcagcccctgctcgctgcaactagagaaaagcccgcacagcatcaaagacccagcacagccaaaaataaaaataaataaataaaaatatttgaaaagagagagagaaagagatggaggttgtcctctctgagaacttttacttctgagtctgaatccagtcaaaaatgagatgttctaagagtcacaaataaataagatcagacatcaaaaacaaaaaaaagagagagagagagacagaagcatagcgggtataatgttgactatgttgactacgggtaaatctatgtggggaatatactgtttttatttgtactattcttattcttgcaacttttctgtcgatttgaaattatttcaaaatagtttataaaaatcatcagggataagtagacagctgtcactcttagaaaaggaataaagatccccacaggacaataccacaagtgctgtggtgcactaggaccatctgttaatatttcaaagaagtgtgagacacagacatacgatctgagatttctttccgctccatttcatgattctcttgccagggttcaaagtaaaggtcgaaggctatttatgtttagactggctaatcaattcccataggagagtgagtatgaataagggagtcttattttagtgatgggaatttctcttagatcctcaaatgtcatgagctgtgaaaacaagaaggtgaagatatacagtcctctgtaagagccttgaagctggctggttgtggcattctgactgtgtgatacttagaatcaatttctaaccatcaattagactctaaatttctacaaagtagaagtctgaaaggaataccatttctttgtacagttgcaccggtgagatcgtattcacaatatacaaattccacccagcttcagctacaggaggtgtcttgggattaacactggtaccttttctagaactaaaagcaaaacaaaggacaagaattgtaagacaagacatattattaataaaaggcaattttaaatggtaaataccagatacctaaaatattgtaactctgataccattttcatttagtattttctttggtgatttatgcgggagacccaggttcaatccctggtttgggaagatctcctggagaaagaaatggcaacccactccagtattcttgcctggaaaatcccacggacggaggaacctggtaggctatagtccatggggtcgcaaagagttggacatgactaagcgacttcactttcactttggtgatttaactacacagtagatttttagagaacattagtgtataacactatgtaggcctaacagcagttaacgttctacactcacgtggactggtcaaccaaccacttccaattcattccacaagtattcttaagtgg

SEQ ID NO: 38146 - DNA, 2073 bp, Bovine  19866880874310
  misc_feature (1)..(1): n is a, c, g, or t
naatatataattagaagtttgcccatcttttttttttttcttttctcacagaattgttaagccctaataatgcacaaaagcagctggcttgctacatacctctcactggcagttttctttcctggctttgttcccttgcctttgagtattgccttcagagttccaaataaactacttgcattcaaatcagtatttcagtcctcttctgggaacccaaattaaaacacgaaagatgttatttaattttcatgaagctctgtgaggttgatcacaccataatggtgtgatcactcacctagagtcagacatcttagagtgagaagtcaagcagaccttaggaagcatcactatgaagaaagctagttggggtaatagaatgccagctgagctatttcaaattctagaagatgatgctgtgaaagtgctgcactcaatatgccagcaaatttggaaaattcagcagtggccccaggactggaaaaggtcagttttcattctaatctcaaagaaaggcagtgccagagaatgctcaaactactacacatttgcactcatttcacatgctagcaagttaatgctcaaaattttcatagctaggcttcaacaattcatgaaccaagaacttccagatgttcaaccttgattttaaaaaggcaaaggaaccataaatcaaattgccaacatccattggaatatagaaaaagcaatagaattccagaaaaccatttatttctgcttcattgactatgctaaagcctgtgactgtgtggatcacaacaaactgtggaaaattctaaaagagatgggaataccagaccaccttatctgcctcctgaaaaacctgtatggaggtcaagaaacaacaattagaactggacatgaacaacagactggtgccaaattgggaaaggagtacatcaaggcctgatgttgaggctgaaactccaatactttggccacctgatgcgaagaactgactcattggaaaagaccctggtgctgggacagattgaaggcaggaggagaaggggatgacagaggatgagatgattggatggcatcaccaactcaatggacatgagtttgggtaaactccaggagttgatgatggacagggaggcctggtgtgcctgcagtccatggggtggcaaagagtcggacatgactgagaaactgaagtgaactgaactgaaatttggagatactaagactcacttgaggcccttaccccacagttaaagtgcattgaatggaatgctcactttaaaaaaatgcctgaaaaaaaataaaaataaataaaaataaaaaaatgcctgagagagaccctgggaaattgaacaattttctgtaatttcttaagtgttatgtgattctcctaaaactaacacacactgttaatcaactatacttcaatataaaataaaaagttttaaaaaactaattcaaatattttggaatgatagactgatttgaggataatcctaccatcataattaaatgaatttaaataatctgaacttacattcagtttccattcatttaggcctttgttatctaagattattctacatctcaaaaatactataaatatacaaagacacacatatattaaaacacatatatatgtctacatattaatatataaatgtacatatatacatatataagtttacatatataaatacatatatatatacatacacacatataatcttagaggaaatatttctgagatcaaagaattacagacatgacaatataaaatgatttggaggttgtcattattgtaaatagtccaacaaaataatattagcttttaggtaatactcaagtgtaggaaatggtgttgtgtactaaagactaaagataaatcttcaataagttcttaaattttaacttttatgaaaaagtcaaaggaaaaggacaaataaaatcattagtacactgagacaatgtcaagggaggaaaatcagttgattaaacattcagagtcttccagagcatgcatattcatctgtgggaccccaggatgagcccattgatgaacatacgtttttcttgatggtgtgttag

SEQ ID NO: 38147 - DNA, 1386 bp, Bovine  19866880885844
  misc_feature (1)..(1): n is a, c, g, or t
ntaacacctcactgttctgtctttttatcagagcactggagttacacaagggaatttagccatgacctcatttcagtcttaatatcactcttgctaaacctatcctagatgagctgactgtctgtgaaactttaagactggtgggtagtgaggggagtaggaaaggaggccagtggagaagccaagactgggagcagttcaggtagagtcttgacagagtacttgggatttctacagggatggaactgaaagtctgctaaggaataaaacaaaaagtggtaataaaatggttctgtactgtgctttgtggtagcttctgaattttctacattaactcaaaggtaagacaaaagcatttccaaaaggattgtatattcctgctgaaaccagtgctaggtgagaagtcaaagtgggattgagacctgggaaccaatcaattgttggacaccaaactgctgatcttgttcatttcaggctatttacaatccagaacttagaacaggcaaaggttataataaagtctgttgtttctactctctaatccttcattacgtgaacattcctacccgctctgctaatgattctattccaataccttccatagatatgtgagcagaactctaagaaaagccagtaaaaactaaatccaagggaaagcccaaggtgtaacaaaggttgggaatgccaattgaaatagctgtgtgccacactctttgaaaataatttgtctgttgaaaccttaaacttttcttaagtctgaggcaatatagccttcatttgcattaaagcattttcaaatagagcaggaataacgactgtggttggcccttacctggtattggaagctgtggccatggaaatgtaccgagtgcaagtctacttcattgcccattcccatcagataccagttgacttcatctcccacatgcatcgtgaggccttgcaggttcccaaacattcttccattaatagctggggaaaaatacacgtttttattgccttccaggatattttaaaccaacagctatttcacagaaaagaggtttttgaggttaatgtgctgtgctgtgctaagttgcttcagtcatgtccaactctttgcaaccctatggaccatagcctgccaggctcctctgtccataggattctccaggcgggaatactgaagtgggttgccatgccctcctccaggggatcttcatgacccagggatcaaacccaagtctcttacgtcttctacattggcaggtggattgtttaccactagtgccacttgggaaaccccatttggttaatatatggggatctttttttatgtaatagaacttatttcactacagataagggaaatgggtactttaagatcaataacaccacactgctttt

SEQ ID NO: 38148 - DNA, 591 bp, Bovine  19866880896721
  misc_feature (1)..(1): n is a, c, g, or t
ncttcctgtagtttcaagctaattccctattgttgcaactgtggtggcttttgagaatagcttgcaaagatgctacttcccatggagtgacctgcagcagcttccccttccctctgctggtcctgtgggcagaggacttactgatggaaaacagtttcagagtttcctagaggagccatgctctgcttacctttgatagtgatctctcaggcagctttgatttttcccagtctgtgaggagcacaccctcagatatagataatgaagaagggggctcacataggtgccctctgctctgttttgggcagtgacagggagcagccattcagggaatgtgctctgaatactcctaccctttccatggcaaaactataggatggccttgtctttcccatacacttttctccttcacagcaactccagattttaattttgattttgttctactctaataaaaatgtggaggcacaatacttgcacttttatttaacaaaaaggtatgtaggcaggtatgtctgcaaagcgctttacatatattgtctcatgtgacttatttcataagcttatgtttgaatccagaggggtgggggg

SEQ ID NO: 38149 - DNA, 811 bp, Bovine  19866880953878
  misc_feature (1)..(1): n is a, c, g, or t
naatgttgagcactgaaagtgggtgatgatggacatgtgggaatttattatactactctctgcgcttttatgtattatttgaacattccccatactacaaagttttttgttggtttttttttttcacttttttaaaatcactgtgaatatactgttcctattgttaacaaatccttcacacccacttcattggagttgtttcagtggagtgtgcccgatgctggtcctagcacgtctattcctcatgacccgcctgtgggtgggtgttactggtcccaagttgacatctgaaggaactaagacccaaagaaacaagccacttggccaaggactcaagacaatgaagatggggaagaacagccacaccatggaggtgtctgctacacatattgtttggtgcctttctaactattattgtacgtgagcatgtctgtttcattgtcacttgcagtattttagtgcatcctgtttttctagaaaaatgaatcagccagcccctctctgtttatccaagataacaaaacaaaacaaaaaaggcctgagaacaatattggtctgatggaggccatcctgactgtaaaaggaaacgtccctgagtcagtatcctcagtgagagacatcccttcataaaacaaaccagaaatattccaacagggttcaaataagcgtaaacatccacacagttcagtggaagctactctgaactcaacaggaattctggctgctttgggaaggcttttcccatctcatcgcagattcattccacgaactctattccctcaaaggcttgggctttaaagccttcagaaag

SEQ ID NO: 38150 - DNA, 1179 bp, Bovine  19866881044766
  misc_feature (1)..(1): n is a, c, g, or t
ntttcctctttttttttccgagttagtcattatgtgcctaaattcctgccttcacagatgtgctttctgcttggtcacttttgataaatctttcgatagcccagaaatcagatggaatcaagtagcactttctggtgctgctttaggtggaagaaatatgatttctttatagctgaaggacccagaagaaatgaatgccagaaagatgtgattttttttcataggttgttctagatctcttacaacgatgaaaactgatgttgaaatcttttacatgccagtaaaatatacattttataatgtctatttaaaaaaattattgtttcattgtaaaatatatattcactgttcatgcatttattttcattagacaggagagagtttattgtagatgatgcatttgctatgctgggctgtgcttagtcgctcagtcgtgtccagctctttgtgatcctgtggattgtgaccagaggacccactaggctcctctgtccattggattctccaggcaagcatactgaagtgggttgccattcccttcttgaggggatcttcccgacccaggtatcaaaccctggtctcctgcattgtaggcagattctttaccatctgaccccccagggaagccctgatgcatttgctaggaaaacataaaaatccatgttataggcttttccatctttacacctaggagaacagagttgcctggatgtttgcactctggtttgttgacttgattactgtttggatggacacacaggatggtaggtaggaaaatcgttggctgctgctaaaattcagggattcctgtgaagtaaatgtaggttgggttacaagtctaaaaccagttgagccgggggcatctggagaatctaagatccacctgtctgattctgggggcaccttggaagtgctgttaaggtttgaagtcgggaaagtgtgtctgaacgtacatggatcccagaattttgtgtcttatcaactaagccggctgagaaatttccttagagttattctcacccagaattggaataaagagctcagtgtgaagttgggatagtgcaacttcttggtttaatactttacagatttttggaaccgaatgcaccctgaagtgaaaagctgcttttttttttttgctgaccttgttggacggctaatactgtttctgggaaataa

SEQ ID NO: 38151 - DNA, 1655 bp, Bovine  19866881068291
  misc_feature (1)..(1): n is a, c, g, or t
ntgttaacttttttgggtttttttggcgacactgcatggcatgcagaacttgcctgatcatggattgaacctgtgctccctgcagtggaagcacggagtcttaaccactggaccaccatgtcaggcccttattaacttttttttaatgtaattagcttaaaagaagtattaccctttttgttagacactgtctctttgcacccttttgaaagttaaaatattaggaaatatttagtaaagatttgttcattaagaagcaccaaggctgaaacatttcccaggggaatacattctcagactttcctcccattcccaagaaaatgtataactaattttgagacacagcagaaagttggagactgcttgctttttgtgggatagatgaagaaaaccttgttttattgtactttgtttataataaatttcttttacattttagataaatacctgtagtcattatggcttaatcaatccatgggttaatgtcttaatctcatccgaatccttagtcgacaaaaattatatggaagacctttcaaaattacaggtaaataaagatgcttctttttcttatcaatttgtatagtataatatagtataggagttaaatttggtacgctccccggttgtcctgttaactgagagtgtatagtttgggtgacagaatctacagtgaggcatcctcagcagccctgcagggaattcctgctgcttctgcctgaaactgctgacgggaaggctggttttgttgctggtgggtgggtgaggagcttcaccgagtcctgtgacagtcttgcctcattttcaggatgtgcttgaaaatgctttgtgaaatgaaagtatggcaaatgcttcgtggtgttttcattgtgattcactttttttttttaatttaattaattaatttttaaaattttagcgttcactcatacagtttaggcctctagcccaagccaagcactcctacctatcttataggaaatagattaaagtggccagctcatctggttccttaaaggatttttttccccaaatatttattaatttatatattgggctacatggatcttagttgcagcacgtggtatcttcagtcttcttgtggcatgtgggatctagttccctaaccagggttcgaactcaggctcctgcactgggagcttggagcttagccactggaccaccagggaagtcccagatttttttttgtaattaattaatttattttaattggaggagagtcacttcacaaccctgtggcggcccctgccacacattgacacagatcagccacgggcacacatgtgccccagactttttttaaagtaagaaatatgatcaagagaatgtagcccatgctgcaagaattctgacctcgacagtgttttgactgaaagtgagaaatgaagtccacatctgacttggtgggtggggctgggctgcaagtgtacgggattgtatttgatggagtcagtggcctgaggactgaacataatgctcacatctgttgtgtttggtctgcccagtgtacctgctaacatgtgaaagttgagatttcaaatgaagaagtgttgagtttcaagtttctctttgaaaaactcagcagcactttgattcagctgtaatcctgggccctcactgcctgaggcctgtgg

SEQ ID NO: 38152 - DNA, 1003 bp, Bovine  19866881136216
  misc_feature (1)..(1): n is a, c, g, or t
ntatgttaaagtcgtgcctcatttcctcgggcaaggaaaaactctccagcatcagacacacccatgaaagggtggcttggtcatgtttaacagcgtccttaggctagcttgaaaaccctcatggcctctgaacacatcatggtgctttctataaggtgttttttaaaaaacattatttcaaatcctggtcgaatataacaaactgtgtccccctctccacccacagcaattaacggaagaatgtttgcaaataaccaaggcctggtatttcacgtggggagtgaagtgaattggtatctgattggcataggggatgagtctggcctgcacacagttcactttcacggccacagctttgtcttcacggtaagaggcctgggcagctcctcttaattactaaagtaccttgttattggggtagcatagaaagataacaggataagaaaggaaatgaccacaccagaacgcaagttcattacatacaatctgcagtatgtctgatgcaatagttatacatttagctctttgtatcctacagacattcaatgaatgcttctgaatacatgaattgcacttcttcctctattctgatgtttctcattaagtaaataaaacatctataatcatcttaattttacccctctttcccaacttatctttttaattttcaaactctcagtcacataaaataaaaataccttgaacacgcctatatatttttgctgcatttgctttctctctgtttttttttttttttttctgaatccaacggaaagtaaattgcaaacatcacgactattcactcctaaatactaaagcaggtgtatcctaagaatgaagacaatcctgcctcaaccacaataatattatcataccctttaaattaacattcattgataatataatctaacatacagtccattcaaatatcactagttggccccaaaatgctagttgtaatggtttttcttttaatcccagatctaaccatttatacttagca

SEQ ID NO: 38153 - DNA, 1483 bp, Bovine  19866881174053
  misc_feature (1)..(1): n is a, c, g, or t
ntttttaaaaacattgcttttgtttgctcaaaggaagcatttgtagaaaacatgaattttcatttaaccttttgcccctccttccttgcaaacatataacctttattatatcacctttgaattctgattttaatttaatacataaggaaaccctagtaaatgatgtcaagctcaaaagatcagtcacaagtaattcaaacatgttagcccaaaaggcaataaataaaaattatgatatatcagtcatcctgttttccccataaatcttaaaaataaaaattggtcttagcttctcatttttaatgtgatttactcctttgagttctgtaaaacttccaaagatattaacatctctatgtacaaagaagcagtgcagcagtacatgtgttcttatacatttttcattcttagagaaaaaattatgaaacatttgctttgaacctgttcttcaattataaaaggaagctaattggaaagattcataaatattccttaagtggtcaaactattttttttatctgaaactaacataaaattctaagttgcactgagctggttggaaaggagaagaaataactctggcctgcctaagctttgtcagttaggaagcaggtaggaactggcaactccaagaagggaagaattaagtttaatatatcttctcacacgccgtcaatttacaacagctcatcatggaggtttagactggcccatctccctagaagacagaaaaaattaattaattacatcatttgtgtgtgtgtacactttccccctcccatcacccctaggagtcttaatttgtttgtgtgctcaatcgtgtctgactctttgtgaccccatggactgtagcccaccaggctcctctctccatgggatttcccaggcaagaatactggagtgtgataccatttccttctccagggatcttcccgactcagggattgaacctacttcttctggatttcctgcactggctgggggattctttaccattgtaccacctgagaagccccccttagtcttgattacttctgcccttactggtcacttactgaatgttttctatactcttctgactttggttcagatctttgtcacttacctatgtttaggctagaaatgtggaagcttcactttattattaaaattcatttttaatgagtggaactgagggctcaagtgatgtatctgaagccattgttaataactagagaagccaggaattaataagtagagaaccctaggaggtggaatccagaaactgtgttccttttcttgaacttaggctgctacacagatttccatcctcttaaggaaataacagtacagtgtactgagccttctagttactgacatggatgcattttttctttttcctgctgtgccacgtggcatgtgagatcttagtttatcaaccaagaattgaaccctggacccctgctgtggcacaaagtcttaaccactcgaccaccaaagaagt

SEQ ID NO: 38154 - DNA, 1359 bp, Bovine  19866881217246
  misc_feature (1)..(1): n is a, c, g, or t
naataagaataatgtatacccatcaccagagtcaacattatgaaatttggcataccttttaagctattttttaaagatacagtgttagcagcaaatggtcattgggttcatttgtcaccattaacttgcatttttaagtatcagtattaaaacacatttatcaccattaaaatacactttcaccattaaaatacatctttgctgctgctgctaagtcgcttcagtcgtgttcgactccgtgcgaccccatagacggcaggcccaccaggctcccccgttcctgggattctccaggcaagaacactggagtgggttgccatttcctcctccaatgcatgaaagtgaaaagtgaaagtgaagtcgctcagtcgtgtccgactcttagcgaccccttggactgcagcccaccaggctcctccgtccacgggattttccaggcaagagtactggagtggggtgccattgccttctccgaaaatacatctttaaatataatgaatatgggtttgagtaacaaattttaatttggtgttaaatgtttaattaacattattaaaagtgatgaccttcatatagatcatcttccattataaaaatcttcaaggagaacctgttttttttgtgtgatgaactttgcttgaaataaggggcttttcaactgaaacaaagaaaacctttaagaaagaaaactgtaaagaaaacctgtaagttacatagagcttttttgcacatgaatgatgtgccgagcactgtaagaagagctttccaggcaccactcgttaaacagccctatgaagtattcttattgtctttgtcaacagattaggatgctgagtctgagaaagatgaatgtaattatctgtccagagtcatccaacaagtattaggtggagtcatattaagattgtatttgatatataaaataaatatttttttgaaggattaaaaaagcctttaatttttacctctaataatcagaaatggaatagtaaacagaaatttttatgcagtcattctttggatgaaagaactcctgcataaacagacaaaaagactgaaccatgatgggagatgtaacgaccagaaggggttaaaagaaacccacacagttcctcaggaccaagtgggaaggaataaggcagcatcccaaaaaacaaacaaaatcccaggaattagagatttattagtgtccagagtttcaagttcatattttccagtttttgtatataacaaattaaagaaatatttcatcttattggctttattttttaattgataatttaggtttggtctataaagaagaaaaagcaatgacttacgtgtcaaccgaaataagcttcttttccccgtagtcagagg

SEQ ID NO: 38155 - DNA, 1256 bp, Bovine  19866881341718
  misc_feature (1)..(1): n is a, c, g, or t
nactgcgtgttgtatttactgagtaaaatgtggtccacggtttcttttctgaaaatctcagtctccatgaggatttatattaaaataaaacaatgggtactcagagctcagagtcacaacctgaataaaggccagctttgcggggcaagggtcttgggggcaaaagttggagatgttgtgatggtggacggtttcaccaaacccaaaatgacctccaagagctggcagaaggctatggacaaggactcacaaggaggcattgagagcaaactgccgcccctcagggagcaaactgtgagcaggaaacttgcctgtcctttggcagttgcacagcaggacacaagagaagagatagtcagatttcctccactggtagatgcaaacacattctctgaattacaaaaaagacaacaaagccagaaaaaaactactgccacaactaggaaaaaagaaaagctcattaaaaatacatatatgccccaagtccctctccctccaatttcaagagtgggctattcacacccatctttttactatgcaactcccagtgctgactttttactcagatcttcctttgcatctttctcagagcatagtgggaggactccaaggcagaacgccatctactgcttagctgtggccaggtaagcttttctcttcaaacaaaggtgaactttaattgggcagctctagggaacaatcttgtggttcagatggaaaagagtctgcctgcaatgcaggagatctgagtttgatccctaggttgggaagctcctctggaggagggcatggcaatccactccagtatgcatgcctggagaatcccatgggcagagaagcctggtgggttacagtccatggggtcccacagagtaggacacgactgagtggctaatacacacacacacacagggaacaaatggtccatgaggccctaacatgccatatggtgtaatacaggttgttccaatgcatcagtccccagcttcaaggtcctcagcctaacctcatattcaggacaaaatgaactgattttattggcccatctgtgtagtattctactcaccaaattttcaggaagagaagagttgtatcaatgaacaagttcccttgctgctgctgctgcattttctttgaactaaaaggaattgctaattataattaaaggggagaagggggaaacttgcaatctgggagaatcaaaagtgtcaatggaagcctaaatggtagtggaaagttggaagggaagaaaagaa

SEQ ID NO: 38156 - DNA, 1403 bp, Bovine  19866881458037
  misc_feature (1)..(1): n is a, c, g, or t
ntcagtactgtccagtagggaagtggaaaataaaattatagtgtgtcctcccatagggtgtcttaaatgtcctcatgtggcagctggcctctcccagacagagtgatcagagagagaagctgactagacagagggagagggcatctgagtcagaagttgtgtcttttataacaatctcagaagtgatacactatcatttctaccatatcctgttggtcatattgttgttgtttagtcgctaagttgtgtctgactcttcgcaaccccatggactgtggcgcaccaggctcctctgtccatgggattttccgggcaagaatactagagtgggttggcatttccttctccaggggatcatatacaccaagtctagttgaatgtggaagggggctatacaagattgtgactttggggaagtagataccatttgggcccatcttggagtctgataccacattaactatagtacaaattcagaaaactgcataaaacaaaatttaataactatgaataacctaaaaagtattaggagatattccatacttcctccctataccctttctcagtcatcattctctacattccccataaacaatcactattcagatttttagttgtataaagtggcaagataaaatctagttcctgatacttcattatggttagaaacagaagttttttttggttctttttaattactcctaatttctcttcatagaggcacatttttgacatatctttattgacttcatgtatgtttgagaaaaaactgctgaaggatgtgtcactgattcattctttcaggagcgtctgcagtggagagttcaaagaaaactgatgttgaagataaaccaagaacgacactgatcatctgtccactttctgtattaagcaactggatggtaagtctttacagccctttaaaaatataatttatatttgtcttacactataagagagtcattcattgggagaaatatggttggtcagcactttatagttaaattcaaataattgttaattgacttggggttatttttactgaattgaagtaatttttctgtgaaaatgtatagtagagaaagaaacattgtcagttgctattgtaagatttgacttgtacttccgcctcttttctttctgtctcctgaagtaggaaaggtgtataatttaataccacatcatatttatgaactgttgaaatctctttcttaagcacaccactaatgataacttgtttattttaacaccttattacaaacatttaatgagctgttatgtgctcagtttttcctaaactcttttcatagattttctcaatgaatcctcacaactagtattctcattttccaagtgacgaattaaaacacagagaaattaaataactgccgaggtcatccagc

SEQ ID NO: 38157 - DNA, 1063 bp, Bovine  19866881961714
  misc_feature (1)..(1): n is a, c, g, or t
nagttctttctggcatctttttgctgtaagatagataaagattcgtgtagaaaattggatgaggttggcagaggtagctacactagtgccattgggagatagagaggcaaaaaggtgtgttatgtattgttatgtattgttatgtccctttgatagggaaaggacaaaaagtattactttataataaatggctattttttcaaaaaattctctaatgtgggtataatattcaaagataagtaaaacgtacatttacaaattatattttaaaattaccgtaattctttaagattgtaaaaaatgttaagtcaaaggtgcttgtgtatttttaaatcattattttgattgaaatctagtttctcccacaattgagttagtagacaagctgtactatacccactccagtattcttccctgggaaatcccacagacagaggagcctggcggggtagggtcacatagagccagacaagactgagcaaccaacacacactataaactgagaactactttattatgtagctaaaacagaacttcatctccatgagttaagtaggtattgactaacactgtttacttaaatgtccaaatctgtgcaaacagttacgcttttgaaatactagtttcattttaatgttaatccatgtttataatttaaaagatatttttgggcatcaggaatgaatctatcatataacttattttcagagacaaagccccagaacttactgttgcttctctgcttgtcttataggtgattttacagcgagatgctgctctccatagggatgctcatgctgtcggccacacaagtctataccatcttgactgtccagctctttgcattcttaaacctcctgcctgtagaagcagacattttagcagtaagtaaatttaaacagtaaaatttattcatgtctaaaaacatcccttaaagaaagttttttttttaagttctaaatgatagagtgaataatgaaataatgaaatcttaaaaagtgtttacctacaaacatgtaagttcgtacacatatttgttacttgcgagtgtaagtgctcgttt

SEQ ID NO: 38158 - DNA, 1595 bp, Bovine  19866880418360
  misc_feature (1)..(1): n is a, c, g, or t
ngtagtgcagcaaggtctcgcccactagcagaggtgggaagtgggtacagagggctctgacaagcagggaggacttcacaggggaggtgattgtttgaattccaagggaaggggagggagcagtgttctgctcaggaaaggcctgtataaggacctggagacaaggacagaagcttagggtgtgcaaagaagagtgagtaggccttggccgtggcacagcaggcttagggctttctcctaatcgcgatccaggtcaggacaacccacgggcatctggactgtgctcagatactgtcttggctgcagaggctgtttgggggtcagcaaacactgcctgtcacttttgcaggctcaggatccacaggacctttcccattgagttaaactcctgagaccctttgtttctactcctctctggactctcgtgggagtcagtgcttccatccccctgtctccagactaaattgcttcaaccaagcctatgccaagagggaactgtatttcacaaaccccagaatgacagatgtcgtctttgtcatgtcactgctcaggtttccatccgtccctctgattatctaactgcccaggataaataagctcatagctaccattcagagagcacactccagggaaggtaccaggcaaatcatccacctcttcccatttaactctccagcagtccaaggtagatgtcattgtcccccagttcaccagtaaagagtatgaggctcagaataacttggccacagtcacactggtaggaagtgcgtggcagaggcactatgcaaaccaaagtgtttcctaaacctctactcttcaaagggactttgcagtccttggcccagacttgtcactgtataggtgagcacacggaggagaccgagaaggggcagtgacaaggccaaggtcacaccactccctctggcgagacgcccacccatctctgactcgaactcccagggcctcccgcctccatcctgctgcctccttgacctaccagtggacaaggaaccagcttctcactgtcctcaggagacttcaacaggagaccagggtgtccaggccccatgcaggaaagctgtgaatataaattccatctctgagccagggtgcacaggccactctacccgggagcccttgacttgggctccgggggccgtgggaaggagaaacgtgcgtgtggagaatttgcagcctgtagctgcactagagaaatgtgcaatgatatgaataaatttgaataataatgagggcaatgactgaattaataataccggctgctcacctgacccacctctcccccaggatatcagcacctgccaccctaatcccaggaaatatgggtgagccttttcctttccccttagaagacatagatgggctgtcagatcaggagagttggggagctgctgttttaacttcctgacaccctgaagacccaaaaaactggatttacacacttaaccgagagaggctgcctggtcgtagtaaatcatatgcgggccatcagtccactcctagctctgcccctttctcacttggtctccttgatatgcaacgaccaatgtggatgccaaatgtccagggagattcag

SEQ ID NO: 38159 - DNA, 718 bp, Bovine  19866880578020
  misc_feature (1)..(1): n is a, c, g, or t
ngagacgtgaaggagtggggaggcaagggaacacggcactcaggcacaagcgcaaagacagtgggttcaggaacaatcggagtggtcagaggaaaaacagcttgatgacttggtgtgggcatgggatggaaggctgtaggcatatggcgatgtgagtgcacgctcgtcccaccctcaccaccccagcctggctggctcccacagcccgctcagcactggctgctctcctgtcctccagcccgtgtctcgggccaatgccactaattgttttctccactggccaactggtgggaatgagaggccataaaggaagcaaacagcacatgccgtgcatccagcaattttactgctggcagtttgatgcagaaaaaataaaacagggacagagctgcagggtcagggaagggaagtctattttcaggtgattttcccttgtcatgtggagcagtcaggactcctctttgtgggcaaatctactgaagcaaggcacaggcattgtcaccatagtccaaacatttatgatgcaagacagggcaggctgggcctggagagaggtagtgacagcatggcagagtctcagcgttggaagggacagtgaaggtcgctctgcccaccatttctcaatcagaagttcccagtctggtatgcccagcgtgtggtcagcctggctcatcctgaaccctcctgggttgcggggctctctgcctcctgaagcagc

SEQ ID NO: 38160 - DNA, 1921 bp, Bovine  19866880591108
  misc_feature (1)..(1): n is a, c, g, or t
nggattttccaggcaagagtactagagtggggtgccagtgccttctccgataggtctctgcagagctgtagaattcagccttctctagtgcatcaccccagccactccaccctcctgtgcagcattcactgaccaggtatcttgccacagcagcggctccactccggccccctttccccctcccacccacaggtcactgtccctctcactgccactgaagcagctagctgtctgccaaggaggggtggggttgactgcaagcaccgtccttctcttccaaatccagagaacttgggaatatctcaggttcaacttgaaaaagaatgctgtgccccctgcgcccccctcttcccaaccagtggccaggctcctactgcccagtgtccaggagaggcggagagcttcttaccatgtttgagtcctttttagtccaggtgagggtgaggggggggattcccaacccagacacaggtgagggtcacatcagagccaatgtctgtggtcgtgggtttagggtcaactacaatccgaggggcaactgaggtagaaagggagaaacagatcatcagggtcctgatctcatcggggcggggaggggaggggcaattccaatcttcctcctgccttgtctcctcagccccacagccttccccatcccaccccaggtcccttaaagcccttgcccctgcagctactcacagtggacattgactaaagtgctgacattggtgctccccactttgttgtgaacctcacaggacacgggctccgtgaagaaggaataatcgacattggtttcatagcgactctcatgggcatcttcaatcaggaagccccccttggcccacctggaggaggcaacacagagcagggtcaggccttggagctctctcccccacatccagaggcctgtcttccccagtcccccactccggatctcaagggcctcccagtatccctccccagggtgtgcccctgccccgcccctcccctcctacctgtagcccaggatctccgggttggccgtggcctgacacgtaaagatgacgcgctcaccctcctgcaccgtctggggctcaatagacagggtcactgtaggagggtctgcaaagcagaggacggcaggtcagggtcttttctgtccctcaaatttctttttctctgtctagcacatacactgagacctcacccatgtggtgatctgggaatttgagtttgcagtgtaccagctccagtaaataagctttcctcacctttattccaggagcctctaggggccggctagggtgaggaccaaggatgataccaaagggacaaattaatcagacggtgtagtgaccaactgtgaccactaggcgtcagtgtgggttcgctaggctcactagccaggatgggggtggggcgtttctccagttgctgcccacacttccactcttctgggcagtgggaatttattgagcacttacccagtagcatactccatgtgagatgctcttacactatatctcacttaacgctcacaaccctgagaagcaggtataggtcatcacaatcccttatctgaaacccctggaatgagatgtgtttcagaatttggaatttttcaaatgttagaaaggttatggtgaccacagaccatttattgtgtaagacccccagaagaatctgggcaacatcccatagaaacacattaatatatctgctgtgaaatatatggctattccaactgagttattaaataaaagactacaaaaagcttccgttcaggttttgccacccaatcacttttggtttggaatttccgataaggagctgtaggcctgcattttattttctgcacatattcagaattagaaactacggctcagagagattacgtcattgcccaaagtcacacggtttaaacccgggaacgccggct

SEQ ID NO: 38161 - DNA, 811 bp, Bovine  19866880605110
  misc_feature (1)..(1): n is a, c, g, or t
ntttgcatgtaacatcagtgtgacttagagcaaatttcaagccctctatgtcccagcgtctgtgccaggaaatcaaaaacgcggccctgcaaattcagtctaatgatggggacaacaatgaacatatgatgtgaccgaacccatgctagagggatagttatctcagctagagaaactgcaggccttcctcttggatccagaaggtccagcatgaatgtggggggaggaccctcagctgcccttcgcttccccagctttcccatcccagcttccccatctgtgtactcgcgtgagatcataagtcacagtaccataaaccactccagagtgtgtaataagtgaattatttaccaatgaccctggctaaatgttcagagggataaatgattaagccgcagatctgtcaaaaagttctcataaataagtaattctgtgccgctttaatgggctttgtaaattactcattcatgccatttcgggatcactctgtggggtaaattcctcacacgtactgatttactgcttcagtctggataggatgggacaaattctgctagccagctgggtagatccccaggtgccaggccacctggcagagtccccagagatgaggacatcttccggtgttacctcacaggaatgtggggtcagagataggctagacttcttggctacctggagtttcaggataactgcagtgcccagggttcttttcctacaaacattcgcccagcgagaatgtccttaacacccaccatgtcccaggctctgtgccaggaaaccaaaaatgtagaagtgtgccctgcaagct

SEQ ID NO: 38162 - DNA, 1003 bp, Bovine  19866880647085
  misc_feature (1)..(1): n is a, c, g, or t
ntaaagaggaggataaacagaatttaggagggcaccctagactacagtttagtgacttagggttccttaagtagtttgagtaatcacttcttcctcttttctaggaaacagttctaaatccaaacatctcaccctctagcttcttattatgtgtttcaaaaggttgataaagagtagaaaactcaaatacaggtgttgatacaccagaaataggaggggaaaaagagttgggctcaccttgtttttccagttctgccttccctgcttcaaggactcctgccagaaaccgaggacaggtgtcactgagaagcctctgcacaatttctttaataactcggtagtggttgagcaccttacagacattctcagctcgacttcctgcttctggagatgacttccaggaattttcttggaaactcaggaaatctaatccttgatatgctccatttaagaaggtttccaaagccttcccagaatgaattaaacatccaaatgatacctggagctcaaaggggtctgcgggtagataaggaagagagaatcaatatggaaagaattacagggaaggaaagtaaacaacctagagatttaaaggaaggaaaacttgctgggggatcacatggaaggccagaggtgggacaggaaaagggaagtttgtgggaagaaaattttgagataataaaggtattttgaaataattaaggggaagggctagacggaagtctgttagagaaataaaggacattaaccggaagagcagactggggagtggttaggtacaagcagaaccttgtaaacatggaagaaaggagggcagaatcttggttgggaaaggctgactctgaggccagggtgctgggcagaagatcaagaacagacagttattcaaggtctagaacctgatggtatgtttagaggtgtgagagctatgtgtattgggtgggagaatagagtgggagtggtggtaagggtgcagcagaggagggacaggcccaaaaggaga

SEQ ID NO: 38163 - DNA, 2218 bp, Bovine  19866880651230
  misc_feature (1)..(1): n is a, c, g, or t
nttttttaattttattttttaactttacatactgtgttggttttgccatatatcaaaatgaatttaaagaaagttgtgagaggagaaatagaaacatcttggggagagcatgagactaaccttgcctctgcagttctgccttccctgcatcgaggacacccagaagatatcgaggacaggtttctgagagaagtctctcaatgatatcagagatgccttgatactgagtcgtgagtgcacaaaacttctgccccctgctaccgctgtctggtgcaggcacacaagaatgattctggatactcacaaaatccagtcctcctaaagctcctctcaaagagctttctatggcctccccagaatgcagctcacagcctgctgtgacctggatcacaaaggggtctgtgtaaaagaaaactgagacaagttattaaaaagcaaacaggaaagaaagagacgagaaaaaggcataggattttttactttagtggcaacaagttgagaggtgaaattattgacataaaaccaattacagtattcaggacttttcagaaagagcactggggagaggtatgcatattatcagtcatggggttaggctgttttaaggatgtagagggggcaagaggggagaggggcaatgtgtgatggagtcagaagtgcagcattccacggtgtagggaatggttacgtgtagagaagggatcaggcagaagatgcttgacaacatcaattggaggagtaggaagtcaccttaagttcactcaagcacagagtaggaaaaggagattcttccttgaggttttagagaagcaagttacatagatgcaaacaagaaataaccacaagagtggtcatgtacacagaagagagcaagaaacaggaagaatctcagatactggatggaggtatggagtcggggttgaaggctactctggacaagtgtgtacatgcagttggataaagaggagggaaagggaccatcatcagagggagcagtagcctgacacaagagaaagaaaagtcattgagagtctttccagatcagaggactatactcacattccaactggaactcattgactcgatcctgcacttcccgagtgaatccaatgaagtaggctcggaagaggtccaccagctcagtcacctcatcatcactaaagtttcccttggaccagggcttcaggaaaatggcagtgcccgagtcactctcccagccatgaatctgcaagtcatccaaccagcctgagccttgattttgagcccatgtgctattgacaaaggttgaaatctgcatgagatggaaggaggttggcccctggaacactgtagtggtggaaagataagaagaatgagggggaaatgtggaatcaggatagtatgaaaaagaacccagagtctgaacaacaatacagaacttgaaatggtcccctgtccccaaagcttctggctccatccccagcctccagaataggggaaagggctggagacagcagagcccagacccttagtgataggtgcagcatgcttttatccagaacccctatacctgtgctgggagcagccagagttattcttaccatcctcattgtcaccacctgggaggataactccaagtaacagaaatggtagaagcagcatttcactgggaagtagaacttctgactctcagagctggtatttgatctctaatttcagcattttttttttcagtactctaaattgacttcctctcttccccaactgacaaatctttgacccacattgcacatctcagaaaaactgtgcctcccacagctctgaactcccactccatctcatttccattctttggtcttcatctcttttatatttactaccctggaaaagctcccttgtgatgctgaagagttatttcaccttcctcatcctttattgccacatctatttaataagaaggtaatactaaacaattgctcaacttccagtctcttttaatctagaagtattcctttggtttgtccacctatctcattctctcatacagcaaatataacactgtcagtgatgtagcagtaacagagaggtagtgcagggagtcttggagagaataccaaatgggtcagtatgagtggccacagtaccttggtgtacattcacagagagacctcctctgagaacgaagacacaccatagaaagggagattctgagaaccctagccccatttcagggagtcag

SEQ ID NO: 38164 - DNA, 3916 bp, Bovine  19866880661080
  misc_feature (1)..(1): n is a, c, g, or t
ngagaagcctctctggttaaaaaggaaatcaagctattccaatacttcagtgggaatgctcactatctccagattccctccaaccctcaagatatttgccttttgaggttgagagttgctagttgccaattccctcctccccccgcttcacattcccttcaaacaaagcttttcagtcaggtttttgaccctgatgaagatttttaactggaatctttttttttgctttccccccttcctctctaattctgaaggatcttttgtcttttgagcaaaagaactgagagactgggagggctgctgggttttttttttttttttcctcttgcaagtaattgggaaagagttttttttttttaaaaaaaaaaaaaagaagaagaagagaaggtggggggggaaaacaatataaagctattttctttcttaaaataaattattttaatagaaacaaaagagaaagatcttgaaaagtgtgaaaagaactttgaagagaaaaggaccctggaacggtaacagagaaaaggagggagggctggagagaaacatgagaaagagcttaaaagggacttaagcaatgcatgcgcagaaagggggaaggaggaatatgacgagtgattggaggtgctcatttcaggactgtgtactcgctggacagtttctccaactcataggaaacagaaagagccagaaggccactctgaggccataaagagaactctcctctccttgcatactgcgcacttagcagtgcctagcatgtagtaaatgctcaataaatgcagggctgaacaaaacaaattggttatgggtgaccgttttttgttgcttgtgtctgtgctttcttcttcctccaggactcaatgaaaggttgactgggggaaaaaagggccagcctcacatgacagagatcaggttgcgccaagctcataagcagaggtcacgttttgtcaacctctccttgtcttaccctactaccttccctgggcttagtcctcaccctcttctggctgggcgtcaggcatccaatgaaacgctatcagctctccattactcgcatataggcttctcactctggggattatccatggaaaaatcttaatcccaggcaggttgattccttttgccacccagaatgtctcggtcgccagtcttggtgtgagcagggaattagaaactcatttaaatagccatccaagtcaactctaataagcaaagtaaatctgattattatcatcatgagcaccaccatgatgcatcccaaagttaaagaaaaaaaaaagaccaaaaagaaacggtggctgagtgttatctctgtcaaggctctccctctactgggtcaattgggagttaactgtatttacagacagactttaatctgggggactcagctctccacagcctctgctccatcatcatagcacctctaaaaggaagattacagacaacttatattatttgttacttaaaatagtagctgacatttcagtagctgctagcttattgtgtgccaggcactatgttatacgttttatatattttaacttatttcatttattcattacaaaaaagacctgaggcagcacacacagggtcaattgtgtaaacaataaactggaacttccctggtggtccagtggctaagactcagcattcccaatgcagggggcccaggtttgatccctggtcagggaactagatcccacatgccgcaactaagagttcctacactacaactaagatccggtacagccaaataataaataaatattaaaaaaaaaaaaaaaaaaaacagtaaacgaagaggtgacatgagacactgtgcatagatggtggtacttaggcaaacagggaaagagagtaagcactggagaaataaactgaggggcaggtagagttatatattaaatatttgccacaagatcctcagcccctcatcagagatgaactgcaagattagccttgagcttccaagcagcatgtgcagaggaaaaaattcaaaattagtgatgcaatgtacagcacccataaaataaacactaaccggtaccttaggaaagtgccactacagaactctcttctgtggatccccacacaaggctcactgtgatgtgcagaaccatgttctgggtaacgtccctaccatgaataaaataaggaattgcacagggctgccccttagaacgttcctcagtgcgggctgatggcacagtgccagaggctcagctcagtaaaagcagttcttcgaggagcccaaaccgttcagtctcggtttgccactctctgacgggctggcttggtctaaggataaaattgagagtatctggaggaatggactggaggtgggtgataacagtgggtggcaggctgggggaaggctgtcgatataaaacaggactcttgcaacttagctattttggccttcagttcagaactgcattccgagatgagaggaaggaaagaacatcacagtcttctctgatatccaggatttcttgggaggcatctgaaggtagggggaggcagaactcaaaagattatttccctgaggagacggggtaaagggacagccagttgttgtgatgtctagggtgggagtgaggtgaatgagtgagactcctttaaaatacaaaaaaagtactttggcattttctttcttttttatttctgccgagtatacctaaccctcaaaatatcagcttagcttttggccatcttgatgcttgggaagattaagcctgctgggaaaaaaaatcctaaggagcattcagagaggaattagaggtagaattaaacacagttaaacagccccagcaaagctcccagacttcccccctctgaaggaagagcccaggcactccagcatttcagagacccacagggtgacagtcagcacagaggtcagcctgccggtgacatctgcatcccttaacctcgaaagtcctccaagggaataaagtctgcaacttaattgtccatctagcaatttagcgtccacaagttcttctatctgaccaaagcggttttttggctgtttcccctacaaagactgtatttttcctaatagtggaggacagaaatcttgtccagccttggtccagggagctggcactggagtgagaggggcagtccccagttaaagggaataaggttggaaggagggtcggggctccctagctgctgcttggacatcctcttggtgagtgaggacaaggataaaggcaggggaggagaggtagagcaagctggcatctcaggccaagtcccccgacaatgggcaggagtctggaacctgcagcctgttacttaattatctctgaatggtttttgttcctggctttaaacatttacccctattgggttttcacggcttcacaagctctctatctccttttctttgccgttgccatggcaacgacaccaggcgtacaactgctctctgattttaaataaaagttgaggtttctctctctctctcttccctccccgcccctccctccttctctcttaggatggatgaggtttctctcatcccctcccttcctttcaccttcctctctgccctgctctccccccaccagactaggtttccttatcatcacctcattctctcatttcctccttccacctgactctcctctaagccctctcccctgtcattgggcttcctagatggccctaatcccctggttgccatgacagcaagacaaggccctttaggagggatgggggcagaggttgaaggataagggaagttggctggggagggggtggtgtgtggtggggaggtgatttattggtagtcccagaagcagtgttacccaagattctctggggaccaccaccttcctctctggacctcaactcttctagcaattaatgggcaatagattccttatctattccccaccccaccccc

SEQ ID NO: 38165 - DNA, 1189 bp, Bovine  19866880717861
  misc_feature (1)..(1): n is a, c, g, or t
ntatttgaaattttgaaaaaaaaaaagtattttgtacatatatacagcagaataatatgggaaacttttaaaaagagtgctgaatgaattacattaataaagaacacatacaatacttctgttgaaattagagttgaactttaatagctacagaaatgcaaattaagataagatctcattttatacaatttaatgtgcaaaattaaaaagctgcagcagcccagtgtttgcagggatctgaaataattgagttgaccaaaatatttttttggtcataataatgtcatggaaagcctgaaagaacattttggccaacccagaaagtgtaaattccaatgaactgatggtgatgaggtaattctggagagtttgctgtagtaacttgtctaatgacattcatattgaccctgaaatcctacttctgattatgagtaatggaaaatatttacccagctccaagaggaaacatatgtaggagatgtttatctcagagtttttatggtagtgaggtgttggaagcatattagatgttcatctctattacgggattctatgtagcaagtagagacaacagactcaacacagagtagtacggggaagatctttaaaagagcgctgaatgaaataatattgatagggtgaagtatatacagtgtaataccatttgtggaaattaaagttgtacatatcaaatatagtacattttataagaatacctaacaggataacatatttatatattagaatgtggggaaagagaaggctatggggataaacagatgaatcaaatatttcacagagaaagactgctggaccaaatgatgtccatgaggccataatggaggagaatgattaactcaacaatctgtacttaagatttcaaaggcaaaacacagcacagaaaaataaacattggaaaatatttaatgaaagagttaggatgatgggttacaccatgagtagtttcttctcagggaaaaatatataatattgtataaagtacttgtatgtctaagaacagaatcaaaatatctgcaatatcaaaacactggttgaaaatgtcaaggtttttgtactcagcaaagctacagttagagaaaagtttctatattttaccaccgggtggcaatagagattaaaacagcttcagcatctagtattcaaaaattagaagttttaggctcagaga

SEQ ID NO: 38166 - DNA, 1892 bp, Bovine  19866880760113
  misc_feature (1)..(1): n is a, c, g, or t
nctcctaaaaactcaccagctggcagagggactacaggattctgggctagacaccttggttactacactcacattttagacgattaattctttaaattatagaggtaatacaaagttgttatgaagcatctgaatagcatgggacaagtacaactgaaaagtcaaggcctcactccatttatctcttctgtttgcagaggtatccactttcattttcttttgtgtttctctagaattcttttgtggttgtagaagaaaagctatatatagagttttattgaatgggctgaacttgaaacaagaaacagcttcttttttctcttagctctgctgctgctatccatcacattatatagaagctctctgacttgcccctggagctgacacaatagctttctgaccactttcaggcatgaaaaaatagtctagtttagctcaatttaaaacttaagtgtcacatccagttcaaagcttctcctttccccaatcattgacttgacctgtggcttggaaacctgcagtgaaaaagagggcattcattctccttccgtctcctcctcctcctagggccagaggaagagcgataaagttcttttcacccagtgactactctttgtagtcctttcttggctgttacggttgctctaccttctccactacggcagaaagttgctgggaggcctgtcccaggggcctcctcactgtccagtctcctgctggctgactccttgtgagcctcacttaggtcatgctcctacaggtataaagcagagcctcttactggtggactcccttcaccccagtgggcaatcttcttggatggaatcgcatcaaagtggttctactatggttactgttcacagcttccactaggctcattggaaattcatcaaaaccagccttgactcattgaatggcggaagtgcagcttgccaaaccactgaccccctctcctcttccttctgtcatgtccagctccagccagtggttcttaggcagcagtcatttgcccagaactctcacacgacctaggtaactctcttaccttggtcctgctgtggtgcacctaggtaagcatatgagaagctgcaattcagtaggttttcagtgaggcagtgagcaaccagcctccctttcctgtaggcacttctgatcttgtgaattattcttccagggtttcacctattggcttgtttgagaggaaaagaaaagcaccataaaactgtactcatatgagcaacctaaacttccctttacgtttctagtcctttctctggctggggtggggaggtgggggagaaggggaaggcgggtggtcagcagctgggtgaaggttgaaggacaagttttgccatgcttccacaagttcagcaagttgggtttggcacttccctttagaatgtagtcttcagctttgggacttgagatgaaatttgaaaacagtccatataatctaattaatcagaggggattattctacgtatattattctactgtttgcttttcctgctaagcagtatacagtatcctgagcatattttcagtcattacatgtagatctacttcttttttcttttcattgcactttatttttcctcacacatttctcttcttttcttctgtcgtgtgtgcaaccatttcataaaccagtatttttagaactgcctagtgtagcaagcaatatttcttcatttttaataaaggttttgcatttttcaactgtcatggaggggcttaagaaaagttggagaatttgaatatgcctgtattccttagggatatttgattttatccaaagtagcacagatctttagaaacagtttattatgtcattgtcatgatgtacaatgatatatttaatcggttctctgctggtgcacatttaactgttt

SEQ ID NO: 38167 - DNA, 3233 bp, Bovine  19866880783531
  misc_feature (1)..(1): n is a, c, g, or t
ntagcaagaggaagaatggaagttttttgaccctaagtctttcccaccagaacttgtttccttcatacttggcatggacttagtgcaacatctctgacgcctgggcctccataatcacagggaagaaaaagaaaaagcaaaaagtcaactcactcctatttaaagactcaaatcaggagttatctcttctgggaagacctccactcctatgacaaataagtgatccttgcttgtcatcccgaagcaccccctaatacactcccctccatttgtgcctctgccatttttattacacccagcacagcttaccaaagtatcaacacttgaaaaaggaattgtggtgccagccattaaaaaaaaaaaacaaaacttcttactttccataatatggtgccctccagctaatagccaaactctttccttccattctcagctaagtttctggaaatccaaggctggtactttcctgcttttatcacttgaccctctgaacacactacagtctatcttctgatcctgccaaatggatcttgctctagtcatcagatccaatggtcacttttcagttattttcttctgttatagtgtcactttaaaagttttgtttatttggctaccctgggtcttatctgcagcatttgggatctagtgccctgaccagggatcaaaccccagcgcattgcattgagaatgcacagtcttagcaactgggccatcagggcagtccctaggatcatttttttctacgtggctgccttggatcttagttgcagctcctgagttcttccttgtgtcatgtgggattttttcatgccactctccagttgtggcttacagactcagtggtcgcagcacttgggctcagttgcttcaaggcatgtgggatcttagttccccaaccagggattgaatccactcctgcatagcaaggtggatccttaactactggactaccagggaaatcccactagaatcattttttttaaacaaaaattcatcatgattttcatacaaatacaaaattaaatgtgtccaaaactgtatttaatcattaatgagagatacagttagatgtttcaactgctttaaaggaaaattcaaaatatcacacttagataggtcaaccaggacttctgaaatgaatttttgtccacgaggcactaatcaattgcactctaccatacacaacttgtttgcatttcgatggacaagaatcatttgaattattagctttccacaacttagaggggataaaacagcaaatagacagtgaagaacagagataagcttgataggggaagttaggcaggacatccatctgtctttttttctcccttttaaagcctttcccagtacctccttggcctgtctactaacgaccatgcctaaaactctcccttttgctctgcggtgtcacctcaaattctcctacacctgactactctttctcagcagaagtaggctcttcctctatctgtcccttaaatgcaggtagtatccagtgtattgtcttggacactcttctccctctactcaggcttttgaagttaatctcatctattcttttgtctttaagtcagtagagttacactgatgactctcaactttctatctccagcatagcttccttcagagttgcaggccctacattgtaaaaatattttcccagaacctcaaatacaacatgctttacctataaatccaccttttcttccttggataaagtcacctgttatccgcttcgtgtcgtgaagtcgtgaagtcactcagtcgtgtccgactctttgtgaccgcatggactgtagtccaccaggctcctccatccatggaattttctaggcaagagtactggagtgggttgccatttttatccacttacttaatctaaaaccttgggaagcaagcttatttttcccccttccttctgcctcatatccaatcagtcaccaagacctgcagatcccgcttccttgctggttctgagtcttgctccccattcccattatgcttgccttggttcaggctttcttcacttgtctgaattaatatgggagacttccatctgatctttctgtctccagcctgattccatctaatccatatttgacttggttgctaaagaatcgtctaaaatgcaaatctgatgtgatactcttgtccctgaagtcatcccatgcacagctccctgttaaggtcagaacaaaattaagcccattaacaagtcagtcgagggctccatgaactggccctctctgttgagcctcatgtctggttcagtccatttctagggttttagaagaacacttgtgagtctacttagagttccccatcatgtgggccatgtcatttcctgcctcctttaaatgggttctctccttgaaagagagagagagaactctcttgttcatcccccttcgccttttctaagctaagccctgggctttgcctcctgcctggagattttctcacctcctgcactgtcttgatgtgggttcctcatggtgctcttttcctgcccctatctctggacccagagccacagacaggtttgtgattgttggcctatctcaggaaaaactctggcttccctgcttttttctttctatgcacttggcacattggcttgtcactgtttatttgagtggcttcctcatgagaccgggagctccttgcaggcaaggactaggctccatatgcacccctttccccactcaatgtcttcttcctacacagtttctgaggatggctaatctcctctgaggaggtttcgaaatcatgtaactcacactgggacttgaatccacagtcttttaactgagatcacacacctcatctcaggacctgttgaaactcaggttcttgatgtctcatcccagaaagagttcattgagagacaagtgataggtaagaagtcaatctgtgtagagagagtcatttcaaaaggtgagaggcccccaaatgcaggagacataagagctacggatttgatccctgtgttggaaagatcccctggaggagggcatgacaactcactccaatgttcttgcctggagaatcccatggacggaaaagcctggtgggctacagtccatagggtcgcaaagagtcagacatgactgaaatgacttagcacacacacaatttcataggctaataataggtaggaggattattccaactatttcaaggaaggggcagagatttccaggaattgggccactgctcatgttttg

SEQ ID NO: 38168 - DNA, 1560 bp, Bovine  19866880795150
  misc_feature (1)..(1): n is a, c, g, or t
ncccaagggaacccagcaaataagcggcacaaagctggaatctgaacccaggcaccctggtatctcaaccacatcagtggagagtagtaccagtaagagccaccatttgctagacatcttcagtgtaacaggttctttgaacatgcatgctgtttcatcttcatgagaatactatgaagttagtatgattatccacactttacttttgagaaaactgaggatcagagagattaatctatgaagatcatgcaatgaataagtggtggaagtgggtggggactcccctgtcagtccccttcccatcactcctgctgtcctgagtttatctggaaatgaggaaggaggaagatcactaagggctgtggtcattagcaaaggctaatgagtgtagaggaagtgcaagttggaattttcacagcattcaggagcagggtgatcctacctgagggccttcagcatgtaccctccctgataaaaaaaaatacttctctacctaaacatcccaccagctccgcccgccataatgctcagcaggtggtaccagcctcccctccaggccctcacccttctgcacctgcagaggagtgtatcttcaagtcccataaaaagtgcccctgtccaacatcccagccccatcctcctcccatcatgccctcacctgtcgtcctgtgttcacacaggaatcccggtgtctggagtgcttctggagacacagccccagagggaccaggtggttaaaggggagacgctcgtccttgtctgctctgtggccaaaggcaccgggaaaaccaggttctcttggcacagagaaggcacaagagagagtctggggcagaaaagtcagcgctcccagagagcagagctggagatccccgttatccgggagagccatgccgggcgctactactgcacagctgacaacggctacggcctcatccagagcgaggcagtgaacgtcactgtgagaagtaagtagctagttctcctaattagccggagagtcccaactgcaattggtttccttctgtgacagtgaggatgttccaaggataagaatcagggccgtgaagaggttaggaaaccattaacatgctaggattgttattgcaacgatggtggcagcggtagcagtgacaacaggggcagaagagccgaaggacgatggcaaggggagacaggaagaaggctatgaggctcggtcagacgtatggtctccagaattcctccccggaaattgtcaaagcgccatagggaaccgtctctgcagcgttagatcagaaggtgccatagtgggaagaaaccccagggcttgagaggtactgtgtggataccgtgagaatagagagagtgggttataagtctgggcccgcacaagagaccttctctgatgaaccgccctttatcagttccagtgtcacgtcctgtcctcaccttcagtgttcctggggcccaggccttgactggggatgtggtggagcttcgctgtgaggacaagagagcatctccccccattctgtaccggttttatcatgaaaatgttcccctggggcacactcggcg

SEQ ID NO: 38169 - DNA, 1095 bp, Bovine  19866880826183
  misc_feature (1)..(1): n is a, c, g, or t
ncctggtgggctgccatctatgaggtcacacagagtcagacaccattgaagcgacttagcagcagcagcagcagcagcaagagtctgaactgctgcagaagcttttggagaaagtaagctcttgcccactatatgtccatatgcctgagcttgtagctaaattaatatgtaggtattagtggggagatatgagatgcttctgtgcatccagttaagagaaattggtttggagactgaacatgcagggcctgaaaaaataatttgggaacataaaagtgttagtctctcagtcatgtccaactctttgtgatcccatggcctgtaaccagccaggctcctctgtccatggaattttccaggcaagtatactggagtaggttgccatttcctactccagggtatcttcctgacccagggctgaaaactgggtcttctgcactgtaggcatattctttaccatctgagccaccagggacttttgggaaaataaattcatttggtaaaagtgggggaaggtgttgagctatcttaggggcctagttgagtgagggctgaatgaggactgaagcccacagacagatggttctttgagaagggaaacaagatgaccattaggttgatggtgtaggaaacagggagatccatgaaaatctctgaaaggagttggcatgacaaggatctgggtcaaggatgggtcactagcaggaatccagaacttaccaatgacagagaggttaatggtctcactgctctgagggccaaagccattgtcagctgtgcagtagtagttcccagaatgctctgcagccacagagaagctataggaccttgttctccatgaagtagcttctatccttgtgagcaacacatcttcatgaaaaaactggtaccagatgggcgaagaccctctctgaacttcacactgaagtctcacctcatttcccacaagagtccaggttccaggagggctgagggtgaggacaggttgagacacgggcactgagggagagaaaaacttagtcgacagttgcttctgccactgcctggaactgttaatcagtgactagtgaaatactccagtcttatgtccaccgg

SEQ ID NO: 38170 - DNA, 1749 bp, Bovine  19866880827968
  misc_feature (1)..(1): n is a, c, g, or t
ncattgcaaagcaagttgaaatgacttctgggattatctgcactgctgctgctctccatttgtgcagaaaattgagagaggagcccatatctaagggatttggtttgtgcatgttgcctttggtttcataccagggtcgtgtcctaagcctggtctctttccacacacccttggaactggataacccctcaagtgccctgggacctcctgaccagagggccaatgggaaagccagagaggctgccacccgcgtgagcaggaccaggtcatgtcactggagcctcagttttctcatctataaaatggagacaataagacctacgttagaaggttgctgtgaggactgaatgaaggaatcgatgttaaggaacagtatttggaacacagttggttttcagtaaatcatattgcacagtgcctgctgtttttttacagctcatagtccaaggcagatcagtaggatgagtgaagaacaaataatggtgcaaatacagataagtctatgtgaaccatgccagtgatgttggtaatccctgaatttatggtctctggagtgccgtgtggcgggagctttgagatggcagcaaatagaaagcaccctgctttagaattaggtctaatcctggctctgaagattcagcaggctcttcatctttgtgagccttagtttcctcatctgttaaatggagtgatagcaaccatttacctctactttaagccctgggaaagcactccttgggcaatgcacagtaagcaggaccagaaggtttaggtttaaatccctctctctccacaaggtttcaactcaggatgttagaacagtgattctcaaacttgaacatgcttgtgaagcacctggggaatctggttaaaaagtgcagattctgattcagaagatctggggtcagacgggatttctgtgttggcaccaggctcccaggtgatgccaatgctgcttgtccttggaccacactctgaagtgttagaggatgtgtttcctctagggaaatagagcttcagcgttctaatgggaagcaagaaaaaatagaattcatttacctgaattcacttttcagctggcttggttgtgtaacggagcctggatgggtcattgattcaggaccatcgatgtgtttgttttagagaagcaggttgtgcgacaggagaaggggcagtgcatgctggcctgcccatcttcggccccaagactaacctgcccagccttatccccagcacctcccacgctcccagccacctctactgtaccccaccaagtgttcactcatgccaacagttgccggctgcagagttgaaaagcaactagccagtatgttggtggagacatgcctccatgcgcgagccagtcagtcctctcctttctttttttaaatgaaaagagtaactcctcataacccagctctcaattggtggggttttgaggggaaaaacatgttgactgagctgctagccagggcctaggctttgttggctttggcttgaaggtatgatcatgagcaaagtgagatctgggaaggaaggtggattgtagacctacttggggtcatggttttcagggaggaatggaggaccacccctgggcagatcattttctcacactcatgtagacctaatggtttgtcaggcaacgtgatgagctaactcactctctcccttccttcgtgatctgggtgcagagcctcaggctgtcgaggcaggtccacaggccagagaagagcacctctgccctca

SEQ ID NO: 38171 - DNA, 704 bp, Bovine  19866880916867
  misc_feature (1)..(1): n is a, c, g, or t
nctgggtcgtcccagtgcaccagccctaagcacccagtatcgtgcatcgagcccaggctggcgaataatggaattaaatgggcttaaaggaatttacttggtatactttctcatagatattttaatttgaagatttaactagagtgactccccaaagctggagaaattaggattttttagatcacaaatgcaatgtagagatcacatttaaggctgattataaccatgggaaaaatacgggggaattagcccaaagtcagataaaagtctccacttacagaaaagtcttactacaaagctccccacattaatgaactgatagttaattacacggtaccaaagtgagtttgcctgctcttcttgaagtggtgggttaaaataagtgtcccaacagatgaatagctgtcactgaatgtgtctgtctacatcaggtactgagcttttgattcagaatggagtgaaactaggctacatagaatttactgaggaatttccttttagacaccattaaaagctgtaaactgaatcttgtgaatgttcatatttcaccactagatgtcactgggagataaacagttactgaccagactggtgtattgtaagttttcctacgaaaaaaattgattgatcttgtgaatatattttttgtttgctcagaaaaatcagatcgtgtcagacccttcttatgcttcacatcttctcag

SEQ ID NO: 38172 - DNA, 1408 bp, Bovine  19866880944637
  misc_feature (1)..(1): n is a, c, g, or t
nagtcagttgtgcatttaatgtcttgaacacttttaaattacttctcttcccatatcgttttggtagaattatttcctacagcaaaccactttttgatcttggctgtcctggtcagaattttgtgcactatactataacatctttggtcgtggtagtccagttttcctagtaacttggttaatgtgctgtgaacgattgacagtttgggtatgtagtgtatatgatattaaattgtgaatcagtgggacttatgatgtaacaacgtatcaatatttgaagatattggtacttgatttcctgttaaggaaagtttgctccaaattttaagctggaaagtcactggaataactgttaagaatcacaactacatgatattttagatttctggtacatatgtgaagaattgtgtacaaattgaaatgtctgtgtagtgatcctcaaaacaaccaataaaatctcagttagaaaaaaaaaaagagtttgcctctttatgttctaggtatttgggatacatcagtgaacaaaataaagatctttgtataagtggaggacatcgctgctggttgacccaagagctagacctcgacaattgaaagcgccttacttcctgccctgtacttggaatattttgggttgaccaaaaagcttgtttaggtttttgtaacattttacagaaaaatctgaacaaactttttggccaccccaatatgttctacccacaccatcccatagttaaggccatttcaaagatgaagccttaaaaatgtaaggttttttaagaccatctgtctgaattgtgtatgtggctgaaccccattaaacctctatgtaaactttgaaagttctggtactgtgagttgacattgggttagaattccttatcacctgactcgcataagcacctgctcagactggtatactgtagagtggtgttattggttataaggaattaatgttagctcagcatttgtggccaacattccccaaagatttgggggtatttttcaggtaaatggcttgcagcccacttgagcaaagtcatgaaattgaaaggttttgatactagagtattctggcttatataaagtatttgtttgtaaaattcatatttttctgtctttgtaataagagtcactcaaaactctaaattttatccttggaaaccccatggtctatatgtcagagttaggcatctctgagcatcaggccactgattactatatcagatcagatcagccgctcagtcgtgtccgactctttgcaagcccacaaatcacagcacgccaggcctccctgtccatcaccaactcccggagttcactcagacttacgtccatcgagtcagtgatgccatccagccatctcgtcctctgtcgtccccttttcctctgccccaatccctcccag

SEQ ID NO: 38173 - DNA, 1232 bp, Bovine  19866881256297
  misc_feature (1)..(1): n is a, c, g, or t
ntcgtataagtaggatattctgataactttccttggcatcttcatctttagagctgacctttccagctgaatcatctcagagctgtgtcttcacttctagagtagacagttgagatatgctggggtggaaaaaagatagaagaagaactggaaggagagggaatgtggggtgataggtagtagtgggagagaaaaacagtcaggaaatgaaactcacctggtcctctagagatgttctgaaggtattggctgaggagaaaaagaaaaccacaggggatgaatgtttggatccacctccaaacccagtcttctagcttatttcccagaatctgggagtcattgggctgtctgcattgattctcattttctcttctctgccacctaacacctcctacaacacacatgatcttgttttaccatttctttacccaaccctctggatgttctttgcaagctccattgatctataaagttctccctcaataccacaaagagaaacctcactccctttctttacagatgctaagagataatttctctcttagtttcaattattgcctctcttaatttacagcacctccatctcaccaatcgcaaagtccaacccctgctttttctgcaagttcacactagaatcctttaaatgtattccctgagggaaaaactgtcttatattatcatgttctggttttgatttgattgccaaagtttcttggaggtggaaccacagtaagagaaaactttcagttcagttcagttcagtcactcagtcgtgtccgactctttgcgaccccatgaatcgcagcacgccaggcctccctgtccagcaccaattcccgcagttcactcagactcacatccatcgagtcagtgatgccatccagccatcctctggcgtccccttctcctcctgcccccaatccctcccagcatcagagtcttttccaatgagtcaactcttcgcatgaggtggccaaagtactggagtttcagcttcagcatcattccttccaaagaaatcccagggctgatctccttcagaatggactggttggatctccttggatgccacaaaacatcagagttaacatatagtgttgacagtgctttcctgaagtcagatctcaagagaatccaggttatattaatacagtaaaaatgcttaacaagttagtcaactattccctagataggaagcttattcacttagacggattaggcattctcactac

SEQ ID NO: 38174 - DNA, 960 bp, Bovine  19866881286964
  misc_feature (1)..(1): n is a, c, g, or t
ncgccttagcagcagcagcagagtctcttctcatccccaccctggccccaagcctaaagattaggctacctgggaagtaccacagtccactgggcagtccaggacggtgtgtgtgcatatgcacatggagtggaggagaaagaaaggaataaggaggaaggaatatgaaggcaaaggaagcaggaggaaaagtatctgctgtcaaaggcatggcgctggaagccaagggaaccttcctgcatatcattttgtattacgggagacaccctactgtttgtttcccatcaccgtcttcaattccctccacagtcaggagacctgaagcacagaactggcttgttgattggtttgagtttaatccatttgtgtaatatccctgttcagaatgatatctaattaacacttttgttggggggaataaaacctcccataatcattagtgaacgggggaggggaggggaagctttcccaggcagcagccttgcgtctaccaggctgtttgcggctccatcttacagatgtctcaactgagacatgtcttaagagtgggattatcactcattctggaccaggacaagcagatggagctgaaatttgatgatgggatgctgagagctacatgagtcagcactcacacctagttctaaggacctcgattctgagtgccaactccatagggggcagaatagctagacagcctccaccaagcagaacgggcactttccaagtcagtgggtgaagttccaagtatgactctactttctggttgcggcagttcctccaggccttgcaaggagaaataatacttagatttgtgtataatttcagtttgcaaaatgactttaaagtgtcagtagccaactcactgggagcagagaataccaacctcatttaatagttgaggagagtgaagctcagagaaattaacagacttgtctaaggtcactaaggcatacatag

SEQ ID NO: 38175 - DNA, 537 bp, Bovine  19866881378599
  misc_feature (1)..(1): n is a, c, g, or t
ngctaggtttggggttggtatctctgtcaacagtcacaggtttctttattgctttggtggccaccaacctcatatgtggcatgcatttttgtggcccaaacagggtcaaccactatttctgtgacatggcaccagttattaaattagcctgcacagacactcatgtaaaagaactagctctgttcagcctcagcatcctggtaatcatgatgccttttctgctaattctcgtatcctatggcttcattgttaacaccatcctgaagatcccctcggctgagggcaagaggaaagcatttgccacctgtgcctcacacctcactgtggtctttgtccactatggctgtgcctccatcatataccttcggcccaaatccaagtctgcttcagacaaagaccagttggtggcagtgacctacacagtggttactcccctacttaatcctcttgtctacagtctcaggaacaaggaggtaaagactgcactgaaaagagttctgggaatgcctgtggcaaccaagtaacctaatgaaaaat

SEQ ID NO: 38176 - DNA, 769 bp, Bovine  19866881384499
  misc_feature (1)..(1): n is a, c, g, or t
ncccttgcttttgaaagttccagagacagacatgctgtctgggagcagagctaagaccttcagcctataaaaggacattgaccaagggcacagatcaaataagtcagtacataatgacatacaggcaaaggggaaaagggggagaggagggcagggaggggcagattggaaggggaaggaaaaattgctgaggcaaagtgtggctcctgactcctctcctgtgatgggggaaagcaaaaaaaaaaaaaaaaaaagaaggagcagagttactctgggacagttgcagaagaacaggatggatttaggaaggaattaactctatatgtcctgtgttattatggctacaatttaaggtgggccaaggaaaggaggcggagcattttggaagggactctttaggtgattgggagggactgagggagtcgatggcaatggggatgactctcggggtgacgttcctgtggtacagagacgtcctagactgagctccacgtggcccccttagagcgagctcttcactcagggtacttcatatgggtggaggaaggcaggagtggaaactccaggcctaattgctaggtctctctcagctcttccagggagcacagggcaggaaattcctcaaattccaggcttgtaggatcattgctgagcgtaaccgcagagcaagggaaagaggcagagaggcagagagggcgtcctctccatcttttttcctccccagttttaaagcagcagcaaattagaaagggtttagcggggctgatag

SEQ ID NO: 38177 - DNA, 790 bp, Bovine  19866881391525
  misc_feature (1)..(1): n is a, c, g, or t
ntggtgttgaaagtatgtaattatgagcagaatttatatgtcgccagggctgcctgggcaccctcccttcatctccttccaggcactgcaaatattgaaggctgccttagaaaagaatcaaacccacccacctttatatctttgcaccccgtagataaggttttaattgaaaatcggtttgtctgttccccgtgcctaatgacaagccgtgtgcatggctaatggagcacaccggcaggagcccagcaccctcatggaagaccagggtgggtcctgggatgggggaatggcagtcactttgacatcttctcccctcccacactcactttgggaggtcctctggtttcttactgatgagtaggtgctggtctttgcaggcaggattcctctcatccccctcctccccccccatttcatggcccgtgaatctccaataaggacaggatgcagctcactgcctgcttcctcccttctgcccgggacacgctcctcccaccccccatcctgcccactcgtttcttcccagcccaattgggcgaaacacctccctgtttgtcatcatggctctctttttcacctctgggactgctgggagacctctcaccctacccaggacactcgtcccaaactcctcattgcactccttcccccacctgccctgggccctcttgttccatgaagcccctgtagtgatgacttagggcctgtcgtccttctagatctgcccctgtgtgtccatcctgagtacttgcctcatccattggactggagcatcctgcaccctctgtaa

SEQ ID NO: 38178 - DNA, 1179 bp, Bovine  19866881676117
  misc_feature (1)..(1): n is a, c, g, or t
ntgtattgctggtaaagtttctagatttctgtttgtataaaacaatggatttcaaagtatacactatagaactctggggaagccaagatactttcagaggattcataaaactcttttcataaaaatactaagatcttatttgcattttctactttactgacatttgcacaggtgttgaaaagcagtgttggttaaaacttctggctccttaggaatgttttgatgaagcagtaaaaattactaatttgattgtattttaacacttgaaaacatgttttttattattttttttcaaagaagggaaaatatgcataaagcattttacatactaaaaagtacataggttgtccagggccggcggaggaagggaagcattcatccaatagtttgaaactgagatgaataaactacttttcatggaacacttcttttttataagaacaactgtcaggcaacctatcattatttaaatttaggggacttggcagaaaatttatcttcaacaaaaatgtaaacctgccacttcaaggaaaacagtcagtgatgttctgataaatgtttaacaactagccctcaggggacaaagaaagttcccaatttgtagattaatagccaatttctgtggtgtaaatactcccagtgtggttgattataactactgacttgatgtcactgaacacagtgttaagaataggtaattgggtctcaaaccattgcaaactaactattgcacactagagaaatggtgccagtgatacaattagagattctaagtggaaattgggcttccctggtggctcagacggtagagaatctgcctgcaaagaaggaggcccagggttcagtccctggtttgggaagattccctggagaagggaatggttatccactccagtattcttgcttggagaattccatggacagaggagcctggcaggcttgagcctaatagcttaaggcatgagcctaacagcttcccaatagataaagacttttctggaaagattgttagagatattaacaaatataatttttatattgtgtaatgaaatgtgtcaacatttagaaggtctaaataactcactgatccaatattttccaaacgaccaatgtatgctattaccacatcttacctggataaaagatttattcaaacttaaagatagacaaatcacttta

SEQ ID NO: 38179 - DNA, 1582 bp, Bovine  19866880385797
  misc_feature (1)..(1): n is a, c, g, or t
nacatatcttcaacatttagggattaaaaaatagaccagtaaaaagaaaaaaataataatatatacctgtagaacaagcaaaagaagcacgaactttgtccttgcagtttaaaggaaacacaggtcaccatgaaaactctaaagagaacatgaccatttaagatttgtcacttccttccaaaaatgatttaaggtattaatagaacaaagactccagaagtaagatgataaaaatggaaataaaaacagatctctagaactatgggatcacatcatgatgggtgatgtttaccatcaagtaatctaacaggaagaagtgaaaacctggagtcaccaggttttaagaaagcactgtggagtaagtgaggaagaattatttcctaaatcccgaatagagaatattctacgaagaaatcaggaggttcctgcttcccggcacatactacaagattccagtagtatgtaaacacagtcaaagaatataaacacgacaaaaagaggcatttccccaacccaactccaacctcaattggtaccaataataaaaataattgctttgagaacgagaatactttttttagtagttttccggcagaggctcttaagtacacatgacctccaattatacatcctacacatcgtagagctccctatgtataaccattcagaccttttcccattatttcctggaattttaaggattcgtttgaaaataagcgcctgcactacttttagtcaagtccaaaagtacaataaacattcctgcccaagacctttttcctccctaaaacaagtgaaacacgagccctccttaaaggcttgaggtattcctaatgtatgtataaaagtccatggacaggccactcatctggaggaaaatgatttaaaatttgccaaagttgccaaatcacatttggagacaaaaaacggaccaattttacttcataagacaaatcattttcaataaacgaacgtgacaccaggaaagtaagtttaatgatccgggcaattattgctggaaagaactttagggacaaagagaatcactcatttagcttatatttatgggacgtctttcttctgagtggctttaattttactaccattacttagcagtaaacagagcactttatagaacttacattatacgtaggaggcgtaaatctaaaggtttacccaagttccttcagaggccaaattaaggaaagccatggtttttcccacctctgagaggaatgaaggggaagaaaggtcaggaccccctcctgtccccttgtttagctaggaaaacaagtgtcccaaatgcgcacaacctggaccgaagctccagtctgcggcagcgtggaggagccaaaagcgatgcgtggagcctagtctgggtccttacctcctggatgcgcttcctggcccgctggagcacttcttcgtagcccttctgccgcagctcgctcaggctttcgtaatactcctccgggtcgtcggtctcggtgaacagtacctgggacaggatcttccagccgcaggtgtccaggccgtggcccaggtaaatctggagctggtaacacagcgtgtcgatttcctg

SEQ ID NO: 38180 - DNA, 2457 bp, Bovine  19866880406908
  misc_feature (1)..(1): n is a, c, g, or t
ntgatttatatatttgttatagtgatatatttccttatacttgttgtaaggacatttcttaagcaggataaagagatagcaatttatacttctctagataattttgaaaagagacttgatttggctcatccaaatcacccacaatctcactaagtatcaagaaagcaaaaaaaaaattaaatatatgcttaaaataattatgaactatttgcataaactgtgtattcgcttaaccagttccagtgtgtgactacaactgttattttgagagctagagatactgtttacaagacttgaaactatatgaagttcttttggcatttggagggaatgatgctgaagctgaaactccagtactttggccacctcatgcgaagagttgactcattggaaaagactctgatgctgggagggattgggggcaggaggagaaggggatgacagaggatgagatggctggatggcctcactgactcgatggacgtaagtctgagtgaactccgggaattggtgatggacagggaggcctggtatgctgcgattcatggggtcgcagagtcagacacatctgagcgactgaactgaactgaactgaactgagagcttaccatttaccaggcattgtttccccctgacatctaccagctgatttttgctttagcgactctattttaccagtgagaaaaccaacctgcacacaggagttaaataaggttgtcacactgcaacagactgcagatttaggatacaaactcagtcatctgaccccagtacacactctgttattggactttacttctttaatggttcttcttttttttttctgccaagacacacataacagaatttatatccttggcagactccttgggcatagccagggttgtgctttggtttcgtgcggactcaccaccagaccatcatgttctttatctttcaacaatggcatatgagtaaataaatagggcagagtgctgttgcttgaggcgaatcctgcatataatctatttatttatttttatgttaaaatgtgtttattttttttaaaaacttcaagctttttattttatcctggggtatagctggttaacaatgttgtgacagtttcaagtggacagcgaagggattcagtcatacatatatatgtatccattctcccccaaatcccctcctatccagactggcacataacattgagcagacttccgtgtgctatacagtaggtgcttgttggttatccattttaaacatagcaaaaaggaaatttccacaaactttagccctacaaccctcattaagttatatgtaaaatctcatacaacacatctgctgagatggatgaaacatctattgaaagcccagagtggttgagagtgaaatgcatagagcaagagagatctgggtataattcttgttctgccactaccagctgtgtgaccttgcaagttgcgtaaccaccctgagctttagtctcctcatgtgcacactttatgacgctggtggagaattaatcgacatggcattttaaagcatatagtaggcaagtgatacacgggggctgttgagtccttgtataaccaacaacagagtatgcctctgcccagtggataagattttcataaggaagtaatgtataacatggaagtggaagggaacctcgatgaggaaagaagagttaggcttttcttctatgtctagcatttatctgcagaacccattattacatggcccagctgctatgccttctgagtgtttgtgtctgcttttttataacaactgttaagctgtcaggcattacatcttacagcactctcctgtctttaaatttgctgtttgtaatctgttctaagccaagataaccagattcagttcagtacagctcattaaacatctggggagcactgtgttagttgcctagaagcaggagaacttgctatatttgggacaaaaagtaaaacagctttgactagggtaatgaaaatgagcactggcatatctgtagacagtttgcaaatatctattctttggactagaataacagacaatactgaagtgtaatccctgggctcctctccagactactgaatcagaatctataggagggggttgtatgtgaatatgtttgcttgttggttttcaaattcaacatgtctttcatggattctaatgacaaataataggaatttcataggtaagatacaaaggaggatgaaacacacgtgcaactaagaacagagttgagactttgctttttaacaaggccggtggctcagtggtaaagaatccgcctgcaatgcaggagactcaggtttaatccctgggttgagcgacttcactttcacttttcactttcatgcattggagaaggaaatggcaaccccctccagtgttcttgcctggagaatcctagggacgggggaggcctgttgggctgccgtctatggggtcgcacagagt

SEQ ID NO: 38181 - DNA, 1344 bp, Bovine  19866880410136
  misc_feature (1)..(1): n is a, c, g, or t
naggctccttctaaaccttgaaaaccaggtaaccaaacggagttctgcttgtatctctgggacaagcaccatctaatcaacacctcctcagagtcttttccaagtagaagcaggatgaaggtctaacttatgccctgatgatttgtcagaattatctattgttaattgtttatctggcccctttcagcataaacttgttgggtcatttagtttcagttcagttcagtcactcagtcatgtccgactttttgcgaccccatgaattgcagcacaccaggcctccctgtccatcaccaactcgcggagtttattcaaactcacgtccatcaagtcggcgatgccatccagccatctcatcctctgttgtccccttctcctcctgcccccaatccctcccagcatcagagtcttttccagtgagtcaacacttcacatgaggtggccaaagtattggagtttaagcttcagcattattctttgcaaagaacacccagggctgatctccttcagaatagactggttggatctccttgcagtccaagggactctcaagagtcttctccaacaccacagttcaaaagcatcaattcttcggcactcagctttcttcacagtccaactctcacatccatacatgaccactggaaaaaccatagccttgactagacggacctttgttggcaaagtaatgtctctgctttttaatatggtatccaggttggtcataactttccttccaaggagtaagactctcttaatttcatggttgcagtcaccatctgcagtgattttggagccccaaaaaaactggttaaagttggccaaatcaacttctccttcagtaaaacaggtgtaaaacatcacttgcctcaaaaaatagtatcggggatgaagacaggtaatgtgaagtacccaacacctaaaatagtgccaataaatatttacattcccttgaaacaacactttctggacgccacacactttgttaggcactttttcataatgtcttaaatcttcagtaatcctttaagtatttcccccatttctctgttttaaagaggttaaataactaaacaggtcacagaaatgatgagcactcacctaaacccacatccttctgaccccaaacacaaggtagtctctgtctactgtgtgccttacatggctacttttgaaaacacatgcttctctcagtggtttcaactggaaaagttagaattgagcaattctataaacataataaatttcaaagtgagcactgatttttagattttaatcaactctatcatcatagttaaggtttactatttaaaggaccacaatgatttcaatagttgtccttat

SEQ ID NO: 38182 - DNA, 2348 bp, Bovine  19866880411459
  misc_feature (1)..(1): n is a, c, g, or t
ntgctggctaagtagttgtcatctggagtactggaatttcttgcattttgatgtttgctcatgtgactcctttttgctcctagtcctcttcccatgactccctactcatccaattccttgaaagcttctcttgacttaaaccacagatgaaccacccgagactttacccataagagtgagtgggtagaacctcacatgggtgacattaaaccctgattcctccatctgatataaaattatttgccacttatgttcttggtcttttaaaaaaataattattcatttgattttgactgcgctgggtcttcactgctacatgggctctttctctagttgcagcaagtggcagctcctctagttgtggggcacaggtttctcgtcacggtgcttctcttgttgaggagcatgggctctagggcacacagacttcagcagttgcagcttcaggctctagagcacaggctcagtagttgtggctgtgctgtgctgtgcttaatcactcagtcgggtccgactctgcaatcccacagactatagcccaccaggctcctctgtccatggggattctccaggcaagaatattgcagtgggttgccatgccttcttccagaggatcttcccaacccagggatcgaacccaggtctccccctttgcaggaggattctttaccttctgagccacccagtgggcttaattgctctccagctctgcataagattcccagatcagggatcgaacctgtatctcctgcactggcaggtggattcttcaccactgagccaccagggaagcccgtgtttttggttttaaagtatcttcatgtggatatagacaagctaatcctccacaccgagtgactcattggttgcaaaatacaggagccactgtttctccccttcttccccacaagtccctgggtgactgcctctttgtgtgcctctatgataatggcccaagtccttgtacagagatcgttgctaaagggacctaaactaagctgagtctgggaagggatgggtatgccacaccagtgtgcagatatttctcttgcaagattcatattagtgagaataatcatagctcaagataaggtaccaagcacatctgcctgtgtgcttccttgcctctattttcctagagcgagatccttactagctaagagtcataggctattttacagacatgcatctcttgaaactgtggaaactaactagttatcaagtcaggcacatttaatttggatgcttaaactttttttttttttgaggaaaaagatgatagtataaagattatgttgattgtgtgttctgaatagcatagaacactccagctttgaggccttgtgaaatatttggacatgtttcattgctggaaagtaatatgcgttaataacagggtatttatttctatatttgaaagatacggcataatccatgctggtggtgtcgggaaatatctcagtgactggatcctgcacagagaaccaccttttgatctgatagaattggatcccaatcgctatggcaaatggacgacagctgagtacaccgaggccaaagcaagggagtcatatggattcaacaatattggtaaggtgcaaatttactgttgtctgtgaagtgtgttcagaattgacttacagcacctctgactttagatgctttttattctgtgcatcattggggaatggttagggagtctaaaaagcatatgcttctaaaacaaaaaaggaatctatgtgaatatatgcctttaatgtgaggaatgcatcagtgattttaacttttaaatctatttttactttacctttgatgatcattataaatgatggttttggtttcttgaaaatataaatttaatatgtattatatatatgcttatgtattaagcttatatatgtttattttacatatattctgtgtgtttgtgtgtgtgtgtgtgtatatatatatatatatatcttctggattttaagtactgtgtttgccattttctgaatcccttcagaatactttgtagttttggttctgtgctattagagtatgggttttcctttttcagttggttatcctaaagaagaacgatttgctgggaggccaactcagcgagtcagtgggctttatgaaaccctggagtctaagtgttccatggggttccattcaggctgggagcagccacactggttctacaaaccaggccaggaccctgggtacaggtaaatgagtgacttaatctacgcgtggctcagactgcaaagtcaactttgggagtgggatggagggacccagtgaagccccgtatcccccacacggctctacaaaccaggccaggaccccgggtacagcta

SEQ ID NO: 38183 - DNA, 1425 bp, Bovine  19866880468223
  misc_feature (1)..(1): n is a, c, g, or t
nctttgctttgtgtaatttgctgtgactactcaagacagattaggccaatgcaggaaagagttgcaaggattttcactttgcaggttgggcactatgcctggaagagatgaaatttaggtcttcctgttaaatggatacccagctgcctagtcttaagactcaaataaagaatatctactagaaagagaatcatccctaaatatgggccagagaattcaagatttcaaggatagcttcctcagtgtgtgagtgagacactcaaagggacagaagatgaagtgcctccctgagttcagttaaggacacagcccaataaggaaaagctgcggggcttatgattgctttataaaacagtgtgaagagaactgtttggcactcgtttacacatgacaggctcacaataattcatttctttaaatatgaagccccaagtcaccccatctaaaattatgtttcctaccaacattgcttagtaactacacagaggaatgagcactggcctggaggcagcatccacatatctcctgagataatgacaccctctcgcctttacaaaagtcctgctcaagacacttgggttcttgtcccatttctctggcactaattagctccaaggctctcacacagtctcagttcttcacatataaaatgagaaggctgtagttttttaaggctttaaatttccttccagttctaaattctttgatttgttcctgaatctctgccggcggattggagtgttaagtcacctacttggtctccagagtcacaggagcattgtagaggctccctggtctttgagagggttggttcacaggaggaatttactggaaggactgatgctgaagctccaatcctttggccacctgatacgaagggccagctcattagaaaagatcctgatgctgggaaagattgagggcagaaggagaagggggtggcagaggatgagatggttagataacatcaccgacacaatggacatgaatctgagcaaattccaggagatagtgaaggacagggaaacttgagatgctgcagtccatgccattgcaaagagtcagacacaacccagtgaccaaacaacaaccaccagtgaagtgagcagaggagaaacctgttctttccccacaggaacgtaagcagcctccaacctgggctgactgaagggctggggtgggaggaagaagcagacaggacacagccgccatgatggtgagcaggaattttgcccccaggaggcactggccaggtttcccttaaccactgctctaatctcagcaggtctgccactggcttcacaggcctcccctctgcagctgtgcctcacaggactcactcgaagaatatcaagtcttccatggcacattgtcatgtttactgagcagctgtacctgcatttaaagaaaaagaacatgtgtcct

SEQ ID NO: 38184 - DNA, 1131 bp, Bovine  19866880628359
  misc_feature (1)..(1): n is a, c, g, or t
ntcttgcatttaaactaaagtcatataccagcttgtacccaaaaaatgctttacatggacaaagatttctactatcatcaccaagctaaaaaccctcaccaaatcctcttcagaatcaactgatgaataaaacagtgatgtgcaaaccaataggaaacagaaaagagaaaacagcatgctcttttgtaagaaagaaaaagggaagggaatcttttggtctagtccaaaagagtttcccatcaaatataaactcctcagcgaggtcctcatgtctaatacttcctgggctggataccactctcaccccaacacccatgacattttctttatgccaccatgtctcccttctcatgccgcacacccaccaacctggtgagtatttcccctgaagggtctagaccaagacacggggttgtccccagagtatgactcctaaatcaggaattgtgtgggagctgatggggccatataaacatcacatgccagccccacaggaaaagggaatctttggcctctgctccagcttctcccattcaaagaagcaaatgaagtcttactgatctttcaaagatgaaggaaatcaaggttagattgcctatctcaggaattatggtattccttttcccgtacccacttaaaacatcaaagtttcactatgactggacaagccagggattacacacaatctaagagtcgtcatgtggatgatagcctgaacggggcagactgttttctgtcagtaactaattgtatgtccggcgaatctaaacttctcttgatcaggggaagggacctctgtgttgggtcaggtgagtgggaagggccatgagttggatgaggttatagagagtttggggagttattttcagagaaacagtttactaaaaaggaagaataaagtctctttaaagaccatgatctctgctgtcatttggcctgggctgcagtcctcctctcagttctgcgcttcttattggcataatcttgggaaggttcccatttaacctgtgtgcctcagtattgtcatcaataaaatgggaatggcaaaatacctacctcttggggttactgtaaagattacacgatgcctatgaagcacttagcacagcaaactccacatagtaagtgctc

SEQ ID NO: 38185 - DNA, 1704 bp, Bovine  19866880730227
  misc_feature (1)..(1): n is a, c, g, or t
ntgccagataaaatgaatgactttcccccgctgtattccaatctcaagttgtttgaactgcttttagagttcacatatcatgtgtatactgctgaggaagagtactctttacattgtattccaattcattttagcagtatcagtaatttccttcatcatgagtccataacctgtttttataaaaaaggtgtattggcacacagccatccccatcctttgacttactgtctgtggctgccttagcacttacatcatgaaatgttaattggattgtttagaaagttgactagtgtgacacagactggatagccacccaccctgccccccaaaactgagatatttatctggtcctttacagaaaaagtttgccaactcctgtcctcgatgtttccttaaagggattcctagaacttaacccaaaacttcgcgcataataggtgctctataaatgttgatcaaattgtctaggaagataacaaataggctcaagaataagagaatactacccagacataaaaaagaatgaaatcatgccattgacagcaacatggttggacgtagagattaccacactaagcaaaataagtcagaagggaaagatagataccatatgatatgacttatacgtggaatctaaaatgtgatacagatgaactcacccatgaaacagaaacaagctcgcagacagagaacagacttgtggtggcccaggcagagggaggtgggggagggatggactgcgcgttccgcgttagcaggtacaaactgttacggagagaaaggataaacaacaaggtcaaactggacaacacagggaactacattccgtgtcctgtaataaaccataatggaagagaattaaaaaaaaaaacagtaagagaaaaggccaggaataaaaagaaagccttattttaaaataataacacaaaagccatggggaaaagggagcctgtcttcatgtaaggaaagaacttacattttccccaactttattgagatattattgatgtacaacattatggaagcttaaggtgtataatgggatgatttgatacttgcctatattgcaaactatttcccccaatagggttagttaacacattcttcacctcacataactaccattttgtggctgttatggtgagaacatttaaggaaaatgctcctggtgtttttgaaacagaagaacacaaaggaatgattctctaactgtgggtaaagaagttgggtttggcctttccttcctttgaaaaaggaaaaaattgtgaatttttctgtttcagtagaaaagaaaatctggaattctggaagattagagtaagcattctgtgttgcatgacctacattgggtcaggcttacacctttgagagaccctctagctcatgagtctatgagtaaaggcatgtatgtgtttctatggtacaatcctgggagtttccagtgtaggtccaaggaggggacgggtgagccctgcagtggcagcctgaaaggtctctttgtctttcctttgaatgtttagataagtaatctgaaaattacattaacaaaatgttttgcatgaacctaaaaataactcaggggagcacactcaaagtctttgtggtggttttacatgcgaacgttaattatgcctacatgcaaaattgactggtaaaagattttactgtcaggtaacaaatacctcaaactgtgggcctcgtgtt

SEQ ID NO: 38186 - DNA, 889 bp, Bovine  19866881429528
  misc_feature (1)..(1): n is a, c, g, or t
naactgtgatacaaatcccttggaagctggactggaatcttttgtaaaactaaataaggtatgtttacattccaaagtgtacttgaaataaatcttaaaactatgctgtttcatgacagagccatgctttaaaatttaaccaagtgttactttagggcaaatgagttgaacataaatagtaagcattgcttaagtgcttcatgttaagctttgtcaaaatttgatatcagttcaaatgattctaatgtatgtgcctgttgatgcaagaatccatcaacattgaaaaccaaatctaaattctaagataaaaatcagtaaggataagatgtcagcaggctgtcttgtaaatcctggtgacttgtgaagtcacaattagctgatgagacatactgcattaattgactcttcctgggtgctcagcagcatgaagcagcctcacccagcagatctgtccatctacttattgcgcattgtgctttgcaacatctgtgtgtgagcaactgacacatttcaaatatgttcagcataaaagttattactgaggagacaacacaggcccacagagtcataactgatgctgacattctaaagtgaacctgcatcagtggttctcagatagcatcagtatcatctgggagcttgctggaaatacaaatccttagttccctactaaatgaggaactgactcaaacctcaaacctactaaatgagaatccctagaggtcaagccaagtgttctgtgttttaacaagcttcaggggattccaatgcacctaaagtttgagatgcaccagcctgtacaatcattgtggaaaagcctattatgagaccagtttattacagtctagctcacctattgcaaatcctacaaatataaaccaggttatcc

SEQ ID NO: 38187 - DNA, 2031 bp, Bovine  19866880362991
  misc_feature (1)..(1): n is a, c, g, or t
nttttggtttttagaacttcctggaattttttccccaggaatgtcatctatatgaggttggttgaatctgtggctgtggaaccggtggttgcagaggactggttgtacctttagtcaaaatgggctttttcagaaaggctgattgtgtaagttagatgataaactgatctactcaatagtaaggcaagaatcacctgtttgccagtgtaaaaattccttccaagagtacatatatacctggtgagggtgtaattatgatctctgttttctagatcaggaaaatgaagcttggagtgattaactagatctgttcaagattgatcccacagctggaaaatgagagtgccaaggttcaaatccagggctgacaccaaagcctgtgctcttaactactgtgcttatggtgtgcagcaagaaaatcatgaacaggtgagaagtcacactcctacctataagaaggcacactgcacagctcaacctcccagccttcctgcaacacagcctcccctcccattcaccagcacccagacggaaaggcagaaaggaactggaactgcttctcataaaggctgcccccaactaagacgggcaccaagctaagtctttggcagatatgtttacacagaagaagaatgccaagggccatgcttcctgccctcagaaagcttggtctagtttatacccaaagatcatgtcctccaattgcccacaatatatggtgtgctcagggactgtagtacatgtgcacatatacatcagcgtgtgtagtggatgtaatagtcatgcaaatgcacatgtatatggagagcactgtagatttttctctaaaaatatcctagcagctccactctacttaataatttaatacttcatatagctgagctaaatggactcaacctagctatgagaaaaataaaaatggtttactaaataagagtatacctaagctttaagggttactggttaaactattaaggactctttcaaagtaacctcaagcacttagaaattttccatttacatgtaaaaccaagactaaagaaattgcaaattccttaaggatcatgctaggtaatatgtgatttatgttttttatatatacatatacacacaaatgaaaatataacagtctttgaaaaacactgtatttaagattttaagctagttagtttagtcttctctctacttcttcaaatattgcaagttagtatggatttattacacatgatgaaatttaagaaataatcaaaattctaagaggtaagcaatgatgaaaagtgggagatcagcataatggagataattagttgtcagagcttaattctaagatcatctgccacaatttaaatatgaaatgtggaaataatccaaaacaaataataaaaacaaatatctattttaatcagtgtcttactttcttccattaattatttctatcccattttagctacgatttcacaagggagacaaagtgataaaaagggaccactcctgaaaaattagaaatatcccaggaccagagtgaaaaacataaaaaatttggtctatacggggttcagaacaagcatcccccaaatgggctactcttcagttcagtaactcagtcttgtccaacactttgcagccccatgaattgcagcacgccaggcctccctgtccatcaccaaatcctggcgttcacccaaactgaagtccatcaagtcggtgatgccatccagccatctcctcctctgtcgtccccttctcctcctgtgcccaatccctcccagcatcagggtcttttccaatgagtcaactcttcgcacgaggtggccaaagtactggagtttcagctttagcatcattccttccaaagaactcccagggctgatctcctttagaatggactggttggatctccttgcaatccaagggactctcaagagtcttctccaacaccacagttcaaaagcatcaattcttcagcgctcagccttcttcacagtccaactctcacatccatacatgaccacagggaaaaccatagccttg

SEQ ID NO: 38188 - DNA, 2323 bp, Bovine  19866880389344
  misc_feature (1)..(1): n is a, c, g, or t
ntgctggatgacgtgcccgtccgggcttttttggcagtgccggggccacctttaagctgaaggatggtactctggcctatgctcgggtaaggagtctctttgtttcatcaggttctcatcaccagaaggacttcggggacatgggttctttttgcttccttcatccctgagtattagtttcctatttttgaatttccctaaacgtggcagacagttaataaggacttgaataaggtctgtttgttatattagagtaccttgaaattggcttgccttaataccaaattgatgataggaacaaatatgagttgggatctacaccagggcttggcgaaggtgttttaaagggccagatagtaaatattttaaactcatgtaccacatggattctgtcctgattactcatctttgttgtagcctgaaagcaacaaggacagtatgtgaatgaaagggcatggctatgttccaggcaaacttttactcacaaaaataggcatttcattgtgagctatgatttattgacccatgatctagactcttctctaacttcattgagactctgtggtagtaaaaaaatagttttttagttagagcaattattttaacaggtaattagagtgctgtttttatggtaggtgacaaatgttctgagtcatttgcacatctgatttaatgtctggttgtctcagatctgttgcctctgacttgtccttaatcacttggtactctgtagcgcaaccatctctccaattctaagaaaactttcaaacctgaggccttcaagccagggaacactcacaagtgtagaatcatcgactacagccaaatggatgaactggccttgctctctctgcggacgtaagtctgtcgctcacctgtggggtatggaggtgcgcggctgtggtgcgtgctcacggcgttgcctgtccttggtgagggtttcttttcctgccagtgtgattttggtagccctgagttttaggcagcctctgccctaatgtatttaatcttgtatttgccgtttgttctaggtctattattgaagctcagttcctttggtatcatgacatcaaacctggggctttggttaaggtaagacctcaagcatataattagacgctctcccaccttcagacagtctttagttcacaggttaactggcagctcattagtccttagatgaacacatttaaaggcttgctccttccctctgcctgctaactaggatttcttttccttctcttgggtgacttgaaattaatttcacggtaaagtcttgctagcaccatgccactacacagaggcagtagatcatcagtcttgggaattgatggtgtttgttagaccaggtcaaaagttagttctttggtaatttagccacctgggatattagtaaggagtcagttccagttgcctttcctgtctagccacttagccccagtggagcagctccactttatgtagagttcattccttagcagacatagtcctctccattggagatggaactggtaagacagacagaaagatgctcacccaaaaaggtgtgaaagtttcataaataaactcttactgcatccagcccagtgtggggcacgtgcttggcccctatgagatctggaataacaggagaggtgtgagatgctttgttgttaagaattgtaggaaagacattcttgaggcatcatggcatcttttccttggattcttagggcaaagtgctgaccataaagccacacggaatggtggtgaagatgggcaagcagatcaggggcctggtacctaccatgcacctggccgacatccttataaagaatccggagaagaaataccacgttggggatgaggtcaagtgccgggtgagcctcctgaagggttgctggtggggttggccagataggaagagagcagtgcttcgcaggtgaagttctgcctttttccacaaagtgaccacataatgtctgcagtgctgtgcctggcactgggaagagaaaaatgggtccctgcctttgataattgtatggtataattgagagttaaaatatccattcctgaagagtgcaggccacgtggctcggtgcaggctgtatgctgaggtcacatctcagaacggggagatgagggtaggctggggcagcaagcatcattgagaatcagtgatgatcaatagcagctaccatgtaacatgtattctgtgccagttactgagctcggcacatcataacatttcatttcatccttaaaatggccataagaagcaagtgctgttttcctcctctttgcaggtggcgaaataaaggctaggaatgtcaagggtcttgcc

SEQ ID NO: 38189 - DNA, 1011 bp, Bovine  19866880396376
  misc_feature (1)..(1): n is a, c, g, or t
ncaccagggaaatggactaaaggcaacaggttagccttttacccatccctggaaggccctcaaggaacagtggaaaccaggcttggggagacagttatgtgttcgtgaggctgcaggcatggctttgcagggcaggctctggagtccatacccaccactcaagtctctgtgatctcagatcatttgcccagcctctctgtgtttctatccctgaaaagcaggaatgccggactcctggacagtccaggggcttaccgagatgacacgtgtactgagataacccggccagtgctactggcccattggatgggaggttgtggaacagaatggaacgtggctccttgcacactccacctctgcagatcacagcctggcttttgcagggaggagtcataaggaatttagtctccaggtttccatggcaacaggggttatctgcctcttcttgaggtggtaccggccacctgggccaattcacatctcgtctggcaagagagggcctgagaacagaaccactccagcacgagtacaggtatgagggtcaggaggtgggtttggccccagagttacagttttctcaaccctggcccctctcggcctccaggacctgcaaagagagacctgtgttccgtgcagagcgtagctcagacccaagggtgacccgcgctgatgatctgtcagccaagcgtttgcatccctccctctcaggactgcgcgcaccatccctccctctgaggactgcgtgcaccatcccagaccaccatacacctcccccctccatcctgaaacataaacacgggattgagtaacagcgtattttgactctggggcgactgtggagtggcttatcaaattatcaaagcctgtggatttaattggaattttgcagataaccccagcctctttcaagtgcgctgctgcgggacctctgagcgctcaaggggctggggtgggggactgtggccctttccatcttgcaaggaagacaaggttgcaaaacagcccagctcg

SEQ ID NO: 38190 - DNA, 2111 bp, Bovine  19866880402268
  misc_feature (1)..(1): n is a, c, g, or t
nttttagcattttaagtggcatttagtacattcacaatattgtacagctaccactctatgtagttccagaacattttcatcaccccagaagggaagcctgtgcccgtgaagcagtcagtcctcattactccctcgcctgaatccccggcagccactagtctgctttctgtctttatgcatttgcccacactgggcatttcccttagatggactcatagtacatttgtccttgtgtgtctggctcctttaacttagcctagtgctttcaaggttcgtccatgtcctaatgtgtaccttctttcctttttgtggctgaataacattccactgtgtagatttgccgcattttgttcacgcacgtcccagctgatggctattgagattgttccgctttttggttactgtgaattttgtgctgtgaagatttgtgtttaagtttttgtttgaacacctattttcggttcttttgggtctataccacggagtgagccttccatctttttaaagctggtgcttttgaattggacatttgataaagccactggttgtgacggatgtaggggggatcatccccctccggctttggctgggggttgtacccaccagacatctgttgtcttcaaaggcttttttctgtggtggccgaggctcctggcaggcagaggggggagtatctgaggttgaccgaggagctttgactctttgaggtggaccagagtgagctacaggaacttgtctgtcagactcttaacctcctcactgctctggggtggggttggggggtgcatttgcctaggacaaggtcctagccatttttcagccttcagagccttgctggtactccccctcatctgggtccccagtccaggtattgcagtagctgacccctctgcctctcattcctcctttgatgctgcgaaagggatcctcctaaagtattcctttcatctgcccctctcctatcaatagtcttcagcgtcatgacccagactgccatcatcggaaattcaaggcctccattctttgcttgacccacagatattcccacagcccttgtctgggctcctcacttggctgtcatgacacttgcatgttgggttagctcatctgtccaccccccagccttgcagcagacagagttggcgttgtgaaggggtgggggctgggggcctcctctgccacaccaagacttcagagagctgagttgagacagcccctatgctgaacctggagcatctgtcctgcacaccctgttgggtttttatctagtctgacctttgaactctgtactgttagccatcacagtaacataagagcagccacatgtgttgggtggttattgggtgcctagtgcttctgtgtagattatttctgagtgaggagctatcgttgtcaccattatagatggggaaagagaggctcagagaagttaaatagctaatcccagaccacacagtttgaaactgatggaactgggattcaaacccacgtctctctgattttagagttcactcttgcaaccactatacattttgccaccatagaattcactctgggtgggccctgtcttccattgtgttagagaaactggggagcagtctcctggcctctttcccagaagagggaaagagagtaccatagggttcttgatgctcctttccaacccccgaccccacccctcccacctcctctgcagacccatcagccagtcatcggacactttcaagggaactttatgttcctttgggccagtgtttctcaaagtgaggtttttctctcgccagcatcagcatcaactgaaaacacatctaaaatgcaggttcccagcccccaggccagaccaactgtctcagaacaccttggtgatagaactcccaaacctgcatatttaacaggagccccaggtcattctgcctcattatgcctcagagtctgagaactatcaaggctgtggggcctcagaacacacccattctggtattcttggagttggtgaaatcaggcttcccagaggagaggagcctgaagttggatggagatttggaatggacattcaagggcaccttggtgagggcatggaggcaaaggcacagaagcaggaaaatacaagg

SEQ ID NO: 38191 - DNA, 1954 bp, Bovine  19866880457242
  misc_feature (1)..(1): n is a, c, g, or t
nattcattggaaaggaccctgatgctgggaaagattgagggcaggagaagaagggggtgacagaggacgagatggttggatggcatcaccgactactcaatggacatgagtttgagcaaactctgggagacggtgaaggacagaaaagcctggtatgctgcagttcatgggatcgcaaagagctggataggacttagcaactgaacaacaaatgataaaggacacagatgaccagccaaatgaaaagacacttaaagcgaggtctgggagagtctgagtacaaaagtttttgtcccagtgaacttggagtgtattagccacctagcacgtggatgtgttcaccaacctggacgctccctcagctccaaacctttgagatttttatgaaggcttcatcatgtaggcacgattgatcattaactccatttccagcccttctcccttctttaagaaaattggaggcagggatgaaaattccaagcttctaatcctggcttggtctctccagttaggtcatccaggagccatccaggccccaccaagagtctcatcattagaacaaaaaacactcccatctccaaggaaactacaagagtttggggagttccatgccaggaaccagggaaagagaccaatatatgttttgtattacctcactctggatgcacagacacagtgagagagaccaggatggggagtcaggactcaggggctgtcatgctggccctgctgccgacccaactgtgtaattttcagtgcggttctcaaccatccagaggcttgtttttctcttctacaaaatgggagctgtaatgcctgccttgtatttctcaaggttgttttgggactcatataagtaaaggctgtgaatatggtgctgaagcaccagaaaggaatgcatatttgtggcttctcagtccccacccccttctagtcagggccccaagcttccccaccaagtctataccaaggatccttccctccaccctctcctccagaccaagtaggactctacagtacaacaccctagggttgcctccaaggccttgggttagagcagtggggtaaggagaaaccaattttttcttactcagagtcctggtcccccaggtccttcctgggaaagaggaagctgccaagtattaaacattcaggaatccacagtcactcttggaattccagcttagtgagcctgttcaaataatgcttcctgctaaactaacagtgatagcagaagaatgctaggagacattccatccctctggttccagacagtcccggcagctcaacttgttatatccgtgtgttatatctggaagaaactttagatctgtggttcttacttctggctgaacattagaatcaccagggaagcttttaaaaaatacccgtgtctggctgttcctcacactaatgaaatcagaatctttgggagagggacctagacatccgtatttttaaagctccccagatgactgcaaggtgcaacctagtttgagaactactactatagaggttccaggtcaaacacctcactttacagaaggaaaaactgccgctgtgggagtttaagatttttgtccctatttaagatagggatagaaaagggtcgttatacaggtagttgcagaagtcccagtaagggactatagagagggaaacctaggaaacgacgggagacgactgtaggttcatgatcgctcaagaatgctattggcacatggtagaatgaagcaggctcacccataaagccataaagaaaaccacgagatatgccccaggttattaggtgaaagaaaaatatcaccacccttctactgatttaaaaaggactatgacagtcctagtttgatctcatcgggtcagacaacctcctgaccaatataaaggaggagctagtgaagtaagtttgacatctacttaagaaggcggtctttacccctcccccactttc

SEQ ID NO: 38192 - DNA, 2943 bp, Bovine  19866880489339
  misc_feature (1)..(1): n is a, c, g, or t
ncatcgcagatttggggcttggtcctgggagctacatttttaggaattgggcatagacccattcatttctctgcctttcattttttttccttaagcccttagactgtggatccagccccaggggaagaaggatgtgcagctgcagtatggacagggtcttctcaggccagtcccactgtagaattactggtgttgggcagttcagggtttgaatcttggctctgactcttcctgggtgagcagcctggagccagccactctgggtctcagtttcctcacctgtaaccttacaaggattttagaaaattgatctgagataatttgggggcaaagcttctacttttagtgtcttacctcgtggcgctagtggtaaagagtccccctgccaatgcaggagacagaagagatgtgggttcactccctgggtcgggaagatcccgtggaggaggacatggtaatccactccagtattcttgcctggagaatcccatggacagaggagcctggcaagctacagtccatagggtcacaaacaattggacacgactgaagtaagtacctggcgcccatcatgggtactcaacatactagcatctgtctggtgctccttatcactgaaacccatgagtacatttagaatctgataggcgaagctgtgagagaagggaagactgaggcaaaaaaggaaggccagctgttcacagtctgatgggaaagtgggctacatgccccgtggaaaacactcaacatacaaaagaagcagataaacaaggagcagctgttcagacctggagggcttcctggagctgtccaagtgttggcttgctggtgtgttgggaaggaacatgtgttgggggagcagagtagagaggtgctgcaggtgagggcaaggtcatataggattccagctccaaagtcagtgccacacacggggtcagcactcttccctgctttcttttgggctccccaggtggctcagagggtcaagaatctgcctgcaatgtaggagacatgggttctatccctgggtcaggaagatcccctagaggagggcatggcaacccactccagtattcttgcctgggaaatcccatggacagaggagcctggtaggctacagttgatagaggtgcagagttggacaccactgaagcgacagagcacacgtacatgttttcttactgtctgtctgtctgtctctctctctcacacacacataagttttttctcctgctccaaggagggaagtgatctaggggtgattcacgggtctgacaaagattcctgctcatggaacaaccgaccacatccttcaaggctgatggaagaaggaacacagtcagccatttatcatggtcctctttagagccagccgagtgagggcttggggggacaaatcgggattggaatcaccatgtgtggtggcaggcagaggggaggcaaagggaagggaaaaataaacctatttgatgtcattggagaccggttccagatccagaaatataagcgccagctgctgcattttccaaagagatattccgaggccagcatgagttaatcgtcggtggaggcagtgaattagaggagtgttgttaggacttctgactttggggtttgcaccacggtccctggaaattgccttctaatttcctcagcctgagtcactgaccagactatttcttggccagaaaaagcctaacaggcaactctgttctcttttgcctctttattaaatgaaataaaacaagtaatagagttatacatacggtagtcacacttactcctcttgagttctcagagtccaggaacaggatcatgggtgaggacagggatcccgggaacaggaaggacaaggggtgtgtgtgggaaatgaggtggagactctggctttggaaacagtttctgagtcagggccagaggtgttctctgccgtggctattgccaacaataacggaagagtccaggagggtgatcagcatttcaggaggcgattcccagggctgcgtgtgacttctcgcctggaccgggttgcttcggctgctgctctgtgtagtggagtcaaggacaggagggagggaagggtggcacactgggccacaaggaggcccccaggagcctccaggtggctcacattagcagcgggtgctgagcagaatccagtgaggacgtcgagatgcagtgagaaggaggagaaccagtatatgagtgcctgctatgtgccaggcagtgcagaagagacctttcagaggggatttcattttaacatcataacctccccatgaagtaggtcagtgtttttatccccactttacaggtgtagaaactgaggcccagaaagtttatgcagctctcactcagagtaattcagtgtcagggctgggatccttactctggcatctgataccggagtctatgagcttgtcactttcttccccattaaagccaggtcaaatgtgaggagtgtgaaaggaaccaaggagtctgggccacacctcctgagagtaagatgtgtgtctggaaggctgtattgttggagagttcctggtctctgctatccccaggccagaatcctgtctctaccacttactcccctgggattcggtgcaagttccttctctctctgtgcctcagtttcctcacctgttaaaaacaaaccaaaccaaacaaacaaacaaaaatgagggggaaataggaactagctcaaagggctgtggtgaagagtaaatgagtcgataaatgtaaagagcttagaacagtagctggcacatattaagtgctgcataggcatttgtactaatattgagacccacttccctgggggctcagatggtaaagaatctgcctacaatgtgggagacctgggttcaattcctggattgggaatatcccctagagaaggaaatggcaacctctccagtattcttgcctgggagaattccatgg

SEQ ID NO: 38193 - DNA, 1304 bp, Bovine  19866880507047
  misc_feature (1)..(1): n is a, c, g, or t
naaaaaggccttgtcttacacttatgccttttaagaatgctaaatgtagattatcttatcaccaggacacaatgctcctgcccaaaagtaaagagtcccttctggtcaatcaacaccacagcaaataaatataaaaaagaaatcttgatcttctaacagtcttgcccaacagatttcctgttgctgcatagttggtggggtcttgctcccctgctggagaggaagagactctcagaccagagaaggggcacagatgtcctgctcgcacgctaggaaataggttctaggaagtccagttttcatttgcccagctgtgtagcacctgcattgcccagtcttccacatgtgccaagtttgatgcagaattaattctctgtcagagtcacttccacagatctgaagagttgccatatctgtgtcacacatctccatttccgtggtgaaaaggacatgatgcttttactcaactttctgatcctagcacgtgctttagccgttcaaggaacttgaaagaatacgtttctcttcttcctttccctcactccattcctgtctttactccttacacttactgtaaaacattagtaaaataagaattaaaagtcacacgaatcccatcaacataacttgtgttttgtggtttctgctgctttaactgagagaagaactgttttggttcagtgaacaattgcaccccctgataattcagaaatcgtatgttctctgttctgtgcatccttgtttagtgtttcattttttttttttttcccctgtcaaagcctcagggttatagtctgcagactgtctggtctgaaacataatgcactaagtgggcagttcatggcaggaaatggggaaatcaaatcaatcaaatgatgaaagacaatgtattccatgcctggataatgatttaactagcttagcttgctgaagatttctgagaatgaactggcagaaggcacatgattaaaaagttcttcaaaacagtaagaatcttttccttctttgaaaatgaggttctgcttctgcagaacccacatgcctaggtagaacatgggcagcagtaatagcatcttcctctagtgtagtgattcttaacctttttttgggattaaaaaggcttctcccccttggagaaagctatgggtcctttccctcaagaaaatacatgcataaaactatacaggtcgagggacctgtgactccttagaactatctactcctggtatacagaaggctatggatgccaagttgagacctcctaatgccaggccaggttccaggatagagactgccaatgaggg

SEQ ID NO: 38194 - DNA, 1131 bp, Bovine  19866880591492
  misc_feature (1)..(1): n is a, c, g, or t
ntggttaagaatctcaactatgtacaattttaatgagaccatgttttgtgtgtttcccatcctcattaccaatatatttggatgaccttataccaaaggcttttgtacagatttttttcaccacacctttattttctaagtattgttggagatgatctggttttttccttggaaggcagccgtccttcctctctgttgtctgtttctcagaccagtctggtattcttcataactcatctccttgggaagaaattaattcacaccaaatgccagtcttgcttaaaggtcttctgtaggtgctcaaggaagtatcagggacatgacaggggccaaactcttcctgtgggtgaaggactttataatgtattaacacatcatggaaaactgctcccagtcactggtggtaatgtttcagatgtcgtttttaaaacgaaactgttgccaaacccaggtttgtgtgccgcttgcacagcaagaccaaagaaaccaaaatgttggggtttggagcagagaaaggtttattgtaagggccaaggcaaggagaacaggcatctcaggctcagaaaacctgaactcccttcttggttttcagggaagagttttgaaaagcaatatttggaatgagggctacggggtgtatgcctttcttctgattggttggtggtcaggtaacaggctgctattaccggaatcgcaatcgtcagtctcctggttttgaccagtctgggcactcagcttgtagttaccatcgtcctgggtgggggttcttagtgcctgcagaagaactcaaaggtgtgaatcaggttgttaggtattccccttaagggggaactgggagtctgttttgtttgaggcactattgtttcttgactgcttgggctttgcttctgcatcccccactcccttaattagtaactgcttgaatctgccctttggaactcagggaaggtctaagaggctgaaacctttttttctacaaaaaaaaaaatcgacacagacacagaaatgcttttgtaccctggagagcccctgcagggccctgcttggtttcaaaacttcatggttggtgttcaacccaaccagcttggtttcaaaacttcaggctgaagaagtcattaactaatttcacag

SEQ ID NO: 38195 - DNA, 1174 bp, Bovine  19866880596009
  misc_feature (1)..(1): n is a, c, g, or t
ntattcttttgtctttaaaatccagcgcatatctcacccttagagaaccccttagctcagactaggtacattcagtggcagtagtcaatagccactcctgtagtagtgcaggtcagttttgcaattacctaccttaggaggcaaactctaaattcactcttagctgtgtgaatttaaacttaggaactgaacaagattgtaaactcacactagtggctacctctcccatcacactcaaccctagagatggcactgaaattgatagatcagtaaaaactgaaaactctgaggatgtgtgtgtgtgcacatgtgcacgtatgttgataaatagggagtgatggggctaatggggccaacacctcacaggttttcttgttttgggtgcatccttcgccttttaccaatgctgggctttagcctctccctctgggtatataaggtagctgataccttccgggaaatacaaattcatagagaaaagtaatgggatgcagagggaggtgcaactgctagtaaagcaagaaactgaacaacttaaactagatgaaatagattaaatgcatcagatgctacccagttctcgctcatctcctccccactctctgcccttgcccctccctacccatgtttcataatcttacattaagtcaaattccattagttttatatttcagtgttgggatcaccatgaacgtcatgaaaaatagctggtctgcaataaacgtaactattatccaatgcaaatgcaagaggctgtctccacgtcccacttcctgcctttttgccactcacttttgaaagttgctcttgctgcgattcctttttctcattctttatcgcccctcctactgccgtaaattgccccccagagatgtcgtaaaatgctcctccccgccctccatgtggcgaaaacgcaatcacgcttgacggcgcgaggtggctcagccgcaagatggcggcgctggcagaggagcagacggaggtggcggtgaagttagagcctgagggaccgccgacgctactacctccgcaggcgggggacggcgctggcgagggtggcggcggcacaaccaacagcggccccaacggcggcggcgggaacgttgcggcggcgtcgtcggccggcggagatggtgggacccccaaaccctcggtggctgtctccgccgttgca

SEQ ID NO: 38196 - DNA, 3123 bp, Bovine  19866880612129
  misc_feature (1)..(1): n is a, c, g, or t
nctacattttgagctcggatcaaaaggaacatccttaaactccaaggagtcctttcatggtaaatgatgacttcaggggcagtctgtccctgggtatggggccacacctaccaaatggatgtggctgtccccaaggtcattaataagcttggagtcctgaagggccttggtttctagcacccaacccttaagagtcataagagtcattcctaaaatgttgggctctgcctacactcaatagtgattttcttctcgagttccaccctgggacagatgtgtgcagtcagaaatgtcacccaacctgtctttccccaccttacaagtcagctggaagcactcatcctaccctactcatattgggtgtccttccttgaagagaacctccccctattagaaaagtacttctcttaattaaacctcaatcttgatagactcaactgttcatcacaggggatgctcttctttaccaaggattctgttttttagcttcttcagtggccagggatgtaattaaatgccattgtttcaatgacacacattttccgttccagctgcttgaagctccttttctgctaaatagtttggcagttatctctttggccaccacttatctcccgtaggcatggccttccagcatgacctgtaccctttctgccattttacagagtccctgtaagttaggaagaactcttgccatctcaagcaatgtcatgatgtggcttatttatttatgagagtaacatagctatcttttctcacttttaattggggatacaggggacaagcaccatcaaggtggccataatttaccaaaatggcagtcttcaaaagtcttaaacgcacaacattctggagtacacacagaataagagcaaaggagacaaaatttgtcatgctcttgcaaagaaggctagtctctggcagagccaaggcctcacattcactcaagaactcgagtttaggtaccaacattatctaaagtgagactgtatagtatcaaagagtgggtgtgttagtaaatcatttatcaagtgtaaataaatatttaaaataccacaatgtaaccctgcttttggtattgctttatttgttcatttaacatatcagggaaagaaaaaagtctgacccagtcctaacctcttggaggtcatgggtcagggtcccaccactaagttgggatgaaagggggacttaagaaggcggggattgggcagcaggagttttagggccagcttccaggcctcggagatttgggttctgcacttccgcggagactcaagaaagtcgctgctagaagcaatgggccccgcgcagcccttgccaaggccggccaccacctggaaaggagcacctggctaggccgcagcgggatgcaaaatggggcgcggcctcgttgggaaggggcggagccgcgggcggcaagaaggaagggcctgggcggggacacagtggtaggtcccgcgcgcgggagggtgtcgggcccaaccccccaactccttagctgggagcacgggaggtgacttcgacctagcgcttctgctccgggcggggttggcggcgccgcctccaggctttgggcgcccgcggcctctgagcgccggacgggccgggcatgcgcgttccgaggacctgtgggccgacggcgcgggtgcggcgggaggggccgcgaccgggtctgtttttcgtttccttttcctccctgtctcagtctcatccccaacaccggaagatgcaggggcctagctacaaacggtcccaacccactctaccccctctcgtgtctggccacgagggtgcccattcctctctggaacccacgtattaaagcggtttcggggtacgcatatatggtcttatgtcccccaagtgaaaagttggtgtttagccatttagaaatgggtaccttggagaaggagaaacactgccgtggggcagaagaaaaagccttgaggaactcaggggccctcactggaggaatacctccttcctcaagcccttggcgcgcagtttaacaggcccggggccctgggtttacccctcccagagttcgggatgcctgcccagggaacagcttaggggcctgcgtgacgatttcaatacccaagttaccagctttgcgtcctggtttttgtctcccatctagatctcggctctagatgctgagcttttcagggctgactggaagccacagcccagtctccagatggagtctaactccagccagtgtgaagacgaaactccttccctcttgtggggtttggatcctgtgtttctagcctttgcaaaactctacatcagggacatcctggacttgaaggagtctggccaggtacaaggtatgtggctggtcacccaggtggctactctgggctgcatctgtaccccacccttccttcccccaaagctgcagaaatttggggcttaggggcttagaagaacctttccagttgcagctttgaaactgaccctaacctgcatccttagacaagttcatttctgtgcaagttcaaaacaatctaaatcttttttaaatagatgtttggggcagtaactttgtactgaagaatgtttttacttgggtttgaggtctttcatatttaaaaatgctcagttgtttttctctggacctgtttgtggtagaaaacttaggccttacttctttttctaaccacttacctggcctgggtatgggtatgtgactcacctgtaaagcttaagagttttctttgtaaagagaggattaactgtgcctgattttcttgtggagtttggttttgtttgaatagatcagaatcaagatcagaatcaaaataatataaactccccaagaggaaagacatcatctgccttgttcatctatgtaatcccagcttttaaacagtgcctggcctctaatgggctctcgaatcacagtaactggagcaacaaagcattataaagttagaaatcatttttaaaatcagagtggtggtcgctaaaggtaggatcttcatacctccaagtatagcaaatacagtttaggataataagtaattcacatagctgtggatgaatcttcacatgtttattatgctatctgagaagtttgattaaactctctttgctatttgaatgaatagcaag

SEQ ID NO: 38197 - DNA, 606 bp, Bovine  19866880612924
  misc_feature (1)..(1): n is a, c, g, or t
ncaccaagttttgggttcctcatcactgaacagacttctttcttgcttggcttcttcccggccagtgtcctggcacactatcagagggggaaataattagaaagaactgtcttatagggatgagaagcactgggcgcttaccagatggggataatcaggagtcttcaaacaaatccttgaccagacagagcaccatgtgtcttttcgcttacgttaactataggcagtgttcctggctcctgaaatgtgtgcatggaaagggcagggggacgtctgctcagtttccctcattcccagggggacccctgggttgctcttcggttcgtgagcagtgacccaactgtagccccagagagttttctaggagcttccctgatctcactgtggagggaaaagtctcattgcattcttggttcactgagtgtggggtggggagcgagagacagctttgttatttctgcatgacacttgggactctcctggtggtccagtggttaagactctgctcttccaatgcaggaggcacaggtttgatccctggttgggaaattaagatcctgcatgttgcttgctgtgcccccaatttttttttttaattaaaaaaat

SEQ ID NO: 38198 - DNA, 948 bp, Bovine  19866880689344
  misc_feature (1)..(1): n is a, c, g, or t
ntcatcgggacaagaatcggggaagaccctccccaaggactgaggagaggctgcgtggatctgacagggctttgggcctcccagcttgcctcaccgttcacctcctttatgcctggccctgtttttatccagaaaagctgaggacattctaactgtagaagaacctgtctgggctggctccacgagagccccccctgcccacggctcggctgcctgctccgcaatgggagccgccgccgtcgccgccgtgtagtttttaaaaaaaaaagaagaagaacctgtctgctcaggctcttgtttcccagggaaaggtgcagacatccagagtggggcttgggcttgcctgttggtggtcctggtgaagggaggtgatgtagcccccagggttacacagcaggggcgagtgccgtcaagtggtttggcctgaagtcatggtttgaaatggacatttatgaggcttgacctccctctggcttgaccatcctctccctgttactgttagcgctgtccagagctgacaggacttcaggagaaggtggggctgggctcttcaggcgatgtcctactgacaggtccagagtcacattcttacaaagagttgttaccacaggaggtcttcccaggtagcgcggtagtgaagaatcctcccaccagtgagggagatgcagcagatgtgggctgatccctgggtggggaagatcccctggagcaggaaatggcaaggggctccaatattcttgtctgggagattccatggacagaggagcctggcgggctacagaccatgggctggcagagtctgacatgactgagtgactgagcacattatcacgggagagttaggggtgagggtgggcaaagggattagaggtatgtgtgtaagcctttttattcctttaggacgaacccagagacgaaaagcaaaataacagatccagagattaactc

SEQ ID NO: 38199 - DNA, 807 bp, Bovine  19866880707974
  misc_feature (1)..(1): n is a, c, g, or t
ntatatattcctgttcttgcctgggaaatcccatgggacagaggagcctggcagtctacagtctgtggggttgcaaaaagtcggacacaacttagtgattaagcatgcatccttgtaatattctaagtgtggtcagatcctcaggccagtccccaaaacctttctcatccattgagtaggtgcaattatagcatcaagaaccagatgtctctagttcacctgtatcacgggctagcttagtccatgtgtaatatccagggaagctgtcctccactgttcagtgagaaggaaacttccaggctaattgatgacgatggtgatgatgatgataatactactactaataatatttggagcatgaattatgtgccagtcattctgctaagcactttgctcattgaatccttacaacaacttgatgagaaaagcactcttacagtccttactttattgatgagaaaacagagacacagagaggttaatttaccaatggttataagctaggaggaggcaggcctggggttctgagccaggcaatggggatacaagcctcttgtatcttatgtcctggccttccagggaatcctgccagccagtcttgccactgcctaaggttgtccatagaccttagataccaagtatagaagtcagggaacagagaccactggtggcaggcaggagcggccctctttgtccctgaaacaggaaaaaccatttgttcctggaacctgacacttcagggggtgggtttgctgtgtgccattgtcttcctgggccatttacaagtccagcacttggggctgggga

SEQ ID NO: 38200 - DNA, 1179 bp, Bovine  19866880768643
  misc_feature (1)..(1): n is a, c, g, or t
nccctgtggcagcacataacatccatgctctcactcagtccataaaatccttcaagcaggattttttaaccccatttcataaacgaggcacccagttcagagaggttggataatctggccccactggccccgggaggagacatcaccaggtggtttgagctgatacctgtcaccttcctctcaggcactcaggtccctgaattcccttctgggctctgcctctcctcctgtccaagcctcacagcctccaccaaggggcacaaggtaccacggagctgaggcagaggcaaggtccagagatcccataatctagaaggttcggcctgctcccaggaccctgctgatcaccccacccacacccacagttgggccaagagcccgccagggccacagtaggatcctgactccagggttgtggggagtcggccctccgttctgctccagggacctcccacaaaggagactctcaggttccctggggacccagaagcctgctgcctgcaagcactgagcagccccagaaaaggaaaaagatgaaacaaattggttcttaagacaagcaaaaaggaattataagaaatctcaaattcctttttatcttgacgggattaccccaaggatgctgcagaaaaagcagcacttaaatagagccctcaggcaacagtttctcaactgcccaggcgcctgagggtcccacagtgtcctggagccagccggcccctagtcgtccatcatggagctcttcgcctccacgtattccagggcctttgccttgactgcctgcacatccttctctgagccgtgttgcttctcatagtccaggtagcgcttgaagaagaatttcattcgcttgggggccaggctcaggtgaatgacccgctcgaagatggccctgggagggagagcagatggcgtttgcctcttggtccctagccacgtgatttctggctgaccttcactcactgctctcaggctctggagcactcccacttctacctttatttttattcctattataaactgtcacgtccgtggacagagagaacaccacccctgctttccagaggagcagactaagatgctacagggccggagtgccctgaaggcacacggggaatcaggacagagctaatgggacgggacaccagtaagggggtgggatctgtgaggacagctctg

SEQ ID NO: 38201 - DNA, 1508 bp, Bovine  19866880774443
  misc_feature (1)..(1): n is a, c, g, or t
nctgagggacctgccctccaccctggctgaggcaggtctgcagacggggctccagaggagctggagatgggcccagtgaacccacgttgagtggtgattcctgggctgtgtcccgtcctgtccctcagctgggtggctttctccagaggacttcttgagcacaaagaacaccagagagtagctcagcggggcctccccaagtgggttttgggcctccatccttcccgcctcttctcattgcttcatggacaccctggcccctggtctgggcatggaggggctggaagtggggctgtccagagtgcatcctctttcttcttgtgcccaggaggtgggtggcaaggtagacaggctgatcccaatccatggaggaggagaggccggggctttcttcatgaacctgggaccagccaggttcgtgcctcccccctcactgctgtccccgtgtccccaggaacagcccccaattcaccagtgagtctgcccgaatcaccagtgaccccaggcgggggcccgtggagcgatgagtgcaccatttgctatgagcacgcggtggacacggtcatctacacgtgtggccatatgtgcctctgctatgcctgtggcctgcgcctcaagaaggctctgcacgcctgctgccccatctgccgccggcccatcaaggacatcatcaagacctaccgcagctcctagccgtcacggacccatccgctccccagcttcctccgaatccggcccggctccggctgaggcgcaagtcaacggggccccttctcttcttcctcgttttggaaattctttccccttctcattaaacttgggaaacagcccctgaggtcctggggaggaaggggagtcaggctgggaggtgggggcagaagcaagtctcagctcttccctgcaggccgaggggctaaagcggggggagggggggtctcagcctgtcctggtcctttcctgcctggggtagattcccaggaggtctctttagcctgtgtggcacctttgtgaacgttagaaagtgtgtcccatcctctgggcagatgcggccctgagtccagacacgtggcctggctagtggagtgtggccctggacttcagcctctgttttctccctcagccagctgcccttgagcagtgcacagcctgggctgctgccttactctctgaccttcccccactgtctccttccttctttcccttccccttgggcctggcagccaagggtaagacggccagtggatccctctcatcccaggagggctgccgcctctgtgctgtgcctgttgcccactcaccctggatgggtggacagacaggccacggaagcctctgggttctgggttgctagccccctggcctggttgagacgtggaggaccccttcctggtcgtggcctgtttgcctcagtgggctcggggatgctcttgcctgggggcagccccttggcgtgggctggagagcaggggaggtcttctgtcaggcttagcatccctggagaggccagg

SEQ ID NO: 38202 - DNA, 925 bp, Bovine  19866880783048
  misc_feature (1)..(1): n is a, c, g, or t
ngctgagggtggggagcgggggtgatggcagaactggttataaagcaggatgcaggcacaagcaaggaaagctgggatttctgttctacttggcagtggttctgctgatgtaatataagaaacggaaagaagactgagtccgaggccatgacctgccttcaactggtggggcagatcccctggggttgaccagttatctctgctgatgtgtgagcccccagatgttctttcatgtgatcttcacaaccttccctgtgggccagctcgccttggctccatactccgggaaactcttgtgtttttgactcttccttgcaatctatcctcccttgtggaaagattgtattgggagccccaattaaagcatccagagttatcattctcaaaaaggaaaaaaaaggcacttgaccccaattgtgtttgacttcagtgctacatgccactgtgggcacatgaagcccccagaaaagagaccctcactcagcatggagcatttgccccgtcttcctggaagcctgatctttaaaaaggaggctgagtgtgctgtcttgtctccgccgtactgttcttgtcccaggagaaaggtcagtggcagtttcattcccaacatttggggtaacactttctgatagacagtgatgagaatgaggctgcacttttgaaaggaacatagcaaagtagtttagagcaggaccctggaaccagattgcctaaatccaagtttcccctcttccatttatttccgtatgaccttagacaagtcacttaacttctctgttcttcagtctcctcttctataaaatggggataataacagtgccatcctcataggattgttgggaggattaaatgagataatgatgataaaggcacttagaacagtgcctggggcaggttagtgctgcctgagggtccctgttgtcag

SEQ ID NO: 38203 - DNA, 1481 bp, Bovine  19866880796521
  misc_feature (1)..(1): n is a, c, g, or t
ngcttccctaaacctgcccttggatgagaagacccccatgcccctgcccagattctactgtgctcaggatctgtgtgggtggaaggaacgagcactcacgctctttcttaggcaggcactcgagggctcgctgcatcacacggtgactggcctccgcctttcccctccgcagaaggaaggcgccgtatttgacccagacagctttctcctgcctgaaacgcttcagcatccggttgtagagttcgccagcttcctgtgggaagaatgatgtaagctgagagagcggatgagagcagagggggcaacgacagagacagatggctacgctcgtgggaagctagccctgggctcaggggctccctcagtgaccaggccctgatccactatgtgaggggaaagggcaggcacccgggatgacgagagcatgtgctggggagtctccctcctaatcccatgccgcgaggaggtcgagactagaagagcgcgtgagcacgatgagggcgaggagagacgaaaggggcgactgggctacatcacctcccgtctgtgacacctctattggtggctcaagggtgggggaaacgacttctcccacctgaagacgagcaagcctcgggcaggactgggcccagaggcaggggtttccccctctccgagacgtccccgctgcctcagggacttccaggagcttgtctctgagtggctgaggcccctctggaagccggctgcctggcccagacccctacctggaatttctctgacttggtgtaaatgtcagccagatggagaaagaccttcagaggctcattgtactgcacggcccgctcgaagaccttggtcagcgactcctgggagccatacatgttttctaggttcagcagggccacccacacgttcagcttctcctgctcctctctggagggagaagagtcagcacatgagtccatcctctcagccccatgagcccccactcccaagtggggggctagagccacggcccctccccaggctccacccatgtcctcagtccccaaccccacaagccggcactgagagcccccatccccatgcagctcatgtagaagcaggaaccccgatccatggctgcggggtctgaggctcccctgatttctgcctccactcctgggaaggaaatctaccaaatctcaaactggcctgaggtctgggctggatggggcagaacctgtggtctgaatctcccctcaaactacgataatgatgcacaggagcaccatccctgttcactagcttttgggaaacctgctagaacctcggcctggaagatggtcacaccaggattttcacccaggtatgtggagaggcaagtttttcctcttctacttttctccaagtggggcacctgaagtgtagggactcatggaaatgtgaccctagccctctcagtgaagaggaccatgaaatataaatgagcagatctatgtcacgaccggcctctgaga

SEQ ID NO: 38204 - DNA, 943 bp, Bovine  19866880805655
  misc_feature (1)..(1): n is a, c, g, or t
ncagtttccacacttgtccaatggcaaggagactggtacctcgcagagtgtagccgtgaggatgcagtgaccggacaggcgcaaggcagccgtgcagagtgtccgcacagaggaagcatttgatggatgctggctttttgttattattattacaacacccaaacaattcagtgttatcacggggcactactggcttttaatggagatggaatttcctagttaagtgaaaactattgtggagtctgactcaagaatcttgaggagaagcaagtggaggataatgttttgttgtgagtgctggtattagagtgagaagagctggggttgaatcccagtgccccactgactagctgtgtgaccctggcaagttgctatacctctctgagctcgtttcctgatctgtaagatggggggtaaaaataactgtctcacagggttcatgaaggggttgagcaggagaatgtatctcacagtgtttgtaacttctgaaatgttctgtccctacatggagttgttaccataaggctcctttctgcataaatattttgtaatttggagtacttgtcaataataaaatatttaaataagaacctagttgctcaattatgtaactgtgttcccaagaggacggagaagcaagcactcccaaatattcttccttatcctaagtttgaattttgtgactgtgcaaattatgctcagtcactttttctgcctttaaggtaaaaggatgccctgttgatgaatttccttaagctagaagtttctcttcttcagatcaatattcatttttctcttttgagggcaatcgccaattccagttaaattgatggctgcagcctgcgtgtttatttctctttattcctgtctcaagcagttaaacaaatgggcagagctatttgaggaagggcacagggcaggaggaagccttttgccactggga

SEQ ID NO: 38205 - DNA, 1745 bp, Bovine  19866880812367
  misc_feature (1)..(1): n is a, c, g, or t
nggtacctaagttattctaggaatcaatatattaccttctcttttctcaggaactacctgctgtcctcttcggaggatggaactgttagattgtggagtcttcaaacatttacgtgcttggtgggatataaaggacacaactatccagtgtgggacacacagttttctccatacggatattattttgtatcagggggccacgacagagtagctcggtaagaacattatgagcttaggactgggcctattcaacgaacagaatggtttcttgttgggaattacaaactccagccaaacttattttcacttctgttattatcagctttttgagaatgtcagcatttgtaggtcatctgaaaactaatttgggacagaaatatttctgtcggcaatcatgtctacaccaagagtccatgccctccccttccccaagtggatgctaaaccttgtcttttgcagccactgtgagctcttttatttctgtcatatctttaaaagttcaggatgaggtagcttgggtttgaaattatttgtggtcgcccccccactgggggcttccctggtggctcaatcagtaaagaatctgcctgcaataccagagacccaggtttgatccctgagtgggaagatcccttggagaaggaaatggcaacccactccagtattattgcctaagaaatctcacagagaggagcctggtgggctacggtccacagtgtcacagaagattcagacacatcttagcaactgctgctgctgctaagtcacttcagtcacatctgaatttttgtgaccccaagggactgtagcccaccaggctcctctctccatggggattctccagactctttgcgaccccatggactgtagcccaccaaggctcctctgtccatgggattctccaggcaagaatactggagtgggttgccttgccctcctccagaggatcttcccaattcagggtcaaactcaggtctcttgtgttgcaggcagattctttattatctgagccaccagggaagcccttttgtatttactgcctcactattttaaagtctcataacagagccctgctttactatatatacagaacaccctagcaggtttctcctaaagctgaggcatatgatgatggctaagcaatttttttttttttgccactctgcatggcatgtgggatcttagttccctgaccagggattgaacccgtgtcccctacatgatgacaatggctaaatgttttacagaaatcttattaaaagcttcactgctctgcaccccctttctgataagtctattgctgtcaactttgagctaagagaattcaacggtatgctggtgaactaattacagtttattatgataaatactcatttggcagcgtgcatcaagctttataaaagaattgcctgagattcatgggatggtttgtgcatttttgctgagtaacaaacttgagagaacaaatcctgacagtacccattaggattttttagggtcatttaaaccttacctggttggttttaatcccctcctcagcgtaagggccaaaacagcacaaacagaggatggctgacatcaagaggtacccagcaagctgctccatttagcatcatctaaatcctcctttaatatgattaacatctgatattcctctctttgtgaatcatatccacttccagccaggccacctctcctttatctgcagtgtctattttaagactgcttcagcgcaaagagtatgg

SEQ ID NO: 38206 - DNA, 1651 bp, Bovine  19866880841811
  misc_feature (1)..(1): n is a, c, g, or t
ngcacagctttgattctgacataagaatgatgcaagctggttttagacacagctagaatcatagacaaaaagacactttgctggtatcagtcactgctaaaggtagaaagaaacagacccagctagataatccacccacttctttctcgtccagaagagagattaacctgtattccttatcacatttttaaggatacagagatcatactattatccttaggcattgtccatagaaattctgggaatgatatatatcaggaataaaaaatctgttgtttctgcaaaaataatcattgctaaatatccattaaatcacactctttcctttgactaactggtcactttattcaatcaacatgtttgtcaaatgcctattacgaagcaggtaccattttatgacatacatcctagaagctgtcctttagggagtagctaaaactagtaagattttttagatgtctaaaattagaaaagatgcttttctatgaaaccaaatatcctttatcttttcattttcatttaaagtaagtaccctcacctacagaagcaattcctgagcttaaaaaaacaatcactcctgtctcccctataacttatgaaacaaaagaaaaacctcacatatattctcaccactccttttccttccttaatttaagctacaacatggcagatgggggcaatagggaattaaatctaattcatgcatgaatacctaaagtgcataagcaaagctgtgatgacaaaagggaacagctgcattatagataactgcagtagtatacatgccatgatttataaagataataaacatccaaatgctgaaagtatgcactgacttcagctgagaggcagccttgagccagaaataccacgtctccagaatatagccttaaagcgaaactgatctcctggcgtcaaactaataaatactttttactattattatataaaagaaagtgctaggtgctctatcaattaaaaggctgattcatcgtctcaccacacttttaaaacaaaaatatcattatctgccttggggaatccaaaattttctattggtcccagaaccttgactgtatcttcattaatgcctgttaacttgtgtcacttttctaaattattaaccagtggaacatactccacatctctatcttcaagagcctgcatatatttgtgaaattttccaaagcttactttaaataaagcacaaagctgccaccctagaaagcatgactgaactaagcaaccaacattaaaatgtaattatcagcccaaaattcctattcctatgtactaagttatttgcaagatatagatttgagcattaaaacaacaggcacaatcttcagcagaaagacccagaaacactataaaactgagcacagacgtcaacacaaagacaaatgtaacagcttttactatcgtacggcactgcagtaaggcataaaacttgaagaaatgctatccaaataaatacagacgttaaacaaaagaaataagactattaatgtgctttaagaacaggaatctagtattctcacactaaaggaacatgaacatgcaatttactaaatttggaattttgtaaatagcaaactcttaatggttttgcgatttaacttgtaattcaaagcagcgttacctcatctgt

SEQ ID NO: 38207 - DNA, 1408 bp, Bovine  19866880850255
  misc_feature (1)..(1): n is a, c, g, or t
nacaaactgtccccgccaagactgctttggattcggggtttacagtgatctttattccttaaaaaagaaaaaagaagttatataaatagaatcagagaagaggggctttccttgtttatgtttctgaaaccaaaagaagaaatattttggaaataacctgcatattcattcttgctataaatcacttattcagatctcttccccatcagatggtgagtctgtgagttccaggctctgtaaaaccaggaggaaagaaactcacctgcagaagactttgatcgaccacatccccctcagccctgacgactgggggtgaaaacttttcactgtatttcttcagttctgagaaatattttttccacgtcctaacgcctctgaaatcaggatgtgcctttagtaactgtctgagggagcagtcagggtgcactctcagggccagctctggtactacttgatcacaagtgcttatacggtcagcacttcaactcaggtaggggcatggttttgtaagacaagtgcaagtttaaatgccattgaaatgtcttcaaaagacattccctggaggtccaggggttaaggctttaccctgtaatccagggcatgtgcgttagacccctgcttgggggaactgagatcccatgtggctcctggccagaaaagatgaaacataaaacggaagcaatattgtaacagattcaataaagacttaaaaaaaaaaacttacaagaaaaatttaaaaataaattaaagtggtgaggattaggtcaaagaacccaatgggaaactgttagcctgtgcctggcaggagtaaccacctagctcctattatccctcactcctcctctgacccctcaacgactgcaccccaacatgcatcttaggactgtgaagggagcagccaccaagacccggcccttcagtctccagatgagaatgcacaggccctggtgtggaggggcctgtgcacacagccagcctgccgctcgggcacgacttgagcccaggactccagctgagtgcccctcaacctctcagcccagcccagagtggcaggaagaggggcctccgctcacaggctcaggccctattgggctcaacaggtctcttctctgctttcaggaatgagttaatcctgaggtctgtctcaggtcctgagtgtaatcttccttacgatgcttatcatatttctggggctgcatctgcctggctttgaaggctctggcaggggcctctcctggccttgccgtaaacgggctgaattacatttacaagaggcctttaatgccccgtgaacccgacttccttaatggggatgttcctcctcctcctttctctttctctcccttttaatatggtcaccggttggccttccaagtgggttggattcctaacagagaagtcaagaccg

SEQ ID NO: 38208 - DNA, 1156 bp, Bovine  19866880852575
  misc_feature (1)..(1): n is a, c, g, or t
ngttctccctagcaaatcctccaagtttctcagaagtccgtgaagactggctgaaaaggtttcctctttttcttaccatctccagctctcgttccctgaaagagaaagctacatctgatttggcagctcactggacagagccagggagatcaatggtcttccctggcggaggcggaggcacaggagctggaggcagggcccccgaaaaatgaccaaggaaggctccacacaggggccagggagccacctgctcacaagggaagcagaccttcccctgctaggcccagccgggccacccttccctctcaccttaacaaactggagatcggagagggctcgcactgagtagtcagggatgtagacctggaggaatgcagagttgagctgattgttgctactccccagcgtcggcgttaccgcatcaattcggtcgctgcgactgagagagtctgagtgattcaagccacacgggcgaggaggtgacttgttttcacctggaaaaggaggaaaaaaaaaaacccagctgccttttaagtgaggtcagatgtcactcaaagtcagctctttattttccaagtaaagtaataaacaagctcagcttcagggtctctgacagcgtgctcacggcttctcctgcaacagattcccagccccatccacaagaacacaccgagtctccaataagcaaagacccgtggccgcatgctatgtcaggggaggcgaggccccagacacaaaagctacttgataaaggcctgggctgcaggaaggcagcacagcatcattttgccaggagcaaaaacgcttgagaatgttcctaagtcagtacgtgtttttaaaggatcaaaataggtctatctgttcatacttcccagccaaacctgttatttttgcctctgaccccagtaaaatccctgaaagggagcctcaggacatctcgggattttaagcaccctcagttcagttccggagaagacaatgacaacccactccagtactcttgcctggcaaatcccatggacggaggagcctggtaggctgcagtccctggggtcgctaggagtcagacacgactgagcaacttcactttcacttttcacttttgtgcattggagaaggaaatggcaacccactccggtgttcttgcttggagaat

SEQ ID NO: 38209 - DNA, 742 bp, Bovine  19866880892517
  misc_feature (1)..(1): n is a, c, g, or t
ntgaatttaaactgatggttatctttgcaagaggccgggtggatccccccaacattcccccagcctgggacctctggctcagccaagcctcttccccatctgaacctccagagcgccgtcatcccaccccacccccggccttgctcttgttaacccaagatgctgctacacagatgccaaatggaaatcttccacagggccctcaagtaaactcgaggtgtgtcgtccacactcctgcccttcctgctgggtcggtatgtggttgttagaaaagcagtcagaccttccagctgtgctctgtgccccgccgagaaggcgcgtccagacccatgtgtctcacggagggaactctggggactgccagcccctgcccccccgtccagggagccaactgtccctcttcccctcagccctgggcccacggggcccagcagggttgggctctgtgcctctgcctcggactcggcccatgccagagaggctgcctgtaacagccagggtcagtttggccccaaacagggattcagaaaccaaatgtgtgtcatggccatttcatgtgtgtctctgtcttattttaataccagattcatcacgtgtagtgagattaatgtcaggaggtatttcttgaatgactgaattcttaactcttagctgtgttttaagtgttaacccaagggatatgtgcattttgggggcaacattcatacactgaagtgacttcctactgaccacagtttttaag

SEQ ID NO: 38210 - DNA, 1438 bp, Bovine  19866880908420
  misc_feature (1)..(1): n is a, c, g, or t
ntccagtggttaagaatctgccctccaacgcaggggacgtgggaacgtggtagggaacgaagatccctcaagcatggggcgactaggcccgcgctctgcagctactgagcccgcgtgcggcaaggaaaaatcttcggagccgctagtaagatccaatgcagccaaaaataaatattctaaggatttaaaaaaaatgcttccaagagatgttgatctatggcaaggtttgagaaccattcatttaggaacaggtattggacttcagtttctgtctctgttgtttttacttgtgtgatgctgacttactcttcctaagcttgagagtttttttccttctattaaatgggttattgtgagattcatatgtcaaatgtctgccactgacaagtttatgccaagtacctatacctgacacttgaggctcccccttcccctttttcttcagcaactgttgtcacaaagtccatgcagtaaaagccatacacaacataaagtttcaaagatgatcctgagccagtaaaaaatgtttattgaattaaattacccattgtagagcctcttgccaaattaacctgtgtttatgagacctaatcttggcagcattgccaggagtgaagtatgaataggaagcactgtaacccataagtagaaatgtgtacaaatgtgattgagaggaatcttttttaaatctgaatttggggatgaactataagatggatgaattatgttgattattttgctataatctctcatctctttagaaacttgaccttcagattgtaactcagaaaccggtacaaagaaaaagaggccatcatagtaaccaaaaaaactgaaaatttgtgcagtaaagagcataacagtactgtaattacaacttaaaaatttttcccacaaaccctcatttgattgacagatgtatggttgtttggtattgaaatattacaaataaatactcatgctttttgccttgaaatggtggttgttttaagcatataaaatagatttatcttttggaaatataaaaggcaagtttttcccaccagtaacatggttttattttatagggagtgatagatgtacatacgtgaagttaacacgggataggatgtgttgctgaaaagttataaaatactcaggtagctcagaaagctgggaatattactccagggcatggcttggtggtggtgagtgccatttgcattgagccttgagagaagagtaataccgttgtttgatttgcacataccatgttttataaaatttgtttttaaaatagggtagctctaggaaaaatgctgaatctttttgctgttgatttgaaaatttttaagatgtggacaaaccaaaggagtgttggatgggtaactgacccaaactgaatcccattaaaagattttgtgattgtgtcagggaagagtgtttgagaggagaggga

SEQ ID NO: 38211 - DNA, 963 bp, Bovine  19866880925585
  misc_feature (1)..(1): n is a, c, g, or t
naggacgcttacagaagcttcctttccaagcttgagaatctcggctgaggctggggatcttaagtcaatgcttaagtctgcaagagacactgcaaaatctccccacagaagttctgccaacctgccacctgccgcaggcaccctgggcagcacattctggtctgccaggcctgaagcccactcatctccagtccctcccaggctccaggcttccagaaaacataagccagcttgtctgtacaaacaacttctggtttcagcctccaaaccaaacctcctggaggcaaggctggcttcttgcttggaagaagaaattgaagacaggaaatacaaatcccatgctaacagctcaatatattattctgccaccaaatttatattagaataatcattcacaaatttcagtacatcagaacactgtgtacttctcacaggttacttgtgccacatatcactgcttgtgtgacaccactgttgctctgctctaaagtaaagctaaaaaaaccaaaaaagaaaaacagaagcattttctgtcttcacccctgctttctttcctccattcactgactgtcctcagaacaaaactaaaaagccttctccctgaggatgcaatttccagccaagaagattatccaaatgggtgttgcccagtgccccatgaactgtaccaaacctggtcaatgatgaaaatgcaagatcaccttattatgataattaggctatgctgattaaagtggaagcatcattaaggccatttctattactaaacctatcttctccacttaattagcactttcttaaaaacatctttagtttcttacagtttatctgactggggacagagtcactgaaccagagttgaatggcgtctggtttatgagaggactgagtctataatacggtgattggtttttaaaagattgctgccttcatgtattatataacatttgggcaggcatgtgt

SEQ ID NO: 38212 - DNA, 1482 bp, Bovine  19866880963118
  misc_feature (1)..(1): n is a, c, g, or t
ncccatttcccatcctggctaatgggctggacctcaggaggcaagaaagaggaagaaagaattatcgttttaaagcaaaagtatgggtcgagcacgttgaaagtaagtgagaggcatgtcggcgagatgaatgtgtgagagactggggtggctgggttttccatcccttccccgggaaggtgactcccagaagaggatgtctgctaggcagaaagggaaaagagtgaggaggttgagtcaggatttagagtctggagttttgtctttagtagaaagaagaaaggagtgaattctgagtgtttcagagggaagcgagccagtagggaggaaacaatgattcaacacccaagggcccagacagaataggctgggaaagtctcaagatttggctgtagaagaagctgaccagaggaaactgctagttgctggaccacaagctgggtcgccagcatgttcttaacggtcactgatttacttagtagaaagccaaagttgccagcaacaaaccaatctttggagaacattcctccatctcttagcttccaggctgattttgcccacctttctttgtccaatctagaactggcctctcaaattacttgaaccagagaccagtaaccagaatggttcatgcagtagggacccaccatccccagactgaaacctcggggtccagacaccatccagcatatctggggggaaggcaacctcatttgctcttctgttgacaccagttattcttgagtatctctaacgatgtctatggtgtttcagtttgctgagcctgcctcactagtgtgactcagaagacggtgcaatgcagtcatcatgttagtggcctgtgagcaaggcatactgctcttgagcatttcaaagaaaggtcaacagagcctccattcttggatctgcaacttggtctctgtaagaggtcttctttaaatccaggacccaggataggaaaagggtttccctgacagtttacaggaaacctgcaggaaggcgacttctgaagaaggcaggtgtgagtggcaggtttgtgaagcatgggtttgtggactgcatggttgcacgtaagctagctggatgtctttggggcgctcctcacagtgtccacgcaacccctcccagctcctagtgggacctgtggggctgacggaggtcattcccctttctcccctcagcagagaaactgaagaaaaggacattgaattccagtgcagttcgagtgctaaaaaatttccaggctcaatggtggtgctaaactgtctccatgtttctaatatttttaataatgggttggtttttttttcagttgttctcatcacaaaaatgcagtgtccttgggggaagggacccagccccttgacctgccactttccaggtgtcctttatccttttgacgggacctctggtctgcagaaaatgttctgtcttggcatgcttctagactgtaagatttggggttggtttggttttggattt

SEQ ID NO: 38213 - DNA, 777 bp, Bovine  19866880966762
  misc_feature (1)..(1): n is a, c, g, or t
nctaataacagcatcaggagagaatgaaaacttctggtctagccaggggcacaggaaacactctataaatacaagccaaagttgaacaccatcctgaaacaccatcctattcctcttaacctgccttgtccttcaaggctcagcatgttctattcctaccagtcactgcggaactgtctcaggtcagagtgagtgaagggtgggggaggatggttttgagggattggatatgatccggtcaactttccctgccctggtgcctggccctgctgttgtgagcatatgcatatgtggccctggtcccagcccagcgtgacccccagcctggtgggagtcagccagacctcgctggaaagagcagatctgcctctatgggctctgctcttggtaggtgtggaaggaatcaccccattcttgccaaaatcaagtctgcctgaaaatagtcagtggggctgagagagatgggagaaggggagccaggggcggggggaaacaagacagaaggtccactggggctggtggccagggccagcacggtcccatctccagggcccataccttcaaggtcctgtttacagaagggccaccattccagcgactgctgctatccccctccccagggcttaggtcactgatcacagtaaatcttgctgctaagccctgacatgactgtggaagccttgtcccccagcacacagagctgacagaggacatgaaaagctgatgaccagccttctacacacaccacctcatcccatcctcaaacagccctaaggg

SEQ ID NO: 38214 - DNA, 747 bp, Bovine  19866881000741
  misc_feature (1)..(1): n is a, c, g, or t
naatcaatttctcttttaataaactaaaagaacaaaaatcccacaacttgatttttattctatcacgggttcgtataattcacttatggaaaactgcaagtttggaataattacatacacagcttaacatgcttagagtccatgtatgcatttttgcctcagttatcctctttcttatttattagtgataaaccaaagttttaagtgattatttaccactaattctatcaaccctgacatctgacatgaagatgaagattatcaaagcttcaccgatcaatatggactaaaagtgacccaaaggttaacccaatccatgacacctctgctcccaaagaaggtctcctatggtcattttctagacccaagcagaactgttttcttatgaaaatagcttaactccccaaagttagattccatcccaaactcttttcatggaaaggtcatacatatttcaaacatgtgtaaacacaggaagagaaactttgagaaaacctatgtagttgctttctctgaagaaacttaggcaaggtttacagtgtgataaagtaggccctgaaaccataagcaccttctcttactgaatgaaccattccaaaacaagactgccacttgagatgtaatgtcctatccagactcttcagaaacaccaatccttgccttactatcaatctcactgcattctaactctgaaaaccagtaatccatctagtgctgtaaagtgagtaaccctgtatcactcaaaag

SEQ ID NO: 38215 - DNA, 854 bp, Bovine  19866881109845
  misc_feature (1)..(1): n is a, c, g, or t
ntggaaatcgcagcctcaggagatggggagggccgtatgatgagtttgttatgtatcatcagtggggtccaccttatcatgaactgaaaatgtcaccctctctgcaaccatcatgcatggtgaccagctggacgtgacctggaccacaggcaagcgatcagagaggatctaacctagaagaccccaaaccacctgagcagcgagtcttctcccaacatgaagaagcttgaaaaggcctgactcatccagcagccagcccagcccagcccagcccagcgcctcaggaagagtcagcaaacagcctgtgtggtttccttccagtcccagcttgccttgacctggtggaaggcaagaagtagacacaccactcctgggaacaagagccagcttgggaatggtggtgtcagcactccgtcgagggctgggcacaagccccacacaccacaccctagggtgagcctgagggcgagatgaggaggcatctgccattcctgtccatttgttgtggacccaggtaacgaggaaaaataggaggtggacaggttctgaacctatagccagcggaggtcttggacttgaccgttcccatgtattccctcagaggttgcccacatcacagttcacttggaattctgtgacagacccagcagtagggacagaatggtgcttaataaatgtttcagtggatttggccagcgcattgtacttattgagtgtcaactgtatgctaggcatcatgccatgttgtagagggggatgccaaggcaaagctgcaaccctgtctccaggacacttgaagtagagtggatcataagcacatgtctatatacttacaacccatggatacatatggt

SEQ ID NO: 38216 - DNA, 1807 bp, Bovine  19866881113978
  misc_feature (1)..(1): n is a, c, g, or t
nccctgctattgagggaatttccaaacacacagatgcagcaagaataatagcagaaatccacatgtaaccatccctctgcttaggcaattatcaatattttgccccaattatttttatttaaattttgtgccaaccattaggttctacactgtgagagatacagaaaagaaagatatccttagtagcctatggtcaagttgagggtacatgataaacattcaggaagtgctaaagcatataattctgactgtaagtttcacaagagttcagggaacagagcgtctgtgttgactggggtggtcttggatagtgtgagcctggagctgagattgccttagacctggtaaaagcaatctgtataaataaggaagaagtgggcaggatttccaagtagaataaccagcatgaccaggtcatattcactttgctctatataagtttctctccattgaaagcactcatcccgcatacttcacactttaatcttcagggtccacagcagctgtcagccatcaggctaatagacatcaagcactaccgcaaattacatcatcagaaccgattagctcttgaacatgtcagcacaatggctattcaatcttctccgggtgactcgttaattaacctctgcaatatgctgtctttgacatcattgggggagttcaatttttccttgattgaaagtcgccctgggggagaattataaatcgataacagaaacaaaattctattccattggccagctttgtgataatgattatgaaatgctatgactacctgagcctataggcacagctcaaataattaagaaaagtgaaggctgatgttgtctgtatcttatcacttgaattacattaacattaaaaatggtctatttttctacacaagtgacagtaacacaaaatgtggggtcttataatttaataacttttcacgttttaattcctctcaactttaaatgcaattaattcaaagctaaggatgaaaaaattgttaatattttattgaaataaaatatagatgaagaaacattaaatgaccagtatcctcagaagaaggcttcccaggtggctcagtgataaagaatctacctgccaatgctggagacccaggtctgatccctggaacagaaaaatcctgtggagaaggaaatggcaacccactccagtgttcttgcctgggagatcccatgaacagaggagcctggtgggctacagttcatgggatcacaaagagctggacacgactgagcgactgagcactcacacacacatcctcagaagctcctcatggttccttctggaaaggcaccaccctcccccaaaaataaccactatcctgacttcaagcaacatagaatacttacacttggtttgcattttttgtaaataaaacatacggtatacactctcttttgtatctggcttgtttcactcagcatcacatttgtgaaatttaagggacgctaattttaaaatgacttttgttattaaataatatatactcgacagtaaaaaattggaaaacacaccatcatttttaattcgtttaatgtctgtacataatttatttgatcaagattataagcttttacgaaagtcttgcgttaaaagttctcattttttaaacttttaaagatggcatatctccatcttcttaaaattgaagtatacttgatttcagtgttgtattaatttccactgtatagcaacatgattcatttatatatgtatataatatatatattctttttcagattcctttccattataagttatcacaagatatcaaatataattccctgtg

SEQ ID NO: 38217 - DNA, 1465 bp, Bovine  19866881123832
  misc_feature (1)..(1): n is a, c, g, or t
nttcaacaggggactaaaaataagaaagaaatcccactttacctttatttttctatgtaaccctgaaaccaggaagttttcatttggagcaccaaatagaaccttaggaaatgtcacttggtttgacttgttcattcataaaactgggttagagagaaattctgagcctgctttgctgtccacagtttcttgtgctgtgcctgacggctcttccaacattgagatggtttcctgtgtatggtaatggatgtccctttattcagaaaggaatcagacctggctttagtcccagcagtgtgtgacttagggcaagtcggaaaatacctctgaacttcagttccttcttccttggtcatggggattttgaaaactgaagtttttgaagagcagaaaccacgtcttattcattcagatccctccccccgccacgaggacaggtcgtagcccctctgtaagcccgaatttctccacctgtgaaattactggacttgatactgtctgggttttctcacacacagtctcaacattttgtcatctaatagccattaagaccaaaagaacaagtgcctaatggtgaaatatcatgcaaagggaaaaaacattttagaggaatagaggtcttctaggcccacctcaaaatcctactgtgttggcagaatgcggctgtctctgtataaggccagctttgtgtcctcccccaacccccatttcctctagaaagcgtagaaagcccccttgtcttgaatgcttccccatgaagagctcctgctgaaaggctgcacacacagccaaggctttgaccttcacctttgccctgacacaactggtaaaagagttcttatcctctcctttctgggggtgggggagtggaatctagctagggtgagcagaaattcaatgaaactataaatagaaacatggcctataaataatgctgcccccaaatatctggaggcacaaacgctgcccagcagtagacagtcacaaatcacggtggcctggaagtgagcaagccctgttcgtctgcttgatgtctcttgggatacttcagacttgttgctggggcctcgtttctctttctgggctctagaaatgccctcgttgtttgctgccctggtacccgtcttctgctaaatctttttttgtgaccaggcacattcactgaagcaaagtaacagtgcctggagtcagacctggctttagctccaggactatgtgacttggggaaagtcagaagatacctctgagcttcagtttcttcagatcttccctgggttggaaagatccccagaagggaacagctgcccactccagtattctggcctggagaattccatggactgtatagaattctgtagaatgtatagaactgcatagaatgtcgcaaagaatcggactccactgagtggctttcaattttgctttgtgagtgtttttaacatagataaaagaaaaagaaacaaag

SEQ ID NO: 38218 - DNA, 750 bp, Bovine  19866881184143
  misc_feature (1)..(1): n is a, c, g, or t
natctgcttttgctcaccaataaaccccacccagagcctggcatcatgcctgggacatagaaggtaggcacttaagactggatggattgaggacggacggatggatggatggatgaatggatggacacatgaagagcaggcagacaagcagacataaatgaaaaaaatatgacataagttagggacacattttaccccaataactataaatctcaaaaagcaaccaaatcccctcaacctggagtgggggtggttggctctttcgctcttggcttctgtcaccaatcaaaaccatatgtgcatcttcttagctgccccctcccaagaatgttctttccttcctctccatccctcagcatgttacttgtacctcaatctagtattcatttcgtctatagtggacttaattgcttaaaagcctatttcccctatcagatacagacctctaaaagacaggaccttgttctcaactgagtgtccctcagcctgggccacttctgctctgcaaaagtgcacatgtggtggaggccttgcttgcttgctaagtcacttcagtcgtgtccgactctgtgcaaccccatggactgcagcccaccaggctcctccgtccatgggattttccgggcaagagtactggagtggggtgccattgccttctctgggtggaggccttaccaaaggccaattcactccagccttggcttcctcgtctttatacttccactgtcaccatgcacagtcagcctaagg

SEQ ID NO: 38219 - DNA, 1114 bp, Bovine  19866881185025
  misc_feature (1)..(1): n is a, c, g, or t
ntgtgtctctttccctacccggcatgtcacatggcggatggtagcatgggtcccgcagctccagtgtagacacctcccttgatgtcagttaatttggctaggcttctttaggtcacaagcaacagtttcgcactcatactggcttagatgaaaaggagacttggttggaaagatataccagggaagcttatgcagtcaaccagatggtggaagggaaagtgagacagtggctccaagaatgcctgaaacaaggctgtgctccctctgtcttgtcttgacttctctctgggcactgtcctcagcagtttggcagtcagtggctcccaaatttcctaccttgtggtttccaacagcagagactgcctctctcccagttctaaattgaaaaaccccaggcaagactctgattggcctgacttagatcaggtgccctctctgcaccaatcattacagccgaggctggaggggcatgaacaccaacatggccactagcgggcccacccctgtttatcagaagctgagagcttccagactcttccttagggccatgagcctggtttaggcctattaaaaacacaaagaagggacatccaccgctggccctcacaaccgagttccacttcttcctgtggtggtgagtcatcttggagatgccaggcttgcacgtttacctccaagtacttgattttatcccattgtccttatggctctgcctatgagatgagccagaggtgagccagcttcctgcattacaaatcctctcttaatcgacagtatgggattgcgagccactccttacccttctcccttcctcctcttccctcatcaattcctgtccagtctccttgtgtccttctggtgtaaactgttggaatttgctgataccccctcaatgggtatagtgtgctggacaggaaatgatcacttagttggggagagggaaccctgaaaggactcattgatgagccagaaggggtctgagagccagcggaaactctcaaatcaaaaacttttcttccccccttttctgttctactcccccaccgcctccctagttacagaatctcacaaggaaggaatgctgctccccccacttctccccttgcctggaggg

SEQ ID NO: 38220 - DNA, 732 bp, Bovine  19866881220258
  misc_feature (1)..(1): n is a, c, g, or t
nggcccatttcctcttactgaaaaacctgacagtaagaactgctggaaactcaactctcttgctgagtgtcccctgtgatacacacacatatctgcacctgtgcacacccactctcctcaagtccacaagccatccacagcctccccacctaacccccttccctgaaggatcttttccccaactgagtgccagttccccatctctgtgcccatgcacacccctcctgtctggcctacactgttcctcctcaagaggtccattcttcccacctcctctagttcctgacttaaaactcacctcctacaggaagtccttctgattgctccccagctgcacctccatagttttattcttcagccacacttttatgcagtattggatttaggtcacttcagagcagtcatatggtatgtcccccagtgtaaaaactctttcaggtgaggggctgggtttccagttctagtgtcccctctgaccactgcacagcacctaggctgcaggagcatcctataagtggaatccgggctcaccagcttttggccaggacccacagctactcttcctgagtcaacacatctgagaggcgcagggagaccttgaaaactggtttaggaacttatctctccaagtattaatcaccccataaaacttgtgtttatttagttgctggcaggtccttcttccaggaggtaggaagctgttattcttggagataccagccagggcttggg

SEQ ID NO: 38221 - DNA, 914 bp, Bovine  19866881242549
  misc_feature (1)..(1): n is a, c, g, or t
ntatgtcagcattcgggttttatttcttcccccctgtttctggatatctttaagttagtttgtaaaatctattttgatgctgcataaaatggtacctccttaggtggcttttatagaaacattttcatgagtaattatctcctgctttgtaaaagcgggatgagttatttatttatactggctttcttattcacagtgcaaatatgacttcaggtggggtgggaactcatgagatgcatacttcttatatttgcagagtagatttaccagcctctagaggaaggaagtccctcaggactctctttagtgtaatagcaaaggaaattagaatggcctggctaaccgcatcaatatgcataattgacaagttactcaatactcctaaagataagtactttccactcttttcttttcgctatcaaatgtaaccgtatgtattattcctaggctactgttttgttctagaaattaacatgtatccttaatgtgtatatgctaattaagagtggacagcttcatggaacttgaaaaaatactgtggtgcctctaggcaggatggtctttaaaatatcagtgtgttggtgataggtgatatatataatctccagcccctacaaggataaagtaggtgcccaggttggaaaggaagaagtaaaactatgtttgcagatgacatgatcttgtatatatttatagaaattcctaaggtatccagtatagaactataagaattagtgagtgagttcacctggatatcagggagggtagcaatagtataggaaagtcatttgtatttttatgcatttacaatgaacaattcaacaatgagattaagacatttctatttatagtcagaatacttaggaatctatttacaaaacaattgcaaaacttgttctgtgcaaacgacaaaa

SEQ ID NO: 38222 - DNA, 736 bp, Bovine  19866881401897
  misc_feature (1)..(1): n is a, c, g, or t
natacataactatgaaaagagaaagaattagcccacgtattaccccaaagcctcttcctgtgctcacaaggtgcctgcacaatgttttggaaaatgtgaataataataaacggtacatagctcctcagatctggattcaaatcagtctcctcatctgcgaaatgaggacagttgtagaatctgcctgatggggtgagtgagaggattcgatgagataatgtgtgtcaagtacttggcacagagcgtggcacagactagcggcccccacacgtgagctattattatcaccgctgtcatcagcatcactcttggtatggcgctagcctgtatccccagtgccaggaaaagtgcttgggaacctacagccctgaggtcacggaggcacagagcccatgagggacagacgggtctgggaggtgtctgtgagcctctaggggcccctggggagctgcccagctgttgtgcgtgggctgtttggggaggagacctctggctttcccagcagctcattgggtgcgtgggagctggctgggatgtatttgacattaacgtggtggggcctgcaacacccacagagagatgcagagtgaagaagcagggatgtgcacaatggccttatcctagaaagtatccaaccagaagaggccctgctttccccgtgaaactacaaagggggctccttccacacacctccaccatgcagacccacaacctttggagaaaaagcatggggtgg

SEQ ID NO: 38223 - DNA, 1569 bp, Bovine  19866881414421
  misc_feature (1)..(1): n is a, c, g, or t
ncaagttggtggctgaggactgagaatccaggtcactggactcccactggacttgagtgtgtgccggcaagcatgtgtgtgcctgtgtgcacagactgggcacaggccaacccaggaggagcctggatgaacctcagctttcccatctgtacaatgggtcagtaggaagatgaaacccaattaaagaggctgtgagtaatgtgtccagcctagtcctgggtaccaagtcaatgctcagccaacacttgctcttgtcacctcccctcccttcaccatctctctgcctgcagagaaagctgccatggaggtggtgggaaaatgttttttttttttttttttgtcctttctgacttcagagcctagaaactgaagcttttctcttctagtcagtttatagtggggggtaaaaaaaaagatgatgaaagtaaaaacaaatgagtaaacccttctctgagagggagggatccatgccttacccaccaggttcctctccggagtggaatcttgggcctggtgtgtggagcatgctgaggatatttgcagagtgaggaggggaaagtgggggatagatggtgacttgttagatgaaggaaagggttgaggggtggctgagggagacccagccctgctcacagacagccccaggctcactgggaaacaaagcaaacacaactccagacacgatccaggcagagcccaagcgaggacagtaaatcgctggatgctgtggtcgcaggatctcgtccgtctgcccagatggttccttccagttaccttattcaccctttcagcccctggccctggagggagtgattattatccccatttggcagggagaaaattgagggctatggaaggcctggcttgtgtgtgtagggatgtggcagagcggagacttgaactgggtattctggtgcccaaagcggtacatttcacattacccactggggggtttcagcaggaagtcagtggagggtgaaattagtgaggacaggtagagttcaggagggcttcttggtggaggaggcctaggctgggcctacagctctgcaagggtgaggacaaaacggacacaccaggtgagatgaggcttcctaatctgcagggctgagggagaggcctgaagagcgatcctgaagggccgcacccagggcagagcccaggcactgacctggcctctttgactataaataggttttcacgcagtaatttcagttgcatttgaatttcccgtcaggctcctttctgtacaccctgtaaggccaaagccctagctgattcccgtcacagctgtaaatcaccataatccctgggcatttttaaacactgattatggcccctaaaatgaattagcagattaaaatatgtcctcattttgttcttcctaaattgattttttttgttaaaaaaacagagagagagagagagtgagagagacccatccaggttatcttcggaggtgggcctgctgctctgtgcctgcatcccacacccctgcccccgggacatgcccactgcccgtgggtactcagggtctacttccctccccgccctcttccctctgctccc

SEQ ID NO: 38224 - DNA, 1416 bp, Bovine  19866881518602
  misc_feature (1)..(1): n is a, c, g, or t
nctgttgtgacatcttagcagcgctgattgagatgaaaagccgccttccccacagtgagattcagccattgttttcttgccctctaacccctccccctcccctttcactgcagtgatgggaggctgttctctttcttctgcttcagagattagtggtaggcccattttcctttgcaggtttgccaccctcttaaaggcagaggaaggccccattaaagtcacgttttccctgccccagagagctgacagcctatttgaggaaagaaagcttatcacacttttgaaagggtgaagaatgattcaaggtgacatattaatagtgagtataccgtggtgtatgcaagggttgaatcaggcgacacgaaaaattaagaggtgctaggactattgtcctcagaagccaaacagagccatcctctttaactaaaggctttccatttctgacacagggtgattctggttcctgcttcaccaccattagagtccctgttctgccaaagatgcctaaggacatttttggacggtactgggggccctggccctgtatgatggtcaatcttggaaagctgaagctttccttgaaagaccttgcggaacaatcaggatcacaccatcagttaatgctctccagggagatgagccaagtctgccctcttctctccagtatgagattgaaatgtagcctaattaaacagcaggaaggggctggccccttggagattgggggtggcagtggctgcatataaatctataacctgatagatccatttctgaaattagaattcaagaaaaaggtcttcatttggtccccttctctctcttttttttcaactcttccatatgttttttgctttcttttgtgctgtttttgtcccctctacctcagtatattagggcttccctggtggctcagtggtaaagaatctgcctgccaatgcaggagatgcaggtttgatccctggggatcaggaagattcccctggaggaggaaatggtaaccttctctagtattcttgcctgggaaatcccatggacaaaggagcctggtgggctaaagtccattgggatcacaaagagacatgacttagcaactaaacaccaaacataccacctcactgtattattgccacctggcccaccctgatagagcccttacagaaaaactagtggttcctaaacccattgacccgccaaggttacttgggggcttaacagaaagagtctcaggcttactcccaaagatatggattcagtagtttgcaggtggggcccaagaatatgcagtttcaataaaagcactgcagcctatcaattcctcagactgatttgggggtgcactgacttaaaccacctttcccagtgtaaaccagcctatagaaatacttatagtgcaacatttttaaagtattggagaaa

SEQ ID NO: 38225 - DNA, 1865 bp, Bovine  19866881818394
  misc_feature (1)..(1): n is a, c, g, or t
nactgtgtaacttgctgaaaatccccagtgttggtaaatgaaagagttcagattcaccctcagatctgtctgagaattttttcttttattctgacactttgtatactactttaaagctcccagaggatttgatagtgttttgggtttctgtttctttttttaaacgataaaagttaccagaattatgagaggaaaagaaagatactggagccattctgttatgatgctgtttaggccaggctgggaaaaagcttggtatctgaaacaggttacttccttggtttctattattgctgattccatttcctttgtaccctgacatgctgaaaaaatacagatctcaagttcaggctgaattaggcagtttctttgtggacttcttaccttcttatccctgttgcacttaaggtattaattagtaaattacttctccgtagatctttgtagactcttaagtgccaaaactgggtgtgatgaaaccaagggggagttgaaggtttttttttttttttaatgtatttgcaaataagataggtttccccttgacagtgctttaaacatagctggtgctaaaggcgtgtgtgtgtgtgtgcgtgcgctggatgaaaaggtgtgtgtgtatgctggataaagtccaagtctttggccttgaaattcaatatttattggtctcaatgtcatgaagaaactgtgaaatctgaaatctgaagtctttctgaaatgaataggggatggatggttaaattctttcagaagttgcaagttgacttcctaagagtttttctctgttggatttacaggaagctgctggaaggcgaagagacacgtttcagcaccagtggattaagcatttcggggctgaatccacttcccaacccaagctatctgctcccacctagaatcctcagttctaccacctccaaagggtcagccactgggctgtctcttaagaaagaggaggaggaagaggaggcttctaagatagcctcaaagaaaacctcccagataggggaaagttttgaagaaatattggaggagacagtgatatctactaagaaaaccgagaaatcaaatatagaagaaaccaccatttcaagccaaaaaatataattctcttgcttaaaaaaagttaatgcttaggaggggataatacacacttgacttgtcaaacagcctattcctgatacaaaacacctgtcgccactccacattgtcttcaaggcttcagtctcatatttagcatcgaatacttactttctctaataagaaatccacaccttagattggagcaaaccgcagtcctagagcaatcacagaggagttatctaagaatgcagctttctcacctaaagctcaggcttcacagctatagatgattcaggtacagaggaagtacaaacgaaggtgctaaatctgtgatcatcaccatcttgctgtgaactgaaattaaaacctatattcactcaccatacccagccgttacccagctatgtaatctcactctagatacctaaaacataaaatcactgccagagataaacccacagtccacacccaacaccactcgatagaattgtttcacaaatgataggtgtttgtttaatgggtattttccctctcaccccgctgcaattccatatatcctttcttccattcaggaaaaaaaaaaaaaggatagtgtagtatttgtccttttaaaacacatttaggttcttctcaaaagaacttaacccctttagctctctctgctcagtaagtagaattagatgcatgttgaccatttctatgattcgtgtaatgacttctccctgtccatttcatgtccttttaattatatactttaaaaaaaaaggcagtgataagtt

SEQ ID NO: 38226 - DNA, 1279 bp, Bovine  19866881969485
  misc_feature (1)..(1): n is a, c, g, or t
ncctgcccttcctcttccactgtactgccctgtggggctctcctagccctgccaaggaccccgtctccttaatctccagtgctcttaagtaatagagtcattataagtgaccttcaggatcacttcatgccataccctcctgttaactgcagcccaaagacaggaattagctttcccaaatcacacagttgacagcagaccttcccacccccgttagagtgtatagtgtggtcatcatgtttacattgtgacatccagccctaaggatggctggggctgctcaggcatccaggaaaagtggagagtgctgccacctagtgacagcatatagatttgggcagtgaacagggattgccatgccccatcttcaccccttgcccctcgccatcaccccgactctcagcacagcacaaaccctgcaaacccaaagagaatattaatacttgaagcaagaagggtgcatgccagtccctctcagtcatggccaggggatgccagggcttgcgcccctggactcctagccctgcccagggcaagagggcttttccctagagctactgagctgctttgtgatgttggagggtactgctggcagcaggtagaggagggaaggggcctggggctctgacccatctggaggaaaaccagatcggactaaaaaaggaaaaaaaaagaaatctcagcagtgtccaaacctagttttccattagttgcgattgaaaatgtgaaataacgttgtattgctgtatactgcaactttaatcataatgagcccttctgaggtcattattgaggtttatataatgcctgaagatgcatcctttggtgcttttttctttcagtttaaagactttattacaagggaagaaagatgtcttcatctctctcccactttgtaacaggggcctggctggggtctctggcagccatcatgctattcccactaggccaagggaccccaagggcagcaagagggagttggaagggacaacctgaactgcaggtgtgccagctgtgaccgggccccctcgccagcccttggccccctccacccccaagcctggccccatgggcccctctttcttcctccactgttctccatcttgacgaaggcattatatagaatcgttttaatcactttcagatgttagagcagcatattttacaggcatttatatccattgctttcctcagcaaggcatgttactacttttatcatctaagaaaaaaaaaaaaaaagacaagggaatttcggtcaagcattatttccatattagta

SEQ ID NO: 38227 - DNA, 593 bp, Bovine  19866882023441
  misc_feature (1)..(1): n is a, c, g, or t
ntgagtcggacccgagagcttaagtgactgccggaatcttacaaaatgagttggcagggacagaaggccagtccgcgccacgagcaggcagcgcaaggagaggcgagggtggactccaatgccaaaggatgcagcggcgagcggggacatccggcccggccctaacggcggagggccggcgtggtcaaacaggggctatcaatacctcctcttcgtcctcggagtccggccggcccccctccagcctcagcgagaagtggctcatctcttcctcctcttcctcctcttcttcttcctccaggtcctcatcttcttccaactcctcgtcctcgtcctcgaagcggcccctcaagcggcccaggctgcgctccggctccagctcagggggccgggagcccgagcagccgggatcccccgcctcgggtaggggcggcgggccctcctcacccgctgcgggtgccggagtgagggcaggcggggagacgggaggcggcggcggcatggtttgcggctccctcggccttggcagcgcccgcgttgcctgcggttaccgccgggagcccctccatgccgtaggtagagaacagatgagg

SEQ ID NO: 38228 - DNA, 1460 bp, Bovine  19866880511996
  misc_feature (1)..(1): n is a, c, g, or t
nacataatgacacttctagcagagtggtttatgaatgttgtgaattcaaggagtatttaatgttagccattgcacaagagaaattttaagttccctgttcacacttgataaattcagagcagctttctcaaatttgacaacaatcctgaaatatagtatgacattatcagtaatgaattatgaagcagaaagaaacttctctaaactatcaataacaaagaacaatttcacatgaaccttgctagaggaaagacttaattatctttctattctccatagcagatgatatagcaaaatatctatcatatgaaaaagcaaatagagtttgctgccagaagtgtaggaaaaaatgattatagatgtctgtcagaaatttcattaatgaatatattaggatattattctagattttgtgatgattgcggtatgttttagcattttataatttgtaatttgttatgatttctcatattaaaatattccctttattttcctatccaaatttatagtcataattttgtcatcacttttcttgaggacaagtaaaatgatatgagatttaatcttcatgaaactgggatctggccttccttcaactcctttcagggttcacatcttacagtgggtaacagtgtcccatctttacattacaatgatactacaatatttttgtgttgttctcacctcattcctagaggccactcttctccactactttcctattgcattcatgggttaattccatttgaaacacttgaacctgaacttcaaataaggatttgaacctaaacttcaaattcataatcaggtctttttcatccaaacacataatccacattttgttaacaatttgtcatttaactctaatgtcgtttgtattattgtctctaaatctctataaaaagggcttttttaaaaaatagggaaaaataaattataacacagaatagatatcaccagctaatccataattgatttaatactcttatggctgaagaaatattgtaatacaaataatgacagtaagattttgtaacactcaactccaaagagaagaggggaagatatgcaaagacattaattcttcttcccctttgtcttcttgctcttataaaattcacaataagcagcaaatagttaaggtttgcaagatgacatttttgacaatgagtgaatagctgattgaatagaattcaatcactgttgccttgacttggctagcaaaatgctttaaacatgaagaattagattattatgcagttattttaaatgatatttacacaaaaattatgacagaaaaatagtcaaaataaattcaaaagattgttatagaatgggttgtaccatataatactagtgtttatctttaaattattctgctgctgctgcagccaagtctcttcagtcgtgtccaactctgtgcgaccccatagatggcagcccaccaggcttccccgtcc

SEQ ID NO: 38229 - DNA, 1826 bp, Bovine  19866880535346
  misc_feature (1)..(1): n is a, c, g, or t
nttctgggaaagaatgaaggcgggaggagaaggggacgacatacgatcagatggttggatggcattactgactggatggacatgagtttaagcaagctccaggagttggtgatggacaaggactccttgtgtgctgcagtccatggggtctcaaattgttggacatgactgagagactgaactaaagtgaactgactgataatgggcacataatatgcacgtttgtggaattagtgaattttaatgcattaatgacaacaaaaaataaaaatatgataaaatttacatattctctaattgtgtctttcatgtaagtggacaaataggtgtaagtttctaagcacaaaccaaattcacttaataacacagcaacaatatccaaccaaatttacctgttgagggtgagtgttccagtaagtagtgaccagtactggtcttcaagtcaagcatattaattgcatactccacgtctaatgatgacttagaagtctatgttttcctaaatgagtacttatattttcaaaacaaaggcaatgaaactttaaataaaaatactaattctcatgtagaatacatgaataaaaatggccacagtaaaaccaaaatgcttggttcatagttttaatctctaccttccctcaaactccatactctaccacaattatggagaacctgtcagaagcctgaatttgagtttaaaaaccatatttccttaaatattgaaatagagataagacctctttctacaaaatgctcacacaattcttgattggtttttataatgaatacaaaatgattatcaaagaagatgactttgttctcagatatccacctataagtttatttcctctgctgaagtccatatacccaaattgtttttttttacacattagaactagataatattccccatgaacttttatctaataggaattctagctatcttggactgtgagatatccacttttcctcaacatatcaaaggtgggggtggtgcttctatgatgttcacagacttgcctgcctagggttgaagtggcttattagaaattccttactgacttgtattaatataaattagtaggtaaagaatataatccagcacaaagtacaatttttattcaaatatttctattagcataattatcttttttgaggaaattaaatgtacattattatacttactatgccacaaattatagaagcaaaaaatttcatttgtaagaatctgcagttctcaagtaattagccacattgcaccctggaaactaaaattaaatacataaattaaaccagtgggggagatgataacatagtaaaaaggttctggatataatacagtatgtcatacctgaagctcagccttaaaatagtcactctaggcatgctcagacatgaacttgatcgggtctcctaaagacctgagcatttgaataaagtgatcagttggaaagtctatctctgatgaaatagcatttacacaaataggtttccttgcctactttctgaacattcagttcagttcagttgcttagttgtgtccaactctttgagatgccatggactgcagcacggccaggcttccctgtccatcaccaactcccggaggttgctcaaactcatggccaccaagttggtgttgccatccaactgtctcatcctatgtcatccccttctcctcccaccttcaatatttcccagaatcagggtcttttccaatgagtcagcttttctcatcaggtggccaaagtattggagcttcagcttcagcatcagtccttccagtgaatattcaagactgattaggatggactggttggatcttc

SEQ ID NO: 38230 - DNA, 2276 bp, Bovine  19866880555613
  misc_feature (1)..(1): n is a, c, g, or t
ncatcagaaatgtcgataatcacagaagtttttcaccactggattccatttatgttagcactaagtttgactctaggtggtagcctctcagacccttgggattttaggattgtgaatagactttgtcctcataggccttaactttgtatttccattttcatacggaaccagaaatagttaaaaattacccaggatgagctggatattaggaggagggaacagggaaagtgctatgctgccttgccttcttcttctgccttcacctaccccatcacagactgtgtttagaactcagtggtaccacactcacaacagtttacatttttcacgcaattatcatgtgcccagtactaggtaagtattcttatagaaattacttcatgtaaccttcacaacagtgtaaagaagattatcattatcatctcattttttttccatgagaaagtggggattaattcacttgtctggaattctatagccagtacatgatagattatgtcagtctgacttcagaacctgtacttcaagagattgtgtttcactatcccttggatgcaactatgcacatttctattctgtggaacatttgttcttgcagatatctgagagaaaaagttgtgtggttcaataaacctaagaaatgaatgaactcagacaattcatcatgtagctgtatataggaaaggctctgagaagtattaaaatacaacagttttcaagaattattggaccatcaaatccttttcctattcaaatatcttttaacatttcaaggacctagggaaaatttgccaattgtgttcaatgaaacatatgtcctctgttcaaacttgcaaactattgtgtcttatgtgatctagcactgggaaatgggcctacagatgctttttgttggttttggtaaatagattgaggtattttatcagtcaaagttttccagcctttccacttcacctactaggatagctatcctgcatttccaaccttgatacctgagaaaatatgattttgctaactgtaagaaatgaatggatgagatggttggatggcatcatcaattcgatggacatgagtttgagcaagctccgggagttggtgatggacaggggagcctgatgcggtgtccatggggtcgcaaagagtcagacacgactgaatgactaaacagaactgaaaaaacgaataaaatcagcaatgttaaattttaaaagaagctaccacatcaactgagttgtaagaccaagtaccagaaataggctgctaatactgatgactagttttcagtgaacatttgaatgctctggttcctggtacatcttgcctttagagtaacaataccaaacaaaacatgagtatgtagagaatggcaaccattttcctctaagctctgtcctatactccttgagtttattctggaattctgccatttcttttgctttgaaaacttcagggtgactctttcagactaatttgagctacgaatgatctgtttattggctttattttaaaatagcatttgttatgtaaggaagtattcttttgatatactcaacacattaatttcatcttcttacatttatacccacagttaaatgttaccattatgttatttgaaattcacatttactcatagaaggaactttctttaaaagactagaggcaactaaccaagtcctagataggtcacacttacatatttccatttgccaaacatgagattctgaggtacatcaactcggcaaggcatgataatggtatctccatatgctgagtttacagtataccatccaagacctttaaaggaaaggaacaaaagagagacagaagagttcaaatattctcttgaagcagcaaagcaaataactttagtacaagatgcaagtcttagcgaaggttttgtattataattttatcctatatgaaatttgtatttcattaaattatgcagttagaacatatttcctatttaaatatcaacagctcttatttaactactaagcctttgaatgttatatgattcaaatccataaatctcagttttaccagggaatagataagtgcatgggtgcatggtaagtcatttcagttgtgtctgattctttgcggccctgtagtatgtggcctgccaggctcctctgtccatggaattctccaggaaagaatactggagtgggttgccatgccctcctcccgggaatcttcatgatatagggatagagcctgcatctcctgtggctcctgtattgtaggtggattctttatcactgctgctgctg

SEQ ID NO: 38231 - DNA, 1039 bp, Bovine  19866880588954
  misc_feature (1)..(1): n is a, c, g, or t
ncttggcaggtggttaggggctcctcatcttgcgttctgcctcacaacagactgtctattctgctcttccttctgctcagtcagacataccagcagagacaatggcctaacagatgctgatacagccgggatcagcctatgttgattttatgcttattagtctgagctagtcacagccagctggttgctgtttgccttgaatgagcagtagaaatacacacaactgcagtggtcccttgggtacatagacacccagggtgctggttgccataatccctcccattgcatgaggaatatttttggattatttaatgttttgtttttagtcttagaacaagcacagagagggaataagaaggaccaaatttataagacaggtgtactaaaaagaatccctgatatttgacactgtggtaactagagaaataacctaaagtttaaagcttgcttattagtttcctcctaacaacgctgagaagctagtacagattttaaaagacccataagcaagcttcctttaaggcatagcaggtgaaatgttgcttgggcagccaggtgtcatgctgactggtgctttagcattcacaacttactcctttattggtcccaggagtgaaatgttttgaactggccataagcactgggggcttgctgtgacctgcttcacttcagaactagaagcgtcctgaatgcttcaggcattgtcctatcccatagtgaaggaaagtgggaagtccttatcagggttgaaatttagcttttctagtctagctgatatttttgtcttgatttataaaatacttaaactattttttatttaagtttttaaatagtctacctaactagtaatataatctccccaccaccacgactgtccaccattagtaatgctttacctccttcccctaaaatgcttactcatccttccttttatcccattttattaactaaataatagtatcttgaaagatatatgtgggcctcccttgcgcctcagctgataaagaatccgcctgcaatgtgggagacctgggtttga

SEQ ID NO: 38232 - DNA, 1759 bp, Bovine  19866880791353
  misc_feature (1)..(1): n is a, c, g, or t
ncattttttgtggcctcctagagagatatggtgccccctcagaatttctctactttttatcaatcaacctttttgtcagttctgctatctttttgcctccaggtttttccctctctttcatttacctgcaggagtttggtctgtaccacaatatcccttctgattgtcacgctaggactagggagctcttgctattcatctgccatgcagcctctttgtcacgtagcccttgtattgtatctgtcccagctgcgtgtttttctttctttgtaatgctagtgatacttaggagttggtttaagtgcccacagtcacattccaaagctactaagaattacatcttttcctcagtctgaaactccatttgacctgagtagagtataggtgatttcatgcttctaaacttgttccttaggttttatcagagccgagtttgcagggccagcaggtttcattcaatattatttgaaggggaagattttttaagaaataataaattattctttttgaattatgtctttcttagattgtcatacactgattttaataatatttgtgcaaaaattatgtaaaaacaaagtatgtgtaaggcatgggttaaatgcttcaagaattaaaattattcataggagagtcattctttcatttattaactgtttttgtaggggtggaagtgtatttgggatcatggagccactatgttaccaatgctacagttgtttgagagtggtatataaaatggataatagtcccacttacggaactgtagctgttccgtaacagctaagtgaatttcccacttatctgacttgcttaaatcttttgcttctcctctgtaaaactgaatataataatacctatctcatgatattgttaaagattttaaatggggtcacctatgtaaaatacttagtgcttccaagcacttaatagaggttgctatgtttattttgtgcttgtagaggacacttgctcttttggctgcctagaaatcacatatttttcttatttggaggagatctctaaataaaaactggaataaaggccaaaaaatctggactaagtggaaagaaaggggaaataattgttttgcctgcctctagaagttacaacattatctcctggtcttgaaataaaagcccatactgtgtttaaaattggtatttgtaatcatcatggggattatggggcagcaaagtgaaacaccagccctagtgatgggtactgtaagattatacctttgtaggcagataattaattggcttccccagacttgactgctttttcgactcaaagagctcctggttctgtctgagtttctcatacctgcatggacactctcaacaggcaataaacgtgtaatgatagagctcatctcattgttttgtctctaaggaattgttgtcttttattgcctattgtctagtatcttgagtgcctttttttccccatgtagtttgtccatttgttttagatatttcatgtgggagggtgaatcttttctctggtactttcttttgactagaagtggagtctgtaatctagtttttgtcaagcacccagatccaaatccagtaactttgatgagacagattgtatactgatgccctttgttcctatctatgatctgctatatatatatatctattcagttcagttcagtctctcagttgtgtccgactctttgcgaccccatgatttgtagcacgccaggcctccctgtccatcaccaactcctggagttcactcaaactcatat

SEQ ID NO: 38233 - DNA, 915 bp, Bovine  19866880796928
  misc_feature (1)..(1): n is a, c, g, or t
naaacattattttcccaatagttttaatctcactctggttaatatcatattaagtgttatattaattatactattatatatcattatattaatgatatttcaaattgataaattttgagttttatcttttctcacctcagataattttctagatagatatttagagatttatccttaaaaattaaaataactgagtggtaattacattttccacagcagtgtttagtagtcaaacaggctgaacttccaaatgagtttgctacaggaatggcaggcagaaataaaaataaaatatttaaccaaacctctccactccccacaaaataccatcaaacaaagcccagaaacagttcaaacataagatcatcctttacttttttgtggttatttactttgccttctggaaatattgcacaatctgttagttttttctctttagatgtttgcaggatatgggatgtactactaagttttttaaaaatgaattgattctcacaacagtacctgtgtgtacttgttaaccacataactacattattaactatagttgcttcacaaatagtaaaataaaatgaaaaagaagctaagaaaacagttatatacttcactaactttattgttcaatgattaaactagaaaatatttaatagtgagtgtttgtttatcattgttaaatcagtaacagtaaccaggatcgttgtggcgttgataacagtgaccaggagctttcctacttggtgaggcttgactgccagtgatcaatggcagagtgatgtaggagactggaaaggaaatacgagccccaagtttcagttctgtcctgggattttgttgttttctgtttctttggttgctcaatgatgatattaggccagaacatgtgactgattataagtggggtgagtttccttccat

SEQ ID NO: 38234 - DNA, 2270 bp, Bovine  19866881037902
  misc_feature (1)..(1): n is a, c, g, or t
ntcatcttttgtgtcctcccagatgtttctagcagatatttgcaaaaactttcccaaatacaaatggaataataatagaggcactggagatctttccaaaaactttagtagaagctttctctatattttcaactcagttatttttaacatgatataatcattaggcatttgaaagcttacatctggtatcagttaatgatcaccggcatctttcatatttaacagtaattccttttggttcaatgagctgaccttggaatagtataagtgtagctgtacaggcttccagtgatttttcaacagttgcattttcaatagctgtacttctaaaagataaatgtaaacacatggcagtaggttacaattaattatccattttcttttcatagaataaaatgaacttagaaaaatgccattaattatgtaaagttaccaactcctctaaagaaaatttttgaattgttagtatagtaactttcttagaaatttgcatcaatgtgctatttaaaattatatataaatactaaaactaaaagaaatatagtatacattttctcctctttttaaaaagataaggagtattgagttgttagtactgtatttatacacaataaaattcacccttttaagcctacacaactatatgcagttgacttggtggtatcgtgaactaaatgaaaataaaaacatgtcaaatagcttaaactataaaaaacaaaaatttatataattttaggcaactatgttatataattatggcagttacacagttatatacatttgatgaatgatagccaatgtacggttgtgtaacttccaccacagttgtcatgggtgaagtgtgcctcatccaattcatatgttaaaggctgcctattccccagcacctcagactgtgactatatttggagattggacctttaaagaggtaattagggttaaacactattccagtatgactagtatccttataagaagacaaaatttagacacacaaagggacactgaagttgtccctgcacacagaaaagaccatgtgaagaggaagcaagagggtggccatttctaagcttaggagacagacccagaggaagccagcactgccaggagtttagacttcccacatccagatctgagagaaaatgaatttctgctgttcaagctacccagcctgtggtatgctgctgtggcagccacagtccactcatgtttatttgctaagttgtgtctcttttgcaaccccgtcgtctgtagcccaccaggctcctctgtccatgggatttcccaggcaagaatactggagtgggttgctgtttccttcttcaggacatcttaatggcccagggatcacacctgcatctcctaatacaaacagtcagaatatagaacctttccattacactctcaaaaatctctcctgcttcttagcattcactcccttcactgtactctcacctgctagtaatcactaatctgataactcttgctacttttttggcttttttcagactagaatgccatttaaatgtagtcatacagtatgtagggcttttagagtttggcttatttaactagataaagttttagatattcattcatgttattgtgtgtatcgctagtttaactttttattgctgagtagtattccattgttcagtcttaaaggtttttctgatccaaggttacatgctaatgaacttgggtttctgatttttgtatcctctgcttttacaataaagtgatttggtagaaaacaattgagttaattctttgctgtatgtgttcactctatcagtggtgtcctactctctgtgaccccatggactgtagcctgcctggctactctgtccatggaactttctaggcaatgatactggagcagactgccatttcctactccagggtatcttcccgacccagggatcgaatctgtgttggcaggtggattttttaccgctgccccatcaacctgaaaaacctaactctaattacctgaaaaggcatgcattttatctaacagttatttggttgtttctagctgtttgataatattgatataaataaaattaccttaactatatttgtgaatatcctttttgaattattagtttatttgataaatacagatttggagaagggaaattcattgttcaaaagttctatacattgcttgatcattgtctttaaaaatatatataacagcagtgttttagggttaatttgattttaaatccactagcattgattactcaaagttttaaaaatctttg

SEQ ID NO: 38235 - DNA, 3284 bp, Bovine  19866881118229
  misc_feature (1)..(1): n is a, c, g, or t
ngaatcttatgcctatagctttatcagtgtatttgtgtagcctatgctttatattaaaacataaggattcatctgaattcatttaagtttatagaacaacataatctgctaattaatgaaagccttatgtttcatgattttttatcaaaatctggggctaagtcttttgctgtgagtcattaattttgtaaaacagaataggtcttttaggaaaaaaaatgtgcccaagaacatctaagcagtcatggctacctggggagcagaaaagccaaactggtctttgtggaaaccactgaatttctttttgttaaccacccaaagtgaaaagaaaattcgctcagtcatgttccgctttgcagccccatagactgtagctcaccaggctcttctgtccatggaattttccaggcaagaatactggagtggatagtcattcccatctccaggagatcttcccaacctggggattgaacccgggtctcctgcattgcaggaagattctttaccatctgagccatgaggaaagcccatccaaatttctcccctacaaaatctgaagagattagtagaaaactaaatagattataaatgagtaagtaaatttattcattacctagatttttgttctttagaaagacttcctcacaccccagcttaggtgacctcttatatatgacttttcttggaacatcatacatcacaaaaatatgtctttatctttctccgtttgctagacagtgagctaaatgaggataggaacgatgtcttagtcgtcattcatttgttcattcttgttctagtcattcatccataaaaacttataaagcacatattatgtgttttcacaggcattatatgaactgtggtagaatggagagaatgaggacaagacacatgacagacatccatataagatgttaggaggactttgtgtttgattaagtgtggggaactgagagtggtagagaaatctagagtgacattcacctgcccagtttggttgcttgtatagattgttgaattagtaaccaagtagaaaatataggagaaaaattatttgcctatggatgatagagtgaggaaagcaaggaaatagttgttcatttggggccatattaagttaaagatgtgtgtgaaacattcaggtgaagaagattttcacagaagcatggtcagggctgattatactgaccgacagatcctggcaactggatgcagttgatacaacataaacatccaggcagatactgaaagtaaaggataacccagagaggatagaagagtatcaggagagcaagataccatgaagtcaaaaaaagaaatatgtattttaaaatgcatgttaccacaagtgaaaggggtgaaatgaagtacatgtggtaatgaataatttttttcagatttatagtttgctttattctgaatgtcagagcttagcctgactagcgttttacaaaacccaattaagttacaagtgctttttaacaagctgagtgttcttaaacaagtctcaatgagtctttatctttttcttttatttgtaaactttagggacttaataaagtggttcttcaggagccaatattttatgtacagtattgaaagtaaacaagtaagcattcttgaccagaagcaatttcctaggggatagaagtagacaaatagagccatcatatgtcaagttcatgtcatatatcagaatatcaaccatggaaggaaatgttgaaataatataaagagtaaagtttgagagcaacttttgctgtgtttgctctactagatgaattgtattcattatatcaactgggaaaccatatcaagaatatcaataatctgagcaatgacgatattttcctttaccagcttaatccaaatgacatcttacatgtttgtcacacccagatctcaaggaaaaaattgttaaatttaaatgtttccagatgaacaaagatcagtgagttatattattattaccaagtcaatattaatacatactcccatgggaaaaaaaaagaaatatctatttattgagttatacacagttaactgaagaatatttaccggaactcaagctttcttaaccaaaatcaatgtggatgactttcaggatgttagcagtaccacgatgacacaaagatattatttcttaataacatcaggtttcagacaatagagaaagggcagaagagggatcattaacatccaaagacatttgtacataatgataattatatccaggtgctcagattaatatgttttcaacataaacatgtggaataaacagctgttgtggaaatgtgccaccaaaatgaaaacagctcaactagagaaactattcagaagctagtgaccccgtacatgctcatactttaggaaagcaaataattttcattaagcctataaacaaacttaaaatcaggatggatttctttggaaaatagtagaaatcttgaaaacattctcagtatttaccaaacatcccctaaatatttgctcaaaaattaaaataaatagcaatcttttattcattgtccagtgtttaatgatcaaatttcaaattaaaaaaataaattccacttagaagacaaaaataaaagatattcttgcaaaaccaaatattgcatctctaatgtagtatgaaaagaagcctgtggatggtgcattcagttgctagcattagcactcacacacagactgcttctggtcaaaaaatgcctttgtgttttgccttgaatacttcactgatttatatttgaagaactatttggattaaacagttctttcaataacatttagcaaaagcattgaaagagttaacctatttgtagcaactttgaacctttctaaatttaatatttttagatgaaagcactgatcttcctatgctttataaaatagtatcctgctgggcagtgtcattacaatgataatcctactgggagagataccaatccaatttattgaatgaagatattaatattgtgatagatacttctaaagctcagtttgattctttaaggattctttcatgcttagtggatgcttactgtactcagttatttgagatgtagcacttactgaatttttgcatgaattgcaattctccaaataagacttatatcagcttgtaaagcctgatatattttctacctttgaagtgggcattcaacaaacttcaattgtgtctttatactatacttagctgtaactcagtaattcttctttaagggagaggccagggagagcaaaatgcgaaacaaagtccatattaggggaattagtat

SEQ ID NO: 38236 - DNA, 1583 bp, Bovine  19866881292126
  misc_feature (1)..(1): n is a, c, g, or t
ntttaacattttgtattaattcacttaataaattaatttcagagatagatagattacattttaattctgggtgacacatttttaagactgcttagtccagattttatttcaaatgctgtataattaagtggatcatccacatagatccacatgaatccacagtttactcaaaggtcactggactcttaagaacacaaaataagatacaacatcaccagcacaggaatatctgagccttggtaagcctcagaaaaattgagaatgttattcactcactgtgatgttaaaagactatgatctcattttaggactatgtagatagtggccagacaaagaaagaaaaaaaaaaaagagctgattcatgctgaagaaagaaaatcctaaataataaggcaatggctacaaagcagtgaccaggaaattactttctgagtaagatgctccggggcaaaagtctttctttaacaaatattgtttaaagcagtgaaatctgtttgccatcactttttcttctcctaggtgattaaatgcagaagaaaaacagtcatttgatagccacagaagctatttactgaaagtatattcaatcaccataaacattatttttacagcaagactagtgaaagatactatgggggatcccataaaacattttttaaaagaaaaaaatgatagtaccatatatttttatgagggtttcagagtgatctgtatgcagctgtttcctccaagtactgcctgacattgcaagctctgcttttggagccagatggcataaaattcagttcccaaatgggagagatttcagaggctaaagaataggttcagggcttgttttattttgtgactaaggatgattcctaattatcttctgtatatttctcatctataaaatgagataacctattgtaatacaggggatctttattcagggcctgttttattttgtaactaaggatgattcgtgattattttctgtatatttctcatctataaaataagataacctattgtaatacaggggatcttcccaacccagggatctaacccaggtctcctgcattgtaggtggattctttaccagctgagccacaggggaagcccattgtaatataagcactagataattataaagtgtttcattgccatacattttaaagacagaaagaaacagaaaagcctgatatgttttcaaattgaaattttcttttttgtttttcccctgtctcctttcgaaaatgtgacataagtcattctgtaggaaaagactatgaaatttattctcttggatttccaagtagaagctgcaggtttagtttgaaagagaaaggacagactcaaactctcaaggtgtagaaaggctttatctaggaaaagtgtagggtgctacaaaagggaagttgccaatggatgtgaatgggacaaaagagctaatataagctctggtttgagtatggggctcacttatgtggagctgggaccttttatctaggctgacttaaatgactacacagtcctctgatgctgggacaatactccttacattgccctttgactgtggcatagctgtcttgtcctctttt

SEQ ID NO: 38237 - DNA, 1296 bp, Bovine  19866881319765
  misc_feature (1)..(1): n is a, c, g, or t
ntcttatagctgtgcattagcgataacactttctgccttgcctacctcacaaaactttgaggacaaaatataacaacagaaagttagaaagttttacagacatacataagtttttataacatcactgagataattaaagtgggctgtaggaccatacattacctagtccttaacttaagctgtttcttgtagaaatttattaaactccattctgtatttacttcaccatcaaaacacacagccagtgggccctctagcagcactggctgatgataatttggatacaccattgtctttcatcatggcaaaaatagaatagtaaagaaaaatctaagcttattgagtgtccactgtccttaactgactatttatatatacagaagtgttacaaaattggaatttgcttttagtagcttacattttcttttttgaatatagaaaaaatgctttgagttttatgagcattaatcttagtatgaattgtttactggttgtttatgattatctggtaacttagaggatagaattttatataagaagtttgatgttagggtagaaatggaaaatgtagctcatttgtttatttcataggatgcctgtcattatctgtattggtgacattaagtgtcagtgtatcaattccaggctgctttcaacatgagctgtgtattcttttaatggctagctttattcacacctctatttttagtagatatcatttaatcttgaagtgtaaaaaaccataacacagtcatcattcttaagtacatcttgaaaacacattcttctgaaaatactcactttccactagagtatactttggacactgaaacgttgacttgggaacagattgataattggcattgttttgcccttacaaatgattattttgaaactaaataaaaaataatgttgattgtgttgtataaacacagcaggttcctaaagtctcagttttattttgtatcaaaatatttgtcagtaacttgactaataaatatttttaagtggtataatagtcgatcagtataataatctgtcaagcatatctattttagatatgcacaagcatacacatatgcacgtgcgtatatgctggacacatcataaaatgctatgatatgaaagttaaaaaaaagaaaactataaagactcaaatactctgtcctttgtgtcattaaagattatgtttttggaacttgggaaatggaccagttcttagagcaccttctttatctttatcagaaaatataaatcacataggtctattttaaactctgtttcctgttaattcta

SEQ ID NO: 38238 - DNA, 3186 bp, Bovine  19866881387513
  misc_feature (1)..(1): n is a, c, g, or t
ncacccctactaactacctttgtgtcacttctgtactcgatatcagaagtaaattagacgcctgcttcatatggttgcgcagtctaagttcatttatttgctcagaactatttattgagtgcttgctatgtgcaaagaactgttctgggcactgtattctttccttcttccttttaacttctccaaacatgtccttccctgcatttttggctattcacactactgactctcatagaatgtctggattcctgctccatgggaacaactcatttccttctgtttattctccatcaaaaatactgccatggaccaactttttcttaactgcagattagttaaaacaggtttctcaatcttctgataatgaaaacctttcttattttcctataatgctatttgaaatttcaaattaagtaatctaaaaaatcagagctacaagacagcatactacattgtttataaaacagtcctgaacttccctggtggtccagtggtaaagaatcccacctgccggtgcaggggacacaggttcgatccctggtctgggaagacttcacatgctatggtgcaaataaacctgcgagtcacatctactgagcccatgctctagggcccaggaaccacaatactgagcccatgcacttcaactactgaagcctgcatgctctaaagcctgtgctttgcaacaagagaagccactgcagtaagaagcctgtgcattgcaaccagagagtagccctgcttgccagaactagagaaagcccacaggcagcacagaagagccagtgcagccaataatgaaataaataaattaattaaaaattaaaaacccatatcactcattaaaaataataataataaaacaaaatagaccctcaccacccaccattaagaatcactgacattagtcatggaaataattaacattttaaaagaatatggccaaatttagaatattcagttgatcatcaaaatgatgagtaactttcaagatttaaactatattttatttagccatataccctatgttttgcataaaaattggaattcactttcaacagttcagttcagttgcttagttgtgtctgactctttgcaaccccatgaatcgcagcacgccaggcctcattgtccatcaccaactcctggagttcacccaaactcataaacattgagtcggtgatgccatccagccatctcatcctctgtcgtccccttctcctcctgcccccaatccctcccagtatcagggtcttttccaatgattcaactctttgcatgaggtggccaaagtattggagtgtaggacatgtaaatatgagcactactttgttaatttttctagcctactttttgaaaagtaatttaagtaatctataataaaatgcaaaagctgtttcaaataaaccaccacaattttccacatgaaataaagatacactcttactttcttaaaaacatagattttcatcaaggtttttgtaccaagtatatgagtcattaaatcattttcactggttgtgatttagagtaacttgtaagtagaggaacaacaaatgcatttgtctttggtgttttcctgatgtgctgctaaaagactgtgctctgtccaaacaaggtcatggccagctgacctggaagcaggctttgctgagccacaaggtcagagatcatcatggattgctacataagcaacaatatataaaagtaagaggaaaataaagaggaaaagaaccctgatggtaattaccctataaactagccatatacagttttgtccaaagataaaagaaattctgtattggacaagataactttcagttaaaaacagaaaataaaatatatttatagtgagtttacctagaatacttatgttattgctgtcttaacccatcaggtgtatcattttaataacattgaaatgagcaaggcttcgtagtaaggttaagaaataattttgaggggtgagcagggcgcggcccaggtcagcgggagcaaggttcgtgctgcacactcagaaaaaaaaaaagaaagaattttgaaattcagcttttaagtcttgagttagtcataattaccaggaaacagagagcaaattttaggaaaaattaattgcacctacagagaaggcaatggcaccccactccagtactcttgcctggaaaatcccatggacagaggagcctggtaggctgcagtccatggggtcgctaagtcggacacgactgagcaacttcactttcccttttcactttcacgcattggagaaggaaatggcaacccactccagtgttcctgcctggagaatcccaggggcgggggagtctggtgggctgccgtctctggggtcacacagagtcagacacgactgaagcaacttagcaattgcacctatagaaactcttagtaaattactacttcagattactacacataaatattaatgaaatacctaaacatgtttaatttagtagcaagatgtacttgagacatggtaagattctgattcctatgataataagcactaagaatgtacatggaagcagcctccaaaatctttaagctcagatgcaatcttgtagtttgacatggattccctcataagggataacccagcagacatcatgtgtgagtcactgcaatgattaacatttcatattcatattcttatagctggcatgttggtagttctctttttccctttcattttcatatcaaatattccacattgttaatatatggtattatgtccattaccaactcaagttcaccaaaaaaaaaaaaaaaaattcagcaaaacttgcagatctttttcttatttgatagtgctgttctcatataatggcttgtttaattaccttcacttgaaattattagtacagtaaaagatttcattaagcccctctaggtaaaaaattagtggacataagaacaaaacagtggacataaacagaatttatcattttctcaggcttaaaaggctcctttcagatgtttctatcagtgtagatgcagagagtaatccagcagaaaataagcccttgagttaaggacagaaaaatcaacacaagaacaggtatgaatctaatgaccattaatatacatataagtggatgaagtgaaataatcaatccatgttcaagaaatgaattctgtggcaatgctcccaacttatcatttgcaaga

SEQ ID NO: 38239 - DNA, 1405 bp, Bovine  19866881625927
  misc_feature (1)..(1): n is a, c, g, or t
naaaccatcagcggcattttgaactcctacaaaatccatgactatgtaccagggttgagaattaacagaagaaatcagactaagttagagaatacagaggagatgattataaataacaaagtagagacttaaagctatcataagatgggtgagcatttattctataggtcttgcaaaaaggaagatattacttgggtactatggaatagggatgggaatttggaaatagattccaaagaacttatgaattgggacttaacattggaacattttttccaatatattaaaattgtataattatattgaggtacttacagtaaatatcaaaaactgcttgttcagagtaaactgttttctggccagatggtccataatatgtcacagagcaggtgaatggcatttgtatgtcagccttggttgtcttgtactccagggatgaagtcatggtatagagctgagttactgagtccatttgctttctaaaaattatgaccaccgctgaagaaaataaagaacactaatggtaggatctttcatcggaaaatcacagcccttaattaactgtcataaaaactttgagaagtggtttcgtccttcttactgcatttaacaggagggaaaattgacatgtagtgaggtagatgtcttttcaaaagcatgaatcagagacatggacagaaatagaatcctgggaattttatctcccactcactttaattaacttctagaacatgccatatacagagataattttctctgctcttgattcttctgcacaaggtctaaaatgacgggttttaaaaaatcccttactgatttaatggatacttaagtaacaaagaatatagagtcataaatcaaaagagggcaatgcatttagactcaggatagactaaagaatgcttagacaagagaaaggcaaaacaggtcacctgaatttattgcccacttcttacccaccttcttcaagaggttgcagaacttttccattcctgtaccatgtgatgttgccatctggataactgtcttttgaaatgcactcacccaactgcaatatagagaggaaatattacaaccttggttccatcacgggttgtccatttgaaagccccagactcctcaagggatgcagagttactccaatgatttcttgatccattcattttacaagtcccaactaaggactgaatgaatgcactcttacataaaaacaatgtcttgtgtttaaaattatagtcttgcccattttaaaatgtgcaggagatgctgccaccattagtaaaatcacattcatttaaaagcattacccaattcattttgacagtcttcatttttaacgttaactaaataatataactgcattaacattggctattaccatgggtgatagatctgcatttgaaag

SEQ ID NO: 38240 - DNA, 5652 bp, Bovine  19866880256159
  misc_feature (1)..(1): n is a, c, g, or t
naatcagtcctgaatattcattggaaggactgatgctgaagctgaaacttcagtactttggccacctgatgcaaagagctgactcattggaaaagaccctgatgctgggaaagattgaaggcgggaggaaaaggggatgacagaagatgagatgtttggatggcatcaccagctcaatggacatgagtttgagtaaactctgggagctggtgatggacagggaggcctggcatgctgcagtccatggggtcgcaaagagtcagacctgactaagcgactgaactgaactgaaagagaaaagataccttgtgtattaagaagcaaatacaagaggcacagcaggcttctcaactgaaacgacacaagtagtgaagaacgtctctaaattattacagaaatatctatcaatgtagatattttcaaaaataactctcaagaacagtggcaaaattctttttcagaaacagatgagctgaattattcccaccaggcctgcttaccccacaagaaaagctgagcatgttctccaggcagggaaaaaagggtgggagtccacatctacacaaaggaataaacaccagaagctggaaaggggtgggtgggcgttaaaactttttcttaatttaaaatctctttaagagatgttgacattaaaaattaatagcaatgtgtgatggggtttacagcattatataaatggaacgtgtggggcagcaaaggctgggggtgagggtcgtgtgctgaccgaccagtgaccagcgaccagcgcagcaactgcacacagaggcagaaacgcacagctagtaaacgatggagaagatgaaatagactcatgaagcagcaggactggtcagaagaggccaggaagaggggacatggagcaaagcagacaggacaaagagaaacaaaacagcaagatggtgtgtttgcacccgaacacaccaataatcagtctccgtgcaaggtcaaaacacccagatcaaaacggagaaggtcccctccctgaatggagatgcagggcctggccccaaacgtgcttctttaaggcaatcagctcaaatcaaaggacactaatgggccagaaattaaggacggaagagagtgcgggttcctggcccactcggagcaagagcaggagtggggtgggcgggcagagcctggaacaagccccgcccatttcacattttatgggctgtttgatgccttcgtgagaatctgttctagtttttcgccagtgtttgccttgggttttccaggttttgctcgttaggtctgcatacattttccgatcacttgtctaaactgccgatctccctcaagctggtctcttcactcctgtgcctggtacctctctgtgaacaaagtatttgaatatagcccagtgtatccatcttctcgtaacacctcatgcttatgaggtcttaaaataagacatttattttcttacctgaagaccatgaagatactctgtgacgccctctgtctccttcgttcacctttcatgctcttgcctaccttccatctgacgctggtttttgtgtacagtgtgaggtgaggtttagttttctcttttctgcgtgaggccccagctgtctgcacaccattattggagggccttcctgtctgctctgctctgcattgccagcgttgtctggaagagcagatcatcctacgggcatccggcggtgacgcaggacaacgtcccagagatgtccctctcctgatccccaggccccaagaggacgcggcccgacaagacaaaagggccttcggggtgtgattagtgacagaccctgagatggggacattgtcccgattgtctgggtggccccgtgccatcaccagggtcctgaaaacaggcggggggcgggcacggagggactggaagaggcagggtcgccgactgtgcttggagcctcgaggaggacccggccctgcccacacctcggttttaaccagcgggaccccttttgggctctggcctctggagctgttgttgacgcccctgcgttgtggtcctgtgttgctctggcctctggagctgttgttgaagcccctgcgttgtggtcctgtgttgctctggcctctggagctgttgttgaagcccctgcgttgtggtcctgtgttgctctggcctctggagctgttgttgaagcccctgcgttgtggtcctgtgttgctctggcctctggagctgttgttgaagcccctgcgttgtggtcctgtgttgcagcagcggcaacactcgtgcaaactcgcaccgtaaagtagcgagcacaccgcgtgagtgtgagctgtcttccgaagcagtgccgagtggggatagaaagaaggattctgcacaccccagagtgaggaacctcagaccctggagccctcaggctgcaggagtgctctttgtatgttaattattcagggcaaacctttaaggctaaccagaaaagaagacaactggtgtataaattccaaaccagtaaagaggggaaatgagtaagagaacaggtgacccaagacctcagtcaagttacgagcggccagtgacggagacccacacacggaacacgggggtgacggagacccacacacggaacgcggggcgaggtgccgggactcgtccgtggatcatgagccaaaaaggtgcgtgggccccacctgccactaagggcagagtgagccagagcatgccagtcaggtgctgtctgagcgagagactcctgaccagagaggagccacggcagcaggaaagcagagcaacagacaagagcagtgccgcgtgccactgaaagggccaccttctcactgtgcagcggagccacctttgtagcctcgggcccccgcagggcagggccaccactcagtgaccaaagagccccacacgtgggaagcacaagtagcaagaacctggggcaagactgtggggcccacgctcgagatgggagaatccagcccgcatccaccactgcaagtcggatgagcagaaagagcacagacaggctttgagcaacacagttaaactcagcttcgcggacacgtggaccttgtgtctagaaattagagaaacaggctgaggccatgtgtgactgggtcagatatcaactcccaaaagatggattttttttaaatccccatacttttagaaattttataacagtgacttctaaatagctcatgggactcagaagaagtgaccatagaaatgtcaaaaagactggattatagcagaatcgagaaggatcttttacctttatgttaggagaagggctggaggctttatgctgagcatctaattcgggaagttagagaagaacagcaaaaacaaaaaacaaaagaaaaaatgaagaaagcaaagggaagcctacaaaaaatacatgaacagacaccaacaaaattagaagcaaagataaacatggttgtttgagaaaacaaaaaacctcataaaatagacacattcttgtgagaatgatccagaaaaaataaaggcacaaatatacaacattagaaataaaagagacaaattctaaagagcatcagagattgaagataatagaatactgtgaacaactttgtgcaatatattcaaaaatttatgcaaattttggacaacatcctagggagaaagaactcgagactcaagaaggaaagaaaaccccgacagccttatagccaagaaagaacaatcaacagatttatattcccccacaaaaataccagttttaccatctttttctgttgaattctaccaaaattccaagaaaccattcttgtcagtctgtacatatctcccaggtagaaggaaaaaggctatcttctgctggtcagtggcgaacctgacacccgagctgctcaggaataggaaagaaaaatacaacatttcatcaccccatgtgaccttaaaacctacagatgtcacaggtgaagagagtaaagggaaaatgaacctgtaaacatctcagatgatgcaggtattcacaacagaaattcttagaaagccaggagcggagtgaacgcctcatcttgatggaggaattgatctgaatctagagcaggctgcctcctgtgtgccccataaagtcagggctcggctgagagcccccacgtcagcgcttccatctgtgctcagctggaggcctccaccagaagagggacgggcagggagcggacggtgtgcattctcaggaggcagagcagccagcaagcagtgccccgcctgcggtgagtgcgccaggcggcaggcacgctggcaggtgcccagcgtggtgtgtgaatggtcaggcgtgcgggcctggcgcctctggcaactgttccttcttgagaccccctggcccaggtctttcccagccctgggagcctttccactggagaaattactgccattttggatttaccaaaattaaaaccagctcttctcactacttgtttctacactgaggtgagagtcacgtgatataaaattaaccactttcaagtgaacgatgcagtggcgtctggtgcagtcagtccttgtgcctctgtctagctccgtgaccccacttcccgttactgtctcaacagaggggagcatgaagaaggagagcagaggcaaagatcataagaagagaggcacaacacggaaggctgggaaggtaggtggcccaggccccaccaagccccgggcctggggggcccaaggcccggcccctggatggagcgggtcagctctgcctgcaggctgcaccctcagggactcctgcctgtcttcacagggcagcataccccggatcgtcccctcccactgcgtcctcgtcgactcggacagcttcaagtgtatcctttgatgcttcacccgcctgccccagacacggatcctgcggcctagttctccttaaccaaggcccagttgtcgtggacccctacgaggaggcccaaggcccaggtgagtgctccctgccagggaccacccacagcactgggaacatccaggcctgggtgctggcctcagcctctgccctgcctccatgtggccctgggtcagctcttgctgcactgccccggggaaggggggcggtggccgtgtgctccgggacctgccctcactctcgtctgcagccagggcaggtcaacagcatttggcagggacccctgaattgggaaggtgccgcccccgggtgtgggcctgtggcagagggctgcgcccgcggctctgggacaattccttggctctttggctgagctggttttcatatcttcacggaggagggaaggagcgccacccctcccctccccgggcccccttgcccgtgaggagccaggccccgggcgcccgccacaccaagggccccccgtgtccgcaccctcgacgcccgttttgtcaccatcccattctggttgcagaaatgctgactcctgtctccgtgacccgggaaattttggaaagattccgagacacgttcactgcgaaatggacgggacacctgggcaataagcagtttcccaggttggcctctgggctgcgcccacgggagaccccttcccctcccgcgctgaccccttgtttcctcagtcccttcctcactgcccggaggcgcctagagccccagcgccgggcgggtgcgcgcccacccgctcggcttcaagggcctccaggccgcgcctcgccgaggggcgtgtcggggg

SEQ ID NO: 38241 - DNA, 1280 bp, Bovine  19866880434739
  misc_feature (1)..(1): n is a, c, g, or t
nccagtgctcagggccatgtccccactgtaggcctcggcctgggcctgctcccggaactgctggaccctggccagcaggcgggagaagtcggcggggctcacggccacccgagccaccttgcaggagcctgcggagacagaggcacgtccccacactgggcctcgcagactgcccttcaggccgagagcactgcggacggagccctgtgcaccaccagacttgatggggggtggcaagctaaaggcaaagctttgggaccttccccaggagtcagcgccagaaccccgctgaaggggggacggccagagaggttgggaaggaaggcggacagaaacttggcctctgcaatgtgccaagactgctctgcagacacagtgaggggccagcagggaacggggggtcggtcccccggcaggggacaggtgggtggtatcactcctgttgacgttcaggagccgggacaggccctcggggcaccaggaagtagccagggggtcctgggacagagcaaatggctctctatctgtgcttgtaaatgaatgggcaggtggaatgaagtgctgaggctgaggaaggagctggagagggaatgttggggggggtatccccagtgggaggcacacgggccaggctcggctgcttccacctgatgccccctccctacctgggaaagatgcctggatgggggctggcaacctggggaggggggcggtggagaagtctcgggtctctgtgtgtcccgccctcccagggacgccccactccacagaggacggcgctctggcacgactcacgccctgtctgcagtgttctgcccttggcggcagggatggagttgggtttgtcgtaggaggcgccgtacagatgggtcctgttggcgggacgggtggggtcccagaggagcccagaagaggcggactctgtgccaccccccggacatgaggcccttccttgaacctcatacaagtcaggacacggagtcacacagcaccccaccccccgccctgctacccaaggctggcagaccaggggttctgctgcacttcaaccgtgccctttatgccagggctgtgtgctggcaggacgcggcactgtgcccggccccccgccgtcatacccgtcagcctgggcaccctggcagagggacggtccacccaccccatcccaacgggcggcccaccctggccagtgccgtgtgcacagcgaccgccggagcatgatgcagggtcctggggagcagctgggggacaggggagaaggcctcacccgtccctgctgt

SEQ ID NO: 38242 - DNA, 636 bp, Bovine  19866880512534
  misc_feature (1)..(1): n is a, c, g, or t
ncagacagagcacgtggacagacctccacagtcagatggaggctccagaacagtcttcagcacagaaggtccctgcctccatcctagcaggggcctggggggctgcttctgggggaggagcccccacaggtgcggtgggcccggcaggtgtggcctcacctggaaggccaggtacgcctctgacagcagcagccgcgcaggctggtacaggtccatcgccagcaggacttcggccttgagggtccacagcagcgggaaggatgttccgtccaggcccctgccagtctcttcgtttaccttcaggatctgtaagatgcgcaggcccagaggggccgcgttgggtgcagggcgggcaccgttggcgtggctgaccccggccccgcatgcccgagcccagtccctgctctggggcccatggccaggctgtcctctcgggacgcctgtccctgctcctggccaggccactgagtagcgccaggtgcaggggactctgcacaccctggggtcccggcactgcccaccacaaagggagccccagggacggcactgccacggtgaccagtgcccttggagcacacgtgggacggtcacttcctttacaggcaagcccaccgcgcgcggggagggcggggggcg

SEQ ID NO: 38243 - DNA, 1904 bp, Bovine  19866880797275
  misc_feature (1)..(1): n is a, c, g, or t
nctcaaagataccactactgtcatcttgatggccctaagcctaatactcggggcgagctgttcctagggctgagacaggccctcccatggctgagtgagaccacctgggccccctgcacaagctcccagatcttcctcactgagctgccctctgcacccagacagcctcagtcctgcacacggactcaaaaaacctgagacaacaacagagagctgtgtgcctgacagacactgcccttccacagccctaggaccaaagaaccaaaataaaatcctgccaaatcccagatttctcttcagctgtcttactggcaggtgccccaagcaaagcaactccagggacacaagggagcggatacacagacagacctttgtgggcagagatccccggagggcgatttgacctaagatgagaaggtgatgagaaggtgctgggctgagggcatggccagcaccacggctgacagtctggccacttggagctggaaaggagccggtggcaattctttaggcatgcacacactcctccagggcccacacgcgaagcaggacacaccatgcagcccgaggtccgaggaggatcaggagccactgaccttcgaggtgggcaccaggccagggggccccatgcctgctgtgtggagtcccagcctctgcagctccctgcttccctctgcaggccagccttcagctgtactgcctccggggacagtcctggaaagatgcccacactctgccgtggcagctgtgagactggccattgccaaccccacctgaggcctctgacctttccttggctgtgagatgggggccatgcagccgcttccctgggacacttcaaggaggcagtgaaatgagatggggacagctgagcacagcaccaggccccccaagggctccccacatttatgccaacacttcccagggcaccctgttcctctgtacccttcaggcctcactgttcacttcctccagaaaaccctgagcccgcagatcagaacagggtgccccgtgccctgtgaactcccgtctcccacttgctgaccctcacccggcccacagggcagccagtacctggtgaagggcccgtggactcacaccaggggcgcctaccagctctgctgccactgcggtgagaactccgggacccgggaacacacccagggtcccgggtatccgagggaggtaggcccgcgtgctgggggcacagagccctgcagtgaccagggctggggcaagacgagaacagagcggcccaggctgcagctcggaggcataagtatgactcgacacagactgttttacacactttatgtgccatcaatggcggcggcagcagcatcccatgtctccgtcctccaggaagactgcactgagctcaagctcagccctgaccggaatccagcaacctgagacatgagggagctgacccccggtgacaacatcccaagcccacctgaacctcatccatcacaggacaggatagggccagcctcctcaaccctagcactgggagcgcagagccaggctcagagcctgggctcgggccactgggccttgggggtcccacagcgtcatgagccggtcagcctccctccagccagacagcagagccccgtgtgtggtggaataaaacgtccggtgtgtggcttcccctgcgaacagtacctggagctggaaagaaggggggcggtcagcttgggtgccaggcctcggccaccagccccacacctgttgcctgggctgcagaagtgatggcaaatgtggtgctttgctgctgcctcaacccagcaccctgatgcagttgggcaacaaggaccggcacccggccactgccacgggaaggagcagcaacagtgagggacccctcagagccagcacacccggaaccgagcacaatcaca

SEQ ID NO: 38244 - DNA, 781 bp, Bovine  19866880942662
  misc_feature (1)..(1): n is a, c, g, or t
ncttgtctcatcgtgtaattctatcattaaaaccctaaactttatcatatttccttgccccgctccttctgccgtaatggcccgcgcccatcaataactgcagcgtgggcgcgagatggagcggctgtccgccgaggcaattgccagagagcgggcgaggcctacgcttttaatctcaatatagcaccgttcggaccagcaggaaaaagagttgttttaaaattaattaccttgtcagtagctattatgattaaaaagtgtgcccacatcaatacagcgtgcctaattcaggagcagagtcacaagaaaggccataaaaatcaatgggttaggccttgaagacagaggctctctccactgacgggtgagctcaccgcgtgatgcccaggctgtgggcagggtgccaggcggggcagggcatgttgggcccaccagcccggctggacgctggggccctcttttggtagttttaactgctgaacgtggtagaaaccaaccttgggctcgtctcggatctgggggaggccatgtgctcgggtagaacaacctgaacagcaaaatacggtgggagcttctgacaaccaggcttccctctgagccgccttcaacagacccaccttcctggaagccactcttgggactgcacgcttactctgccccgcgtggcgtgctggcccccagcatgggctgcgggggcctcagccccggggacagtcactggcgtgggctgggggtccacagccccggggatggtccctggcgtgggctgggggggccgcaa

SEQ ID NO: 38245 - DNA, 729 bp, Bovine  19866881251369
  misc_feature (1)..(1): n is a, c, g, or t
nacagtgggaggtgagactgggggtggggaccagggtcctggaggggacacgtaagttaggggttagcagtcctgacggtaatagaggtgggctgggctcggctgtgcctgggcgcttcccacccccagcggtgttctgaggtgggacagtcctttcttttcatggcttctgtgtttcccagttttgtacatgagcacacattagcttaacaatcagaaaccaactctcaggacagcagagagccttggagccaaacccggcaggtctgagggcagccaagagaggcctctttctagaccccactaccatctcagggggtcatctccagggcctcctgggatcaagaaagtggcctgggtgcccctcctggtggacacgtgtttggggtcaccaccaacggcctgcgtggaagagtgaaggtggggtggtcaggggcagacagagacgggccgtggccccggcggggagactcagtgtgacctcggtaagcgtccctgggcgggcagctcgtgcccggtgtctgaggccgtcctctgcccccaggcctgggcatcccccagctcctagaggccgtgctgcagctgctgcccctggacacctacgtgcagagcccggtaaggctgctccgggctttggcttgccctctgccagaacacagggggaccacttgccctgatgggggtgggaaggacgtgtgtttcccgaggccctaaccaaccagaggagcc

SEQ ID NO: 38246 - DNA, 1755 bp, Bovine  19866881267359
  misc_feature (1)..(1): n is a, c, g, or t
nactcacagctgactccgaggttggggtcttctcactgccctgtggccttggagccgggtcaccagaggctcgaggccggggactggagcagtcctcagagcaggtcatccatgacggtcaccgcgtcctcctgggccgaggagccccgtggacgaggccactcccctgcagggaggcctggcgcccgacccagagcctctgcaagcccagcccgcctcctggcctgcacccctcccaggaccatggcctcttctgagggtgcccgcacccctcaccctcttgctgtgctctgcagggcaccctctccaggcccagagtgcctggggtccccccgtttctctcccgccaagccccgggggtgtgatgggggctaaggcgggcggctggatgggtaggtgcgtcaggggctcagtcgtggtcccccccccgacatgcacacccttccgagggaggggctagcagtgtctgcgggctccgcggggcccccctgcccgccacaggcagagggcagagcgtctctgggggaaggaggcggggtgcctctgtggggacccagatttctgcatcgcggctctgtgtcgcggctctgtgtcgctgggacgaggtgaccccagcctggggcccccgctccaccccacggaagcacctgcgtctgtgctctgctgggtctgacgtcctctgagtttctaggacttgttcattttcctttcgtcttgacgaattaacgggaggaaaatcttactgagaaaaacgcatgtgcttctaccgttctgtcgatagtctgggatttctcagttgtgagaaaccccagggccacgtgtctagtggacgcccccgcccttggggtcctgtgggggtggctggcccccggcaggcgctcctgctgtgcaggcaggcccgcccctccgcttcgttcacacacactttgggggagggaattagtgtaagactgatttctttttcttttattaccaccgcttaaggataatctaaatgtaattaccatgatggaggcataatgccattccaaataattacagcccaccgtgtttaaaactaacagaactctccccgctgatttacgggttcttttggctcaacacgcgtttcaaacactacctctgggagcagcacttcagataatgcgagaccatttttaaaaagcagatttgtgtagtcgattggggccgaggcggttttttttcctcaagcccgtagtgagaaattggttgttgccatagatcacggggcccgctccgagctcttatgaaagatgaattaatcccgctaatgctccgaggcgggcctttcacgggggctgtgtgctgatagcctcccgcagcctccctcttctcaccgagatttatggtgtcttttagtagatgaagctgcttgtgctcacaatccgtctgctggtaaaggaatcctattaacagggtacctgagcgggcacttgatattgtctgctgaacgacgtgcccccacccccgaccgccgtggtctcctctccagggctgagggcctctccgagagtcggggtgggcaccagggggcagcgggccagccccggacgccacgggcctggagaaggcggtgatggccagggcgcccagcagggtggacgggacggtgggaagggcagggggagaccccagccccgcccgcgcagccttcctctgtgtgcagcaagcatctgtgtccagaagcttgtgcacagataccccggccccctccacgtgggtatggaccgcagg

SEQ ID NO: 38247 - DNA, 1447 bp, Bovine  19866881410576
  misc_feature (1)..(1): n is a, c, g, or t
ncactgccatcagcctgcagccccacgagtcgggaaacatggcgactgaggacaaccagctcccccagccggggcctgacggacctgggcacctcccagctggtctgacctgattgcatcaatgcctgctgctaccgggccctcacccaggcccccagggctcaggaggcactcagggacgcgggggcgcctggcgtgagccgctgaccagccgaatcctcactgcagcctcctgcccccgcttcgtagcgccccccgtgactctgcggccttcttcacggggcgttcctgcagtaagcaaaccagcgagcgggagggcgggaacgtgcccgtcgagggccgccagctctgctgtttacacaacacgaccgaacgcacatgacttcccacggcgcctacctccaccacggacttggaatccagccggaagttgaaatcgccgaagacaaagtaggacgccttctggaaccgctggtcgctgatcctggaggagaggagggaaggggtcacaggtgcagccacccgccacgcccaacctcagccctgcgccagccgcccgccacacccgacctcagcctgcgcccgaggccgtgatcccgccagcagagccccggccacgctggccttgtgggtgaaggaagtccgcgccggtcacctctggctcaaagcaagatgggagctgtctctagcaggactgcccgcaggcagacaggcgccccagcatggggaaggtaggctcggtgaccgggcccccaggctcgctgcccagccgcggctgcacagacgcccccactgagacggggcggcggggcccctgggcccagggtggggggcgccccctcagcccgcggtgggctctgagaaagcacgtgtcaccagcaggcagagccagggagcaccactcacccccgaccaactcagaaatgtccgcccggttaccccgaaccgggccccagtgtgcagagcgagggcagccccctggagccgtccttcccagggacttgttaaggaagagctgaccaggatcagtgtcacggccgtttcatggtgctgggcggggggccatcatctggtgggcagctctgcccaaccatccgcccatccatcccccgtccatccgtccccctacagccgggaaggccgccggcggctcctctcacacacgggcccatgctctccccgccagggcccctgcctggctccttgcctcctgtgctgagtcccaggggtttccctggaaagagcacctgagccctgtgctcccggcactgccccggggccttgagttccttgcagaaaacacgcccccgttcccccgctgggcctccggcattctcccccaagctggctcctctccaggcggagttggcggcctttaatccatctggaattgctctggaggactggatttgagtccatgggtctctccagcagtgattgatcctaa

SEQ ID NO: 38248 - DNA, 4404 bp, Bovine  19866880415653
  misc_feature (1)..(1): n is a, c, g, or t
natctggtaagatgaagccgcaaatcccagcaaagagagacatgaaaatatcttgtccttggggcattctctagctgctgaatcatgcctcgcttgacactagcactacccagcagtaatgataatcaggaagagatatttgggcatcttgacaattagtgtgacatctctgagcttttcctcccagaaaatagatctttaaaagttctcttcttcatcacaataatgctttgaaaaataaataaaatttaaatccatattcaactaatgcttacaggtcaaatttatgaaaacaaatgttgctatctttataagtgaagggttttattaattcaaagtattactgtaagtggaattatcagcgttgacttgattactcatcttccttcttgttcagctgcaggtctgcaatgttgttgaaatatgaagctaatgcatagaaaagtggtttattttctacaaaatcagtatccaaggggaaaaatattaagtccatgtgatctaggaaaaactaccctaagaggcacttattgttaaaattctagcttgactatcctatctaaatctttcaaaaatgtttctggctctacagttttggttaagacccaggttaacacaggcttgtcagaattgctttcttcagtagtaagcagttagatcaggaaataaaccacaaaaattccttaattgctattcatctaagtcaggtcttacactttggctgaaaaaaaataaaccaaaggaaagaaatgcctagcagtctttttctgggtattttttttccacacaagctaacaaaaacaccttaaccagcaaaggagtcaaagaatagaaaagagatctctcttcaaaccttcctttctaggtagaattagccatttaagctttgtccacattagcattaagctagcaaggctggagagtgacttaattcatatcactttgccaatttgtttacttaatattaatcccatgtgttttagaaattggtctgaaccaaattgcattggaattgctccgaaaaggctaagtcacacctcaggagcatctttaactatttattataataatttattcagtttttaagacttataatgagttgatttgtaatgaatttataattccaaatttataggatgttaatatatcattgggtggttgaacatgggccatctctcttgtgtccttttggtatgaacactgctgtttaatatccagtcttaaataggagaaatcttttagagaatttcaaacaagtagtttgtgtgtgatgagttcatggttcagacacagacctcaacaaggttaaccaattaacaaatagagactaaaaatgacaataatgcaattgctatttatccctccctatgggccagacactggagaaggaaatggcaacccactccagtgttcttgcctggagaatcctagggacaggggagccttgtgggctgctgtctctggggtcgcacagagtcggacatgactgaagaaacttagcagcagcagcagcatacttctggttgggccaatacacaacattcagcttgctattggcttttctgtttgccaggatttgcttctttgttttccttttattataatgtgtataataatgtacatttaggtgtgtgaaaaaattagcatagcaattcaatattagcatagaattttaaattagcatagaatttcaagcacaacactcaagaattattgatgaacctgggactttcttcagattacagttccaggacagaaccctttcactgaatacaggacagaaatgaggcagagaagagaatacacactccttggctagccatggggctcactagctgcaaaggtgaagtttgagcggctcaagaaggtcatgagaaccctttggcctgtgcagctgctcctctgagatgaagcgtgtcaactggccacaggtattccatgacagcaaacggtgactgtatataggatgtgatttctaagtttgcaatgcattcatcctggggtatgtgcataatcccatatgatcttcccagtggtcacgtatggtagtgaaagctggactgtaaagaaagcagaactccaaagaattgatgccttcaaactatggtgctggagaagactcctgaaagtctcttgaacagcaaggagatcaaaccagtcaatcttaaaggaaatcaaccctgaattttgatcggaaggattgatactgaagctccagtattctggtcacctgatgtgaagagctgactcattggaaaaatccctgatgctgggaaagattgagggcagaaggagaagaggccatcagagggtgagatggctggatggcatcaccaatgcaatggacatgaacttgggcaaactccaggagatggtgagggacagagaggcctggcacactgcagtccacggagtcgcagagagtaggacattactgggccactgaacaacaacatatgcataatcattatgcttacagtgcggtctgagtttttgtatccttagagataatcaaagcctgactttcttctccactgagtctgctgcaggggaatgacagtgctaggaagcacagaaagcccatgttttaaggtatcttctccaggttgcactgaccgttctaacaagggtggaggtggactgggaaacttttgaagggttaagatctcagcatctttcagctgctttccttttgctcaaatttctcagggccagggcatttgcctttcagtatgactgtgctgctctcgtttgggctagacgtcaatagacaagcatcaaccgattccaggggaagcctcttctgctactgagaaaattctctgtaagtttcctcacctctgtttcaatgccaaacaagattttttactgtgaacacttgggtatctttcctaacaaagctagcttcctgtatgaataagaatacctctgactcagaatgagatataatctttcaatgccctttctatcagggatcttagtactggagctctgacgatcattagtgaaatgaaatttgtcttgagaataaaaaccgtcgcagagagaaaaattatgcaatctggtaaaagagaggcctagggagatgagtttattttctaaaatgtttcagtcaacttaaagaaaaaattgaaaactacattaattcaaactgtgataggactggaacttgtgggaagtatgagaaatctcagcaactttgtagtctatcggcctggacatcatgccctgaagaggacaaggtgaccttctccacctaactctgaggatggggaggagagagaggacattgaggccttggcaggacctgtgcccactggctggaggtgctctgcttttatttacaggttgtgattctacactagatttattggcataaaagagcttttgttgtcacctaagaaactggtggctcacacagtaaagaatcctcctccagtgcaggagacccagatttgattcctgggtggggaagatcccctgaagaactatccactccagtattcttgcctggaaaatttaatggatagaggagcctgtcgggctacagtccatggggttgcaaaaaatcagacatgcctgagggactgagcacacacaggagagacttagaattaacaaaattgatttgcactcatgattagtgtgacaccctaattttatacctggggcaactgagaccctagaagatgaagtggtatgttccagggtctccccactaatagatgacagaggtttcctgacttcatctattactttccacctgcctatatgatggagtgttttgctcataagtcactttttttgtgtatttcagcctttttaagattttaatatttttccacttttattgagataaattgactgcagcactgtataagtgcaagctggccagcgtaacaacttgacttatctgaactgtgaaatgatcgccatatgaagtgaacacccacaaccttttatggtgtacctcagtcctactgcagcctcttgggcctcacaggcttatggacccatgtttagatccaaagcatcaatgcagcaggggattctcctcatgtgaggaggaggcgcctccctcatgtttgtggtactgaagttaaccaaaggtcgatgctccctgatgtaacatatactgccaagacattctttgactgaggaaggtacattcagtcaatcagactctctggcaagaaggaaaatgtgcctcctgtgtcaccgggcttcttgtaccagtggatgacagtgatgtatttacaccagaaccttgacaagcggctgacagggcttcagatctcagaatttgttttagaaggacaaacctattaagagcactgtccttgacaacctggatccttcagacttttaggtctgaatgggttaacccaaacggacttgttgctg

SEQ ID NO: 38249 - DNA, 1294 bp, Bovine  19866880418917
  misc_feature (1)..(1): n is a, c, g, or t
ntatatatttgccaacaatgaatattaatattcttaatttttaccaaattgatgataaaaatttgttacattaatttgtatttccctgattactagtgagattgatcatcatttcacctatttgttgcccatttatgtttgcattaattagaataagcagtaattatgggaatctaaagactagattttagttctaggtttgtaattagcttttcagactttgatgaactaaatccagctttctgaacctcagtttcttaacctgacagatagaaataacaatcccagtcctgtctttctccacaaagttaatatgatggtttggtcatattaaataatatggtaaatatatttaatatttatggtaaataatatatgaaaaagcaagtggaaaactccaaaatactagacaaatgatgggatttcttttagttttaaaaaatatgtgtaatattgaatagttctgtaattgggactcttttctaaatagaataaagctagtatgttcagcagctaatttacctacaaacttcaggatctccccagacaagctgtgaggaaggtagaaggcacagttattggttcagctccaacacttcttcccattgcaccctggtggggtgaccacaaaagaaaacctactccttgtgaaattcctaatccaagtttgttatttcaaggagttaggatagggggtggatcctctcccacaacttctctggttcatccatcaacaacaacagaccatctggttaccggggaccagtgaggcataaaatgcctagaaaagcagctgtctttccctttacctgtgtcagaattactaattaagtaacaaatttgcctttagctataagtgaaattttgtgctgctgaaactagtgcagcttttttacatgttattaactactcctttttgtaactacaactcttcctataaaagaaacttatacttcatgaaaccaggataaaaattctcatctggtcatctcagtttttagggtgatgtattcaatcattcatagaagcctctaattgttatcttacctcttgctttttaccttgaagtgaggccaatctgcttgtttatgcttagtttctttctcccagtatgggttcctaacatgtacataacaaaattttcatttctaatttttccactaccaattcaaattgctaatatatcatataaaccctagatgtgagagcactgtgactgagttgtattacccttcacatactgtaaaactttgtagaaatataaataggccattctatactcctaaaatgttag

SEQ ID NO: 38250 - DNA, 2113 bp, Bovine  19866880421921
  misc_feature (1)..(1): n is a, c, g, or t
nacacactagattaactgttaatttatagacttccattacctttatcaaataagtaataaataaactacatctcagaattataaaatgtttgccaattttgtttctatgtcaatttaaaccttatccttaaatcttacaaaatgaaaacatcaaactggcacatggaaattcaaattaactctttcaagaggaagggagcagatattttgagaagtggtaactatataaacatgacgtttctagggattttttaaatttcttgtcatgtttatccaataatactgtttttctacacctagattttaatatcaaatcagatctagttgaagctattcccttagagtacaactttacataaaaatcaatttcacagagaaagttgtaaaaagtaggaaagcactatacaatttttattcaaaaatttcatgccagaagtacatgcttcactcctaaacatatccccttcctttgaattatatatcctttaaatactaccaaactctacaaagatgactgtaacaatctgtttcacacataacttggtttgtacatacaaaatgcttgcttttggatacttcttaggtatgttaaaggaacaacatactttaataattgtaatcatcccatcagtcaccaagtacctgataagagtggcttacctcaatttaatttttaccatatgcagaatcaaacaaatttgctgctttttttctgtttataattttgtttatttttttggctgtgctaggtctttcactgctgtgtgggcttttctctagttgcagggaacaggggctcctctccagtgcatgggcttctcactgcagtggcttctcctattgcagagcacaagctctagggcagtcaggcttcagcagttgtgattcctgggctctagagcacaggcttagaatttgtgatacacaagcttagttgcccatggcatgtgggaccttcctggatcagggattgaccccatgtctcctgatttgacaggtggattctttatctctgagccaccaggaaagccctaaatttgctttcttatgaaaattactttcgcaacaataaatcttactttggaggagaaaacttctgaatgacttgggaagaaagcaagcaacataaaatatttcatacctgctttatggcagtaactgttattacaaagaacaacggaagtccactggtaactggactggtaggtgtatcaatcataagctgcattaaaaaagaaagaatgcagagtattatattttatattgtacatatcactattaacatgtagaatcttataattattgggaaatctgaaaacattatacaaaatatgtatcatagttcagatgaaaaagtaacttgagagagattatgcagtgaatgtagtttacttcacagtttcacaagtatactctgttagccattatatggggttagtagactatctaaatctattgcatacccacaaatactgctagagtggactcagtttctctgctttcttaacacatagagtacttaaggtcttcctcagtatttgtcttggaggggagctacagctattcagaatttcaattcacatttctttgcccatccagagaaatgctaaaaaaaaaaaaaatctgtcaatttttattctgggatccagaataaactcacactggagagaaaacaagaaatgggactagggaaacggtttccttctacaagtgattttgttacagctagtagagccagaggggtacaacttggaaaacaaatgatgctgcaattatctaaatcatacaactgatgtttcaataaactgctttagaagaaatatttgcagtaattatatttggttatttagaacatgggtctaataatttattaatattggtttactctggttaggccaattaagtttgttctattccacagacaggctgaattcctgatcttaggcagtaatttcacaaatgcatgttacttgtatgtaataagtgtaaatttctcatttttttgactaaacaagctgatggtctactgattaaaaaacaaacaaacaaaaaaaaacccagaagttccttttccgctcacaaagggaagcaattaaagaaaagcttcctcaag

SEQ ID NO: 38251 - DNA, 691 bp, Bovine  19866880578427
  misc_feature (1)..(1): n is a, c, g, or t
nttaggtgatttttgagattctgttttattcttgtcctctttgcatgtccaagtatgtctatttcttagctagtgatacctacaaaatatgactagtttcagaactatttccaacttcttcgttttgtcttgtatttctattgtggcactaattactagcaatatgattaatgcactacttacccgtggctttgttcccttttgtttttccgataatgctaattaatccaattttgaaaaaaaaatttttcagttctgctcacacacgtcagattgcaggtgcctttgaaatcactttttcccctttggttttacattaaagcaaagagtaagagtagaccgattagtgatacggctgaaaatactcctatcaaagttgttcatcggggaatgaccaggaccggtagtgttggggatggctctgaagtaagaaagtttccatttactaaaaagttattttgccctttacttatcttagttactgtatgtgtatggttacctaggtttgggggcaacagacttttaatatttccaaggggaagcacagctgaggatggctgccaaagacatggtcatcaatcagattcaagcagaatccactcagcctcgcccctctgagtgccgtcagtcatcctgccgctctgtcctcaccaggtgctcatttggcttgccgttgggagaccattttaag

SEQ ID NO: 38252 - DNA, 3502 bp, Bovine  19866880615646
  misc_feature (1)..(1): n is a, c, g, or t
ntcttttccaatgagtcagttctttgcatcaggtggccaaagtattggagcttcagcatcagtctctccaatgagtattcagaactgatttcctttaagatggactggttggatctccttgcggtccaaaagtctcctccaacaccacagttcaaaagcatctgttctgtagcactcaactttctttgtggtccaactctcacatgcacacacgactactggaaaagccacacgtttgaccagatggacctttgttggtaatgtctctgccttttaatatgctgtctaggttggtcatagcttttcttctaaggagcaagcatcttttaacttcatagctgcagtcaccatctgcagtgattttcgagcccaagaaaataaagtccatcactgtttccattgtttccccgtctatttgccatgaagtaatgggaccggatgctatgatctcaagttttttaaatgtttaaatgtttaagccaactttttcactctcctcttttactttcatcaagagttaatgagttcttcatcatgtagtataccttataccttctcttgtttttaagtttacaactcagtcccttgttttcttgtttttttccctcccctcctaataagcttttcctgaaactctgtctgcaggtttatgaagatagattacagtctgaacttggtgattgagatcatatcggtcttggctaaatattgtaccataacagacatctttgggtaaaagtagaagcagtggtgaggcaacattaaagacagacttggcaacgcaaaaaatttcagagaaatttgattcctgtggcgctaccctggaaagctagttccaaatgatttctttcattgcttgctgaaatgaaatgtttgccatgaaatactagttcccacagctaatttgtttgtttctcttttgcaaagtacatcccttcaccaagttttaaaccataacttgttttattacattttttattgacattttgcgtaccagtatctcagaatgctgctttgggtattgctggacagttattggcttctagaaggtgtataacttataaaagttatgatttttgaactgtctccgtgtaataagggccttcttcatttctatgataatcagattgtatttaaatagactattgattttgtttcactctattaagcaagatagctacagacagaggcaaaaacataagtaggaagagtctgttttggagacactgatctttggccacgttcttctggtgactcctttatttcaagtatattagtttcccagggctttcataacaattgccacaaacttctgtggcttaaacaacagaaatttatcatgtcacagttctggaggctcgagttacaaaatcaaggtggggattgtttccttctgaggatcatgagggaagattctgttccaagcctcactctttagctggagacagagttctccctgtgtcttcacttcgtcctcactctgtatgtgtctgtctctattcagatttctccttttataagaacaccagctatattagattagggtccactcgaatgataccaccttaactgattacacctgcagtaaccctatttccaaatggggtgacattctgaggtacttgggatcaggacttgaccatttgaattgagggggtgggagggtacacaattcaacccatatcatcagttttccttttttattctcttccttcctcatcacaccaaaatctgcaacacattcaggaggtgataaatcatagcttgaggtgttacatctccaagaatacttacattctcttgaagtcttacattttaataaacctggtagaagaggacatgaggcagggtttatttcaaattatttgttttttattaattaattgaataattacttaattttgtagggaaggggtcaagtataaggtataaggaatgtggtaactttgggagaatcttattaggtggtcacttgcctatttcacccaggcactgggctattcataataggaaactttcttcaactattttaaaggaataacatagtgattagaaagtacatttggaaatgtacattggaaagtacaaagcagtatttcttaacatgtagaccttggactacctgctttaaaatcgtcttttaaattgcaaattcctgggcctagtccaggcctaaggaaccaaagtttctgaaggtgtggtccaggacctttctaataagtatcccaatgaagtttgagagctgttaacacaacaaaacaagacagattgtacaaaagaatctggttaatttacaggcatactatatatgtatgtgaccatgttgatcaattttctaatctttccaaagttcagagactggagttggaattcataatcaataaggacttgctcattaccttcaccttttgttcagtaaataaggcaggaaagactgtgcaaagttgtgaaaaaccattattttctttcatatgcacttttgtcttacaataaagaatctgtgaagttggctttctgacaaaggagagaggattgtgatcctgaagagcaaatggttgctttctacatcatttggaagtgatgttttttccctaatcaactcagctttaataatccaagtgaccactatatctgtgctagactgcaatacaaattagtatatataccgactacacctttgaatttaattttccttttaacacacagacaatatgtgttgttttctccttacataaaatttctttatttttgctctggggtgaaaaaaatccctgaaaaccccaagtatttaggggaaaaaaaacaagaagcaatttaggaaggattaaaagcaattgttctgttacccttggcaacagaatctagatgcagccaatcaacaaagttgatatattgttttgacacacgtgcacatatttctaacataaatagcaacagagacctaataacagtaggttttaaagctggaaactgatgtcatttcaaatgtgtcaatcaaagagaacctatgaaagtgtttttttccttcaagctgacattaaatatatgctgtaatggcttcttaagtgatggtagacttctgtcaggccatacaggagatgctcaatctataattacactcttgcttcttggaatctgtcctttaacacacctcaaaagagagaggaaaaaaaaaaaaaaactttaataagaaaaagtctgagtcctacagtaaaattcatctgttcatttcaccataaagtatgcttataaaggatgagcaaaattagattagaattagcttgtttatccctaaaatagatgcatttttttagtgtctctgtctgttgaatttatgatcaacttgtgccagtaattctgctatttaaattttttaagtgcttcaaaaattagcatttgaatagaacaatagaagagaacaatagtactaggctgcccataggaaaataaatagggtgattggtacccaggactgagacatttactgctcaatataaaagag

SEQ ID NO: 38253 - DNA, 924 bp, Bovine  19866880632849
  misc_feature (1)..(1): n is a, c, g, or t
ncacatgaggataccattcctgttcaatatttatttgagcttgtattccagaaagacttattcctctgttaggtttatgcacttccccattcctttctctctcttttgaaggttagatgaggagttccttgtcatttgtcctaaaggaccggtgttttcttccttgaaatagtagctggagcctgaaaatggtggattcagagacacacaaattaaacataaaagtttaagtcatgaaacaaaccatatcttacagtcataccctcagctcaccattctgcaaccttatctttttttttaacttaccatttttaaaaaagcaataataaaatacccaatcagattttgtatcactgaaatctttctcaactggaggaacatttgcaatgaacttttttcccccttaagattaaattctttaaaaacaaattcacttttaatatgaatgttatgattcacagcacaaaaaaaactataggcacgttatagttgtggaaattattcaagaatgaactattcttagaaacatagaagtgatgcaaacctgagcttttagaaaatctgtaacggcactttggcagggatctctagtggattctactgaccaaagaggataaataaaggtcatatttctgcccagttcattagaatttacctttaattttatagcaaactataaaattgtttgctataaaaactaggtgtgtagtggctaccagataacagggacctctgtcataaactctggtcatttaatccttagagtaaatctataaggaaggtattattattctcagtttataaatggaaatactgaggctgaatgatttgtcagagttttactgccatgaaagtttcagaggatgtaaaatcaggttttctacctctaaatttggcattcttttcactacttaacacctctta

SEQ ID NO: 38254 - DNA, 973 bp, Bovine  19866880645335
  misc_feature (1)..(1): n is a, c, g, or t
nccctgtcagccacagcagtttgtgtgttgtctgtaggcgtatgtaaatgcacatgcaaagggtaactgagaataattgataactctttagaatatttgtcaaggtagattagctgggtttatggggaaaatatgtccaggaaaaaaaatgtcactatgggtagtgacaaagcaaaatgtggtgctagtgctgtgacatttcaaacatttcagaaggcagttgaaaccgttaagccgggactcaagtgtaactaatatagtttttgatgagattgatttctcagctgtcttgttgccctaggtctttactcctcccacagatttcacagtttgtgcatatcaggttcagtcatttatctcgtgaagtagttatcatattccactattccatggctaatcatggcataagcagttagctcttttcatcttccaagctcttaatagcagttaatgaatataaacaaccccccttaggagataaattaatcacactgtaacagtttccttttcaccaattgagaagctgaggtatagagactaagtaattggcccaaagtcattgagaaaacaatatttgaagatggtggtgacccaaggagctctgagatttcaaacttgaataaaacgtttgcttttccatttgtctcttgtacatcatggcctagtggtaaagaacctgcctgccaatgtagaagaagtaagagatgtgggtttgatccgtgagtcaggaagatcccctggaggaggaaatagcaacccactccagtattcttgcctggaaaatcctacggacagaggagcctggcaggccatagtccctgggactgcaaagagctgaacatgagtgactaacactactacttatatcatatataaaaccattgactaacactactacttatatcatatataaaaccattaaaccaatagcccagtgggaaatatgcttgttctgctacctacactaagagca

SEQ ID NO: 38255 - DNA, 1039 bp, Bovine  19866880646632
  misc_feature (1)..(1): n is a, c, g, or t
ngaagtccttaaaaaaaaagaatgtgaaaacacatgtgcattaaataaataagattgcaaatctggtgagattagaactgagcacttagagaaactgacattaaaggaacacaatctataattcggaatatgatagaaatgtctcaactggcattgtgggctgattgttgtcagtatgacaagtgtcctcatctgaagaggagattataatacagacatgtacagaggagagagcatgggaagacaaagagaggaggccatcgattagccaaggaaagaggcctcagaagacatcaacccttgacctcagatttctagcctccagaattctgagaaacaaatgtctagtttttaagctaccagtttttaagtaccagtctgtggtactttgctatggcagccctagcaaattattactattataccctttgacactcttgctttgtgttggaagacacgagcgttgtttcaacttcttgtactcaatttggctctgcaaatgacatgactcagaataactgacaagccacaagagcctcatttctgtctttcagtatgagctgagtcaggtttgatgctgagagaccttgcatatatcttgaagtttatccttgagtgggaaaaaagaaaggatgcttattatatttagatagcaagagaccagagagcacagtcaatccaaatcatcttgattagttgaacaaagagctaaactgaagtagaggaaaattcaaaagatttaactataagttcttgaacttggactttaaaatgtcaattgcacaagtacaggggaggcgagaagttgttaaacagtggtgtgtattgaaagctcataatgagtcaactgaatggtgagaatgcccccaaattcagtgtgtttataagccatcatttatgggatccttattttcaggggttcctgacaagataaagagctgcctcatgaagtagtgagtctcccattgctgaaggtatccaaggaatgacccagtgaccagttttcacttatgtggcagagggcacatagttaacttga

SEQ ID NO: 38256 - DNA, 1689 bp, Bovine  19866880652666
  misc_feature (1)..(1): n is a, c, g, or t
ncctcaagtcagtgatttaattattattattatcacattatagttaatgtgaggaaattggaccacaggaaatgaacccacctaaattaacacaatctgtgaactgggcagacagagtttaaatttggttccccttggtagcattttctgcctgagtctctgtgtattttacataggtgttatcacagtgcatggtttgttcctttttccctattatgttacatatatttaataatcattttttgataactacgtactgtttcatgagtggttacatcaccatttgcttaacattttattattgttaaactttaaacattttcaaattttggaaagatttttttatgtgaacttccccgtgttcttatgagtcaatccataggagaaaaaggatatgaaatctcttacaagctatgttattaaattctcttttgtcaaagatatgaggatacttaatttatcacattcctgtcagcactggggaagaattatcaaagcaaacaaacaaataaaaaaacccaaacccaaaaaacatagatttgtaggcaatagtaagcttcctgtgttaatatgttttgatcttaaattcgttcgtttgttaaaaatatgtttattgagtgcctattaatcttgggatgtatcagtgggcaaaatagatagtgattatctgtttgacaattttactcaaagatttttattatatataccactatagcaacatgtagaaggcagattgattagaggagagaaagatttgaggaagggagaccaggttcggatgatatactaatagaataaataaaacaaatatttagcaacttagccattaaaaaaagacaaaagtggataggacatgacaaaagtaaaaaaaaaaagtacaaaagtaggatatgtagtatcacaagctccatgagctgtttacatccttagtaatagtgggatcttcttataatgaagatgttgtataaagtgcccatcccagggaattccctggcagcttagtggttaggactctatgttctcactgttaaggccccaccttcaatctctggtcagggaaggaagatcccttaagtctttcgatgtggccaaaaagaaaaaaaaggtgcccataccaaatagtgaaatttaataagaaccttgtaggttgaagggagagattgtcagaagtcactttcacacatatttctcttcctacttttaatcctgtggctcttgggttgtcatgttttatagcttcaaatgaaggtagcatttcaagcaggagggatttggtggtggtgagagatgttgaaatttgagtttggtagcctaacaataaaactgagacagtattgtcccatggcaccctgaggtaggagggaaggtggttattcatccacccatttctggctacagcgtagcatcctatagccagagagttggttctttattttttggccatgcggaatgtaggatcctaattccctgaccaggtaaggaacctgcgccccctgcattggaagcctggagtgttggcagagaggtggttcttgagtgtaagtgtcgcacagttaaagtctgcttgaaagtggtcatatggtaacacaatccactattgtcatcttagagggtgggctgagaagaaatcaaccatagcctgtgtttccacagaccacttattatttgagacaaaaatagcttgcaaaa

SEQ ID NO: 38257 - DNA, 1299 bp, Bovine  19866880689062
  misc_feature (1)..(1): n is a, c, g, or t
nctgcctagaatgctaaccagatttccatttcattgagagtacttctgggcacatttgaactatatcccaagtctttaaatctgcagattctaactaaaagccaggacattaaaatggtacagctgggatagggcaaggaaaatgactgcaactcaaaaatcttcaatgcctcccccattccctacagcaaaaaatcaaaatttcctcatcaagcacatggtagctttccagatttatcccacccactctcttcaaagtgacttttgtatcaacataacataccaataccctgaaaggtggctccctgcccctaaatcatacgtttgactgtagtaatccatttttcattaaggagatcttaaattatctatacaaactggataaacttccctctgaaaccaagtaggaaacttcaaagtaggaagttctgatgtggagaacattctaaaacattctgcatcgaggaaaggacttacccttgagcaaaaaggcagttaatcatgaaaccctgaaaaaacactttgttttcacagagaaatttctaccaatatctctttctagaattttcttagaatcctatgagaatggaatatagggctgctcatatacctgctccttctgacaccaacctcttcttcatccctaagctccagactcaggactaaaacatcctgaagtatttaatgagtttttaaggcctttataatatttgattctaggcgtctaagtccccctacctaagggtacagtcacaagtgtgtgtgaacctgtatatgtgtgtgtacctgtatgtgtgtgtgtacctgtgtgtgtgtgcatgtgcacatgtgtttgaacaggcgtgtgtgtgtatggatggttggtcagtgcgttttcatgttttgggccagatcatcatgatctgtatatgccatattgcctgctattactaatcctgggacctaccctaattcttggagttcttgtcccatttttcatttaggataacaagtatcttgactgtaatctattaattgaataattgaataaacttgtttccctccagcgtgagcatattgtttgcacacagtgtcatcctgggccctccagctatggaaggcctgccagatatgtttattaaaccccctgtgcttggaaagaacacagaaaactgtcatctagagcaatacaaaagtgcctatctcagctggagatctcgcagttatgaataaaggaagagtttgtggtacagttttgagatgtaaagagaaaaagcttccccatggtgcaaatgtgttgtaaccctccggcgagaaaaa

SEQ ID NO: 38258 - DNA, 905 bp, Bovine  19866880690012
  misc_feature (1)..(1): n is a, c, g, or t
ntagtccatctctccccagaatcagcacggttctgtggcaagactccatcaaatcagtgagtgagtgctgttcctgttctgcgggatgggggctctgagtcagatttcagtgatttagggaaaataaagaaatatgatatttcctgcgtggctgtttgtgaactgaaattcattcccacaacagataggtatctgggatgcgtgactactacaacctgactctgccaatttgggtgtccaaaggggataaattcagataatcatcccctcttacagaacgaggttttatttttacatgagtaagtggggtggagaggtttcaaaaaattacttattgggaacagttatcccatttctggcaagttagggaatgttgtctagtgagttaagcttcaaagtatggaaaaatgataatagaggaaaagtttggtaaattggaatggtttattaacttttatagttacaatattacaatctagtcaggacttccctagtggctcagacagtaaagcgtctgcctacaatgtgggagacctgggttcgatccctgaatcaggaagatccgctggagaaggaaatggcaacccactccagtattcttgcctggagaaccccatggatggaggagcctggtgggctacagtccatggggtcgcaaaaagtccgatatgactgagcgacttcactttcttttactttcaggaggaaaaaaactcattttaaaaaaactcacaaaggaaacaacacaatcacatgctggattaggagccaccatcatttgaaactttgcttcatttaacaggatgaaaactgaacaatcacttcatgtttgtggaatattttatcactgtttattaactgccaaaatgtatgtcaatatcaaataaagggcaaggaacccagaa

SEQ ID NO: 38259 - DNA, 2283 bp, Bovine  19866880692645
  misc_feature (1)..(1): n is a, c, g, or t
natgctgctggtggatagttttgaattttggcttcatgtttggttcaatgtcatttttgaaaagaaaataattctttggtgttgttatttacaataccactactatcattccaactctaccattccctattaatgatcagtcccaagctgatactgttactttattaacaccaatgacactgccaatattcaagttatgttcacttatttcatattcttctttccttcctttcctcttcctttctttttttaatttttacttttgttttttaaacagtccacaggaacatcataactgcattctcctgggcattttcctgtgatcaccgagccagaggggagtacatctctatgacatcaagacttttagaggtaggtgtggtctgtcagctggatttcctggccctggctcagtgataaagaatctgtgtctgcaggagacttgcaggagacatgagttcaattcctgggtcaggaagatcccctggagtaggaaatgacagcttactatagtattcttgcctgggaaatcccatggacagtggagcctggcaggctatagtccatggggtcacagaagcatcggacatgatttagtgactaaacaaaaccaatcaaatgaactgtaggtgttagaaggatctttgctttttttactctagttgctctgtgacctaacttttcacttcccccccaactttactgcccttcagacttctacatccattgtctgatggtcaaatgtggaacctggggggtcagagaagaattaaacccttttctccccaatgtccttcttcttcagggagaccatcaaaaaagccaatggagaactgtgtcctaggaataacgtcagactttatgaaaatcatggggatcaaggacttcaaggagggtgactgctgatttctctggcactctttttccttcaggacttttaggaaatggactgagtagtatgtgcggttgtgtctgccaggacatagagactacagccacaagctacaagctctgtagagaaccattgactggggaattggttgttaaaatattaagtgaaacaggcagttgaacatgcagtgagttcacttacaaaaggaggaatatgtgtaggtaaaagatctgaaataaaatgaagtattcacagctgcatgtgaaattatagttgatagttttcttctttgttttttaacatttgccaacccacaaagagcgtggtaatttttatcaatagagggttaaagaaaaagcctttaagaagaaataatgtagaggtaggaattgtgcttctttcatttcaccttgtggttaatgaatcctacagtggacatctagtcttgcacctgggttgtgatttatcagtgtggagtctggagcctgctctagtgctcctggggcagcagaaatcaggatatcttggagacctggaaatgaatccctaacttatggagtccaggggcttgtcatggtaatcaagttagttagccctcttgctcatttcagtaacaggatcataaagtttcagacctaggaggatcttgaggaatcagctatttgggttttttttttttttttcatttttgtggcagaaccaggatgagagtttgatagtaataatgtctacgctttagtaatcatgtaccaggaatgatactaagtactttacatagattactctttaatcacagcatcaaagtaagcattatccctaccttgatttatagacaaagtagctgaggcatatagattactccaaattatccagttagaggccatggctggttttgaactcaagtttgtctggttctaaaatgggctcttactaggcacagttctgtctctttatttgtaggatgagctaccggattcccagtcttagatctttacctcttgtctccacatagaaaacgcaaggtctgttttaacctgtgtggagcagatcaaccccccaaaaggacattgtccttgctgcggtagcctgtatggtcacaaagaagctcactctgtagtttaaaggcccatgtttgctattcttcaaagcagtgtggcctcaggccttcagcctgagctcagacttgctttcctttactcacgcagttccctttcattgtgagagctcccattcacagatggtggcagtgaccagccagagtgagggtgtggtgaccaggagatagtcaccagtgccccagctggagggagggagctgggagagaagtcttaaggcttcttaaggctgtagcaccctgaggcctctgctggtggtgactcaggccaccccct

SEQ ID NO: 38260 - DNA, 692 bp, Bovine  19866880700815
  misc_feature (1)..(1): n is a, c, g, or t
natattggtctctcctcctccccgttaatagtactaagttacatagaatttttcaatttacaaagcacttttctttaatatatcctatcatttatgagttccttctttgtggaatgactctaagactctctatggaattgttgttcatgcttccctggtggctcagacagtaaagattctgcctgcaatgcaggagacccaggttttatccctgagtcaggaagatgccctggagaagggaatggctacccactccaggattctcttgcctggagaattccaagcttttcatactggaagagctggaggcatgcagaaaacaccaccctaactggagcagtttcaagcacaagatggactgagacttcaactaccctcttcaaaagagagaaggaagaacccagcagcagtggaggaaatctgggaaagcttatgggctataagactggctccgtcaggacctcagttatccaatacatggtgtacatagagtcactatttgatccaaggcagtactctagcagatctaatttggtggatggaaatcagaaattagagtcttaaggacagttgtcaatcaaagtcatttcaggtgacagcactcaggtcatcagcccacttaaaacatatgccatgaagaggagaccaaagcagtagggtccttggagccaagagctggaatactttttaaa

SEQ ID NO: 38261 - DNA, 1685 bp, Bovine  19866880712966
  misc_feature (1)..(1): n is a, c, g, or t
ntgccctttgctcctgccccactccgttttcttgcctgggaaatcccacagacagagaagcctggcgggctacagtccatggggtcaaaggagtaggacacgactgagcgactgaaccaaccatccatttgctcctgctctgtacaagcacaccagggtcaactctggctctgaccacctactcatttggctccctgccacataagaatctacactatctcattacattcctccacaaatatctcccattttcctcacctctctctactattctcaatacacctctctacttttcggtcattccacatattttaaacaaaattccatgagagaagagtgtctagctggtacatcttacttaataataactgagttttaggtaataagtgctgttacatgcctttttttttttttttggcatatggttttgttattcttagaggatttcttcatgaatatttccactgtgcaggagaaaaaaggaaaaagtcagagtactttgttcagtgtaatgtggagattacaacccatacctgccagattacaagtgctgtgcacactttttaatattctgagaatattttacatctagctctccagaaacagtgttgtttaatccttcagtcactctaaagaaaacaacaatagagtttaaagaagggtaaggatgtaaattcagccttgaaaaatccagaggccatcaaatattggcctattccttccatgcaaaagaccactctgctaataactttggaattggctaattttaaatctactttattgaccagtatccactgaaaaagattacatattctattttttgtcaaaagtatgtttatgacaagggctgctcaagtggtgctagtggtaaagaacctgcctgccgatgtaagagatgtggggttagatccctgggtcaggaagatcccctggagaagggcacagctacccactccagtattcttgcctgggaaatcccatggacagaggagcctggtgggctactgttcatgtggttgcaaaagagtcccatactactcagtaacaacaacagttgtatttaatatgtgtgtccacttacattgacttctcgctttcatgcattggagaaggaaatggcagcccactccactgttcttgcctggaggatcccagggatgggggagcctggtgggctgccaagagtctatgaggtcgcacagagtcgtacacgactgaagtgacttaacaacaacaacaacttacattgaagcctcccaaagaaaggatttttgtattgcaaacaaattacaaatatttattgataaccacttttactgtcatccttacctgtaatgtggctatagctgaacatagttatacagcagaagcagaaactttcttttaacccagtgaacattatagccttgataagtttcagtccccccttcctgatacttgtttgctgtaatcattgccatttctaatgggcccttcataataaagtattcattgatcttccatcagggaaagagagaacagggtcacagacacagctctcctggttgctctgccaccctaactatttcagagtggggaggagagggagctggcacccacaaaaggtttcagcccagctgctttccttcacctgttcagcatgtgggccccaggtgagcaccagactcctaggttcggcagagtca

SEQ ID NO: 38262 - DNA, 877 bp, Bovine  19866880718788
  misc_feature (1)..(1): n is a, c, g, or t
ntttcttaaaagaagttgtgagctgttaattttaggagactgttcaaaatgctgaattttttagaatgacacatttgttgagaagaaaagtgctaagaagaaggaaaaaaagctccagggggaaaaaaaaagctagccagggaactgcaagaaactcaagccaatatgtagcttgcatctgctggcaataccctcatcaaagaaggaaataagatacaaaactgaaattgctattcaaagaaacttgataaacaaaataatccattcaatttaacagatggctgtacaatagtgtgtgccatgactaaaatatctgacccacccacctacccactggtagtgctaccaaaaacattaatttaaactgggcaacctgaaatgtaccaaataaaactggctacaactacaacatcagcaaaattatattcatgctgaaaaaaactggacatattccaagtacatcatctaaacagcatacttccagatgctttattccctctgcttggtccaggtatatattctgtgcttatgacatttttacccctagtttagttcactggctctgtgattctaataacataatcaaagctatgcccaatctcttttatctcaagagatattcccattacctctattgtgttccaagccctgtggtagttgctagagatataaggtaaatgacacattgtcctagatcttgatgtttacattctggggctatctgtttgcttagtaataaactgaagcaccactttggatatatttgagtctctattaactctgaaattgctaaatgaatgattcatgttcacctgtcactcagcactttctggactagcatgcttctattaagaatgtacatgtcacctagtttaaa

SEQ ID NO: 38263 - DNA, 1701 bp, Bovine  19866880763557
  misc_feature (1)..(1): n is a, c, g, or t
natttcaaaaagccttcttgacaatactttatttttctggagaaagaaaatgtcttgttagatctcataagatcatcattaattttttctttgtgatatagtcagcaaagagtttatactaggagtagaagtatcatctctgtcatttccttattgtctacatgtacttatttttatttttctatttttaaactttacataattgtattagttttgccaaatatcaaaatgaatctgccacaggtgtttggatccacagcttatttacagaaaaactttaaaagctacatgtccattttgagatggttaacttcaaccagaaattataatctggaaatgtactgaactgtgtatatgtatactgtagtaaattgcagtgtccagtcagggagaaaaagagagggtccactgctaattctccatactgtgaattgttttctcttcctttaggatatccagattagttactgatatgtgtccattttcatactaaacactagtaaatattaattccttttgatttttaagataaaaatatttgtcaatgaaagttctagtaatttcttcctgtatctcaggggataaacttttgcactcttaagaggtatgcacatctcatttagagaccctagacttaaaagatcaacacaaatatcacacatctatcaacttgatattaattctaaagagggctaagtttgtacaaaatattaaaaggccataatgatgataaagcctttggtaagcttttattccagaggttcaaagcttgttttactttgtgcaacatcaaagtgtttggatactgaattataaagctcctatgggattttctataacaaaaatgatacccaccttaatatattttgatgtatttagatctaaaacatttctgacaacaaaaattaaggaagaaaatatatgacagatcttaaagtgctgaaggacagatttcatctcctacttactggaaattcattatagcttccacatctagtagtattgccacctagagatcttggctgactctcttgtttaaatatatgctgtacaaaatatattaaaaatatttttaaaggtactgatgagatagtaagagataaagattcctgaaagatcaaacactaaatgaaagaagaagaaactcagagaggcaagcagaacaccctgaagccggttgaacctcagtgactttgagttttaattttcacactgtggacaggagacaaaacataggacctactcaaagagagggatttaattaggagacctctgacataaagccagagtctcaaagagttatagcttcagattaagagtaaaaatgtaaaaacctgaattccctggaaatggtatgaaaaatgacctctttcaagtcttggtgatgagaagaggagaaaaaaaatctgagtatccttggaaagcattcagctctctttatggtccaactctcacatccatacatgactactggaaaaaaaatatagctttgactatacggacttttgttgacaaagtaatgtctctgctttttaatatgttgtctagggtttgtcatagcttttctttcaaggagctgagtaacctcagctacttgcccaagttttgaagtcctacccatactatctgggttggctgcaagcctaaaagccaataattacgtgttaagaggtaccaggtaagccagcccacatatctagg

SEQ ID NO: 38264 - DNA, 1189 bp, Bovine  19866880797315
  misc_feature (1)..(1): n is a, c, g, or t
ngaaaaggggagggatgagtagatggaacacaggggatttttatggcagtgaaactattctgtatgacactggaccggtggatacatgacattgtgtttttggcaaaacccataaaactgcacaatgcaaaaagtgcattccagtgtaaactatagattttagttaataataatgtatcaatattggttcataagttataacaaatatactacagcaacacaagacattactaataggggaaactgagggaggttgagagggagtattatgggaactctcagtactttctttttaatttttatgtaaatttaaaactgccccccaaaatagagcctaaaattttttttaaggagagagataaagataaaccaacgggggactataaaatctaattgtttatctgttttggcatcattttaactgttttgtataagtttcctctgtcctaaaccctctattttttctctacacaactcccaacctgtacgaatgaggctcacatctctctgcacatctccattggttttttttatttaacactcacttattgagtaataactttgtgccaagaactatgataattgttagagatatgaaaagaggaataagatcagacttgaggatatcacagtcgagtgatagagacatgttaattacagtggaacaagttattaagtgccataaataaaggtaagaaaaaaatctcttggaaccacaactcagtactttgaactctatatggcattattaaactataataaagtcacatcatctgcttttgatactgccctatcttacttttgccaatatgtcacatttaaaatttattttaagcctctccctcctgttcttattcgtcagccttttgcttcttcctcaaaatggctaatttttgccgatttcccaattcagtcaaactaccaggccaatgaatatgtatattcattctacataattatactgattcttccaccagccggaaaaaaaagtgaaaaaatgaactttactgaaagtttcagggtcattaagcaagggaatcaccactatgcaatctcaagactacattccaggaggagggtggtatggagagaagtgaaatgttgatgtggaaggagccagccattcccctcccacaacacaaccctgcatcaggaaccaagctccaaggtgagacaaggagaggggaag

SEQ ID NO: 38265 - DNA, 3959 bp, Bovine  19866880801334
  misc_feature (1)..(1): n is a, c, g, or t
nataaaataaactgaaagtaatgctattagcaaaaaaataaataaataaagcaagaaatctgcttgctttgaaagcaatgaaaatgatatataacagaaccacatttatttataatgtattccaatatcaaacagcaaattttaacaatgcaaaaccgcaattacttttgcaccaacccaatactttgggaatgaaatgaaatgaattaataatattgatacatacagcaatattgatgaatctcaagatcatactaagtgaaaaaagcaagataataaaagagtaaatactactatgattacactttactacaaacactctagataaaacagctaaatctatagggaaagaaagatcagtggtttactagagatgggaggggtgagatggaaggggagaaatagaggaattacaaagaggcagaaaacttatggaggcaatggatatattcattattttaattgtgatgatggtttcatgggtgtatatatatgtctaatttatgaaattgtaaactttaaatatgtgcagtttattacacataaattaaaacttcagtaaatatccactgaatcattgaaaaagcaagagagtttcagaaaaacatctacttttgcttcattgactatgccaaagactttgactgtgtggatcacaataaactgtggaaaattcttcaagagatgggaataccagaacacccgacctgcctcctgagaaatctgtatgcaggtcaaaaagcaacagttagaactggacatggaacaacagactggttccaaattgggaaaggagtacatcaaggctgtatattgtcaccctgcttatttaacttctatgcagagcacatcatgcaaaatgccaggatggatgaagcacaagctgaaatcaagattgtcggaagaaatatcaataacctcagatatgcagatgacaccacccttatagcagaaagtgaagaagaactaaagagcctcttgacgaaagtgaaagaggagagtgaaaaagttggcttaaaactcaatattcagaaaactaagatcatgccatctggtcccatcacttcatggcaaacagatggggaaacaatgcttttgagctgtggtgttggagaagactcttgagagtccctaggactgcaaggagatccaaccagtccattctaaaggagatcagtcctgggtgttcattggaaggactgatgctaaagctgaaattccaatactttggccacctcatgcgaagagttgactcattggaaaagactctgatgctgggagggattgggggcaggaggagaaggggacgacagaggatgagatggctggatggcatcaccaactcgatggacgtgagtttgagtgaactccgggagttggtgatggacagggaggcctggcgtgctgcaattcatagggtcgccaagagtcggacatgactgagcgactgaactgaagatcacggtatccagtcccatcactcatggcaaacagatggggaaacaatggaaacagtgagagattttattttggggggcaccaaaatcactgctggagaaagcaatggcaacctactctggtactcttgtctggaaagtcccatggatggaggagcttggtaggctgcagtccatggggtctctgggagttggacacgactgagcgatttcactttcacttttcactttcatgcattggagaaggaaatggcgacccactccagtgttcttgcctggagaatcccagggatgggggagcctggtgggctgccatctctggggttgcacagagtcggacacgactgaagcgacttagcaaaatcactgcagatggtgactgtagccatgaaattcaaagatgcttgctccttggaagaaaagctatgaccaacctagacagcttattaaaaagcagagacattactttatcaacaaaggtccatgtagtcaaagctatggtttttccagtagtcatgtatggatgtgagaattggactataaagaaagctgagtgccaaacaattgatggttttaaactatggtgttggagaagactcttgagagtcgcttggactgcaaggagaagatccaaccagtccatccaaaaggaaattagtcctgaatgttcattggaaggactgatgctgatgctgaaacttcaatactttggccacctgatgcaaaagtcttttcattgtaaagtccctgatgctgggaaatattgaaggtggaaggagaaggggacgacagaggatgagatggttggacagcatcactgacacgacggacatgagttttgagtaggctcctggaactggtgatggacagagaagcctggcatgctgcagtccaagggggttgtaaacagtcggacacaactgagcaactgaactaactaactaaagttatttttaaatagagagaggtctgatatttcctataatggtagtttcttagtctctcagagttaagactgacattgagataatcagagttggcattaaagacgtaaaatagcaccatgagacttgactattttccaacaatttccctagaactgacccttttattgctcttctcctcatgtcctaattcaacccatcagcaaactctgttggtttcacttccactacatgccttgagttaattccctttactatgtgctcacaatactaccccaattcaaataccatcatctcttgcctgatgaatgccctttgtctttgatatgaggtacatgttttcccctgacttgtctcttgtctttaaacttgtttatgttttgatgttttctttcttttcatacataagtgttttatttttctgtactcaaatttgttactgtcttcctttgtgatttctggactgttgagtcatatttggaaaggtcttccctaactactgatttcaaataaagaaactcacgagcctgaacaggatctagaaaggggcttgcatctctattaccacccccagtgaatgctgtgagtcatcctcaaacttggagtttacatagagctttagtctaagacttcttaatgcacatagctgctccaaaggaatacacctatcttccaatctctcaactttcaagctagactttagaaagcaatattcaaatccagtagaccctataatgtatgatactcttttacaggtggtcaaaccttaggctgccacaataaatctttgaatttcagaagtattttaaatagtaagtgaataggcatttgtctacaatatagagggaaaaaatactagtattaaatacatcaattaaaaacatttccaaatccatgaacaaaataattgatagtcaattttacaaagaaaaggctactataatttgattcaaactgttcagataattggaaagatgtgaatataaactaaatatttgataatatgaaggaatttttgttaatttaattttgggatatagtggtaacatggctatattttctttttgaatagttcttaactgttggagatatatactgaaatatttatggataaaatgctataatgtctggatttgctttcaaatatccagagatatttttaatgatagggatatatatgaagcagtattggctatgagttaatgtttattgaaaatgggtaatgggctcattaggatttatttatatcattatctgtacttttggatatgtttgaaactttttattacatattttagagataatatgttaattatattgtttttttttttaataagatttgggagtgcatctatgaggcaaatggactcagcacctcttccaacctcttctcccttgactatatagaggctgaaacatgttagtgctcatttccccagcattctttgcagtattgagtcacaacttggaacaatgaagtgaagccaatgtctgataggacttctcagaaaactttgctttttacaccatgtgccggcttccacctctctttttccct

SEQ ID NO: 38266 - DNA, 1609 bp, Bovine  19866880825328
  misc_feature (1)..(1): n is a, c, g, or t
nagggaatgactgactatgagtcctgggaccaatgtgggagggggagatgatctaagaaacctgcatggtaaccatttttataaagtgaaacatccttttgcaatgtgaatgtaaaccatccctacagactgccacgtgaaaacagtttttagtgtctaggattttgtacctcagcttttcttaaagtcagactcaccattatgaataagtcaaatacagaagccctagccctctgggtgatggcaaaatttctttttgcatggatgttgaatcatgtcttggtatgattaaacaccatcagtgaagcaataacccctctgggaattatgaggacaaacattttagtgagctctcagattctcccatctaacctggatacacacaggcccctatgctgagtagtgctgagccccatgaagcagctaagaactgggcagtcctgtcccctcttcaggctcaggccctggccctgaagtccagggtgtgacagctgtggttgggcaccaagcgggtattcactgagggccctgcactggaagactctgcagaaaccaagcaggggcctggctcctgagccgccctctcttggaaaagtacattttactgccttctgattttgtaggtgggtggcttcctgggaacttttccccctccctctttgctaaatttctcatctttctggatcagtatctccctactcgttagttttacataagctttactttccagttcatccactatattacccttgtttctcacaaaagagcaagaatgaccttttcattttcagagggctcagtctgattttgagggaaaaaattggactatctccaaaagatgactctgatctttaaattctcattgtgctctctctcaggttttttttaaattaaaaagtgcaactaaaatgtttatgttttctagtgatcaatcctagtttcactaatactaaccacctgtgtcttgaaaattgcaacatgaagtgtctagagccacctatttttttccttttattaggctgttacttatatgctgtaaaactcaaggtagttcaaagagttttgaaaactctgagcacccaggttatcaagccaagatatagaacttttccatcatccagaaaattccgtcctaccctttatagtcagccagtttccccgtgcccacagttaaccactaacatcacagatgaattttgtaggttcttgaacttcaaataaatgagatcataagatatgtacacttaagtgaatggtttctttcactcagaaaaatgcctttaagatgtatccatactaatgtatggattttttatttctttttaattccttttgaagtgctctattgtatgaatatcttgcattttgtttattcactcttttgttaacagatactcacttctaatttggagtgattctaagtaatgctattatgaacattcttataatgacttttttggtggccatgggctctcatttttcttagatgtatatggaggagtggaaaaattaagtttctatgaaatattcctgctgaaaaatatttcaattaaatttagtcagacctctaagcaaaactttcctttcacaggaaacaacagagaataga

SEQ ID NO: 38267 - DNA, 744 bp, Bovine  19866880829153
  misc_feature (1)..(1): n is a, c, g, or t
nactgtatggaaaagagttattctgtatttagcctgaggttctctgaatttaaaataccaatagtagaagatagtgaaacagtgataaaacatttaagaagagggcaaatcagatgatgaagacagcagaagcctgacctgcattaataccactctaaggggagcaagggagacttcgtttgtaaatgagaaagaaagaagttgtgatgtgtttgtgcaaaacttcaaatcaattaaccagacaaagcaaagtttaacttagccccaagaacgctatgaatcactggggtggtagaaggcgaaactctgtttgatactcataattataaaactgtgaacagaaattgctcatgtaaaataaactttccgttgtgttgcaacatgttggagaaacagatagagatggcttgaaaaatcttaatggttgaaattcctgcagctttttgcaaagggctggctatatgaattgaaatctaaatttatcatcatgtctgtgctccagcacactggataatgatctagtctaaggaattgtcagttttgctgataatattttaaattgtgcatttgttaaatgcaaacttactttaagatgtcggcaccccactccagtacttttgcctagaaaatcccatggacagaggagcctagtagccctgcagtcatggggttgcgaagagtcggacatgactgaggaacttcgctttcacttttcctttcatgcattggagaaggaaatggcaa

SEQ ID NO: 38268 - DNA, 1630 bp, Bovine  19866880903908
  misc_feature (1)..(1): n is a, c, g, or t
nccagacacacacacacacacacacacacacacacacacacacacacagcactggtgcgtctctagtctggcctatgctgcctggggggtttctgcggcagctgtgatatcctgaagggtgtgtgaaattgaagacaaacatttttactaggagtttacagccttaacaaagtaaactgcaagccctccaggtgtccttgatggtgggaacaaaggcctgtggtgcagcaaaaagagacctgggttttgaattagaaggagctgcgtttgtattcctgctccaagttcatgggctgggtgaacttgggcaatcactttctctctgagagtctaggtttcatcatgagtcaaatgggggtgcagactagattgtttctaaaagcctttatccagtcctaggggtctatagttctaatgtttgcattaccttttatattttattagttactttcccataatttttttttaaaatcttaaatgcctaggaaccaaagaataaaattacatttctgtcgtacttactttgggtgacttttttacctccttattttaagaaattgaacatggcctttaaaaacaagcaacaaaaatgagacagaagttgctgttaggtatctcttctcaagaagccaaaagatggtggtggtattttggtactgcttcagagcaaaggaatttttatttccttattactccaagataatttatttttcaaatattcaaaaaaagtcatcttaaatcctagaggcttcataaatgaatcattattaattatgaaattttgtatcatgcattttagtttataaaacctgcagtttacctgcaggatctcatgacctcccctaacactggtcccactctattagactgatgttgttaagacatctgctgagccgtgtccatcaccttggaacccccatggactgcagtacaccaggcttccctgtccttcactgtttcctggagcttgctcaaactcatgtccattgagtcagtgatgctatctaaccatctcatcctctgccacccccttctcctcttgacttcaatctttcccagcatcagagtcatttccaagagaggtactaacctctccatctgactggtgggaagttgaggctcagagagttgctgaggctccgcagagacccccagagccagggtctgaatgcacatacctcctagtgtagggtgtcatgtaaatgttcatgtgattaaactaaaattattcatttcaaggctactacatacatcaggtggcatttcacctggattaagtcaagaactttagctcatttctagtctgaagcttagattccttgaatgcataaaatggctcaaaaattggccagggttcagattggaaaaaaacaggtgtatcaattcaaagataatatcctttgatgatcagtatagaatacaaaaagtaattcatagggaaaataggaaaaaagaataaagcacatttcttcagagttttggagcctttgtcttttatcgaagaatctggatgtcagacgtgatcagggaatgaacttggacttcattgctgtgcaggtccaagttgaaatcctggatctgcctcttcctgactcttacacattcgacgattcatcccttgcagactcca

SEQ ID NO: 38269 - DNA, 2106 bp, Bovine  19866880923508
  misc_feature (1)..(1): n is a, c, g, or t
ntgctctagtacttctttatcttatacctggaagtttgtgtcctttggctgccctcatttcttcctcctgcttctgatgaacacagatctctttttctatgagtttgtttttgagatatcaatgacctactacactatgttagttcctgttaaacaatataatgatttgatatttctggacatttcaaaatgattaccacagtgagccgagttacaatatgtcagcatgctaagatattgcacagttactgactacattccccacactgtacatttcatacctgtgactcatttattttgcaactggaagtttgtgcctaatcttccttacctatgtctttcctccctccacccacttccctctctgccaaggatattttaaatccaagttcaagtggccccaaagtcacctcacaaaaagaatgtatgaaagcatgtatttatttaaaatctttcacatgcaggctgagtgccacaaagcagagaaatcagagaccaaggtgaacactgttgggcacagttcttcaacataacatttgttctgaaaagcacagttgattatgagaagagtctagacagggataatgaccttttacttagacttgcaaaaaaatggaggagggagggaggagaggaaagaaggaaggaggaaagaaagtaagggagggaggaaggagaaagaaaaaatgttaacatgataggtgcctgagccaagtactttcagccagtctacacaaaatgtgcactcagttaaatctaggttggcagctaaaaatgtgatatcacagtacattcaaatgccttcagaatttgtgagcttcatgacagaatcttgggagggagaaggaaattaaccaaagttgttattgtcatttacagaaagtcagatgttagagcccagcacaaatctctcaaaatagactggatttgcttaaaagcaaatggtttttgttaggggtttatttttcttgtgtcaaaaacataaagttacactgtaaaaggaagtggtaaaacctacatcactcaaagcattggagatgtatccacgtgttcccacatgctcaacagttatttaaagtgtgattctcattttacctgttaatccaatacttggaagtattcaacaaggagcttagcctttttctcagttctgatttctgagcaattgcagagaacacattctactgggggaaaaaccctgaaatgtttacattccagaatccattttcagatcaacagtattttatgaggttgattaaaggtgtttaccatcagaatgaagcaccaatttcagtataagaactatgttcttttcaacataagaactatgggctgaggtttgtaacattgtacaggaggcagtgatcaagaccattcacaagagaaagaagtgcaaagaggcaaaatggctgtctgaggaggccttacaaatagctgaaaagaagagaagcaaaaggcaaaggagaaaaggaatgatatacccatttgaatgcagagtttcaaagaatagcaaggagagataagaaagccttcctcagtgatcaatgcaaagaaacagaggaaaacaacagaatgggaaagactagagatctcttaaagataattagagaaaccaagggaacatttcatgcaaagatgggcacaacagaagcagaagatattaagaagaagtggcaagaatacacagaactatacaaaaaagatcttcatgacccagataatcacgatggtgtgatcactcacctagagccagatgtcctggaatgtaaagtcaagtgggccttagaaagcatcactacgaacaaagcctagtggaggtgatggaattccagttgagctatttcaaatcctgaaagatgatgctgtgaaagtgctgtacgccagcaaatttggaaaactcagcagtggccacagaaggggaaaagatcagttttcattccaatcccaaagaaaggcaatgccaaaaatactcaaactaccgcacaattgcactcatctcacatgctagtaaagtaatgctcaaaattctccaagccaggctttagcagtatgtgaactgtgacttccagatgttcaagcggatttagaaaaggcagaggggaccag

SEQ ID NO: 38270 - DNA, 951 bp, Bovine  19866880944427
  misc_feature (1)..(1): n is a, c, g, or t
ncctgaagttgaaaattgaatcactccattctcaagggcagaattgttcctaagttcatggttgtctcccaacaaatggatcaagacagccttttatgtgtctgtcagttgtgaccttgccctagctctcccagctggagtcactaatgttctctacagcaggctcagccagtccccatcccaccccctgtccagtccctgggccaaaccagagcagggcaagcctcggcctgtccagatggctggctctaattagagggtgaggacaccatggccaagctggaagtaaatgctgcagataccttttccaagagtggcaggtacagctttaaactaagtgcatgtatgcagagtcaaaggttgcatctaaatgtgcatatgtatgagagggctaagcctgaaaaggcagtttaaaagggttattcgaagatggggcagaaatagatatgcacagctggaactctcaagcatatagagacagggaggaaaaaaaggtaaatgagagagaagtctgggacattcctgagttaaagactactgcctattaccttggctggtactttaagccaaggttaccaggtggtcagctgcttgcaaaaggacacaggcagaagaaagagaacagggcccaggtgaccagctggtaggacctgaaattagtcttgttaccatgaatttactgtctggtctgcctaccaagagcctagggacacatctggcctctgagtccttctgagccttttctggtcttcatcaccttggccatgctttctgctgctgttatcttgcaaatggggctctagatcccagagcttttgtctggtgcccagatgatgcccttcttaaattttccaggagaaatcaacacaatattgtaaagcaattatccttcaattagacagaaattaattttaaaaagtcttccagctctaggctccaaggaccctactg

SEQ ID NO: 38271 - DNA, 745 bp, Bovine  19866880987107
  misc_feature (1)..(1): n is a, c, g, or t
natgatatttttataaacatgtattagacttgaatttagttagtttccttgatggaaatgggtggagctcttgcttctaagaatggacacccaaaccacactcactgggccaacaccacccaggacagcaggggctccccgagccaatcttgctctgtcttcaggaggagccttccccgggaacctttgcttatagctctttgaatgccacaggactcttatctgtgacacttataaatccatcattttagaaactatttagtcaaacaacttcattttacagcttaaaaatgaaaacctagagcagttgagatcaaacagtttgtaatcaagttggacttaggaaatagtacctgatctgatagtaatgaaggaccactcaagatgtttatgtaggaaagtatgcaaagaattgactcattggaaaagaccctgatgctgggaaagattaaaggaaggaggagaaagggatgacaaaagatgagatggttggatggcaccaccgacttgatggacatgagtctgagcaaactctgggagttggtgatggacagggaagcctggtgtgcagcagtccatgcggtcgcaaagagttggacatgactgagtgactgaactgaactgaatatgataaaagtcatgagcgtgcatcactgttttctagagttttggatttcacagtctaaaaaaattctgagaaactcatagacctcctgacgtgtgcacatacatgaaactaaagatg

SEQ ID NO: 38272 - DNA, 1658 bp, Bovine  19866881082734
  misc_feature (1)..(1): n is a, c, g, or t
nattaaaaaaaaaaaactgccaattattcctcaaagtgcttatttcattttacatttctaccagcaatatatgagggttcctgtttctccacttcctcattaacacttggtattgtcaatcttctttattatagctcatctaatggttgtgcaatggtagcacagtgtcattttaacttgcattttcctaataattaatgatgctgggcacaactaatgatgttgggcacagtaaagccattcttatatgttccatggtaaaatgtttaattaaatcttttgtccattttttaaaaagccaggccgtttgctttttattactgtaatcttttatagattctgactataaaccatatatatatttatatataatatgatttacaaatattttctcccaactatgacttatcttttcatggtttttagttgtaactttttttctagatgtgactttcgaagaacaaaaatatttaatgttgatgaagtctgaattagtcaactttttctattgtggattatgctttgggtgtcatatctaagatacctttgcttaacttccactcacatagattttatcttctgtttttttctagaagtttggttaaaaaaaaaacaaggtgattttataagttatttaaaagataaggtgaagctaatgttctataagcccttcctagggtgaaatcaatgggccgatggagttaagtctatatagggatctttcctacattttcaggactgcctttcaaaggttggttatattgtgtacccacagaagcagctaagtgttccttattactgatccctcaaaatcttttcccaaggagaaaatgagatcatgctcatttaaagggatctggaaaggttttactttgaggaggtcatatttatttcctataccataactaaaatgttcttggtgtgttatttcatttagcaagtataggccaatatctttcaaaaccaaagcaggaaagagtcatttcctattactaatggttttgacatggacttagtttcacttgcttctctttattcctgtgctgtgcttagttgctcaattgtgtccgactctttgcgaccccatgcactgacagcccgccagggtcctctgtccatgggattctccaggcaagaatactggggtgggctgccatgccttcctccatctctttattcctagtaactcattttatttctctaataatgagacgttctgtaatgtattagacattgaaaagttatttgaacttgtgtgtgtgtgtgtttgtgtgtacatgtgcacaatcaagggttacattgctcttgattattgggggaacttacacctcatttctttcaaatcttcattgatcatagcatatacaggtcctcattccttatttgaaacactcaaagtcaaaaatggtttcaaatgtgtaggtttttaaactttagagagacactacaatgaatattctgaatgaatctaatttttccagagtcaagatgactagtatttcctaatatggacatattcatattttgaaacatactgaatatttacaatatgtgaaataataaagcccataagaagtgtcaatcagttcagattttctaccatttgagttcagttctgggggcaaatgagttgtaaaacctttccatttagagcattt

SEQ ID NO: 38273 - DNA, 1032 bp, Bovine  19866881129537
  misc_feature (1)..(1): n is a, c, g, or t
ntgatcatactaggtaagtgcttcatttttatctcaattggtttgattttgggctttcattatattattgcatttaggttttgcatacttaggggtttgctttaaaaaaaaaaaaaaaaaaacagtctttaatcctacctctgatgagcacctgactaagcttagctatatctttaattgatgctctcttcaactctatatgctaaattgcaattccatgatctacctaaagagatagacagtttaatcaatgtacaagttactctacttattttaaataaatgcctttcagacttagtaaacaccattaggggaaacatgggtggtttaaaatcaggtaagtgatttatgtttcctcaaatgaagcccttaaattcatttaagtaatgaaaaactcatatgacccttagaaaattgattttgtgtaaagtcttttgtttgcaaaattctctaattgagcaggattcctttaagacagattgaaaggtatacctttgttggcagctgttaaatcttctagtaatattctagggttctaaatttaggatgctaagatagaccttccccataatatttgttatatcccaaaatatatttatcaaaggggaagaggttaattaatattatgactagcattataaaattaaagctctctaggatttttaaacatataagtatagtgagtgacaaataattactgagttttatggataagcctaaatgctttaattaaacttcctgagctacctaacttttagccataaatgaatgcagatactgagagtaagtttcatcacacttgatttctgcgtgataaccaccctggtgaccatcaccgcttcatcccaatgagaaggtgataactttgtgttttcctgttttttgtgtgtgcctaagttcttattcctagctggtacagcgtcagaattaaaactcagatcttctgattcctagcccagagatctttccaaaactgtgcttttcttgaatgctctccttcagcacagatgctaaataaatcaaacagaatat

SEQ ID NO: 38274 - DNA, 1364 bp, Bovine  19866881185864
  misc_feature (1)..(1): n is a, c, g, or t
ntgaaagtgaaagtgaagtctgtctgactcttagcgacccagtggaccgaatggactgcagcctaccaggctcctccatccatgggattttccaggcaagagtactggagtggggtgccattgccttcttcgagggtttcactctgtagaatgatttaattatattttaggaagtttacacatgtgatggtgaagacaagggattagattctacagcagtggtctcaaagtgtttcctggaccagcacctggaggttaaaaatgcaaattcccctgcccagacccctgcctagacttccagcctaaggaagtagcccaggaaccagtggtttaacaatgttcccagtcagttctagaactgtttcagtcaagcttgagaaccagtagtctggaggcaggatgactagatttgacatatttcaaaagttcaggtgctgtgtctaaattactctgcaccagacatggagcaggtacttgatgcatatttgctgaataaattgatagagatgatgagagcccagcctaataaagaagcaaaatataatatagaaaccaagaaatattttagctccattagcaattcagtcaagagcagaatcaactcttaatgaatgtgattgtataaataatttatgaaaatttcccttatttgacagttttcttcctttttttctatttgctcattgtaaactcaaaaaatgtattgcactttcttaagaggaagcacaataaataaaagggggagagttcaataacttacacctgcttctggaagtcccttttctacttacttgaaagctaaacaagtgaccaaggaaatggtaatagcatgtcagaaaatgatgacccaagacctggggccatcagaaaatatgacattgctaactaggcaggcagtccaggttggagaaagatgggatggtgaggaccagaaggaggggccaagtattccagaagctacattggcattgtttttgaggaaattccaaacttgcagcagaaagaccagtaactcaatcattaatgtctttgaatgctaaagggaatgaaaaagtggaatgaaaaatgtcagtgaaagagaggtgtacccaagtatctacactctgccaatcattctgttgaaactcgggaagcatatcttatttaatcctcaccacttcaccatgtattaatatgtccattttataagaaggaaccagagggagtaatttgcccaagattgcacagccacaaagtagtaacactggaatacaaatttaggcattcttactctgaagcctacatttaatctcctgttattaaatacaaggcatggaggttgttacaggtttctgtcctttggaactttatagagtatatatttg

SEQ ID NO: 38275 - DNA, 1873 bp, Bovine  19866881209726
  misc_feature (1)..(1): n is a, c, g, or t
naaaagaatgatacaatacttgtttaaagggtgtaagagaggttaattttaatgttcaatagtctgcatgaaacaccaaagacctcaaaaaaggacattcagagcaagaagaaaaagacgcacaaatttgggaaagaaaatgtaataataataaaagttggaaagaagcaagatatattcaactcttttcatctattaaggaacatgatccccagattctgaaatgtagggttaacactgtagacaaaggtacatttaactaggctagaataagaattttaagtccatagcttcaaatagattcctgcctccatttttgaatgacatatgcagggagcttacaggtctacagatatgaccaccaatccactgctgataatgagtgagacattgagtgagacatcaaacttaatgaaacattgttgacaatgtgagcagagccagaagataggaaatggacatatgctattgctgtcaacaaaggaaaaacatttggactactaaactgtaatgctggtcctgggcaataattgaaaacaaatcataaagctaatgatttctaagtacctaaaagaaaaagagagctattcatagttattgatttggttgaagaaccaaatgcattgacaaactgtatcttcttttcagcaagatgatagctctcatgaaaatctagatgataggagagttggatggattaacggatgcctctgtgaccagagagagggattctttagaagaaagaagagtcctaatcttaatcttgttctgttcagtgtctttattaatgacttaaatggggcatatattatgttcatcaaatttgcagagaggttcagattgtgatggggtgagttaatagaagggtgtaaaaagattactgatgcctggaataatgggcttaaactgacatgatgaaaactaacagagattactattaaggtctggattgaggtaaacaaaataaaaatcaaagcatacaggaaggggctggaagtccagcacagcaaaagtttatatgaaacactgatagagcacctcagctgctccattttctgtctcatgagaaataaaaagtcatactacactatgttggtcagaaagcacattttgattagaatgttcactttgggagcaaagtggtgaggatgattcttacagttaactaaaactgctgcctggttgaatggttcgacctaaatctaacaggccagcttacctgtgaagtgtggaacaggcaaaggtttttgaacactgcagtaagatccagaaacaaatcccttgccacactgttgggtgtctgtgttttcaaagaaatttcataaattccatgagactcagtttccttggctgaaaattaaggataaaaatacctcctttgcagagttttcttgaagactgtagatgtttaagggacttagcccagggcctgtcacctagtatctgcttggtcagtggtagctgttagtgtgataatgaccatgtaaccagtgcttgcagacagaagcatgtgtgtattttgcccattaagatactggtctccaggaactggatattcataacaaaattagggagagtgtgaggacactgtctttatgaaaactatgctcaaaattagatgattgcattttgatgaaaatggtctctaacagaagcaaatgttatttgatatgtacatcttgaaggaagatgactcccaagctctgagctttaagattgcaaatgagagagactgatttgaggctaggtgctaatgccaagaggatttcttaaggactgttaatgtttttattaatgttctgttccaaaggtctacagctgtggagtggcctgccttaccccatttcccctataaatttcttttaaaaaatat

SEQ ID NO: 38276 - DNA, 870 bp, Bovine  19866881218862
  misc_feature (1)..(1): n is a, c, g, or t
nttaagtctcctaaaaatcagtatttccccaaatgcaagattgaaagccagaatttctgaattggtggcattcccttcagctctcaaagttttgaatttgttgcttactctgcatttgcaaagctttcggttcagttgcccaaaaatgcgttgaaaaaataaatcctttttataagttccgttaggctccattatgagtctctcgaaacagagtcagatttccctgagagtgcatttttccattgttttagggagaaatggataaaataagaaattggaggggaaaatcaaaataactaaaattagctttatgaaaccataatttttagaatgcatttccaaaaactttgcaagaaacatcaattcttcacttttcaatttaatgagaaagagtaaatctaatatagtcttcacaatttgaaggtgtcattaacgatactgtttactaaggcagactttctgccatccagattctgtactttgtgttcattgtgggatgatggtgtatcttgaatgaagaagacttagaatctgcagttaaccacttatattgaaaaattaggtctgtatttgtgagatctgacaagtagctttaagaataaacatctccttggagcaagaactgtgctttattcataactgtgtccctatccttaacttctagtccaggatcagactcagagcaggccctcaatagctatttgttgagtgaatgaatcagtcttgtttttatttataactgtatatcagacatctaaacctaattattagagctaccctcttacttgaggatatatggatatatttttcctttaacattttacacaaatttcacattttcttggcttgggattaaactcaaaagtctaa

SEQ ID NO: 38277 - DNA, 1626 bp, Bovine  19866881247626
  misc_feature (1)..(1): n is a, c, g, or t
natgaatggataagaaattgttgtacatatagacagtggaatattactcagccataaaaaggaatgcatttgagtaagttctaaagaggtggatgaacctggaagcctattatacaggtaaagtaagtcagagaaagataaatatcatatactaacacatatattcagaatctagaaagatggtaccaaagaatttgtttgcagggcatcaatggagaaatagagaccagagttatgaacatggagagaggggagaagagggtgagatatatggagccagtaacatggaaacttacattaccatatgtagaatagatagctaatgggaatttgctgtatgtctcaggaaactcagataggggctctgtatcaacctagaggggtgggatgggaagggagatgggaggtaggttcaagagggaagggacatatgtatacctgtggctgattcacgttgagttttgacagaaacaacaaaattctgtacagcaattatccttcaattaaaaaataaattttttaaaaataaaaagatttacttgccactttggaaaagagtgtaatattgtaggaatgaagtatcagtattcttgtcaccaaggcaaacctttccactggagatgattactaaatgtaccttaattgaatgtcttctaaatttgaagccagaattataacatattaatatacccacatgtgagagagtcgattgataatgtaactagcatgaagaaatgcttgtatggactgaatctgggctatacagtgcatttttaagttctctgggaacaaagctctttgaaaccaagttgatctgggtgtaaaataaaatgtaagcctttgtcatcagacatggtaggtgctgactaggccttagctacactgggcttctgcatcactgactaggaatcagaaaaagactaggaaaagagaaaagcaaggaactaggaaagagaatagcaaggaaccccaggaatgaaagagaaggaaagaagccttcacgaacttctgtagatcttctgtatgattattcttttcttgtggttgcatctctgacaaagaatggactgtttttcattaccagaggttattgcctagttagtttatatctaaagaaaatgtacctgtttactttgaaaggggcttccctgttggcccagctggtaaaaaatcctcctgcaatgcaggagacctgggtttgatccctgggttagaaagatcccctggagaagggaaagactacccactccagtattctggcctggagaattccatggagtgtatagtccatgggatcgcaaagagtcggacaagagtgaactctcactttttttgaaagaaaaagaaatggcttaaatacattaaccctatatacagttcaaggcaagtgataggtataataggatcaattaaaaagtaccaccagtaaagaatcatgacaactaacttttctgacaattatttttcttttgctttgcttttagggttttgacccaccacatcaaagtgacacaagaactatttacatagccaacaggtttcctcagtatggccattatacacctcagaaatttatagataaccggatcatttcatctaaggtaagaattaacacttctattatta

SEQ ID NO: 38278 - DNA, 2545 bp, Bovine  19866881283508
  misc_feature (1)..(1): n is a, c, g, or t
nagtgcgtcatccctgcctctaggaggcacctttgaatacctgataacaatatatcaaggacattttccagtggattttccatttctgattttacttcaagaaagtacagaacaaattctcagccagaagtgatcacagcacctattgtagcaatccagagaaatgcaaacctgcacatcaaaacacgtttgtgtacacatgtgtcaggcttttggttctgtatgtgttactacaattttaaagattatttggtatatttcttgcaaggcaactcactcacctgtcccctaagaccaggttttctgttgcttcctgcacatgtgaaaaaaatgcctttctacatctgcagaaacaagtagttgttgtcatcactatacttgccctgtgaaaccttagccaggtggtagggttacgcattccgttcctttaagagaagcacagcatttcagctccatcgctgggagctgcctccagtggacccgataaacttggctttggagttttgtggatttagacactcaattatttttaaagacaaaataaaacccaaaatgcttttcaaaaacaaaccaaaaaaaaaagatgaaagggaacggaaggtgttagaatgctctctgctgatgaaaaccaattcatagggaaacgttgcattggttgtttttcttttaagctattacataactgaatgcagtatgtggtacaggaaataattttgcccacacacctgcacagaaaaacccacatcaacaagtttgctttggccatcaatctgtgggaccaagagctaagcctgaaagcaaaggtgaaataaaatacgaaaattgtacagcagccacagaggagtcagctatccagaggcccctgctgaaatcccatctttagggtaaagtttcagacacattttgatgttttggtcacctgacccaaaccctggagcccaattggcctctgagtttacaggctaagtaatgatgtaaccagagtgtgtgggaaccagaaggatgagacagatacaatttttcccagtcatttattagacttggctactaattctgcttgttcttcgatttgactgctggttatcaggaaattcgaactacttaaaggacataatgagtttatctatacttggggtagaacttagtcacattcatgtaagattaaaccacaattacagagaatagtaatttatgaaattcaattatttatgtttgaatttggtagatctattttaatacatctaaaattttattttacctgtacttttttttaactaaacatctcttacaatagcattcttatgttgcctgaaaaacagaattcatcaaaataaatgtgttattttagccatgatttttctattccttttctcaatcttataaagtttttacctaaaaagaataaatgtttatactcctataatttgtcactatggcaacttttggcctttaaaaatgctgacactgtatcagagaaccaagagaagaaattatccttgtttgacaagaataagcagaaccagtttggcaaacttcagataaaccaaacagcagggcaaggatgcctaaggataaaaagcatttgttgttctactcatatgacttactgtcaaggaaaactagagcatgttcaggtttcacggcaaaaatgagagatctaattaatgctcacagcaaacttaaagggaatttttttcctcaatttcccataaccatccctctgtgcctcctccaccaaataaatcattcaagtaatttctaacacacactatattatctttctgatgtgttggcatgagtttgtaaaaagtttgccaactcttatttctgaatctcttgaggagagtcttgcagtcgtatttcacaagatcttaccaacagtttcacaacagagagaaaatatcataggtttcaaaactgatgatataataaacaccctgtgtgattttttaaatttattgatattgtattttggtggcatttatactcatagaaagtacttcacattctcaaaatacttagtctggttagcaaaaatgtcttcaggaaagaaatctctaaaaacacttctttatcattcttcttgtgcatatcatgcccaacacataagcaatagatatggtgtctgacatctacttaaacctgttgagaactatatcaaacattaatggggattagtgttagaaccggtgtaaacatagcagacaatctgctggcaagtccatactcacatttccatatgttatgcagtaagcagggtcatttaagaagtgaaacaccaagggagatggtgttcaggtagtgagtgtatgactggtgagaattaaacatatcctggatatatttacttcataacaccagcatatatacatacctatccaactctggcccttacccttctcctcaagagacaggtcaagttcaagacatgcaattttattatgaaaagcttctaaaacatagataaaaatgatttagtacttccaggtgcactgtaattctggcagaagaagttaattccaggtgtgtaatctcctaaagaaat

SEQ ID NO: 38279 - DNA, 1414 bp, Bovine  19866881378621
  misc_feature (1)..(1): n is a, c, g, or t
ngtattacagttacccagcacatggccatctttttgtaggacgcccatagatgagaacacagaagcactattggtaggtagtggtcaagagggccagacctagagacaaatgccttggagagtataatcaggttgcttgaactctttctgcctcagcttcctagcctacgacatagaggtaacaatggcaatttagctcttatcattgtagtcaggattaaaccaaaccgtatacttaaacctctcagcatagttcttaacatataatgtacactccaaattattatctttttgttatgattaatctcttcatactacctagctgcaataccttaaatcaaccattgttaaagtatggtcttaggggatatcagaagattctgaaaccctcttagagggttcataaggtcaaaatgattttcacacaaacattattgtcataatggtaataaatgcatgatttatatttttactctcagtctttcacaagagtacaggagggttttccagaggttatgaggcttgaggttagtaaattaaatgcaaaagtaaatgtgaaaacccagctctcttctgtgaagtcagacattaaagatgttggcaaaaatgtgaaacaatgcagctcttcccaccgaatgtttttgttttaaaaaaatagtaatttttttcataaaaatgtgttagcatgcaatgggtttactgtgttattttaaataaattaatacataggtattttataaatctcttagtttaaatttctaacttaataaatataaagaacccattaaaataaaaagtgctttagatgtctcaataatttttaagagtgtataaaggggtccttggaccaaaatatttcaaaatttctgtcttaaattacatgggtaatcactaagataaattgttatctatttataattttaatgtgtatttttatttttcttaaaataaagaaaatttaaagtataaaaataactaaagaaaaggattaaatgtgccataattaaaccttccagtggtagccattatcagtattttagtgtatttccctctggtgcttagtccactgatatatagaattaaactgatatgatatacataatatataatattttgaaactttttttacttaaaatatatcaaaacatctacccatatcattaattgctctataatagcctttataagccttatcacatttcattaagctcctaattttagacttttatgttgcgtacatctcttcatgttataaataccattatagtgagcacctttttaaataatacttgattatttcttagaacaaatccctagaagtgcattgttgtgtcaagggtatgcatattttaaggcagggtgctgccacactggatttcagaaatagtatatcggcacatgttagcagtttacg

SEQ ID NO: 38280 - DNA, 818 bp, Bovine  19866881423987
  misc_feature (1)..(1): n is a, c, g, or t
ntaagtgctaaggaaaattgagtgcaccgagcaaataataaagtgactctgatgacccaactcttcttaacattccagccctggcctcaaagggagtgaaatccagacaatccccatgaggtaggatgggttacagataatgttggtcatttatatccctggaaaccagattccagagaccttccatgaaatctcttggaaaatgtctcttaggtcagaaggaagccatatgtggtagtctgcctgtttattcccaacctatgcctgttgttctggcacatgttattaacaatataatgccttctctcactcactaatagtgttccaatttgggcaataatttatatgaacactaacttgtagagttaccgccaccctcctctctaatccatatattagaaatgaggtttactctgtattggctccttcatatctaagatttttttcttccaagttgagatcttattaatgaatcaactgctctcttttatgaaaagacaacatttaataagactgagaatcaaaccattctcatgattagatcttcctggccagtgaaaattattatttttacttttttttaaagacacttgcagttcataaaccagttaagatgtgctctcttttccttattactcccaggaagataaaacaaatttcaagagatcttctaaacactctgtcacaaaaagttctgcaaaaattgcattttcattgctataaaagcttccacttaacattcacctattataaacaattagcttttttattttcagtatgataactataattggattagtatctccattcaggatctt

SEQ ID NO: 38281 - DNA, 639 bp, Bovine  19866881433262
  misc_feature (1)..(1): n is a, c, g, or t
nagtatgaataaaccgatgaagaaggaaaaatggagcagccaatcttctttaatagctagcaagaattataatacagaacaaaaaacagaatacctcggatttgaaaaagtttacatttctctgcatcttagttcggttagggactgaaatatgaaaacatgtagtataccttttgttgcctaaataatatccaatagaatcctgactcattgtaaatcctgactcactgtacgataacctgtttttatagtaccttttcccttaactgaaaacatctccatctatcctatgttgaataaaaatttacattcctgatatgtggattatctgcctgctgtggatacctgattaagcttcagaattgattcaaaattcaaaacgttgctaagacaatgaaaactgccagatgtccacttgaattgacttctatagaataatgtctgttacttagtataatgagggtgcaaggtgtttcaaaaagtggattgctttgtaaatagatgaaattcaaatctttaaatcattttcactctgaacgttcctcttcagcatccagggctcaactcaacattgactttttcgaaaatctttccctgatctctgtgtcagtccggtcagattttagcactctccccgct

SEQ ID NO: 38282 - DNA, 1103 bp, Bovine  19866881500048
  misc_feature (1)..(1): n is a, c, g, or t
natttattcctggaacagaaaatgtgttttttagggcattcaaaacaagagaaattcaaaaaaaatttcaaaaaaattcaacaagaaattcaaaaaaattcttgtttaattcaaaacaagagaattaaagataaattaaataaattcctttaaaatattttgttatttcttttttacaataagagaatagaaattttatccatatgttcaattaacctcagccttgagaaggtggtatagtgagtgagggcatgaaccctggagccaggctgcctggatgaaattctaacccttccgcttactcactcttagcacgggaaagttacttaagcctcaccaccctcacctgtaacatgaatatattagtatctacctcttaggattgttgcaaagattaaatgaggtcagcccttaggacaatggccagcatgtagccagcactcagtcttagacattattattttttgttaaaaacattaataatcacaaaaacctataaggcatctgctattatctctgtttacgcatgaaaaaaatcaagatttgtccaagatcaactggcaaatgatggaattgagatttttgcccaactcctgcttctgctgtaacgtctgttataaaacgtaatcttatgtggaaattgcttgtctccccaggaccaagggcatgtagcagtgggggattggaattcctttagagaactcagtcattacacagttcttttctcatgctaatgaatgtggcaaattcaggcctagtctaggcaaacacctgaagtggcggcagacagaggaccaggggaggagcagaggcatcaggcagttcctgaagtcagggcatcagtggcattctgattctgagccatctgcccaggaacagcaggatgccagcaagtgacaggttaggttagggcaaccgtctttgagggcagaggcttgtcttctccaactcctgtgacatgcccaatagagcataataaatactcaataataactgtttgttaaattgagttgtcttgaactaaattgaactggccagccatcctcactggtattacttgagaaacatgaaagcctccacccccaaccccaaaaccacacatg

SEQ ID NO: 38283 - DNA, 1648 bp, Bovine  19866881626212
  misc_feature (1)..(1): n is a, c, g, or t
nagtgattccgttttacatatatataatctttttacattcttttccgtttggtttatcacagaatactgactattgttcccagtgctatacagtaggacctgattgttaatctgttctatgtataagtgttgcacctgctaatcccaaactcccaatccttccctcctccatggcattttttctcatgttttttacttcagcatttgttgaccttatatgagaagtctgatttgtgtaccactggcaggaaatttttgttttctttgaacataacaagtctgtagcattacttggaattcttctgtgacagatacttgtatagacatttatcaggtgattatgatggtcattttgggttactagacagggaaagagccctctgtcaactgttgtttactttctaaaacgttttcttattttcctcttcaaaagagaatttttttattcatcaaagattactaagctcttaaggggaagtataaccgattattaatgtcagtcttttgtaaaaatattagtttctaacattgtgcctttcggtaactaagtaatgttatataaggcaattttccctgatgtacttaaatttataaagtgttaataaaatgcagttttattatatttttttgaaaccatagagcaaaaatagctcccacatggacaatgggattcagcctaaattccccctaactggtgttcagggcatatttaatgttaatcttgtggaaaatcaataggctccctccttgtaattctcctactccactcccaggttttctaccttccctgccacttcctttaccattctgacaaacactgtgttaaaaccatcatctgaaattctaagaaataagaatgtagcaataaaataagtaaaaaatctacagtaaatgtcaatacttaagagctctcagagaaggttaataatattaatgatgttttatcctctaacttaaatgattggtccccatgtttttcaggttttataccatatatgttatccgtgtctgtttatatgtttacatgaataaaaaccataaagtggtaatataaaaaaacattgggaaaattctctacggacagatttttaagagtgaaagttatctgaaacattgtctaaatgctttgtaattgaaattagacaagtcttagaactctgaagacagagagtaagctataaataataatatcaccatttattgaacacctacttcgtgtcccatgccaccataggtgctccatgcacttcggagccttgccagcctctaaggttagtgttatgaactccattttatagattcaaggatgttagagagcttgttcagagccacagctagtaaactataaagctacatcttaaacccaagtttgttttcctttacaaatgcagttaatataatacataaatgatttagtgttagaaatatggattgttaatggcaattataatctacttgtgagcatatgatttttttaagggaaaagtggaagaaatgtaattttgttttcttctcttgatttccaccctgtctagtctttgagcgcggagatcatttttacttatctttatatgctagcctttggaacataataaggattctcataactaggccatgtcatgaattgtgaactggctctaaatacaat

SEQ ID NO: 38284 - DNA, 727 bp, Bovine  19866881818253
  misc_feature (1)..(1): n is a, c, g, or t
ntacagttgcagaatcagttgtttacatcttcggatatttaaacagttttagaaaattaaagctttctaccaaggagtgacattggaacaaggtttctttttgtcaactgtacattaatttcttattaaccaacatcgtagttttcacaaatttcagagtgaccagacccagaggattgtcagtgaagtgggtgtcagagatccaattactaatagttaaaatgtctacgtgagattttgaactcttgactcagtctttttccttcttcctaaatggctcctaaggagagtgacatattaaggaaaaatccagatattagactgacataagaaaggtggaaaaaacagtaccatgcatcaggggtgaaaaaagaagtctctacgaatgtgtcagacataaaagaaagtgaaggaaagttaaaaattaccatagggcaggcaggacacctgctaaagaacctaccgctgccagtcacagctggaaagaaaatgaaagagatgcaaacaactgtcctggaaacaaggaatcatccttttgtctttttgtccccttatgaacaattacagtatgcaaaaatgggagggggatctcaaagtattgggatgaaaatttcagcaggctctgcatataaatagcgaagggcctggaagtgtgcctctttgaaaacaggccgtgtttgggagctcccagtgcattgaagagaatggtaattaatgcatagcgaat

SEQ ID NO: 38285 - DNA, 1036 bp, Bovine  19866880483743
  misc_feature (1)..(1): n is a, c, g, or t
ntgccctactgtcgagcacctgaattggatgcttccacatatttctagcactgacttaagccagagtaagacaatgagtggctaggaatcaaaatacagtgttgtaatgtaaactgcttagaggggaagtaagttttcatctgtgaccatcagtcatctgtacttatcttgctgtgtgccttaggcagactgcaaggaagggagtgagatatgaacttgtaaaaaaacaacttgtgataaaatcttcttacctgattctccatcttgggcattacagtctttaatgcaataggcagagtccaactagtccaaatagctatctgtaacaagggcaagagtttaaagaaaaattcagaaattctcagagatgcttaattactcacaggtgatgttgctaggcaaccacttcaccttctgattctgccttcacctaagtgtggtactcagtttgctctattgttacagaatgttaaaagagatggagaagtgaagtataaagaattttaaaccaggtgaaaatagagaggggaaaaaatcttacaatgtagctctgaattaaaagatatgcaaacacagtttaaaaaaaaaattccccatggcttgagaaatcattcttaatgaatagaaatatgagacggaatttcaaaaagaacagaaaaatgtcatatttgaagtcataaattactttaagctaatgtgctgggggacaggatcaatgagctatgccattggacagacccaggagtacgcacagttgtagatccctgctatatttcaagagaatttccaaggacaacaacgcttaaagatattacttcaaactttctgaaactaattactgttctcaccttgccgttagtttgcaattaaccgttctttacctttgatacagaaccttgaagttttcctgataagaaattgctttttcttgttaaactatgaattttagtcatggccatggctctgattttgcttttataggctatataaagttttagtatcatttctcagctgtttcagcatgttcttttgggtt

SEQ ID NO: 38286 - DNA, 1984 bp, Bovine  19866880724201
  misc_feature (1)..(1): n is a, c, g, or t
nagaataatggacctttattgttgagcaggtatttctgccactggggacatctgggttcacacgtgatgcacatgcagaatgcaaactgcaagtgaagaaggagaccaaagggcagagaaaaagttttacatttgcagttttcttgtcttgcttaaaacatgaatttttatttcatcaattggaaatgtcaatgattttctacaagttctttttatacatatataaaacaaaatctaagaacaatgaaaaaattaggtggaatggtgggaatttaacaatgtaagtacaaagtgaaagtcactcagtcgtgtccgactctttgcaaccccatggactatatagcccatggaattatccaggccagaatatggagtgggtagcctttcccttctccaggggatcttaccaacccagggatcaaacccaggtctcctgcattgcgggtggattctttaccagctgagccacaaaggaagtctgtaagtacaaacataatctggaaaaaagtaaatgtgaggtagaatgatcattatgaaacatttatcctgaaaatataaaactagtggaagaaaatataccaaaatacgtctctaatcttacagaacagaacttcttaaaatgttaaaagaagatataaacagaaggagaaataacttttactatttttttttttttttgctattttgctgttatatataaaatatacatatatacatataatattgcaattaaaaagaaatcagaataacaaaacatttcaaatgacataaaatcaataagaaaatatgaagacaaatttagacaacataattgttgttatgattacaaaatcatgatattatgattttacctattcacatggtaggaaataattttcatttttgagatatgataatgtcatctatttctatcaactattaaagctctcatattctttctattcttggagcaatgatagctttcaatatttgagaatggcattatagtattaatagaaagtgtcaaattgtattgattgtgcaatgttataattctaacttacagttttagagagttagtgcaaatgaattttgctgttcaatatttttaaaagcattcaaaagacaccctcttcatgtcaagtaatttttcaaaatctttaatgttggccacaattccagcagagttattttgagttgctcaaactcagcaatttcatactctctctctctcttttagacaacacacataatttgggctttaaataccacaggggaaaaaaattatgaaaactagaacgaactaatatatacagaaatgcattgttaattttatctacaaacaggccactccatctgttcaaacataatgttccaaaccaaggaatatgttccaaaccaaagagcatgatatttgacagatggaaaggtctgtaagcctgtctggagcacagaatactatagagtttgtaccagggtccaattttccagctaaatgaaatctaatagaaatttcttcccaatacacatgaaaatcagcaccagttttaccaattgctatgcgtcatagacccaatcatttaatttattttctttctcatacgcaagaaacccatatctactctctgagtcaattttctattttcatggttgttctcctatataaataaatccaaatgccaaacatatttcatgtgaaataaaagtcactaatgagtcaaacaccggatgacctactgtttagcataaaacacatgagggttgtttttagaaaaattcatcatttaaggatcatgtcataatatataagatttggaaaaagctttcataggattttgataaacctcttcaatttattgaactgaacaacagataagaaacataggatatttgtacttccctaaaagcgtgtagccagtgagagaaaagatttctttgctgttgcccggtgttctattctaaaatctagcattctaatttgggttattgcctcattatcattaaa

SEQ ID NO: 38287 - DNA, 2625 bp, Bovine  19866881191232
  misc_feature (1)..(1): n is a, c, g, or t
nccaaataactgattaatgtgttgtgcttagccctcagttgtgtctgattctttgtgaccccatgaactgtggctggccaggctcctctgcccatgggaattctccaggaaagaatactggagtgggttgccatgccctcctccaggggatcttcccaacccaggagcaaacgcaggcctctcatgttgcaggcagattctttaccgtctgagccaccagggaagcctgactaattcatagttcattcaacaaaaacagaataaaaatttaaagacaagaataaagtatttgttcagttaacagatcacaatagcattttgattattcagagagaacttgtacttgactacaaattgggctctttacttacaaactataaacaatcattataagatataatatctaaatgtttaatccttgacatctgcattttatatttgagatgtgtatgcctgtgtgtgtgtgtgtgtaaggatgaaatttggcacattagctagctgaaaaccgtattcacttctatttctattgtattaacagaaaaattggctgcagctggcaataatttcttttgaaaaggattcaatgacacattatttcaaatacaaatgtatatagttgagtaatgattaaacaactgtaccactctacccactgaaaaaagtatttattgtgaacatcaagcaaagagaaatatatgtatatatatactagaattctgaattttatctatactatttgataagtagttaaatttgtgtggaatctgtatacaaacgaatgttaacactttttcaaaacttcatgctaataatgtgtatacaactttcttaaaagaaactagaataggcagaacaatcttgaaaaagaagaaagtttatgaactcacactagtttatttcaatattactattaagtgactaatccagatagactaatgttggtgaaagatagatatgtaaaagagtggaacaaaatataaacttcaggaacactcccaagcaatgatcaagttgactttttctaattaataaactttacttttagaacagattagatttatagaaaaagtaaccaaatagtacagagaattctgatatctcttctatcttccccacaccatagagtttcatctattattaagatcttttaatagtatggtttattttttataattgaagaaccaatattgatacattagtgttaacttaaattcatgatttgcataaagtctcatcttctaaagtcttgctatgaggccattaataccctggtaacaaaagcagacaaaatcaatagatgtaacaaaagtacacttatagatgaatatcccttaggaatatagacacaaaaaaataacaaaaattaaaaaaaaaaacaataaacaaaaaaattcattaaaatactaccaaagcagatcctgcaatgtataaaaggaatttatacaccatgaccaaatgagcttcaagtgaggaattcaagagtggttcaacctaagaaaatcaatcagtgtaatataccacattaacagaaaaaaaaatcaaatgatcatctcaattttatggaaataaaaagctggattgataaaaacactaaaactaaagtaggtatagaagggaatttttcaacctgaaaaaaaatttatggaaagtccataggtaacatcatatttacttatgaaagactttgatttcctcctactatcaagaaagaacaagtatttctactcttgccacttctactgaaccttatactgaagttcctcgccagggtaactaggcaaaaaaagaaataaatggcatctgataggacagaagaaattaaaacattctatggtgtgagtttatatatagtaaatcctaaataatctatgggaaaaaaaccctatatgataaattaattcaacaaagctgcagtatacaatgtcaacatacaaaaatttattacatatctaacattggcaaaaacaatcaaaactgaaactaagaaaacagttctaattttagtagaatcaaaaccaataaatcctcagaaataaatttaataaaataaatacaagatttatacattgaaaactataaaaattgttcaaagaaactaatgaagaccaaagtaaatggaaagatcctgtattcgtggatttggaaacttaagttttgctaagatgtcaataattccccaatttatcgacagattcaacaaaatccatatcaaatccaagcttccttttttgcttaaatcgataaactgttcctaaaattcatatttaggagaagggggcatcagaggatgagatggtgatgctgtcaccaatgcaattaacatgaaattgggcaaactctgggagatggtaagggacagggaagcctggcgtgctgtggtccatggagtcacaaagagtcatacacaactgggtgactgaacaacaacaacaaaattcatatggaatttctgagaacattgaaaagccaaagcaaccttgaaaaaaaaacgagttatttaatccacagttcctgatcttaaaatactattacaaacacattatgatcagtaggatgtggtatttttatacaaatagacatagattaatggaatataattgaaatttcagaagcagacccctatat

SEQ ID NO: 38288 - DNA, 858 bp, Bovine  19866880244626
  misc_feature (1)..(1): n is a, c, g, or t
ntcacttcagtcgtgtctgactctgtgcgaccccatagacggcagcccaccaggctcccccatccctgggattctccaggcaagaacactgggagtgggttgccatttccttctccaatgcatgaaagtgaaaagtgaaagtgaagtcgctcagtcgtgtctgactcttagcgaccccatggactgcgggcctaccaggctcctcccatctatgggattttacaggcaagagtactggagtggggtgccattgccttctccgtcggtcacactggctcacagtaaactttctttataataagtacttattttattgctaaatatttgagtgaagtttcaccaactgtctaaagcatactagcatttatatttttaaacatttgtgatagcttttccttattagctagtaaggaaataaccagtcttctgacatttgacaatttttttttaaagttttttgactaaactttattgaatttttaaattactgaaaatttccatttttatgccgttaactttcacagtaattcccttttaagtattatgtcatgctttgaaatgctttctccaaaaataggaaaaataatgaactttattctagcatttctatggtttcaaaaatcctttagaacatatttctagattagctgattcatggcatgtaacacttgtgaagtaaaagaggaagagtgaagtacattgagtaactataaatattgcaacatatctgagaggcatacaatggatgcatagtagaagaggaattgcatggcatggcccaagttctgaccacagccctgttaataataacaataataggttttggaatgagcagcccacagtcatatttctcatttc

SEQ ID NO: 38289 - DNA, 530 bp, Bovine  19866880643566
  misc_feature (1)..(1): n is a, c, g, or t
nactttttaggagcaagaaaaagttcttcaggataattgcttgtaaaaagtaagacagtctcacaaagctttagcagctgcaatgcaccctgtgtaaaaggattatgacatcacaggcgtttgtactggcattttagctgatactctgttcatctctaagaaattcccttattctctccattaagcaataagtaaagtatcctgaagatatgaaacttaatttgactactatcaaccaagtgcagacatgacagaaacaaaaaaaactagtaaaagcacagagtaaaagtggagtaaacaaagggccagagcctaggagccttgtcatgattctacctctacgtatttgacccggtgacccttggccagacaccaggcttctcagagcctcggcatgctctcccagaaaacgggccaatgttcagtgtcctttcctgatccctccttctatgaactgatgcttcctggtgaatgaaaggtcagattgtcctgtgttcatgaggattttaggctcaattttctgtgaaaca

SEQ ID NO: 38290 - DNA, 1889 bp, Bovine  19866880749237
  misc_feature (1)..(1): n is a, c, g, or t
nctaaaaaaaaaaaatctatgatgaaatcaaagaggaaattaaaaataccttgagactaatgacaatgaaaatataaccaaacaaaatctatgagatgcagcaactgcagtcataagagggatgtttatagcaatacaggtcttcctcaaaaataagaaaaatctgaaacaaagtaacttatctagaacacactcacaccatatacacaaaaatagatgcaaaatggccttaaaaatctaatataaggaacaacaccataaaactcctagaaaaggacctaggcaaaatattctctgacataaatagcagcaacgttttcttagatttttttaccacctgagccacaagggaagcccaatcacataaatatttaatctatagaagaaagtagctctgaaaatgacttcaatataactgctccatagtaattttgaaacaaaaattattttcagaagagtttgaaaacaaaagtaaaaatagttcatacccaggtattgagccccggtgtgttataaaatgggcttccctggtggctcagacagtaaagcatccgcctgcaatgcaggagacttgggttcgatccctgggttgggaagatgccctggagaaaggaatagctacccactacagtattttggcctgaaagaattccatggacagaggatcacaagaactgttttctagggaattaagcaagaattctaacaagattatatccatattttctaatttaaagcaatactataaattttaaaataagaaaaaaaaaaaagaatctccagaatgaagttgaggttccccaaatgaagctctttcttatctgtgtttaggtcattttacgctgtgtttggagccgaaattaatctaaaaggaatccctgtgtatagatttgttcttccatccaggatttttgcatctccacttcaaaatccagacaaccattgtttctgcacagaaaaaattatctccaagggttgcaccttatatggtgtgctagatattagcaaatgcaaagaaggtatgcaaaagttctcatgtcacaattcatggcctaatctgcaatactctttaaaatgtaaacttcactcaggattccttttctacaagaaatctaaagtgagaaagcagtaagggcagaaagtaaggataatagtaggattttgttttcatttttgtcccactttcaaggccccagttgtttctgtgttgcaaaatttcatttagataaaaccacactgatacttccctgagctactttggaaaatgtctctttaggtcctctgctcattttttaattgcgtgattttttcagttgtgtgaattccttgtatattttggatgttaatcatgtgttttgtgaatattttctcccactccataggcagcctttcatttttgatggtttccttttctgtgcagaatctctgctccttttagatatagagcaaaatgaaaataattcccagaatactctgagcatcccaacttatctatctgacatttttctaacttttttaccctaggaaatggtaaataaaagtaagcatatttcaagatgtctctgaaacaaaagttgattcaatcaataaattgggagtctcattttgctcatcttcttcatgtcggagtaggtgagaataaagaaagaaaagcctagtaggtgataataaacaaagaaaagcctcttaaataaattctcaaagacatattactacctgaaacatgaaggtatatgggttgtattaataactatgtgttcagtagctaagctttatatactgaaaataaacacttaagggatgcacaatagaagtttatgttttatttctgatcaaaagtgatcagatgtgatacttttccctcacccttatccctcaatttctattca

SEQ ID NO: 38291 - DNA, 1609 bp, Bovine  19866880764539
  misc_feature (1)..(1): n is a, c, g, or t
naaaattagtgaatcatggtttaagagtgtgccaggaactattcctcacttgcaatgtttgcagcttttgttgtgaacaaatgtgaacgttggaagacctgctgaaaggtgacttctagccttaaaccggagggaagaagttcaacttcatagctgctgctctgccatggtaaattattattaaacaagttttcttctcacaaaagcccattcaaatggtttcaattgcttttatttattctacaggatttcagctccacaaatgctcctgctgttactatgtacagagttctgcatgggagatgtgaggaagaaaacaaaatggcatctttcatacgcaggaggaatattaatgaggtagagaagagggaagggatcattatggtaagcttcctttctgtttgccccctaagattagaatttactttttccttgcctaatcctggttttcctgacttcatccggtaaaacatagaattttgctgaactgctataactgaacgatatagtatgcgaaacaaagtttggataacaggagacaaactcttaatgaggtcaggacgcaactctgaccaatgaattgagaaagaaaatagagaatgatgtctgtatctctccatttgctgtggccattacatccgcctcaagggagggctttggaggtatgtgtggttaggctaacaaagaacatctactatgctatggtttcccatgaagtaggaagtggagaaatcaaaacctgtactttccctgttcagttcagttcagttcagcactcagtcgtgtctgactctttgtgaccccatgaattgcagcacgccaggcctccctgtccatcaccaactcccagagtttacccaaactcttggccatcgagtcggtgatgccatccagccatctcttagcaaatcttaaaaatgaccattggacccagagtggaactggctttatctaaaaactttggtaaatgtactgtagacacctaagaaactgaacacagaagcaaacatatctaagctctgcacatagaatgggaaataggataagattttcatggcactgggtgagatgaatgagcttcatggatttggttcattgaggaattatcagtgtctgtgaatttgcatacttagcatagcatgaaacatagaatatttctgttaaattttataattttaatagatgatctaccctacacagggagagagagagtaaaaaacaaaacaaaagagacatgctgagaaaggtgagggtggtactggtgatggtaatattccgtgaaactgcttacctgagaatttctcactcacaaaactgcacacatctatgtattactttatggtagagatttatgtcaagttggatattttttaaaaaatgctaagcataagaaatggagataaaagattttaaattgttttacatggctaaaaattcttaagatctagtttagacctcattggaaggtgaaccttttgggttataaaagatttacacctatttttgaataaatatgtactatctgtttattaagtgcttactatgtatccagcactagatattgctgatactaagtcacaaatgaaacccagccttcatggagttcaca

SEQ ID NO: 38292 - DNA, 3714 bp, Bovine  19866880798056
  misc_feature (1)..(1): n is a, c, g, or t
nccttaagaactcttaatttatccgaaaaattttagcatttcagataaagggaaattattttaaggtacattaaaattatagacaaaagaccagaagcatctgtaagcccatagaaggatttactatttactattcaagtcatgcaaaaaggtttttaaaaatcatcatttgtgccagaaataattggcagaggaactaatcaccattcaagaaacatttagtaaatactaatgcaagacatggtattaatgctgctcaacacaggtttagtttctcttcaagagtatgcattatcataacttattcatagtacaatgtaggacacattttaactgaaagcaacaataaaaagcctgaatggttaatgtattcatgttaaccattaatacagactgtattttaacagctcattcaattcaacaacaacaaaaacaaataacccaatcaaaaaatgggcagaagacctaaacagacatttccaaaagagatatgcaatcacacaaaaagattttcagcatcactaattattagagaaaggcaaatcgaaattacaatgaggcaccacctcagaccagtgagaatggacagccttaaaatgccgacaaataacaagtgctagagagggtgcggagaaaagggagcctttctactatgttggtgggaatgtgagttggtgcagccactacagaaaacagtatgaaggtttcaaaaagccagagttgccatatgatccggcaatcccagtctcgggcatatacccagacaaaaccataattcgaaaagacacgtgcaccccaatgctcacagcagcattatttacagaagtaaatacatggaaaaaacccaaatgaccatcagcagagggatggataaaaaaagatatagtatatacagacaatggaacattattcagctataaaaaagaacacaataatgtcattttcaataagatgaatggacctagagattatcatactaagcaaagtaagtcagagagaaaggttaatatgattatcacttgtattatatgatatcacctgtatacgaaatctaaaataagacacaagtgaatatatctatgaaacagaaagaaacagactgacagatatacagaacagacttgtggttgccaaggggaagagaagttgagagagggaagggctgggagttagggattagcagatgcaaactattattgatacatcgatatgtaggatggattaacagcaacatcctactgtacagcacaggtaactacattcagcatcctgtgacaaaccataatggaaaggagtatgaaaaagaatgtgtgtgtatgtgtgtgtgtatatatataataaccactttggtgtacagcagaaatcaacacattgtaaatcaactatacttcaataacattaaaaatatatatagactgtttttacaataaagaatacttgactaaaagtagacattgagttaaaactgaacatttttgtatattattaactttgtgatgttttaagaatttaaatgttttcatctggaagcaaaatctaaatcagtcatcttgtaagactgttcaagaatgtggttatccttttaaaaatatttaggaaaaaagtaataagtttgtaagaagtggatcagagtatgaatgaaatatttatagcactcctctttctcttacccctttgttttgcaccaaaagggtgcaaaattgagataaaattttatcaaattttaaaattgaaatatctgcctctagccaatgcagtaaatgatgtggtcatcagaaggcccaaggaaaatcataaaacattggaagtagctatgtgtacaggttgataaatacccaatttcatcaaaacactttagaacaggaagagaaattagagataatcttgttccacaccctcatctaccaatgaataaactaaacccagagttaataggactctttgtaggtatccatttcccaagttgtgctggcagtatagctagcacatctggtgacacatgtggtctaatgtggtctactataaactagggggaaattggtggctctcaaaattttggggtgctggtgtgtttgttgagcatgccccatgctcagagatccaattcaattaagtctaaacagaggctagatgtctgaaattttaacagtgactgataaagtcatccttggttagtttgagtcagagtgagaaatataaaacctacaatgccaagtttttaaaatggatgttaatgctgagtaagcaggctttccaaacaagttacagctttttttcattaaatataactgtttttcccttccattgacactataaggaaaagggaatggtgtttaaacaaggaactgtagagaccacaaagcaatacttgaccaactttccacaaatgcagactcaccagggatacttgttaagactatacacattgatggcggactttcttggtggtctggtagttgagactccgccgcctatacagggggcaccccctgggtccctggctggggaggctgggaaactaagatcccacatgttgggcagtgcagacaaaattatatacatatatgtattcatggggccttttcctggagaatcttatttaccaggttgatatgtggtgggacccaggaatgtgtaattttcagaataactcctggtaattctgttaaccaaacccagtttgtaaactctgtcacgatctgttgtattaataccagtttcgacggttctcaatcagggaactcaggaaaacgcttacctccagagcttctggacaggtcggtctgcagtaggtcagagaatttgtactgtttcaggctcccaggtgatgttcattccttgcaaacctctgggctagactgtgctctgcaaactgaggcagaagattcacaggaagacgcccagaagccgctgcaatttctctactgaaacctgggcttctgctcctgctgcctcaagtacaagaaaatggtagccgctgctgttttcaagcctggagcaggtgcttccaattcctgaaacctggacgcgaacctcctgggagagattctggcccatggaacgcccaggcctctgaggggagaaggggcagccggccagagtggagaggggctgggggtgggaagcaggagaggggaaatcctgctaattgcaaacacaaaaggtaatgcaaatatgcagataccttttagtagtagtttgcctccaaattgtataaactagttaatccatgatcgtgttggaaacagacacagggacttccttagtggtcatgtaactaaaactgcgggtcccggggcagggggccctattcagtccctggtttgggaacgagaacccacatgccacagctgggttcgcatgtgataatgaagatccggaatgcagcaaagaagatagaagatctcgcaagccacaactaagacctggcacaaccaagtgaataattttttttaaaacacaaaattacctcatctttcatggaagttatgtagtgaacgctgtaacatgctacccagatagccctcagaacaggcacacttacttcctcgctcctggggttgttgctgagagtgctgccaggaattgcatcagttgatgtgagtcacctggcctcatgctctgtacaaccccccccctccccttcaggaatagccagcatccagtgactagacatctgaggtccctgccaaaactctgaaaggatcttataag

SEQ ID NO: 38293 - DNA, 1590 bp, Bovine  19866880867706
  misc_feature (1)..(1): n is a, c, g, or t
ntgagtttcttggtctgtgttttatcacttagaaaaagaattctgacttggaaaaatacatcattgtctttctcttacctgcaaatatcagaggagaaaaattgcaatacccttgtcttctcaacaaaaggtggaaatgaggctgcatctgtttaaaaaccaaaccagtggcaagggattagatggaaagagtgcatcttagacaaatctagaaatcttgattccagcatggttaagagagatataatgcaaactgtatatataaaattaaaattctccagtaactgcattttaaagatgaaaaaaaaaatgtatcaagtatatgttgtttaaccccatatatcaaaaataccatcattttaacatataaaaattaacaaatttctgaaaatccagtgtttatacttaccgtatttcagtttgtactagctgtgtttcaagtgctgctgaattgtgacctgtagctgctgctgctgctgctgctaagttgcttcagtcgtgtccaactctgtgcgagcccatagacggcagcccaccaggctcccccgtccctgggattctccaggcaagaatactggagtgggttgccatttccttctccaatgcatgaaagtgaaaagtgaaagtgaagtcgctcagttgtttccgactcttagcaaccccatggtactgcagccagcaggctcccccatccatgggattttccaggcaagagtactggagtggggtgccattgccttctccgatgtagctagcagctaccatatctaataagactgtatactatacgtagtcattggtattctgtttcatattaaattttcccattccataggtacagatgaaagtttttaaaaatgtcaaaattacgttgtcaaaattacgttgttaaaactgcaattttatgtttttaaatcttccatctatcagtagaatagcaattttttaatcttgagattcctttaaaactcatttttgtaaatgttgtttgtacttttaatagcgatccattcacctacccttatggctgatcaatattttttaaatcactaaacaatttcacacaaatggttggaaaatgtacacatcaaacaaaaaagggcattttttgagcttagtaaatctctactacggttgtgctccatagtacacactggatgtaagaaaaaatagctagataattcctccgtttgctccacaaatgaatatcaccaaacatgagccaccactgaatgtgtttgttccaaacagtaagaccctacccttcagttatgaataccatactctttttctggtaatggctctgaccttgtgattttattacatttcacttacatttttgtgataggtgaaatataacagaggatctcagtgaacctgatagagacattgagagaatgggatactgaaggttaaattccccaaataggtccctgaatgggccttgcctacaactgctgtcccaacaccttagccattaatggaaaagagtacattgaaaatctttaaaaaccatcggaaatatcatcaaagattatgttgtaatgacaccagtaactaccaagagccatgaccataacatagctgata

SEQ ID NO: 38294 - DNA, 1067 bp, Bovine  19866881186130
  misc_feature (1)..(1): n is a, c, g, or t
ngaaacttatccaaaacaaattctatgacccatataacatgtagctctggtgtgttatctgattcctgagcagtgaccatactctggacaagtaggacgaacttttaacccaacaaatgacaatttagcaaacaacagctgcccggccctttcactagtagacctataaaaacacaaataaaataaattgtgtttacacttattaaataatggctattttttatttcttttcttctttagtctgcagaaaataagaaagcttgcagcaatcacaaggttcagctcttcttcaggagataaaccacgccttagaaaagcaaataagattaatgtcttttcttctttggctcaactggctatttgattctatcttgagctctgctttgaatcttttctaaggcaaagcagaatctgtcttggatggtttttttaacaatgtgggttatattatgttttatgactaattaaaatgagactgaaaactgcataatggtgtctcaaattaattcaccgcccatttggtccacccaagacttgcctcagcaggttttgcctaatcctgtagtcctaggcactgccaggtggttattgattgaatttgcagatttggttacagcaaatgacactatgtggcctgcttcttaattacttaatgcagtctctatcagtcatgacaacagcacattaaaacaggtggcataaattcagctgcaatgagcctggtggaggcaatttttataaaagctgttctacccaaatgggaggatctcaaattcagttaggcaaagtatttcagtgaaaataatgcattatcttaaaagccatgtggatgattttatctgttatatatgaaatgaccaaatgaaaaaattaaattgataacaaaagcataaatgtctatatattagggtctgggtgggcaggatagtattttgcctgacagcaagctcctttttaaactaggataaacaggggacatgatgtctaattatcaagcaggattcagggaagcacgtctacatactagataggatgctgagtaacccacaaggcaggaaataaattta

SEQ ID NO: 38295 - DNA, 952 bp, Bovine  19866881210859
  misc_feature (1)..(1): n is a, c, g, or t
ntgatacagcactgcccttttcgccttcccacaaaaacatatgtgctctcgtgcaccatgtatgcacatgcacagacgtgcacacgcgcacacacacaggtgtgagattctgagggtgatcttaatgtctaaatcttttcccagagttaatttacactttcttttttagccaaagcatatatgcagatggttaaaaatcaagtaatttagaggaatttataatgaaaatcatgtttcctatttgaattcctcttttctgaaaaaaaaaaaaaaaaaaggagttactctttttagaagttgacttttaaaatttctgacttttggctgcttactgtgactgcttttcattctttaaattatttctattcattatcaatttattttgttgtaatctataaaaatttattttatataacttcttaccacactccttcctctccccaatatagtcctgtcacatctcttttacttctataagtgacatcatacattttaaaagtagaaggctcaaaatattgtacagctatgataatgatgatgatgatgatgtcatgaagagtcatgttctgaagattaggtaatggcataggaaaagagtcaccacttaaaattaaatgaaaaccaaaaaagacatatttattaatatggttgggttgggaagataccctggggaagcgaaaggctacacactccagtattctggcctggagaattccatggactgtatagaccatggagtcacaaagagttcaacgtgactgagtgactttcaattcaaatcctgtggatatagactgtatataataacattatagaaataaaacatacaatagaattaataatgtttatctcaaagaaacaggcttatagatcattcttatttccttttttctaaaatcgctataataaatacatagacttttatagtaaaagaatattcagagtaaaaaat

SEQ ID NO: 38296 - DNA, 1805 bp, Bovine  19866881234689
  misc_feature (1)..(1): n is a, c, g, or t
naacaatgagaaatgcattattcctttagtcatcacattccttgaatattacatggaatttcaactttcctttgctatcctagttcttaaacattttttattgagacatcaaaagctacacctcattaactaaatagttcttttgtattcaaaatgatgcagggccacagccaaggatgtatttcaagttgactgctgcacaaaatatacacaaagctggaccatagtttatcagaaacatatttaagccaagaaatgtgcaacatttcaaaataaagagatgggcaaataggtttcaggcaacaatatatacaataagaaaccactaacaagatagtataaaatgtaaaatttaaggtgacaaaagagaaagaatggtaaaaagaacaattaatgataaaggtgtaaaaatcttactgcaccagaaaaaaacagtcaaatatgcagtgtaattattgtacatgaatgaaaaatagcacaaaaagcaattattatgggtggttttaaatacacctctatcaacattagacagatctactagatcaaaacaagtacagaatagatagggcttttgtttctagtaacatggcagcctaacattacctaaaattgcagtaaaagtatttaaatgctggacaaattgtaaaacattcttgtaagtgatatgaacttgaaataaaggtaaatctgtaggggccaaaaacaaagaaaacactggttaaaaaattaaaaagtatcttttgctctggaggtactcactcacattgctaaagaagaggcttttgtttcagggaccatggacagccaggaaacaaagcattaggtttaggatagattcatgtttgtactgaaaaccctggataaagctggaacccacaaagacctacatgatgaaagcctggattaagaaaatgtgcccagggacttccctggtcatccagtagctaagacttcacactctgaatgaggaggcactgattcaatccctggtcagggcactggatctcgcatgccacaactaagtcacacttcaaaagatcccacatgccacaaccaggacctggcacaccagataaatacgtatttaaaaaagaaaatgtgctcaacagagaagtttgcctaaaagataacttatttgcctgacccaacccatacgtgtagataaatccctcctctgagagtttatattcgccatcctgtcatcacgaagattaagattaaaatttatactcattacacttggctgaggtaccatcagcctaacaattaacacaaggtgagtaacacattttgaatacagctggcaggaaaacatgctccaggagatggtgaaggacagggaagcctggtgggctgcagtccatggggttgcaaaaagtcagacatgactgaacaacaaagcctcaggtgtagccaaaaaaaggaaagaaacaggtgaagaggaaaaggtgtgctcaaacactgaataacagaaattactctgaatgcagcaggaagagaaacaggaaaaagtgtaaaagagtttagaagataaggaaggatgagagggtccaaaatatatgcatttgtaatcctagaagaggaaaacagaataagagaaaggaatatttgaagagagcatgtctgagagtttgccagaattaatgaaagaatccttagattcaaatcacataagtaaaatgctatgccaatatactagggaatctacgaacaagaaaagagagaaataataccttaaaactaactagagatatagatatcactttactcttgttattatgacagttagattcttaccgcctcct

SEQ ID NO: 38297 - DNA, 918 bp, Bovine  19866881423765
  misc_feature (1)..(1): n is a, c, g, or t
nctgacataatgtttcgcttaaatttaattgggtagttatatccttttgcagttcatgaagatcaagcaaagatcacactgtattgccaagcaaaagtgtttatgaacatcaaatcaatatgtggtttaaaaaaagccaatttcacatatttcattcgtaaattatccacaaagagtttttttacttttttataaaagcacttttgccttgaaaaaaatcaatattttgtcatctaaatgcttatcttctagttccctgtgacctcaatttatttctgagtgttcctgttaatacagatgttgaatgggaaaacaccaagaaataaaattctttctgctggagaaaattatagctccattttttggcaactgaccagcagggtcagtttctcccaaatactgtgaggacccctgtggcaaaaaacctgatataccatctttgtttggaaaactacaggagtttctttaggttacagtacggtacatttcaacctttttgtggaatagaggtatattcctctattcctctggtgtatttcagttcagttcaattcagtagctcaatcgtgtctgacttcttgcaaccgcatgaattgcagcaggccaggcctccctgtccatcaccaactcttagagttcactcagactcatgtctattgagtcagtgatgccaaccagccatctcatcctctgtcgtccccttctcctcctgcccccaatccctcccattattagggtcttttccaatgagtcaactcttcgcatgaggtggccacagtattggagtttcagcttcagcaccagtccttccatgaacacccaggactgatctcctttaggatggactgattggaactccttgcagtccaagggactctcaagagtcttctccaataccgcagttcaaaagcatcaatt

SEQ ID NO: 38298 - DNA, 1491 bp, Bovine  19866881623352
  misc_feature (1)..(1): n is a, c, g, or t
nctgactccactccctgcttcctacaccgcagccttattggccttcttgctggcacactctcactcccaatatcttccaatagttgctcctttgctcaaaaaggcttctgtcagacatgtctatggttctctccctcaattccttcagctctgttttaggtgacagtttatataatatataaaacgctttgtggcaattctatcaaaaatttcatcttctccccataagctatctgtctttcctgtttagttttttctccaaagaatatatcaggagagtaaaatgtcctacttaccttgtttactgtctgtgaccaactattaggattatgctccagagaagagagaccatttctgtgttttattcatcacaatatacccagctgctattatagaataccgctttacaagggagggttcaattaacccttgctgaatgaataggcatactgacaagatcgtgaagaacttttagaatcagacagaaaacggtaccttaatactgcttgcaccttgagtaagtccaaatttgctgtccaaattcaatgagttgagcttgtatgatctcggagttccaacatcacaaaaaaccctacaaaacatgaacaaattgaaacagcagtgagactggtttataaccctctaacctgctgtacttaaagactgtagctactaaaaattttctccagccttatggaaatacaagagaggaattgaaataaatttcatttttgtagatagctcacataaatgagcaacaatttagggtctttgtgctctttaattttatagtcactgcctgcatgtttttacacgtggtgtaagctgtattgtatcactgtaaatacattttgagttccatggcatactgtggtcagttttcatggtataaagtgtttctttacagctgaagtagtactttttgtttggtctagtccctacccttcctcctgaaacctactccaaattcaggctcatcaagcatgcaaaaaacattaagaacagtaagatacatccacttcccctgctattattcttatccaagtgtctaagaaaagctcagatatccagctggttcaggagctgtgttattcacagttttggctgattcaggcctgaacaaatatcgcttctgttactgtcctggaactctaacacccaacttgactccttaaaagaaaacacctgagttagagactatatagaccttccctgaaatgtatgcatggaagaaaaaaaaaaaaaaaagcaagcatttacattatccagatcttataaatattcaaccaaagagaacatcaataagaaaagatatgagagtggttatataccccatattcttaccaatggtttaagaatatgtttgcaaaggaattctttccagtgtccaaatggaactatcgaaaagtttaaaggggtaaaatcctaaagacatgcccatttaaaacaaaggaacaaaaagtcatcatcaacagaaacaggttcatagat

SEQ ID NO: 38299 - DNA, 1319 bp, Bovine  19866881630831
  misc_feature (1)..(1): n is a, c, g, or t
nctctggatggctttaaacagaagatgaaaaacttgtattgtcctctagcacccaatggaaaattcttaaaactctacatcaaactttccatttgcgaattgaaaatggttaccaacttgctaagagtcttttaagggaaaaggattaataaaagctataagccaaattgttaaaggatgtgaagtctgtcaaaagaataatccctgtaacaaccagtcagctctcccaggcttatagcatacaggaagatatcctggagaggactggcagatagaattcattcatgtgccaaagacttcaccaggcttccctggtggctcagacggtaaagaatctgcctgcaatgtggggaacctgggtttgatccctgggttgggaagatcccttggaggagggcctggcaacccactccagtattcttgcctggagaatccccatggacagaggggcctggcaggctgcagtccatggggtctcagagtcggacacgactgactgactaagcaccagagatcatttcacatgtatgggagggtgtgtgtaaattgtatgccagtacacaccgatttatataaaggacttgagcatccacaaacattgttatctgcagggcgtcttggtaccaatcccccatgaatatcaagggacaactgtatatactttagaaatttttctttccattgaattccatctactttatagttttcaacaattcatcagttagctctgtcacactagcaacatctcatattttccaacagtgctatagatacttctcatttttgtttcttttatcatttgtatgggatttggagaatgtgagctctgtccatcattgaatcaaatgtctaaacctttacatttgattaccatataagtataaggtaacactttacttgcagctagtatgctcatacattttttaaaagagcaactttttttcattgatgtaacttaatgacagcactgaaagtacagtgtatattaaagaataataatccttaataatttttcagacatcattgttgaatataatagtaatgaatacattctgctgtttttatatttaatgaataagtacaataaaataaagtgttagttgctcaatcatgtccaactttttaggatcccatggactgtatgtaacccatcaggttcctctgaccatgggattttccaggcaagaaaactggagtgggtagccacttccttctccaggggatcttcctgctccagggatcaaacctgggtctcttgtactgcaggactgattctttactgtctgagccaccagggaagcccaagttattaactgtag

SEQ ID NO: 38300 - DNA, 3049 bp, Bovine  19866880368566
  misc_feature (1)..(1): n is a, c, g, or t
nccaagtatacaaacagaatgagaaggcctcactgacattattcggagaaaaactttggctctaccagttcatgaccctaaagttctgaattctacaagcacttggaagtcatgatattaactgctcccactcccaacaccagaaaagaaaatcaattataatgtgaaaggaagcctctacaaaatacattattgagaaaagcagaagagagaagacagccatttactacgggctgcacgatttatattcagtatcttaacttactcctcacaatatccatgggagacagatcttccccctgcttacaaatcagaagcatgagacgtgatgcaacttcagggtctcactggaagagaccggcagggttaagatggaaacaaagacctgtctgactccatagctgagagcaagggtgtctgataaaaatcaaatgtgatccacagacataatttaaaactttttagaagtaacattaacaaaaaaagtaaaaaggaagagacaaaattaatgctactattatatttgattgtgggtttcccaggtggctcagtggtaaagaatccagtcaccaatggaggagatgtagatgatgagggtttgatctctggatcggtacgatgccctggaggagaaaatggcaacccactccagtatttttgcctgggaaatcccatggacagaggagcctggcaggctacagtccataaggtcacaaagagttaagacatgactgagtgtgcacatgtgcacacacacaaatttgattataacccaatagagtcagaatattatcatttcagtgtgtaatcaatataaaaactatggacatatttcacattctttcatattgtctttgaaatcagagtgtatttcaaacttatataccttaattgagaccagccagatttcaatcactcaatagccacgcgcagttagtggctacttcattaggtagcatacccctagagtaacaatcaaatttgctaccgatcattttattttgatgtacagcaatgagtcccagatgcttagagttcacagacataaaatttttaatacctgatgaggccctacagggttgaccatatttaatttcgccaagtgtattggttggcttagatgaagtatcataacaagcagccccagagctcagtggctcagacaacaaagttttatttcctcctcaagcaacatgcccaataagagttgcctgtcactctatttcacatcatcttcactctgagacctaggcagctggaagagatcacaccttacagaagaagggaaaaaaagaatggagaaatgacacaaacagctcacagaactcaaaaacaaaaaaatacaaacaacccaatcaaaaagtgggcagaagacctaaatagacatttatcgaaagaagacacacagatcaccaaaacgcatgtgagaaaacgatcaacttttattagagaagtgcaaatcaaaactacaatgaggtaacccctcacaccaatcagaatggccatcttcaaaaaatctacaagtgacaaatgctggtgagggtgggagaaaagggggaccctcctccactgctggtgggactgtaaattggtgcagcctatggaaaacggtatggaggtttcttaaaaaactacaatctgccacatgatccagcaaccacactcctgggaatacatctggacaaaactgtaacttgaaaagatacacgctccccatgttcacagcagtgcaatttacaacagccaagacatggaagaaacccaaatatccatcgacagatgaatggataaaaaagacatggtgtgtggctgtctgtgtgtgtatacacacaccatggaataccactcagccataagaattaaataatgccactggcagctccatggacgaaactagagattatcgtactaagtgaagtaagtcagaaagagaaaaacaaatactataatgacctcatttatatatatggaatctaaaatatgacacaagggaacttatctatgaaatagaaagagactcacagacatacaaaacaaacttgtggcggccagggttgcaggggagagggatggcttaggagtttgggattagcagatgccaactattatatggagaatggagaaacaacaaggtccgactgtgtaacacaaggaactatattcaacatcctgtgatgaaccataatggaaaagaaaacaagaaggaaaaccaaacatacattgtctcttaaaagactctcataagaaatgacacacacagttgaccaatgaaatagacaaagcaagtcacaaggctaagcccgaggtctcagcggcaggagtgggagaggatattatacacagctcccctctaaggaggggcagcgactgtgtgtgtactttgaattaacaacccaatctccaactttaagaaaggacttatgaacattatgttaactaatatccattattattgcccttgtgatacttcaacaccgcaaaaatagaaagaactcatatcattcttaatttctcttttcaccagaaatcagagagaactccccctcagatgggtagcagggtatgactggggaatcactgatttcgtaacaacatctcttctccttttccccaattcctaatcctgacggtccccatacaggcgaaattttccaggtcttctagaatctatgtaatttgatatgcaccaaataatagttattttctaaaggcggcttacccagagacttgcactgtctactttttacatttctgttctacttctatacatatatatatatatatttacaaacacacatacatatatatatatatttctataccacaagaaaaaatagacataaatatttagccaagtttgcaggagaccaactcagtgatggggaccagattgggggcagcttttctcccaaagtgtaggtgaaggagacagcctccacgtaccattgggatgctgagaaacctacgcttctctatctttaagttttgctttaaaatgtgggttaggacttagggggattggatcctttgagaaattcaaaccaatcaa

SEQ ID NO: 38301 - DNA, 1488 bp, Bovine  19866880393378
  misc_feature (1)..(1): n is a, c, g, or t
ntacccctatcagggacccaagttaacgatgaggctgcagccaatagaaaaaaagtggtagccttgtttgctacatggggacagaagccacggagctggatagccagagtgggccagggaagttccacaagtgatcagggtgctgtttcaaaaaagagggggaaaatattgctgctgctgctgctgctaagtcgcttcagtcgtgtccgactctgtgcggccccatagacggcagcccaccaggctcccccgtccctgggattctccaggcaagaacactggagtgggttgccatttccttctccaatgcatcaaagtgaaatgtgaaagtgaagtcgctcagtcgtgtcagactcttagcgacaccatggactgcagcccaccaggctcctctgtccttgggattttccaggcaagagtactggagtggggtgccattgccttctccaaaatattgctagttaggccaaaacaatagtccttacaataactgtttccatatggagattgcccctagcatttcttggggaagtcattttttttctgaatctcacattctgagaaagatgaattttagaaatcaggaaaatggggacaagattataactcttcagtagaataaaagattaacattcaacacagatacattactcttcaaaggaatccagtgatatcaagatgtaagagcagataagcagacatgcggagttgaaggtcaaagtcaagatttctggtaactgggacaaggcaaggaggagagaagcacttacaatctaaccagttttgcttgtagctatggccatgttataaatacgacccactggctgctaatgatgtagtcttacaaataaatgttaaggttattcacatggtatcctttatactcaatcaatgagtaatattgcccaaaacaacagattttcaaagaaaaataaaacttcaaattggtaatttctacacattcctctgtgtagagcatatagtcttactagagtgctaaattatataaaacccacccagttatgtccccagacattttccagtatttgtgtattcagtctagactatagttctttgtgattattactaaactgatgtatgtttcttcttaaattttctttttgaaaattctaagaatgagttaaacataggaacaacattcgggatatactgggaatcctttaataacaatttatgatttgggatgtttcagagaattctgatcttttttacccagttccctaatattaatatctgtctggagttgagaaacaaatcatgcctgccactgggaagaggaattgtccaaagagaaagcgaaggcgggagcagagaggaggagaggtgccgaggctacgtgggaggcagagctgaggtggtcttatgatgccatagccccaagaggcagagaggctctggggagggaaaagcaagcgggagcagatcaggctcctcctttaggggggtttggggaagggatgggttcag

SEQ ID NO: 38302 - DNA, 1851 bp, Bovine  19866880460152
  misc_feature (1)..(1): n is a, c, g, or t
ntgtatgtgtcttttcagattatggttttttctctttatgtatgcccaggagtgagattgctagatcatacggtagctctatttttagttttttaagacacctccatactgttctccatagtcgctgcaccaatttgcattcccaccaacagtataggaaggttcccttttctgtgcaccctctccagcattgtacatttttttttaatatttgtttgcttattttttggctgcgtggggtttcagttgtgtcacgcaggatcttcctagcagcatgtagacgtccctctacttgcggcaaacaggctcagtagtcgtggtacgtgggctccagagtatgcgggctccatagtttgcggcctatgggctttctagttgcagtgcaccagttcggttgctccagggcagatggaatcttagttttgcggcccgggatcgaacctgcatcccttacattggaaagtgtattcttaacccctggaccgccaggaaagtccctgttggtagactttttttttttttgatgatggccattctgactggtgtgaggtgatccttcattgtagttttggtgtgcatttctctattaattagtgatgttgagcatctttcatgtgctttttgtccatctgtaagtcatttctaaaaatgatacaacctgctggtacagtgtcccagggggattggttccaggacagcaccctccgatggttgtcatcgtttagtcgctaagttgtgtctgactctttgccaccccattgactgtagccaaccaggcttctctgtccatgggattttctgggcaagaatactggagtgggttgccgttcccttctccagggaagggggttgccatttccttctccactcaggatctcctgcagtgcaggtagaatctttaccaactgagtcaccagagaagccctcagatagcaaaatctacagaagctcaagtcccttatgtaagtggcctcgtacctgaatccagtcagcactttgtgtccacaggttgaaatttcatggcagaaaatccacgattggctgaatcggcatctgtgaaacccgtggatatggaggactagctgtttgtgtgtacagtatatggttctaaagctttggcatcgctgttgtagaggtgtggataagcttttgtttttcctgtttacattttctgctttgtttaaaagaaaaggttttccccaatgcagtctattcattgaaaaaatttgaaattggattgaaatccatttgaaaatgatcctagcagttatagataaccatatttagctttaagtcttgatctcatctatgcaatacagttgtccagagctgttctttggggagggaagaatacagagttacctcttgtgggggagagccaagagctgttttccgaagcagactatgatgtggatatagatccttggctcagcttttctgtggaagatcagatcagatcagtcgctcagtcgtgtccgactctttgcgaccccatgagtcgcagcacgccaggcctccctgtccatcaccaactcctgaagttcactgagactcgcgtccatcgagtcagtgatgccatccagccatctcatcctctgtcgtccccttctcctcttgcccccaatccctcccagcatcagagtcttggaaactcatcttttaaaagtcttgggtggagttacattggtaacagaatgtgcaggtgaggtcatttctttataggtacttttcctgggtgggaggaaagcactttaggttctaggctctatgcaggcctgattttggctggaaaaggaggctcactagattacctggtcagaagagaccacccaggctgttgtatctgtggag

SEQ ID NO: 38303 - DNA, 2677 bp, Bovine  19866880663308
  misc_feature (1)..(1): n is a, c, g, or t
ntgagaaagtgtgcagtgatccttggcatgtctacccaggcgagagtggtgacatcagtgcctgatactttctatccttgtagagctggaactgtttctgtcactaaatggtctgtaattctttttgaggacctacctggctttggcaggaggcacttacctctctggttttcccacacactcctatttgtcctgttttcctcttcttgaaactcctgcccccattcccaaaaaagaaaaagtcacaaccaccctatgcaccaaatgtctccttttcagcctttccttgattctctttcataaatctgagtcatttctccacacctaccagcaatcccggctgaaattactgttttccacagcacttccacttttcatcttctgagacctgctttctgtctgattcagaagcctttggaagatggggaaaggcactccagccttctctctgacaaagatttcttgctgaaatgcattttttcctccacatcaaagtcctctggaaacacagaaacctcaacccatcaggggttatatacatacagaaatacatctacccactcctccaaccctggtctctatcaagagtaactcctttacaagggcatgagcagcatattgtataaggcagctgacagtcagtggcccagtcccttgctgccgctgctgctaagtcgctgcagtcgtgtccgagtctgtgcaaccccatagacggcagcccattaggctactctgtccctgggattctccaggcaagaacactggaatgggttgccatttccttctccaaagcatgaaagtgaaaagtgaaagtgaagtcgctcagtcgtgcccgactcttcgcgaccccatggactgcagcctaccaggctcctccgtccgagggggtggcaattggcattttcccctgtggggccaaactgtgtgtgatggtcataccacaaatcaagtgatcccagggcctgcaagccctattcccaaccatttgttggctgaggccacttcaaggaaatcttcctgaggagcaacaaaatctgtgcacagcatgacacaggccacaggttctgcagcaaaggaaattccattgcagaaggaatgtcagccagccctagaagagcctacttctctgggcctctgtacgcagccagaaagctgagctgacagatggatctgagtaagctttctacagcaggaaaaacgctggcagttttctttcacagctctcgcttcagtcaggaacaaagaccagaatcattctgtctaaagcaggattctcagagcctggatcacaagcagtcatggcaggaagagtggcaggtagggtagcaccttgtttgagatacaggttcccagggacccacagacctactgaaatagtcatccttcagaatctaagaatctgattattaaccaaaccagcacgtgtgggcatgcacacccacgctgagatgcttgtgcacactcaatgtttaactaccaggaaaaggctaagcgtcaactagagaacgacctcacttttcatagaccaggggaaaaatacattgtttgatcaccgagtagaagaaagtttcagaacatccatttcccaggggcaggaagtattttcagtccttatgagtcccatgacagagcttttgttgcagggtcttctgttgtccacatgcaagctccagaccattctcagcaggagagttccatttctctattgttgtcttcttaggtggagacattccatagcaacctctgctgctactaagaagcattcggaaaaccagatttaaatcatatcattggcagtccctatttatgcttctgagaatgccgttctctgttttcccacctgcctttgttatgcttttgacctttttgattgaaaataatggaatctactgaaatgaatttaagcaagaaaagaaaggtggtacaggtgatcaggggagaaggcaatggcaacccactccagtactcttgcctgggaaatcctatggatgaggagcctggtaggctgcagtccatggggtcgcgaagagtcggacaggactgagcgacttcactttcgcttttcactttcatgcattggagaaggaaatggaaacccactccagtcttcttgcctggagaatcccaggaacaggggagcctggtgtgctgctgtctatggggtcacacagagtcagatatgactgaagcaacttagcagcagcagcataggtgatcagggtattcagggatcattctaggtgggcagtacattcagttttcccatagatctaaaaccaggatcttggcaacactggaaactgcagtgtctatgactgagtatcttcctagaactcccttccttcttccttagagagtcgcagttcccctcagtattcagccctccccttcacggcccagtggttgcagagaaagcccaactcagcgctcaatgagacccaaaccactgacttccattttagcagatttctgtaatttgtggcatcccctatattatcatgaaatgaaattcagagatacatattttatcaaatcaatatgatttcctaactgccatacaaaggataaataaaagtttcatgtgataaaattatatacatttcaatcagaatatgtcccagcatggctccactaaagcacataataaataggggaagaccgagctgagggataagtg

SEQ ID NO: 38304 - DNA, 578 bp, Bovine  19866880723184
  misc_feature (1)..(1): n is a, c, g, or t
naaataacagggatttgacacttacgtaaatatgatcattttgtgtactttaaaggacagaacatctgtttttctctgtgcatttgcttccataatatccccaaacactcatgtattttcctcccatataatatccatggaaatagttacctttcaaaaggtgcagatgttaatctaatccaactgagacgatgagcagttgagactggccccctattcacagcaagcctaggttggtggtgggggtgggggtgggtacaacaggctgatgggactttagaactgtcaacaacctgtctctgctaagaaatctcgcaaggaagtggggatgatggtgcacaccattccctctgaaaactgggtctgctttcggaagcccagctcttggctgtgttgctggtcgttaaccttcttgaactgaccagggtgcctcccaaaggcacgcctccaaaaacagagccttcctggaggtacagacactgttccctcctgctgagccgccccagggaggttcaggaagaatctccctgagtcttgacctctgatctgaggacaggccactcatctgaaaccaccgg

SEQ ID NO: 38305 - DNA, 1328 bp, Bovine  19866880763985
  misc_feature (1)..(1): n is a, c, g, or t
ngctcccatttttaccctcacaccccacatcactccattaatttccggcatcacccttcattagcgaccccgtggctgaaggactgttatgaggcttcagggtcatgaactgcaccatctaccccttggttcatttcacagcttgctcccctcttaatgcctcacagctcattttccccccttcacttggcgagagggacctttcccagggcatgaaatggatgggtctcccgctggtcctcttttgtttaatgcctctctattctctgagcttaaacatgtaccccgtcacagaagagaagcacttgctctgtgcccccaccacaagtcgagtttggattgcagagaaattatgaggctacagtgctttaacataggcagtttttcaatgaagatggaacatgagaagatggccttattttttcagtacatttactctcatgggtaaaccccatggtggaagatagtatttggtgagtttaatctgctctgccttttttcataaatgaggtttaattatgagatgtgtgtgtgcttgtgttttcccactgaacaccatgggtagcagtctgccttagaaaatgccgtgtgtgtaaaagaaacttccaaagctgataaaagcagggacaagagggcacacctgctaagcgctgggatttctcccatctgtctgggtgataagctgtgttacttttgcccttcttctttgctgatcagcaggctggggaagaccgtagcaacgtctaaaagtgcctactaaggtggcaggggagcagaagtaaagtatgttttcctataaaagaggtactaggtgcataaaggagtatttcagaaaccctgaggagacacagtaggattgtggtaaagaacatgaacttgagagccaggcaagcttgggtttgaatccagactctagtgcttggtagatgtgtgactgtgctgcactcagtcatgtcccactctttgcgactccatggactatagcctaccaggctcctctgtccatgggatttcccaggcaagaatactggggcaggttgctatccccttctccaggggatattcgtgacccagggattgaacctgcatctcttgcattgggaggcagattctctaccactaacgctactcgggaagatgtgcgaccgggctatgaaaaatcacaggaagtcccctacatacgaaccttcaagttgcaaactttcgaagatgttaacatatgtttgcatgtccagtcacataagttagttcacatgtctggtatttattgtcacatgtgaacatcctctacaagtgtgggttgtgcctgctgtttattgtatggagta

SEQ ID NO: 38306 - DNA, 930 bp, Bovine  19866880798476
  misc_feature (1)..(1): n is a, c, g, or t
ngctacgttttagcagtgacgtccctgtccttacccagcatccactgggtggagctgcgtgttaattactcagtgtcttttgtccccagagtgctctttcttttgattcctactggaggtttcaagtctctcttctctcctcccttctccactaattcattggggttggggaaagagagcaaagacagagaaaactgtttaaaatgtctgactccacaggccttccttcactgtttcagctattatctctaatggcctttgaagctgaaagcagagttgagtgtatattactttttgcctttacggtctgactgatgacatttcatgttttaaaatagttttgttccaatgatttcttctcgtagcagtggatgggaaaatcctaatacatgaggatatcatatgataagtggataataatcggcaggcattcgggtggtgggcaaatcaactgtgtgttatttttagagtgttcacgtgatatgattcatcttaaaagcatttctgagtgttgggatctgaaactatccccatgatttactgaagtcatggagaacacatgtgactcttgttttgaaaatgacagcctacggatcccatggcttttttcctccccttttggtttcttagagaattggtgggcaaaaccaaaagaccaatataaattccccctggtaccctgctgtccatgttcaaagactgggagtatttggtgtacatgatctatgtaccaaggtgatattctaagagagacaaattatgttcaaacatctgaaagtcatcatttccatgcatatgcaggcattttgagaaaaatctacaagaggatcaaaaacaagattaaaccacatctgtttgggtttaaacgacgttgtctatgtagttcaaagttgtttccttttgtattaaaaaaaaaaaagaaaagaaacg

SEQ ID NO: 38307 - DNA, 1633 bp, Bovine  19866880810562
  misc_feature (1)..(1): n is a, c, g, or t
nttccaaacatttttaaacacagtgctcattgagccaaacacttcttttagccacatccacgcgtacagcctgccaattatggagctgactcccccaaaaggtcaggcaacccaagtaatcatttccatctctgcagtatttgcaaaggactgaccaataacgggccccaaccaagtgccaggcaccttgctcattgctttccaagagtcatctcattttgaacctcattacaaactgactgcaacatcgttacccaggttgaagagacaaagaaaggctcttaggaaagttcagatcttgtctaagttctgagagtcaggcgggagcaggattcgaacttgcatctttgtgactttaaaccgcacctactttccactaatgcacaggacccacctagaaacaagagtggaataaagcagaccttgcagggagggtttcttcagccctgaggaaatagctgaggtggcatacagatctctatgcatttgttgggaatacaccaccaagtttactgtttcagagtcagtgatttaatgcagtcatctaagtagtgataaataacagggtatttgaccatgtttcaaatttatgattcagcccttcactgtgataattgctggctggtgtgcagtgggccagaggaggccagaaatctggtcactaactagatctgcaagcgaaattattcttaataataacaaaagtaacaataatcactttttaaaaggcaaaccagaaactttttgttgcagaaggctttacacataatgactctttcttatatctagaagtttcacagctaacaagttgattttaatctccttatttcaacatcaaagagagaaaaaaggttcaacatcaaatggatcagaaatgaaggattttataaaaaaaaaaaaattctggtaacctcatgcagcactctttcctaattatgttaagttaatcaagtttccatattgcttaatgctcacttttggcaaaaattaaagcaaaagcaactgagtccaaaattagtgcacagaccagttgcgatttgtatttgccttaattcaacttgacaatagagcgattgtgaaggacacagcttcctcccaaatattccacctccaccacctctcactctagccatttttgagaacaaacgtccaattatttacatagagctacacaactacaggagtgtttaactgtgtatcaatccactatttccaactccaagtgaaaaaaataaattgagaaaacaactatctacattataaactcaaagggtaattttttttttttaattaaaaagacagcctggaattacatggggctgcatttcagagtgctttatgtaacagaagcagcttactggaactgtctaggtgacccacaccacagagcagacagaataccccctgactgtccataggaatcacattctctgtgaaaggcatggccacctcagcaggagagggaagttcttgtaaagaactttcttagtgaaaagcccaggtgagagatcaccaaagacatcaactatggatggtcctgctggacgttccactttgtatcttttactgccttacgctggaacatcctttgccaatacgaccttttcctccaggtactctgtgtccacatcac

SEQ ID NO: 38308 - DNA, 1722 bp, Bovine  19866880819832
  misc_feature (1)..(1): n is a, c, g, or t
naacgaagaggtgggggaggacttggcaagaggagtctgggctctggcgaaaatgttaaagggtggtgcggggggcgggggagcttcagacctttagcttcagacatttgctaaactgaaattaagatgaagatgaccaccccacccaccccgtcctctgtaggccttcgggctccaccgaccaagctcagatgctagtgagacggatactccagagtgatgagcactggggtctggggctttgtctaatgaggctgggccctttggaagtgctctggaaccagctgaaaatatgggctattttgggactgctgggaatcagaatggagaagagagaaaggctttatgtatgtaggattccacgaaagggaatggaggcagcattttccataagagctgtcttaccagggtaccatagcaaagaaggaatcttatgtttcagacctcaccaactggaggttctttgaagtaccacatcttggaggcttgactatctcactaggaacttggtccccttaaatccccaggatgtaggcaggagagggatgcaggcatccacgctatgtacagcggtgctttccacttggaactttcacacgtgcgttttattaagctaatgaattatgagggggtaataaagaagtgaggaataaatgaggtttctggagtgagggtcaatcactcaacacctgttttggctaaaaattaaatggactgctttaatttttgcctgtcagaaagctagtggcaagttcaagtggagaaaggcaattcttgccaaagaagaaagtaacaaataaaacaaaatgcagggacagacgcaggtgaaagatctacagagaaatggcagacagacagacggtaccagacaatctcaagaatggatgagaaagaacgttcaaacggccggaaaagagagaaaatggtatgaagggtgacacctgccccaaccccggggcccatcaggcacagagctggccgggtccggggggacatcaaacatccccagaaccattttcttttgatatgtcacatgcttggtggcttatctcttctcgcctctgaacacaagtacaatcactttctgttgataatcatgttcagcttaattacacagaggttgcacttgaacatttccttccttaaggctgaagtgatgccattatttttcatttaactgcagaataaggggtgctctgttcgcacagtccaggaattgctaagaccacaatggtgaatagccatggctgtgcacaacttcaattttcatgattactattaattaagggtctgtcaaagggatagaatgggctcttttcttctctatcagccagcatagacactctcacccagagaagttgcacggcaggaagggtgagtcaggctgccctgttgcttgggttcaaagcccaatcccacaagcccaacatggacacggtatagctgtttccacaagttcgctcttccataaaggctgtgtgcgtgctcagtcgcatcagttatgttcagctctttgcgacctcagactgtagcccgccaggctcctctgctcatgagattctctaagcaagaatactggagtgggttgccacgccctcctccgggggatctttctgactcagggatggaatccatgtctcttctgtctcctgcattgacaggcgggttctgtagcacgagtgccatctgggaagcctgagccataaaggttgggtgaagaca

SEQ ID NO: 38309 - DNA, 504 bp, Bovine  19866880832026
  misc_feature (1)..(1): n is a, c, g, or t
ncaggggaacagaagaatgggcaagtgcctatgaaactgggagggtagtgagaaggttccctggaggcgccctggtgctgtgccttcaaggctacagaaaatcacataggttggcggggaaaacctgtatttatttctaggatggcctcacttccctcgtgatctactcatgtttctctctgagacctggtttggagctcgttttagtccccttgttgaaagtagctctccttttctgatctcaaaatgacatcaggacacagcataggtgacggcggcctcagagccccgctgggatgccactgatgaatccactgggaaatgcaaacaatagactgacggaaagaagccttcttcagacacctattttctttcttaattgcttacaggaagatccagagcaggtgttcagtacctgaaaatttatgggtaattatttggcggctcaacccttgggcatacttgggtgtaattcttttaacgctaagcagtttcaaaataaca

SEQ ID NO: 38310 - DNA, 1566 bp, Bovine  19866880838133
  misc_feature (1)..(1): n is a, c, g, or t
naactgggtgacttagaaaagagacattcattgactccaagttctggaggctgttagtcggaaatccaggtgttaacagggccaccacgctccctctgagaaaactgtagacagatccgtcctttgctctccctggtttctgatggttgtctgtagtctttggcattgctcagcttatagaagcatcagtccagtcctctgtctttgcaaggcattctccctgtgtctcttcatattgtctttcctctttgtcaaaatttcccctttttataaggacaccagtcatactggatgagggtccactccagtgatcttattttaacttgataacctctagcacaatcctctttccaactaaagtcacatcctcagggacttgagattaggactttaccctaatcttttttaaggaacccatttcaacctattacagatattaagtttaaaaaagtacaaaagaaaatcttacttctttttatctaggtcaattgggaatttatttctcccagatagttccatcgaacctgaattttctggatacttaagggagaaaacaggaatagcaggtattaacaattgaccctccacatgtcagtttgtaatgagttggttagatgatttgttcagtgggtcctgggtcatgaagttgggcctaagtttaaccagttcagatggctttagctccaggttatagatttcactccaaccctgctagcttctctagatataggtgccgttgtttctcgaaaggcttgtcaaaaagcatatgaatgtctctctcccatttgagaatggcatccacaatgaatggcaggcagtgggtggaacaggagtgagtgagtttggagagttacagacctatatttagatcctgccaatgcctcttaccagctgactgaccttggtcttagtcctgctgaatgatcttgatcctgatccttcataaaaatcagaggatgaagctccaataagataatgtgagcaaagtacttagcacatagcacaggcttaataaaagtttgctcctcaagcagcccatccttcatatagtccctgagcatgctgaggaaatgttaataatcattaacaccatgttttatagtttacaaagccattttatgtattgttacatttaatttatatttattgggttgttggacagtgttgaaaatagggaaatggcttcttttaaatttcacaactagcaactagtaattattcatagctttctatattaaatattttaattatttgttcagcaaatagctgcagttagtaatctcagtgctaatatcacccgctcatgcagtagttctcagtgggaggcgatctttgtcagcggacatctattcatgtctggagacatttttggttgtcccaggtggggatggtggctctgttggcatctcagaggcagaagcaaaaggtgctgttaaaatcccataatgctcaggacagctgctgcagcatagacttacccagcccaagatgtcagttttgctgagcttgagaaaccctgcctaaagcatccaatgtatttccatgagtaagtgctcacccttcaat

SEQ ID NO: 38311 - DNA, 3571 bp, Bovine  19866880851380
  misc_feature (1)..(1): n is a, c, g, or t
nttccccccaaaggagtcagcttacaaaaatttactagctgcactgccacagggatttatggtttcctttttaatagttgcagtctgataaacctgagtttctcgggtcacgaggtagattcatttatctttcttttgaacattttaagcaaattccagccctgcaaattgactgcatttttatatcgtggaataaactatagaacagagttggaatacacatccaaaaataagaagatcttacaataaaaacagataccgaagtctgtattttcctgattgtcagtcaagctaattatgttttactctgaagctctgtctatcaggcaagaaaggaaaaggcagcaaggggctccctcctcacccaggctgatgtttgggaatataacaccagtttcttcacagcaggagtctgctgtaattggcagctctgttttctcctactagagggtaattctctagccaaggaaacacaatgttaacaagattttacaaatctgacatatggcatcctatctgaaatgaccaacaaaagttccttctctccccaagccaacagttattgctggttagggatacaagacagggtgataaaaaggaagtaaaggcccctggagttcttttaggggggctggtaaatttgtgatcttgaaaaaggccaattaataaggaaaggtaagctattcagtgtggtggtatctctcagagatggatgaaatgacaataaaaacttcaccgggaagactgggcctcgctcaggacatgtttcttccctaaggcattcaaggcgagctcaatgagtccattaaggaggggctgggagtggcagggctggtcccccatgtgagtgaaagcgggaatcctaaacaacgcactggacctagcagtggttctgggttgatctcatcctcgccccacacctacagaaacactagaacaaatttgcacggagggtgaaatagctttgatgtgactccaagaactgcatcacaacctaaatcttgtttaaaaccataacccctcaatgagaaccctatactctgttttaactaacaaaaaatggcagaaagaacagtctggggcataaaacccaggcagaaatacatgtagactttccaggaaaagaggaacaagagtattttccttccctcttgggcatattaagtgactgacattaagtgcttcattctttcttggcaggacgctgggtagattctaaagagggcaaagatgggttctcagaaagttatcccggatgcactgtgatacccgcactgtagttacagccgaatgcaggggccgactgtcaccagatcccatctaacgttccatgactccagctgcagatagtgatcagactgcaggctcattcaaaggtgggtgggatcaaggagtttacacatgaagggattaatgagcagcttcaaagcaccaggtacttgggagtaaagacacagagtcaggtcaagtcttaattttcacggggaattaaactgccttttgttacctcctggtaacatactgttgacagtcaactggaatctgcccacgagaaggaagaaggatgatggcgcccttctttggtttcggtgtacccagggccacagacactgcaaatattccaagagcaggatttgtttcttcagtgagatcatctgctcattcgctgtacctgcccatttcttctttcctttctgtatgtcctacagtggacagcagcatctgaactattttaagtagtaccaggacagaccttgaacgaacacggactcacaaaacagttctgcttcctcaaatatcctgctgtccttaagattatgagaaagtgagagtctcagtttggtgctgatacatcttgctaatatctgctaacctcaaagggagataagaacctcagaacgtccaagagacagcagaacccagccagcatctaacaatgggatgttttcattgtattcattcttatggctactacttctttgatgacaagcatggctgatttgccatttctagacgttagagaagattttcatttgaaatacagttcctcaaatgaagtgaaataaaccaatcacaaaaaaacacacatattttaggattccacttacatagagtatcgacagtagtcacatttatatagatagcagaatggttgtcaggggctgggggaaggagagaacagggaatggtctaatgggtacagagcttcaattctgcaagatgaaaaagttttggagactggtttcagatcaatgtgaatatacttaacactacagaactgcactcaagaacagttgagatggtaaattttaccttatgtgtattttattgcaactgaaaaaaataagtggaagatagaggtagaggaggatatggctctggaagatagacgtaatgctgctggctttaaacatggaaggaggggccgccagccaaggaaagcaggcagcctctagaagcaggaaaatgcaaggagacagattttcctctagagcctcaggaaggaggtagctcagccagcaccttgattatagcccagtgagacgtattttcgacttctgccttccaaaactgtaagatgataaatcttcaccctgaaaaacagttactcaatgttttttcttagagtcaatcagaatatatttagaaatgatgctgatgaagtacatgtttctgggaaaactgtgacaacatgtgaacacctggtgtctggtgaaagatacatacactatcttttgggctgtaaaagacaaaccaagttttccaagatttattttacataagaggcatcagaattatcaggatggattaaaaataggtgtctaacatggttcatatacagttcacaagcaatgatctttagttattaaaagcaagccctcccaaactctttcattgtatggactgatgcaaatatgaaccaaaagctaagctgaggatctggaggccgcaaccttaagttaaaccctatctctgccacttaagaatggcaaaaacttggactagtcacctaatctcagaaccttaatttgtgcaactgtaaaatgggatactcagcacctccctcaaaagagctgctgtgaaatcaaataagaggatgtatgtcaacttttggctcaggcctgattcctattatgattatcagacattatctgtgctcagactctcagtcgtgtccgactctcgggaaccccatggaccacagccaggctcctctgtccatgggattctctaggcaagaatactggagtgggttatcatttcctcctccaggggatcttcccaacccagggattgaacctgcatctcttgtgtctcctgatcctaccaaatagctgtttgtttctggaaacaaaaataattcagcacttcaatataaattcaatctgagcaactccagcttttccacatttggaagatctcattagctggagtcatggcaaccctgggtttctcttagatgttggagcaggcgtgctcggggagttggctctactgtttggtcagtggagtgagatcactgtctgcttgcttgctgtacacttgcagcggctgaagggctgcccgaaag

SEQ ID NO: 38312 - DNA, 2934 bp, Bovine  19866880900647
  misc_feature (1)..(1): n is a, c, g, or t
nagtctctggatgtagaagtgctatataaataagcaccactatgcttgtgattaggtactgtttacccaattgcttaccactcaaaactatccccaccccccaccaccgcacctgagcaatatcttagtaactttaattggagactaatcacattaggggctttcctggtcagtcagtcagttcagtcactcagtcgtgcccgactctttgcgaccccatggactgcagcacaccaggcctccctgtccatcaccaactcccggaaaagaatctgcctgccaatgcaggagacacaggtttgacccctgggtcgggaagatcccatggagaaggaaatggcaactccagttgccagtattcttgcatagaaaaccccatggagagaggagcctggcaggctacaatccatgcggtcacaaagagtcagacacaactgagtgaccatacacacacgtaatcatatctagacagcaggtttactgaagaaatcacacaattatctcattttttcttcatgactctagaaaattagggtatttttcccctcaaagtatgaactattataaaaagcagatttttgtgagtgtgtatgggtctctgtgtgtccgtccatgatagctttcaaagggacaaatcattttttatcaactagattctgtagaaactaagacaaagattacatgaaaaattactgctgagacattacgatttgtgtgaattttaactggatcagtctagctgtctgcctgtggaatatttgcccagagaacacagctgccattgcttgggagaagtatgactgatcaactgtttggagtttgtagagactcagatatggtatttgaaaacagctcttcagaattaaggtaaacgtttctatccttggataaacagagcacagttgtccagagcagagctgcccagcacgatgactcatgcattctcagccctgcagcactcagtaacaagccaggtctactgactgctctctactgtgagctgactctctggtagacagagaaggatcagatgaccccagccccaataatctaaagcactaaaattaacaagtaaagtggataattaagggcacaggtagaggatacaaagagaggaaaacattttgagaatgtaaatggtagtaaaaagataattagcatcctttaaaacattatctcacttattcttcatgactgaagtaagaagtattatccccactttatatttgaagaagctaaaggtcatcagagtcagcatttgaatccaagccctctgattacacggtttgtatcctgaagctttccagcatatgctttcagaacataggataaagaccaacaatacaggctggagtggctggttggcaaaaatgacacagaagagtttgaaaaaaactattttttttcagttctggcaaaggattaggaggatgtgagatgggcatggacaggaatgaggagagatgctgaaatatacatggcatccacatgatcaggacactcatcctgaccagagtctatataaggggtgtaagggaaacaataagaaagaatgggggtgaggaaaaagaaacctacaactgtgtgcaaatgtctccccagctgctggagatgcaaggcagaggcaaatgaagcccagaaacccaggtgttaatcagcacagtgctgctcagtgaagagtttatgtagttatgagatggaaaagagaggatcaaagtctgggtctgagtaacagtgactatttaaggcaggagaaagaaccaggaaaaaggaatatgcagtttaatggacttatatacctataagattctatttgggcttccttggaggctcggcagcaaagaatctgcctgccaatccaggagatattgagttggatccctgggttggaaagatcccctgcaaaaagaaacagcaacccactccagtattcttgcctgggaaaccccatggacagaaaaggccagcaggctacaatccatgtccagcaaaagagtcggatatgacttagcccctaaataacaaggttctatttggatcaaatcccagttaggaaacttactagctttattactttggtcaagttcaatttttctcaaatataaaatggggaaaataagaatacttatctcacagggctgatgtgaggattaacacacacacatacacacaaacacacactccaatgataaaactaatgctgggcacacagttaagtacttgctaagtgtctgcttattatcgttgttattgttgtcatcatcaccatcattcatataagcttagtctatagcactgtgggtagcagagagcagttagaaacaactcaatgtacattcagagggaaaaggccacccatggaataccatgagacagtttaaaaaactggagtcgaattctgtatattctagcctggaaaggccttcaagatataaagtaacagaaataagctagattccagaattctcatccatacacattaattctgacaaggcagtgacaatgatgagtgtcacacaaacatcttagtaatttcttagcagaatgagtctttgcagaccccagtgtggtagggagaacagttttctatagagatgcatttagcagggccaagcacactgtgaggcctgggccaaagccctcagtggcagaggaagaaccagattccaacaagcctgactggctgtcgcctgccttaatcaccagacagagcagataagctgcacaggggatagaaaaattaaacatgtctgttttactttttagaggcaattagggatttatagccaaagtgttgtaattttttggatcacagccagcaatttttttttttttttctttcaaggaagatgattatgccactgacattctaaaggcccattttagagccatttctttattcccctagaacaaggactagttactaaaacctag

SEQ ID NO: 38313 - DNA, 2335 bp, Bovine  19866880903939
  misc_feature (1)..(1): n is a, c, g, or t
nggttttattcggatccgtccttattgcatggtccgggcacatctggtggcccttaacatacccttgtgacctgaatgaacacattcactgaacgagctcttgatttccttcccctgctgcccttctgaagggctgacttgtcactagggctcagctgccatctgggcatatttgggcaagctgatgtgttttatttggctcacacacgattaaaaaaattgaaccaacgtttgaaagttaggaggtttcacacaaaaatatgagttcctgcttctcttgaaaaatacgaatccctggcatgaaaacgtctactggagctaagaaatgagggtcccctttagagatgcaagtgcccttccattgaccaaggtaaccagctttttgtttctctttccctgacaccaaggctctagcagcttgtcattcattactgtgattacaatgttattttagagtacaggaaggtctctaaaacttacggctctatcaaaatggggaaatgaaaaataacccacagtgtccatgtgattaaaaaaaaaaaaatacctgcctggctgaagtagccaatagagtttataaactatattctctgctcccaaggtcaagagagtgatttcatcccatagtttttcagtagggctgtgaatcctcatctttggtatctttgctttcttatccgtccaggtttgcagtggcaagtgaagtccatgttcaactgcaagactaacttttctactggcatgtggtggataaaacagccatggaaagaaaccaccagcttcttctgttaatactacatctgcacacacacaaatcatttttggtttgttctagaaatccatatggccaaggcttcagttctactgttgggaactgttcttcaatttttactcatctccctttttagtacacttcagcatatctagatcagagtcagattctatgtgtagagcaatggaagaatgggaagatgaaggtggccttgttcaatgggtagagttgtaggtaagagttgaaggatgcttatctcccctgagacaaatcaaagtttaggctgaagagaagaaacaatttgtcatcacagagctaagggaaggaaaggagataaactagatacaattgtgtaactagtgtggattggcaggtcaacctgaaagtgaatggaaattcagaagatcttcaggtttacttatctgagttattagtttgttgttaataacagagacccaatgaaacaattagggatttactttctctcatttaaaagaatatttataacagtcatccaagattactatggaagttccctagaatccttgcgggtccagttttgtactgcgtttggctctggcagccatcaatgcgtgagctccatcctcaggtcacaagatggctgccggagttccagccatcaagccagcttgctgagtaagaggaaggagaacagaaaggaatctcccagataccccaagccccaaacttgtgcatccctatatataagggaggatagaaatgtattcattcagctgaacacattgcttagggttctggtactaaggaacaaatgatgaataactgtaacaaactatgccaaatctacttaagaaaagtaattatcattcaactgactaagacatgctggtgccgtgctatgactaatccttactagatagtaaaaaacccatactgaataagaaatagtacgttactttgcactatagacaaggaaactgaggctcagagaggttaaataacttgcctaatgccacacagtaatatgcgtgcatgttcaatcacattggactctttgcgaccccatggactgtagcctgcctcctctgtccttgggattctccaggcaagtatactggagtgggttgcaatttcctcctctagtgaatcttcctgacccagggatcaaacatgtgtctcctgcagtgcctgcatcggcaggtgatttatttactactgccaccagggaagcccaagcccatatagtaagtaggtcagcatttcagaaattgctgatttatccctggaaacttatgtgacgtgagatacgttggtaaacgcttagagtttctcatttttcttagtgtggtatgaatcctgcagaccaatatgaaccttctaccatgaactcttctgttctttattattgagatttaaaatcataataaaacagtggttaaaagcctttgagaactttaagaaagtgataaactgtctttcgattttctccattcctccacatttaactaagcagttttcagggccctccaatggacaaagtattttccttgaagctgtgttcccatatgtgtactttgctca

SEQ ID NO: 38314 - DNA, 1164 bp, Bovine  19866880956687
  misc_feature (1)..(1): n is a, c, g, or t
nttaagtgtcatgactgacttatgatcaattcacagattcttttcagaagaaagaggaaaggatatcactgacttttctttctgatgactctagagctattctccacagcaacatatccacctacaccctctcgcccactcatgcctcttacctgcttctcactgtcttcactatataaatgtgtatcactacagatggacctcttccattcaactccaaaaataaatacttactgatcttttatttgtgcaaggctttgaatgatagtctagggcaagataagacttggtccctgcccccaaagcactttcccaatagtgtagaagaccaacatctggaccaattgttccggtagaagacaagccatggtaacagaagacgtgatttgacataaaagaagaatagatggagtgctaggaaagcaccaggaagggagcaattagatggtacttaaaagaatcagagaagattgctcagtggagactgtatttgtgtcttaacctttaaaggcaagcaggatttcgacatgtgggcaaaagcgtggaggaggaagaggagggagaaaagacagattgcagacatgagtaagggctcagtacaagagatttactcatttgagctggtcaggctcctgtgctccaactgcccatcagacttgtacatctgtaatacagtccaggggaaactcaataccttgcctctaagatactggcggcggagtgcagtctcctgtccctccccctcggaatggaacccatccaggttcccacatcactttcttcctgagtccaatccacctcaggaaaagtatcacttttcaagaagggacttagaggctcagataacaaatctctcattggtgagtcatgttcttcttggcaacccaagaacccatggatatttcctttccagcctctttttttcccccagtcatccctaatggaaacattgcctcatgccttcctttgccaaggcctccagcttacctgaagcccagcttccgggatttcttgctcaaactccatttctatctctcataaacaagtcagccaggaagtcttccttgagccacatgggtgctaagcatagaagatgatgctaaaaattgcaagataattttttatttttaccctttccagccttcacagttagaaacggcaata

SEQ ID NO: 38315 - DNA, 1437 bp, Bovine  19866880981010
  misc_feature (1)..(1): n is a, c, g, or t
ntcttacccactaatgaaataagtagcttcgacttcttgaagcctttgaatcttaaagagagtcaggtcaagaaagctaattttgaaaaatgcttacgggccctaatgccctgcactttatttgcttcttttaacaagattatgaaatctcctagctatctctaaacaacacaaaggtcaggtaacaaaccaatgagttccagaaagaaaatcaaagttaaagtggattcactataaatagaatttcttggctgtcagggatttgtgtaacctcaaatctggtttggaacctcaacaggggtttggaattttttggttttttttttttgtttgttgtcagttttccaaccaaagaagcaaaattttgatatatatcactttgatgaaaattaattttggctcctgtatcaccaactagttcatctagtgatctacagactgatagtaaaactgataaaatgactgtgataggctccttgaagaaaatactgtgaagactaaatggagttgttgtttagtcgctaactcatgtctgattcttttgtgaccccattaactgtagcctgccaggttccttggtttgtgagatgtcccaggcaagaatgctagaatgggttgccatttcctcctccagaggatcttcctgacccagggattgatcccacagttcctgcttggcaggtggattctctaccactgagccactagggaagccccgagtaaatgtaggcttggcggttaaaaaaatcagttgaaaaggacctggtgtcagcgtgaaaacagaactactcctgaattctgagagaacaggctatttattcttctgtctttatagagtcataatcattagttggcttgtccataatcacctttctaaataaattatgccgtgtcttctcaaataccttcaatttcctaaaaagcatttgtataaaggacagaaatggtatggacctaacagaagcagaagatattaaaaagaggtggcaagaatacatagaaaaactgtacaaaaaagatcttcatgacccagataatcatgctggtgtgatcactcacactcacctagagccagacatcctggaatgggaagtcaagtgggccttaggaagcatcactacaaacaaagctagtggagctgatggaattccagttgagctctttcaaatcctgaaagatgatgctatggaagtgctgcactcaatctgtcagcaaatttggaaaactcagcagtggccactgcaaaaggtccgttttcattccaatcccaaagaaaggcaatgccaaagaatgctcaaactaccgcacaattgcactcatctcacacgctagtaaagtcatgctcaaaattctccaagccaggcttcagcaatacatgaacagtgaacttctagatgttcaaacaggttttagagaaggcagaggaaccagagatca

SEQ ID NO: 38316 - DNA, 663 bp, Bovine  19866881238586
  misc_feature (1)..(1): n is a, c, g, or t
nctgttatttaatcggtaagtgcaggacttatatgagccatgtgtggatttattccatggatccaggtttgaaatgagacccaagaaagcagaaggcaccacctctagggctccctttacactcacaacttactctgctgtctccttaaaagaaccatcagcattccctgtagtgataactaccaaacctttcctctgccatttgcggtgattaaattttattctgaaacaacttttatgacatttgtaagtaattttgttcttcggctataatttgaataactccgctccagggttataataaagtaattaatatgtcggggcggttttgagcaggattcaatttatcgcctctataaacaataaagtgaaacacgggcaacttggaagaaaacggttaagatgtgttcatttttctcctcacacagaaaggaagacactgacttccctgtacttctgtgccacccctaacacactcaagatgcatggtcacgggcttccccgtggtccactgggtgatcatccactttgtgatggtggggacacccgttggatccctggtccgggaggatcccacatgccgtggggcaactacgctcgtgcgccacaactacagatcgcgcactctagagcctgtgctctgcaacgagagaggccactgca

SEQ ID NO: 38317 - DNA, 1672 bp, Bovine  19866881294340
  misc_feature (1)..(1): n is a, c, g, or t
nctcaactttctccttgagaatggtactggaatttctgggagaaaacgatgagctgaatgttctagaagcaactttttcttgcgtggctctttcttgagcttggtacagatgttagttgggaaagaggacttaccttagaaatgggatctccaagcactcttggaagtgtaagatgttatacttgagttggtcttgcacggctgactttttcagaaggttccaggcacctttgtagtctgtaaaaaacacacatattgtagttgtgagccacctcgagaattacaagtgtaattataaacccagttcttccttttaagtacagtatagtgccatttgtgttcattgtttttatcagcgatcctggtaaattacagaagtactagtttgtgcgataaaagatgaaattcttcagagcttggagattgtctgtgtattataacttattaactttttcccccctttctttaaaaaaccatcactttgcgctctcgtcccacacttcaaagaagtgacaacttatctttgctctttggggagctgagaggtagaaaactcagttgtatttggcagctgctccagtaggactggtgttataaatgaaccctttgttcagcgtaggaccgaactgccagagatagaaggagctagatgcgggtagaagaaacctgactttggtttaaaagtcaccgtcttttctcttctgttgagtcagtgttggttggtcccttttggctggttttcaatcatcagtgtgcttatttgtttgttttctgtgttggccactcggcatatgggattttagttcccagaccaagggtcgaacccatgctccctgcaatggaagcctggggtcttagccctgggactgccagggaagtcccgtcagtgtgctcgtttgacttaactcatttcgtttctttctgttttgggagaagtgtcagggaaggaggctgagccgagattcctcagctacacaggctcccgctgcctaattaagatggtcaagtacataccctgttgggttttagaagctttatccagctttagccaagaaggcacttctaccctggggcaggttttctccgtgctgaggagattagcagtcaagaggctccgagtgggggctgagaatgtacttagagcacagcctttagccctggagggtaattaatgttggacattttttttcttttcctttagaggccgagtgtcaaatatcagacaggggtagagtcagctcacttatgcagacaactgttacttctctgtgatgttagagtgaggggtatttgccctttaaatttcaggccttcttgcttcctgtgactgctcaggtccagaggatgcactgagtccagctgcacactctacctggccgctggaactgtgtgtccgtggcaaggcaggggtgaacagcttgtcttgagtggggtggaaagcctttaatatttgctgtgatttttttttttaaattgtcacatcatgggttactttgagggcctggtgcgataacaacccatggccgtcagaggggtaaatttgtatattttttggccttttaaaaagccttataaaaggtaattttggagggcttgtatagatttggaagactgaaagtggcccataacattgacatttcaccattgactgggggtttatactctgtaaagg

SEQ ID NO: 38318 - DNA, 1266 bp, Bovine  19866881386642
  misc_feature (1)..(1): n is a, c, g, or t
ntctctcttttaggacaaggaaaaaatccttaaaaaagaaaatatgttagaatcatttattcagaccacaaatatttattgagcgtctacttcatttcatggattatctctgtggctcagcggtaaagaatacgcctgcaatgcaggagatgcaagagatgagggtttgatcccgggtcaggaagatcccctggaggagggcatggcaactcactccagtattcttgcctgaagaatcccatggacacaggagcctggctatagggccgccaggagtcggacatgagcacacacacacttcatttcatgtgctgggaaaaagctatagatatgacagtgagatcctcattgggacttaacttgtaacaggaggaggaacaagagaaaaaaaactaattataatggccataatttctttgaatagaataaacaaggaactgagtaagggacactcagaaggggtcctctttagagcaaagacagtctgccaggatggaggagggggacctttgatgtgagaactaagaatggggaagagaggcgaggagagaggggagccaagaggtgagaaaacatgctccagaaatgagaatctgaagcccacccttcactggaaaatgtagaattcagaaatttggttttcttgttggctgtaggctcaaacttctttgcaagcagagaagacgatgatatttgaggtagaatttcagggctgtgaacaggaagttaggcagagatatcaaccaccccgttggcctggatgcttgactgaaatatccagcatttgtcctattcttgaaggatcctctggagaaactcagtccgtttactttggctccgagtccactgttaactggagaggaaatgcatttattagcaggggccaatctgttggactaactccggacaaaccaccctcaacattgggagactctgggtggcccacagccaagtatgagggagatggctgtgagtgagtggggtgggagagtggccgacatgggcttgagtccctgttgtgccatctagttccctgtgtcctggggaaaggaactcatctctctgaacctctgtttcctcttcgattagtggtgagaaaaccaaatacactagcaggctgcttgtgaagatcagaaagaaagtgtgtaaggacgacctggctcagtatttggaactctcaaaatgagagtctaggttgtaacagaagtagtaatagtagcaagcactgtacagtgagagtagcagcagtcatagtaatagtaacaa

SEQ ID NO: 38319 - DNA, 1762 bp, Bovine  19866881391303
  misc_feature (1)..(1): n is a, c, g, or t
nacaagctccacatcttgctgtagacttgggagataagccacagttctggaggcaactgcagagaagagcagaaagcttctcttttgctgattggcttgtgacatttacttggtttatccacagtctccatcatgaaagctctagtcttttcaaaactacagaagtttttccatgtgtctccttaaactcttgaaaaatgaagtccctcagtcatgtctgactctgcgaccccatggactgtagcctaccaggcttctccgtccatgggattttccaggcaagaatactggagtgggttgccatttccttctccaggggatcttcccgacccagggattgaacctgggtctcccgcattgtaggcagatgcttttactctctgagccaccagggaagtctcaaactcttgaaatccaagcaaaatatatgtgatgctttctcaagtgcaggaagaaactggcattttttaatgggaaagtgtgggaagaaggcttttgcaaaatcacgccattccctctttgccaggcccctcttcgattgattgttaaatgtctcctttttgtacttctgtggccctgctcacagttattctgtgtgcctgtaactggggcacaaccagcagtgcttactgctgtcatacgtactatgacagatggaatgtacattgtgatttatggggggttgttcacagagatgaggagatagcttgattctctgccatccacgtgaggtccagggatccctgaaagaagaacgcatctgagggatagaggaaagctcgtaatatttctaaactttgtgatgaattgatctgggacttcttttcttttctctaatcagccagagtcctctagaataaaacagcattggatttccacccagtgatttcggagttagcaaaactcccatgttgaccaagtggactttgatctttgggaagaactgattaaaatctttgaaagagggatcagacgtacagaagacaatccacctgaccacccatgaaattgatcaaaagttagaaaacacacagccatgagcaaacagattggatgtttgttttttattgtcttgattatcgggtttgaaaagagagactgccctcggagacctgactcctcgctaagcactccagctcacctctctgtaaaaggcagatgctcagtgaagcgattcttgagatcttttttggtatgagctaaaattctgttgacacaaacctgataaattttctgaaccccactgtcccttgctcacttaggtgccaaattacctggcacactttccccaaacctaagcccctattccagtctccatcctgccctgtgtcagtgcagaggccccacctgtgctcaagggaatggatcatccctgtcttttctggaagcacgtgtgtccctctcagctttcacagagctgcctctgctccctgggttctgagcagccgactaagggatgaactcggggccgagtctgttgattgagcacggaccacctgcttgtggagatcgagttctctgacccttcttgctggggcagctgtggctttgattgaaaaggtatgcagagctgacttcaaacccagtggcactggtctttgaaaaatgtcctttggcacagtccctgcggcacgtgtttgcttatggatttcgccttttcttagaagtgagcacgaggcttgggctggattgcccgtcgctgaaggcatctactatgatgagtcttctactaatatgtttaaggattataaagaaaacagag

SEQ ID NO: 38320 - DNA, 1984 bp, Bovine  19866881416533
  misc_feature (1)..(1): n is a, c, g, or t
ntccagtcctgtggccactgctgagttttccaaatctggcatattgagtgcagcactttccccagcatcatcttttaggattcgaaagagctcaactggaaatgtcaggtacagggctgacctttttaataggaactttctgtattccaaaaaaatttctctgatgttggttttagcatctttctgtctggtgaattcctgtcatttgttttcttactcacaggatacatagcgctgactgtcaatatttgctcattagatgtatgctttcaggagtttctgaaagattatgagatgagccacagtggatggagacaggccctagagctgctattggtgctgccaccaggatcacattgtcatttgcatgattcctcatatttactgaacactctatatgccagatgctgtgcttcacacctgtaagacaggcattgggttggtcaagaagttcatttgaattttctgttagatgttacagaaaaacctgaatgaactttttggctaacccaatactatatgtttcctctcattttacagatgagaaacagcagagaaagggttcaacttgagtccagctgatattcttaacagaactgctattctactagaggggctggataggaagaaagaaggaatgaacatttgggttataattatgaggttcaggatggatgaaaatgaatgtggaaaacactagagaaatgaatgccattccagaatatgagatttgggattggaaaaaaagggatttgaaacattccatagatgtggaactcaaaagactatggaaactgacagagtataagaaaaagagaggaaatgaaaaggatcccaaatactggtacggcactttatggttggggaaatattgaaaggacaatattggctgtgggtacagaaggggaaatacattcattgctgaatttactgaattttctgtacaaagtggctatttgtgtagaaacagtgaatcattcattcatttattaactcagcacataaagaacacagatctatattaagcattagagatacacaataaaactagctttataaataaaaatacaatagataaaactagtgcttagaaatgcatgggtctgaaagatatagatttggtgtttatttgtttattcattaaaacgtgtattcggggtgttccaaagcatgtgatatacaaaacagaggggatagaggaatttgggaaaacaaacatgatcatcaagggaaatggtaagagaaggtgaaatgccagacttcagggagtgtctattttaagaggtataagcaggaggcagagaaatttgaaaagaagtgatagtaaatgaggaaagagagcagaacaacataaagtcccagaatgtgatgtatgagaaagggtttaggaagaaattcataagagctcaatatggccaaatcccacagctgctgctgctaagtcgcttcagttgtgtccgactctgtgcaaccccatagatggcagcccaccaggctcccccgtccctgggattctccaggcaagaacactggagtgggttgccatttccttctccaatgcatgaaagtgaaaagtgaaagtgaagtcactcagtcgtgtctgactcttagctactccgtggactgcagcctaccaggttcctccgtccatgggattccccaggcaagagtactggagtggggtgccatcaccttgagatgtcaattaatataagaagtatatacagacctgtttttgagggatgagaggtcactgaatgtagggaaagcatgtttgtttattcttttaagtctttcatgagggagacagcaatggccctattacctctattgccttagaagtaatagggccattgggaagatttttaagggtaagtttacaaaaaggagttagtgaaaagggagtggttctagatgtaagggaatcagttttggggaggcaggtattttagtggagtaagatggtatgttacgtgggaaaatg

SEQ ID NO: 38321 - DNA, 1767 bp, Bovine  19866881428896
  misc_feature (1)..(1): n is a, c, g, or t
nctgtgctttgctggttctcatttgatgtttttcccagcatctgagatctcttaaattatctcatcagtgaattggtttctttcaggtcccccagattgttgggtccttgagggcagatacctggtctaagtcattcatatcttattaagaatgcaaatgatgatacattcagatttaggtttatgtctcagcctcacagttttctaaacagaaggcctgcagcaagttacctaattgctgaacctgttttctcaccttcagaaagagatcatcagcttctctggtggtccagtggtaaggaatccccctgcagtacaggaaatatgggttcaagctcttatctgggaagatcccacatactgtggagcattgaagcccatgcaccacaactattgagcctgtgctctagagcccaggaaccacaactactgacccacaagatgcaacttctgaagccagggcaccctacagcccatgccccgcaacaagagtagccactgcaatgaaaagctcaagcaccacagctggagagtagcccctgctctccacaactagagaaaagcctgcaaagcgaagagcacctagcactgccaaaactaaatcaataaaaccttttttaaaatgagagatgatctctcttcaggaatggtgttgagcattaactgaaaacatgtaagagcccatcagaggacttgtcacttgctggtcttttaacagatcaatgttttgtagttctttctttgttttgtgtttgggatattagttgatatttacatctcaacaaagtcaaccatttgggaagattgggtaactaaaggtatttctcttcgctttaaaaatagacaaagttggaaagctgtccttggctttaccacttctgacttgaactattaatttcttttgctgatttcttctgcaaaatggaaaaccacaatacatgagttgggatgatcattaggatgagagagagaaaaactgtttggaaccccatataaaagcgaagccaaattttatagaaatacaaaacgcatttgagatattcagcagttctctcaaggcctgattataggcttgatggccttaatttttctctaatatataattctgtgttatagtactctacaaaaatgctgtagcatatcattaatgctcacaaaatgtcataaaaatacacagagcagaaaacctcccagctagagaaattttacaatctgaagatagaggcagttaactttaatctaggaaactaaagacaaccacaaaaagggtggatatcttggagagaatgttcttactttttcttttgaagtagaggactttatttgaaaactgatgatgtttgactatagaagaaaatctaaaataaactcccaaaagtaatcatagtaaagggaaggagaaatagcagtcaggggaagagatttttgacagaagagaaacctccatggaaatgtagaaacagaacaaagaaataatctgtccacagatagatttttttaagggaaacgtaagtttgttgcaaataaaagacgatcgcagcattatggtcatttgggaagctgtattatattgctcaccaaatccactagaatgcatataatatcagtgcatgattttggagttgaaatcaatctgaactgtgaaaagcctatgatagatattcctagaggtaaagaataaattatatcagtcaatgaattaataaagacttagtgagaagatgctgtatgccaggtctggggacaaacccagggaagtcagccagg

SEQ ID NO: 38322 - DNA, 1739 bp, Bovine  19866881507650
  misc_feature (1)..(1): n is a, c, g, or t
ntcctgaggctctcccgtctgctgtggatagggctgtagacccaagcagtggggagacacctggctcaactcccctcccttgggtggcacgtgatgcactgggcaggtgactggcaggaaggggacccagcagctggtggccgtgtctctgccacattgcaggctgagccccccaagaagcctatgagggtcatcagtgcacgtgccctgtgcggagctctgtatctgagggtgcttggcattcaatagcaaataaaaacaccgtgacaggtagacagaccatggaagaaaagaaagagttttacgtgttagttattttaatgacacttttttccctgccttttctaacagggcctcacattttcattctgcactggtccctgtaaattctgatcttgtctaccacagcatccctagcacccagcccagagcagatattcaacctctgttgagtaaacctctctgcatcccattctgtttgggggagggggtgggtgagaggaggacttccatggagatgctctacggaaaactaaacacaatccttgaggttggtaagtactgcatctgaggtgatcctccctgggctcaggggcagtttctagtattcctatgggcacctgagggggccacgtttcagactgtttgccgggtacctaaacccacagatgtggtgacaaggtaatgacccgattttgtgagccgcttgtggactcagccatattcctcacaatcgcatctcttcacgtggaaacctctggactgacaaaaaatatctcacttgatgaactgattttaactggcactacctgccctgcaagacctcaaagacattttttcccaaacaactaattttatcttcatgccccagcacacctgcagccctggcggggctcagcacccctcccagaggatgcataagcagcaaagtctgttttcctcccttgtgtttaaaggggaagccccccgcctccaacaccgaaggttctgtgggctgaaataacactgcctggcccatctcaccactgcacgcagaatcccagggcccttcctacccacccaagagagagaaaacacggcgcctggttaggattcttgttcctcatatagtatcgtgcacatccataaggttttcagttccacgctcggctcagccgagactgtgagctcctcccatcactccctgcaagatcagttcttgtttcttttggcaggagcacctgtaccctccagagtggcagatgtgggcaaaatcctcatatctgcaccagtggctgcatagaggcgtttctcttcaccggcggttctctagctataaattccaacgtgagcagactcagcaaaaactagggctacagggtgtctcttctttattgctgaatccgcatgaaatcccacttgacgggggaaaggacgaggttatggtgcattcagactaaaatgacctttccagtgaaggtctggttcttcgtcaggcaagctgctgcagaacccaggcctgccttcccgagtaagggatgcaggcagtggctgttgttctccggatccttgaacttgaaaggagtccaagtgacctgacccagcccactgccaaaggaaacagtgtctgaggacccctggccagaggtaagtgcagcacggcagtccttaaatgcataggccccctcttctcctgcccctctcaggctgaaactgtaatatcaggagtcagtaaaaaacctgccaggcaaactttccaa

SEQ ID NO: 38323 - DNA, 837 bp, Bovine  19866881526800
  misc_feature (1)..(1): n is a, c, g, or t
ntagagtgggttgcctttcgttctccgagatctttccgacccagggatcaaacccgtgtctccttttttagctgacgattctttaccagtgagccacctgggaagctccatgtacctggtacctggtgtgcactcagtaaatagaagctgtcgcacttctctgtgcttctgtctgagatatgcttgcgacttgtgcgttgttagtagtggctgtgagagagagaggagtctcaaagagattcaggcgggaaagggttagtgtgcgctaggcccgagggaagggctgccatgctgggcagtggtgtctttgtgggctggctgatccagctcagcgcccacagtcttactgatccagccccccggaagagtgttgagggaacccagatggcagtgggagatttatctttgtcttgtggggatagatgttgggaacaacccttaatgctcattttacattgtgattttagtttcttttgagtcctattataacattatatagtgttgtgtgtgtgtctttgtgagcagcggggcagggaggggagagcagagttggggagtgtgcgttttcccactgtgggttcctgttgttagacttcagggggtagacttcaaagtcatctctctccatctttagaatatagggtttgggggttgtttaattttttaacaaatggaattttgatgtatttgcatttgatgtatttgtattttacaaatttgatgtatttgtacagagaaatgattactgaagtagatgttcttacggcattatggcagggaaatcaccaagatggggatttgggagttttttgggaacatccgaatttacttcctaaa

SEQ ID NO: 38324 - DNA, 1122 bp, Bovine  19866881539176
  misc_feature (1)..(1): n is a, c, g, or t
nagtttggtagtcatcttgaggaaataaagagaagcctcctatagagaagcatgtttaactcttcctgtctcatttcctcatgtgggaaccctgttgaccacccaccatggttgacaacccaccccagccttcttcatgtgaaattcatcatcacagtagagacctggtccttgttgctatcagcacaaaggcagcaagtggcccagagcttactggaatctcatgtaaagtaaataaaataaggtcagtgcctctagctacccgccttcaactttccatttcaaactccacagtggggacacatgttttatggagggtgaaaggggaggaactattacctcttagttctaatatctactgtgagcaaaccctctgcagccttgctactcaaagtgtggtctggggaccagcggcagcattggcttcttgggaatgtgtcagaaatgcacaatctcagactccatcccagccctactcatttagaatctacattttcacaaggtgtctggggaagacttcctacatattaaagtttgagaagtactgcatagcagtgctaagtatttcatttatgcacttcatacatttcaggcacatgtatttatgaccatgaaagtgaagtgttagtcactcaattgtgtctgaatctttgtgaccccatggactgcaacctaccaggctcctctgttcaaggaattctccaagcagaaatactggagtgggttgccatttccttctccaaggacttttccccacccagggatcaagcctgggtctcccacattgcaggcacactctttaccaactgagccatcgaggaagcttgtatttaaatccatgttacttaaatgagaaaacaacccagatcatggtggttaaggagcttggccaaagtcttggctagtttgtgttaggaccaatatttgaatcctgttatgtctgactttgaagcttgcctatcttctactgtctcatgttaccttcatttttttccctaaaggttaggttgcagtgagcagctctcacttcaatgagaagaaacatgagacttgaatttccacaaggagagacttagtgaagcaagaattagaagttccaataatgatggaccaagggaagca

SEQ ID NO: 38325 - DNA, 1032 bp, Bovine  19866881694870
  misc_feature (1)..(1): n is a, c, g, or t
natgaaagaaaccatagtgttggtagatttttattttagagtaacatgctcatagcatcattctgtgtaattccagtgaagctttatgaacaactaatgtgctttagttttgccttattatgatagtgctatctgataatactcatgtagcagtgtccagaattggggccctatttttactttgagacaactttatactctcagtcttaacagaatgacagcttgctaggggatgttaccaactattacttctcttcattgtctacattatagacaattaaatgctcctattttcttgactgcattttttttttttcatttgattcttttactatgactttgaacatcaagacttgcaaacctgaattcttggaagacatgtttaatgtgagtgaagtctagagttgtgttttagaaagactttttttttttttttttacattctaggcaggtcagtatcaaaggagtctcttaaagaatgatgacctagtgtttttttttccccccccacaaatagaacaaggatctttcttgtcaccatgaatttaatactgtttcttgtgttttcctttgcaatctctttgactggattatattcaaggacacaggggcctcttgtcttttaggtccatttaaaagttaattttcaagctttgacattaagctcaagagtttcaacagcaattaatccaaaatacccacatcagaaacatcattaatctttaccagacaggagtggttatgtttgtgactaaacctcagtggactctttggaggtgggatttgccatttgcaaatgttttgaaaggaaagacaaggctttgaagccaagtaggagaaacagttttaaagagttagaaccaaaatccaagagtcactctgtgagtcctggaggaaacagtcatttctgttgtaggtcgtgaaaagggtcacttctggattgaacaccatccaagtgcgaattagggcacctggtcatctttcctccaaatttcagtcctcagcccttctctgccctctccccttggatga

SEQ ID NO: 38326 - DNA, 926 bp, Bovine  19866881850431
  misc_feature (1)..(1): n is a, c, g, or t
ntattttccccttcataaatgcaggaagtatctgcatttccaaggaaaatatttatgtatttttaaagtggattctaagaccaattgaatacacaaattaaaacaaatatatttgcctgctggccaatgcctctctgaagccctcaagttgtgctttacagataaaaacaggctaaatgttttaactctgatgaaagagtttcatttgattctgtcatcttgtttttgatggaatttatgctcctccctgcctcttccattcatttcatcaaatggtgattctgcattagcaaaaacccaacaaggtgcgaggcggaagtggttcagaaactgtaacttgtgtttcagttgtttttgaagaacagtggatggttgggcagcgagcatttgtagggttccatttgcatttgaacacaacactgtagcctggttagttcacagtgtctcacatgtttggagcatcatttttcatttaggaatggccaacctagctttcttttcccattgtaagggagcaagcacgagactgtcatgggaccactgcaaaagaaactcattatctcaaaaccatgtgacatcctcagttccatgattagaataatctaaagaaatcaaagaaaataatgttagtttaatgcttctcataaatatgattaaagtcactggttggtgggggaaaataagcctggatctctgaggtttctatatttgaatggactttcagctttagggctttgagaactagcaccccaagtatcttccctgtagtcgtgttgattaattggttaatgtaaattccaaggagtctcattaattagagtaaagaaatagcagtaggccatgttgagtttaaaattacttatgaaatttaatcattagtaacaacaatacaactcacctttgtaatattttccaaaagccaaata

SEQ ID NO: 38327 - DNA, 831 bp, Bovine  19866881866648
  misc_feature (1)..(1): n is a, c, g, or t
ncgttaattcctttcccaacctacaacaaggactccacccggctgtgactttggggtgctgactggacaagtgacatgttcagtatcctccagaaagcacaagaattgccactgcccccagccccccagctgtcatgatgcaaattatcgccacacctatggtggtcttcaagtgacttctggctgcccccatcccaatggattagctccaaatctctcagagcataaaaaggacccacacctcatggctcgggaaatcaagaaagggctgtggacatgtctgaatttggttgtgggtggggagcatttgcagggcaccacttgctcctgcaaaggggacaagcaggaccctggaaaagcctggctgctgctggcggcaggaagcaaggactggcctcactctcagtgttctctgcctctctctacaaattcccttcttattttgggattactttgattggctaatgagatgtctacagtgagagatttatccattcgaatcataaccacagctgtgcttaccgcttaatagcctttactgccagcaccaaaaatataggctttctccacaataaacactttttataaaaccaataagaccactccagggagggttgttatcatgaaataatcatggccccatgggattctgccagcctggccatgtttcaggcctcataatgctggggtgggggaggggagcatggaagggcagaggtaaggggagattatatcaaaacaaggacaccccctatcgtgcctttctgcttaaagactttaaatacttcggtcgaaaatgtgtgcatgcgagtcatgcggcttaacagctgt

SEQ ID NO: 38328 - DNA, 910 bp, Bovine  19866881929273
  misc_feature (1)..(1): n is a, c, g, or t
naaactaaaatataaactcatttcatgtctcattgaaggtgaatgcaaaacaaaataaaataaaaccctgagcttgatttcttaagagaaaactctactgtcagagccacttcatagacagagctgggaaattcatttgaaattcctcttttgtcccttaggatgaagtatgatgcatgcccgggagcttaatggtttacaagttgggactcccactgtgtctttttttgctggtgattttatgattcttctacacacaacatgatggattcttgagtatcctgagttttgaatccatacttttttttgttgcttgagtgaaacccttcaggcagagctgtgaagatgtgggtcttaaataaaatatttttctactgtgctaataattcacacattctccacatttctcttctatactcagggtcagtgggatacatccatttttcttaattctatcaggcttgtttttctctggcttccagcagctttttatgaaagcacagcatggcttattccagatgctggtctttggggagggaggagggctttggagggggagggggcactttcttcttcttttccctccactctattaatggtggacttttaataatttgaaaactctttgtaagtgacctaatatgaaatactgcattacaaacccccataggagacacaattcaaacaataaaagcaataacacattttcatcctgcttctaagttttaatggagtgtatgttattgagagccaggatacttttttttcccatctgagaagtcatttatttacttgctggattgctaaatctctacagagttgacattcttcttttgaaaaactggatgtttagatttctggttcagaggaaagattgtactatcagacggaaaatgttacatatttcaag

SEQ ID NO: 38329 - DNA, 974 bp, Bovine  19866882158886
  misc_feature (1)..(1): n is a, c, g, or t
nctatcttttttcaagagtaataaaaaattagttaattgaaagtatacagacttaagctctgagaggttagcattccacgccatgggtcagaatgttttcttttagagggagaacccaatacttctttggtggattgtttcattcaaggttccagggatcccagaaaaattgtgcgtgcctcatccttagatgttcaggtcctggatgctgaatgtcctggtttgaggagggaaaggtgaaaacttgcttgctgttcagttctttgtagacggagggggaacacagtggctgttgttatggacacgcggatgctaacaggtttgcttctcaggggcgctggttaaacaacttcttaactggccagagtccagcacgttaatcattaacccgggcctgagcgtctgctgccccgtgtattcagaattagtttatcattacctctaactactgccttttatggttccgaagcgcttctatgaaatcccttatcaccaccaagcctaatcttcattaacttgcaggggggagcgctctgatatttctgagctggaccagagtaagcagtttatggccagttgaagaatttttcatcacaactgcttaaaaaacagagagaaagaaaacaggaaaaaagaaaacaaaactcagctcgctcattgcggtctttggtccatgcttagaagttcatattctcgtgacctacttttccacttaactcttgataactccgggcttctttgttttctttttgactttggagaactaggttagtggggaaagtcagggttccctggcagacaggctgggttgagagcccttggctggcatctcctcagagccccatctcagcgcccctctgcttcctgtgtcagctcagctcctggcagagtccctgcctggaaccagcccttgtagctttcacaaatggtctcagggctccagtcattcccgggggacacacagcatctctaca

SEQ ID NO: 38330 - DNA, 2140 bp, Bovine  19866880385731
  misc_feature (1)..(1): n is a, c, g, or t
nttccctctgattctattcaggaacacaggctctctcaatgacccccaagtgctctggcctgtccacctttgagtgtagatgtgggtataaacggagaaggcaatggcaccccactccagtactcttgcctggaaaatcccatggatggaggagcctggtgggctgcagtccatggggttgctaagagttggacacaactgagcgacttcactttcacttttcactttcatgcattggagaaggaaatggcaacccactccagtgttcttgtctggagaatcccagggacgggggagcctggtgggctgccgtctatggggtcgcacagggtcagacagtgaagtgtcttaagcgactgaagtgacttagcagtgggtataaaatggctaaaaccaattttgatggctgttttgtacacatagtaggtgttcagtgaatactcacgggccggatctaaaggcacgtgtaaatttctaacggaaatgttcccctaattctaggtgaccccaaccagtgtcaaaatatcttgagtttgaaaatgtattctgaaatttagctgaatctattatgtattcgcatgtgttttcaacttaaacattaacaaaaattttttttaataatggtagtgaaaatattatatggtttgtttgaagaagtttgttcttttccagaaacagcattgatcgatttttatattatgagtagtttattcgtgtgtgtgtgtgtgtgtgtgtgcgtgttagtcactcagtcatgtccgactctttgtgaccccatggactgtaacccgccaggcttctctgtccatggaattctccaggcaagaatactggagtgagttgtcatgcccttctccaggggatcttcttgactcagagatcgaacctgagtctcccacactgcagacagattctttaccatctgagccaccggggaagcccctagtttattcataaaaccaaatcaacaagagcatctttatgacataaataagaagaaatgtcaaatgtcccacttagtcacagtagaataatgaaactccagtccaattctcgacacttaccgcgacatctgtgtttactgtaatgaaattctcattcgcatacaggtaaggcatcgtgtgaatcataagccagaggatgtgcgcagtctgagctcaaggcacactcagggacggtgcagcgtcgacatcagagaatgtagcaagtggcatttccctgtggaaaatcttgggttcagtgccagttaagcactttcatccatttttctcaatgataggatagaaagcatgttcattaagtgaacaaggaaaccaagctgggagcagcagataacaccatagagaatggggactgatttgatcatgaccatgaaatttaactaaatggtcagaaggagactgagagtctgcagaggggagagaggccaggctacccgacttaggtggccagtggggcagggacatttacaagtgcaggccctcatctttctgcttttacctggaggctctgcaaacacacggagcccagccatcacctacactaacgcagtcaggagcatgggcaagccaggagacctccaggtacctcccacctgccagccgggtgccctccaggtgatccttactcatgtctctgttttgcaagcctccgttttaggaacttacatgatggatttggattttgacagaaaagggcttagactacatgctgaaaaggacaccacaaagtagttggggaattaaaaaaaaaaaaaagaaacggattacaagttcctagaaattgcaaaattcacacggaacaagctgtccagtgaaagtcactcaatcgtgtccaactctgtgtgacccatggaattctccaggccagaatactgcagtgagtagccattcccttctccaggtcatcttcccaacccagagatcaaacccaggtcttccacactgcaggcagattctttaccagttgagctacaaggaaagcccaagaatactggagtgggtagcctatcccttctccaggggatcttcccaacccaggaatcgaaccagggtctcctgcatagcaggcggattctttaccaactgagctatcagggaagcccactaatatgaggggaagtccaaccaaatgttaattg

SEQ ID NO: 38331 - DNA, 759 bp, Bovine  19866880704778
  misc_feature (1)..(1): n is a, c, g, or t
ngatttttcctgtctaaagattgtcctttcgatagatgcaatatcgctttgtttgttcccaggagtattttcagtttagagaccgtatttggaaatgtaagtcttattacatcaaaatagcattcaatgtaaatgactttcactatcaaagatttcaatagtgggatgaataagaaaatatgcaattcaaatagagttcattctattctatgtgctgagaactctatcatattattttctcccgtgattatttctggtgacaataaaatatatcaatgactttcacgtgattataggagtaagactattatgggcaggaatgcttaaggaaaattaaaaactgcttaattgtagtatcaggtggcactggtagtaaagaatcctcctgccagtgcaggagactcaggagacttgggtttgatccctgggttgaagagattccctgaaggagggtatggcaacccactccagcattcttgcctggagaatcccatggacagaggagcctggcaggctacagtctatggggtcacaaagagtcggacatgactggattgacttagcatgtacgcactgtaattaatgcaaccaattgtctcgtaactagatttcttttctttcttaaataaaaacacaggtgaagtgctctaaaactaaaactttgaccaaaattttttactttatgataaatatagaagcaatagggcctatatttatgcatagtaaaatttatgctttttttctttttatatttgcctt

SEQ ID NO: 38332 - DNA, 1817 bp, Bovine  19866880799039
  misc_feature (1)..(1): n is a, c, g, or t
nattttgcaaatccccagtgaaaaacagacttaggtagcaatgattaatggctgctaaccattcagtgaaagtcaatggaatgtatttgaatgaatcagggtgaaaaacgaaacctgcagagcaatgtgagttgatgtcaccaaaagtggagaaccttgtctcttggggtgatgcaataggaagcacacagtaccacctaagaagtaattttgattaaaaaaaaaaatcctgaatctgatcaagccctcaactctactcctagaaaaggaaacgatcaaggacagaggaacaggttaacaggtagttccagaaatcagtaaaccaaattcggaaatgtagaaaattctacaggacaaatgacccagtttcttcaataagtacatagttgtgaaaaagagaaggacaactgttagattaaaggagacttgggacaatgcaatcaaatgcagtatatggctcttaattgcatcctgatttgaaaaaaacaactacaaatatatgttttcaagataatcagggaaaagtgaatacaagtcaggtactggatactattaatagtaggaattacttgggctttcctggtggctcagacagtaaagaatctgccagcgacgcaggagacctgggtttaatccctgggcaggaagacctcctcaagaaggaaatggcaacccactccagtattcttgtctggacaattccatggtcagaggagcctggcaggctacagtccacggggtcacagagttggacatgactgagactaacacacacacacattggtggatttaactgcacaagtggaagcttgaaatgtgtctccacagttggctgccttgttgaacttctgcatttgcaatgagaaggaaatccttgagctgccacagccaacccctctaaacacagagtccagggtcagacttgtgaagagagccaccccaactaactgttggatgagtgaacaaggaataattcttggaagtacatgctgaaatttgcttgcttcctagcaaagctgtctaatcaaccgaaaactctttaagtaccttccttcatgtttattcttgcttgtgacatcctcaccctcctgtgtggtctgaatgtttgtgcccccgaactcacatgctgatttcccagtccctgcggaatggtactggagcttgtgcccctggcgggtgctcaggtcacaagggagaagcccctgtgaatggaatcagtgctcttataaaggagccttggagcaaaaaggggctcatccatgagccaggaagcaggctctcaccaataagagcaccttgatcttagagttcccagcctccacgaccgtgaggctgtcgaagagcaatccaggttacagcagtttgttttagcagccccaacggactgatgcctcttctgtgcacaggagacttttcagctagaaaaatcttaccatccttcatgtacagatcacaccccttatcaccctcctgaaagccattttatcaccagaagccagagaaaatacctttgactgcatatgttgtttctccaataaaattaatctttatgcattatctcatttgaccatgagaccgattctacgtggataagcggatagataacattagctccattttgtaaataatgagaaaattagcgctcacagaagttgagtcactaaatcttattggcgtaaccaacgaggggcacagagagagagttcagtccagaaccggagccttcgttctgcgctcttgcacacgttttggagtctgagccaaatctcgaattccgaaaggcttggtctaaacaagcgatttctcctcatgttcag

SEQ ID NO: 38333 - DNA, 773 bp, Bovine  19866880812012
  misc_feature (1)..(1): n is a, c, g, or t
ngttaatccacatttgcttttaggcaactgtgaaccagatgttttttggggaaaaaaaaaaagctgaagccttttatttttgtgtgtgtttgtgtgtgttttgcttggggcataaaaatcatttttcccccttcagtgaggtcgtttccaattacaattatgtttgtgctacaaacacttaaaaaattaacggatgtatttggttattagtttatctttcagcatgctggtattaatgcagtcattatgttaagtatatttttttaaaaagctagtcaagtgacaagctcaatatcatcaaaagtccagggaatttggccccttctctgcctccccaaacacaaagctggggaaaccgcccagggacgcacatgtgcacggcatgtggggcctgccgggtccccagacactgacatacctgcccagccccctgggctgctgcagtgagaaccacaagcctcgatgtgggagggccacccatccccaggcacccagacatccccgcctgcacccgctgtgcatctgtgggagagccatggaaatgcaagagcaatcctgagcatcccctgctctctgtaaggagtatcttatacaaccaaaaccagcaaccacactgctctgtgtcctctgggtcctcagtgaccccaccccgggaaagcaattctacagaattacctgtgtgggggaaaggctttatcagcttgatggcctcgtgtttgctctactgccagggagaccgccatccccattggtctggggctgaaggagtctca

SEQ ID NO: 38334 - DNA, 1429 bp, Bovine  19866880815329
  misc_feature (1)..(1): n is a, c, g, or t
ngcttggtgttcctgctggtgttcctggtggagtaggtgagcttctgatccggcctatcactgccactttctagctctgccacgtgaccatgcacttggttctcctgatggtacaaaagggatcaaaatagtagattgtaggtcagtcactatacaggtcgggtgaggtgatgcctggaggggtggccaaagcagagcgtcacccccgcccacagtgaccgtcacaggctgagaaacccgggggcagaggtgacccgggccagagtgggttctcatagatgcccgtcatgattcatctttccaggtgggtgatgtcaccacccgtgaaagaggtgctggggacacatcatccttgtgtaaatgtgagcccactggcgcctccagaccagagcatggccacttctgccaccatccgcggctgcgtcgggtttaacgagtctgcacactccttggccatgtatttcttgctctccaggaactttcagcctacaagactctctccctcagtttcctgtaactgcactggagtgtccagtctgctctaaccatcctgtgagagcaatgtgctggtggtcataagctacaaagtgcttcatcagcccgaattattactttggtaaattatttttacatttttaatccaaaggagtgaaataaaccagcataagcagaaaaacataaaacgcaagaattgctttatgggcccctggctgagatttctgaacttgaacattatatgcgggaaacattagatgcagtaattatgtaatgatgcttcactgtataactattatctttcttattgtcacttctcccttcagatgagggctggagggattaaccctctcccttctgtcctcagaagagctgtctacagtgcatagagacatccagagtttacagggcctgagagagaagatcttgcaggtcctagaagcacttctaaacttgatcctttgtttcttggtatctcaaaatatcaggaattaaaagaatggcaggaaggcatcaaattaaaatagattcaggttaatgcaattagtgaggatgcatttagcttacaggcaggtggcgctagtggtaaaagaaccagcctgtcaatgcaggagacataagatgcgcaggttcaatccctgggtcgggaagatcccctggaggagggcgtggcaacccactccagtgttcttccctggagaatctcatggacagaggggcctggtgggctacagtccaccgggccgcagagagtcagacacgactgagcgacttcacgcacatgcatttacaatggggtaggataactttgttgtgcacagttcttgggctggttctccttcctgtagcatctgaaatcagccgtggtgcacagcgcagctcagagcaggcatgcggtccaaggggctgagccaagaaatgcagaaaaggcttc

SEQ ID NO: 38335 - DNA, 3723 bp, Bovine  19866880984052
  misc_feature (1)..(1): n is a, c, g, or t
nttaatttaattaattgtgtttgattaaatgaggtcctttcattagcccacttagccacgaaccatatatacatcatcataatccttttacaagccccaccgcccagacagagacctgacatcagagcatattcaaatcaccagcctcagccatgcagacctccctgcataattaacaactcaacgagctgcagtcacttaagctgaaaagaaaactgttcacatcaacctctctgatactgtttaaattgaagatgtcacgggtaaaacaaaggtgaacagacaatggtaattaaaaattaaaaaggacaaggggagtttgcaagtgatggcagcgcatggaacgagggctgggcccgcttcagagaagcaccacggagcgtgtgggtgtgcggtcccttctgggagggtgtggtgtggacggcctgcaggacagagaagtcggacacactttacagggagggtggacgagggctgagctcggaagccagaagtgactctatcagggacaaatggaattgtcgcctgagctgcccaaagccgccctttgtgggatcccgcagtgatcgagaggcgcgaggcgtcctgacggggccctgacgtttgctcccctgcgtgtctccactgcggccaacatcaggtgtcacactgggccccacacaggagcctgccacgccgctgccacccggcccacctctgagggccagttccttaaatggattttcctccagacgacatgacagagccttgacataaaatatagggatgtctgctggaagttattcatcccttcctggttcgatgcacaaccttccagggatggttttaattcacactgatcctcgagtataacaaatagtgtgctgtgtttcagagacagaaccggggccgcattgcggagagaaggtccagacgcaaaatggaaggggcaggcggtgttgccaggctgtggccacaggagcacacgaagggcagtgtgagagcaattaggcagaggagccaaaagaccacgaataaaagtacccttgaggcacagcgggtgatgtccgcgtttgcagctacttgtcgggattgctccttgcgttctggacgtttggatacagatgtcacagcaagatacatagagcctggacttaggggcatttgtaccatctttagataactacctggcagtcaccaacataaataatagtacatcaaaggcaaatacaaacattccaaatggatcgatccacatccacagatatattccattaacgatgtctgagaaatataaccacaactggacaaagaagcaggatagatatggctcagaaagtaacatgtcttggcagcaagaaaggacttgctccttttcatgccagctgaggagggcagtctctttctagggagataaactgaagcagatataagctcacgcacccacggggcacggccacattggagatgctgagagtggtaacgctgtccatgctggtgacttagctccaccgccatgctgatacagcccgcccgggagtagggacaggccctctgcaggcacggggaccggcgcccgccggcagtgcaggcgcggctcgggctctgaatgtcccgctccggccccaccggccatgtggctccaggctgccacggcgcctgccttcggcctcagtgacaggaggcttcacttccgtgccggggctgattcaggctctaggtcagcttagaacagagcttgggacaccttcagcccctaagtcacgttcacttatattgttatcatttgttgcatctccttttatctcccggcacagatgacggcagcctcggtgaccctaggctgagcgacgtcaggcgtgtcgtgtgtgacccgtgacgcaggagacgaccacccctctcccttcttagcatctgcgcagcccgccctctgcctccggccgcctcccagctcctgggtctggaccctgggatgcacttctcttcctgggcccggtggatcccaggaccgtcctcctcccggcaggtggctggagtgtgagcctgaggctgcagacacaccacccagcacccctgcttcctgctggctcccatcccggtggctgggtagccacttggaggggccacgtggacacacccaccaaggccaccgcaggtggggtggcgtctgcagcttaaagggaggacaaggaggtgaaggtgaaggttcccggaccacccccccagaggcccactgttatcagattagaaaagtcagcgagcatttagcatctagaaccctcccaatcaccccggaattctgagaagtgtttgtttccacatcttttttttccccttatgccaggtccatagcaagttttaaaacacgaattcaaatacattcttttcaatgaaagaataaaatgatgaataaatgaatgaatcaaggagtaaaaacatccatctttagtggttctgttccaccggatacacaatgtcatagaaccttgagaattattctgaaatctcattcataacacatccctcccaataacaattttgttcagctgccgaaatcttaggagtgtaatacatctttcaagaagataattcaaatacagggtattgctttttatttattttttaaaataaactgtgattgaaatagaccttaaggatttagggaaactaatttgagagtttatgttcaatttattaaaacaataaaaatcatcaaaaatttaatttaaaattaaagagactagagttctttttacccagaaacaatccagtgcttttttaggagttccttcccaacacttcaccccatcaattgctttctggtggaaatgacttactgcgatctagcagccatggtgatttttcagaatctaaaatctgaggaattctcacatggccctaaaagcagttcctttcctgcttgcccagcatgacgaataatttaaaatgaggacgtgaaatcgatgactattagcttggagtctgcagatcacacgtggggaaagaaaactaataaaaaatatgtatgacgtctggaaagtttcacttctgttgacaaaagcacacgggcgcgtctgtgtgtgagagcctgaaacatcctccccagcaataataagcccaggtttcctccccagcagggggaacagagacagctgtagagaaacaaagggtatatgaattccaaataaaattgctgaattaagtcttaaaatgaagattctcaaatgcagaatacaggaggtgttctaggggagaaaaagctcgatctgatcttatgtcataaggcacagcttaaataaataggtaatgcgaatgaacccgcagttctgtgcgggaagcagcaataaagggggtgcctccaggggcagatgagcgcgtgcgcgagcaaaaatgtgagtgcagcacccgcgctcttctgtggagctgctgcgcatttcaggtggaaaacactcccaggtccttccaagctccagcggtcacgaatgcgggtgtggatccctgagctgactcggtgccccagaaaggcagaggcaaactggcggtggctcaggtgcccaagtagcttgggtttagctacttccataagatgcatggatcgccagttggcaccatcacaaggggccacctggaccctgtgggagcctcagagggttcccctggcatgagctaatagagggcaaagccaccttcaacactcgggcccatctcgggggccgcatcttctgtccaacaccagcaatactg

SEQ ID NO: 38336 - DNA, 736 bp, Bovine  19866881039624
  misc_feature (1)..(1): n is a, c, g, or t
nctgctaaaaaggttaacatctccgagtcgccggttaagttcgcgctgcagcctgatgatatacttaacagcagcaaagcgcccagcaaatttcctgcaacattagctgcatttaaaagtataatcttatgcagctttttcttgctcaacaacgtttcagaataatgggggaacgcgtctatttacaagggagaaaataacacacagtatttaacactccgtgcgatgcttacaattcctttaggtgcaaacccgtaaaaacagacaaggggcttgaaatactctccacaagcagaaaagcgttggaacctgggggaccataaccaagtcgcaggttatcaaaggctgaggtttgtctaataagtgggtgcagggcgcacgcgtgtttttagacgtaattactatatgcagaagggaaaggcttagcccttctaactagcacgtaatgagcccctcatcaatagggtcctttataaggcttctctctgtgcagcagggcagaactgactgctgggctgcgtgttttgtgtctggggctttcagtctttctccaatgaaaatacatcattccgagccactcttccaatacatcacagtcattttcggcacttgagttgtttttctctccatttttcttacaaaatcaagcatcattacagcaggtttcaagtgcacgttagtgtctgcaatctacccctgcttttctttaatatttcatcattaaatagcaaaataa

SEQ ID NO: 38337 - DNA, 789 bp, Bovine  19866881328194
  misc_feature (1)..(1): n is a, c, g, or t
ngtgaaggcactgatgaggggctggcactggggaccccgatgtgtgtccccaggataggacagggaacccaggggaggtgtgatgggggttcaccccatggtggactaccagaggagaagaggggctcctgtgagcaggggtggagggggagcctggtcaggctgcgggcaggggaagcgtgtgtgaaacacactgtgctgagcgggctccctcctggcacaccttctcactgtgcatctgaggggcttggctgcaaagggagacatttctggaattccttaagcagcagcctggctggtggggctctgagaggctttgagtcactcgggttctgctgagctaacaaaactaatgagatgacaccaaccttccccacgccaccggggtcaggcttcgcacctggagctgtcacttctgatttgccgtgaaaaagttatagataagagagagacaaacaaacaaggtaaaagaagtgagaaaaaaattactcaataaaaagcaacgataaagcagtaaaaataagcagctacggcgagagcagaaatgcccaactggacaaaaccatcaccgaaggccaggctgagtcctccgcctagatgagaaacaaataaagcaataaagcatgtctgcagggtcaggcctgaggtccgactcggggcctgggaccagggcgggtcatgggtgaaggtcctggcggtggcggtccctcccgctgaccgcagccggggcgccggccccgacctccgcacgaggaccgcggcgggcagagcgcgggcgggccgtggggc

SEQ ID NO: 38338 - DNA, 1075 bp, Bovine  19866881388000
  misc_feature (1)..(1): n is a, c, g, or t
nggaaaaaatgtacaacatcttgagcaaaaaaaaacccattattttttcttgaattttcacagggtatcaatcttaagtatttaatagatagatggcatacatataaatgtagacatatgtatatatttgtaattagattctgtaatgtgtgtacttaagacaaacgtatttgctctccttatctgcgtcctattttatcttttagttggaggctgtttaataataagaaaagtaaacaaataaaaaagcgaataaataaagtgtttttcagggtcagctatttttctcatcttagtgcatgcagtactgtacatttggtagtacttatttaatgcttctaattaagtggaatgcttttgctaattctgaatcttcatttactgtaattgtgggcctaaacactcccagtaggattccttccgagatggttttaaattcactgtgattgtgcacatgggtggctgcaggaataacctgtttaattcctcagccgtgcaggctcggcacaaagttgagccatttccataagtgcgccttctctctctggaggcagttctttgacacatcaaatgaacgctctctttccccagtaaacacgaaacacttgcacttcagtcccctcgtcgctgcacgtctatgcggaaacttctgcggagacccactagcgttgctctggtcgcatccctcttaccgccagaggtgagaaggaagcgagctgtctgaccttcctggtgccctgcgccccctggcggggaagtgtgctggtcccccaagtgtttctccaggactcacagtcacttcctctttacacaactcctgaggctctgccaatccagagctaaagatacttcgtaattaaaaagttaattttcaataaagttttgtgacccattttgcaattctcctctagctttggagagttctcggtctacgagttgaccaaccactctctactgggcgggaaagaactccttagtaggagtgatccagcctgtgagccggccaagctcaacctggtgtgagaaagatttcctctatgcaggacacgaattagacagaagtagagacagtcaa

SEQ ID NO: 38339 - DNA, 1410 bp, Bovine  19866881585911
  misc_feature (1)..(1): n is a, c, g, or t
ngtgaaattcacgtagctatgaatatggattaaaatttatagctggaagataattcactggtcacatgcctctaattagcaggcataattttgaagagctaaaagctgcctcttcaaacacagcttgtattttgttccactaaaacaggatggtggtttcccttgaatggaacgcgggcagctccccgccaagtttggaggaaggctatggaggtgtctgtccagtgtggtcatgtgggctctatcacttcattattttccacgggtcagagccagcagtgcacttacagctgcaatcctgagaggtacaggaaagtatccctcacgtaatgcgtgctgcgaactgagttacatggaggatgagcaccctctccttcacatgatgggcgctgtgaactgactcacatggaggatgagcatcctggaccatctccactgcagacatacataaggtttcctgatgtcctggaccatgtccaccactcctccaagcaaacagttccacggtcctgattcagacacaaagtagcccctctcttggctcatttggacatgaatctttgaggctgtagcatgctgattttatcgctgcctctattattattattatttgtttaaagtagtcagcatcccacggtgcatctttccttttgctcacggtaagcaaggctaattaaaaaatgcccaacattcaatgtaaaatatttgccaatgcaaaacaaataaagctaatcaacctcttcccctgtgagcccacattattagtgcaaagcagatgcattaaagcaaggatcagagtcagatagaggagaagatgagccaagtggctccagagccctgacacccagtgaggtggtccctggggagctgggccctacaggaggccgagcatcacaggcccagaatccaccaactggacagagatgggagcctcggggggtggtcacaggcacatttgtatcaaagttcctgaaaactcaccctaggaaaacgtatctgccaccgttcctaatatccaaaaagtgcactcaagctattaagagagagaaacccaagccatttaaaactcgtacctaaattgttatcgaaccacttcctccagcaattctcaaaatcctcccagaggagcacttattaatatttctatcatcttaggtattgtaggtcatcaagaaataaatatcatttatttttattctttatttgctatttctgtttctccgtttattcttttacttaaatctcttaaataaaatatctagtttttcctttcaaaatagttttattaatgcaatctcccctactaatgttagagagaaatttctgtgtctctaggctgccaggcatggttccatctttccatgaccatagaactaaagaacacactctcatttttttacatttttgtag

SEQ ID NO: 38340 - DNA, 2557 bp, Bovine  19866880407736
  misc_feature (1)..(1): n is a, c, g, or t
nctgttccattttatcagattctccccccggataagtagcaaactagtaagaaggcaaaatcaggtcaaaacttagacatcaagaatatcctttcccttgttcttaccacctcttaaatatggagacactaaactattcccctcaattctacccacctggaaatccattgactagatgaacagatctctttcttttccctcctccttgtccttatttcacagccagagtgttgggctgaatctctgaggtcttctccagtgcttagtctctgtgaattcccacttaacctctcccttcttcaggcaagaatgccacccactatcacagacagccagtagcctgtcttcatggagtgtgtacataggctaagccttgggctttttaatcctagatgaatggctaccagaaaaagatcaaagatgctactgaaaaaatgatggctcttgttgctgagctgtccatgaaacaagctatggccattgaactccaaaaggaagtcaaggagaaggaagagttcatcttcacttgcaattccaggatggaaaagggtcttcccctcaataaagagattgagagagaatggttgaaagtacttcgagatgaagaaatgtatgccatggccatcgctgaaaagtctcgggtaagctatggcttctttattttctacattgcatttgtaaagtgtgccaggaagggctgtttcagggattgtcaatctcccaaaatacatgaaatttttctactccacagcacacagagtcccaacaactcattagagagaagttttgctctttttaagctattacgtaggtagtcaaaagtacaacagtgcaaagcgtcagaatattccctggagaacatttggcaagcaccaagtcccacgccagggcctcccactagcatggcaatgtccatgctggcattggttttatcttagatctctggtctctgtctttgcagccctgctcagaccataccttactcttcgatgtccatctgctgtggccaccacagcatattgtaaggcctcaagcataagctcatcacaggtttctgaagactctacatttggtgcaaaagcgatgactccagcgccacccttcttctcccaccagtgacctaactctatcactgaccccacttaggagctgtgtgtccagttctttttcctactcccatgatttttcaataatcttagagtggaattaggcatctctttcaaaagagacctacaacttactcttgactatggggcagacatccccagaagatcactattcactctctaagccaagaaaaaagtgtattccaaacacatactaagaattcttgaaaatagggtctgacttatcattctcacactcactgcctaggattgtatttttgaagacattcagatttttacctgtggtgtcccagctgtcatttacctgtctccattttcccaacccaccccccccccccaagttctttttaatgctataagagattcctgttttccagaaacacaggcagaatcttgaggctcaaagcaagctgctgaccactttcctctaattctattttactcttcctttgtaccatttgctcaccaatgacctaccaaaggaaatagattatcctgcctttgtcacagacatggaaataactagtgcttaatgtaagatactaagtttggaacatggtgactttaggccctatcaaccagtttatggtagaccctataccccaggaacagagtgatgcttgagcaacatggctcattctagtgagaggaaatgtgtgtgggggtgtgtgtgtttggtgactctaccctcacacccttttgtcccttggaatattggccagcatagccaacgggtgctcagacccagctgtgtctgatgggccctggggatgaagtgacttaaccactgttttcaaaaactgaaaaggataaatcattctttgcaggagttcttggaagctgaaactcgccagctgcccaatggtgtttacacaactgcggagcagcgtccaaatgcctacatcccagaggcagaggccactcttcctctgccaaaaccgtatggcgctctggctcctttcaaacccagtgaacctggggctaacataagacacataaggaaacctgttataaagccaattgaaatctgaacatgtgaaccaacccaggcttctgaaggagatacttcaaccaggcttcttcacatccacagctggaaaatgtcagcaaacagccctaaattacaaacaaacacagtatccacaattacccaacagacgacaacatatacttccttccattcatactcatcgatttttctttttcactccatctcttgattacatttcagaaatatatagtagtctgagtgttatacaaatgcaataaaaataaataccttttcaacaaagtacagaaattggcagtggtctttattacagaaagaaaaggagatcctgctcaatatattcattttaaagagaaagaaaaaatggtttaaaagaaaaatatcccaagtatcacaggggcataactcactttgttaagta

SEQ ID NO: 38341 - DNA, 1645 bp, Bovine  19866880421216
  misc_feature (1)..(1): n is a, c, g, or t
ntgttggcaaagttacagctcatgtgaaatttaagctggtttgccacatagtctcatccagctcagtgtattctgtgctaaacaccagtgatttcactttaaaagaagatgtttaccaagtatgcagatttggtctccaactgctatgaaataagataaatctcatataaaagtatttcttttctttctaatgactattggagcatggggagtctcacagccttatacaaaaatttgaactagtttctaaaacacagatcaaggagtgttaaaatatgattatacctatgacatttctattctgtaaataattcacataaatcctcctgctcaacatgactaggtgctataattcctaaacttatgaagtaaacatcattatgtgatttatatttcatattctggataaaatgaggaaaatcaagggtggggtgatgaagccagaaagagaagagactcagaaaaggagactaggaaagtagggggaggaacagtgaacaggaaggacagtggcaagagaagactgaaacaataaagaaaaataacgtggcaaagccaatcctctagcccccgaatctgtttgggggtatctaggaggcaacaacaaaagcactacccttgaggcagtcacctggtacaatatatcacttccctggaaaagatgaataattacaatattagaaagaataatcagtctggaatattactaaattctaacaaattcacaaatctagtgctaattgaagcagacaaggagacacagaaatggaaacccacattcttcctggtcttaagtatatgtgacattgaaacctcagaaaattcacataccacagactttttcttaagtttcctgaggatctgatgtattccaagagattaagcattagacacaaaaattaatatataaaatctattatattgctacataccagtaatagtacatataatgtttttaaatgtgccatttatgagagcaacaaaaaactaataatagcccaggagtaaatctagtaaattttcatggagaaaattctaaaacttgttaagagtcataaaaaggctctaaataaataacaggctatatactttgttcacaattgggaagatttaatatcgtaaagatgcaacttctcccctagctgatctatagattcaatgtaactcaaattaaaaaatccaacagactttttggtgaaatctgacagggtgattccaaaatctaaatgtaagaacaaggagcataaaatagccaagaggaccccaacagagactgaggtgaggagacgtaccaattaccaagacttaacagaaagatagttactaaggtgtcttcaccttatattgaccaatggaacaaaatttaaaacccagaaaagaagactcacatgcatacggaaacatgatgtttaaaggaagtggttttgctgtcagtgagaaaaggtagggctatctggttagtgaccgtagaactactagctattaacagagaaaaacaatgcagttgacaaaagaatattttaacacatgtaagctatagataataacaaaataaaaccatgtaacgaccacccagcttaaaagtaacagatatcaagactacttctaaaggctgccagtgttcccctattcctatatcacatta

SEQ ID NO: 38342 - DNA, 1648 bp, Bovine  19866880569179
  misc_feature (1)..(1): n is a, c, g, or t
nagtgggcagagggagactactgtaccttctgctgtgcccaggctgttggaaaataaatctggtggtttccagtccccagccacagcacacagacccaacatctgtgcattcgttttcactaactgctgtttcccaatttaaaacccgatcgtcttcttccttgttggcaaaggtgccttggaatttgtgtcgctgagtcagcaagcctttcagatttgcccggtttttgttgtttgcgttttctatcaagatgggaatccacacaagtcattcctcctaaggatctggtatcttcatcaataaggcacggtttgtgccagctctccacagagaaaaggtgagagccacagggatttcacgtcgctgcctttccaatctggttttcagtagagaaagtgcagactgggaagggggaaatttgaggtccccaggatgaaagtgagccctggaagtggattgttgattgcctcctgtctcagataaattcaggtggcttcttgccaacagcttctcctgtttaaccagtcttagaagctactttctgttttcacacatgcgttatgagacgaaggacacgagtcaggatttctgcatcgaaaattttaatttccttggtcacttgaacctttactgggtgcttccttttggtcagccccttttgcttggtgctgagcgtgcagtgaccagccataaaaactctgtcttccaggagctcatcattcagtgggaaaggtaaagaaaccatagattgcaacaaagcattgtcggtgtgatacatatagaggagtgggtaatcacaggcagagcccaccccacccccacccttgcccagaagggaaggtccagaaggctttgagaacgtgagagccaaagtgaattgtgaagaaggagtaggacccaggaagtatgggacgaagccaggcagaggagtcagtaaatgcaaagttgtgaagagacccggtgtgtctgggtcactgtaagtgtgactccagtgtggctggggcatcgggatgggtacagggctgagtgtgggggcttttgcgtgtcatgtcaagacttgggggattttagcggagaattccaggaagggccttgctaaatgagcaccctggctagaaagcatggaatgggttggattggatcattctcctcgtgactgtttccttacatcacgccagcttctagtacagggaggtagacagggaagcttgtgctctggctgttcctgggcttgtcaaagagatagaatggccggagagaactgtagaggacagatgcaatgctgtagaagttgatgagaggggattttcttgcaagagggcacatcacggcatcctggaggtgtttaactggttggccaagtgggtggggttccaggtaaagttgaagcacagagttggggaaaccggatatatatggggtatcgggtcatcacttaaactctgtggaaggagctggggagggggaagagtacacgagagaggggtactgaagggagtgtgccaccaggtagtgttagggagggaccaggctggtggactttcaccgtgagccacggaatgtgaacattgtttctagacctcgaagggaggtgtggagagagaggggcaagactgtactccaggaagctccgcctcatccctgtct

SEQ ID NO: 38343 - DNA, 2193 bp, Bovine  19866880690108
  misc_feature (1)..(1): n is a, c, g, or t
ntaatttcatggctgcatttaccatctgcagtgattttggagcccaagaaagtaaaatcagtcactgctcccacttttttccccttctatttgccatgaagtgatgggaacagatgtcttgacttagtttctgaatgttgagttttaagccagcttttttcactctcctctttaagcttcatcaagaagctctttagttcctcttcagtttctgtattagagtggtattatctgcatatctcggagaaggcaatggcaccccactccagcactcttgcctgggaaatctcatggacagaggagcctggaaggctgcagtccatggggtcgctgagggttggatacgactgagcaacttcactttcacttttcactttcatgcgttggagaaagaaatggcaacccactccagtggtcttacctggagaatcccaggaacggagaagcctggtgggctgccgtctatggggttgcacagagtcggacatgactgaagtgacttagcggcagcagcacctgcatatctgaggttgttgatatttctcctggcaatcttgattccagtttgtaatcatctagctgagcatttcacacgaatactctgcatagaagttagataagcagggtgacaatatacagccttgtactcctttcacaattttgaaccagtgtgttgttccatgtccagttctaactgtcatttcttgacccacatacaggtttatcaggagacaggtaaagtggtctgttatccctacctctttaagaattttcctcagtttgttgtgatccacacagtcaaagactttagtatagtcaatgaagcagaagtagatgtttttctgaaattttcttgctttttctatgacaatttgatctctggttcctctgcccattctaaacccagcttgtatatctggaagttctagtttcatgtactgctaaagcctggcttggaggattttgaggattcccttgctagcatgagaagtgagtgcagttgtatggtagtttgaacattctttggcattgcccttcttcaagactggaatgaaaactgaccttttccagtcctgtggccattgctgagttttccaaatttgctgacatattgagtgcaatactttaacagcatcatcttttgggattttaaatagcatagcttcttttactctacttgtttcttaccattttctttttttactccttttttactcttcactatagttttagaattatgatagtgcagtaaatataggtggtataactctatgagtatcccttaaacacacgtgaagaaaaatactgctatttttgatgctggaggaaggcactgggaagaatggtttcagagtcctgtgtttatcctggaaaatagattttcattggaagaagggaatatttgaagtttttttttctttgttagtcatatttcaattatttattattcctgtcccaagccttttaaactcttggcagaaaaaccactgaaatctcacagataggtttgccaaactggcctgaaaaataacagtaattacttttttccatggattattttagtgttatttggttcaaaacttggctttgtgtggtctgataaatattgtgatgtttaggttgaaaatgcgtagtcagtacatttaagtcattttttttttttttttttacattttttaacttttagaagaatcattatttttcttccatgtttcccaggaagtacaggggtttgtttttttagttgtgctgtagtagattaagttagagtggaagaagagagtttgtatagatgcctaaagctatttattttgtagttgcgcataaatctctgactgggagtgtgatactgagaaaaattgtgcacgacaataataatattattaaataaccttgtggatatctaaccatgttttagaacattattaatacatttcctttctggattacccctaatgtgtaaagctttctttttctctcttttgcaggtaatataacattacgaagcaagatgggtaacatcacagtaggtatgtgctaagtggttgttagtaaattttgtattctttttaaaatagctatatttgcggtattttattagagtacataaaatctacaatttagccgatgaacctaatagtatcctgatataccagtcagatataggcagacccactatagaactgaggatga

SEQ ID NO: 38344 - DNA, 2188 bp, Bovine  19866880725163
  misc_feature (1)..(1): n is a, c, g, or t
nctttctgtattacataaagggtctacatacatggcagtcctcatgataagcattttgttctcttatgtctatagggatgtaaccccttcagttcagttcagttcagtcactcagtcgtgtacgactctttgcaaccccatgaatcgcagtatgccaggcctccctgtccatcaccaactcccggagttcactgagactcacgtccatcaagtcagtgatgccatccagccatctcatcctctgtcatccccttctcctcctacccccaatccctcctatcatcagagtcttttccaatgagtcaactctttgcatgaggtggccaaagtattgaagtttcagctttagcatcagtctttccaaaatacacccaggactgatctccttcagaatggactggttggatctccttgcagtccaagggactctcaagagtcttctccaacaccacagttcaaaagcatcaactcttcagtgctcagctttcttcacagtccaactctcacatccatacatgaccactggaaaaacaatagccttgactaaatggacctttgttgacaaagtaatatctctgctttttaatatgctgtctaggttggtcataactttccttccaaggagtaagaatcttttattttcatggctgcaatcaccatccgcagtgatttgaggaattaaaaggaaactcaagatcaatctctcatacaagatacaaaaatatattttgtttcctcattggttatatgaagatttttaagtctctggaaatttagaaaaatgacagcaaaattaggtgccacaccccatggatctcttggatcctccatgatccccttttggtgtgggatacatagtaaagagatttttgttgataaggtattgacagatggacatcccaagactcccatggaatattccagtttcataaaattctaatctgagaatccctggataccccattgaagacaggctattagtacatcaagtgattatatgttctgtagtcttataaagagtggacctttggatatttctgttgatccagaacccctgtaaggacccacatagtggatctttcatggtaggtccatgctggagggattcctagtctaaatcgcttcatctatgctagtgtgaagtacttgcaagatgtaacaaagaacctaccaactgtcattctagctttaaccaaaatcaggcaattcttgatctctctgtggattgctgaaatcaggcttttgtttaaagttctttccatgagatacacaatgaacctttaaggagtattaagataaacagtatttattgttgacatttcaagtagtttaaaaagtgaaagtttaatttttatcacgaaatcatacactccctaaagaaccatttaataagtcagaaactacaaatatgttaaattaataggtgtaatatcaacaaagggatctcaacattacaaataataattattaaatttacttaactccgtttgataaaaatagaaacataaagggtttctttatttaataataaactctattaagggaaaggaaaatgtgcttttggaatctgatccagatacagtaaatgcagatcccttttgaatatactttgcataaaaaaaagaaaagaagtttgaatatgttgtgagcattgactgatgaaagcacttttcacataggccttataaaaacatatcttactactttaaaattccaacatatattggtgttcatttgttcagatctgaaaaacaagtgggcataatgtgtcagttttatgttgaaagtggatatgggatagaaggttctgactgccatcatcagtagatgatcctaggagtcaggacaggcttagcatgagaaagtccacaatggtttcctagcaagagggagaatcaaggtcagagggtgggaattttgtgcaagttgaggacaggaagtcagctcttcaagtttttggtcatttgatggctgactccttgaaaccctctcccctggtctttgtgacactgtactcttctgattctgatattttacaatccttttggttcctgtggtttcaaattgacatccatttccattctgtgttgtttgtaatacttagatattcaactgtatattaggtatttctactttgcatcttgtcactctattcaaaacagaaatattactgctacactctccccaa

SEQ ID NO: 38345 - DNA, 1696 bp, Bovine  19866880799838
  misc_feature (1)..(1): n is a, c, g, or t
ntggaagcagggttcttgcctggagatcccagggacgggggagcctggtgggctgccgtctatggggtcacacagagttggacacgactgaagtgacttagcagtagcagcagcagagtaacttagcagcagcagcagcagagtaaccaatggaggcagtttttatcctttcagacaagacagaatattttagggtggtgtattctgccttccttcaatgctgtatgcctcagcatagttgaaatatagtcttggcatttaaactcatcatgaggtcagagtctaatttaggaaatctagccttacattataaagtggcaaattatggcaatttctcaggtaatttaaagtaacaatcactttctcttccacacttcaggaaaatattaaatagcaaataaatccagttatgcattgggtcaatgcaattaaatgcaattaaatccagggctcagaataaattctagaaggaacactgtttctatattactcacagtgactatagaaaacaatttttagtgttgaaacacctttgtactgtaggcgtgcaaaactatgtttgctaacctgaactggcaatagtcttaaaatagaagcaaaagctattgctaaaaataatcgaataaaacaaggatataagtaatttatgtttccaaacatctcatttgtaaaacttacccatcatactctagatctcccttcttctgcttttcttgagattctaatctttctaactcatcattttatttcctacatcacattaacacttcactaactctggaatttaacccaaaatccaacttttgcttttccatcccaaactcatgaaggctatatgatggatgcttgataaaactaaatctctctccctctccctctctctctctcaaagtaaacatgtaaaactactgtttctgcaattatcatcaaacacttttctctctgctcccagagcagggactgacatgttaggacatcctatgaaaatatgttgtgaatgttttatgaaggtgcttttacttaaccaggaagtccggaaggaggagaatgacctaacctgccacattttctttatgagaacatcttcctggtgatctatagcttcatgaagtagtcatggagtttcaaatttgcccttgaatcctgggtcaagcaatgccatcaacacatattctttcttgtcacacatttcaatgaacttgtagtcaagtcaatatcattactttgagtttgatttgtgagtattccacaaaaatgtatttatgctcattaataataaagaacagagaaggcaatggcaccccactccagtactcttgcctggaaaatcccatggacggaggagcctggtgggctgcagtccatggggtcgctaagagccggatacgactgagtgacttcactttcacttttcactttcatacattggagaaggaaatggcaacccactccagtgttcttgcctggagaatcccagggacgggggaacctggtgggctgctgtctatggggtcgcacagagtccgacacgactgaagcgacttagcagcataataaagaaggagaaggggatggcagagaatgagatggttggatggcatcactgacttgatggtcatgagtttgagaagctccaggagttggtgatggacagagaaacctggtgtgctacagtccgtgtagtcacaaagagttg

SEQ ID NO: 38346 - DNA, 1622 bp, Bovine  19866880842798
  misc_feature (1)..(1): n is a, c, g, or t
nagaaatgcatatttccccaatttcctcaaaataaattgcttaaacttgagtcatcttccccacacaagaatagtgtttttgatgttaaaatatcatgttgattatgacaaataccaatattcagaaaaaaatatgcaaaatacccgataaatcagagcaaacttcagcctgtattcctgattaaaaaggaaaaatcaagatacaaaatcaggataattggtgagctcaatccctgcactggagctggcagtgggaaacatttagaaaggcaaagagcaggttcactgagaacccaggaatcatcctgcaatctctcttccaaactctttacagaaagaaactacgtggattgtctgcagacaaggcaaagggaggggcaagtgttgcttatatatgtgtatatacaactttcaatgtctagtgaggtatcagaaacacttctcaaggattaaaaaaaaataatcccttggtctcttaggataatagtatgattcagttggcttactgctgaatagcaaagaaaaggtaaacagaatgaactgtttcctctatcatacttataataggaaaatgggtaattactgaaaaatcctttaaggtagattttgcagacatctaaagagaatttctgtgagttatttttcatcctgcatatgactcaaaactcctggaatgtaatgtgtcaatattttgcaaagtattttttttttctttccagattataaggatgctgggactttctcaaaagtacacttaaaaggttttaactaagataagaaactcctttataagaatcttgctaagaaaatccaatttccttgcaaaagcacacctattttcaaatcactataatattaagagaaaaaaaaagtcttcaacaagtgcagattacaaatgatatatgcttattccattaactcaggggttctcaaggctggttgtgtcagaatcatcagggggaaattttgaaagaacatggatgcccaaatcctgcccccaaatattctgatttttttgagctggtaaaggtcctgctctctcctgtgtgtgtttttaagttcgctttgttactccaatgggcagccagaactgagaaccactgaagtacatatttacaatatacattaaacaatatttattagacagcacaattataaccagcttacaatgtaatcattatatacagatttgaaggaaataataaaaattatgccttcatgggtctattagggagcaatgattgcagtcttaaataattctgcagttaagcacatggttctcatctctatgacatttgcattagataaatttggcaatactggaaatccagacactggcatctcaccacacactataaacccgctagcccttcctcttcagattagctgctcatggtttagacacacccttttaaaagacttattcaataacctctttgcttattcattctgactattctcccacagttcatcattggaaagtccaggaggaagtttagcaatttcaaatgaggaaatgtggtttagttttacagttagttaaatcagagttcatgaagaaaaatgtagcattttgatagttacttgcataaaagtaaatctattataaaaaaaaataagta

SEQ ID NO: 38347 - DNA, 1068 bp, Bovine  19866880924336
  misc_feature (1)..(1): n is a, c, g, or t
ntgcttttcaaccttgtccgtatgactcaaatcaaaattgatgagaaggagcaaaaatccaaggatttcctgaaagctcaggtaactgcatttttgtaaccattcattaattaccacaacagtccagggtagcctcatgttaatacaatgggcattagaaaactatgactttaagccccctgcaagttcagtgactacacagcttccctaaacaaaactcaaccatgtaatgaaaaacagtcccaggattcagctggcaatagtcaacaatctagaggaaaaaagaattagattaatgacaatgagcagagatttgaacagatgacaatttcagtaagaataaggtgagtacctccaggggaaatggctgacaggctcaaaggcacaggtgtctgtgattcaccaccatcccacagtccatcatgatctacccagaacaactcaggagccgcagcatcagaccactctccttcccaagttcatcgagtcggcatcatttaaaccactgtgaggacagttacctttagtaactgtttctccctatgcctttcctgggctcctgaccaagggccagagctgacccagtgcaacatccccaaacaaaatcaacaatgaaacaatagcaaaacaatctttctatgataggtaaaatcctaacattacaatcatttattccacgtaaggattgtgtccagagaccctcttttaaaaattattatggcgtttccctggtggtctagtggtaaagaatccacctgccaatgcaggagacatgggttccattcctggtccaggaagatcccacatgcctcggagcaactaaccccgagtgctgcaaccactgaggactacacacttagagccggtgctccacaacaagagcagccaccacaataagaagcctgagcaccacagggaggagtggctcccactcgctgcagctagagaaagcccacacacagcaacgaagacccaccaccccaaaagctaaaataagtatacaactcttcttaaaaatgatatgacactactaaagtagaatacctaaatataccatggacccagatg

SEQ ID NO: 38348 - DNA, 2421 bp, Bovine  19866880985392
  misc_feature (1)..(1): n is a, c, g, or t
ntcatactcttttagtgatttaaaggtcactaaacaggatccttctgaagttgacactgatcttttaaagaagctgaaatgtgtctttggatgctccacacgcatgaacctgtgcatcttcagtagcatttttttcgcccacagaggcccaatgatatcttgctttccatggcctctcctactgcagagagctagctgctgagaagcacgtactggacttaggaaaatgagacatggtattgtgaaatccatgtaacaatatatagacttgtgatttggatgagctgataattcctacagcaggtcagaagatggagagctccacatagacttgaataatcaaggaaggtttcaaggaagagttgagaagccagtgaggaagactttgatttttcttctggaaagtagagttaattcttcctggacagattggagtccagcaagtatcttggtccctgactatttctctgccactgatgcccaggagcaggctgctctaaatgttgctcccaagtgtaggcaaatctgtacatgtcactgacagggactagagaagcttatacagtttctacagagatatgatgagagcaaactcaactcctctgtaaactaaaggctcctgacaaattttcctggattcaggtctcaggcattttaagttttttccaatgttttaaattacaaacaatactacagtgaatgatactcatttttgaactctgcataactgttttttgacattttctcaattctccacaaacccagccctccagtttcaggagggaattacgtgtgctttgtgaaagaggtaataaggtgaggcattggtagcagagcttcctggctgcctgctgctgctgctaagtcgcttcagtcgtgtccgactctgtgcgatcccatagacggcagcccactaggctcctctgtccctgggattctccaggcaagaatactggagtgtgttgccatttccttctgccttttccttcctggctgcctagccaatatctgtcctccactttgacattactaacagaaccccagttttgttcagagctgcggtgtatccaaaaatcttcaaactccttcaaagttgggggtgatgataagagccagggtgggccaataaaatgtaactggaggggctcctggaaaggtgactgttttagaaagacagtgtcagccaggtcagctgccatatgcattttgctctctgcccttcctcacttctgtatgatcttatgcccagaggcttaatggccattttgtaacccttggagaaaaaacatgcatattatagatgacagacgagaaagctcagaggctctggactttccattatgtgaaactgcttggtgtgtgcctatctttgaatttttttattatttgaatgaagcaacccatatttacttaagccactgtaactgagtgtctattacttcttgaagccaaattaaaaacctgattgatacatctcttccaaaggaaatcttcctaaggtaatctggggaataggctagagttaagctgaagtttccactaatggagaagagaaaaactgatcaagtatcaaagttctaataccgaggtaaagtaatagaccattattttcgagccggcaagctgtatatatagtatgttttgtaagcttattcattttagttatttatttgatttttatagagtagcatttgatatatttttaaaaactgtatgtttattgtaacaaaaaaatgaaaaaagtaggtaaagtaagaaattaaacatcttcactccccacttccacattcagatgctactcatcaggaggcagcattaatagtttggtgtctgtttttcctaacatttttaatacatgaacaaacatttactttcatgaaattaagaaattaggcatattctgttgttgtaaacatcccagttactttgtatcagtgaacttcagtttctttaaggctctgttgtttttctaaaatatttcaaattttcatgaggtctgtggaattctgggagagtctctacagtcaaaggcctaagagaatcaaacagttgtccctagggggaaacaaattttgaagaatagcctgaccccttcttgcttatcttttatcttttctgtttttagaatgcttgcaagtctgaaatgttcaggctgggagtgactggcctgacccactcctattttcaagtactgccagtcagtgtaggaccacggctgggctaattataagtcataagttcaaagaggaagttagtctctccctgaaactgaactagaacaaaagcataggcttttcttgaaatcagggaaggaaaaggacttttattttcatttctaatgctatatgagtgttattttatggacttaataaatagctagaagtagtccaatataaatagcatttctttactaaaatacta

SEQ ID NO: 38349 - DNA, 1950 bp, Bovine  19866881018516
  misc_feature (1)..(1): n is a, c, g, or t
ntcctgggggaaagtcctcaactcacctgatctacttccaggatgcatagctcagcccataattactcagacttctgtagactgttaggtcacatttaagtaccagaaatattaaaatccatgaataaagcatacaatccaatacctgaatgtttgaatcctaacaaaaactctttaaagggaaagataagagaatttttataattaaatgggtattataatgtgttatacttaaactgaaagttagatcctcagaatcttttgttatgtacttatatgaaccaattagtcactttatagatttcttgaaatactataacttcaatggtaaccaatggatagcaattgctcatggtaattataaaacagcctattctgggatttcctcagaaaagggtggaatattcagaaattaacacagtttgccaagaagtctgtttttttatgatatttgaagacatagtttttagttttgaaaaaagaagagaaaaccatataatgtcaccaagtataattttaaaactttttcacttgataccaactttgatacccaagcaaagtaaaataaaaatacatgaaaaaaagtttaaaaagtagattttaacaaacacttcaccaaacacagctgtttctagttcactaagtcagtgattacaaaatattttaatgtgcttgctggcaaacatgaagagcctcatttcatggaaatgccacatttccagttatccttgataggttgtaaaatttaaggactggtaactatttctacatatttcttaatcaggaaaagtaggtaagatactgcccatatctcttaaaatatgtgagatgcacctgaatccatgtcacagcagtgtattttactccaaatattgcaaactagcagtcccagatggtgctaggggtaaaaattccacctgctaattcaggaaacctaagagactcaggttccgtccctgggttgggaagatcccctggagaaggaaatggcaatccactccagtattcttgtcggagaatcccatggacagaggagccaggtgggctacagttcatagggttgcatagagtcagacatgcctgaagcaacttagcacacagcagtcaaaagtacaaatctgcagatatttttagtatgtacagtttttaaaattagaaaattagctggtaccatctaaaaacttgtagattttgccataaagactgaatttccagcttctcttgaaaaaactttagatttgatgaccctggattcatattctaacattataataatcaattggcatttagcagagactgactttcagaagtaataaaagaggtttcccccttttaaaaggagcccagtctaccctaccctttcaatgtatgtacaatgtactaacacctaggctgtttcacttgttacctttacagacctgtagtagtaggcatttaacattggaatgctgctttgtttcatgctttattaatacacatacacaaacacacataactatatcagaagtttaaaacttaatgctttaaaatttctgagattttcttactgtttttccattttagtttctgataattttatgaaaagattaaataaataaaaaaaagcccaggtccagatggcttcacagctgaattctaccaaaaatttagagaacagctaacacctatcctgctcaaactcttccaaaaaattgcagaggaaggtaaacttccaaactcattctatgaggccaccatcaccctaataccaaaacctgacaaagatcccacaaaaaaagaaaactacaggccaatatcactgatgaacatagatgcaaaaatccttaacaaaattctagcaatcagaatccaacaacacattaaaaagatcatacaccatgaccaagtgggctttatcccaaggatgcaaggattcttcaatatccgcaaatcaatcaatgtaatacacca

SEQ ID NO: 38350 - DNA, 1812 bp, Bovine  19866881024083
  misc_feature (1)..(1): n is a, c, g, or t
ncccacccctctgtctgctgcccctgctgggcctaccgagtacttgcccctctggctgtgtgtgtgcttcttggcacagaccacatagaatgcttaaccattttctcctcttaggaaaccacagtaatatttacatctgtgagtctgaggggaggcagaagggaaacacatgcttttggcatttaaactgataaatttaaatacaggtgaggtcagaaggttctggaactgtatttcctcccactgttgttcctgccatggcaggaaaacattcccgggttgaaggaaagatgagaaacatgagcgaaagggttaaacaggcactgcttgtttttgtggaggatattagctctctgagtcagaaatgctgtgaaattaagaaatcccactgcaaggtcttcagagcctctaactctgtggacttcctggccccgagagccttggccagctctgtgctgtttacatacagtaaacactcatatctctagcatgatcctcccaccaaggggtgtctgatgcctttcgggacctcatcatcttgctttgtaacgtcttctcaccttcacaggcttaccgaagcaaaggcaagaatagaaaacaaagcatattttccatggctagatctctctggggaatatctctgaacatttagtttggtttctgaacatgtttttttttcccccttatactcctagggaattgaaatttttgggcaagacattttcagagtacatgcctataacctttagcttcatattaaaatatcacttagggttggcatgcacatactcagttttgaagagtaacagatgaactccatttaaaaaaaaaaagagttcggcaacatcagtgcacaaattgctttccacagagttgcgtttaagggagtatttattcaaaattcagaagcatacctcataggaaatggcctttctccaagatcattaactataaagatgacatcttttagactaactagctggaatacagcttgtaaaattatgaatagatataagataaatttatttattgctgagagctataggttcctctctctctttttccatatttttaattactgacttaaatttttttagtgtggaaggtacagagattcctatataccccctgtccccacacatgcacgacctctctcattatcaacagcccccaccagaatggtccatcttctacaatggatgaacccacactaacacatcataatcattgaagtccatagataacatcagggttcatgcttggtgttggtcattctgtgagtttggacaaatgtttaaggagatatctctcattgtagtatatacagagtattttcactgccctaaaaatcctcctctacatatttttttaatttgcaaaaatagcttacaggtcagaagatctgtcgactttgggatcatcctgttagttctaatataatttcccggaaccatgtaaagcgactgcttcagaactacaacaaacaggtgagtctgtgtggagcggagccctgctatatgtttttttggagcttctttgtccattttatgaatggcctttcttggtgctgaagtatggacagcaatttatagttcttaccactttaagttcatgcttttttggagaatcaactgactttacagctgtttcccttttagccctggagttctgtaatggacaagtcgtcattcagtgtagaatttctgcctctgaactacttcattcacatcctgacagacatcgagtcctccaatccaggtaagtcactcctgtttctcagaatttgcctgttttccctgaacatccatcagt

SEQ ID NO: 38351 - DNA, 1688 bp, Bovine  19866881162794
  misc_feature (1)..(1): n is a, c, g, or t
ncttctctgtataaacttaggatactgaaattaacaatacaatttaaaaatagccatttcatataaaatgatacatatagaatacaacagagtatttattatgctcacttgattctcacaatcttcttcaggaaaaacaaaaaaatcaccatccctatgttgtgaataatgaaagagtctcagtcaagttaactgggaggtttgctgctgctactgtcgcttcagtcgtgtccaactctgtgtgaccccatagacggcagcccaccaggttcccccatccctgggattctccaggcaagaacactggagtgggttgccatttccttctctaatgcatgaagtttaggacttgtcaaattatctttcctgtgtttcatttacctctatcaacatcattgtcatcaacactacaacagagttagctatgccagacaccgtattaagtactttatctatattatgttttaactcatttaatcctcatgacaaccatatgagttaacaccgttattattattccattttccagaaaaccaaaatacatagaggttaaataactaatccgaaagtaaagagcttagttagtggctgtgccaggattcaaacccaagtacactgatgctcaattttgtgctcttaaccaattcagtatgctacctctcaaatatccaaaacatttccatgaaagctgtatattaaaagttaatatattttataagcattttttatataaagccccacaaacttagaaatatgtattaaaaattaacattatgcataatataaactaaaagaaatatcaaaataaatttgttagcacaacacaaaactcagttaggcaggaaacaaacaaacaaaaaaaaacagaaagtaggaataaacgaatattcaatagaccatgaaagttgacagaaaagataaatgatgagtggaaacagtggccaaaatattaaaaatagtaaataattatgatgatttaaatctttgatagttacatctgaacatcagtgtgtactattctacaactgcagttgtccaatttcccttttgtacctccaagaccacaatcagagaggtgaagctaaatgccatctcaaaacaactgccacataaagccaggcagtgtctttcaacactttttaaaaagatacatttaaatgtttcggtttaaacagtctcccacaggttctaaggaaaaggctatgaaaaataaaaaggtataataattagtgtgataacctgccttgtttaattatgccaacaataatctacatataggattccagttcctctctaccaatcatctgaggatatagttgagtatggaactgaacaaatttatgacgaaagagccatgcaaattatctaagtgtaaaataaaagatggcttgtgtgctcagtcatgactgactctttgcaaccccatggactgtaacttgcgatgctcctctgtccatggaattttccaggtgaaatactggagtgggttgccagtttgtattccaggggatcttcctgacccaggaattgaatctgcgtttctttcgtctcctgtattgccagtggattctttactgctcagccaccacagaagccccaaaagatggcttgtgcctgtgtgctaagtcacttcagtcgtgtctgactctctgcgaccccactgattgcagaccaccaggctctcctgg

SEQ ID NO: 38352 - DNA, 698 bp, Bovine  19866880477457
  misc_feature (1)..(1): n is a, c, g, or t
naaaattgatgcagtagctccagggcaaggtcaaagatacataactattatttgataatccctggaggattttcaccttgaaacaaaatggaaaattggttcagtttttggatagagcatcactcagggtaatcagaactggaactaaaaaaccaaagtggcagaaaacacaggaaagttactgcttggcatggatcaacaatttgggcctgggaaggcagggagtggatttgcctttctaattaggtttgacttgggctaatattgaagtgagcttttgttgccggaggagacaccagctgggaggaactccaggaacgtgctgggtggcagagtgaagtcagcctgatattacacattttctctgggtgatccataaatagaaggttcacacatggacacatgagaccagtctataaacttagctctgacgcagaatgtccagagaagttagactcttgagtcactctggataacagtttaaacccagactcggctactggcttgccgtgtggcctaacacaaaatttcagcttttctgaggctcatttttctctcaatctagaaagtgcagatggataagatacacctcaagaggttgttgtgaaggataaaaagcaagtcagctaaaagattatattaacttttattacagaaaccttggaataacaccaaatttcattacaccatgtactgat

SEQ ID NO: 38353 - DNA, 1430 bp, Bovine  19866880541695
  misc_feature (1)..(1): n is a, c, g, or t
nttgctgctagcattcagacattgttctgtaggagttgttcctatttagatgaatttttgatgaatctgtaggaaggaaggtgatctccctgtcttagtcacccatcatcttcttcatttccatcagatttttagaatttttaacaactagaatggtttggtctttgttatttttgcttaattctattacttaaaatttttacagaaattatttttgcttcttcattctgtttggacatctttgaaggacttatacaggctgtctagaagtccacacagtagaaaggtgttattgatgtagctacttaaagggagagaggaggtaatgcaggataagaagaaaggagcttttcttttgcagaccaagatcctggaagttaagaaaacatgagtcccctatggacagatatggaggttgatgacggtggaggcagtgattaagcccattttctcctatccactttacttgattcctttctagtggttcataaactgggagaaagccaatggaaaccaaggaggacaaaaatgatacttagagctcagcgaaggacacagagcaacttttgttctatgtcaaaagcttaggagggtctatttctaagtggtcatgaattctgcttactaatgaatgtggagtttcattttcccagggacaatgaatagcactccgcattgggaacctgatttcaggccagtgttgaataattgctgggttgctgaaagcatccaagtagaatctctccctccacttcactgcttggctcctctctcctcccagctacttcaagctcttataaacagcattcattttcaattacaagctaagaaatgtgattgtgaagccaaggtgcaaggttcctggagagggactgctagggaggctgtttcctcacatctcattttagtttgtaacttgctggtggggttgagtaatcactgaagaacagatcagaatgcacctgctgtaagaagagaaacagtgatgggatgtcactcagagaataggttgtgaaagatgtgatgtccttgctcactctggcactcctcacttgctctgatgaagaaagttaccatttgtgatctactgtctggaggggatgatatgacaaagacctgagagtgaccttttgacaagcagccagtcaggagctgaggctctctgcctaacaggctggggtgaactgagtcctaccaacaatattctcaatgagattgaagagaatctttctctgtcctgcaggtttgcaaggactgcagtcccagaagacactgactatagcttcacacggagaaggcaatggcaacccactccagtactcttgcctggaaaaatcccatggaccgaggagcctggtaggctggagtccatggggttgctaaaagtctggcatgactgagcgagttcactttcacttttcacattcata

SEQ ID NO: 38354 - DNA, 1788 bp, Bovine  19866880639157
  misc_feature (1)..(1): n is a, c, g, or t
ncctggaaagctccatattttctttaaatcagtaaaaataaaactgacagctgactcggtggaacagaaaacagaagcctgaagtctgtggagtgataagtgccatgttaaaagaaaataactgcctgacattgaccatcaacagatcctactgcagaaaattattaataaaattcctcagagagcaagaaagtgattccagataggggcatagagatacaagagtaggaagaacaatagcaaagcaaacacatgagtgaaaactcattgtgtaaaacaattgcaatacataagacagaattgtaaacaaacagaatcaaaacacatggcagcaaaagcacacacgttggaacaggcaaggggaaatgggattaatttgtttaaagttcctgtattgcctggaaagcagtcctaattcatattagatattaacaaatcaaggccatatgctatgattttgaaggtaaacactaaaagaatagtaaaaaaaataaaaagcttgctagctaaagtggagagcagatgaaattaaaaaaaaatccatgagtgagcaagaaaagagagaaaaataaagagatgagtgaagcacatagaaagatgataaatttaagctcaaatatatatgcaattacactcattttgaaataagtttctaaaagacaattatgaacagactgaatgaaaataatagagccacatttatgaggtttacaagagaaataccttaaatagaaggatagaaaggtttgaaaggaaaaggaaaaactcccgtccatggtatttatttaagagaaatgaaaacacatgttcacataaagacttgcacaaggattcatagataccttgtttgtaatagccccagactgaaatggtgcagatgcccaccaatatctcaatatacaaaagagctatgtatgcataaggcatgtgaaagtgttagtcctcagtcctgtctgactcttcactaccccatggactataatcatacttctcagcaaaaaccagggataaccaataaatgaatgaatctccaaaaaattatgttaaagaaaccagacataaaaaatgaagaaaaaaatcaaaatatgataatttcaaaacactcaataaaattcaacatccattcatgatacttttattatactaagactaatgggaaacatctctaatctgataaagaatatctataataacctacttaaatgagatataatgaaagcttgccctctgtaatgctgagcaagacaaaggaatttacttttctctttaacattgtattaaaaatcctagacatgatgtttggaaaaaaacagcacaattctgtaaagcaattatccttcaattaaaaaataaaagtcatagacagtttaaaaaaagtgagaaaataaatgtaatagaatcagaaaataataaatgaagtacttattaattacagatgtcttgattacctatgtacatacaaaagaataactattataataaattaatgagctttagattcaatgtcaatatgcaaaaatgagttgtactttcatataatagcaaccaatcagaaaatgaagtacaaaatgttatattattcatgatatttgtaacaagatcaagtactaggtgtataactaagacgagtaaaaatcctatacagaatatcatgtgttttttgctatgttttgttttcagttggtagaaaatgaaggagacactaataaagaagggatataccactggattggaatatttaatatcataatggcacaaactgatgtatagactcagtgcaatctcaat

SEQ ID NO: 38355 - DNA, 1898 bp, Bovine  19866880726019
  misc_feature (1)..(1): n is a, c, g, or t
nctttataatgcccataaggcttcacttggagacattctggaagctgtaagttcataaataatgtctcttccacttggtcagacttgcagtgccagtggaagacagatgatcctcggctgtacatggtatccctgcaagctaacacgttacttcgtagtcttgggttgcccatcccctggagtgttttgatgcgatcagttgtcagtttcaggtctgttgtttctctcagcagaagcccagccagtggaagatgacagcccccaaagccctgcctgtgttaggggagctatcgaagtcggataatgacataagcgagtcggtgttcatctggggaacctcagacaaagcagcccagagaaaaaccatctctgtcgatgaaggtttgtttcacttgcaacaggaaaagcagcagcagcagcatccggagccggtactcaggctggggagaggcaaagggaagctgaagctgccacatgtgagtagcattttgcgctttctctgcagctgggaaaggaacgatggggagggggcttggctgtgaggtgggcgtgcatgtgtgcgttggggctctctgtatggctgagggtgggagatggtttacacaattaacaagtcccttggggatctgctctcctctgccaaaggaggtgcaagagtgggctcacacgcacttgcattttctccgctgatcataacacacgtaagcagcaggtggggattgttttcttttggttttcattttttctttcctcttctccattcttgagagtgggttacacagcagaaagcgcagcctgaaagaggattcctgactggaaggactcttttctttcccaagaggttttctttcccaagtttctttagcaggtgtgcagatctccattcctttgcccctgagctgctctttggtaggggtgtttactccctgctaaccacaaagcagccagggtgacttttgcatctttctcagccagagttgtctgcaataaacagcaccagatctgacacaatttaacctctcaggggtactgttcaaagagtttagtgagcaaagccctgggatgggaaacatgggatgtacttcatgcttctgctcagcaggtctctcaaggctgacagcatggatcttgaactttgggaaagttttttgtttgcttgtttagccaagctctgacatttactgtgaacatgggatcgagtgatgctgaaaaggggcaggagagaatgctgttgctttaaagccctcgtacagcaggttgttgcagcatcaggaactggttaatgtctttgggttactgttactgatgctaaataatgtgtggagccaaagcacacctgggcatgatgtattctggttatgggaggacacaggtgcttgtgtgcagtttgttttctcatccctgcttccttctttctctctttagaaggtttgatgtggctgcgcctgtcatgctgagtgtttgtatgtttgagtatctgcagtaaatacatacaagttcatcctccctaggatgggggagggggaaggagggacacagcatcgcctatcctaaacacaggctttgagcagctgtgcatgatgaagggagaagagtcagagacgcttcacactggggcttggtcgggaggagagcagtcagtgatgcttgagtgaagaactgagtgccctagcactggagggccagggcccagctcctgagttgccgtggggtgttggtggtgaacgaaccatgggatgagtttcttggggagtcctctcacccaggccacgctttctgacctttcccacactttggctccccgaggaaaaagacaaggtgactcaaagctggggattaacggcttagaggggctcgagtggccatcccagtggagagggtccactagggggacatca

SEQ ID NO: 38356 - DNA, 1464 bp, Bovine  19866880730909
  misc_feature (1)..(1): n is a, c, g, or t
ncattttatctactactgcgggcaggaatccctcaaaagaaatggagtagccatcatggtcaacaaaagagtccataatgcagtatttggatgcaatctcaaaatgacagaatgatctctgttcgtttccaaggcaaaccattcaatatcacagtagtccaagtctatgccccaaccagtaacgctgaagaagctggagttgaacggttctatgaagacctaaaagaccttttagaactaacacccaaaaaagatgtccttttcattataggggactagaatgcaaaagtaagaagtcaagaaacatctgaagtaacaggcaaatttggccttggaatacggagtgaagcagagcaaagactaatagagttttgccaagaaaatgcactggtcatagcaaacaccctcttccaacaacacaagagaagactctacacatgaacatcaccagatggtcagcccccattagctgctggcaaatgcaaccgtgtgagccacttcccactggtcattgccattcacaggaattctgtgctgatttctttctttctttctttctttctttctttttttagttactctgtcttctgagatttcaaagctccgcactgaccagaccacttagagggtttcctattgtggaaacttctttcactactgcatccccagaatgggtctctgtccctaaatcctttgtttccctttttgtctttatattttgttctacctcatttccaagagattggtttgcttttctgggtatctgggatcctcccccagtgtttagaagttgttttgtggaaattgctccacatacagatgatcttttgatgtatttgtggggaaggaagtggtctccctgtcctcttcctccaccgtcttggaatgcctccccccaccactgttgttccataaattgtttaaccaatctcctgttgtgtgcctatgtgtacatatatatacaaaagcattattgcagaaatatatatatatatatatatatatatttatatatatatacacacacacacacatatatatatgagccctcattaaatattttctgcccatcagttcctaaaaataggatttcttgtgcattttaaactgttgaaaaatctgacaaaaatacgcagaatgtcaaatgttggaatgggaggacaaaaaccattgaaggtgggaaaagtcacataaataaatatatggaggagcataagtcacattcctttgtttctccaaagatgtttcagaattttgaccctttgtgtgagctcaaatgacaaattccagctcatgccaagtgagcacaagctatttgttagtctctttatcctcctcctgtccttccagtgagaagtctccagaggttaaacactctcattagtaatctcaccagtagaacccctggaaatcaatgtttgctgcccttggtttttatcttaaggctcttcatcacacacagac

SEQ ID NO: 38357 - DNA, 1996 bp, Bovine  19866880772433
  misc_feature (1)..(1): n is a, c, g, or t
ncaagtgttagaacactataattcagtgctttaaaaaagagtgtaaaatgtttgtactatctcaagaaactcttaagtaacataggtaattttaaaatttcctttattctgaatcagttttaacagtcactttcttcagttgtaaatcactgtttaatcaactgcagaattctagactttaatcagttctactaatttttatttatttattctagatttagctcttaattggaggaaaattgctttacaatgttgtgttggtttctgctgtacaacaacacaaatagttctacccgatctttaaagtcaatatcctttctattatactcctctgttcctcaacagtttttaactcattttaaaagtttaagacaatgtgtatttcatacatgcttcagtgattgtaaatactcagtcaagttttccctgattctagtctatcccatctttcactctgatggcagcacagggtgtctacaaatatgctggttcctacacgagggccagtgtccacacacacacactcctatctcttccctttggctgctcaagactcccagtgccatcttggagagctctgtgcttcaagaatcaatcaaaggttcagcagatgtgctgacagccacacaagctcatttcctgtacctcttagccctcagtcccagaaaggaaacacagcccctaatggactttatttgtaattaaacgacaaggatattgtggtgggaagagttttctcctccttactagggccacttgctggccttttttattcatttttttatgtgagtttaattcccattgatgtgggtgatgattgttggtcaaataccgttcctgcatctgagtcggcatggcattctccgctgttgtccctgtggtaaacacgggggaactgaaaggcaggatgagttcacctctgaagtcctatttggtgcacattttgagcccgaggcccagcaacgcaggaggcctggagtgttttcacttgggcatagccatcaaagtgttgtgtgtatttttcccctttggtggaaaaatgatggctttgctttcttgaagcattcctgctgacttattcatggaacccaaagagggtgacatccaaggagggcagcatgcagcccttctgtttcccagccagagtcagggtttggcaaagtgtgagagttgaagggaggcgggactgcccggtgcagtaggtgagagaagagttggccaaaaggtaggaaagacttgaaaccaaaatccacactctgatgtgcggggcctcccagtgagaaaaaacactcaccaaacacccacatacttatttgggttggaagagggtatgcagtgcccaggaggctgttgaaacagagaactgaccccctttgatgggctggaagagctgtggaaagctgaggcaggggctgggaggagggatgaagtggagggtacccaaggcaaggctgtggatacttggccccaaaagcccattttgcaggtttgcttgggatgaaactgtacgttgtgccttgtgtgggtggtggatggagagacttatgagaagaagggatctatgactttcctagggagccagacagacttggggttgaattcaagccccaccacttatgaccattggaactttgggagaaaaatcacttagcttgtctgggcctcggtttcttagccagtaaaatgggaataaaattgtgtgtgtgtgtgtgtgtgtgtgtgttttaatgaggattaaatttggccttggtgtactggccctaaccagttttccatacacagctgccatctttccatatgtttgatgatgagtcaaatataaagaggaaggcctaagataacggtttcagaacatctcagtgtgactgtaaatcctagttctaccttgcactagctttgtgacagagtaattttcttaacctcacaaaactgcaatttcttttatcacagaaaaatttatcacaataatatgtatctcacactgttatcaagagtt

SEQ ID NO: 38358 - DNA, 1187 bp, Bovine  19866880800087
  misc_feature (1)..(1): n is a, c, g, or t
nagaaaaagaaagcactattagtaagtactattggtccaataagacttttgctgttgttcagttgctcagtcgtgtctgactctttgtgaccctatggactatagcccagcccaccagactccactgtccgtgggattctccatacaagagtactggaatgggttgccatgccctcgtttaggggatcttcctgacccaggaattgaacccgtgactcctgcattgcaggcagattctttactgctgagccaccagggaagccccaatctcactaatagggctgcccataaaatggaaatggacatagggtttgcagccaaattgcttttgaatatgcgagtaccaatgacaaaaagcattcaaaccagaattttagtctgatttcattaaatattccatttttctagctctatagtttgatttcaagctcatcaagtggatttctggttggaatctgattttccgtgtaggtctgcctccagggaagaaacattctcccctagattttctggtatttttagcctttctaccaaagatctctctatggagtgatatattgcttgtcatgtagttttctacagaaagaacaacgcccaaaaatgtgcttcaactttttctgatcactattatagggtgaaattactatttcaccctataaataaattacttgccatcataattaaatacatcaatctcatgagctcagctaatataaatctgagacatgaatttgttcttaccaacaaaatcaactcagaacctgtaggactccaagccagacgctagattacataaattcaccaaggtattcattgcactctgtcccatttctggacacagcttgccagccttgtctcctggtgaagaagtgaagtgttacttgatcagctgtgcctggctcttagtgaccccatggactgcagcccaccaggctcctctgtccatgggattttccaggcaaggatactggagtgggttgccatttccttctccaggggatcttccctacccaggaattgaacccaggtcttctgcactgcaggcagattctttaccgactgagctacgagggaagccctggtggatgcacattaacatgaccatttgtgttaggtacaagtatgcataatttctagagatactcttatgtaatcagagggggttcaaactttaaaacttaagctca

SEQ ID NO: 38359 - DNA, 928 bp, Bovine  19866880880707
  misc_feature (1)..(1): n is a, c, g, or t
nccagttctacctgttgcttcctgacctgcaaaggcattattcagttcagttcagttcagttcagtcgctcagtcgtgtccgactctttgcgaccccatgaatcgcagcaaacactgtgcaattgatgctgagccataggaaaagcaagacactgtgaacatacaatatatcagagtgtaccaggccagcacaacaggtgcaaatgaaagaatgctcgtggcatgcacggccatggagattaaagagggtggagaaataagaagggacagttcacaaaaagctgtataagtcatgctgtttacatcttcccttgtttttagggtgtgaggagccactgatgtgttttagaaaacttactctatagccaggtggagaaggaactgggttataaaaccagaggcagtgacgaggaaagaggatggtgtggtaagggatgatgataccaggatgataataatggcatagataaaaacagattccaaacatgctcaagaagcagaacctacagaaccaattatagattggactgaggggtatggaagtagtattttagggtcattcaagttgtttcccaatgatcagtcagagcgaagcctccacataaatgactggttaatgttgacctacatttaaaaatgcagacagtgtgttcaacaggcttattttaacaaatcaacgatttttgttagctcagtttctttgtaattataatcatagtttcagaatttgggaggaattacattaggatttttattagggctttgggttttctattaattccagatgaaacttcttataacatcttcagatgcaataatgagctttaaccacttgatggccacatttcaaagtcctttatcttcctcacctctgacaactttctctctattctaatcagccgtctctgggactacatacatctgtttt

SEQ ID NO: 38360 - DNA, 1624 bp, Bovine  19866880948695
  misc_feature (1)..(1): n is a, c, g, or t
nctggagcagcaaaactgttttttggtgccctgtacttcttccaatatgactgctcctttgaaaaaaggaagcgcatcatgtgtgggtggggggtggggaagggaggtttggacatgatcctggatgccgtgagggcagagattcacagtggatgcttaaagcgtagctgaatggacctaccgggcaactgctagcaagggttttcccttcctaagacatatccagggtcccattcaagaaagaatcaaacctggcattttcctggttatttactttaaagaaaaaaaaaaagtgaagcttagcattttgaaatatgtatttcttggagacaaatatattttggcccaacccacatcccattagaactcaccacatgaagtttccagttccatccccaggccacagccccactgtagcatgaaggatgatattttatttatttaattccttctttttttttttaaactctcccgttctagctcctttagcaatcacttggtctgtatgcttttttcttgattagtcccctttccttgcatccatcaggtcagagttgtgtttgctcactttcatgaaaatttttgtcagtaatgaaataagatttacctgatttggagctataagtgcccccgggggccattgggaacctccttgacctcttcctggcccagatgtcgtcgccattcagctgaccacaggccgccctgggaacgggaagacgtgcactgtcgttcaggtggtaggcaagcaagcgccgagaggccgcccgcctcaacgcgccaggggtgggctgtggcttctctctcctcttccccagcccctcatccccaggaaagatctagcggcccactgtagaattattaggagtaacaagaaaagaatcccaataaaatctcacaccatgactcaaattccagtcttcagcaactggtagtaaggatcgtctgttttgaaggagactctgaacagggcctctgtggtaatcctccaaggcaacagagggcactgtggacacacattggaacaaggccttcctgtgcctcaggaagctgaccacagttagtagctcatgctctggaaggcttcctgtgcctcaggaagctgaccacagttggtggctcatgctctggacggcttcctgtgcctcaggaagctgaccacagttggtagctcatgctctggaaggctgcctgtgcctcagaaagctgaccacagttagtagcacatgctcaggggctggtatcccacatctttcatgtcaagtggtcccctccagagtcttattgccatgattccatggaagcaaccatcttgacaaaaataaaagattctcgttctttcaatttcttctttcaaaatcaagtctaccttgatgctgagggtcatgaactttgaaagaggctggctttttctcagatcctaagttggctacttcctggttgtgtgacctctgagacccaacttctctgagtctagatttcctcatttggaaagtggaaataacaatacttattgaccatgggattgttgtgaggatcagttaggataatgcagatgggtgccttcagcgtataaatgtcaatccacggtagctggttgttgtaattaataattttgcaaatg

SEQ ID NO: 38361 - DNA, 1645 bp, Bovine  19866880983406
  misc_feature (1)..(1): n is a, c, g, or t
ncatttgagaagttttagtagggacttccctggtggtcctgtggctaggactccaagatcccaatgcagggggcctgggttcgatccctggtcggggaactagatcctaattgctgcaactaaaaagaacccgtatgtggcaatcaaagtcaaagatccccgcatgctgcagctgggacctggcatagtcaaagaagtaagaagtttcagcagcaatgagtatttattattttgaatgaactgtacatgaaacttaaatttttacatgaaatataaaaatcatcaaaagtgctgtttaggattattttaatattaatttatccccccatgtgatctagtagctacacattttaccttttttaatgatctgacacatcattacaatcatgtaagaactgtccaatgttaaaacataaaaaaaatattagtttattcctcaagaaaagtaccaccagtgatgctttactgaacatgaaaaataaacagatgccagagaatcaacttttcgggaaaaagaaatatcatagagtttcacgggtgaatgcaaagtccaaagcagatcagactctcagcagaacattcttgggatataacatcctaatagtgtgggttatctcctttggaggcaggtcactggtgtgccagaactcatcttttctggcctactttccaacaaaatgtctaatgccacgaacctctcatgactcctaaaatatttaatacagagggttttcagtcttagaatagcccttggagttaagtttgtcgttgaagaagaaagcagtcattgctcacagacgagagccccgcgcaccttccgccgtcaggccgacccgtgcgtctggtccgcgccaagtgcgtgctccccacagccgtcctgggtgccctggctgatgaagagacagcaggtccttcaagtcacgcgtcccaactggtctcattcggccctaagcaaaccagcctctctgattcaccaccagagttgtctggctctcccgcctcttggctttcttgctcctctgcctcaccttccagcacagagcgctggacgctaacagaaaaagtcccagggacagaaggaccaggcccaagatggagatgatggagccatgggagttgaagctgtacgccacggcagtgaccacggtcccggtgatgaggaccaccacagcgaaggggatgacgcagcggtagcaggagagctcagcgcccccggtggcggccgccagctgaatctcactgaccaggggcaccaaggtaaccaccacttcgccattggcattcttttccatcgccaccggtttgggagactttggggttcccaggatctcctttatgggctcgtctgtcattgttacagcggtgtctcctagctgagttcacagactagatctgggtggtctcctcagggcaaaaactgtgaagacaggagatgtcagctgaatgcattagagtgagccccacaagtagcagcaaagacctggggaaacaccactatgttcttttcttttctaggagacatggatgcctgtgaaaatcaactttaatgtattttttccccaacttttgcattctctttgcattgggcagaaagcaagataaagcagagaaccataaagaaagggaaggatataagcaggaagca

SEQ ID NO: 38362 - DNA, 1324 bp, Bovine  19866881017297
  misc_feature (1)..(1): n is a, c, g, or t
ntataaaagggtttcccttactttctccaacttaagtctgaattttgcaatatggagttcatgctctgagccacagttagctctcagtcttgtttttgctgactgtatagagcttttccatctttggctgcaaagaatatagttgatctgatttcggtattgaccatctggtgatatccatgtgtagagtcctctcttgtgttgttggagaagggtgcttgctatagggtgcagtgcattctcttggcaaaactctcttagccttttccctggttcattttgtactctaagggggtatctcttgacttcctacttttgcattccagacccttatgatgaaaaaaactttttttttttttttttggtgttagttctagaaggtcttatgggtcttcatagagccattcaacttccgcttcttcagcattagtgattggggcatgagctagcacatacactggtgctttgatctccagtgggaaccatttttgtacagtgcaacagccctggtctgacaaaggtacaaccaggagtttagtcatctcagggtgaagatctggttaccctaccaatcaaacaacctagactagcttagcagaagttctggttcaagataagagtaatctagagcaggtggtatttagataaacatgacgaatatcatcattaaacaggtttgcatgaaatgctgccagtgtctaatccataattctttgcctttatcactttggtgtatggtagtagttacctgtattccctttcttaaagtttctttctttctttttttaatttaaattaccaaagcttggtttgctgtctctagtgtaactcataagtgctagggaattactgtcccttggaagaagtcttcaaccaatgactgatcctagtcagagtataaacaacacaactgtctcaaacagtaagtgggaaagtcactttatacaattcttttacattggctccaagcgtttttttggctcaattaagcttcagtcaccttcagaagtagctggcttgattctgtccctttatttgctgctttcccattcttgtttcatgtccccttctcctgtgcttgtgtttttcttcacctccaaaggagctacttgcatgtgaatcattttctcaggatcttctttggggaaacataaataaattgggaaaagaaagatgggttattatgggtttcttttcaaacataatgatgaattaaactgagaactatgtttggtgcccatgtatctcacacattaataaatgagaacctaacagaagctagaagtataaaacatagttcttgaaatctatcccaagttatttt

SEQ ID NO: 38363 - DNA, 914 bp, Bovine  19866881089553
  misc_feature (1)..(1): n is a, c, g, or t
nccttgccctgggaggtcaaaatatcactccttatccaatgagctaaaagttagagctgtctatttgcatgagactttcagtcaccaaaattaatcactgctattcaagataccttaatgactggctagatcaataaaagcgtatttgagattctgtctgaaaggaaaaaaaaaaaaaaaaacttcaaacccaaagctgaaacttcagctaacttaaaaatgaggctgtgtcccccaaaggtttatacttacatgtacctcagagagaagcaatccattaccagggagacccctggacctgagagggaaggaacagcagtctgagcttcttcttggacttctgagaaggcagcctgtcacagcacctctgtcaggaaagtgacgggacagagatctctgggaaggagaaaagatataaaatgctgtgggttttagatcctgagctctttctctcactctaccccttcctaaatgacgcttgtctttccctctctctttttatttcctcccccgccggtttgctcctccctgccattttttttttttttccttctttcttttccttgccagcagattctgagttttggcttcccccagctctgctcagtgacatgataagtcagaatcattttagagtccccagagacacaggaggcagcttttacttttatttctcttgcagcctttactgagcgcactgctttgcattactcattttttccccagccagactccaaatcttcccccgcccagcaggcattttcacaagaaaatccccgagtcagcgttgcagacccagctgaggggacggggccgaagggacagacacttttagggctgcgggaacagctgtgaagtcatcgggcagctgaatccagcctgtaagccaacaaaaatctatgttcctaggtttc

SEQ ID NO: 38364 - DNA, 1463 bp, Bovine  19866881165533
  misc_feature (1)..(1): n is a, c, g, or t
nactgccgtttgcatactcatgacatactctttgaaaaaactctgttacaagacaattacctgctttagccattctggcccagataatgccagtgttattgttattctctgcaaagctgctttaacttcccaaagcttttccaagtcttctatttccttagatccaccttgcaaacctataatgttggcaggacaactgttatcctgttttcacagagagatgaggaaactgagatcctgacttaagttctcagagttagctgttggcaggaatgggattccaaagtatgtcttcttatgttccctgccttcctgttccttcctttccaccacattaactttcaattcaggatgtttgtgcacgcagctttcaatgttcttattgacagtgctcctaacaacattttaagtgtttcttttcttgctactacaataggaaattccaaaccaattgtgtattcaacaggtttgtattcttttaagttaaaaatgtacttataaagcattttaccattggaagtataaaataattgtggttagaactttcaaaatgccccagcaaatcacaatattgtagaaaaagtggtatcagtagtaccaaaccctaaattctgctgcactctactttccttgactcgagcatggacctctgctcagccccgataagcctggagcttcccagaggggctaaggattaagtgcatctgtgcaggaaagtggtctaacagcagcctttccaaggactgtttacctgtgaatcaagtaccctcagcagataactagcctccctaagccaagcccaggattcttcctttgaaaaatcttctgcccacaaaattgtgcacaccatgtgtcctggtactaaatgaccacagaagaaagaagccccactgccattgactgtccttcccctcttaggagagtcaaaggtgtcacacattgacagagctggcacctcctctagaaatactcatcaagtgtaaacatctatgcacaagctgtgagaggaagtaagttgttcccatttagcacatttattttttcatttcaccatgctcaccagcagaggtgaaattcgaacaggttcccagtcccaactcccagaaacaacttgaaaccccaaccgttcccctctgcacatcagcaccaaaatgagagcacagcaatttccatgtcctctgaccatcagtagtgcgtccagaactgtcctgctgctgctactgctgctaagtcgcttcagtcatgtccgactctttgcgaccccatggactgcagcccaccaggctcctccatccatgggactttccaggcaagagtactggagtgggatgccattgccttctccgccagcactgtcctaggctctgcaacagagagaaatgggtttcactctccattcttcagtgtcttttcaagatagacctggaataggtagcaaaatagaataaagaggagaaagaagg

SEQ ID NO: 38365 - DNA, 1655 bp, Bovine  19866881249916
  misc_feature (1)..(1): n is a, c, g, or t
nctctttcacgagaaagaaaagcagaaatagggttatctgttatgggagaggaagctcttctacacgggaagaccaaggaaagctcccccgaggggcaacactgaagactaaatacagagaaagagaagaagtgagtcctgaactttagcagagtgccatgctccacatcccccagaggagaaaacaagtgtcaagactgagtggggagcctggctcatgtgtttaaggatgaggaggaggcagcaatggccggaggaagctgggaaggggtgaaggatgagcggcatgctcacggggaccagggtcctgaggcttctattctgagtgattcaagaactggaacttaaactataaaagatcactctgactgtgttaagcatcagaatcacctttcagaagcctccctcttgctgtgtagggtctcaggcagaagccaagcagccaattaggaggcttgttcgcagcctcagcaggagacagccacggggctcagactcagtgcagaggtgagggcagtaaagcagatcacgcttgaaatgagggttagagcaggatatgaaagaaagaagaccaggagagctgcacactgcagaatctgacaaagctaagatgattttctctcaagacagagtcaacttggctgtgggagtgcggctggatcagacattcggtgctcactggagatgcgtgtagtaaccatctacatagggacaaagagtggacagctcagcacatcagcctggagttcaggggagacggacatgccaatgtcaagagtgtgtcccacagggttccgagggcatttgattgtctgtggttggatgagcatcctaagggggagggtgtggatggaaaggggaatattggagaactccagtgtaaaaaaatggggtagaaacacagaattcacagaggaaatgggaagagggacttgtgaggtaatgagacaatcaaaacagagtgatatgtacaacagactcactttttctgtacagctgaaactaacataacattgtgttatgttaactaacataaatcaactatggcccaataaaaattaaaaattaaattcaacaaaaaataattttgtttgcaaaaaaaataaataaatagtgaagtcctaaaagtaaaaggaacggctcaataaggaagagataattcaacagcatcaagcattagctgtacttccaataaggactgagacctgcccatggatgtcagcggtgtgctatgttcagctctgtggatatgcaatgttccctgggagaattaggaattatttgtccccaggagttacagggacatttagattgagacaaagagttgttccaaagcgaagctaacctgatggattcctatctgctgagcagggtgcctgcccttttctcaggtccagagaagtgatttttcatcagaggagaaacctgtcacccctttgagatgccaagccataaatctcctttccaccaacttgctaatagtttttgttgccacctttcctgataatccagagtaattgttatgaaatatgggcttgttctagccctgccagctacggcgcctccatcctctgcaggtcccgggagagcagaggctctgtgtctgtcactgggtgtgcgtgtgttagaagcacagcagatgctgttaccaagag

SEQ ID NO: 38366 - DNA, 1060 bp, Bovine  19866881288807
  misc_feature (1)..(1): n is a, c, g, or t
ntatttaaatattttatattatacataaaatctttaatagtaatttaatgtatttagtatatataatataaaatatttaaatatatgtatatatactcatgaatttagagaacttcataaataatatgagttttaaaataaaggaataaaggatgactgggaaagactgagggcaggaggaaaaggggacgacagaggatgagatggttagatggcatcattgactcaatggacatgggtttgggtggactccgggagttggcgatggacagggaggcctggtgtgctgcggggcatggggttgcaaagagtcggacatgactgagcaactgaactgaactgaataaagtttaagataggaacctggggaaagcaatggccattaattaacacatttttgactggatatttttttttcagaaacgaacatctgtggcattaataagtcttttgtcaataatgtgttaagaaatggtatacaatcagttgagactggtaaggaggtgaaatggaagatgatatcagtattgggcagaagttctagaagcaaagagggtattcagagagggttgccatttccttctccagaggatcttcctgacccagagaccaaactcaagtctcctgtatctcctgcattgcagtcggattctttaccagctgaattatcagcagtaaataaaacacgaaattccttgccctcctggagttcacattccaatggataaagaaaacagaaaaacatagtcatttgggaaatataatattaaattgtttgtaaaagtctgttgctgggttggtctcctatatgcagcttaattccccatcagacttttaactctagtactacaaatatttattctattttgctgataaattttaacatcgacctccactgttatcttggatagaatacattgtctttcagttcagttcagtcgctcagtcgtgtctgactctttgagaccccatgaatcacagcacaccaggcctccatgtccatcaccaactcccggagttcattcagactcacgtccattgagtcagtgatgccatccag

SEQ ID NO: 38367 - DNA, 1702 bp, Bovine  19866881341101
  misc_feature (1)..(1): n is a, c, g, or t
nttccagtcaagagtactggagtggggtgccattgccttcaacagaaattgttaatcttcaagctatcaagagtgttgaatgagagacttccccggtggttcaatggtataaagaagctgcctgtcaatgcaggagacatgagtttgatccctggtctgggaagataccatatgccatggagcaactaatcccaaacaccacagctatttgttttagagcctgggagccacaactgctgaagcctgtgcatcctagagaccgtgctctgcagtaagaaatgccactacaataagaaacccgtgcagggcgactagacagtagcccccactctctgcagctagagaaaagcctgtgttgttaagggagacccagcacagccaaaaataaaataaatacaaaattttttttggaaaaaaaaaaaagagagatcttgagttgcttaggtgggggaagccacaaataaaagaggaattttctaagggttgagtcttttcatatatttctctatagtcttgaaaacctagaactctggaaagccagagctgggaacttatctcatgcctcatttgacagagaagaaatctggagcctacctagaggaagaagctatgaatatgcaagaattcatggatagactgggagcattttaagagttacttttagaaatactttggaaaataaatatacataaacaaaaacaactctccagctatccaacctaagtttgaaattcatgctcagctgttgatccaaaattggctgaagatgggagaatgtctttgtgcagagggggtgctgggagccagtgacctccgctagaagcccagcccacgacgggaaccgcgttcccccacgtgcactgcgtcctcccggcgtcctccccgacgtgcacagggtccctggagacccgggcgctgaaggagactgcagagcctcccggtgcagagctgaaatgctgacagccttccgattgcaacggtcaccacagtaacttttcgaaacctcccacggcgtggttggggggagggggaaaccaaaaatcccaaatataatttaatttccagggtaaacacttttcatgcaaaaatggccaaggcgatccttgaggcgaggctgccttcttcagcatgaccacctgcccccttgagcattctgctgaaatcccgcgcagagctccaacttcacaagcgatcttccagagcctggatccctgtggaagaggaggaggcgaggatctagaggcaggattgacaggaaggaggaggctgaaacagctttgccttctcaagagggcccgatgtggataatcaagatgtgagttgttagggaacattcgtttgatcttgaaagactcgtgagccaagtgcatagtcgctggtcaaaatcagggatgcccactggcccatctgaaaaccaaaagggtcgccccactccaggcatcctactctcgtaaaactttttagcatttatgatgtaggacatatcagaagctatgctaagtccattacacttctttccttatttcatcgtcatcttctgggtttgagggagaacaaggaggaggccctggaggctgatgtccttttcagtaaccatgtgagcagcaaatggcttagtagaggcttgaaccccactgtgtgggactgtgctgtgaggtccaggagagcccagttgctagttcagctgccatcagctccatga

SEQ ID NO: 38368 - DNA, 2007 bp, Bovine  19866881381555
  misc_feature (1)..(1): n is a, c, g, or t
nctcctcctccatccgtgggattttccagccaagagtactggtctgctaagaactgagaatgatgagcttttagataaggaagttgaaaaaagtcactaagcctgctataattagcagagtcaagaccaattcacattcgtgcttgctaatacgaagaagacagaaccatacagcattgatatatgagattatgcggggaaactgagaacctctgaaccaagagtaaagctggcattaggcactcaaatggtacttaatgagtgactttactgatctggagaagactgaccacatgacacatacccctctggatgttttgcctctgcaaaacccacccagacagagaggtttgatgtgattacgttaaatactactttgaagtttaataaggcaggaagagaaggggacgacagaggatgagatggttggatggcatcactgattcaatggacatgagtttcagcaccctccaggaggtggtgaaggacagggaagcctgacgtgctgcattccatggcgtcgcaaagagtcagacatgactcagcaactgaactgaactgaatttaattcaagccaaaattttcccccaagctatcattttacgggttacagattcctcagtttctgattggtcttttcttgagaccaccagatcctttatttgtgaaggggtgtctttgctggtgtggttactggttatactttaatattatggaaatggctcagtctggactgaattcagctaagattagtcaggatttcagaattttgatgactaaagtagcactttggtcagtgctaatttcttttcccacaggcgaattattcatactgtgtaacagtttaaagttaatgaacaccttggtaacgagaaattccagcagagagtcacttcctgaagatgttcgtatttcacagtgagagtcttgacctggctctctggctgtaatttctcacccagaatcttcacatctagggcctgcccttcaaaacccctgcttccctactgggctgaaagagagaaagcaggaagagcccattcaattctcttgtttccggaagcaccacccagccggctcagggaattgtctttagatgttttgagatgtgtgttcacttcacagatatttctcaatggtctggcatccatctggccaggggacagcatggtagctcctgggatgagggagacacatggggtgcaccttcaaggagctatgatccagtgaagacacagcaggcaagctgttaacaggtgatgagttgtgagagggggcaagtaaagggggctaaccaagtttggggggttgggcagaacatgttggagttggctggatgagggttgaagaagaaagctattccacatggaaggaataatttccataaaatccctcaagcaggagagccagtcatgttgcaggaacaactggaggcccataggtctgagcaatgagagtggaggaaggcatctcacatgtggctgaagaagaaggtggtgaggctgtgggagatcctgagagacatggtaaggacttttactttatacccagaatgccagtaagttttgaaagattttgggctgagcagtgacctgatgagacatactcaatcctaacagctgctcattccccaacggttcatcatctccagcattcctagcatggtgtgggggtgctggccaagacgctctaagcccgttctatgaatccttccttcccactgtgaggcagcacgctgagaagcccccactcaaatctagtttccaaagtagagcatgagactcagaagtttaaccagagaaaagagatcagagaatctccatgtgcatgacccctgatgctcctggcccatgctgttctcagtacaccttccagtgtgactatatcatgcatccagtaagaacagagccactgcaagagccagaagtggtagagaaaaaggaaagtcatataaaatgtaagcaggtctgcatttcccaaagtttaattttctaaactcctccccaa

SEQ ID NO: 38369 - DNA, 919 bp, Bovine  19866881973980
  misc_feature (1)..(1): n is a, c, g, or t
ncacaatttgccacttaccagtccccaccctattttgcccttcaagtacgaacatgatgctgttgactcactacaattaggaaagatgttttgaggttttcagcataacttagtgagtgttgagtgaacatctattatgtcccaggctctgcttctaagtttagcaatagttttcagttcaggaaagagtagttaggccaacaagatgaagaaagtacgttttcaagaatattttttgaggcatgtttaaataactgatgtgtacataattggaaagtagcatgcaaacatgtaagaagaaggcatgtgagtcatatggaagcgttggcagatcctagaggatggagcggttaattcctcctggggtatcagagaggacttgtctggtatgtaaaaactcagagagtttgaactgagctttacatattatttcaaacatgaattccactgccatttactgaatggctgttgagtgacagatagtgcagatttaagcaatgttcttgtcaccagggaactcatgacctatctggtgagtcagataaataatgatcatcataaaataaagaaaaatggctttggactggtaatgatagtaacagcacccccagctctttcaaaagcattactatgtgctaggtaccattcactgactacttttcaactcattatttaattataatttaaaatcataccatacactggtgtctaaaataggtttacacaaagggaaacttgttcagaattgcctttctagtcactgggataaccaaaatctgaagtcttgaatccatgtatgttagaatccaaagttaatagacccttaactattaaagaagagttgggtggagggaacaatgtaaagcgagagaacaaaattggggaagacacaggagaaggaaattacacgcacggtcaa

SEQ ID NO: 38370 - DNA, 754 bp, Bovine  19866880393662
  misc_feature (1)..(1): n is a, c, g, or t
ntttcatgaatactaaatttaacaattaatgaggttgatataatgttacagttggacatttgattaaggatttattgatttcaattttgcagtgttcttattttagagcaggtaatttttttccagctgtcaaatattcaaatgatgcccttgtggaggctcttgtgggcaatatgtgagcaacctgggccaatacgtcttggccatcctccacctgaagcatacatccctttatacacacagacacagacacacagacacacacacacacacagagcctatgtatatggacacgtaattgttaggaattgtgttaagctactataacaaataaacttccaaatttcagtggcttaacacaatagattatttttcatttccaaaaacagtctgatttggttccaggacaatgatatcaaggatgagggtgtgttaaagagggggtagacctgtgttccacgcagatttggggtgtcaagcttgtggaagctctctttctgtagcatgtgactttcaagtttgcctttcttctcttttggtcattttattattttttaacactatacattcatatatactcaacaccaatttatatcctatcttcttttttctttcagtttgattgatgcaggtgacatacaacattgtattagcttaaggtgtataacataagggtttggtatatgtgtgtattgcaaaataatcaccacaataagtctagttaatattatttacctcacaatgttacaaaata

SEQ ID NO: 38371 - DNA, 879 bp, Bovine  19866880395907
  misc_feature (1)..(1): n is a, c, g, or t
ntagttttggtatttcatacggatgcagtcagaagtagctatacatgaaagaagcctaacataaaaatagagctttttccgtcctcccgtccggaaagcaaacatccttcaataaacatgcaacgcagctgcctagagagacccaggtctggcgaggaggtcacagagggcagccctgggcctgcaggaacactagcctccccgagtccttgcaggagggagaacgagggggcgatctgggtctagcaagtccagaaggactcgggcctcagccctaaggtccagagatggggacccccattcatctttttaaaccccactctctggcccacaggttcttaggccaagagcatcactgcatttcatcagtttgaggaggagtttttgaaaaataatctccaaaagatagtcttgggtcatcaaggccccagctttagagtcacagcctgcattctgtggccctcaacaccctcgccccacgggggcccaacagccgcctgcggctggccatctgcaggcccggtgtcccccgtcaggtttacgcagtccccctgggaagaagtggtggacaaggagctcctgggcccagccagttctgggtgtgagacttttctagtgcctcagggctgcagaagcctgcagcacacccgggccccgtgaggctctaatggaccagcaggccaagaatgagcgtgggcaggacacccagccagaggctggtggccagggtgcaggcgtggcccagcagttgtgaggtcatggcgctgtcctcgcgcagcagctcccagtgctgagcttcgcggaggtaggagtcctcctgggcctcgcagtagtagtggccataatggaggtccgtgaggttctcgataacaggatgca

SEQ ID NO: 38372 - DNA, 1880 bp, Bovine  19866880518401
  misc_feature (1)..(1): n is a, c, g, or t
nacctctctgttggagtcaaccctcacagcccacccgtctgctcatctgatcctcacacctttcctatgaagagacgcaagatgagggtcagagctgctcaaagtcacccagatctcttgcctgcctggaacataatggaggccgggggtgagggctgagggagtgagttcccttcccttcgctaccctgctttctagatgaccatgatgtcctgtccttcctgaccttcagtctgtgggaaccgggtccagaggtaacgccgaacctgggccttccctggggggagggctgggggagaagcagcccagtgatccctccccttcccggatgctctgctcacgtccagctgtcagacctgtcattccaacgcttatctctacctgcttgcagagctctactcaggccaagccttgtgcagggaagtgctaggggccagaggtgacccagagccaggccctgtcctcaaagagctgtgggagcactgaggggtcctaaccagccaggggagcatggcaaagatgagcttgaaggaacagagggagtagcatagacacaggcctgagggagctgctggggtctgggccacagtgggagagacgggtgtaaagattggcagtgcagcagggctgggaggactgggccaggtggctgagctgagggagaactaggtgtgtgtgtgagtgtgtgtgcatgtgtgtgtgtgtgtgtgtgtgagtgtggcggaggtacggcagggctgggaggactgggtctatgccagggtggctgtttggtcagggagggggacagggcttgagggaggccctgtgggaagactcctctgggtttggggcctgagtttgtgtcttctttctccagcctccctcacagcccttcctggagacggagcagctccgcctggcaaagcagctggaagggctgcaggcaaggctgggcctgggcaccaaggaagacatgactccagagctgaactatggagtctgggaagagggtagggacccagagaacaggcaggtgggccagggactcgactgagggtcacagtatcctcttccgttcaaaccaagagccctttaaccagcgggaagggggcgcctgaggaggctgtatctaagcaggctctgccccatcacccagacacatctttccaggggagtcctggaggcagaagccacacgtttctgcccctccaaggtggcttcaaaagacaggctctgttgcccaccccagcggcctgcctgcccccactctgccttgatccccaggggaacaaagcttcggcctggaggagacactgcacagacacagccagatccttcaggccctccagggcctctccaagcacttgatgcaggctgagcggcaatggaagcagcagctggggtccccaggccacatcaggcctgaaggaggctgggtgagtggtccttcgagcacccaagggtctgcctacaggccctgagaagccgagctccataggcaccagatctgatggcaccagtgagctctctctgtccagaaagaggggcaagcactacccgggaactcatctcccccagggtctggagagataggagtgcgtgcatgcgtgcctagtcacttcagtcgtgtctgactctttgtggccccatggactgtatcccaccaggctcctctgtccatggggcaagaatactggagtgggatgccatgcccttctctagatcttcccaacccagggatcgaactcgcgtctcttgtgtcttttgcattggcaggtgtgttcttcaccactagtgccacctgggaagccctggagggaaaggagggcaggggtgaaatgctgcaactggcagggtggcatggatctgcgaggcaagggagtgaggtgggggctggg

SEQ ID NO: 38373 - DNA, 794 bp, Bovine  19866880580855
  misc_feature (1)..(1): n is a, c, g, or t
ncgctgtgatttgtggcctctgtcggtcattctgtgggctataaggcccagtgggctcagggttgggggtcctcggcccttctctcctgcccagtgtccgcagcctgccaagagtggaaagggcagcccttgccccagaccccagctccagaagccactggcatctgttcacattgctgtggggagggagcaggatctcagtgacagaggcgccgtctcttctcacagcttcccctcagcccccacttctccccacagctctcatggtaccaagtgacaggtcggccttcctgtgacacggggacgccagatcttctaggaagatgtcagcaattcaggtactgcggcgatgggggtctggtgtggcgggggtccccatggcaccatggggtgccgagaggggagagagtgagaatgcaggtcgatgctctccccttctccccagccctggctcttagcaaagtagaattcagatgcaggcactcaagatgggagcccagggggtgagactcagctagcaggcgcccagcgctctgtggaggaagggcgcctcacccaggcttgtggaggctaggagagaggctgtggccttgcaggcgtgcaggcaggtgggtgggggttgccccgggctgcacctgcccacctgctgcctgccctgcaggctgcctggccatccggtacagaatgtattgccaagtacaactttcacggcactgctgagcaagaccttcccttctgcaaaggagatgtgctcaccattgggctgtcaccaaggtaaccagggacctcacacc

SEQ ID NO: 38374 - DNA, 1139 bp, Bovine  19866880599576
  misc_feature (1)..(1): n is a, c, g, or t
nagatatgctcactgtccattcactcattcatccttttatctgactcacccccatgtcctctgtgccccgcccagagacacagggctgagtcaatttcgaggatcctgcagtctgcagtgaggtcccctgaacaatccaccggaggcccagtgcagaagtggggcagacatgggcaacctctgcctcctgcatgctacttcagaggcggtggtggctcccaagggctccagccctcctggccttgaagcctctgagcctccctacccccagctctggccgctgctgagcaaacaggctggattagcagtctccaggacatgctggcagggtctgggccctgggccaggttccaggctggcaggccgcaggggagtggaggcagctggggcagggcctctggtctcccttctccatttcctgccaaacctgcctcagtttctcactccttccttccctctccccccatcccactcacatcagtggtaattctcacactcactccatccctcacggccagttcccacctctgctttcgtgctttccccaccttgggatgccccctaggtgcccccaccaggaaggcccacctctgtctggacatatctgtgtatccacagcctggagtcctggccctccgcctggttattctctcagggtgctgctcccctatgttcgtggtctccggcctgtccttcccctcataggcctctctttcctcctctgagaaacacaatgctcccatgctcacttgctcagtcatgtctgactctttgcaaccccgtggactgtagcccgccaggctcttctctccaggggactctccaggcaggaatactggagtgggttgccattccctttggacacaaatctctctcatggtggaaatgacttgtattttggagtcagagggagctgggttcccattcatttagttccttaatttttttgagcctcagcttcctcatctataaaatggggccttgggacttccctgatggtcccatggttaagactctaagcttccactgctggggtcatgggttcgatccctggttggggaactaagatcccccgtgccgtatggccaaaaatagtataataaataattaaaagataaaatggggccctataaaagcaa

SEQ ID NO: 38375 - DNA, 1535 bp, Bovine  19866880603644
  misc_feature (1)..(1): n is a, c, g, or t
naggaacctctggttgaagctcttgaacctttgcagagccgggttgggcaggtatttaaggatagggaagaagtccacaggattcccggagctggcggattccacgaaatcatggctgctctccaccagactgagcatctccttactgctctgggggaagtgctgcccgaagcacatggcaccgatgacgttggccactgatgccaccacatggccataggggtcgaagcgcccaggccctgacatcagctcctggaacttgcccaggagggcctcagcctccttgctcacatgatcctccaggtagcaggaggaggaggaagatgggtctgaggccacagagaaggtgttgagagcattctgggccaggcgtcgccgggcagcccacactggtccagagtctgggttgaaggtcatgctctggccatcagtgaccaaggtgaagctgtagaggtcgggccggcccttgaaatcatcgccctgccgcacgagggcctgccggacggtgtccaggccgctgagcaccagcacgggtgtgcagccaatgcggatctgcagcacgtccccatagcgctggctcagctgcgacaggaccacgtgcgggttcttccccaatgtcagcatgtgcccaagcagaggccagccccagggctccggtggactcttcaggccttgagggacccgaggccgccaggtcctgaccacccagaataccaggcagaagatggcagaggccaggagaagctccatggctgagaagggactgagttgggacaatgccatctgtacctactgcaggggaagaggaaggaggggcgagatggagccattcattcacttgtttattcagtcaataagcacttgctcacattctttccttggttcccagccagacagattgagaaagactgagttacatccagtaaattacgtaggttctgcatcccaggacctcatccatggtgcatcacagaatctgaagcctggaaaggagccctgagcttcccaacgtgagtgtctgaactcccagccctggccctcccctctgcccatcacctgtttccaattctgaggccggtgtgatcacttcaaaacgggggagcactcttgcgaaccccagtgcagggtgtatgctgggcattgtgccaaagggaacctgcctggggacccttcctgctgatacctcctcataccttgggaacagggagctgctcccctcttcgcaacactgatgagaccaaggtcccagggctcatgcaaatggcttttgatgctgtcttccctaggccattccttattaagacccaaaagagaggacaaatcctcattctcccagtcttttttcttttggctgtgcagctcactatgtgggaatctcagttcccagactagggattgaactgtgccccctggagcggaaatgcagagtcctaacccctggacaaccagggaagtctctcacatctctcatcgcttttaaatgtttatttatttggctgccttgggtcttgattgcagtgtgtggacttattgct

SEQ ID NO: 38376 - DNA, 1261 bp, Bovine  19866880611937
  misc_feature (1)..(1): n is a, c, g, or t
ngttatgaggtagttccaattattattctcattttaaagatggaggaactcggatttggaaaggtgaggcaacttgcccaaggtacaggggctcagagggcaaacacacgcccccggggccccgtcccctgctcggtgctgccccctcttggccgaaggctgtggtgacgggctcgctgccatcagagcctctgtgtgtccatgagcccagacacactcaggatgtctcagcactcctaactctctggaccagctgcttcacccccgcggggaggctggctggtcatcttgtccttggctgctagggtgggtctcgtgctgtctgtcctgctatgggccaagagtggcagaaaggagaagaaagagaagccgtacccagagggaagccagtgggagaccgtggaggcggtggtgggcctggggaattgtgggtagaaatcccactgttggcccaggctgagccctagggaagcgtctcagggcgggcctcggcctcttctgtggattccaagtcccagcgttctgccaggcaaggctcgctttcccgctcctctctcttctgctgcgagagcagaatacagcaatggaggctggagctagaccagtaccattgggggcagggtggcactgcaggcctgggcagcacggcctctgggaccacccctactggttaggccttgggtcctgtgtggcctggctggattccaagtgcccacagggatggaggcagcctgctgctgggctcctgccgccaggacttccggaaccggccgtaccccttcagagcacggatcacctactgggggcagaggctgcgtgtgagtcgtccctcctgcctttgtgggtctactgggcaggaagtgcgggttacagggctcagagttctgtggattcccacgatcccacagacacacctgtaacagcacacgtggtccctggcacatgcaggcaacacccatagggatccctgctctctacacagactcctaacttgcccccagcacattcctgggagagctggcacaagcccaggtgtgcgagcccctccacatcactctgattccaagcttcccgcccgccttccgggtcagggagccagtgagtcaggtggggacactgcctctgctggggctgggggagagacgtgggctccccctgtgagggactcatgccctttgtgtccctcaggtgtccttgaacagcggcctcactcccagtggcccagatgaggtctggttcgatgtggggcccttgcttttgg

SEQ ID NO: 38377 - DNA, 3774 bp, Bovine  19866880634176
  misc_feature (1)..(1): n is a, c, g, or t
nttaaaaataaataaaaattttaaaaaagaagaaaataaattaaaaacttagagaaggaaaacaaaagagacctattgttaagggagtgggagacggatggactggcatttcaggttagtagacacaaactattacatatggatggatggacaacaaggtcctactgtacagcacagggaactacagtcaaaatcctgggataaaccatcatagaaaagaacacagaaaagaatgtgtgtgtgtaactgagtcactttgctgtacagcagaaattaacacaacactgcaaatcaactatacttcaataaagaatagagagacctattgttaatcataaaaccatcattaatatcttagatttctataatgcttaatggcttttttcattcatttacttacctgctcactcaaaaggtatacacagagtacttactatgtatgtggtaacccctgtagcaggagttgggtatataaagatgaaaagcaatatatgctcacacagaacctgaagtctagtcagcagaaaattcaagtaggtaatcaaaagtgttgaacactatgacagaggtgtgtactggggactagagcccccaaagcaaaatacatgttagtctggtagagatggatgaagcacttaagctgagtctggttgggaagggaaaataagagttggccaagcagagtatgggaggagaggggcaccttaagccaaggctcagagactgaggccatgtgaggaactgccaatgttactgttgttactgtaaatgttatagtgttactaaagagacaaatgcttgtagagggccatcaggaggtaaggctgtagagaaagttagggatcagatcatagtcacactggatttttctggtggctgtaggaacagcaaggaaactagagacaggggcacctgttaggagatgaggcagaagtaagaggggatgtatacagcagtgacaatgcaaagagagaaaggacgatggaaccaaaaaaacatttggaatccaaagaatttggtgactaactgaacatgaagatcaagagaatgaagaattctttacgactcctaagtttctaacctgggtgaaaggtgtcacttagggcaataccgagtggcaaatgcaaggcgtgtgcagaaaggggaggagtgtttttactatgggggaagcctcagaaagttagaaagtgatgagaagagagacagtataaaggctcaaagtgaagacacaaaagaaaggggcagggtctcaaaggatatagaaaacgataacacataaagcatgtgtgataaggttagccctgaacacaaagggtatatcttctgtgaagacttcagaggaggtaagcaataaggatggatacacacctacagaaaaggttaggtctgggtgttgtttaggaagtcgaggaagctctttccagaaagtctttttttaaaaaaacgttaagaaaggaaggtttctgtgaaacttgtgaaaagagggatgtgaagacaacatctaagcttgagatctgctggcaaacactaaagaaaaatacattcctagagctaaggactttagctactagctagagtgtgtctctggagataaattataatacaaatctacaaagagagataagttatgttgggggacagggtgtgggggggtggggaatcaataaaggcctcacatataagaaagaacaaataatacaaaactgagaaaggaaatctgaaaccgtagaagaaaacagaaagatgattctaaatttgacacatttaaatataatattgcatgtctgacagagataagaaaaatgtttcacaaaccctgaatcatcagctgaaagctagttactacacaaagtctctgctgaaacagcagtagaactagaagatctaaggttgtaaaatctctcccctgacaaaagtagtcctatgcaagagaatactggcaatgagacctaggtcaagctccatagaccaccagactggatttgaagagtcagttaggacactcacctgaaagtgacttctggcacaaggcacttcactccattgtggaaaggccgggtgagagaaatggtctggctgacctgatccactgctgacactcttccctgatagacacccaagctatctccacagttgatggacacaatactgcccagccaatctgtagccatgtttcagatgtgagattgccgtggagagaaggaatcatgcagtgtaccttgagaaacagacaaatcttcagtaaaatttagaaaacattatatcaggttatgtaataggtgctgcttaataacacatattctatcacaaccttaactgaggtaataaagcagtaaaaatcaagctttttttttcccactaggagtaagcatactgatgaataagcaatattgttatgtatatagttcttttaagtactttcaaccatatgtactagccatttacccagacatcacttaaatgataatgaaaaatcctggacaaaatttgtttttgaaaagttgactgaagacattacagaacactaaacctaacaactacgggacatacattcatttccagttcaccaacatatgctgggccttaaactagtaccaattcatttcaaaggactgaaatctgacagagtatactttttgtccaaaaccagaattaaatttgaattcgataataagatttttcaaatctctccaaataactgtaaattaagcaaaacacctctatacaaccaatgagtcaaagaagaaatcaaaaggacagttagaaaatagtccaaagtcaaggaaaatgaaaatagaacataccaacatgtgtgggatgtgcttaaaaaagtgtttgaaaagaaatttattgggagagggagaaggtgggatgatttgggagcatggcattgtaacatgtataataacatataagaaacaaatcgccagtccaggttcgatgcaggatacaggatgcctggggctggtgcactgggatgacccagagggatggtacggggagggaggtgggaggggggttcaggatggggaacacatgacacccgtggcagattcatgttgatgtatggcaaaatcaatacaatactgtaaagtaattagccaccaattaaaataaataaatttaaatttaaaaaaaaccaaaaattaaaatatgcagaaaaaaatttatatatttatattttctaatataaatgcttatatcagaaaggaagaaaggtttaaaaccaatgattgaagcttccatcttaagaagctaggcaaaaaggagcaaattaaccaaaggtattagaaaggaaccaaagagtagaaatcaatgaaataagaaacaagaaagatacacaaaaccaaaaatctgttctcttgaaaatatcaatgaggctgataaatccctactagactaaccaagaaaaagacagagaacatatattgtcaatatcaggaatgaacaacagacatcacaggcattaaaaagataaatttgacaactcagatgaaacaaagaaattccttgaaaaacaaattacaaaagtgatacaagtgtaaaatagacacaatcactaacacaaaaaagctagaaatagacccacacaaatatgcctaactgatttttgacaaagtggaaaagtaattcaaaggaggtaatgtagcttttaacaacaaatggtaacggacaaaaactaccagaactgataaaacaaattcagcaaggtgacaagacacaattaacatacagaaactggctgcattcgctacactaacagagaaatgtcag

SEQ ID NO: 38378 - DNA, 1167 bp, Bovine  19866880742862
  misc_feature (1)..(1): n is a, c, g, or t
nacccgctgacctctaagtgtgaatgtcgatgttgggtggcagccacaaggggctgggggttcagctctgagctccggggtctgcaggagatgaacaactaccggcgggccatgcagaagatggcagaggacatcctgtcactgcggaaacagaccagcatcctggaggcagagaaccgcatgctgagaagccagctggcccagaaggaggtagaagaggagtcagccagccccaacaaggcccagaacctgggtgagggcgtgcaggccaccgagggaacagggaggtgggggcctctcccaggtgtgcgtgctgcgggacacaggctaatcagtaggagcctggggtctctccggggaaggaaattgagagtccagtcctgtctcaagccccgggactgagagacatctgcccttcccacctgctcccgtctcaagtattccaatttgaattgggaggtgcctcctccctgagccagctcctccaccaccactagcatccatgaagcagaaactgctgctgagtgagctggacatgaagaagctgagggacaaggtgcagcgtttgcagagtgaactgactctagtaagccagggctcagagggcagaggggaagggcgctcgggagggagtacctgaaagtagaagggagagggacataggggccagggggccagggaagtggtgaactgagcagggggagctggggtggaccctcagggccaagggcatccctgttcccccttctcccctctctctgcaacccccaccaccatcagaagaatgatcgagaaaaggagctgctcctcctacaccaggctcagcagccacaggctgcgctgctgaagcgctaccaggacaagctgcagaagatgaaggcgctggaagagaccgtgaggcaccaggagaaggcaggtagcagaagggccaggctgccccggatccggccactgaagggaaggtgtgatgcccccgggccagcccagcctctgtgctccgccctccaggtgatcgagaagatggagcaagtgctggaggacaagctgcgcaagaggagcaagcccctgcagaacaagccgcagggaaagcccagcatgcgtgagtctgctcccgcccctgcaggccctgccttcttgaggcctctcagtttcagcagcaccttcaaa

SEQ ID NO: 38379 - DNA, 1539 bp, Bovine  19866880776656
  misc_feature (1)..(1): n is a, c, g, or t
ntgggtttgcctgtacagaggttgtgaataagaaaacccaataaaaaagggaaagaagggcctgcctacaagaaagagactattgcttatgttcccaggcccatcagagaaagatattgccaccaaagcaagacagagttatcaggcagacacaaagatttttctcatagaaaagcagaacctagcaaactccccttgggtttaaacttttaaaatttcccagaataaatggccagcctactttttgagtgggctgagccaatgctaactggacattatagcctcaaaaagaatccaatttcaacaacatgagagaatgaaacacgaaaggaggcaagagttctcaaattgcaatcgtcaactcaaaaacaaacgggggagggggggattcctctggagatttttaagctttaattaattggaaacaggtatcaatatcgtctaaacaagtcaaagctccttttgtaaatttttaaattttttttaaagcttttttaaaaacagtctagaaaatctcgtcacatcccctttctttctgattcacttctatgacattctatgacaaatacaaaaaggaaaggctttcaggccaaaagtattctggaggcaggtttatcagcattcttaccaatcagtctccaaacacacacccctttcacaccctctcctcctttaaccagcccccctctttaccttcctccttttcaggcccccacccccagcaaacctcacttgagttatgtttcctcagcaagtcttcgcaactgaatggattactatgcacgggcaaattttaggtgaacaggacttgcaacatggcgtgcagtgctatcatcacataaaagcagcagcagcagtgcacaggttgggacttgataaatttgataaatgcactgttcaactgtttaaggattgggcagaaagacttaaaaaaagaaagaaagaaagaaacctaaatgtcttcacgtcttcaaaaactcacggggaagtaatcacacccctagcaaaatcaactgcttggatttatgttgttttttttttttttaacagattgaaaaggtacaacttttcaagctaggcaaaaaaataaatttttaaattttcattttctgtttaatcttagaagtacttcgtttgtcttttgcattctgtgaaaaattcaaattccaatttgcctcttactgcctctacttcctctcttcgcactttagaaagtgtgagttatgcctgcagcaatactttcattctgctatagccctttttatagcgtaccaaagcatgaaaaggtttacacccacgttaaatccagttgccaaaagtgttcatttaaaataaaaacaatctgcatcaaagaaaagtaaacaaaagaataaggaaaagcaaagaattcggtggtcattttcattctccttatagcattataacatcaatcgatcacaagcgggataatttttcaaacaagtcctgccagtcatcgaacaactgtttctcctcttgtggcaccatcttctctgtatgctgtcctcagcggggaggggt

SEQ ID NO: 38380 - DNA, 1812 bp, Bovine  19866880782450
  misc_feature (1)..(1): n is a, c, g, or t
ncatggctttggaactacacttgcgaatagctttcagagtttatactgttttcattagattctctccaaggtcgtagatcttcaaatatagggtgtgttttacttttagaaacagtcattcaaggaaaacaagccaggaaaataggatgaagtgagcaggcggtttatactgattttgtgtgaagatgaggtgtggccatacagcatgacagatttcctcgtgtggcttgaactgcctctgaaggcagctccccagggaggaattatagattccctcagagcagtcactggactaaatgtctagtcatttgagatgacttctttcaaagacaacaacatcatagatgtgaaaagtcattaaaaattcgcctctttatagtcacacagcaactgactgcgttaggctgggagttgctcaggggcatgggaaacgggcagatacgggacctgagaagatgagttaggagcaaggtggcattctgagtccccagggtgacctctcccctacaccagggctgctctgccacccagccccactctgggcacgtgggggtcgtgatttctctcagcagggcccctactgcctggccaggcaccccagttccaggaattggcaggtaagaggaacaggcgttttcctcctcatggatggccctccacaaaacccctaaaagtagcatccagagcaggtgggccccctcagtcccaccagaaacaaagctgaccatatcctgcaagccaactttagatgacatcctggctttctcacattaagcagccagtccggacataaaacctgccctggttttgattttttcgacaactaagacagaagcagggtcctcaggctagtctggctctgtggtctgccctgtgcttagtgggcctaggagccatctcctgtgtcccaaggagactcaactacgaaagagggggagaagaccttttagctgagtttccctccctgaacaaggcgaaaaaaacccaagaacatcatactggggcgtggggatggggggctgacatattcaggcctcagtttccctgtctggctgaagcagggaatttggactagatgacttccagctctaaagtcctatgagtctaggaataaaaactcgaagttcaagtctataagcagtgcctattcccctagccttggggggaaatgggggagctggtggcccaccctgtgggctggattacatcttactctaaagagcctcttcacctgagagacagctggcctcagtccacaataaaagccaaagcaacctgcagagagccaggaaggaggccagcagctagtgcagagcactctccgtgggtcaccagcattggccctgcagggggccgaatccccgcccctgttacacctcccagagtgggcgggagcacgttgcgggaaaccctgtgggctgtcagtcactgctatcaaagcaggagcttggattgagggtaattaatcatggtccctctgacagcaatccagggccttatctgtaccccaagaaatgccgctggtctccagttccctcctcaataaaggagactgacagttccaacaaagaggccccttatcagatttcagccagggagcctgaagcagcccgagggagatgcggaaagggcttttatgaggctgggaccaggcacgctgctgggggctccgggggctttaccccggggggtaggaacgctgctgggctgggcgctggccctagtgctgctgtccggggccttcagtgcaaatggagccaaacaaagcctgctcctggtcctcggactcctccctgggactcctccctggca

SEQ ID NO: 38381 - DNA, 1164 bp, Bovine  19866880798132
  misc_feature (1)..(1): n is a, c, g, or t
ncaggttcagctgctccaccaccaccttcttctcgctcttcatcaggtgggagaaacagctcccagagcagaagtcacagcctcggagtcctggctcaggctctgcttcagctgcgctgctgcgttgtctccaattagaaactggaattccggcacctctgcaggaaggtcaggccaggacccgcatcaggaatggttaagatggaacccgcaaacggtggaaagctggaggaggcctccccgtctcattcctaaccaaggagccaggcaaagctatgtaagtttcgcagtgaaaatttactgctcatgaccagccttcagcaaccacacctgagcctggtctcatgagcctcccccaggaacatcaggaattcatgaggccatgggacttccctggtggtccagtggttaagaatctgccttgcaatgcaggggatgcaggttcaatacctggttggggaaccaagatcctacatacggcagagcaactaagcctgagcactgcaactactgagcctgagcaacctggagcctgtatgccacaaactagagcatccgtgcaacataatgaaaggttccgcttgatgcagtgacgatcccgcctgccacaataaagacctgatgtaaccaaatacatatataaatcattttttaaaaattcatgaggccaaccagcccttcagttcctgggatactcagcctctgttctcagcctccagctctgccctgggttgcccttgcatcctaggtccagtatgcaggctcttagcattttgcccaatcttacttgttagaaaggtcacaatttcttcaactggccggaagccacataagccctggaagggggtgagggcaattgccatctctggcttatggttggcatcggggtagtgctgtggagcctggaggtgcagcttctctgccagctcctgtgggatgggcaagggagaggaggatgtttaggtgcagccgtcacccagcaagacaccagttcctaccagcccttgttcttgaccctccccagtcagcttcctgcctctggcactgagctcagtcaaggcataattcagaaactcagggttcagccaacccaaggcaggcacatggatcaactctggggtagagctggggcagactttaagaggactataaccagaagaccca

SEQ ID NO: 38382 - DNA, 2236 bp, Bovine  19866880800132
  misc_feature (1)..(1): n is a, c, g, or t
nacaagaaggatgaatctgaatcttaacgtgagaaaagtcagttccaatgaaaaaggagcgatgttgggcaggggatcaagcaggacgccttggagcactaatgaaaacagcccactgtctctgggggtgtgttacaggtgacgagaacaatcccacagccctggatgaagccaggctatagcagctggcagcagcaggagccaaaggcttattgccaaacttccagtgagaagagacatttaaccagcgtctcctgacccaagaaaggtaccttgggctttttcactggggatctggaagaagaagaaaaaaaaaaaaaaaaaaaaaccaaccagaccacgcctctaagaccttaggagccagcactgcattccttagagctgtgcctccccagagacagaagcgcctgactttaaaagcaattaagtatctaggctattttaggattactccttgaccacctggaatatcttattaaagcacagctcagatgtccaaagcaattttagtccccattcctcactcttccccaaggcaagagttaaccctttccttcaggtttaaagcacagaggctaagttactagctcttcacttgagctccccatattctgaaacctctaagaagctgtcctgtccttagaacgccatcacacacactacagctttacagagattcttgagtgttctctgaaagcaacacaacagtaatgtgtttcctttctgtctactctataatctgatagataatgaatcccacccacctttcagatctgggcaaattcctgggccttgaacctcatagtcagctccatgggtagacttcaaaggggctgatcccaagctcaaggatatcaagctggtaactttgaaatataaagtgtaacaaaagtattccagctgaatactgctgttgttagtactgttctttttttaaaataagcaacacatgaactaccttttctttgctatgcctgtgtctctgtaggtattacccctaacacttgtgactgtctactactggacaagtggataatgctgtaatgttaaatgtccagttcccagatctcaagaagaaaagaaaaaacacctctggtctcccaccagttttaactgatcccaagaggtaatgagacatgcacaaaggggtaatgggctggattacaggagaatcctgaaaggagaggggagccccaggaagtaaaacagatactgttagaagcgacactgttggactccagaaccctactgataagatcaggatcactgctcttagctcaacggctcaggccttggaagcactggagttatcattatcagatgcacaccttccgctgtcaggtaactttagcaggaaccagaaagtgcttccccacgttcttactggcaacaaaggtcaattcaaactcggtggcttggaaaaagagccaagggacccttttctgattaagcagcagaaagggggaagggtggaggaagggagagagggttggcagtcctgcctttccatctaggcatataatcacactttcatgccataatcaagaagactgcccagaaatggggtgttcctacaaaaaggaggaagaaaactccaacacactgttggggatgaaaacacatctataccgaagagtgaagtggccccgacaaggctaagtctaagcaccccacaggaaagttccagctccttttctctgcagtatttgagtcagcagcacagattattcacgccgttagctaccaaccacctgactgtccataatggttgctgacatcccttcacacggcagagctcaggaagccagagcgggagagccgagcgggagaacacctgccctgagacctgaagaggtcaagaaacctgccctaagtcagtgcttcagaaaggtttcacaatttttttttcaaactacatattttaaatgtatagaaagaacaatttttttttaaactgctatgatgaattatttcataaagtaaaaaaaaaaaaaaaaaaaaaaaacttttccttcaagtttgggattctacagagcaagtttcctcaggcagaaaagttgcattatgtttagaaatcaatcccactgacaatctgagagcttctcctggggcttttgcccaccccactcccacccccgctccacaggtggatggcactgtggcacacacattgcgactctgatgccagccacccctgtgctgcctgccacctttcccaggctgaatctctctcata

SEQ ID NO: 38383 - DNA, 1494 bp, Bovine  19866880896139
  misc_feature (1)..(1): n is a, c, g, or t
nagcctggcaggctacagtccatggggtcacagagagtcgaacacaactaagcaaatatcactcactcttttacttatgatcagtgagcaaataaaatgaaggctatttcctgaaatgattgatgaaagattaacagaagaggaccagaaatatccctttaaaatgggcaatcatataggtcagggttatgggcttcccaggcggtgctaatggtaaaggactggtctgccaatgcaagagacataagagacttaggttcaatcactgggtcaggaagatcctctggaggagggcatagcaacccactccagtattcttgcctggagaatcctatggacagaggagcctggtgggctacagaccatagggttacaaagagtcaggtatgactgaagtgacttagtacagcacagcaaactatagctcatggactaaatcctgcccactgcctgtttttataaataaagttttattagaacaccaccactgtcatcagtttacctattgtcactggcaacactcagccatctaatccacccaacctatatttcctgctgggcttttggggagaaagttcactctagataagtggaggaggaggacatgctactgagcgaatggtgagaaggacagttagactgaagcgaagacagcagctgacacgggccaggagaagaggcaggacaggcccagggtaaaggagtcttgaggtctagaatggtgaggtcacctgtgaggcaatggggagccactgtgggttgtggagcagaggagagatggcatttgttttcaattcattgccattattaaagaggtgtaacatggatcatccctttctcaatctgatgggggaggggggttcatttagacataaacagacagaacagatgggaaacttacagagcagttgcttgcttggaacgagtgttggcttaaagaggagcagctggggtttgtttccctacttactggtgtgggagtcgtctcccgtgaaagtgtaagcaattaaactggtggtggcaaaactcacagttggcagcacttctgaatgtgcctgcccaaggggtgaataggtgctcccccaaaagtgagccttctctgatcttgcctcttggaaatggtgaattaaatcagcaaagtaaacaggtttctgttcccaccaattactcggaatctggacagtaccattatgtatttagattttactagagggggtactgaaattaaaacatgcttgctccttataagaaaagctatgacaaatatagatggcatattaaaaagcagagacatcattttgccaacaaaggtccatatagttgctctggtttttccagtagtcatgaatggatgtgagaattgaatcataaataaggctgaatgacaatgaattgatgctttcaaactgtggtgctggagaagactctcaagaatcccttggacagtaaggagatcaaaccagtcaatcttaaaggaaatcaaccctgaatatt

SEQ ID NO: 38384 - DNA, 1785 bp, Bovine  19866880951522
  misc_feature (1)..(1): n is a, c, g, or t
nttttgtatgtggatatctagccgtcctgcaccatttgttgaagaggccattcttcaaccattcagtggttttggcacacttgtctaaaatcagttgatgataaatatatagatttgtttctggactctcaattctattccattgatctataatatatgtctatcctgatgccagtaccatactgtttcgatagctatagctttgtattaatttttaaaatcaaaatgtgaggctgtccccttggtagatgagaacactggctcaggaaggagaggtgactggctggaggcagcggggctgttcctgggctgcagggtggggagctgaggtgagaggatgaatgaagtgggttggctaatgatcctccttcccagagggagggccctctgcagtgagcagccctaggctttccatgtcccctaaagggctctacccaccgtcactcttaacagtgaaagcagcagccacatcctcccttccaggcctcacatggcccatagattccctatgggcattatggggcctggtggcctttacagaggcctggcctcacaggccaggcttttggcccatagggctctgtgctgcccagagatgcccgggtggtgttcagcacacagtggccacttggagaagagcccctcacagggagctctggggcccaatcccactgtgctctccccggcctcctccgcctttgcagtggttggattgcagccctgtctacgatgaagcacaacttggctgtgtcggtcatcatgatggtggtggctggcttcttcaccctctgtgccgtgctctcactcttcctcctgaagcgggtgagtgagtggtgggtgctgggccaactgcaaaccccaggaagccccagcccctggggtaggcacctctctcctgctttctccatgggggatgttcatcactacagcagttgcgtctcctgggtcctcagagctccagcagcttcctccaaggctctgggtgggaggtcagacaggctggggtccgtggtggctgccttgggcccatgagctggtggcccccaggcgggtggacttttctcaccacagcctctttctgcaggtgcactccctgtaccgcaggacaggggccagcttccagcaggcccaggaggagttttcccagggcatcttcagtagcaggaccttccgcagtgccgcctcatctgctgcccaaggagcgttccaggggaattagtcctcctgactcctccctctgccctggccttctctctctcacctgccttttgagctgcactttccacgggtgccttaagcattgggtatgcccagcacagacctggggagggtcttgcccatggctcttcttcctccctcagcaaccatctctcccttccacctgaggaaaggggagggagggacagggacttttttctacacaagaggaaaaaaaaaaaagctgtcttttcttctctggtggtggtttgataggatttttttgtatctttggaagcaatgggactgaagttctcttcttcacagatacacacatatactcacacacatacaaacacaaacacacgcacttgggatcactggctgtactgggcccaaccaccttgagtcctgagattccactcctccccagcaggcctgacgggaatctggcttcatggacccagcctgtcacttccacagtcctgcccttccctcctgctcagactctgggagcctcctaagggctcccctttagatgaactgcagtactgggctcttcctcagaatcactactagggtaactct

SEQ ID NO: 38385 - DNA, 2456 bp, Bovine  19866881021058
  misc_feature (1)..(1): n is a, c, g, or t
nctgcctgcctcagagcccagagctctctccattcattcctgtcggggactaacgggcatcctgacccctgagtcctcccaatcctacctccccggctgtcccagtttctataatagcctacctccctttccctccctcccaatttcccagggcatcacttgccccaaaaaagcagtcagatgatcagatgactgcctgccggggacattacctctaagtgtccacgatcccccctctgcgggttctgggatgtggtccctggctcccttggcctgaaagacttccagcccacgcactaccttcacacccacactgcccttcacctcctccacagcccggtgacaacctcccatagcttcttccagctgtaagagcctcccattctctgcagaaggctcagaaagtcctatctcccatccagccccaagccttcatgctgcaaactccaaaacggtatctctctgatggccctaagggagaaccgagacaaatgccctcatcactcaagtgcatcggcttccaggtctgcagaaagggagcctacagctgcctcagcccaggaccagcctgccttgtcctggctcctgctcccagtcttacaatgtcaccccgcctacaccccagtgctctatcctgctggcgggtcacaatagtcaggccatccgctgctagagcagagcaaggacagggctcagtgggtggagccaggatgaatggaggagtcaaggggtggtggatctcacaactcagaagccaagcctgtgaacaggaaattactctccccaagactcctaagagtcaaaacaccaatgagaacaccatgaccctgagaaaaccccaaggtgaagcaacagctggaagtcacatggggcggtatgtgcaattgagggggctgcctgaggcctagactacatgaccccagaggtgttaggcactgcgggagacactgcttttctgatggcaccactacccagtcccaaggaaggcctattgctcccagggcatcttcgcccacagtctgggaccaggaagttgctctaaagccacctcagggctgttttctttacggccaatgatcttctgggatgcaggctcatctttcagaacgttctattctgcttctggggccagccagaccccactcccagagggagcccctctagggaagaggaggtggcccagcagtcctccgcaagaccctgcaaaggcgctgccgtcagcaggcccttcctcacatctcacaaaacgctttgcatcccacagcagatggttcctcttacttgcataatctcaaagacagcaagaggagccaatttcctcactctgcctagcagaggcccataggacacctgggaccaggccctcccacctgactttccacatctcttcctaccatcctcaggagtcagggtgctggaccaagctacacccagctttgctcacactcaccacatttctgcctctgaatccgagtaccttccagccttcgatgccctcctccctctgccccacctcctccaggaagccctcactgattgactctttcacagctacacatattaactcctgacagctcttagccactcagttctcccttccaggtataactatccaaccagatgttaatgacattactctttatactcattttaaccaagcagactggagagggggtcccgggtagccccttacctgtggttaggtaaagcacgtggaaggtctccccattgctggcgtgcatgcggtggacaaccactttctggtagtggtacttagagtggaacagtggtgccttcagaggccccatgggctccaccctctgcaccacctcagggtgactgtcggccacctggaaggtctctgtgggtatcggctgccggtctgggaggcactgggcgaggagaacaggtccagatcagtggggtggctgggagatggggtcgcggcctgggccatggcgggtgtcactgctcaccttgccaggccgtgggttggggaggctcgagtggtagcccttgagtgaggaagtgcagaagaccttgtcaatgtcaccgagggagtacacgcagacagccgagtagttcctggggggacatagagaccacctcagtgggaggcccaggaccgcccacctccactcactcaggccagccccgcaccagatggagtataactatagccttgcgaccaagccacctggccttcgagctctgtgacagcagggactttcctggaggccaatgccagtgcctgagtgttagcaaataccactgaaggaaggagagaggcaggacagaaagagggagggacggaagttcagcctaatttctctcttttgcaatataaaaccacaacctgtattctgtcacggaatcactgagttcagaggtcaagcccagggcaggagaaatcccaacacgcgcatccttgggatgctaatggccacagaggccag

SEQ ID NO: 38386 - DNA, 1106 bp, Bovine  19866881034763
  misc_feature (1)..(1): n is a, c, g, or t
nagtttttctgcagatggtatttcagctgtgaagagcaggctgccatgagtcttcttttattttttaagttttatttatttatttgttttggctattctgggtctttgttgctgcacaggcttttctctagttggggagagagagaggactaatctctagttgcaatgcatgggcttctcacggtggtggctcctcttgtggagcatgggctctagggctcccaggcttcagtagttgaggcacacgggctcagtagttgtggttccctggctcgagcacacaggctccgccacatgtgggagctccctgaatcagggatcacacctgtgtctcctgcactgggaggtggattatttacccctgagccagcagagtagctctgggatgattctctagagctacagaattgctggggactctgagagccaaaggagagactgggctacagagcaaggtgatggacttggaagtggacttgccacagcttccacataaattctttccactctctgtggctctagctcctacttggtgtaaaggatagacctttctcgggtactgcaaaaattctcagacagagcctgagatgcaaaggtgaaatgaatagaaggatgctggacagaattgaagtctagcaatacctcccctgtctcctgcctattctgttatctaaattccaccattatatcattagcactttgggctcaacaccctggtcatgcaccttaatacagatggatttaactcctttacctgttattaatatcttgcaagatcttggcttatcagatcaatttcccaaggctgattttctgtgttagagcatggaggatggagtgacagtttgggtccgtgtcctgtcaagaatcaaatgttctgagaattaccatgaagcaatgctggaaataaaccaggagaaatctaacttgctgtggaaaggatccaggaagtgttctcagaggaagtgatgtcttagctgaggctttaagtaggaaagattcaaagtagaagtgggcattcctgttaggctctgcaaaagattctggtttctattcagatgggagctactggaggggcaaggtggtgatggaatgagatttttcat

SEQ ID NO: 38387 - DNA, 1374 bp, Bovine  19866881058193
  misc_feature (1)..(1): n is a, c, g, or t
nctgaaagcactgagtcctaagcactggaccaccagggaggctctcacaattctctttttagccaaggcaagcttcagtgattcctacacaaggcagagcttgagagtcatctagggagagctccagaatagtttttaaaaatgtagactccagggtcctaatgaattaattcaggaggtggaacctaaggaatctgtgctttcttcgccttctgctgctgcttgtctttctgacttgccatgctccttttcttcacccaaagaatgggagtgatgatcaggtcttccaggccaggtgacttggtgctaaggcagggagttcataataaagctggtaatatttgggtactccctgtaagcacataatacttcttttttttccctgaaaaatacttacttatttatttatttggctttgccggctcttagttgaggcatgtggggtctgtagttgcagcatgtgaactcttagttgccgtatgcaggatctaattgcctgaccagggatggaacctgggccctctgcgttgggagctcagagtcttggcccctggacctccagggaagtgcgcagcatacatacttcttgtggtccgatgatgctgtttagaaatcagttgtgaagagctatggatttacacagagcaccaagaagccatatgagaaaggtcctttgtaggctgaagaatcagcatctttgtacccaggagccctacctatgcagttggtctgagctttacagtagcagtgttggcagtagattccagagccagcgaagtgggttcaaataccacctcttccatctattacccttgtgatctttcagtagggctcttaattcctttgagccctctgtgaaataaaaataccaagcgtacctccaaggatgttgtgaggattaacagagctggctcacggtggtagcagtgccccaggtgctttttcatgcacgcagtgccatcctccgctgcagctccgcagacatgctcagaagcaggggagacaccgagaggcgcagaggtttcccctctgatcaccaggaaggtggtggcagagctcggactaggatcagagagtcctagcttccccgacagcagcagcctggctgccagcccagacccgcctcccggctgattgctttggtttagcaaaacatctgtgacttgccggcagcccccgaactgctgtgtggttggcagagttccatgctggccgctgagtcagctcctagcaggagcccgccctgacagcactggggaaagttcaggcccgaggcggctgggctgcccctgccttggcagctggccagcctctgcgtgtgtgccggtcgttcctagaaagtgcagcctcgtgcgaggaacaagtggagctcca

SEQ ID NO: 38388 - DNA, 939 bp, Bovine  19866881074188
  misc_feature (1)..(1): n is a, c, g, or t
ncacaaggattgcatcttctctctgccttctctgctctctggagagtcccacagactgtcagtaccagcagggccctggagatcacttggtccaactcccacaatgaccagaagataaatgggaataggctgtgcccaagatcattcaaagcttagtggtgaaatccgctctttcctgtgccctactccatcttgctcttttccttgccctctccatcaccttgtcttttgctctgtatttctctctctcacttatctctagagccttcggtcccctgaagatcccaggtccccaggccctcctggctgttcccacaaatagggacataagacctggggtggggaagcagctttgtaccctgccccctctgcgagttccctggatgagagccagggtaccccaacactgagagagggaaacaaaaccccacagtggtccagattccaggtcccctccctccttctgagtaagaagctgatctaagatcttagaacatctcttttcagagagcagcagccaaggaccctcgctcatctggcaggtccccaagggtttcctcgtgcctgcagcctggcatcttcctgttcttcctcttcatccagactgtaggcttcttctgctatgtacacttcaggtgggcattcccatgcgcaggacttcccacacctacctggcatctcttgggtctggaccacagagattcagtttgagagaggggatactaagattccagtggggagatccacatgacttaccagctggcaaggagcactgcccaagttagggcccattttttccatagagatgtggactacctgctcagctgctggtcccatctgagtcctctcttcacagaattcactctctaatgtgagaaactgacaagtaactaacagtcacatcctttgtgatcagggccatgatagcaggaagctcag

SEQ ID NO: 38389 - DNA, 923 bp, Bovine  19866881088158
  misc_feature (1)..(1): n is a, c, g, or t
ncccagagccttactgccctctcacctcgattcagggacaggcagacaggtcagggcccctcagggttctcaggctgtgagcaaggagccagaatgggggctcggccccctcccactccctaaccccaggccccagccagcccattttgtgagggttcagtgagtgttcactccccggcctccccacggctcgcatccctgctctttcgctttggtcctgcaaaccactgaggggaaagggtctgtccagtcccattaggcagaaggcccctggagggcggagtgctgacgtgggccttgctgctgatgctgccgaggtggcccatgccccaccccccacaacctggggccagaacttggtctcctctagctccaggaaggtcaggaggggtttttgtcccatgaccctccttgggggcagcccaggcccctttccctggggtgttcaagagagaagacccagcgtgacagctgagcatcactgcccagatccggggcctgcgtccctccctgcccccacaaccgaaactgccagctcatggagattgttgttattccttggtggtttgatttgttctctttgggctggttagttaaagctctatagggtcttctcccatcctaactcatcgtcctctctttctctcccacctctccctccccacattacctactgcacaggttttatgtttcttgttcttattttacaaaggaacctaatggaagctttgcccttgaaaccaaaccccaagatggctcttctgcctataaatcttggctggcttctctacagtcctgtgtgaaacaggggcaccaggatctgcctgtagcaccttgctcctcgcaggcctctgagatggcctgcttgcagagcctcctggttggtctcctggataacccccaccctcgggacacacacatag

SEQ ID NO: 38390 - DNA, 1277 bp, Bovine  19866881555043
  misc_feature (1)..(1): n is a, c, g, or t
ntcccctgcaggggtgggtgagcctgagaaagtgtctgggctcccctctccctaggaccccaattggtacaaagccaagaacaaggtgggccgtgagggcatcatcccagccaactatgtccagaagcgggagggtgtgaaggcaggcaccaagctcagcctcatgccgtgagtacctccaaggagcgatcagaagctccagtctgggagggaggaggatgggagccctgagtccccaggaagagagtcaggaaagcatgaaggcaagggtaagagctgggatgtccatgagggcctctcaagaggaagggcgtgggtgcagacctcagaggggatgaagggtgggaagcagaggacgagggcctcagtgcctgtctgagccacaaactctgaggaggcaccagccagagggagggccttcaggacgtggaacccagcactgcccttgggctgccacgaccccaggcttggcctccctgcagctggttccatggcaagatcacgcgggaacaggcagagcggctcctgtgcccaccagagacaggcctgttcctggtgcgggagagcaccaactaccccggggactacacgctgtgcgtgagctgtgatggcaaggtggagcattaccgcatcatgtaccacgccagcaagctcagcatcgatgaagaggtgtactttgagaacctcatgcagctggtggaggtgagcgggaccccagggccagctgggttccggctgcagccccaccgccactggcagggtgaccttgggcaggtcctgcggcctcggcgagcctgcctttccctgcgcctctgtagagcccctgtcgtgtgccggggtttatctctgagcccacagtgcctccacgtggagatggcaccccagtatgtaggccaggaaacaaaggttcagagcagttaaggggcctgctgctggtcacactgctgtgatttggaggtgccaggactagatctaagtcttctgatcccagagctagcttccctccagccactcagaactgtctgcccaaccatgtgtgtataagcatgtctcctcgagctccaccttggtggcccccttgtccggcagttcccaaggccgactctgccccaggcagccttcagatgcctcctgcacccaccctcagcactgtccccgccgctggcctgacttggggcaggggtcctctgcacacctagctagaggctgagtcagggctgttggtgaggccaagtgatagcaacagctggtgtccgtccagcacctggggtgtgggg

SEQ ID NO: 38391 - DNA, 3004 bp, Bovine  19866881719442
  misc_feature (1)..(1): n is a, c, g, or t
ngtagcctgccggctcctctgtcctggaattttccggcaagaatactggagcgggttgctatttcctactccagttttattaactacaccacagtaaaaaaaaaaaaaaaaagaatagtgatgtgtttttttttacaatttgccaagaaacccagccttttggagtctcagggagtactgagggtgagggtaagattgctttgcactaaaggcatggggaggagtgggcagggcaggagaagatgacaaacggggtctcttacgtggctctgctagcttttttctacgccactgtctttcctgggcctggtttgcagggtccacctgccaaggcggcaggtgtgctgtgactatttggaccaaaggtagattctgttctgaggggacccaacgctgactgacaaatgggtggttcaatcaaactcctctctcaagaacctgaactgaggggttgttttttaattaaaaaaaaaaaaaagttttatttggcggcaccaggtctaagttgcagcacttgagatccttgatcttcactgtggcacgaggactctttagttgaggcatgtgaatggttagttgcagcatatgggatctagttctctgaccaggcatggaacctggcccctctgcattgacagcgaggagacttagccactggaccaccagggaagtcccatgaactgagttatgtaaaggaaagtgctacttaggggtggatgcctctgataaaaggagttgagagtctgaactggacaagataggagactttgaaaaatcacttaatttcccctgttaggctgacatgaaattcccagcccagggcttttcccagtatagggtctcccccccatttcatctttgccaaattacccttccccagtgccctgcaccccgcagtttgccagattctcgtgggatgttgcccatagcagaccagggatcattgccagtggcctgatcttggtttatggtaagacctcagagctggctgaggatgggggatcagaggcccagtgaaagggagggacttgcccaaatttaccacacctaaaacctgagttcagggctcctaatcctccagcccagttttctctccaactcttcacacggttcaatgatcgtattgcatttctgagctgccctgttctagccagacagtcctggctaaggaggtgaggcaggggaatagacccagccttgagtccctcccccaccaattctgagccttgtgttccttatctctaaaggggtggtcacagtatctgccttctgaggtttttgtgagaacaacctgggatgatgtatgtccagggcctgcccagaaagggacaggacagaactgtttcagtctgcctccagcctgctgtgggaggcagaaggtgcatggggggcaaagtctccacgtcccatttctgctcctttggccctggcacgaagggaaccctaagtcagcccaagtgagttaaagattggccaggtgtgcgtgagaagctcaggccaacttctgaccacagggagccagccagggcagtgacctagggtgaccgccgctgggccttgactgagtcttggatgggcaaagtatggtagtgtctgtttgttgcttgttgggggtctttacaaggggacaacagaggatgagatggttggatggtatcatcgactcaatggacgtgagtttcggtaaactctgggagctggggatggacagggaggcctggtgtgctgcagtccatggggtcacaaagagtcggacacaactgagagactgaactgaacgtgtgccgatagggtgccttagtggagttttccagtagttagaggctccagaaggataggaccatgtccctgacagactggagctcccagagcaagggcccatctccttgctcagacagggaggtgtttcttgagattcccaggcctgggctgcagcccaattattagactgggccttgcagagcaggctcatttccccctcagactggagccccccggtagggctgctgtctccttcctcagcttgcgacatgcaggaacgggtctcaggttcccaggataggactgtcctctccctcggaccacaattccctggggcagagctatgcctccttcgtctgacaggtgagctggctttcctcagaggtttccttgaggagtttgctttgggtgtgaggacaggcctggaaacagacaagtggagctcaagtgaggtgctttcttcctccaggactttaacagagaatctggctgggtttgttctttttctttttttaaattaattaatttatttatctgtggctgtgctgggacttcatttccgtgtgcaggctttctctagttgcggcgagtgggggttagtctgtagttgcagcgcatgggctcctgactgtggtggcttctcttgcggcggagcatgggctcaaggcacgcgggctttgtagttgtggtgcacaggcttattgcccagcagcatgtgagatcttcccacaccagggatcaaacccgtgtcccctgcattggcaggcagattctttaccacaggaccaccagcgaagtcctgattttactcttatattattttcttcaaaaccgcagacagccatgattatttccagaaggttggggcaattcagccactgcatgaacactttggaaatgaggtctggcttgttttcatctcatctctgctgctgctgctgctgctaagtcgcttcagtcatgtccaactccgcgctaccccatagacagcagcccaccaggctcgcccgtccctgggattcttcaagcaagaacactggagtgggtcatctcatctcagagaactgcaatttgtaggacatataaggctgaatcttgattagaaacaaagaaggcaaaaattaactgaaggaacgtgtcagcaagagtgcagatggcgcgtattaggtagtagcggtcctgttggccaaaggtggcattgcagcttagctcgttagtccttgggttatcgctcagaagcgga

SEQ ID NO: 38392 - DNA, 1261 bp, Bovine  19866881920887
  misc_feature (1)..(1): n is a, c, g, or t
ntgccgagacactggagcagcacctgtgccttcctgttcctcctcctgaaatctgtcctgcctcctccaggtggcttcctgtttgaagggctctctgatgatgaggacgactttcacccagtaagtgacgggccgcccgccatttgggggagatggtgctggggaggcgccctcctcaggacctggcacgcccagcagggggtggtcagaggccctgtgggggcccaggtccgccacactattgctgtgaccctggcagcctggggagtctccccaagaactgttcttggagcaggggtggggttctgaaaaccactcagggcttcccccctgatctgggcacctcccttgtccagagtgccaggtccacgccctcaagcagcacccccagctcccgcccagcttccctggggtacagtggagctgctgggccccggcccatcacccagagcgagctggccactgccctggccctggtcagcactccggagagaggtatggagagagggtggggaagtccaggccgagcccccaggtatggagagaggggtggggaaggtccaggccgagcccccagggagaagggcccagtggtagagtgggtttacctttgctgatccttgtgctccatctgctttgatctgagctctacctggagccccagtgggtttcccactgcagctcaggcgacctcccctcacctgcctttaggctcagaagtctggggctcatcctaggcctgactgactcttctcagcagttggaagaacctcatgtcgcataatggttccttacttattcctgaaagtggccaggcgtatatcacaggcttaagcattcctggtgatagtcactccagccagcaaagccatctttcctctgccagtatgggtcctaggctcggtcaggggtcccattccatctccgtggagcaagagagtacagaacccttcctgcgcacatagagagctttaaggtggctctgtggctgtctcctgctggcccctgctgggaggcagtggtgaggcacgcagggcaccgtggggcgatgtgacggcagcgggtgtgtgctgggagactggggtggctctgagggtggcactgaccatggtctgtctctagggccactcctcagggacctccccaatgtcctccagcgtccagtcagggacgcccatcaccaacgatctcttcagccaagccctgcagcatgccctgcaggcctcagggcagcccagccttcaggtcagtcttccccgtt

SEQ ID NO: 38393 - DNA, 643 bp, Bovine  19866882182869
  misc_feature (1)..(1): n is a, c, g, or t
ncctccccgaccctggcctgggagccctgcaggagtaaagccaggctgactcacgtcctagcaggggccaggcccagagcggctgggccgtgattgagtactgaatgaatgaaggaaccaacaaacaacagggggaagctaggctggctgcaccacactgtggtcccacaaccgacaggactatatttaaccccaaaaggacagcagctgccaccccacccccacagagctgggggacagggggctttcactcctacttcctgccccaaaccctgctcccagcagtccttgtgctggggtcccgggaacaggctgggcattgtgcccaagcactgaggtcagtggccgcagcctcaggcaggctttcttgggagcccaggctgccagggaggggcgaagcccagaaactgccctcttcctgctttggggcagctgtagaccccagagccaagcacgtgctgagggccagagtaggtcaaggggctcctgccctgcccccctcaccaaaactccactgcctagtggggcgtgggagccttcagtaactgtttacacccagctaaaaatacccactgaaaagggaagtgcacaggagacctgggggggactcgggggccacagtccccagagactcaggtccagc

SEQ ID NO: 38394 - DNA, 1834 bp, Bovine  19866880347367
  misc_feature (1)..(1): n is a, c, g, or t
nttagtaagaggaaaggacattgacacaggaaccacaagggatcaccccagggacatcacatgacacaaaagaagggggctgggaagactgttcagctgtgcaagtcccccgcgcagagctgtaggtggccaggccagtctctggggacaggatcagagtacagggcccaggagccagcagactgatgccaggactcgtgggaacccatggctctgtactgagtgcatggatctgcagaagctcatggaatcatccacttacgatcttacatccactgcacgtaaatgtgccctcaatcagatagaagtagcaagcctcaaagatcaacatttggataaatttggacttggagtcaaggggaagaagcggcccggggaagtaggcctgacagcctggggtgccccccttgggcagaccgccccctcttccaccctaagagtcatgatgcaattcggcttgtcgcccttcggcccttctggtcctgtgggcagaggcaggggccgtgggcgcaggtggaatgggcaggtagctgctgcagaggccatgcactgacaatgtctgtccccctggctcccacctcgagaggccagcagcagcctcagaccccagaccccagaccaccaagccaatggaagtcagcgtttccaccttatacctgtgtctgtgaagatgcccctgcacctgaccctctaggggcaaggttcccacctgggccttcaaatggagggaaagggagtgggaggtggggtgaccgactctccactccatagcttccaagcaaaggtcaggacccagacttggggcctccccagaccccacccggccttcgaggtcatggccaaactcatatctccaacctcagtcccttggttcccttatttttttattggaccacagttgatttacaatgttgtattaatttctgttgtacagcaaggtgaatcagttatacatatacatatatccactcttggattcttttcccataaaggccattacggagtattgagtcaagttgcctgtgctatacagcaggtccttattagtggtctattttatagacctatataaagtggtctatataatagtgtgtatatatcaatccaaccccagttatcatctctgatggacatgcactgcccttgagctgtaacccataaagcaacacaatccactcctgtccacccggagcatcggccttcatgagagcggctgggaacacccgagtaaattagtcatgagggagcctgtgggctgcggaaggtaataaaatatattgacactggcaagagttaattaaagctttacaagaattcactcacggagggcctttgagttcaagccaaactccaaaagcctggagaaattaatgaaattcacacacgtccccagcctggccatccacataggtactaataagccatcaacaattaacacgagtttactcttttgttaatgacttaatttgcaatagcagagtgtgaaagacagcattgtgcagtctgcagaaggaggcaaaggcattctcaaagacacacacttgctttcttacagttttactttgggtgatgaggaaataaatcaagcaaagaaaggttattagtgccatggtgcatgcaggtctaaagatgacacctctgtctctgggacatggctggaccccctcccctgtgggtcagtggagccatggacactaagagagccacagaggggctgcaggtgtggcccgaggcagacctgtagagacacacagcctgcagaggaaacacacccagaacaggatcaagtcaccaccctgaaggtgctgtcccagagccagcatccaggggcatt

SEQ ID NO: 38395 - DNA, 2327 bp, Bovine  19866880373769
  misc_feature (1)..(1): n is a, c, g, or t
nctgatgcacccttttctgtaataattaaagcagaggcacgaagtagggttttttttttttaaattatttatttggctgtgccagggtctttagttgtgtcatgtagactcttagtggcggcatgtgcgatctggttccctgaccaggaatcaaacctgggccacctgcatggacacattgtaggattggtcggccagaaacagactgttttagtcagcatccagttcactcacatagaagccagagcaacttcatcatatctccatctgtgagaatttctttcatcagtaggttgtgccctggagaaggctggtgggggtgctcactggtcattccccgtccctcccactaaggttaaagatgggcttctcctgttatatcaggggtcaacaaaccactgtccacagacaaagtgcagcctgtctcctgtttatgcatggcccagggcacaaggtgagcaatgtgagcccaagctagggtgtcccctccaaccttgcttcccactctgctcccaacacctgctggaccctgagctctggactcccagtctggggattggagaggcattggaggaaactgacttagcttccagttagttttcaagggggaaccaactggtcctccaggaggaacaggtctgggtgtcattggcaaagagaaattgatggcaggggctgaatccccatcaactacccccatccatctaatctggtccaccaggcccccacccccaacaggctgttcttcttgaggtggtctccagccaatgcagttgaacccatagggtgcccactaccaagggcaaatttatatttgcttcttgacccagagggtccagccgggctttcctgatagctcagttggtaaagaatctacctgcaatgcaggagaccttggttcgattcctgggtcagaaagatccactggagaagggataggctacccactccagtattcttgggcttcccttgtggctcagctggtaaagaatctgcccacaatgcgggatacctgggtttgatccctgggttgggaagatcccctggagaagagaaaggctacccactccactattccggcctggagaattctatggactgtatagtccatggggttgtaaagagtcggacatgactaagcaatgttcactttcacttttggactattaaaaaaattcatataaaatgcagaaaaacagatcaaaataaaaagacattaagaatgctttgaattcagcagtaaaagggagaagtcctgaggcgcactgatgaacctcgagatgtcacttcggagtccacacaccactccatctacatgacgtgaccggacaatcagggcacgaaagaaagacggctctggctacaccacacgtccaggacaaccaagtcacagagacagaaaggaggcaagtcccaagaaggagcatttgggctgtggtttggggacagtgtgtggctgaggttactgcttcctgagtccctctctcaggactctacagaagacgagccccttctgcctggggcaggcagacactcatcacagaactggtcctgcctttgacttcctggtggcaggaaggtgttccttccctgtatgtcagtgagattccaacgtcagagcctggtcccctctgcggagcaggaccacgagctgtctgcagaagcagcatcttcccaaatacaagaggcccagctgggctctggcctgagcccgccagacgtcctgtcgccacacagaagccatgtgcaatgagaacacatgggcgacaggccctgctggctgaggggatggcacgcagatcacggagcacccggggccctcagcaccgcccacccccgtcccctccgctctgccaagggctggaacacagcctccctggaggagcagaaagtccagaagcagacctgacaacgcctggtgactttcttgtgtgcctgagggccgcaagtgggcaaaggaagaaaaccacacccacctgccagccattgacaatcttctggttgaaaatcccaaactcatagcggatcccgtagccgtacgccgccaggcccagggtggccatcgagtcaaggaagcaggctggaagtacaaacacagggacagtcagcagatccgaggcctctgagcccaggcctggacaccgaggcaagcagacaccccgtgttggggggaagcccccagggtggcaggcagtagctccgtggggacctgttggcctcaggtctcgtgaaaaggaaaggctgaggctgctgggccaccgctgaggctctttcgcctaagagcctatggccaagacagcatcaacatggggactacttgggggcgt

SEQ ID NO: 38396 - DNA, 1417 bp, Bovine  19866880417539
  misc_feature (1)..(1): n is a, c, g, or t
ncgcagagcctgtgcttctgtgggaatggccggcaactcagtggctacgaggcggggctcttgtgtcggctcagggaatcgatgtaatgaaaagtggcgcccagagcccagctggtctgccacgttgtcgatcttccgggtcagcttgaagagacaagcagggagaggagcacgtgtgtggggaagacgggcacgtgctcttgaggggcagggagggggcaccccagggttccctaccttcagcactttgtcccccgggaagccgagctcctggagcagcaagctgatgtaggtgaggtccaggcacaggaaggggctgggtggcggccgggtctctgccgtccggcacactgagggggacacggctcctgggtgtgggcacgggcccaggctgcctagttacacccatgcagggcaccaccccctaggccctgtgccgcccagggcctccctgctggtcagagcccaggaccagcagggacttgaggtcaacccagggtctactacccaccctggctctgtctccacccggtgaccccagccacctctcctgggtgtggacccaagcctcctgaggactggaaacaccctcaaagctgatgagagagagcaacccacccctcttagcgaggacagacaaaccacccatagcctctgctcagagccttctcccgctggtgtccaggagacaaacccagaagtgaggagaacgatggaaaagaagcctttctgggggcagggagaggggaaggaggtcgttcgatggagaaatacagagttaactccttggacctgcaactgggaaagggactcagggtggaactgctacaagcggcctgcacacctgccagtggggagtgaggagggaagggtgggcaacccgcccccggccacaccctagggggacggatcttggtccccctctctgggctctgctgtgcaggggtccctggcaactgtgaatctgctgggacactttgggggcttgaggttaccctagccagagtcagaaaaagtgaaatcaggggagtccacgcctcacaccccaggactaaaacccttgcccctaccgctcaggccacacaaggcgtggtgggcttggggtccagctggctcggtggcccctcacatgctcacacccctgaaggcttgtctgggcgacaggcaggagctgaagagaaattccggggccagggcctgcctcgagcccgggaatggtgtcctgcctccaggccactcaccatacttggccgctatctcaaagtcttcaacgacaaggctgcctcccttctccgcatctgtggatgagaccaagtgccccgttggcaccagggctgcagagcagagacagcactgaggccctggggcccacgcacccgaggggagaggtccaaaggtggacggctgcatgtctggg

SEQ ID NO: 38397 - DNA, 1345 bp, Bovine  19866880477545
  misc_feature (1)..(1): n is a, c, g, or t
nctctcccaacgcagcgtgggcgcccggtgggtctctgcgcgcaccccccagcgtagcccgagccgagcccgagctcgagccgagccgagccggagccgggaaggatcccgagctggagctgaacccggcaaattctgcgtccccgggtgggtcttctgcaaaccccaggattaagcgaggggcttccgataaagataattacaaaaggctgcgcattaacttttcattattaaaagaagacccaaatctccccctcgcaagctgttcctgagattagcaaaaccataactttcctttaggataattgtcttttgagtcgctcggggctgggggcgtctttagggaccagcgtcgttttgggctctgccaggaatttctccccaaatttatctctgagtttaggggaaagtgttaggggtacaagatccaaccacgatgctctggctctcggcccggcagagcaggagttcgtaaatcaggatttggggccgcagttaaggaagactgctaaagatgcacacaactgcagacatcccgagcaggaaggcgggacaaccggccttgaggtcgccggtcctggggccttcgcaggggctggtctcagagacggacgtgtgtgcaccctgtctgcagcttggagggccgacggcgcccgctggcctgtgccggggtctcgaagtttctgtcccccagtccctaccagagcaggcctcgaatagatggccagggacccccggggtaccaaaagcccggccgaaaggagcccaatttcgaccgccactgagtgccaacagcacactagtttccaaccccttaggaaggatattacaaaacccattttgcagatgagagaaattgaggtgtattaacccgctcacaccggacacgcagagagaaatcgagaaagcaaagcgaagcaaaggaaagactcggggtgggagttataaggagatcttggaattcctggacggaagagtcactgccgccggctctggccccacctacaagaaggggctcgcgggagggaccaggatgcagggagagctgagccctgggcgcttccctttccgccgcacggtggctgcgggggcgggcaatcccgccacgctaatctgcgcccctattccacccgcagacattgcgtgggatcgtgggtctgctagggccgcagcccctggggatcgcgtctagcgctccgcccaaagttggcgcagtgagggaagcgcgcccagagtttcaggagacggggagggagcgagctggccctaagcccacccacattgcactgtcccccggcgtcctggcgggtgccttgaatccagataatgttcggcggcgacagca

SEQ ID NO: 38398 - DNA, 1082 bp, Bovine  19866880787452
  misc_feature (1)..(1): n is a, c, g, or t
ntacagatctgagagcaaaggcagatgcggcaaaagcagatgcagaggccccacagtgagaggatgtgctcagacgtcagcccagaggcaagagaacgcgtgagagctgtgaaccgccaacctccactgccttctccctcacaaggggcccggcccgcagcgggaccctcttccacacctgcctggcctgaacacgagtctgcccgacgcccacctttctgccgagctggaagggcacgaccgggtcgtcctcggcgtgcaggatgagcagggagcaggagatgtgcttcacactgcaggaggcggagggagaaaggcactggatggccaggacaggctgggcctcccgggctcccgggctgccagcagcaggggccagtgagggagccctgcactgcagcgtggagcgcctcaaactgccaggcgcttttaatacaaagccagcagctgatttcttagatgtttccatcagtatctgttttaggtgacaagtttcaatcaaatctagagctcacttcattcaccaaatcgggtccctgaatattacctggaaatttaaaaacaaaacaaaacaactttgccagtacactattcttaaaaagttacaaaacaatatttacaaactgagtaataggtgggccaggaaacttactgcaaatgaacattactggacatcagctggcaaaagagccaccctctaatttctcttctgtgtatatgacatttaattcctgaatgtttcaaataaatgaacattctcaagatggtcactgaatccaaacccctcagcaaaccgccaacggaaggacaggctgcaggactgatgggccctggacgctcctagctgcccctcactgaggccgcacggggagctggtggatgcagcacacgcctgcttctggcgacctcatgctgaactgaggctttgcgtaggcagccccagggcaagcctggcacctggcaggactaggcctgggtgtgcgcccagccatctggcaggctgcactgctgctagtggcacacagatcacccactcaccacattctactcccagggtgaagtgcttgctggtgtacaggaca

SEQ ID NO: 38399 - DNA, 2011 bp, Bovine  19866880800489
  misc_feature (1)..(1): n is a, c, g, or t
nggcccagggacggagggagggggctgggctggggaagagggtgggagccacaggagggacgcccagggctgaggcccagtcccttacgactctggggaagtctttgcccacacagcccatcttgaggtctcacacacatttgttctgagctctcctcaccctcctggggtccctcccccaaaggcaggtatcacctgtttaacagcaaagacaccaaggctggtgagacacagccagtagcagggacgagaccccagctgccacccacaaatccatccccacccaagtacaccaagtccccaggtcccagagacaatcaccacgcttggggaggtttttaagagaaaatggctttacaaggactcatcttcccctcagcaaattcaagacctagcccaggtgaaggtgtcctggggccacacacctcccggaccagcaggcatggaggaagggcggcacatggggtgacaatgggatccaggtaacagcgggctccgggtgacaacgggcacagggtgacagcaagcctaagcagactacaggcggagtctgcacaggtagggggccctgaaggagcccaggtaaagatgcccactgtgttcatgcgcctcgctcacataggtgaccacctgcccttcggggtcatgcagactcctcaggaaggtcccgctatcactgagctccaggacaaggctgtaccgtggcacgaatttcatcactgtctcttggctgaatagctgcaaaggaagcacagagtagagagagtatggcagggcaggtgcagaccctggagcccagacaacaagcccacctggagacccgcagccaggcacctagtcctgtcacctgctgggtgcatcccacctgcactgccccccactgaaccacctccccacctgctcccctccacacaagagtgctactgccttttaaaattattggtcccaaaacatttagtcaaaaaatggcttgtggggctaagcaggctaggtgcgtgcaggggtcgcccaaaccagggagtcagtctgagtagggagctttcaccctggaggagaggccatggctccaagcaggggagatggtgtcctgcagcggagtggctggcacaggccgtgggcccccaaggagacagcaggcccctacacgtggctgggaggagggagaaactgggaggagggagaagggctggcctaggtaccagagccctaaccagggccgtgtgatgctggggacaaaggctacaaatgtggacactggggaattgatcaaacaggcatgagggagcacgggacccaggtttctcacccttagagaaaggaagtaccaacatggatggtaagaagacaggcacagatcctgtggtgttggactagaaacatcagtcttacttagagttttcagtttaaaggaacagataaagatatatgaatgtaggtacaaaggtctgtccatgagcacatgtgcacagactcactcaggaaccgccgcctggcaccttctaggaccttagattacaaacagttcagtaccagtaccatgggcaggatcccatggagggcatgacgaggctccggggaggcagaaggaaggggcacctaaaccacgtgaggaagagccaaaggctgggcgtccaggggagagcaagaggaacaagcaggacagaggcccaacaggtcatgatggtgagggtgacaattccagatgaggaaacaaggagggcaagagtcagagggctcaaagatgtaaattcacattttaaggcaaaggataagtttaaagaagtcactgaaagtatcagataccataagcagaactagaatctttagagctttcacaagggtcaaaaaaacccacaatgagatgcaatttcattttgtttcttgaaatcatagttttcatgtttaccttaaaaatcacttttttaagaaaaggcctctcggataagaaatccaacatggagaagccgggattggcgcggatggccgccatgctgacccagtaccccccgga

SEQ ID NO: 38400 - DNA, 698 bp, Bovine  19866880843197
  misc_feature (1)..(1): n is a, c, g, or t
ncttgcactcgtctattgagtatgtcttagcattatatacatattttattgcttaaaaaatcctgctctctgacaatgcagggttgacacaaatcatcagtttgtaaaaaaacaaatcagtattagagaagcacaataaagcaaagcacaaacgagagaagaaacataaacccaagccaaaacttttgcttgtagacggtggtgggaataggattgaacaattaaaaatttctggctgtacctgtttttaaagttttaactttagaaccatgtaagtgttttacacattgttaaaagaaaatgaaatcaaagtgaaaaaccaacccaaaactctctttggcatctccttcagtttccttgctgtctgtgctgacctacacatatattcagagatttggcatttttcttcctccccatcagagctgtaggtacatatacagtgcccagctacttgatggttactccgtaataaaaaataatttagatatgataaaacatcagtttttcttttcaggtgcggtgtctaaaagactacagagaatttgaagttgaggatgttgcttcagtgctattcaaaaaacatagccaggtatttaccgtcttaggatactttaaattttgtaagcgtgtcgaatgatagaaatgttggaatcagtagcaaactaaataccaccttcgagatcatttgtgtcataggt

SEQ ID NO: 38401 - DNA, 1569 bp, Bovine  19866880949466
  misc_feature (1)..(1): n is a, c, g, or t
nacactaatcttttgttaagataaaacagtccaacaactgaggttagaagggaccattgcttggtgaacattcccatcagagtaaaaactggcttctttgcacagtgtgggatactctgattttgtcttgtcatccttcactccatggaaactttggtagaaattgatccggatcacctagtactaccagtcctgtgagctgtgagacaggccaggtgctcccagagagggtagctggcccttgcacccctctgtgctggggagggggtctcctcctataagcctctctgcttcccctcccacctcaatctaggtctggtttcaaaaccggcgggccaagtggcggaagcgagagaagcgctggggcggcagcagcgtgatggccgaatatgggctctacggggcgatggtgcgccactgcatcccgctgcctgactccgtcctgggctctggggagggcggcctgctgggctcctgcgcaccctggctcctgggtaaggaagaaggccttgtggccgcgccgcacaggcaatgtccggggtccctatgattggagggccactgccaagccaagcagtgtaaatttactccgatttttaaataattacaaggcttggactctaatcggttgccttttcattggaactgtgtaggcagtgtgtggaggtccagtcaggccctggttctctgagtggaatgatacacattcattacgtgaaatatgtatttccagtgttgagtactgtcaaccacacagttcagagctcatggcaataggaagcaagatggtgcaggcagtgaacctacaggccgttaaccacacgcaccctggactccagaggtctggttctctgtcccggttcagctgataacaacctgcgacgtagctgttctgtgccctagttttgtgctagaactgtctgctctgttggagttcaagctttgaggctggaagttctgagaagctggcatccttactggtctgttggctattaccggagaaccatgggcttggagaaatgagttatagacagcatccaggcaaattaggtggaggaaaacacaaggcagaaagttaggattagggggatgctcgcagggggccaattttaggctggggaggaggagggtttttgttcagcgaaacttttttgaactcctgcccacctgaaactatgctgggactgaagatatcaagttatctttgccctcaaggactggagagcctgagagggagcgctgggcaggtcacccgacccacccctcctagcttacatgggcaggtggggtgagcttactgagtctgcaggtctgcggccttacaggaaagtgggcctcgggctgccagacacctgactttttgagagaagctggacatctggcttttgatgtaaatcttttgattttaaaatcttgccaacaaactttaaaataaaaatttaaaaaccaccacgtcatccaaataaggcatttgccctggctgtgcccagtgtacaaactctaatgttgagagttacctacaagactctctggtaggccccagacaggcaccagcaatggaaattctaa

SEQ ID NO: 38402 - DNA, 1622 bp, Bovine  19866881017547
  misc_feature (1)..(1): n is a, c, g, or t
nctggggctctgacccctcaaggaaggttctagcccccatcaggcgggaccccagcagggcttggaggaaggcagtcctgtgagcggtgtggaagacgtggtcattgatctctccagctccacacgccaggagactgatagagcacagcagggggtcggggaccaaggacgtccagactctgaggggctagaggggctccaacctgggaaggagggggccttatgagaccctaggcctctacctgcaacacacaaaggctggaaatgtgcacattcctcaccagcatttttcagaagacaaacgttgtccaagacaaatgctctcagctggattttcttcttcctgtgtcaggataaaatgcaatgtcacttgctttaagaagacaaatggtgactcttggaacattccactgcattctagaatggaaatcattccttgaaggcacgtgaatcaattaattagatctaatacttgcattctcttctgtaggtagaacttgaggagggaggatttcaagccccaaacgcattctcactgccagacattctgaagtttggtttagtagactgtgtggattcataggctaagtatgctgtccttacactgaatcaaaaaatacagaagtatttaatctacagagaatcatatatcttcataaacagtgaagaccttgtgcagcccccatatgattgaaatatgatattcttaccttgaacttggctttagacatttccattttcttgttagacaatgcttctgtgtccctctgagtgtcatttgattgggtctgtgcatcttggaacagttcctccaaggaagctctctcccccttcccttctgatacagcagggaaccatttctgaacagctgttgaatatctataaacagtgttttaaggtcagatcaggcttctcggttttttaaaatttatgtttgagagcactttagagacttgatttcgtgaatgtttccttgcctctatttccttcctttatttattatttaaaaataaatgttttatggtttgctcggttctcatgcacccactctgtccacatgttcatctactgccaccctgaccaagggcatccccatttcctgccccaaactttatgcctgaagccttcatgcttggctgcagctcttacccagtgttgctctgtaaactcctataaggcaatggctgtatctaactcctttttaaaaaaaaaaaaatgttgtaatagttccaggtacacagcagagcaactcaaccatatattatacatgtatccattctcccccaaagtcccctcccatccaggctgccatgtaacattgagcagagtttcctgtgccatagagtaggaccttgttggttatccatttttaaatatagcagtgtgtacatgttgatctcaatccacctgcaatgcaggagaccacctgcaatgcagagacacaggtttgatccctgggtggggaagatcccttggagaaggaactggcaccccactccagtattcttgcctgggaaatccggtggagagagggggtcgcaagagttggacacaacttaatgactaaactaccttcaccacatgtcaatctcaaattcctaactatccccttccctccagtc

SEQ ID NO: 38403 - DNA, 1339 bp, Bovine  19866881284229
  misc_feature (1)..(1): n is a, c, g, or t
nggtgaatcttgaggacgttacactaagtgagatgagtcagccacaaaaagacaggtagtgtgacgtcactacactaagtgcccatagccggaatcactttcactttctatttctagagcgtgaaatggtggttgccatggcctggagatcaggggccggggagacagtttaatgtgtgcaaagtttccggtttacaagatggaaaaaattctggaaatggatgctggtgatggtggcacaacgtgtgtcactgtgccctgagctgcacactgaacaagggttaagacggcaaactttatgttacatttgtttcaccatgatacacaaataatgcatgttttaggtataatgtataatattttgaaagtatatctaaaaacaatgcaaaaactaatacaattaattcatattatgatagattgtgaaaataagtctaaaggctgtttctcataactggatttgtcatatgcaatgtcataatgtcagatgtaggaaaaattactatttatgaaataaaatatattataaaatccttgagaataatttagcacaatctattaaaatcataaatagccttatctaccttatgcgacatagtaacccaagtttatttttatatttaagaaaaagagaaggtgaaaatgataaaaatctaagggtctgttggttgcttacaattttattttttttatgaaaataggaatttataaatttagtaaatatttattttgataaagatgaggattgactataattcaaataaacatttcattctatgatttgaaaaaatggattttagcttcctttaaaataatgcacacaaaattttaatcagcaaatttcagcctgtgtttatattgaaaaccatgggttattgctccctaaactcaaaatacatttaaaaccataatcttattaagctataagcatccctgctccactgctcaaagatacttgtctttcagccaaatgacatatccagatgacaagcactgacaaagtcagggagaaagctgatatttttaaactcatgaaagaagttgatttcagtgcttcttacctgtaatctctctgcctcactcccacgtgactgttccctgaaagcaatgctgactttggctatacgtgcagagcccctgctccactgcctgcatctctgggtgcagacccttccagcacttctcccgacagagcaagtttcatgcgggaagggtccccacactcacgtgccatcttccagcagccctgatttccagaacaggagagataggtatcagtgggcaccatgagtgggggatgggacaggggccctgcgtgccccccagtcaacttaagagg

SEQ ID NO: 38404 - DNA, 1221 bp, Bovine  19866881579888
  misc_feature (1)..(1): n is a, c, g, or t
nttcgaggccccgggggcctgccgtcttttctattccacttaccttgctatggaaggtccccaggggcaactcatctctcaggatgggtatctatagtttcttatgcttttggcctcactgcctgtctgttttacttgaattttagaaatcagagagggtaaaacagctcttgctttcttcaccagctccccctttgcagactgtaggtaacgtggcaacactgtttcagggggaagccagtctcgtctgtctttgaaagacagtcccccagctggacgcccgtcagcagctgagcgctcgtctgtgtgcctgggatgccacgggggctccttgctgctgcaggatgtgaggctggtggctaccgggtcaggggcttcagagctgatgacaccagcaggaggggatacatctggccaggcagaggaagggtgcttgcttctcatggagggtgaggtggctaagcagggatctggacagaggctgggggaccctgagtagcacagcagctcagcctacagtctgatggcgaggcccttctggtgaaatgtgtgtggctgaaatccaagacggtaaaccaaacaggaatttggttcacttcacgagtccagataattgtactttgaaaaatgtttccaacataacgttaattttgacctatatgtgaaatgtgacataagtgtgtttttaaaatggatattcatgcatgacacatttccattagcaccttatcagattttctgagttgctgctgcaatagataggttaggtgtttaaaataagcaatcagttacttttatgcttctgcaaggacaggttatggtgattgaacagaatttgctttttcttttttcccttcatggagcctcaaaacaaaggccaggggagggtggtgggtcctgccacctggaccactcgaggcagggtgggggatggaagggtggaaagtgagggaggggcctgcaggtactcactcctcatgtctgatgggactggcagctctttcctataccctctgaccttgagatctccctgggaaatacctaagacccaggctaagatttatctgtggattcccatggaagccaccggcttcctgattcagaacatcttcccttctgccagcaccatcccggccgaggggcggaggggcagggaaatcgggctatctcccccatcccccgtttcttgttggctaaggtctgcttctgggaatccaccct

SEQ ID NO: 38405 - DNA, 1191 bp, Bovine  19866882094134
  misc_feature (1)..(1): n is a, c, g, or t
ntgggagcctcctgggggccggcattcaggatacagtagtgagaacccagcaagtcagtgagaacccagcaagttgggggcacaggcagctgacagaggagtgaggagttgacgatgcaaacacagtggtgtgggatctgggcttctggggacagtgctgcgtgttgcattacgtggtcagagcaggcttcactgaggaggtgatgggaggaggcagcaggtttaaaatgggagatgcccagggcccttggtgaccggctgggagagcagtgcgaggggaggctgtggctggactgttgggcgaggagttcgtgggagactttggctctggggagagggcccgtttgcaggtattgaggggtggacacccttgatctgtgtctcacagagtgcaggtgggctgctgggtcacaagcagacttgggggatgagggaggaagtgggaagggaagatggtggcgtggccctgggttgcaacagttgctgacggtttgggagaagcagcgtgtttgcctgtggatggaggagacgggagagctcctgggcacttctgcgtgagcctggggcgggggtgagggtccaggccacagcggggttgcgcctgtgtgggcgcaggggggtggccccaggcccagctgtcttctgtcctctccatggagcaggaagcaaggccgtccctgtgaaatgtcctctgcgctctctgtctcggttgggcctggatggccgggcagccagtggcagaataaatgccaggctttgtgagctggagggtaaagtttgttggatgggttggggaggcccggcaccctgggcctcaggtgacaggagagtgtttttgcgtcagccacattgacgccttcagttttcttctgtgttgtgacctttcctgataccctgggaagttttttcttttaactagtgcttctggcaactaaggatattattgtaatgtgtgccctttgtcaaagaatggggaattatgcatgtaggtccttgcaggtcttcagtaaatactttcttcatatatttttatagacaaatccctataattgcattattttacagcttcaaagaaccccctctcttccttggtgtgctgcaaccaaatacggagttacaacaggcggaaaggctatttgaaaatcagcttgttgggccagagtccatagcaaatattgggggtaagtagac

SEQ ID NO: 38406 - DNA, 1822 bp, Bovine  19866880346432
  misc_feature (1)..(1): n is a, c, g, or t
nttatacagtccagaccacatgccaagtaattctgggcaaaagatccagaagacggtcttaaatggaaagttaccaaccaaatggcctgattctgaggatgcacaaaagtaggagcaagggttggtggcaagtgagccctagtgaccagagcagctgcccaccagccccttctatgctcaccctgcttctcacttttcctcaacacactggcaagtctagggaggacgatgctcttcctggctccagagctgaaacttatgaagcatcacacaggagggatgaggtttataacctttcacttaggggctccttcagaaagaaaatcctcagcagatagaccccaaacactgccacagtcttaggcccacaaagtcctgagcgtgaggcaaacgcacttttaaaggacagtccaattgttagcgtcaatatataaacgtggcttccttgcggcttaacaatataacagagtgagacaaactttagatcacacttagctggttttttatccaagtgttaaggtgtgcttggcccaggaaacatcattatcttttgttagaattgctgttgtttaggcacttagtcctgtcccactctttgtgacccgatggactgtaccccgccaggctcctctgtccatgggatttcccaggcaagaacactggagtgggttgccatttccttctccaggggatcttcctgacccagggatagaacccaagtctcctgcattgacaagcagattctttaccactgagtcagcaggggagcctccctttctgagagtaaatgacattgaaaagaacagaacaaccagagttaactttccaaaactggaaaaacataggtggaggtttttataatctatattttccagattttttttcaagaaaaaaaatcaccaacacaagataacaattgactatttttttactatggtaaaactatacataagatttacgatattaaccattttagagtggacagttcagtggcattaactatattcacaccattgtgctatcactgccccaaggtatgttattgtgagagataatcaattcacccattagaggatgcttaagttgctttcattttctgactattgtgtataaagatgctatgactgtggatgtacaaacacatgcttgagtccctgctttccattctttggggcacatacccagaaatggaactgctgggttacatggtaattctatgtttcactcttgaggagccaccataccattttccatagaggctgtaccatatgatgttcccaccaacaatgcacaatagttcacaattttaaagtttacacatttttgtaagtagaatttacttggcagctagtttcttaaaacccatcacattgctagtttacaagttgtaatggcatgctgtgattcatggggtcgcaaacagtcagacatgactgagcgactgaactgaactgaatgacaaagttaaaatatctctcctagattgagccattaaatcgaactcaaacatgacagtatgaaaatatgatcctggaacaaacagaggtcctcagagagggaagtgggttttgcttgttcctgcagtggcctcacctcctgcccacttgtccagctcactagccacatctatgctccacagtgtcttcagtctgccccttggttcctactgcaatgcttgccatccttattcaaaggctcatcattcaaacttgaatttctggaagatcagaaaagtaatcctcaaccacaatcttcattatctcagtcataagctcaagaatataaattaattccatgcccttgcttataaggaaagagccca

SEQ ID NO: 38407 - DNA, 1745 bp, Bovine  19866880645212
  misc_feature (1)..(1): n is a, c, g, or t
ncctgtgagacattttattcccttctgtttcacgtgacctttaaaaacttgagtagagacaataaagtaatgggaccataagggcagcagaatgaactgggaaccagtcaccttcatcctgtagaggacaggcttcccttttcagaatcgtggttgagagggaaagggcagtgatgggccagggtagagacatagcaagtcaggagtgccccaccctcccctcctctcatcccactgccgtctgtctccagcaagaactttcctccctcaccccaccaggccctccacccagagttattgctggctgccaagtgcttcttgaggcagaagcttttctggagaccacagtgatggacagacttgggtaacttcagtgtacctggagctgaagcacagtacatacacacacaggaaatatctcagaatccccagcacctagagtaatacttggcacacagcaaatgtttattgagcatcttctatggctcagatggtaaagaatctgcctgcagtgtggaagaccagagttcgattcctgggtcaggaagatcccctggagaaggaaatggctacctgctctagtattcttgcgcggagaattccatggacagaggagcctggtggactacagtccatggggtcgcagagtccgacatgactgagctggtaacattttcacttttctatgtgtcaggccctgtgctgagcactaggcttgccacgatggacatacaggcagaatccctgccctgacagcacttacagtctcatcattttaatagtcagtcttagacatctcactgacttggaccaagatgaaggatgtttgacttaaggaaaacttggaatcacagacttcaagtaattctgtctaactttcaagttatataaagaagctatagtactaagtggttgtgtagagacattcttaatgaacagataaagatgattagtggatcaaagcagcttagtccctgtttatatttcatgggtttgactttatgtaaatgatatttctaatctgtttgaaaatggttccttctcctaagtcagtaaaatctcttcatgaaatttgtttgcacaattaattaacatccatgtttaaggttcatttgttagtgtgtcacagattaatgtcagagctcttagtgttggattacaagcttcgagagcaaagcgtatattatctgtttaactcactcagtatttggccctgcagccccaccacgggggcatatatgctttcaagggtgagagtggtgatagtgactgttacattgctgctgctgctactgctgctgctaagtcgcttcagtcgtgttcgactctgtgcgaccccagagacggcagcccaccagcctcccccatccctgggattctccaggcaagaacactggagtgggttgccatttccttctccaatgcaggaaagtgaaaagtgaaagtgaagtcgctcagtcgtgtctgactctcagcaaccccatggactgcaggccaccaggctcctccgtccatgggattttccaggcaagagtactggagtggggtgccattgccttctccggacagttacattagggatggttaattctcctcttcctagaagaattcctgaaaggaaatgcatgaagcatgaagggaaaagagaccttctcttcctccatgatttccaagaatgccttgaaagaatggaatcaccaactctctgcctttgttccctcaaatatgctttgtgaatacaagaa

SEQ ID NO: 38408 - DNA, 2048 bp, Bovine  19866880655364
  misc_feature (1)..(1): n is a, c, g, or t
nccttagccagtgtgcaggggagagtggcagagagcaggactgtctggccctgtcccagctgttgggggagtgacaggtgaggagggacagggaaccccgaagtgtgcagctctgcggacagggctatcattacctaggagggcatgcaggggagccacttggacgaggggcaggagacacgggcttactcaccccctgtgccacttggagcatatcaaaatgggggagccgtttattccttttttgggtctcagtcctaacatttacagaaatcaagggatcccgcctgaattaagggtccctggcaaccctctgctttttatccttcaatttatttattcttattcaaaaatatccctattaagtaggccaagatagtgagttagtagctgtaattttactctgttagactgtcttctgggtacattagattcatttttatctgttagttacctggatgtgctaagcataccccaacactgaatgcctttgtgtaagctgtaagcatctggccttaattcatgctgtgtttgtgatatagctcctacagttctaagagtggctggctgcgctgtgaccaccacctgacactaagctccttctagccaagattaggatgtggtgatatgcttagttggtttagaaaggctcagcttccatgagactggaaggacatgacgcttgtgcttctgtgatcaacctccccctgatgcccactctggaagggcctttctcatcacaggtatgatgggcgccagataccagaccacttgagctgtctcccatgggggagattgtgaagacaggtgggcgagcagtggctgggaattagccaggatatttcattcactctgcagtgagaatggcctccctgtcacagtcctttctgtccacgcatcttctgtgatgcattgtgtgttattattaatatattataatctattagagggcaattttctctaattttctgtcattttgccgttctatgcaaaaggcattaaattgtgaattaaaatgtgggcatctggttatcactggaaaaaacccagctgaattcacaggctctcaaagcggcagtatgtttgaaaagttttaaccatttctgtgattttcctttttgtgaagataggggcaggagaggaggtggccactggtccctagagaatatttcagcagtgtgtgactcagcgaagactgaattgttttcactgacttagtctcagggttgggcttccttctcactccagcatcgccaggccttggagaagcatctgattttcagggctgtcagcccgccacctgtcattaacacaagtctgagagagaaacagtcattgccagtgcaacgaattacaagtgcagagacaatatatacaagtactcggttattcttgtccgtggttgtagagctccattcgttcacctgtactggttctcttgggattcgaaccacaaacacatgaggtacccagaaagctgggagcagcacctgggagagtctggaagtccagaatgccagcctagggtgttcaccatcccctccctgccatgtttccaggggccagatggttagaggccatgatgatgcccctcatatatggtcattcaccatgcacttcagctctccattaaccccctcccccgcaactctctcgggtgtgtactcagtcactaggtcgtgtctgactctttgtgaccccatggactccaccaggctcctatgtctatgagatttcacaggcaagaatactggagtgggttgccatttccttctctagggatctttccaatccaaggatccaacccacattttaccactgagccacatgggaagccctgtgtatgacctagcggttcatcaaatgctatcacagtagatactaattaaatagttgtccgataaacaatggagtgatatgtgtacaaaatagaataaataaaataaaattttaaagggaatttaattttattagcctgccttgtctagtccactctggctgccaggctttgtgtggtgagctgtccactcttagcacacagagccccg

SEQ ID NO: 38409 - DNA, 769 bp, Bovine  19866880694673
  misc_feature (1)..(1): n is a, c, g, or t
nttcatgactcctcttggacaagcactttgaaatagtcctcaggttgctcattcttgctttccttagtttacacatcgaataaaatgtaatattctagctttcttatgatctgcttatatttgtcaaatatatctttcttttgaaattattacataatttggaatcttcaataacttggagatttcaggtctgctccttgcctaccccaccccaggcacacacctaattaattttaaattgagattttactatgctaacagtctttagtgtgacaaattagcatgcctctatcttatagaggtattggtgaagattaattaatgagtcatatatttcagatgcctaagtcactcccagggagtaattacgtgtttgggaagcatattagtcaccatttttaggactctgaagatcacttggtgcattgctgctgcaccagtggccacaaagagttaacatactctttcagtagcttatctgagtgccagaaggactgagaaaaaaggtaccatgtgaaaagcaagcatagcagcagacctgtcatatactcaaggctgtgaccaggagttttctaattccatgacacatctgagcgagtctaacagtttccatcactttaacaagcctggtttctcttggtccctgtggctcagactgtgaggatctgtatcagtgggaagactgaacccattagcctgttcttgacaggctgcctttttgttaaagcaaacagtccctagagaccccagtggaagcaagatgggaagg

SEQ ID NO: 38410 - DNA, 2594 bp, Bovine  19866880737546
  misc_feature (1)..(1): n is a, c, g, or t
nagaagattcatccttcttaagcagatctttttccagttattatcaataccccaaatggtttcttaacattatgaaaggttagttttcaggtttctaggaagtgacatttgcatttggtggtcaggtacactggaaagaatctgcctgtaatttgggagaccccgggttcaatccctgggtcaagaagatcccctggagaaaggagtggtaacccactccaggattcttgcctggagaattccatggacagagaagcctggtgggctacagtccatggggtcacaaagagttggacacaactgagtgacccacactttcacaatcaaagcccagggcattcttgccccatcctgcagtctccatgtgttcgcttcctggaccttattctccagaatccagacacctaatctgatgagggtgtttaagtttatgggaactgaccctaacatccctgcccagcaacacctgtacatcccagtggccaagccccagtctttttccagctaggagagatgcagcagagcccagcggggctggggagggaaggcgggggcaggtatgtgtggtcttttctaagcctccagtcccaacactgggtggcagcaatcagggctgtgctccaaactggacacaaaaacagacctaagctgggaaagattttaagaaatcatccagtccaacagtgcctcttcttttcagtgataagcagagtgagactcaggacagagcttaaagtttaaatatctcctgatccattactgtttctatcacctaacacactctctagcctacctgctgcccccacagaggaggtggcttgttgttgtttagtcgctaagtcatgtctgactttttgcaaccccaaggactatagcctgccaggcccctgtgtttaggggatttcccaggcaagaatactgcttcccaggcaagaatactggagtgggtcactccagtattcctcatacaggggatcttcccgacccaaggattgaacctgtgtctcctgcactggcaggcggattctttaccactgagccaccagggaagccccaagggggcagcttgggtttggcaattgaaggactcttgcaaaagtctgattcacacaaatctgtggcataaaatgaggggtgcctgtggtttcaacacaacctcacttttaccttctatgccagcgggcacatcaacatgccaagcactaaagtgggttcactcattgcaggagaatgtagcagagagggttggggaacctcccagaagtatagtgagtcagcaagcaccatggtggcctctgcctcagcccctgtccccccagctccccccaccggggccactggctctgatgtcatgctgccctccccctgccccaccccgccttgctgctggagccgctttacactgttatccttggcaaacaccagggtattgttacccacggccccgggtcagacgctgtgagaagacacttggaatgagacaccacagcgccacatagagcaggtggaatctggaaaggagccagctgctaatcacagtgagaccaactttcatttcagtctccctctgctttacggctcccgtttgtttacctgctcacgtctgcaggttagccaggaatgagctttgatcctgctccaagcccagcatcactgtttgcccgtggcagtgagcaaaggaaatgtggcgagcaaggtgggtcgggagtgcgcccccgcttcagtcccaggggatcccgagactcctcctcgtgcactttggcacctgaagtttgagtttcgcttggcccacgtggcctagtatgtttttatcttcatgtgttggtcctgccttctaggactccagcctcctagaagaggggacgctagcacctactgcatagcacagggaactcagtgcttggtgtgacctaaatggaaaggaaacccaaaaaagaggggatacatgtatacatataactgagtcacttcgctgtacagtagaaactaacacaacattgtaaagcaaccacactccaataaaaaatttttaaaagatggggtgatgacagtgctgaggaaatgacaatgaaaacagcacagaacagcagccacaccaagggagggccccagggctccaagtctgggcggctcccaactcacctccagagaatcaagcacgacaaccctctgaccaacagccttgatcacaaacctggagtcagtcctgtgccacctgagaccctgccacgtgatgcttccagccctgggccaggcctttcagacgatgggcccctgacaagccactcaaccaggacaagaatttgggggcaaagaaaagaaagttcacaaatctcttcacattagttgagaggtgagcagaaaatagtgtttcagagactcacccatgtactggccggatgtgggggatataacctgtgaggccacacatgacctaaaaaccagcagcatcaccaaacactcctcgggtgcaagaggctgggaagtgctggtgaggaacgactactacagctgcccagaggtggcctgggcctgcacagtgagactgctgggccgggtgaagctgacagtgtcttctgaatttaaggctgaca

SEQ ID NO: 38411 - DNA, 1657 bp, Bovine  19866880780933
  misc_feature (1)..(1): n is a, c, g, or t
ntatacttttatggcacaggcgtatgtctgtaagcaatatggaatattgctttacattttaacccttttatacatggatcatactgtaagtttcatactgcaacccttatttcctcattcagtattatgttttggggattcaaacattttagtactgttctattacatggaaatttcacagcatatttatccgctctcccactgatggtcattccagaattttgctcctgcagatgttgctgcaatgaatgttgctgattgtgccatttgcgagtttctctagggtagtattggaagtgctgagtcatgaataggtccatctccttcttttctagaaactgccaaattatttttcatgttttaaaggtatcacataaataccagagtctgccccccatggacacttattataaataacagtggtaaatattgttggagtgcttaccatgggctaggaaatgttctggcgggttttacatgattcagtacattcagtccttacctcattttcacacgtgaggaaactgagatacaaagatcttgactaaggtcatacagggagtgacagagccccttcaaaccacaaaagtgtagtttacaagacctgtctcttaacactaggctatgctccaagttatagaaagacactgcccgggccacatttatagtggtacaaagacaccagccatttagctgatgggagacctctgaagaagggagcagccttactagagtattactgtctactgattaggaggaagcagcagaaagttgcttaatttgtgcaaggtccaaggatcagtgactaaacctttaggctctggtgcagcatgtcatcttgcctgtttagtgtctctctccccacctgtgtgtccctaaaggcatcaagctacatctccatgtgctttcaatttctttcagtctagggtagattgcttgtaatagaaaggtcaaataatttttttaggagtagtaatggatataatctcatacatggaaattttaattgcagtgctttaatcccattctgagtgccaaacttttaggattaatttgttgaatctgttggtaacatggtgctcagtcttctgaccagattctttgcctgagggctctcatttactaatgagtaatcgctgcaattttcagagaaaaagctaccggtaggatcacgtttgaacattcatcaaatatgacgcaagcccagttagaagagatgttagcgtccttagcctgcaaataagggcatggaattaaatctccctacactgtaattttcctagggttattactcccatcagtgtttggaatggctgatgatgaaactattcgtggccttagagctcagttgataggaacatgtcatgagtcaggcttacaaagtggctggctgaagcctgccttccatttgcctgttattactgaagcccattttggagagagaaggcagaggtggaagaggaggtgctccaggaggagtgcatttctctttgtacacacatcatagactcacagcgctgacaaactaattatagctttaggttgaatgcttccttgctctgcattctgtttgcaaacagcccattatttccatcctgtgtgcaggaaaaacacaagacaaagtgggttcatcggttatgtttcggtaagtccagct

SEQ ID NO: 38412 - DNA, 1036 bp, Bovine  19866880800589
  misc_feature (1)..(1): n is a, c, g, or t
nttgtaatacaagggaccccagtttgatccctggtccaggaagattccacgtgctgcacagcatgctgtaagcgccggtgccacaaccactgagcccacacaccgcaactccttagagcccatgctctgcaacgcgagaagccaccccagtgagaagcctgtgcaccgcaactagagacgcagaccctactcacccactgggactacagaaagcctgcacacagcagcgaagacccaccacagccaaaaaagaaatatgaacaaatctttttttttaaaaaaggaatttttatagactccagttgaaatcttcaatctagtaacaagagtgattgatagctcatgttttcctggtgccatacctgttattccggaaatactctaagtgaatgaaatgacttcagtttatagaagtgtcattatactttacaaaatcctataaggcaataatctatcccctcttaacttaccctttgtcctcttatccaccacaaaactccaaaaccaaagagataagaatactaagtaaattcttttaactggaatgattaaagtatcctctagaacttttgcataattgttttaaaattattaatcacttaaataagtcattgttaacaagtaataagacttcccctagtggctcacacagtaagaatctgcctgcagtgtaggagacctgggtttgatccttgggtggggaagatcccctggagaagggaatgccaacccactccagtattcttgcctggggaattccacggacagagaagcctggtgagctacagtccatggggtcacaaacactgagacacaactgagcaactttcatttataagtaacgaatcactctcaccttcttcagtcatatactttatcagttcatccttagaaagaaatcctcgtttagctggatctaatacctagggggaaggaaaagatagatactctattttttgatgaaaattccacatgatgatttttttcacataaatataaatatatgtaaaatttgggcttacatacctcaaaagct

SEQ ID NO: 38413 - DNA, 1707 bp, Bovine  19866880804504
  misc_feature (1)..(1): n is a, c, g, or t
ntcacatgttgtcaaaaagccggacaggatgtcatttcgtggcacgagagccaggaacgactgactctgaaacttcaggacttgatgaagggacagaagggcctggcctggctatactgcctttatgtttattccaccagcacttgctctaaaagagaagttgcttccagttttagttttggggaggaatttcacatttccttcaccacttaatatcagaaaccaccagcatgccagatattcttcaggtgtgtgagcagtaattacccagatgcaaacaattaacacatccaagttaattttgctaagattgagtaaataaatgaagggagttgatgtattgagttcaatgtcagaattgaaaaggatcctcggggacatttagtctgaaaatatcttttcacagataaggaaatttaggtccaacacaataaagagattttctcagggtccctgaacatgttagaagcagaactgagaacagaactcaaatctcttggtttattctattttttcttaatcactatgtagatgacccttccattctctacaatgacacagttcttcataacctggaagaaataaccatgattctctgacatactgggtaaatcctcaatgtttcttgctgtgtccatgacacataaagagggtggggtggattacagtgataagctatttccttccttgttgctgaatttatggaaaaccacgttccttcaatcctatatccagagaatacaacatctaatttatggctgaataaaactggatgctttcacatgactctattcatttggacatgtttgtatactaacaaccctcatgttttagaaataattccaaaacaagtccttcaaatcctttaccacatcactggctttctttcccaacaagagattatttaggcccacaagactggcaccctttatggcattacagtaaatttatattcgatttttctgactgctactgataataacatgctgacagatataatcctgttgatatgattacacatcaaccaacagggccttgactgtgaatcagcaaatggactaacgtagcctactaagcataaatccaagaaatatgacagaaaatgacggcttaaagagggtctaagtcacaataaaagctcaaacaaaattcttcatctttggtaagcgtaatacaatggtactctattggcaccgctattccagctgatgaacacatcctagaacactcgcagagaccactggggtatgacagagcaagaaaaacaggaacggatactgaggacatagaaaggggaacaactgagttgattccactcagcatcttaggatgctacggatttcgttttcacacatcttggcaacctggagattgtcatcttaacactgattaggaaataatcaggcagtggaaggcagaagcatgggtcagagatttctttgagaaatgattcagccttatggttcaccaacagtctgtttaagcttcaaaccagattcatttaagcagtaaacatttgaaatgataagagcaatacaacatttcctgtcttctgaagagctctctgatacaggtgtcagagagtattagcctacaatgttaagatacagggcaaggggcaggatgacctgggactccagcccaagtcctaaagctctttgagtccaacccccagagtccaaccaggcaagtacagccagaatttgg

SEQ ID NO: 38414 - DNA, 1733 bp, Bovine  19866880897188
  misc_feature (1)..(1): n is a, c, g, or t
naggtaaatctgaagactaggggaaataaaatatggctcagttttggccttaccagccccttccaaatgcattcatgtttctctctgcatgtcttgttatgtgaatggaaaaagaaaaaaaaaaagcatgctttggtccatcaggtttttttttttccctttgtctccttctgaggtgctcaaaggcatcagtaacagagcaggaaagccctggctgaacaaaacttggtattttcctttgataccttccattgggaggcttcatacaatgcactttgtcagcaagcccctgcttcaggcaaacattgagaaaactattgaggaggcttcaatggaaaggatctgatctgccctagaaactgccctagttctctatcaggggagccaccagccctggaagagaagattgccccaccccccaacagtcttttttcctttctcctttttaatctcctttccattgtaagaattgtgggaactctctttaaatgaaaataactctcaagctgggctttgttttccaacatggataaatgcctagatatctcctatctactctgtaaatctggagtctcaacttcagattataacaaatttatctgggacaaatgtttgagttaaggtgaaataagcactagatgttgtgagtgtggttttctaaagcacctgaatattaaaaacttgttcatcaacctcctgctagggaacctctattccctcctcctggtctgtctgtgcgtctgcttgaagctggctccattactgtattaatggcaacctgctccagtattcttgtctggaatatcccatggacagaggatcctggcaggctatagtccatggggtcccaaagagtcgagcgcaagtgagcacacacacatccagtctctggccaccctacctgctgtttgattttagttgattttaggtgtttctaaccccccaaaacatcaattactttaaaaaaactatgctatgtcactttctattttcaattgcagcttaaagtataaagcaaatacttgaggtagtgatgtcaagcgaaataaaatatctttttaacgcctttccccagttattgtgatgaacccgattgcatacaaatggaagaatattccagaagtgagagagcatgaacacagcccagagcacttattcatggtgtctgcagttctattctggctggacccctggggctcattagaggtcttgcagcccttccttatggcccttggaaaacatggctgcccaggccaggaaggagtatggtcactcaaggagtgtgaccatcacttaatctcttcccgactataaaaatgaagatcctttctgggtctcagtttttataattatctgataatttgtgttttcttctaattataagacagggctattgaaacatacatcaggttatgaagaaataagacacccacgatcacaggagcagagacaatcactagagactttttagagtatttctttcaatctttctccactgcgtaagttattttgctgaattggattcatgcatgtatgcagtctcctgcttgctccactaacattatctcttgaacatttgtccatttaacataatttgaaaaaatatgaaaatgtatatgaagactgaagattattatattatgttgataatatttatttaatgaatatgctattgttacatgctcaggggttttgttagatagatgatgccataggaatatcttgcacacaaa

SEQ ID NO: 38415 - DNA, 1064 bp, Bovine  19866880931735
  misc_feature (1)..(1): n is a, c, g, or t
ncctctgagggctcttggaaacccctgtctagttgctgctcccttgctttattattaaatggagagaaaagcaggggagatgctgaaaatgaaatcaaagtgcatggtaaactggatttgatgcagagatgggcaggaacacagactccttctcacccaccaccaccccaaagagtgtgtctccataaagatgagaaatacctaacaagacctgagtgtgtataaattctcccaaagtaagatgggctctttgtaggatgcaaattttgaatagtcaccgtcaacctaacagatatatttcaaatgtaaataaaagtcatcaagcagtaacagttcatctcctgacttcattttttgttgtcacagaggtgttctgtttagagagaaaataagctgttataatattccaactgaaatttcaagaacatgatttagtaggtgagttatttagggctacttagtaaatagaatttctggactgtggtaaatgtgttactctccttcacatgttcaatgaaacagccttttcttcttctcaccaaggtagttatcctgtcctcagcccagagactcaatttctaacggctgttggatttattccagggcagccaagcacaggttctgaaccattttctttttcaattcctgtggcctcagaatgctcagaaatgttgacttttgcaaagaggccaaggaggtctgcacgtgtgccaaggcttctgctgtgggcttggcataggagaggcagctgggaggaaggagtgtgtgggccttccgtggtgcacgtttctccagaaactaattcaggacaatcttgtgggttacatacatctagcaagcatttctctgtccctaagaattatatccattgttagaaaaatccatctatattaatatcaataagtccatctatttattatattgatactaatattaatatcaacaccccctttacaggtacatgatcaggccccaaaaggccaagtgatcagtaggaatccttctcccattcacatccgtctctcaacttctttctctcttactgctgctgctgctgctaagtt

SEQ ID NO: 38416 - DNA, 2248 bp, Bovine  19866880982863
  misc_feature (1)..(1): n is a, c, g, or t
ntggagcaggggttaagctggaccaggaaggtggctggacgctcagagaggctgggatcctggtttagccaaaggctggaatcacaggaatgtttcaccggggtctgctctgagaattcccagacccccatggattttagaatttcccagcctttcctccttcaccttcgcactctcttacttcctcctgagatggcccccgatctgcgagagacatttgagagaagctatttattaacagatatgaagaaatggattctgcacttgattatttagccatgatttatcaatgatgatggattggaaagcggtgtaagtaacagttatattcctgtagttagatggtctgtcttagttgctcttttcttttttgctttagcttttccggtgaatttccttttgagaaaagtgaagaataaaatgtatcaagtatagagaagttagaagttaggagggtccagcttatatgagctttcttcttgttcagtcgacttgcagaatacgtcagctatatcaagtgagacacgcaaactgcccacagagaatctacaaacatcccccagagggtgaggctaaaatgggaaataaatgaaccagggatttgaactgacaatcattgctataatcagacttgttcagaggtgctaaaaaaattgacattggctcattttagaatcaaagacgaaattgacatgtgctgtcttcacaggatcataaaaatgaagttagcctgtggctctcagaatagcttctttctggctacataaatgtgagatggatttttttcccccctaatgttaattgttgactgtatttaccttccatttcagcttttcttgagacagaacccctcccagtctggaacgtaatgtctggtcaccctgtggctgtatgacattggcaatttgaaaggcactcactgccagtcaatgccagtcagaagatattccatttttctgtgccagggcttgatttaagcacttaactcccagtatttggggtgggaaggtgggaacaacaagtaagtttaagaccaaaacccatccatttcacaggacagagtaacagctctctagaagattagaaatggaaattaaagaagatgatttgctttttcttcaggatttgtaacgaggctagttttgtatagaaagagtaacttaaactttcttgatttaagaaaacagcattttaaaggaaacttttaagatcataaaccacttaggtaagaacatcaaaacagattgctaacatttttatgaccagttgaaactttttctcttggagtctatacagtagtgttattacaaatatgtctggcttaaaacttgcttagttatttggaagaggggtttctaccagggacactgtaaagagcttttctgagtgatcttttgcctttctcatccatcacatccacactgtagcccctgcccctgcctgtctcccagcgcccgtcctgcctctgagtcttggaacctcatgaaagacctttctaaagattccctttagcatgccctgcccagctctggacagaggaagtactgtaatgcaacacacaaggctgccaaatttggaattgaatgagctcagttgattcctgaatattaaatcagttctatgagccattgaatgagatcatatcttgtaaacctgacccagagtgttgctaactttattgacgggcattttgcagcctcaagggctgcagtactgggcacctgaggggatcagcctaaaaccaaaggaaatcctcccactcttctcggattcctgctggccacatatacctagggccacgccttttaaaatgtgtcctttgttatcaagggaaatctgagacagaaaacacatgttggcagcgtcacgtgagtgcctctgcacatgaaggggtagtatcacaggggaaatgctttcgatctggtgctgttttgtttgggtttcttgtttataaggattctggcaggcttgtgcatctggaagaggtttggggtagggggagactgaaaaaacctaaagcaaaacctgaagggaaaaggaaaatcattgaaaagcaaggtcagactcgaaatggaatagctctcttaccccaattccagttctcatccttagttttagtttcctgttaaagcagacactgatcactgccttcctgggcttgtagagatcgattctttcccactgcttttagattttgagcaaaggaggggcaatttctccagaaacagaaaagccaataagaaaccat

SEQ ID NO: 38417 - DNA, 1580 bp, Bovine  19866881064687
  misc_feature (1)..(1): n is a, c, g, or t
naccacaggaaaaaccatatccttgactagacgaaactttgtggcaaagaatgtctctgcttttcaatatgctgtctaggtggtcataactttccttccaaggagtaagcatcttttggtaccaaatccttccttgtcctcagggaggtctccctgaaaacctatctgtattaattggaaaagaacttcatgctaagctcttttcaaactacacatgcattattctaatttgtcttttaaacattacatctagattttcatgtatcattttccctcatgcgtatatctaattaacacacagctttcatgactatttggctgtgtacggtatgaattagattttaatttttgtaaggtgccaaaatttgcatgctctctttgggtggtgctgaccaccccatatataccacatgtcgagtgaatttttaagatactggcttttcccaaattcagcacctacattcttgaaagcacttcctttccccccacacagatctaactaaatatcagaggtatttgacctttcattttaaaaaatgtttgatgttcctattttcaacaaaagatctctgttctcaaatccattctatggagagaattcctcagttcttttgagggatgaaaatcctctcttaagtccaccaaactgaagatcaaagcctcagagccccacttatctgcagagcaatcattgtccaggagagaaggctccctggtgatagggctgcttcaacccctggatggatgggtggatttggagtgaggactggggagctttactcttgggtttgctgcaaggtggctgtcttgccttgtgaaggtttgaacatcgatctcttctcctatggctttccagatggctcagtagtaaaagaatctgcctgccaatgaaggagccacaagagatgagagttcgatccctgggtcaggaagatcccctagaggaggaaatggcaacctgcaatattcttgcccagaaaatcccatggacagaggagcctggcaggctacagaccatggggttgcaaaagagttggatgtgactgagcacagcacagctcttctgtacagctcttgtagttttcctaggccgattcagctgttatgctgtgggatttgacatcatgtgactctacctgggcccaccccacgcattcgccagagatgtgtccaaaggttttctacagaggattgccagtggtcctctcctgagtggccaaatgcagccggtataagagcttcccagggaaaggaacctggccctgctctggtcattttcttctatccctgctgctgctgctgctgctaagtcacttcagtcatattcgactctgggcgaccccatagacggcagcccaccaggcttccctgtccctgggattctccaggcaagaacactggaatggattgccatttccttctccaatgcataaaagtgaaaagtgaaaagtgaaagtgaagtcgctcagtcgtgtctgaccctcagcaaccccatggactgcagccctccaggcttctccgtccacgggactctccaggcaagagtctgggagtgggttgctattgccttctcccttcta

SEQ ID NO: 38418 - DNA, 884 bp, Bovine  19866881068972
  misc_feature (1)..(1): n is a, c, g, or t
ncccctctctgccctcgcgcaactgtcaggcaaagcgggacggcggatattggctcccccacacgccgaggctcctccccgatctggatctttatattttgggagaatttctttgaactcagttaccaagctccgcgaaaggagacaagttcccacagccggttcgctggcagtaggcgaggcgggggtctcgcccacctcctcggcagctgccgtgtgtcccgattgtactcgtcttttccctcgtggaggaaaatggactcactagactaaggaaaatgccaattatctggatgtgaccgtgaaaagagaacgtgtgactggaggaggcagaagaggaggaaaagccttatttgaagagaagaataaaccaagcactccaacccttctgcaaattagtgctgttacttctggggtccatctgcttttatccccccaacccctccattaagaaaccttgacttgagggccaagagagagccccctaccactgggcatccttctgggttggaagaccttttggatgtagcgttggtggaacatttagacactctcctctggaaaagccaccatgaattcgatagctgggaataaagagaggcttgcagtctccaccaggggcaagaaatacggggtaagttgtgacgggtctaatgcggagatgtgttaccagactctttcccgaccggggtctccctttctgggtaacgtgcggccagggcagggcggctccgagctctcctccggctgcagcggcgcctcggccaggccagccaggcgtgcgcgcgcggaggcgggtctgcccgtgaggacgcccgcacactcgccttgccctcggaatttttgcggccctactcgtccctcctcttccccgcatccctaac

SEQ ID NO: 38419 - DNA, 1897 bp, Bovine  19866881088024
  misc_feature (1)..(1): n is a, c, g, or t
nacagcagccaccagcaaaagcgagggtgggagaaagtgcagccgtgggcagtcttctcacagagcccgtgtgtgggcagggggcagcttctttgaagctatatctgacagcgttcagttttgtccactgcactttcttttggaagagatattaatagtttaaatctgtgtggattgtcaagttttcttcctctcagtaatatactcattaatatttgacttcctttcagcctggaattttcaataatttaatagctgccctcgccagctgcctgtgaggaagacccgtcttgcccgttgcctagaggttctgtgcgtccacggggcagctctgagagcagcgggcagaaaaagcagagcaagtctggtctctcctcattcctctcttgcctaccaacgtttccttttccggctcacattcttctttgcctccatatttctgggtccctggggatgtaatatcactaagtcctaggcttagctccagaaagaaaggagacagagctggttgaaggaaatgagtttcacctttatcttccccctgactcttgtgtaagttacaaatcagtgaattcatcctcttcttatgcagcatcttgccaccctgaggccccttcccaactcttcagaattccttctgtaattaagtgcggtggtggaaaagtcaaagttttgtgtgtttgtgtgtgtgagggaagagggaagaggaggctaagcaggtgcttgaagggaagcagactcagtcacattcacaagatggcaggttgccaaacttgtatgactactgcaaaaagaactcgcactgcatttttgtaccaggttttatcggtatcaagtatcttgtatcagtgctagcagtggctcttgttacctgtgctcagagagaaagatgtatggaagctctaaactgcagacaattctcagtcagtgtcctcagtagtgacgcatattacaaaagtaagaaagcactaaataatagtaacgtgtgtgtgtaaaggtggggagtgtatcctttctgggagaaggttctaacactttacaaaaataatctagattaatccaacatcatcagagtatcatgaggttaaataaatcagcctagatagactaagtgatatagccaaggctgcacagtgaatttagaagtaaagtcagatgaagatacaatcccttcttcatactgactttttcttgccatattccatgggaactaagaataatagagattgttttccgattttattttctttggacaagttaagctggctaaattagctgggggtacgtgcctgactcatagataaataggttactgtcagtggtataatttttgtaatccaaaaagtttccactcacagattttctataatttactgacaaataaatccatgaccccaggaggcagagacgatagcattgcttcagaaagcacatgtttcttggaaatagcttgttagtacatatggctttcagattaaccagttgatgtcctgggcctgcgggaatggaagactgggcagaagccttgttttgttggggttttgctcttggtgttcaggctggttggtctgatgcccggtaaagcatggagtccataatgcacaccaggtaagcagtgtggaatgtgtgaccaggccattttccttgaaggaattctccctccctcaagattctgccgaggcttagccacggcaggaacatcactatttcccctgtttgatttttcaatgctgtttccgcctgggtggctgcacgccattaagtagactgtagatagatggctccccctcttgctaagaatatggcagtttgggggactacatgtcttagacatccattctctaagccccagagcagaacattcagaaacattccttccagttctgaaattccttag

SEQ ID NO: 38420 - DNA, 798 bp, Bovine  19866881114675
  misc_feature (1)..(1): n is a, c, g, or t
ngccccatagacttgaaactttgctctgcttcaattcatgccctgacttggaaagccttggcattattcagttgtaactctgccaacacacactttcttattctcattcattaaacgtatggtaaggaaactcagcctacatcagcaaaagcagagagcaggcaggaaagacagccaacggcctggaggacatcccctgcagacacagagactgctgccctggggcttcctctgctgcccatggggtgtgggctcccctcagccaattgccactctaccagaggaatgaggcaggctggagcgggggcagctgaaacaatcagggacctggccaccgccgtgcactctgttgtcagcacaaaatgggtgttgatgaagcactggtggtacatgatgccatcctggacaatgtccccccataaaactgcaaaatttgtagcaccattttcttttcatcaagcagctacaatccaagggacacatacactgcttttaatacacaaagacaactgaaaaaaaatcagtaaaccagttgcgtgagttgtgtaatttgttaccacttataaaatgcattcactggctgtagctaccgtctgatcttctgcttgtgttgtttccttttcattagtgtcactataatctgaagtttggagggaagggaatggcattcttctgcctctctatgtatgaacagtccttgcacatgccctgtgaacccacatagaagacagtaggatgtgtggcaaataacatgacggcctaactcagaggcacaggcttccgggcagttccaggttc

SEQ ID NO: 38421 - DNA, 753 bp, Bovine  19866881200011
  misc_feature (1)..(1): n is a, c, g, or t
nagtggagctctgtgcagggccagagaaccccagcacggtggctgggtctgagccactcacatacagtctgtgctccgtaaagctgctgctgatgcctgggctgctcatcctttagtcatttcctgaacagactgaaaaccatttcaggggagttagccttacctgctccatctgcatcacccctggtaggatcagccaggctgggttgggctaaggttataagtgtggcagattgagggtctcctggaatggtgggttgggctggttaggtgggtgagtaggaaaacaacttgttcaagctgtgaagagcccagcctgtgtctgtacgaccaggtcagcctccagtgtggagatggccgtctgcagatataacgggtgctgggatggaaggacccggctgattaaccacttcctggcttatcccttctgcatccttccttcctaccaggtaaatattgcttagacaccaggttctgattaaaactacaggatgaaacttgtaccaaggatacaactgatggtctgtgtcagcttgttggagttaaaaaatatattttaatttgtttagctctctggggaaattatctgaggctgcatgtgataatcaactttcacatgagctttcaaaaccctgaaattattcaagccacaaaatgagatttttttaatctacatgaatacaggaatcttttgcccccaccccacttttttttgagtgggggagattaaaaaatttctaattcattcctctc

SEQ ID NO: 38422 - DNA, 2567 bp, Bovine  19866881300132
  misc_feature (1)..(1): n is a, c, g, or t
ncatcaaggagcttacattacagcagtgggaaatagataaatcatctttgtcctaaagtagatctgaatctactaaaaacacatgggtcttaacatacacacacacttcctaagtacttgtaggtcactaggtgaaatgactaacaatctttagttacagaacgtctaaatgcctccctccccacaacacacacagttaaagttacttctgtttgataaaccagaatgtccactcactccaattttctctcttcatctcatttcctgcctccttcctcccatggtcgacccccttggaagcaaaggtaggtcacaaaccagcaaaaagacctaaccgactacctgggattgcacgtggtcagtctgtttttggatcctttaaaactgcttattggtaatgaggcaatacattcctgtgatctgggaggtgaaccaaaaatcctagctcgggtttcagtttcatgtaaaactgactgcttagcaaagggccagtctttccagtttaatgaagctggctttgtgggcggtgagcactctgggaagagaaaggataaggactcacagagaattagcaacattcaggtgagcaaggccaaaaagcatgctgttgatccagtaggtgaacaggaaaaactaggaagtggctaaaccccgagggcccttcgggagctgtccccaaccctggtgccacagatccatcacagcccacacctacagagaagcctagagagacagaagatttcctgccatggaggatttctacacagagaaggggaaaactgcattcctccctggaacagatcaccgagggccagatcaaccgttcagcagccaggacgaagcacacacctgaatggctgtgacccgcagtcttgcaaactgcccctaagtcctgcacatcgatccacaggcccctgtgcagtccttcttctttgtatggccaacagcctcctttccttgtctttttcctggcaacagaggatggagcttcttttagagagcacccttgggacttccctggtggttaagaatctgccttgcaatgcagaggacacctggtccaggaagatcccactttccacgagacagctaagcctgtgagttgcaactactgagacctcgtgccacaactagagagtccgagtgaatgctgcaacgaaagatctcgcctgtcccaatgaagattctgcatattgcaactaagtctgaggcacccaaataaataaaaataaaattaattagtttattaatttaaaaagtctttagaaacgacccttggggcctaagggcttccttggtggcttacacggtaaagaatctgcctgcaatgcaggagtctcagatctgatccctgggtctggaagatcccctggagaagaaaatggcaatccacttccagtatttttgctgggaaaatccccatgtacagagaagcctggaaggctacagtctgtgaagttgcatagagttggacacgactgagcaactgagcacacacacattgtatttttaatttcaaactccactgttcattgctagtatgttaggaaagaaattatttttttaaaaacgagctttgtttatttttgtgtaaggtgttagacagtgttctagtttcattcttttacaagtggttgaccagttttcccagcaccatggattaaagatctaaacgtaagaccagaaactataaaactcctagaggagaacataggcaaaacactctccgacatacatcacagcaggatcctctatgacccacctcccagaatattggaaataaaagaaaaaataaacaaatgggacctaattaaacttaaaagcttctgcacaacaaagaaaactattagcaaggtgaaaacacagccttcagaatgggagaaaataatagcaaatgaagcaacggacaaacaactaatctcaaaactatacaagcaactcctacagctcaattccagaaaaataaatgcttgtttgtttatttggggagtagtccagagagctgggtaaaatgttttaaaaattcagtcttcataggctgttagactagctcctagatataccatttatgtgtttgtctttagaatgttccatacccttcttttgtttcaggtcaatcaagtcttatttatttatataaagaacatttctttataataataacctggctgtaggaagcccttaggacagttctataattattaaaataatcaagttcttttgagaaaaatcattttctcaatgatgatattctccaaagtttggattaaattacctcagttggtagagatctcaaattacagaaagacctgtaaatgtagaagaatacaaagacaggaaatgtgtttgcatagtatatttgaacccttctgggtttcttcttcactgcacacttaaaataagcatttgagagttagacagaaataataccactctaagcatactgaatattttgagtcacatgctacattctgttattgtgattctaacttaacacttaatcattatatataaatatagaacagagttgtttgaccaaaatttaaataacataggggcaccaatta

SEQ ID NO: 38423 - DNA, 2705 bp, Bovine  19866881629211
  misc_feature (1)..(1): n is a, c, g, or t
ntattatcgagcctcatttctgcataggaagacagaacaaaaaaattatttattttatagacgtttatgaaattaaataagagtacaggtaaagggtttagtatacaggaagtacttaatagatggtactttgaaggaatataataataaacagtggaactgagactgaatctaggtctctgttccccatattgcatcagatcatctctgaacaggtagaaaaacaggcagctgaaatgtaagggcatttgtgggatataagtaaagggggcatctttctaaaaatcggagtaacccattagtgatgggtctgcttcttgaaatagcttttatcatcccaagtgtccaagtagtggctagaaagccatttacagggaataccagggagatgaaagcaggcactgggaacgtagtatgatttccaaaatttcttccgatgcaaagacactgaaatgatccctgaaatctctattccattcagggaagcctctgttggcttcaatgcagaaaaactgtaatgcagaaaattatttgagaatacataaaaactacttccttcttaaaacatatatgaaatttcaagggggaaactttgctcacatcacagttacaaaaaaataatacaaaacctaaagcatatatgtgaaataagaagtattctagagcttagaaatcacagtttagagccatatattgcataagaacattttattttcatttcgacatcatcctaaccagctatttgatctctattttatatgtttcaatttcttggaagccagcagcttctgctgtttttacagagcacttcaatgacacacagatgggccaagtttaagagacagaaatcgttcatatacacttgtattattcagtggcataaaggagcagcagtcatgaaagaattgaaaaggtaaagacattttggctagcaattattttgtgtaattaatgcctcacaggttctttttttttttttttttaagggacaggaacagacgagtatgtcgtttgataagattttaaacaacaaaaagttaacctaaaaactgtgagaagtaatatttacttgactcattcttggcatggactgtatcacatatttcctacagctattcagccctgcacacatctttaactatccctgggcttcacttaattctctgaaccttatttcaattaaaaaaaaaagtggcctctccagcaggatgaaattaatattcactgaacagctataaagaaagtgacgccacaccaagcattatcagtctgaggagaggagcaataatgtgaacttggcaagaatttaaacctagcgagctcagtgcttccctctgggctctaccctttctctccatccttactcgtctcacacaggggacaattatcctaacacatcagtgtgatgccatccgaattcaggaatcagtttagaattgagatgaccttcaaaggggatggttccttgttccccctggccagatctacccagatcaaaaagaaagaggtaaataattatctagttaatttaattggtttaggtgggggagagctttagattatacagatcagaggtgggaacttatagggtacctttttctttttttgcatttatgtgatagactatttgaccttggattttcagaattacggagtgtttaaatggcaagcccttcattctaaacgcatcccatgagaattaagttggggtctaccccgcttagtgtctagagtttactaaaatattgccctaacaatattgtaagaatcgttagcttcgtgaagaatagaattctccttagagaatatcaagcaggaatatcaggtagtacagttgtttttctaaggattcttcatcctttaaaaaattctaagtaccgtgtttgctaacaatactcagagcatttcatcctgtctgaagggggtgttcaactgtgagatgatcatataggtgggtgacagcttcatgaaaattaagaggtcattcaaactgggttcaaataaattgaacccaagcaattgactggtgagacatcattctgaaaaactgctcaagaggagggcagggtgaggcccttagaactgcccccatctgttgcccagagagggtcctgacccaggagggagatgagagtggtaaaatcgccagcgtcagcaggtaaaaagacaatccacatggcaatttaaagtgaaatggccagggctgtcataggctccgatggcttatgcgccattataaaatatttcaatgctctgaggattaagactgtctggtaaatgagcaatgacatgacagatcacagcagctcccaggaaatccatggggtcagagacacaggggtagaagaaaatagaacagattataaataggaagggtgtgtgacaagaaccagtggtctgaggcaaagccctctggaaatagttaagatatccatctacgtgttaaaaaaaaaaatcagttagccttcattttgaaataatgcctatttaaaagtattccggcactgccatttctcattctggaaattctccaaacagggaataaaaagcgtcctccttcacctttccattttctaattggctgtcactgaggtcatttccatgcctccggagaccaaaaagcatatgggtcttggggtttttcagatttttatgtaaatgatccatttcattagtgtaggaagatattcagacagacttcaaat

SEQ ID NO: 38424 - DNA, 1488 bp, Bovine  19866881751601
  misc_feature (1)..(1): n is a, c, g, or t
ncatctatccacatttcacatattattttgtatgcaagatacacttaacgataacatttttaaatgagtcgtaacagctgggatttggtccaaaagttaggtcttaatgaataataaagagaaaaaattgcaaagagctaacctaaaacaaaagttaataggagggggaaaaaaaaaaaaaaacccaaagaaagcaccagagtgagtgaacccagtagaataagcaatagagtggaggtgggttttgataaactgatggctttggggctcagaaaggtgtcacacttgtaagcagtggtggcaaaggggtgttcttacagagatgggttacacgaagtgggaacagagcttgcactaagtctcctcgagaaggaccacttaaattaacagagaacaaaatctctcatttacttgacttaaaaggtttggaggaattataaattgaaagttaggaattataataataattaatgaatgaatggatatatgaatgaatacatggttggatgaatggatggatggatgaatggatggatggatggatggatggggtgctaaggcaaaagggcccacaacaactctgggtaacatcactatctaaggggcattttaaatgctgtttaatagtttttaaagtgtttcatttggtaacaagatcccatgtatagctgaggaatcatagatcagaaaagttaaatgacttgctcttagtacacaactaataacttctagagggagatctagaacccaaacctttccacaggtaatctgctgcatttcccattatactgaattaagccccaacaggtgaatgtgatcattaaacttggtaaacagaaatggaaatgaaaattactcccaagactccatcttgaagcacagtggagaagctatcttgaggactggtctatctgtcaaaacatctgttcagcaagcatcatattcagtattacagagttgggactctctaaccagaagtttgagacggcctggcagatggttgggaaagctgccgtcaccacttgcctcttcactatctcttagttcaccagaaggctagtgaccatggctactggacatggagatgtgttctctagatctttcttcaagggaggtcttgttgccctagctgtgggcagttagcctctagctgtcagctcttttaggatttgcctagctgcagaacgctgctttacccaaatgcatggccttctctgggtcacccacattccatggttgatgggggttcaaggacccagccatcaagtccagtacaggtcatcatgatggccatttatgctccagagctcccctgtggtgttgactgaggttttgtttggcagcttgacattttcctccatatagtcctgcatcctcctcctcatttccacagcctttaatctctaataagcatcctgcatgggcacacccatctccatgttggcctcccagagaccccaacctgcaaggccagagggggaagcagcg

SEQ ID NO: 38425 - DNA, 791 bp, Bovine  19866881894211
  misc_feature (1)..(1): n is a, c, g, or t
nctctgccttccgctgtcaaactgctttctctacaagggaatgaagcaaattagtcaagttaggtaaggttaccactcacttttggggcggtaacatctcaacaacacaaccatgcttaccccctcacaccgatcaaaagctgaggtacatgtgcgagaataggaaaacaaccaaaacccggacagcatgattagaacaagagagattgcacacaatcttgatgtatgggcccctgaggtcattaatgaatgacttgttacgtataccctgggtgcctgtagtgtcaccacattaaatccatgtttctagagaagtttctgtataatatgtgtctttagttataacatgagctcattgttgaaactcagtaagcaaaaaatattaccacaatctatccacattcatgttattttgtccttaaaataaatgggaaccatggtgatcttgctcaatttcatgattctaaatgccatctatatgccaataactcccaaatttatatcttcagaccagactatttcctgaactccagactcatttatccaactgcctgcttgacagctcctcttaaatgtctaatggacatctcgacctcagcgtacatccaaactaaactccttgtcttccttcacaaacctttttatctcacttaatggcaattccatccttacaggttgatcaaactaaaaatctttggattaatctttatatcctcactttgtctcaatcttaagagaaattctactggctaccttcaaaatacatccagaatctgatcacttctctacca

SEQ ID NO: 38426 - DNA, 949 bp, Bovine  19866881973505
  misc_feature (1)..(1): n is a, c, g, or t
naaaaactgagtaaggtaattagtataaagttcttagcaaagtgccaggcacattgtaagcatccagtgaatgttagctattattaatagtaatagaataatataaatagcattagcagtatctaaaaaaaaccagagagtcctggtctatattaaaccaagtcacactatgttatatcatatgctaccttctgggcatcaagtttgcttcttcccttaataacctttgacattacatactcacatcccaaagaagaatcagaaatggaaaataaatcactgctttaaaaaacttcaaacttagcaaacattaaaatgaactctttcaagagggaggagtgctatgtttaaaatgtactggatctgactgtcttggaaaatggctaacactccggggctatccccaaatcacttctgtccatactggggcctgacatctcttagatttctacctcaggacttgatcatagattggataattttaaaatgaaatgagccatcaagtttacttccatgagatattaatatcttttctatatttgcatcgcgaatccagtccatgtttattcataagtgacacacaattgcaatttaacaaacgatactgcattctcatatctgctctggagggttgaaaaggatgcattagtcctcctgaggctgttatttcaaggagtttgttcaagaaaatgcctacaatgccaacggactgctttatggtgaatgtgtttataacaatcagtaaggggtttttacctagatgatcagcaaagaggtttagctgccagagtgtggaagctagactagctgtaccatgtctgacagtgaattgtaggaggtaagaatctgctttcctgcccatacaaatccacaggacccactgcaagggattcctggggtgctgaagtccaggggagtcctctgagatgggagggtccaggtcattttg

SEQ ID NO: 38427 - DNA, 3276 bp, Bovine  19866880084237
  misc_feature (1)..(1): n is a, c, g, or t
nggcatccggtcccatcacttcatggcaaatagatggggaaacagtggaaacagtgtcagactttattttgggggggggggctccaaaatcactgcagatggtgactgcagccatgaaattaaaagacgcttactccttggaaggaaagttatgaccaacctagatagcatattgaaaagcagagacattactttgccaacaaagtttcgtctagtcaaggctatggtttttcctgtagtcatgtatggatgtgagagttggactgtgaagaaggctgagcgctgaagaattgatgcttttgaactgtggtgttggagaagactcttgagagtcccatggactgcaaggagatccaaccagtctattctgaaggagatcagccctgggatttctttggaaggaatgatgctaaagctgaaactccagtactttgggcacctcatgcgaagagttgactcattggaaaagactctgatgctggaagggattgggggcaggaggagaaggggatgacagaggatgaaatggctggatggcatcactgacttgatggacgtgagtctgagtgaactccggcagttggtgatggacagggaggcctggcgtgctgcgattcatggggtcgcagagtcagacacgactgagcaactgctctgatctgattcctctgaagctgctgctgctgctaagtcacttcagtcatgtctgactctgtgcaaccccatagatggcagccctccaggctccgacttccctgggattctccagtcaagaacactggagtgggttgccatttccttctccaatgcatgaaagtgaaaagtgaaagtgaagttgctcagtcgtgtccaactgttagagaccccatggactgcagcctaccaggctcctccgtccatgagattttccaggcaagagtgctggagtggggtgccattgccttctccatctgaagttgctaagatgttttaatagcaaatggcatttaggaaccatagtctaggtgttaactgtgttcagttctatttggttctattggttctaggccccttcagtgaacagagctaggaaatttgttttccaaagtaaggaaaaatcaggagcttataatgatttttcaaattcagatcaaacattaaaaataatttaattttttgattttatacttgtactttttctcttacaagaagtattttactatgtaatgctatcaaatttaattacatatttacctgtatatctataatttcaaggtaaaactaccagtaagtatactactattaagatttcttttaaactctttttattcacaaaatatgttatactcaactaaatatgaaaagttaaaaaaactgtggaaaacaatttctttggcgttttcttatgtctctaacttgatgtacaattcaattcatgctttcacattgtttttcatatttaagggctcttacttcaattctaatttcatccatcctctaccttctctctcttttttaaattgctgctcattacaagtttactataacaaattcttacttcaaatgcaatttgccaaataaatatgaattcttttcttatataaaagatagcataccatctatgttattctgcattttaagtttccacttaataatatattagtgtatgtatcagtgtatgttatgtatcagtgtatcagtatatgatatgatcttcaatcctgtttaagactatgtaatatttaatttatcataatttatgtaatcattccctactgatgaccatttgagttgtctgataaccattgaggttttggtattaaaaataattctgcaatgagtaattttatatataaaaaattctgaatttttccatttcttgacagatacctataagtaaaattgctgagtcaaaaagaaagcatgaataattctagttattgccaacttctcttctatcagtgttatctctttctgtattctcactgtcaaggagttgctgtgtcccaataaaagaatacaggatcaaaattttggatttttgccaatcttataggtgagaagtgatatcgtaataaaatttggtttgtgattatgttgctaaactcatctgtttcattcttcttgtatgtactgtttgttcacatcttttgcccatgtttctatctggttgtggttgttttgcttcaatttttagaatatctttgtactgggaactgtcatctttttgtaaattatatatcttttcttagtatatcctttgccattgtttatattttttcaatacaaatctcatattttagcgcagtcccacattatttattttattgtttctgaattttgaatatttttccaacttccaagttgtaaagaagttcattcttatttctccatgatataatttaaaaattaatttttatattttagatctttgatttatttggtatgagtgtgaaatgaaaattcaattttatcatttttcaaatgtttgccttttgctccaactctacataaaaatgtctgtctttttctcacaaatttgcagtgccacctttatcatatatacttttaagggtcaaaagtttatacaaacttttctggtatcaaagataggtgttcggtttaataatctgccttctattcaaataacttcaactcaaactcatccttaaatttggcttatttaaatgcaaatagattaaaaacagaagtaaaatttccaagatgttatcctacaccctactacaaagatgtataaggcatggactttgtaattaggagcttatagtttaataagagagatggatatgcaaaaagactattttaatatatttttccatataaagtatttgtgtcatgtgtgctaagttgcttcagttgtgtctgactctttgtgactccatggactgtagtagcctgccaggctcctctgtctgtgggattctccaggcaagaatactggaatgggtagccatgccctccttcagagtgttgggtgggggtgggggtgaggtgtaatttccttggttatgtctcatcacaacaaaaatttgaagtgatggaccagcgttacagccctcagacagaccagtgttacagctttcagatggaccagcgttacagctccctgttacagctcagttttatttagaaaataaaggaaatacatccttggggtgtgagggcatgctgactcaaaagacttgaagagaagagagagagagagagagagagagagacccctcctcccccagccctttggctcctctttttagtccctgggactgccttatgtaa

SEQ ID NO: 38428 - DNA, 1023 bp, Bovine  19866880348266
  misc_feature (1)..(1): n is a, c, g, or t
nagttggtgatggacaggaaagcctggcgtgctgcagtccatggggtcgcaaagtatcagacatgactgagtgactgaattgaactgaactgggttttatagaacaatttccatttattatggaggaggtattgtggttctgaaggtgatacttaagttctagatactcaaattcaagtcaactgatctaattgcaagagaaaatataggccaatataggcttttatttcttttaccaataaagattgtattccttttctacctaattagatgagtcattctgatttgttattctgactacagtttgcagtcttctctttatagagagtggaacttgaagcatcccaacagtctcatcagcagtttttgtttcaagcctggaattttaatttgttgaaagatgagccaaggtgaagaatcctgcgtcaagctttatacagcacagcgtctcttttttaaaaaaaactagaaccttcatggcttgcttttcactgtgtatggaagtaaatacatcagagcttgctaagctatccatccaaggttaagcaaaatttctctaacgtgcaggaaagcctgtttttcctcttgacgctgatgtagtacaattggtgttcacagctgctacataaattgtttgcaaaatcaatgaaagcattccagggccagagttagcatgcacttctcctggtgactctggaagcatgttactttccaaataaagtcatattcccaacatatgcactgccactctggttcctgacctcccagaggacaatgaccatgactagctagtgacacacaaaaataatgtaccaccctggttatgaaagctaccaacctgtagccttgaataagagctcctattagttaagcaatcaggggttgcatttctgctcagcaagtaccaaatatttaaagtaacatccttgacttttaataatagaagattgattatagacctagtttcaatttgaaaaatactcaagatgactaaagaaaagaaggagatatataactaatagg

SEQ ID NO: 38429 - DNA, 812 bp, Bovine  19866880454546
  misc_feature (1)..(1): n is a, c, g, or t
nttcattattagtgaaagttgtgctttttgagtgtctttctaaggagcatcccttgagtgtgcagtgctatgggtttgaggacaaataagtcacatagttatggagctcagagctggctcctttatgagaacccaccaaatcagaaaccacaaagcagagtcaccccaaaccgtcagacccaaattctaagtgccagttttcctctggtccccacgcttccctcttttctctggatgcctgtctcagacgccacactgccttgtggcatgtcatgccacacaaaaatgcacttccactctcaactctcctaattgaggtcagatgtaagaccctctgtgttcgccctgaaggaatgtttaattggaatcccatcagaccgcagtgtggtacagtgggagagacagaggattccaagtgtgggtttgaatcctccttccctggctctgtgacctggagcccatgaccacacctctctcacctctctcctctgagcctcactttcctcatctgtaaattaagaattctcattcagtgttggtttttgcctttctgaaaggtaaaatgaaacaaagtattttgtaaagatactatataaatggtacgccttctgcatatgaattataatggtaataacatgggctattccatccagtttgactgggaccccttaagaggaagcttctgtaggttttcttgctcctgtcaatgcactccttcaagatgggccactccatctttgaaaaagaaaaggatctttaaaatgccaaagtgcatttcacagaacattaacctttcaagattctctgtaaat

SEQ ID NO: 38430 - DNA, 1385 bp, Bovine  19866880483663
  misc_feature (1)..(1): n is a, c, g, or t
ntgctctcctccattttcaacacccatccttcagctacatcttttctttcaggaataacttcagatatttattacctggaccattttagccttcctactctccacccattagtaaataagcacaacagaaataactaaagccaagcagtaaaaacagaatgctccttagataactctggtggggaaatggatacagaaatgtacagtttagtattgttctccaagtcatccgtaaaaataataccttttcaatcagtagtgttccaagtactgatcagtaaaacactgtaaaatattaattgaatgttactatttaaataattaagataagtaagattagcattcatctgacatctgatgttaccgagacttaagggagcataattgactactgacttaaaggggcattatcactattttgatttgcctccaatccattaattcatataaatatatggtacataaacctgaaattatatttatgacataattgcaggcatattaatagaaacatgtttatatttacaagtgtagtgtagtccttttacaaattagattctgttgatgaccagcatctacatataaaaatgctccatattgttcacatttataggccataaaatgcagatgataaaatatactttctcatactttctactttctcataaacaagaaataatgacaaaggaggagctttatatgaaagcatcagtacaatttaaacactcacgaggtcataatatattacactgagtagaaaagttcagctgtaaagaaaatgtaaagaacattctctccccttaaaaagtcaaacaaggttccaaatgcctaaccaaaacacaaaagtacagagaaaagacctacatctttccattaacaaaacacttggttttaaaaagagcttagtagtagaacatacaaaagaaaatgcaattcagtatctaggatgaacattttttataagttcagcattaacattgaagaaatattgaattaagctgctttgaaagaattgaattccatctgctgaaatttttcttaaaatgaattttttaagcatacacagtagcagtctgtattggttttgagtttcaggaagctatattccaacatatgcaagagaagagtcacagaaaaatgtaacttgggagagaagaatgaattttatgacctgcttgcagagctgaaaagaataaacgcatacccacttttgctgctgtgtgtgttggggtttccctggtggctcaggtggtaaagaatctgcctgcaattcaagaggcgtggattcaatccctggttcatgtagatcccctgaagaaggaaacggcagcacattccagtattcttacctggagagttcatggacagatgagcctggcaggcta

SEQ ID NO: 38431 - DNA, 1359 bp, Bovine  19866880508125
  misc_feature (1)..(1): n is a, c, g, or t
nagacattaatgtgctgttattagcatcacactcatattgttttcagcaaatagcaatcaataagacccattagctagatccggcaagtcaatagtaagatctacaaaatattgatttcattatatgaggagctgtgaaagagaaacaaccacatccaagctttttaagctggtctagccagcaggggcattttgtaggcaactcaccatcgtaagtgtagatgttgatgttgcgaggttccgggtagaagcaagagcagatcagggacagcatggacagttccttcattttttccttgtaggctgaaacaaacagctcaagattagtatctctcatttcctgaatttcctctgaatgcttcatttcacctgaatgattgttatagcctcctgtagaatgaatgttggtagggactctctctcacaaattcgatggaaacagaactctggggtgcatatttcttattacagaggacataaaaggcaaattactgcaggttagataagaagtgaggggaagggagctaaagaaaaacaggaaggtagaaggaattgagatccagcaaggtaggagggagagacagaaaagatatggaggaaacagaaacagacaaaatggacagagataggttcattctatacatgtgtgcgcaggtctgttgtatataagtcagtttcaggaggtgtgctttgttaaatctgaatggccacatattcatttgggaagaggcagagaactcatcaggacaattattaagcaaatacatcctccagggagcagtgctgctgccttctcttcatgcccaagtgcactttcatttatctccctctttccacaaacaaacctggaccagagatctgataaggacctcccttcctctctgcacgctcagtttggatgccaagcagctgcagggattcggacctccttcctccttcaccccccacaactcccatttcatttttcccttttcccctcaagaagcctcctgcctaggtgaccatgggggcctcttatcactattggccatcactgagacaacagatggggataaggaggtgggattctctaacctttgttgattcttaattctcaagaataataaattaaggaaaatgaaagaagaatcatagagagactttgttcactaacttatgagaacatataaacagatggtgaggtcctaacatattgaacctcacagggagctagtgcctcttggcagggtcttctgatggttatgcaacccatgggagaggagtaccttgggaaggtgagaactcacagaagattgtttggggattattgccaggtgcatctgcagttagccagtagaaaatagattcaatatctggatg

SEQ ID NO: 38432 - DNA, 835 bp, Bovine  19866880526486
  misc_feature (1)..(1): n is a, c, g, or t
nattcagctggtatttattcctgcacatctccccataagaattatgatctcctaagctatgatagccacggagattttgaaaggttaatattttgatcagccaaagcagcatattttttctgtaggaatagatatcaaatcaaatcaagggacatttaagaaggtcaaagctgtacaacccatcattggattttgcagaagcatatgagactcttaaatttcaattccattgataattggtcaagcagttgtaacaaggaaaagaaactgggtgacccgaatcagtccctgtggtcaaaactgtaataaaagcagtaaattgtatcaacttggaacttcaccttactcttacttccaagtcaaacatccgttgagtttaatgagaatttaatcatgcagagtgctgttcttttatctttccccgcgatgaaagaaattcttgtagtcttacatggagaccaaactacactatggtttacacaggagtaatggaagcactttattttgtctgcaagtcaagattttattaccaagcctaattctaggtatcaaagggtatatttttctttttgtttttgtttttttatacagtaacatttttttttaaattttattttaaactttacataattgtattagttttgccaaatatcaaaatgaatcaaagggtatatttttcttaagtctccagcagtagtcacaagcctaggatgatagctaaattggttgggactaaaatgagagaaaaccagagtggaagaacagagtttgttcatttggctgagtgaagttctcatagagcaatggctttttttctccctttttttctcttctt

SEQ ID NO: 38433 - DNA, 1173 bp, Bovine  19866880546589
  misc_feature (1)..(1): n is a, c, g, or t
nttttgaattttgaatccctgtcttttttccatttaaagaaaagagaacagtggctggctgtgtgcctgttccatgccgtgttaagtgtcaaacccatcaccaagggtaaacagctcccagtaggtgaagtgggattaagatagtccaggcaaatcccccacaccctggcacttttaatggttgaacagaaaaagtagaacggaaaacatgttgcctaatgctgcatgagttgcctaatgctttatctatagactgaatgcttatcgtttcatctaagcatggaagataagtgtctctgggtgcagggtacagcttgtgcccatactctcaaaggctggttattgttgaagattatgtaaaaaggctgttgggagctcaaaaaaaaaaaagaaaaaagaaaatcacagagttccgtttgttcctgttgtcagactgagatagcagccaagaaaagaaggaaggaaagaaagcctaacaccctgtcagatagcacacgagtgcactgtgtgagccaacctgctccatcttttaattagcacagaccatgctactgtcggcatcacaacccaagagccggtgttctcaccagcctgtgggtggctgggttggggaacggctatgaagtttccagattcacacttttccactgcgtggctggaatggaaggccttcttcccatgcttctaactgatggcatcttgtccaccgactctctcataggtgaccctgctgctccctcctctcccagaccccatccgtcatctggtcctgtcagtctctctgctaaacttctcccaaatctacctgctgttcttcgcctccaacaccatatcttagtctgagccacactcaccactcatgctgaacttctacaataccttcctaaatgttcttccagtgtccaattttgaagtttcctttaatcatcttccactctgcaggcagttatcttttaaattaggaggatgggattaacacataaacacccctccctgtacataaactagaccagcaacaaagacctaatgtgcagcacagggaactatattcaccatttggtagtagtctataagggaaaagaatctgagaagtaatatacacatatatatttagacatatacatatagcattctttatgtgcatatacatggttaatacggacgggggagcat

SEQ ID NO: 38434 - DNA, 2044 bp, Bovine  19866880569937
  misc_feature (1)..(1): n is a, c, g, or t
natggaattctccaggcaagaatactagagtgggtagccattcccttctccaagagatcttcccaacatagggatcaaaccccagtcttctgcattgcaggcagattcattaccatctaagccaccagggaagccctgaagcttcatagtagtaataataaaagcagaatgccttgctccattttgtctttctattaagtcatctttcccaagggtatcattttgctagaagaatgaaacccaactctaaagaaataactgtggtgtgaggacatgttattgaaaggaaaacatttagaggtgatgactaaccttccttgctttctccacaactttccaaagatcctatcagaagtaggttttaggaattgtttttctctgcatcctgccttgtttccccttccctggtttcttctcatgttgtttaattaattcatgacacaaacatgacaggcaccttgttaagtcattggggtgtcaacaattcaacaatcagtattgtggactgaattgtgacccccaccaaaattcctatgtttgaagttctaaccctccgtacttcaggatgtgactgcatttgagacagagtctttaaagaggtcaagttaaaatgaggtcattaggctggattctaatacaatatgactgatgtccttatgggaagaagagattaggacacaacaccttcagaaggaagaccacatgaagacacatggagaagatggccatctgcaagccagtgagagaactcagaagaacccaatccttctgacaccttgagctcagacttccagcctctagaattgtaagaaaataattttctatgggttgagtcacactgcctatggcacttagttatagcagccctagcaaactaatacaataagcattataaaacacagcattgtagaggagatgcgcaagttcatagctaaccacctgacaaggtaaggcaatgctgagccacagaagttctaaggttaaatccctgggcaccaagcatacagatgctatttccaaaggcagtgcagacaggcagggaatgatctaaggaagaaatagattgtgaaccaggactagaatgactcacaaggactttacaggattagagacaagggcattctagggggctggctcaggatgagtcatctttctcgtatggtctctctttgtccttcttgtgcattatcctgaccaagctctataaccaaactattatcctatcattattgcattcataaacataaattgggacttccctggtggtccaggggctaaaactccatgctcccaatgcaggggggcccaggtttgatccctagtcagggaactagatccacatgctataactatgagctggtacacccaaatataataaattaattaaatgtaagtttattaaaggggtttcccaggtggctcagtagtaaagaatccacctgccaagcaggagacatgggtttcatcagtgagtctggaagatcccctggagatggaaatggccagccactccagtattcttgcctgggaaatcccacagacagaggagcctggtgggctagagtccatggggtcaccaagagtcagacatgactgagcaactaaaccaccgccaccaagtttcttaaggagcaaaagtatcactgtccccattttccagatgaggaaactggggcacagacaggtgcagtaacttgtccaaggccacccagctcgtaagtgtcagagctggatgcacacccagcagtcctcctcctccaggggtctaatgactgagaccaggtttaatcaaggagcagggtgggtatagactgaggctctgtgaacacagcctagagggaagtagggactttctttccagacctgtgggtggaatcagaaggacagagcttgacagtagcttgagaaggaaggaaagctgaaggaagtcgtttttatttttgagaagaggaaagatgagaaactgtaggtttctaaaaggagataggagatagctggcaacagaagttccagcaggagaacagacgtctttgataaagcctaa

SEQ ID NO: 38435 - DNA, 799 bp, Bovine  19866880642521
  misc_feature (1)..(1): n is a, c, g, or t
nttttaaactagacaaattgcatcgggaggcttatttaaagatcccccattttcttaactgtgatgatggtcttaaatattaataataactacagctttggcttatatggtgcctcttccaacaaagagagatgcccttctttcataatcagtatctggcactaactgatatgcaaatccccctcccacccccgagtgcacagcgttgcatgctgcacagctgtgagtcatcagacattaatgtggacttaatttgaactggtgctggaggtatcgtttaaccacagtattaccaattcccattctgacatctgacagcccttaataattaactgcatgtaaatggtcaaaccttccgtctctgttggaccggtctctaactctaccagtctctgcatcgtgattgcaagtcagggctgtcaactgctctagtggcaaatcatagggaaaagatcagacatcttcaggagtcctgtgttcttcactctagctgccttttaattggactggaaggccttcctagcagctcccatatgctgctttcttagaaagacagaatattttctctggataagagggaaattgactgtgctttgaggcttaactggaggctctggggaaacacacttttgtggtagacttgccagggttatgctacagtgcgccaaggcaggtatattgtcccaaagccacaagttactcctttcctgaaacctcatccttgtgtgatttttcttccttctccctataaaatgtcttatttgaatttaagccacggattgacaggctggttccttgg

SEQ ID NO: 38436 - DNA, 3204 bp, Bovine  19866880750938
  misc_feature (1)..(1): n is a, c, g, or t
ncatgcacgcacgcattcttgttatgagaaaccagtgaaacagtacacataacgcacagtgtggtgatagcccagtaccagacacatgccaagatctcaactcatacacctttctttcttctgtcttttcatctattacttcacattgttgttgctgttgtttagtcactaagtcacgtccaactcttttgcgaccccacggactgaagcctggcagtctcctctgtccatgggatttaccaggtaaggatactggagtgggttgccatgcctttctccaggggatcttcccaatccagggatcgaactcacgtctcctgcattggcaggtgcattctttaccactgagccaccagagaagcctttgacttcatattgggatatcttaatgacagtctctttcattttagttattatgtacagctttcaaaacagtctcatacagatggtgattttagatactgtactttaaaatatatatatatgcatttggctgcaccaggttttagctgtggcatgtaggatctttcgtttcagcatgcacatttttagttgtggcaggtgggatctagttccccaagcagggattgaacctgggcctcctgctttgggggcattgggagtgagtagaatcttagccaatggaccaccagggaagtcccaataatgtatttcttaattttttagtgcacagaccacacaggacatttttgatgattatttaactgtttcatatctatctactccttagaatatatactagcttttcaaagacagaggccatgcctgcctggttcacttcagtatccttggtgcctcccatcactggcatagagatgcagttatcatttgttagataaataaattaatccttatgaaaacctagactcacatgtgatgagggagagggaggcccactggtaagataggtagctgatgaacaaaaaattgcagttatctattatcccaggtcccctgatgcttgctttctcatgcttaggcttgctcagtcatgtccagctctttgtgaccctgtggactatagtttgccatgttcctctgtccatgggatttaccaggcaagaatactggagtgggttgccatttcctcctccaggggatcttcccaacccaggaattgaacccagatctcctgtattgtaggcagattctttaccactagcaccacctgggaagctccctcttgctctaatacttacccagtaacctgaagggactggatttccctggcgtggcctggtccaggagttggatatataaagtcagatcgagttggatgagagaggagagaaaggatggatcatgaaatgtccactaaaccagaagccttataatttctacttggaaaaccttcagacaaattcaccacgagcctcaaatatcagcctcatctgggtcatgtcttctctaggctccaacgctgctgaattctctctcatgtcaggttttgtgtatgtgatatttcctttgtcttttctattctccactgctatgcactccctcctttgcctgcctgactcctgtttattcatagttcagcttagagaccattttatgtaccatataaatttagtttagatcctggttttgtcggttgtttagtctctaagtcgtgtctgactcttttgcgaccctatggactgtagcccgctaggctcctttgtccatgagatttttcaggcaacaatacctgagtaggttgctatttcctcttccagggggtcttcttgaaccagggaacaaatctgcaactccggcattgcaggtaggttctttactgctgagcaaccagaacacccagattctggtttaagtctttccaaattttgtatttcaccatcgtcaaactgtataatgctacactgtattataatttccttacttgtctgtgtcactctcgaacccatcctaagagggagaaaagtatctatctcatgtgcccgggacagagcacaatgactagcatattaaatatatgctcagaaaatatttgttgactgaaaggtcacagtagaaagggaacgtcttatataaactcctcttccccactgataaccactttcattattctcaaggcaggtcaaatcaccaacttaaagatagtatatctgagtgggtcacctagacacttactctacagatatatgaagattagagaaaatatttttaaataacttaagacagcatgcttttgattccatttgtagagtaaggccttgatgcatcttctctgtggggactggctgtttgttccattttttttcttttattaattaatttttattgaagtatatagttgctttaaaatgttgtgttagcttctactgcatagcaaaatgagtcaaccatacatgtacctatgcccccacctctttggatttccctccgattcagatcaccgcagtacattaagtagagttcctatgctgttcactatgctcccatcagttgtctactttatattaatacatagtatcaatagggcttatgtgtctatcccaatctcccaattactctcacctccacccctttcccccttggtatccatacatcagatccgctttttgaaaatgagatgtacaaagttggtttgcccgtcttgaatttcttattgcatctatgttgatgatttagatttcccacgtctccatcactttggctccatttataaaaggagatgaggcccaccctctgggatatctccgtctttctctggtctccagtccaggtgggcagcacaacacacatgggccaggtcttagaaaggatatttaggaacctgtcagttaaatgaagtataagaacttccagggtttccaggatctaagcaaccaggaacaattccccactgtttgcaactaagacaaacagaaaaaaacgtgggggaggaggaacaccggcccgtctctgataaataacctttccgtgtgaagtgcacatcagcctgacataagtaattagctgtcaggtgctgggctttgctgtcagaggccaattttcagattagtgttaattgcagggggggatctgatggcctttgctcccgccccctcaccccttcagtggactgccttccccagcttgctgccagtttgactggagcctcgggtaatggagctggcagggtggaatcaattactagccaatgaagattttcccacaggtctgggcttggagaggagg

SEQ ID NO: 38437 - DNA, 900 bp, Bovine  19866880801210
  misc_feature (1)..(1): n is a, c, g, or t
ntgatgtactctgcatagaagttaaataagcagggtgacaacatacagccttgacgtactccttttcctatttgggaccagtctgttgttccatgtccagttctaactgttgcttcctgacctgcatacagatttctcaagaggtaggtcaggtggtctgatactcccatctctttcagaattttccacagtttattgtgattcacacagtcaaaggctttgacatagtcaataaagcagaaatagatgtttttctggaactctcttgctttttcgatgatccagcggatgttggcaatttgatctctggttcctctgccttttctaaaaccagcttgaacgtcaggaagtttactactatactgtaaatgaagactttgtattctttcattttttatttctgttgttgaatgctctcattgaggtaagaaacacggaaaggaagaaatcagagaaaaaccagaaattggtaagtgaaagaaaacctattatctttcatatttttgcatgtgtaatcagcattgggggggggtggtaattacctcacatagtttagatttaattttccccaagaatctagaagtcttctactctagaatgaaaaaaaaaaaaaattgagagggtgtatctttttcacaaaataccttaatatggatattattccaggaggaaattagattgaagccaagggagcaaggtgtcttctggcaaacaccaaatttagagcccattattattactaaactctaattatgttttcaatgtcttgcttttggtattgtgggaagaactgatttaattttaagagactccctgaagctcactaccaactgactcatccttcttaattccacctgcgtgtttctctctttttacttcccatactctatatttagaaaa

SEQ ID NO: 38438 - DNA, 1756 bp, Bovine  19866880874311
  misc_feature (1)..(1): n is a, c, g, or t
naaaaaaaaaaaattaattcaagaagatccatgcacctcaaagtttatagcagcattatttacaatagtcaagatatggaagccacctaattgtccaacaacagatgaatggataaaaatgtggttatatatatctacaatggaatactactcagccattacaagaatggaattttgctatttgcagcaacatgatggacatggaggacattaagttaagtgaaagaagtcagaaaagacaaaggttatatgatatctcttatatgcagaatctaaaaaatacagcaaactagtggatataagaagaaaggagcagactcaaagatacagagaactagtggttaccagtgaggagcagggaggggcaatacaaaggtgggggagtgggaggcagactctactgggtataaatagactcaaggatgtattagataatgtgggggatatggccaatgttttgtaataactgtaaatggagagtaacctttaaaagtatattaaatttttaaaaaaaaaataaaacattttctccagtggaaaaacatccaaacttaatatttctgtctctggcaaagacaacacctcctctttgaatttaaacctattacccttgttatagagatacagaaagtacaaaagtatacaattctctatcttagatttattatctccatatttctgatattttctggtcaattctttatgatatgtcacctctgtggtagataacttaccagtaaccttcgataagttcttggctaaaaggcattgaaaagtattatcagttaaaaattgttattttgtcactgtatttttagtgtatcgaggttacactaaaaacctcaataatagtatatattccctcttcaagtagttatctctcaaatacaaaaggattcgtaagttgatttgtgtccctcctcatacagcctacttttatgttcacttttagtcatttaaatgttaattttttaggatttatatcctaaaattccaggagaaaatgagcaatttataaaaattactaccttgaattcggtcactgctaagatttaatttattcaatagaaattcttctccttggctcctttgggacctgagttatctggatatttgtttttgttgttcagttgctcagtcgtatcctactctttgtgacctcaagactgcagcacaccaggcttccctgtccttcactctctcctggagtttgctcaaactcatgtccattgagttgatgataccatacatccatctcatcctctgttttccccttctccttctgccctcaatctttcccagcatcaggttcttttccaatgaggtggctctttgcatcagatggccaaagtattgaagcttcagcttcagcatcagtccttccagtgagtattcagggttgatttcctttgggattgactagtttgatctccttgatctgaatatacaagcacccaaatatctcagaacacttgtctccaagctgacccactgtaactaagacctctcagactcacattgtataatctctgcctggagatgcagcatccaaccaacctcttcctcctcacgtctcttatatcacttcctgcctcctcatcattcaagcttcagatggtctggcttaattagccttctgggtaggcaagactcacctagggcatttctgtgatagtaggtgcttaaaagaaacagaagcagcagaaaacgataacatattttccaagtaggtaatatattttcaaattttctcatg

SEQ ID NO: 38439 - DNA, 1620 bp, Bovine  19866880896662
  misc_feature (1)..(1): n is a, c, g, or t
naatggtctaagtttttgtctctgtaaatgctcatattttgaatgctgagcttttatccaccataattcttcatgccccctaatttacttcttcccagattcatgcaatactcaatttaaaaggttccttctgtttcaatgtattatctttaagttaacttttactcagaaatcactttactttccctgcaatgtgctccctgaattgaagtcaagaagtacaaattgtaacaaaaataatcacagcttttagagttagagacagctaccggattgtgtgttacctggaacagtgttcctttctgtgtagaagttacctttatcaaacaatccaccccatctggggtagagaaatatgttttgtatgtactttgtgtggatcataaatggttgagataattagtaagcaactgatattaaaaggtcaattagaatggattaattttagcaaaagtcctcttattcaaagaaattagatcatatatttggccaattaacacagtcaaatgtgaaattacaacacaattttgtgcagtgaagaattaagttaactcaaagacaggtcaggcctttgcctttggctactgggaggtgatctttagtatcctgggatgttctgcctaataaaagagtctgtctggggaaagggaatgaagactaaaggtattagtttgagcctctaggagggattggagactaaaggacagctacctgggtagtatgtaatagagtcccaataaaagctctggacactaaaggcttggatgagctttcctgattggcaatactctgtacctataatgcagcagatgtgagttcaatccccgggccgggaagatcccctggagaaaggcgtggcaacctactccagtattcttgcctggagaatcccatggacagaggaacctggcgggctacagtccataggatagcaaagagttggacacgatttaagtgactgagcacatacatggtgatatacgtaaatataccacattcttgattccttggggagaggacagaaaaactccacacttgctacctttcttggactctttcctatgctgcatccttggctcattttaatttgtaccctttccctgatataaaccataaccgtgattataacagcatttaataagttacttgagtccttctagtaagttatttaaccagaaagtggttggggactctctttcctactgaatttcaattatttttagaagtgagtgtaatcttgtaatgtgctgtaaatttgcagttggataaactcaacacagatgttcatcagagatatccataaatatttagagtctacttcttctaggcatattgtatatatagagtgtgtgaagaactgttgtttaaaataactgaaatttgtagattgcaactccagtgtaacctagacatctagttgaggaatacacaaataaaagctttgacttacagcatagaagtgtaaatttgtttgactgtgttttgaaaggcattttctgtgagtatggactcagagcaggatcctcctagatttcttccctgatttttgaactcatatttcatgtgtatgtgcaataattccttgagtaatataatcataatactagtacaacagacaaa

SEQ ID NO: 38440 - DNA, 1835 bp, Bovine  19866880976054
  misc_feature (1)..(1): n is a, c, g, or t
ntatatatatacatataccatatatttgccctgagcagctcacaaattaaagtgtcatttactgaagtgtgaaggatgaggagaggaaggagaatcagaaatttggggattaaaagatatcagttttggataagttagagattcctatttagacatccatatggagaagccgagtaggcaggaagataacatagcatcctggagttcaagggaaagactagaagcctgctgctgatgctgttgctgctaagtcgcttcagccgtgtccgactctgtatgaccccatagacagcagcccaccaggctcccctgtccctgggattctccaggcaagaacactggggtgggttgccatttgttctccaatgcatgaaagtgaaaagtgaaagggaagtcattcagtcatgcccaactcttagcgaccccatggactgcagcctaccaggctcctccatccatgagattttccaggcaagagtactggagtgggttgccattgccttctccagactagaagactagagatacttaattgcctgtcatcatcaaaacagtgatatgtagagctatactagtaactacatgagatgatctaatgactaaatataaatatttgaatgtatttctgctagtatattattaaatttgagtatcatcagtcttcatacagtaaatgttgctgaattgtaagaatagcacaccatttatctatagttatgtctacatctgtatctgtctatctctctatctatctccctacctctccatctatctccctacctctccacagagaggactatatataacagaaagggaaaaaagaaatgtatctggcagtttcctcaataaacatactaaaacttctctgctttttgacaagccagtacatttttataactcataaataattgaaaatagcaaacagcttactgtcataaagcacttttatgtgatagtaaaagattctcttgcacatgttagtattggtcataaacagcacactgaagtcaaaagtaaatggcatgagcaagaaatttcattaaatttttaatgaggacaaataaaattctatcatgctatggttgctaccaaattcaattcaattaaatacatacttgtcacatgtttattacatgcatatcatataatgtgctagtgtaaaggatgcaaagataagccacaattgtcacagactcacagactttggagttcacactctggtagaagagggctttattccaataatcacatggcttattggttaatcacacattgagataaaattgtgaaggacaccaacatgaatctataaaagcataaggtaactataactgacttagtctgaaaaatcagagatgactttgtgagaaagtatcacatgaacctggtgaagagaagttcataaaacaaatgggatctaggggattgacatcgtgtgttccgtaaaatggagaaatccagtgtagatgaagaattaagaaaaatgataagcgataggatagtcagcattgttcaccctgctcgtgtgagatttgtaaaatatcttaagatttttttagatgattttcttttctcatttggaaaaacatgagaaatttctcattttttaatcccaaagatccctttcactcaaaagctagagaattctgaaattccagctcatgactttcaagtcacaggtgctgtccgtggtgctagaaagtaagtaactgagaagagagaagtgattaacaccaaggttcccaaacttgaccatactttggaatcaccacactcaagatctactgaattataatcctgaggattagaacccttgggtctgtatttttgtagat

SEQ ID NO: 38441 - DNA, 1272 bp, Bovine  19866881294529
  misc_feature (1)..(1): n is a, c, g, or t
ntccattttaaaggagatcagtcctgggtgttctttggaaggaatgatgctaaagctgaaactcccaatactttggccacctcatgagaagagttgactcattggaaaagactttgatgctgggagggattgggggcaggaggatattgggatgacagaggatgaaatggctggatggcatcaccgactcgatggatgtgagtttaagtgaactccaggagttggtgatggacagggaggcctggcgtgatgcaattcatggagttgcaaagagtcggacacgactgagtgactgaacttaactgaactgaactgaagtatgcttccctggtggctcagatggtaaaatgtctgcctacaaaatgggagacctggtttcaatccctgggtcaggaagacctcctggagaaggaaatggcaatccacttcagtattcttgcctggaaaatcccatgaatggaggaacctggtaggctatagtccatggggtcgcaaagagttggacacgactgagcgacttcactttcacttcaaactatggtggaggtaatgaagataatggcaaccttcttcaaatggtccaatgcatgtactgctacacttattgcccccaacctgaagttggccatcgcggacccatgcctcaatacttaaccactactgttttcttttaccactaaacctatgtgctccttgatttatcaccttatctagcaagtgttgatttttcttttgcaaactctccaacaattttttcataggcttttctgaaatcttttttgctcagtgaaatttttgatcattttctccatcaataaatatagggctaaatcacaatttttagataatatatatcaatttgatatatatgtctttaccataaagtattttaaaaaatcaagcagatacttttcagtagagtggaatgaagataattgcctgactttgctctgccctctggcctctggcttagttgattgctccaagggtggaaatattgatgtcctgatatttcacagatatataaatttaagatctgctttcagttaacttgcttggcaattaccgaactctttcaatttaacaattattgttttctttgaaaactgggggaattctattgtattaatgtctttattttaaaaataattacatttccagttatctcttatctctctatgaaattcctattactaggtccaaggatactctctttttaagttgctgtaattatgtaacaaattactccagaacttatttcttcaaaacaac

SEQ ID NO: 38442 - DNA, 1785 bp, Bovine  19866881392352
  misc_feature (1)..(1): n is a, c, g, or t
nattggttgatgagactacgtccagtttttgtgccagttgtagtcagcttcatttcctggttctcacacagccgcctgacactgttgtgtttggattcccaacacggctgggggatgtttatgtccccacccagacagctgtgctcattgaaacagaaggatcgttgatgctgtttacttccagaatggtaaaacgccgaaactcctcgtctctaaaaaatggttactattttatttaaaggtgaattaaagctgtttatctcaactcagcactatcttataatggttttcccaagttagcgtcaattgaaaatgctcttatgttatttttaaagtgtcaaaaaatggtaggtcttggaaattctgcagatttttatttctggcataattggaagatttggaatatggttaagagagtgtttccatctatttattctaaattggccaagtctggaaaattacagagatggctggtccttttgtcatgagttcccaaaatcagaattgcttggctgatggccggactctgactttcttgaaaagtttccaaggcagtcttcatcctaaaacacactggccatttaggaaaggccagaggaatctgctttaccaataagaggccacttccggtggtcctagggaaataagataatcccttttggggtgggctttaaaaatattacacaatttttacaccctacaattctcaagatacaacttagttctgtggataagctgagctatcagaaaagaacctcatgttgtgtaaaagggccatcttttcactgtttaatcctttacagacccagcatcaaccttcccaatcccgatagctgtatttctcatcctttatattctaaaagcttatattaggaatataataagagaacaccttgacaagtttcaggaaatgaagcttacttgacagaagcaaatttctttctttaaaatacccaaaggtactcaaattatgttttcaaatatttgcattctttggcctgattctcaaatatgttttcaaatctttgcactctttgacctgcagaaaagttctataagagcctcagatttccatgattcacatgcagatggaatcctagaatactgtctgaatttcaattaatttttggcttccttgctgattcaggtgatctgagtgatataggctgttacttgcctactcagtatctattcttgccttcttcctgagtgacagatttttttagctgagcacattactgcctagaacaagacacatttccagcccccattctgcttggaatggccaattagttgcaagtggaatttgttaggaagggcttctagaaagtataccttttgacagtgacacatggaggaatggcatttttttccttgcccttccccacttcctcagtgccaaccaggatcgtggccctgatggctagaccttcacatcataatggattttgagctgaccttgaagatggaagctcctgggttaagaatgttggagcagggagataggagtgtggagccttgatggccctatggtgccactgttactgctgttgttatgttcctaagttgtgtccgagtctttgtgaccccatggactgtagtccaccaggctcctctgaccatgggagaggagcaaaaatactggcgtgggttgtcatgccatcctccaagggatcttcctgatccagggatcgaacctgagtctcctgtgtctcctgcactggcaggtagattcttttaccactgagtcaccagggtagaactgcttattcttggacttcatta

SEQ ID NO: 38443 - DNA, 1409 bp, Bovine  19866881522310
  misc_feature (1)..(1): n is a, c, g, or t
ncttctttttgctgctcttctgtgggaaagaggaagcaggagatcttagcctcaggaagtgatgtcgaacagtttagctgattataagtgcttgaaaggcaaattaaggccttccctttaataggatgtaattggttaaatacggtaatagaccacctgtggctgagacgaagccaagtcctgagaagcccctgagaccacagcctggtgttgacctgcctgaaggtcagacgggtctctgtgttacagagaaagattctaatcaaaacctgggtgtacaatttggtttagaatatgttgaccaatggaaaaaagttatacaatttttaaaagaatttctttttagaaattaatcaaccaccaagcaagtaaaacagctttcctggtgcctcagatggtaaagaatctgtctgcaatgcaggagagccaggttcaatccctgggttgggaagatcccctggagaagggaatggcaacccactccagtattcttacctggagaatcccgtggacagaggagtctggtggactacagtcgacggggtggcaaagagtcagacacgactgagtgacgaacacacatgcgagtaaacagtgcatcctgtgtgccaggtgctttagtaagcattcgtgtataatgaacttgctaaccagtctgtgagacagattcgattactatcatcagaatcaaacccactttgcagatgaaaacactgaggcacagagtaagcttggcttgaggtcacacaacttgtagtggtagagctgagacttgaagccagacaatctgagtttaccatctacattcctaatccctacagtatactgcttcccaagatctccttacttgttacttgtgaattccatacacaacacaggctagaccttgcatttggagcaatatgtcttcgtacactcccatctcctcatggcatcagaatgatcacaaaagtagctttagggaagtgaaaaagcccattcaagattgcatccactgggacttcctggtggtccagtggttaagaatctgccttccaatgcatgagactcagtttcgattcctggtcagggaactaagatcctacatactgcaactaagcccacatccccaaactagagaaaagctggcataccacaatgaagacatgatgcagccataaataaatattaatattttttaaaaacggttacatcagcaaacctaaaattaccaagtgacaacaaatgtcatacaccttactcatacacagtctcatctgagcttgaagcatgatgctgaggtgatttaataaggagaaattaactgaggactcctttggaagtagaaaaatgttcacacgtggttttgccatagtgggcagagtcatccttaacacagcatctgtttggcaaggaagaaactcctagaa

SEQ ID NO: 38444 - DNA, 1052 bp, Bovine  19866881657475
  misc_feature (1)..(1): n is a, c, g, or t
nccttacatcacccagtcgttcagctgtgcacaaagtcttccatcagaatcttctcataaggatggaaatgtcaaaatcaatttcctggaaaagaaacaaaaatggattttttttcccttaaatggtcttgatagcaaaatttatgagagtagaaatacatcctgagggattggatgaaaggctcattgaaagagtcattttcatctggaccagggaaagccctagagaggaaactgccctgagacccagagggcagactatatgttggaatttttctttgtttctaacagctacagttggtttttttgtttatttgcaaagtgctggttgtgtctcaggggtagtgagttggcaaagcattttacatgggaaaaccaaaaaagtcagtgtcacagatagaggttggcatgtcccactgcagatagctcagtgaaaagtgaggtgtgtccaggggccaaggacatttggagagaccctgtaccctgataagctgtctagagcttccatctacaaggactgctaaaatcttatgggaatatgtctgaaagcatggcccactgtacctcagatcatcacccagactcactgcaggaatggtcaaaaagtaagctggtttctctgccccagaagagacaaggctctgaagtaaacgttagaaacagttctctcccatcctggccctgtgcccacaaatgagctttgaggagaatttaaagatggtcagcctgaagggtgccaagtctctatcctgccccagttggtccagaagcacagacaactctcccccgagtatcctgatgaagagactgagcgtaccatggggacagttcaggtgatccctcaggtctttaaactgcagggatagccacagtggtggggccccagggcccactgaccaccggagccctgcacctcagcgggccgtgtgtgggaggctggtcagggctgcagctgagtgacagctccaaggatgcagcaaggcaggccccagtcaaaagcaggtgatgactccggctccggacttttgaggaagggctccagggcagccatt

SEQ ID NO: 38445 - DNA, 802 bp, Bovine  19866881799978
  misc_feature (1)..(1): n is a, c, g, or t
nattttgtaaattgagatttggtaaaatcccattgtaaaatataccatatagatcaaatgggaagacccaagatacaacttactaagattattttttaataaagaagctaggcttgaataagaatagctgtaatatgacagccggtatatggacactaactgatttataaaatcttttggcttattaatagatacttagggaaagaagtgttgctttaaattttaaaaaatgacatgctgttagaataaaagctgaggtttcactgcacccttcggagaaggcaatggcaccccactccagtactcttgcctggaaaatcccatagatggaggagcctggtaggctgcagtccatggggttgctaagagtcggacatgactgagggacttcactttcacttttcactttcatgcattggagaaggaaatggcaacccactccagtgttcttgtctggaggatcccagggacgggggagcctagtgggctgccgtctatggggtctcgaagagttggacacgactgaagtgacttagcagtagcattaacattagaaggatttggagatgaccaatcaaaattgatactgtgctgttaatgtacatgctaaagaaatactggaatggggactgggaataagtggggagaagagaggaaagtgcttattttgggttagtggaataaggctaatcacaacaagtaaaaatttcagaaactgatttgttaaatattcacttgacagaaaaagaactatgtagattttgatttcctcagaaaaggaatagggaaaaagaaagtaaaa

SEQ ID NO: 38446 - DNA, 1130 bp, Bovine  19866881940761
  misc_feature (1)..(1): n is a, c, g, or t
naaaactaatttaaatagataaatgcactccagtgttcatgtgtgtgcatgctcagtcacatctgactctgcaaccctgtggactatagcccgccaggctcctctgtccatgggattctccaggcaagaatactgaagtgggttgtcatatccttctccagggactcttctggatccagggatcaaacaagggtctcctgcaactcctgccttggcaggtggattcttttaccattgagccatacgggacagcattattcacaatagccaggacaaagaggcaagctaaatgttcattgacagatgagtggataaagaaaatgtggcatttttccataccaatacaatattgtaaagtaaaaaataaataaataaataaaaagaaaatgtggcatttatatacaatggaatattacttagccataaaaaatgaaataatgttcttttcagcaacttagacctagagattatcattactaagtgaagtaagtcagacaaagacaaatgtcatataatatcacttacatgtgacatgtaagacaaatgatataaatgaacctatttgcaaaacagaaacagactcaaagacaaaacaagcttatggctaccacaggagacagggtagagggagggataaattaggagtttgagattaacaaatgcaaaatattttatataaaataggtaaaaaacaaggtgatgctgtacagcaacagggagctatattcaatatcttgtagtacactataatggaaaaatagacaaagcacacacacatatatatataaaactgaatcactttgctgtatatcagaaactaacacagcattgtaaattaactatacttcagtaaaagtaaaaattattttaaaaagttgtcagaaaaaatctacatgtgtgtcccttcatctgcatatttgcaaatggtatatttgtgtatatgtccatgtttgtcattcaaaaacattttgaaaatctctttttgtgtttatcactgtgctaaaaataagtcatatagatttcattgaaaaaaatcttagttactctgaagcctccttggtctctaagatgcaattgagaaatcttgttaatgattggagaaggggatctacatgtaaacaaattgacaa

SEQ ID NO: 38447 - DNA, 2761 bp, Bovine  19866880122763
  misc_feature (1)..(1): n is a, c, g, or t
nataattagggatgctgagcatcttgtcttatggtggttagggtattttttctttctttttcttttagttaggcatatgtggaaattttacgtttctattgtcatcttgcaagttgggcgtgtttgcaatttatttctctaatatttacctcaggatctttcttgaggcaagctgtcactgacaagcacccccgcccccttgtgaattggaggaccctttggttaagttgtagttacagaaaagttccacaaggtggcagcacttttgatgcttactctggttcctggggcaaacagcgcattagggaaagtcggcttccagggttgtgaaatagagtggaatgtacctcagcgaacatttaagggcttgtgtcgcactacttatttcccctaaagcatcacacacacacacacacccacagacggcttccagactaatcccaaccagagccacagcaccttgctgactacgcttcagtgcctagggagtctgcactctcagaaaggaggcttgagctgggaacttcagcatcagcagacgtggaggttaggtgactactgcccccaaggtctccaaggacttgatcccactcgggtctctggtcccagccagagcacagcggactatataggcttaaaaagggttcaacgaacaccctgccaggctgtctcaaaaacatagcagtctagcctggagacccaagcctgcgcaggctccaggatggatcacaccccaagtcagggagatgggagggaataaagcaggcactgcttttctttttctttaacatcatgccgatgctatgttggaggatagtacattcgcagtgttgtgcttgtcctcagcgtgcagccgccggattcaggtataatatattcatggtgtatctctattgcatttttgaactttttaccataggaggtcgagaagagtgccaagcaccaggtccttgtgaattatatatctcagatacacttttctgtgtacataaagaaaggaatttaggagataatttttgtggattatctcttagagatacagatttctgtctttagagatacagattgctgcctatatatggaagatagaaaggatggaaggggacagtcactgttgattatatattacaatacagatttcttgtgtatgtaggcatgctgctgctgctaagtcgcttcagtcgtgtcagactctgtgcgaccccagagatgacagcccaccaggctcttctgtccctgggattctccaggcaagaattggagtgggttgccatttccttctccagtgcaggaaagtgaaaagtgaaagtgaagtcgctcagtcgtgtctgactcttcatgaccccatggactgcagcctaccaggctcctccgtccatgggattttccaggcaagagtactgtagtggggtgccattgccttctctggaggaagatactgagcaaccagcaaaactgagaatgaactataaataacatgagcttccctggtgactcagtggtaaagccaatgaggagatgccaatgccccacatgccaattggcatgccccacatgccaatacaggagatgatacaggtttgatccctaggtcaggaagatctcctggagaaggaaatgtcaaacccactgcagtattcttgcctttgaaatcccatggacagaggagcctggtgggctacagtccacagggtcacaagagtcatgcctgacttagcagctaaacaacaacagcaagaacaatgtaaggttttaaattctaaaaactgttaccaacctttaccgtatacaaaaatgtagaatatggccatcatccaaacacaccttcaaaagctggtctaaaatcttgaacttaactggtctgagtcaaaggtaattgctgaaatattcattaaagatgttaatggcctctcctgtggactctggttcaataaaaccagtcaaggctagatatgtccaaaacaaatcagccccataccaccaaatactccttaaaattccctttttgaaagtcttatctccacctcccacagacctcctcagcccaaccagtttcagagaaatatgttccattccatacatctttatttgcaggtccttgagagaaattatgcatatgccggacacttttaagttgggagcgcaactagaaatagtttgaaactgcttattctggaatctccaaattgtaggcatgtgcaggggttagaatggtgctaagattgaggagagaaaggagacaaagcattagaaagacagagtttatttttaaagaattaagaacaactattctaagtatcctcctctgttgcttttgtttgaataaatgctgcaattaaggaagatgctatataacccagccttgaaaatccccaggtgctgcattaagcagacctgagtcccaagtctggcttcaacacttcctgtgtatattcttattcaagtgactcagtcccctaagtagcagctttcttagaggcaaaaatgtgggtattattaatacccacctcccagggttgtcacgaggattaaatcaagcagttcctcccctgcagttcttagaggtttgcatagaaatttgagaatgttgcattgctatgtggtcaggtcccagaacttcccaatttatgctttttaaaattataattaaaccccgtacttcctggtcatgcactggatatcagtgtttatattaatatatgggaattacatatcactttattagataagtagcatgccatctccttcttctgccccatca

SEQ ID NO: 38448 - DNA, 811 bp, Bovine  19866880275652
  misc_feature (1)..(1): n is a, c, g, or t
ncatgggattttccaggcaagagtactggagtggggttccattgccttctccgacatcactgtataaaggaccttgaaattctctgaaatcttaaggaaacctgatagttttctcaatatgacatcaatgctaaatatttacactaattttcaataatgagtaatgaagatgaatggacttttcaaaatgccaattaaaaaaaatagcactggagaaataaaactgaattaactttctactctatagaaaacaatataaaaataatatcatacaaaaatatcaaaagtatacagataaaatatagacaatattagagaggtctgttatgcaggttattaaaaaatatcatgtttttcttgcttttgtgaaatacacgtcagcatcagcattgtcagcagattaacattataattgttatggcttcaattttaaacaaagatttacttccgtgtctacatttgttcttgttatttctgtatccttttcttaagggtggggaggggggttccaaactttataagctacagacccaccaaacatggtctgccctggctagaaacttgtgtttttccctaaagcctctgttctcagctcttaaaatcaggacagaatcaacaaatatttagaagaatcacaagatgttctctaagaatcccttttcaacttgatttgctgtttctcttgagaaccatctgatagaaactctgacctttatttcttagaggcgacagaattactccagggagatctgctcctggtgaggattatggaatccacttttaacaagcaccccaggcattcacaggccaa

SEQ ID NO: 38449 - DNA, 1241 bp, Bovine  19866880279738
  misc_feature (1)..(1): n is a, c, g, or t
ngtttttccgtggtctgtatggatgtgagagttggactataaagaaagctgagcactgaaaaattgatacttttgaactgtggtgttggagaagacttttgagagtcccttggactgcaaggagatccaaccagtccatcctaaaggagatcagtcctcggtgtgcattggaaggactgatgctaaagctgaaactccagtactttggccacctcatgcgaagagttgactcattggaaaagaccctgatgctgggagggattgggggcaggaggagaaggggacgacagaggatgagatggctggatggcatcaccgactcaatggacatgagtttgagtgaactccgggagttggcgttagatggggaggcctggcgtgctgtgattcatggggtggcaatgagttggacaggactgagcgactgaactgaactgaagtactctaatgtgtttttaaaattttataggtagtcattccaaaaataagcacacctttaaggtgatcatctcaacccacaggccaggatatgccgatggacagacacaagataggcattgtagagcatcagaagctctattatgaccattcaatctgggggtgacccagacatttcagcccaagtctccatgaggtgcatatcacgtccaaggctccggactacagtcagcctggtacgaactcaatgttgcaccaggtatatgaccttgagccaagtatttcctactttgggcttcagtttccccttctggacgtggctgtgcctgttgacatctagtaggaagcactgaatagggttgacaagttactaggattagcccaggaaccaaactcacttccctctgctccatgaccactcttcctggctctctgacctatgaatctttatggctcctgcatccctcctatttctttcactgagtcttgcaaagtcttattcattctgcctgtttctggtcagccctcattcacgcaataaacacataccaagcattgagctaggttggcaaactttttccgaaaaatgccagatggttcatgttttagggttggggagtcacacagtatctgttatgaactattcagctctgcttttatagtgaaaaagcagccatagacgatacataaaccatcagagaaggctatgttccagcaagactttatttgcaaaacaggtagagggacagatttggcttatgagctgtagttgaaggcaaatgagctagatgctgggcattaca

SEQ ID NO: 38450 - DNA, 2709 bp, Bovine  19866880493568
  misc_feature (1)..(1): n is a, c, g, or t
ngatgttgaagctgaaactccgtactttggcccctcatgcaaagtagctgacttattggaaaagaccctgatgctgggaaagattgagggcaggagaagcggatgacagaggatgagatggttagatggcatcaccgactcaatggacaggagtttgggtaaactccaggagttggtgatggacagggaggcctggcttgctgtgattcatggggtcgcaaagagttggacacgactgagcaactaaactgaactgaactgaactgaagtttaacttatattccacctgccagaaacacaattgggatccaactattcttttataaacaactgagttttgcattatttattgtatctaatagctgaatgtttaaagcaaacctataatatctctgttgacatctgtttatatgtttatgtatatttgagaatctgcctgcaatgtaggaggcctgggttcagtccttgggttgggaagatctcctggagaagggaatggctacccactccagaattcttcatggaaaattccttgaacagaggagcctggcaggctgcagtccatggagactgacaggtggattatttaccatgagaactaccaggatagcccataagtaagacaaaagtttattagtaaacttttcaacaataattatgctttatgttatgtctacttaaaaatggtttacaaaatcttttaaaagcttgaaatcttaaatttacactgaaataagtgaccagtggagaaggcaatggcaacccactccagtactcttgcctggaatatcccatggatggaggagcctggtaggctgcagtccatggggtcactaagagtcggacacggctgagtgacttcactttcacttttcactttcacgcattggagaagacaatggcaacctactccagtgttcttgcctggaaaatcccagggacagaggagcctggtgggctgccgtctatggggttgcacagagtcagacacgactgaagtgacttagcagcaagtgaccagtgggtcagaagctcacataacaacctggtttttgacattgacatctgatatagaaggtagtcttgtggggctaagctcttaccatatggaatctaatgctatctccaagtagatagtgtcagaatagagttgaattgcaggacacttaactggtgttagataattacttggtggcatagagggaaaaacccacatattggtattggagtcagaatattatgacttattcgaaattgatgagaattgtagggtaactatacttgtccttttgagtctgcagtagagaaaaactacctcatattgacttaaaccacacctagagtcctttaatgggcccaaaagaaaggttaagcactgtcaagaaagagaaagccaagtcaagcagtgtatcttattcctgatgaatgcagggatgcagagccgactcaagtcactggggtatttcttatattctttctgtccaactactctcttaagaccccttcatggatcatagccttgtcatggtgaaaggacttgcataactatatgaagctatgagtcatgctgtgcagggccgtccaagacggacgactcatagtgaagagttctgatggaacatggtccactgcaggaggcaccgagacccactccagtattcttgcctagagaatcccatgaacagtatgaaaaggcaaaaagataggacatcagaagatgaaccccccctgcccccgccaaaggtcagaaggtgtccaatatgctactgggttatgatggttagatagcatcaccaactcaatggacatgagtttgagcaaagtccagtagaaagtggaggacagaggtgcctggtgtgctagagtccatggggtccgaaaaagtcagataagactcggctacttactgaacaacaaaaacagctctcttgagacagcttcaggtacaaatcagatgcaccaatgataagcacactggactgggattcaggaatctcatacttgctctacagctttgggcttctctttgagtgcctcttgggtcttgattttaatccaagtcagatgagtttaacaagacactatctacagtcctttctatctctgacatgctattgccttaggttttcaatggcccatctgcctggggaagggcatccatgtccttctatagctgacggtcccctccttctctgcccacatccctcaggaccatacctcatcttggcctcccaaagtggtatcaggcagccagacaatctcatttactcacaattatttccgtcaccaggacccagtatatccaatggcaatttaccacacatcgttaatatgtttgttatattttgttggcagaatatgaaagttcatcagtaagcccgcacacagggaaagcatattgaaatgagcattatggatctgtcaggctggagtttatggccttttctcagtactacactgtaagtaaaacaagccgtgattgagtcagcagcctcctgggtactcatttgccaaagtgtagggaattttaatgctaagtttatcttcctgcattaggcaggcagggtgagggtggggtgttgggcagattgcttcggcttaggggtattacagaccagcctgcaagttcaacagacaccaggagggaagctttcaggagatgtagtacccggagttttaaagctcagttgcaaatactccttttaaaac

SEQ ID NO: 38451 - DNA, 1435 bp, Bovine  19866880526881
  misc_feature (1)..(1): n is a, c, g, or t
natgtgcctccaaatctcaggctccattaatctggatcatgaaggctgaaaaggaaatttgccagattgggggaagagcatttgagggccgagaaaacagcctctgcaaattcatggagccacaaaaggcacgtccccagaaagaaaggggaaggccttcagaggaaggagactgaactgggaagggcagtggggctggtttataatgagccgtgaacgccaaggggagagttggtctttgcggtttctttagcctgggctggttggtgtgggcaagctacgtagccatggtggagcagtggggacgtgggtttctcccactgatcagatgtcttcactgtgttacgacattctccagtgtgttaatggtgactagttccgacacaggcagcccagctcattcttctgctcctttgttggactgaacactatctcatcattttgtgggtattgcctttatgcaaatgctcacctctgatatttactcacaaaaattagacagtcaaaatgttaccctgtaggcttactatggaactggaggactggctcatttctgaggtgccaggacatgttaagttttttaaaaataagcacagaaacaagcggcctactcacttcaagggcagagctgggtggtgcttcaaaaggtcttagctctaagcttctgttcacgacccagagcagtcactgtcagacatgaccagtctgcatctttgggtccagaaaaggagactgcagccctgagaagggaatggtctgccctggggcagagaactggtttgtgccaggaaggctgtgtgatctgggttctggatggatctagctgggcagatgatccgaatatgcttgataaacaattcagtggcacagataaactcctagactctggcagaataatgaaaggatgtggccttttctgaaaatcatgcttaatgaaaggaatggccagctccatagaggaagttcagtccttagcgccacaaggaaagacagattccaattcaaaatatggaaatactttctgtgaattagaaatgagagttgaatgatcttagtcagagagtccctgagagcttgctcatcattttattccccccacccccaaggaaaatcttctgactaaagagaacagtgtgtactcataggaatctagggacgtgtagcttaaaatgcattttaaaagcacaaaattcttttgaagtctcctgtcttatggcaaaatgccatacacacctttaaattaaatccaacaacatgtcccttttttgttttaatatagcctttgaaatacttattatccgtaaaattgatcgtgggtttacccctggaggtatagatactctaatcagagaagcagtatctgatatcatgtaataattatgatatcataacatctcagagttgaaagagattcacgaaatcaccgatctgaatt

SEQ ID NO: 38452 - DNA, 1921 bp, Bovine  19866880548699
  misc_feature (1)..(1): n is a, c, g, or t
ngattgctgggtcatatggcagttctatttccagttttttaaggaatctccaaactgttctccatagtggctgtactagtttgcattcccaccaacagtgtaagagggttcccttttctccacaccctctccagcatttattgtttgtagactttttgacagcagccattctgactggtgtgaaatggtacctcatagtggttttgatttgcatttctctgttaatgagtgatgatcatcttttcatgtgcttgttagccatctgtatgtcttctttggagaaatgtctgtttagttccttggcccatttttttgattgggtcatttatttttctggaattgagctgcatgagctgcttgtatatttttgagattaattcattgtcatttgcttcatttgctattattttctcccattctgaaggcttgaggaaaggacattttagaatgaggggcacaattagaactggctcagatatatggtctttccaggtcatttagggcatagagtaaatgggggagagaggaaaatacagatgcaagagagactgaggccagtttaggaagaactggtttgataaacaggggtatggactctgtcctgcaggaaatgaggccaccggggaatgggctggttcccctcagctttcacaagataatcataggagccttgtaaacgatggtttagaagaggcaaaaggcaagaggtgagcaaacataaactaaaatcgtaggaatttataaggataagaaaagacatgttcatataattaagtatctaagatattttaacattctgtacagtggatatggtgattatctctactgcatcagtttcttgtaccgttaaattaattagtgcataaaagttgctgagagtagtatctgacacatatattagctaatatttatatgctgtaataacagtatttctgtgtatttttctatgcaccagtaccatttctatgtacttggccttgcagaagtgacacagaagactatgtaaacattcgtcctttggctggtggcagaaattattacagtaactagggtcccagctaacttagaacacacctaaatgccataacggtggcacacaaatacacacagtgctttgggggctgatctggaggagagagaatgatttagaatcgatcaggtagaatgcattttggtggggaagaggagcatttgcaaaggaactggatgaataggaatggcacaggcactttgagagagcaagatatggtatggcagggtatcaagttgagaacatggtctttgaaatctactggctgtgatcgaatcttggctgtgccctgtccaattttatgatttaggtcaactccctccctctaaatctcagtatcctcatcttgaaaattgtactgaaaattttatgtgtcttatgagaaatcatatgtatttcatctgtgataaaaaataaggtaagtgcgggtgaaatgcttagcatgggacctggtgccccttaagagaacaacacatattggtattatattttgcttattgttatgatcagacatctcagtgcagagcattacgagcatctgcccactgatttttcttcatttgaatgctaagtcttttaccctgtgtgcagggcaaatcctggcctgacatttgcattctgttgccctggtttcccctgcctttgcctcaatgtcaaagaaatctccctttcaaattaaagggagatttaatgttcttaagcatagctgccccctctcgtcttaagagtgtgtggcatttcaagtgcgatttgcagactttcagaatggaagatgctctaaagcattagctcctgtggcaatgagttggttgtctgttttccaaaccactgatgaatcagaacatctgcattatatgagggggatgttccaaaattgtactgttcacacaa

SEQ ID NO: 38453 - DNA, 2258 bp, Bovine  19866880554987
  misc_feature (1)..(1): n is a, c, g, or t
ntgcccggagaatcccatggatggaggagcctgataggctgcagtccatggggtcgctaagagtcggacacgactgagcgacttcactttcacttttcactttcatgcattggagaaggaaatggcaacccactccagtgttcttgcctggagagtccctgggacggggaagcctggtgggctgccatatatggggtcgcacagagttggacacgactgaagcgacttagcagcagcagcagcacacttgagtgtagagattcttttgtttcttgctgacggaggatggtagagagaagacacatagctgtacctattatgctgttctatttcagtctactctgtaattcacttcctttttttggatcttattcttttgctaagtaccacccacctacttctgggagacaaggccaggtgaaagacatcttcagatgtctcaacttcctcatctgcttgtcactcactgggtactaatttggaaggctgtctctcaaagaaaactagagaaagtggtccctgaccctggaaaaatacctgttatgtatgggaagcttgtaaacttatgcatagagaggctaccctggtgatcaaaagtcagttagcgctggagacagaattagtagtggttactagaggacagtcttccagttgaaaagattttaatggtcagggttgcttgaagatgggaaggaggaccttggtagaattgaggaggcaatcactctccatcaccaaagggaatctacttatcatagtctgactgaaagggaatgtgagcaggtgagacagtggcttccatgacctttgatacccttggcagcccaaggttgaataatcacacctacgaggtctgctttcctgacgtttgtctgtctgaagagagcacctttctctgattttcttgcggagtctgtcgtacgagtggaggggctgagaatctgctcagcatccatgggacactcctgctgtgtccagggtgtttcctctaagtctcctctgtgggcccctcctcttccagatgtcaattaaatgctgcttttcctcccactcctgttgggttatcacactgacccccctgtcttcccttatccttcattccagcaagtcccaaatatctggtttcagatttcgtctctcctccaaactcaacaattcttttacgcaactgccaaacggacatttccgttggatttttctgtctcagaatcctcacttcccctcttctttacctatctgtttctcttcctgtgttctctgtctcaagtaatggcaccagcatcagtcagaggcccaagtgaggaggaaggttgggcagtattcttgagtctttcttcttcctaactcagtataataatagtaaaaataaggaaacagtagtaatttcatagtaactgctattatttgaacacttgccatatttcagactccacattacatggataataccacataatccttctgttaccctatgacttttgcctcatatcacgagtggaggaaattagtagcttgcccaagatagttactaagtggaggggctaggattcaggactccagaatctgtgttcttcatcttcttgatatcctgctttcatatctaatcactcaccattctccttctctctcaacttgtgtaagtcttccagttcatgtactttcccctattttagcttccttttttcctatcttatttcctgtgttcgtttacatattataaacacacagcatacctatgctttctacatattatcaagaagaactaatacgcaaggtttcctatcacacaagcacaaacacagacattttaaaagatgtgtccacttcaaactgtcaccgcgttgttaaccaacaatatgaaataaaaagttcaatttaaaaaaaaatttttaaagatatggaggaataaataagaatggttaattttttataaattattttggtttattacttaccagtacataattagcagttgtggaaagatgaacacgctaatgtcaaacattcttttcaattattctaaatttggggaaggaaattggcagatatggttgcttcatgatgattttttactttgtcctatgattgctggtgtactttctccaggaataggagaaatatcaactctgccattttcttctggtttgtgttatttgtcttatcttcaactggtaatttctttgcaggaatctgtcaaagcaaattggtcattttaggagggttgggcttaattgctgctgctgctgctgctgctaagt

SEQ ID NO: 38454 - DNA, 1155 bp, Bovine  19866880598468
  misc_feature (1)..(1): n is a, c, g, or t
ntaaagaatctgcctgcaatgcaggagacccaggttcaatccctggatcgggaagatcccctggagaaggaaatggtgacccactccagttttcttgcctggagaattccatggacaagaggggcctggtaggctacagtccatggggtcacaaagagttggacaggactgagcaactaacactttcagctcttcatatctgtaaaagctccatttctctattcaactttaagactcaatcttaagactcatcaaatttctggtatttttctaattaaaaaaatatatacatactttctctctctctctagttatctgtgatacttatcgctataaagttactatgaacaaggaattagggaatcctgaaccactgcctcctggggaaacacagggttaggttcctacaagactccagttacctttctatcaacttatcaatacataacctgcttcgatgatggtttctgtttaaagataccatatttaatacatactgatgattcattaacattgaactcacagccaagagcgctgtcactcaagcctgaataaagcttatctaacacatgggttttctccttaaggcacatcgcagctgtcctgtactcaggaaactagacagcacttcagcgctatgcgtggaggccatttttaactacaacataaagtgcagaaaccctgaaaacctcggtgctaagcagaccatgagtaggacgtttgtctgtaggatgagagctgcagcctcagctgggaatgtactccctgggagactcgctgctctgtgcacgttcacaaatgatccaaaaagtcgcaggggtactgacaggtaacaaatttcagcgagtgagtgaactcacaaatatgggctcacttataattaggatttaccatatacagatgttgtagcttgttcagttgctaaatcgtgtccaactctttgcaacatgccaggcttccctgtccttcactatctcctgaagtttgctcaagttcatgtccattgagttggtgatgccatccaagcatctcatccttctcctcccgccttcaatccttcccagcatcagggtctcttccaatgagtcggctctttgcatcaggcagccaaagcactggagattcagcttcagcatcagtccttccagtgaatat

SEQ ID NO: 38455 - DNA, 2238 bp, Bovine  19866880605390
  misc_feature (1)..(1): n is a, c, g, or t
naaaactctctctttctctgtctctctctctctatatatatactatatataaaacttatatataaaacatatatatatggtggcttctctctctctctctctctctctatatatatatatatatagtgacttctctctctatatatatatataaatatatatggtggcttccctgttagctcagatggtaaagcatctgcacatgctcagtcgctcagtcatgtccaactctttgcgaccccatagacagcagcccacctggctcctctgtccatgggattctccaggcaagaatactggagtgggttgccatttccttctccagtatacacacacacacacacacacacatatatgtgtgggcatataactatttgcatctagtttatttcttttgtccaatattatatacacacacacacacatatatatgagattaattgaaatgtctgtgtggaacattgggtctttcatcattatttctgtataatattcctttctgttaacatactataaccgtttattctgatgggtgctgtcaggggtgaacgaattttcttctacccttctaggtactaagatctagactgctctaggaattaaattgacatgagacagattaacaggataaaatcaagcaaaagcttaatagcatgcacacttgagagaggcccagaaaaactgagccagtcaccaaaatggaaaattattcttaattcttaggtttaaaaaaatactctcctgtaaattcctcaaaaattgccattgattccttttcacttttagatcagctgtctctgtggactttaattttgtgtaacatatgaggtaggagctcaagaattattttttctatgatgatatccaactggccctctatcctttattggcaagatcatatttcatccccaacactgtgataccaccaatacagtgaattagataaccatattcttgagtacatattatgttctgttgatcagcttatcttgaaaacaaaaaaacaccattattttgcatgtttgaagaaactgagtgggaaggggcgctggtagtgtttgatgatttctacaggaagccaagttgcaccatgccctaaagactggctttgaacactcctacagacagttgcagcttctgttattttaacattcttggaatgagatctgtttgaaagctccatgcaaatagctgcaatttcatttgccaaatgtgttaaaaatatgtattttcacatttttctgagaacacataggttaggttcatttttttcccgggcattattaggcataatcattttgttcagctatttcttggaaaccaaagctcaacttagtcacagagagtaacggtcagggctgtggcccttccagagagccgggttctaatctcagagctcctctggttcagtgggagataagtggtaaagtcctctaagagcttagtgccttatttccctcagagtaaaatgaaactaataaaaatttaattatatgtatatccccaagctaattaaagaaccaatcaataataccctcaaataattattgtaattgtaaaactgaaaaaatatgtgtgacagcgtattagaatgttagaaactcctttgcataaagatattattctggtgtgctgcttctctcctgggttatattttgttacgggtccataaagtctttaactaaaggtgatgtgctattaaagagtaataaagattgtgatgcagtgaaactgacaattgtcttcacttcatccataagtttcaaatgaattcattttagattttccaaacacagcctccttggcatctacagattccttctggcttcaggctgctcccctgtggggtgtaccaaacctgaagacatgattaaaatgattgttttcacatttgaatcttctttcctacctgtgattcgcttgtctctggccagagtcaaatttttgaattaggaaaatggaatttttctaatctatggatagaaggggaaaatggcatgagatttcatgtggacatttagcctccactctttccccatcacacatgcttttgcaggatgtctcaacttcttgaagcatttgcatttaactaaggagggggcttccctggtggttcacatggtaaagaatctgcctgcaatgcaggacgcctgggttcgatccctgcgttggaagatctcggagaaaggaatagcaactcactccagtattcggccggagaattccaggactagagga

SEQ ID NO: 38456 - DNA, 1199 bp, Bovine  19866880608558
  misc_feature (1)..(1): n is a, c, g, or t
natctctgactagtgatctcgcctgtcagagcctcagtatctcccccttaaagaggaacttagaatccttacctccctgacagatggcaagtatgatgctcacaagaggaagagggagtagatgtgcttggtaaaccctgcgtgcatgctgcatgcgtgccaagtcactttactcatgtctgactttgtgaccctgtggacggtcctctgtcaataggattctccaggcagaaatactggagtgggttaccatgccctcctccaagggatcttcctgacccagggattgaacccttgtctcttgtagctccttcaccgcaggcagattcttttactgctgagccgccggggaagcccaaagcctgcacctttgtgtaaatatgggccctattgttcctgttactggcacccaggaactggcttggattccttccactgctctgatggaagataagtgctttggtacctaatcactgcatatgaatagcctgatttcaaaatatcattttaggataacaaagtgaacggactgttagatgtcctatcttttagatgtccagaataaatgcacgagaacagttgacccagacaaattgaccgatgaaaggataacttgcgcttcaatataatgagttcaatattcttttgatttacaaaaaaaagcactggggcattcaggcctgggatgcttgtcagcaaaagggaaatgtaaactgtattgcatttcccttttgctgttccctgttctaacagcttcagctcaacctgcttctatttgtttttattttttttaattttgaccacactgcatggctcgcaggatcttagttccccaaccagggatcagacctgtaccccctgcagtggaagtgaggaatcttaaccactgggctgccagggaagtcctccaacctgcttttaaatgtagtggttgcagcagcagcagtagtaggtagcagtagcaggaggagtaagggcaagggaaagaggctcctagggagcaggggcttccaaagacagagtgttttaagggggagcctccttgccacgcaactctcccacccttgatgcttcaagctgaggcaaaatgaataagatgataggaattccaaaacagaactctccggctggagttcattccagaaaatagaataacgttgaacagcagcaaagcacacacagaaggaactaataaacta

SEQ ID NO: 38457 - DNA, 4001 bp, Bovine  19866880617820
  misc_feature (1)..(1): n is a, c, g, or t
ntgtgttgaatgaaaattaaaatttgggtagaggagcgacagcagatgagattgctggatggcatcaccaactcaatggacatgagtttgggcaagctctgggaggtagtgaagcacagggaagcctggtgtgctgcaatccacggggtcgcaaagagtcagatatgactcagcaactgagcaacaacgaaagggtaactgaggatgaggaaagcgaggcagggcagggagaaaaggaggggggagtaagggatttagaaagcatattatttatctaatcctatataacaaatcacccctaaacttagtatcaatagcttacaatgacaaacatttattatctctggagggtcgctgatgtgacagatgactttcaataaatatttatctttgaactagttacagatattatgccaatacttggagaagtggttgtctttattcattataataatgacatgcctgacagtttaggaatatttatgtatgttatctaaatttgtcatcgtgacaatcttatgacataactgtcactctgtcgtgttaattaactcattaattatttatttaagcaaactatttattacccctgtacaacataccagaccctgtgcattcagaagcaaacaaatagataaaaatccctgccttcatggagcttatgtcaaatagggaaaagacagataataaatatagacacatatacggtaagattcacagtatgtcagagggtgatatgtgctgtcaggacaataggccaggaaggataaaggaggcacccaaacacagagtaattaactaacttcccagcactgtacagccagcaagagggtggaaatattccattctgaatctgaacttagagggtgtgttagtgaccacggcctgtatgtaatgagaacttcagagattctttagggcattttttcatggtagagtccaagcagtagttaggaaaaatcccaactcaaatgggaaattgctttacctaccaggaagcctggagttttcagtcctcaaaggctaaatactgtcttccctctaggaacaagatagctaccattttagcttcccatccagatgctccagcactcaacagaataaagagaacaacttggccaacaacctttcccagaaagcttgagaagacctccccttatcatccaaagcaggatcacatgatccccactgagcaccttcctagcaaggcaaggagtaccctctgtattctggatttactcctggagtgtaatagagttatcctctcctgtattatacaagggagcaagggtgatttggagaaaattcatcaataggaaaaacagagagtagggaatcgcaagcatttgctattgatatggaccaagcctccttcatggtccagagatcatagtgaacacacaaaagaaactttagaaatagctgttgattttaattacagtaagaaatagaaagggtttccctggtggctcaactggtaaagaatccgactgaaatacaggaaactgccagcaatgcaagagacctgagttcaatccccgggtcaggaagatctcctagagaaggaaacggcaagccattccaatattcttgtctgggaaaccccatggacagaggagcctggtggactgtagtccatgtggttgcaaagagtcagacacaactgagcacgaatgtacacacacaagaaatgtaaaacagacacaaagaaaagagaagagggaggaaaaagggtgggagaagcagaataatcctgatcctaatataaaggagagaagacgcccagcactctgagttgagagtgaaaagactctgttccccatcattgcccagccattcaacagctgtgtgacttgagctaatcacatagcttctctgtgacttagtttcaggaacagtgactctagtctaataatgctcattagtcacgtttcatgaacagcagaagatttagtaaaatgtctgtgttcagtgagaagaaagtgatatgtggcattccagttcaaagtgggtttggtctccatttacagatatagagtgggttgataatataatagagttagtcaagcagatgattcaaagaggacaacacacacacacagacacttgtattcatgtgtgcacacacacagtcacacgcacacacacctacaatcctttctcattaaggaaatactgttgtctattgttctttgagcaattattgtttgctaggctctagccaaattatatatgaccattttctcacttaatttcccaacaacccatgagttagttttctgtttgaattatctggaatagatttttcaaatttccacttcattttgcatatatgcactttctcttccccatgaaatggatgccatttcaatatatgactgtggtcttcgggttgtttctactaaatttaaacacaatcctgcaatcattttccttgcaccagtgagccatttcatcgtgctttgagctgatcagatcaaaactgttcaggaaaatttagtgccagcctattcctaaatgctgagctggctctggttctctcttgaccattctcctttttgctcatccagtcccaagaccgaactccgtgctcatccatcacttgtaacatgtccctctcagcaattgctcaacaaaaaccttgactgagaaatctcattgatgatcacaagctagcatttcacatcgcattcctcttcaaagcagtttgctcagatgatgtgaatatttgatatgagacagagaaacaaggtcagaaagagattctgagagaaggagtgatttggcaggcttcccatgaggactccaggagaaggaccaaggcaaggctgagagcatcaggcacagagtcaggagaggtgagaacttaccatggctctgccaatatcatgctgtgtgcctgtgggcaactcttaaatcttgcagcatcaattttccaatctgtacaaattggggaagagaactaagctgcgatgggaaagcaccagacctggcggccttcaggaggcacggggaatcaatcatggtactttccccactgagcctgtgatgcttcctctgttctcagcacacactccgggtaggctaaaacaactagagttggcatatcatttagaatatatctgtcacttttggttgaaataatctctaacatccattttggatctcatatttcaggaatatattgctgctgtggaaagaatcatgaactcaggatcagaagaccaggtttaaatcctggttctgacatttattacttctgtgaccttaagcaaatcaattcatatctttgatctgtgtgtgttttttttttttaatctgcaaaatgggaagaaaatatcaatgtcctatggtcgaagtgaagatcaaacaagatatatgagaaggcacccaaagcacacagcatatcctgggatattgtagacattcaatcagccattaaaattaatattttaaaggtggcatctggtgagacaaatgcatatgtgataaaattgctaagcatgctggaagccaagaggaaagtgaaggaggaagggagggtcgttcctatttggttatctcagcttttccctttttccatcactgctggtgatggatcctatagtcgtagccaaaatgctggcagcccacccaaatgtcatgtcctcgatcctgtctacaggctacttcttccccttcagctctagatagctggctcacaaatttaatttctcagtgacacatctaggaaccaccagtatctatctgatccctctctactttgtcccccaccccacaagcacccctccccacactcaaaggggtgatatctcattagtatcttaactcagtggggtacttggctttggcttatctatgttcagtcttaattgtgtgtgttggagggaacagtggcttgaggtcagggggatggtgctaggagcttcttgcttctgcatcaccagtacaaccctaggtgttcaggggcctcagtctccatttctaaagtttgtaattat

SEQ ID NO: 38458 - DNA, 2649 bp, Bovine  19866880728419
  misc_feature (1)..(1): n is a, c, g, or t
ntttaaatccctggctccatctgggtgccagctacctgttacaggctgaattgtgttcacaattcagatcccagatcacagagctggaccttaatccaatatgactagtgtccttataggaagaggcgattaggacacagacagaaggaagatgttgtgaaggcccaggggaagacggacatctgcaagaccaggagagagggcccagaagaagccagccttggtcttgtggcctccagaattgtgggaaaataccttcatgtggtttaaaccacgcagcctgtgttactttgttgttgcagcccttgcagacttaacacactatttaacttctttgagggaattatacttaatatcttgtaatgacctgcagcagactgcaatctgaaaatatatacataactgaattactttattgtacagctgaaactaacacatgttgtaaatcaactatccttcaattttacaaaagggaggcaatggtacttaacctcagggtactgttattaagtttagatataatttatgtaaagcagatacaggtattttatgaatgatatctggaaggtgcagtgatggcagtaatagtaagcccacaggcctactgaagaggtaaactggaatgatgattttgatgtgaaatgtaaacttcaacctctggaatcaaactgcgtaactgtgaactcggctccaccactgactgtgtacacagtattgattattctcatcctaccaggtctcactttccagccctttcaatgtgactacctgaccaacttgtcaagaagaaggatgcttaatatcatggaacacttcttagtgtgtgttaggaagtgtcctaagcctattcgaatttgaatatccacacaaatctaatatttttctccccatttttataaagtaaggattctgcagcagagtgggaacttcctccaagtcacagagttcacaaaaggtggagtcaggaatcaaacttgcacagaaaagcagaaatgaaaaaaaaagtagaatattagctcattaaacatgatcttgtctgactttattgttcctttgcatgctttgttatcagtttcttattctaccctccagaagaatggtcactttcgtttcaggagtaggatcttaatcggcaagagttcggagacctgtccagttctgaacaccacacactggcagaagcacctcttaggaaccgccttctagacccaggccccttggggtagacgtcagcactgaaccctgagaccagagttctggctcctcccacaggcgtggggccatgtgactcggttatccagtacagtgcaggctacaattgcgtgtgttactattgggtccagagcatttaattgctagtgtgagatccttctgaactcaatttccctttgacatggtgaccagcaacagttatgaggctgcctgctccagtacctgaattccggagtgactgcaatgatcacaacaatctttcttactcaaaacagacatgcaggttaatgagatactcttgctgatggatgtcactgaagtttcagagttatgtgttactacagcataacttagcccaccctgactgatgcatccattaatcagttttaatcttctgctttttccctctggaaattttatcagtttgatcataccctcagtcccctttgcctcctttctactcttacactcactctcttcttacctttgactctctccatcccatacaattgctttctgcagtgctccttggggtggggtatatggccggggtgtctccctggggaagcctaaatataatctaagttaggtacaaactcacttggtctgcctccttccatttcaaattaggatgagagtgtggaaccagtcctaaatcctgctcatgaaaggcagacacttgagcctgatttttgaagacttaggtgcagtctgggtcactgcagctgaatcctgcacttcagacctcatcttcccagtgataaggttgtgtccatccatgactatatggagtatgtccatttaaaaaggacaagaggagctgatttgtccctaaagggccttgaaaatccattgcgctagcatgaaatgggtcaataaatgaaattaaggtcagagactttctctagagagacagtaaatggcatctgaagcatcctttatcctccgtccccacgatgctgctgcagatccaccagtaaagtactgatcagtagccagaggaaatgtcactgctgtctgggccccaggaaccatggccccttttcccaggaggaaatgggaggccacgaagaaatcttgcaagccagtctgtgtccagaacaggcaaggctatctgcttcagttcctaattctaaatttgaggtccaaatcctggggctatgatgatgatcataatgatcataactggggatttcgctagggtggaagtattttaagggcagggattagatcttgttcaggttatgtttcagtacccaaggcagtccatggcatataatatatgcttgcgatttttgatgatcggtggatatacaaatgtataacccagttgattctcaaggaaatcaaccctgaatattcactggaaggactgatgctgaggctgaagctcccatacttgggtcacctgatgcaaagagatgactcattagaaaa

SEQ ID NO: 38459 - DNA, 1834 bp, Bovine  19866880774774
  misc_feature (1)..(1): n is a, c, g, or t
ncttttcttaatttgtaatgcgcccccctccacctttctcttctcgacacccattctgactagcacatggattccaagctcacagttacattctcaagtcccctttctgcctctcaagtgtgaagttcatcaactgaaagaataaatcaagtgtgactttccacccttttagtttcctaatcattttaaagcactgatttattttccaaaataatgaggacagtgcaatgttctaaaaggggaacaaaaagaaaaaaaatgacttacctggctttgagcactgaattcactttcacctaaaaaaaaattatatatatataatatatatatatatacacacatacatgtatcttacataaagaataatgtttgtaatagaaaaaatagttactagagataaaacaaggaaaataaaatatataagggtatatctggatacagatgcaattttatttcacagtctactggcagaaatagcctcctgaggtcagctgctctgaagcattctgttcccattctaataaagatccagtggcatttatgcagcaatgtgctgccaggtaattctgcggctgttgcttcatttctatagttccctgaagctggaataatgtcagcttctctacaaaccagaatctgggaaaggcagggcagccatgcatcgctcctctccaaatcatggcagagatcgccactgagaccccagggcagagcaggtcctgtgaaatgcacgggtttcccttcctccatccatctccaggagtcactctgtccagcttggagggtggcatatgttctgatccatgatttacttccctcacccaataaaggtctttgccaaatcacgggattaaatgtctgcatctatgttgaattatatcgtcattcattctttacctgtaaatttctctgttgaaatatgcaaatgttaaataacagtgagatggattataatagtgtttatcttccaagacccccggtgtgtctcacagcagaatatatttaaaagttgtctaaaaggccacccccttggctaaggcactgtccactctgtggacagtgttttactttttagactttttttttaaatgtagaccatgcttaaagtctttattcaacttgttacactactgcttctctttcgtgttttggttgttcgggccatgaagcacatagaatcttagctcattgactagggatccaagccacacgtcctccacaggaaggcgacgtcttaacactggaccacctgggaagtccctcactctgatagcattttaatgaacaaatatttgggacttttccatatatcttagaagttattgatttctaatgcaattccatttgatgagaggttgtattctgtaaggtatctatttttaagtattactgagatatacttaatagtctcaaatgctgtctatcttagaaaagttcgtatgctctagaatttctgggtgtcatgtggtataactgtcacttatgttagtgcagttgatagtgttggtcataaatatatccttacagattttcttttaattcatcaactattgaagaagagtgtttaaactttcattatgattatggatacatctatttttatttaattatgtgcttaatgtattttaaaatcttcaatgatgactctggatttatatcttttcccctttaaattctagaagttttgtttaatgtatttttaagctctgtttttagacatatatacacttaatgattcctttctcttcccaacaaattcaccccctttttttttttttttttttacagtttccagtgttattctttatactcctggccatcaattagaaacccc

SEQ ID NO: 38460 - DNA, 1582 bp, Bovine  19866880801283
  misc_feature (1)..(1): n is a, c, g, or t
naattagactttcaatcatcgggcagataattaaacattagaatccttggcctttctcctcgtgtttattagatgttcttcattaatcagacagggcactgatgggctctatcactgtcagctggtgcgaccccctggccagttttggaagcccttgttcctagtgtgaacaatttcactggggaggtatatcaacaccttcaaagttccttgtataggtctccctgacttagaaaccagtatctattctccaaataatcactgcagttcagttcagttcagtcgctcagtcatgtctgactctttgcagtagcctaagataaaaacatatgatttcgttcagagttgagttttagtcccagttttgccatttcaaacaatgtgaacatgagtgattcttctcccttgcatgcatctgttttcccttctctttaagacaaggggtttaaatcttagctcttcccaactttgagcttctaaggggtctgaatgattggggtcactgtctcgataggtgccacagtttggcttttatctaggagtaagagaggcaggacagccatgtgtcagcatagagaagtcagttcatgcatgatggcttttctcatctctctccttggtggatgagcaacatgaaacagtaagataagaagggccagtctcaggtatatgagctggggacctccatgcccaggttgttggaggggctcgccttgacacaaaatatctatgatgagcctgggaaggaaagccaactgcataatatgtctgccatattttagcaacaaaatatctaataatattcagacgcaaatcctgtggcacaggcattctcatctttgttttacagaaaataaataccagggctcagagatactaaacagcctaaaccttgtaaaatcactagcacgtggcactgccaagggtagaaggatgtaagtaaactctgcagtcacttggtccatcacctttcgccataatgggcttgagttttgaccctgcatctatccttggagggatttagaaggaagggctataattccctcttgtcctcaattcttccccaaatccaagatgaataagagtattattttctcccatatcatcaattgtttttataaagattaaattagatacaaggttgacaaaacctttgagggtttaaatgcttaacaatcaagcttagctcttgggagatatatcctaatatcacagtactatgatgtgaagatcaaggacccaccctctggagctggagcacctaggttagaaccctggcttgcccacttatgttcccatctgaaaaatgaggataataagagcaagtgcatgacagggttgcattgatatttataggaatatttatatttatatgcttggtataagaagagttgactcgttggggaagaccctgatgctgggagggattggggacaggaggagaagtggacaacagaggatgagatggctggatggcatcactgacttgatggacatgagtttgagtaaactccagcagttggtgatggacagggaggcctggcgtgctgcgattcatggggttgcaaaaagtcggacacga

SEQ ID NO: 38461 - DNA, 1820 bp, Bovine  19866880817438
  misc_feature (1)..(1): n is a, c, g, or t
nttggctaatttttatattaatactggaaagttgactatagtattaaatctttcctccatccaagccatgctattctcttcaggaatttttattttgtgttttccaataatactgtttaggattatatatatcttatttctttaatgttgaatttatttctaaaatttaaagttttgggctatttagattatttctcaatttcttttttcaactgaattttgctagaatagagataatatatttattttgtacatttattttatattcagtcaccaagcaaattctcttattattttcatgtgtcttctaccagaatgatggattatctctgtatataacattcaagaggagatggttaagtatcttcttttcaaattctttacaaaagtaatttaattctcctgtttttgaatatttgctagaacatctaaggcatttggaatattaatgtagatagcagttatttcttccagtgtcctgatattttttgtattaaatagtttttattcaatttgtacttaactatagtttttaagaatgggttttaaatttattaaatgcattttcacaatcttttgatggagtcagctaatttcccctttaatatggtgatgtagaaaattaggtatattttcaaatgaacctcatagtcaaagaataaaccctacgtggtaatgctttttgaaattttaaaaattattttctaattaatttcttctctatgcatttatttttctccttttgaaatttctatcctccgtgtactagatctcctatatgtcttacctgttacttataactgcattcttgatgttcattacttcatatattatcttcgtgctttgaaatacttgttttctatttgatctctgtccctgtcttcttccctccctcccttccactctctcttatctccttctctccttcttttttttttttattaattactagaaatatgaccctttgtagtattaaatcttcccatccactaaaaaccaacaggttttattttatatatttcaataggcttgtaaatggtttacaatcttaaaagactattgattacaatcttaaaagaatgcatatactctttaatgatgttttagttgtttagcgtgacctctttctcctttaactctgtattttgttcctgatcttcctctctatctagctgcaagccctgctgggtgtcttgttatggtcctttgactgctcccctggagcagtgccaaaacttttctgtcgagcttccaaaaaataacaccttgactgtagaagtctcatgagagattgaaggttcaggaggtagtccatgaaggccctgatgaagtagtagggtgtagtccctctattccctggtctcctgtctttgcacttcaaggtcctcctgcccatgaatcaggaggtggagcctgcctactgcaagccatgtgaacttccttctctgaagggtcacggttctttgttctgtttttttaaaatatttatttattcatttgactgtttcacatcttagctgcagcctgcaggatcttcaatcttggttgcagcatgtgggatctttagttgtggtatgtgaacacttagttggagcatgtaggatctagttccttgaccagggtttgaacccagaccacctgcatcgggattgtgggatctcagccactgggccactaaggaagttccaggtcatgaattttgataggtcaaccatttaccaggattctccactaatcactaggctttcttttgattgaaagggaaagctgttcttcatattcaatttcattaggatttcagcagaagctaagattttcaa

SEQ ID NO: 38462 - DNA, 1579 bp, Bovine  19866880829705
  misc_feature (1)..(1): n is a, c, g, or t
ntttgggaagtgtttgcagagaattctgcatgatatctctggccaagttagcttgtttagtaacttaaaaaaaaaaaaaaaaaaaactgctgtccaagctgttagctagaattgaaagatacagtgatggttagagggcctatttagtaagagcagaaaaatgtactggaagtgaatcatttgtctggacacagaaggctgagtcagggagatggactgtcacgtaggcaggttgggctaaagccaagaacacggggcagtgattgctctgagggacaaattcaatccaggcagtaagactctctccatgcccccaacccactccctggttcagggtctttcaatgggtctctcagttaaaatccagggaggagagcactgactggcaagaatgaaaaaaggggaaatgccatcttgtcctccactgaattactaacagcattcttagtttcctatccagcaagcctcatatgacaggaagaaaaaaatattgattcaacatgagaaacaatacgttaaaactcatgactctcaaatgacagaatctttccctaggaagtaatgagttctccaaagctataagggttcaagaatgcaaaagataaaccatagtgagaagtttttcattaaacagacccctacagggataacttcaacccaacctcactccataattttatattttggattgaattgggagctattaatcaaacattgggttttccaggtggctcaatggtaaagaatgcccctgccaatgcaggagacatgggtttggtccttggatcgggaagatccctggaggaggaaatgacaacctactccagtattcttgcttggagaatcctatggacagaggagtctggcgggctacagtttgtggggtcacagagtcacacacccgaggaactgagtacatgtgcacgacacaatcaaacatgagctttcctagttgaaaaatgtgaagattgcagccaaaggcaaggtaaaaataacagtaaaaattaataaatagtttggaagaatctactatgtagtggacatgtcctaggtatgatgaaggatagagagttgcagtggttataggcgctgtcctccgagctcacagtgaaggtagggagagagactgtttttacatcattggattattcattatttttttccccacctgaaggcaaacacatttactggcaactcgatcccaagttctcttctagtctgtggtggtaaaacagtgaataaacttagccactggtctcaaagtggaggaaggttttggaggtcaagaactatttactggaggatatatactcaattaaggagaataggagtagaaaagaaccttctcacattcaacccacattatggcccagaagggagggacaggtaccctggtgcctttaagaatctgaaggacctccaatatctggggaagtgagggaagataagggataaagatagagaggtactcagggggtgaaccggagtgcttttataaacccatattaaagggtctgagattaatggagagttactgatagttttcaacagaggagtgacatcaccagagtaaagatca

SEQ ID NO: 38463 - DNA, 1369 bp, Bovine  19866880858668
  misc_feature (1)..(1): n is a, c, g, or t
ngtggtacgtcctcagtgtttgtttagtcttcatattatgattcctgtccaagagctatttggataaaaatgaaaaggtcccaaacaaggtccttgaactcagatcactcccagggagcatatgatgcattgaaggtatgattatatcagtacttaaaggcatatgccaaaggaatggcctgacaagaacccaaaacatggcaattcagccacatctgttcttgaaagcgcctgcagaatgaactttttaagaggtatcatctgtcaagattcctcgactgtccctctggaagctgtctctctggaaacttattccaaaggcaagcccaaggacctcagcattccagtctttgataaataagcccctctctctgatagcctcagcaacagataaatctgtccacccaaggacattttccaagcgggacgggctgtttaaactccttaccagattgcagctggcacccgccacgttgatttttccctctccttataatcataatgggatctcagcaataaagatggatttgttaatttccatccccttctcactttctcttttaatcactgtcgagcataaattaatttcagcttaaagagctttcaacaagattccatcattgtctagggcagtaaaggtcaaaaaacaggagcctctgaaaatactcatcagctgtttgccaggaataaactttagttattgacacttaattatttctattttgtccaaggcaagctgaagtcagcaagagagacagaaagggaaggagagagggaggtgggaaggagagaaagagagagaagcacgctacccaatttgatcacccacctgctcaaatgttgagtgttatattttctcctgaatctttgatgaagcagactaaacttccaatatcaggcttgatattgtcagtctcctcagagtgaaatatagagtcaagtgttaggtcactagatttgtttaaatcccaattccgctacatatcagctgggctgggatgtctgggaaaaaaacatttaagttctggaattttaccagttaaaatgcactaattgtacccatcttgcagaatcatcctgtggaacatatgagagaaaggatgtaaaatactaactgcagagcctggaatggcataaatatccctcaaagtacagctacaattagaggtatttcctttgtaggtctggcacttgagagtctgctatgagtcacagactgtgatacagacagaaacatatgcaaacgcataggatcatgaagtaatgcttcttttattccccagcaaaactgaaggagggttaggaatgtagtatagaaaccttctcatgtgacctgcaaatgtacacaatattctatgctctttcgtgg

SEQ ID NO: 38464 - DNA, 1262 bp, Bovine  19866880885258
  misc_feature (1)..(1): n is a, c, g, or t
natgttaggggatgtcaggaagggagccagatctaaaagggacaaggggtgaagcggtggctgtgagatcacagaggccagagtgttggaaagatacagagaaagatgactcagattatttcatcaaataaaaaggagtaacagcatcccctctgtgaaccatcacagctggcttccacttaaaagtgatatgaatttaacaaacaattttgaggccgcactgagattgttaaatagagtattgtctatatgggcatgtattttccctgtgcatgtacacatttcaatcaagagataaatattagggagaaaaaagcttcaattaaaatattacaatgcatattgggtgatttcattaacatagtcgttgttctaaagtcttggaatacacctctctctcttctctttctctctcctccttctttcaagctttcacagctgtggttgtctctgactaaaactctatttcctgtcttctccaccagatgaattcctattcatgaccaaattcttctttgaacacgcttcactggggaagtattcctgactcctaaactaagaactggtttctttgtatgcactcccatctaaccagcacaggactgcttaatatccaggttgcaaactctaaagccagagtttacaattgattttacaaaagttcacatagtttacatttcactccactactttctggtattgggactttgtccacattaattcagttgtcccatctataaaacagaaatagtactaatacccacccttgcaaatgaggtattatttatttgagaattgaatgaggcaatttatttaacaagctgaaactaggcttcagcttttcattctcttcaaccagctttgttctcaaactgaaatagaatgaaaagaaactatgaacatctaagacaccaaactaagagactggactttagctagtaagttggagaactactgaaactttcaggaaggagagacagggtcagatacaagttttagaaaatagaaggaaaaaaaaaaaaaaaaagaatccaggatgagaggcaagtgttaaaacatgttcaatatagtcaaatgattcaattttaagcaatcacatttaatcaccattccccaaaactaagagctcatttaattttacaaatatttagggaatgttcactaatggtggggtgctgaactgtgggctgcaaattcaaagaggcagtttgctactacaaaataatctagtggttaagagctttggatttacaaccacgtag

SEQ ID NO: 38465 - DNA, 1094 bp, Bovine  19866880924136
  misc_feature (1)..(1): n is a, c, g, or t
nttatttctgttagaagcagcatccccataaaaactgaaatgtgccactgactctttgctgagatgggaatcactgtctctgagtctggaacaaactctaattgtgcaatggaagggtttgtctgctgtgacgagagatgtaagactctgcaagttccaaacgtgaggggaagacctcggctggctgctggtgggggtcattacagactgcactgaagcataaaagcagacccctattgcagcatcaccaggcagatcaaggacagagcagctcattaagcagtagctgaggcagctaaggcccacagtgacatgggctcatctgacctgatacttctcaggggggagcagagaaaggggagatctatcttgaccctaatgaagagatgctgaatagaaggggacaggcagcctccccaaacctccagctcccagcatctttaaggagtcagacttctacatactggcagatagctgcattccgatgactcaacagtgacacccagtgactctctctgtcaatcccagctgcctgttcccggaggatcttgaagagaatgcatttcagccttccttacctaacagggaagcagcaacagcaatcacatcagattcactcccgagtaagacaaacataataataaatcccagtctgcattaacataatcatctaactgttgaagcatatttctctcccctgctgggccatgtctgatgtcaaacataatagcagtgtgcagcacggtatcagcttgactttggagtcacatggaagagagtctttcatttacatctttgtccaaattcaaagggcccttgttttctgtcattttgaagcacacgcacctacatacacacactcatgcacaaacacacacacacacttgtctgggttcatggaaactttaataatggaaggaagaacccagagacaagaggtaacatatccatatcattctatactgagccacatgaatctggagatgagagagagagatgaacaatttggggtgtaaccggtaggaggtgaccagaatagccctggaattccaaactgtggcatatgaatactaaatgcaactggggacatttag

SEQ ID NO: 38466 - DNA, 3690 bp, Bovine  19866880929536
  misc_feature (1)..(1): n is a, c, g, or t
naaacctgacatggtcaatgtggaattggtcaaatgtggtcaaattaggaattgctagtttaaacaaagttgaagagatttatttaaggtagacctttataagatctttctatgtcaataagcattatattaataaaccttcagaaaagttgtgtaaggtttgatgtctctaaaagtatcaggcatagaatctgtgatagccagagctcttgacatcttgacaagtgatggagaccaactcaaaatgaagagagaaagagagaaagatgttcttttaactaaaaagtctctaggaaagcctatattaagaggatcaaaattagtcatcaaaagagggtccatgtttattcttgggttctgatgatagtttcatgtttttgttctttgagtagagaactgggtctttacccatctctgaattaaacagtgatggcagtaagatgggtacgatgctctgattagatgtgctccatccctgaagcttcagatgaaagcatttccacatcactcacgtggacttaagagtattaaaggagtgacttagggcgccattatcagaatggatacaagtaagttaaatgacatgatacatgccacagaatcatgccctctttggggcattgtggaaaatcaagtgggacaaagacacagcgttcttcgggaaatatgaatgagatggttatgaaaggggcctggccgtggtaggccctcatgaaatgtcagtcttctttccttttttgctctccttatgctcttttcatgtctgatgacactcaaggagcctctcaaatgagccagtcaaaccatgaggaagaatctgtgaatccctaaacatcgatccaagtatcgagtctgagaacctagctcaaatttccaagcacttgagaaattctttaacctcagtcatgagaccactcctatagaatgcctgactatattctactgggcattctttaattgaaggaaccaaaaatagctgtgtttccatataccacataccatacagcccatgagtcatacatatttattagtttaaatgccacaggaaagactttcacaactttttgctcaggccattattaagatgattttctccccattctctctgaagacattaatacttcaaggtggccttggcctgcttcctcttcctctcctccctccctgcgtgctttgggctccccctgtacctgcctcacttcctcggatgcctcttgtttcggtccctgcactccccttggccagtctctctctctggcttcagggaagcctctatttcctgacttcgtgatctttatttttgccactatgtgcctgcccttggacctttcggatgcctcacccttgaacctctttcctcactttaggccctgccatggtgttgcattcttaaatattgtcttctccaattgggaaccgtatgaccttttgtttgcagaaatcatatccatattcataagttgctaagcgtattttgtaagtcagaacacattgtgaaatacactaacccctcctgctgtttcagcttgcctaacagaggaagctacagtctcttgcaattttgttccaaggaataaaggcaatgtttggcaaatggaatgtactccagcccctgctggagggaaaatactgagaaatcacaccctggttaacctgctggggcttttgtctccccagcaatacctctgagtgtaggtaaatagtaataatgaaattgtacatacaagtacatttttcatctgtaggtttccctctctgtcccaaagcaccttagcttccggaatgaccatcaagcatccaaatctgttttttaagaaccaggcatgtcattcagccaacaaagaactgaaactaaattactgacttgtaataaaacaaaagaggagaggaagacaagtttttattgaacttctccttcaggtcagcacaggattaggtttgtagtcctactggagctttgaaatgatattattgaatatctaaatgtagatatagagacatgtaaatatagatatcttcttagctcagactgcgttaacaaaaataccatgtgctagctggcttaaacaacagaaattaattttgcacagttttggaggctggaaatccaagatacggtgccaggacagtcaggttgtggtgagagcccgcctcctggtgtacagatggctgttttctcgatgtgtcctccgtggggctcagtagtctctttcttcttatgaggagactaattccatcatgaaggtcccacccaaagatccccccaaagacactgcttcctaaggacatcacattgagagctagggctacaacatgtgaatttgggtgtacgtaaatatgcgtttagtctataagaatatgtttcagttctcatagaggtggaaaccaaggttccaacatagtccaggatcacacagtaggtgagtaaggtaaattttggagtccagtctgtctatctggttccaaatcctggtacatttaaatccatgggtcttttaaaaataaaagagagaggagaaagtaattcagactcttatgaagtcttacagtgatgaggagtttactttctctcaaggcaccctgctgttttcataatgtaggtagtaaagcagattgaggggcttccctggtggtccagtggttaagactccatgcttccactacacggggcacaggtttgatccctggttggggatataagaacccaaatgctgtgtggtgcagccaaaaaagaaaaaaaagcacagattgagaattatgcttgtctcatttttagactcgtctctggtcgcaaagagttgaacataactaagcgactaagcatgctgcactactgcgctactcccattaaacaagtttcccctctggagctcctcatccctaaataatggcatacggaggtgtggtctgttctgaacgatcaaagctctcacttgtgaagtggccccaatgtgccatgtgccagatacccagtaagctctcatctaaatcttccattggcatcaaaccattttttaaatgagggctcaaaaggtaaaatgaacccacctagcaattggaacccagaactggcctcaagcttgtagactcaacaaaaattccaagtaacagtttaaatatcctttccaggggagtgtagattcctcttacaatacggaaaagaactccagggatggtcttacacatgaaggtgaacagggaactctcagcccattgattttttgctataaacacagtccctcaaagtgaaagacacatgcaatctgcctccaaggtcaaatcctagttgcccctaaggtcgatcatggttgtggtccatttatctgattacgactcaaggctaaagagactgaggtttatgtgctgcgatttaaacctgcggttcccagggatctcaggtgtgttgcaggtgctgcactaattaagccctcccaccaactctctctgccttgctggctgtatgtcatttttgctagtgccccgcatgccaggcttatactgccactgagactgtgcactctggtaaaacctttcatcttcgtatctcaggctgcttttcaaacaataattaattaggcctcataaccccctgatgagattattatgtataaacacagtctcgtgcactgcccagggaattttgtcatcaggagttggaagtccaattcacacctccacacagacctcagg

SEQ ID NO: 38467 - DNA, 1812 bp, Bovine  19866881002090
  misc_feature (1)..(1): n is a, c, g, or t
ncacatgccacctgggccaggccctactgatatctctggccagctgccagccctcagcccggtgtctgtagttcaatgcccccaacactacatgagctaatttgttgcaagtatataaaggtctctgagaaatccaagttcttcctggtaaggagggtgcactgaaggcagatgtctgatgagaggagcaggaagtttagagccaggaaatcacctgactaggttcagtcccagatcctgagccttcttccaggatgattttgggcaagctatgtgttcacttctagccattttgtctctttgtattaaaaaagaaaaagaaaaaaaaaaaaaaagagcttcccaatacacccttcagatctcacgaaattttattttttaatgtgaattgaccaagtcaaacttcgcaatcaatgaggtgactgatgtcacatcagatagcccttgtggccattatttgaatcagggcacttgaaaccctctcaacctccctctcctgccagcaaagatgaaagtgtcatttctgacctccgcactggcctttgccttgaactttgccgtgcctttcatattaccatttccagctggttctttgccccctggtgagaccagacttttctgaaagagtgtaaacttctctgaatgatatttgaaaataaaatataattgatttcacagctccttgaacctgtcctatcaagaattgattttttttttttctctcttctgttttacacacttgaaagcgatttgagtgatgacaggtaaaaaatccaatacataaatgttcttcatcctttctccttttctttttaaattcttccttgcaataacagtgcatttgggtatgtgtgcaagtccatgtgtttgtacaagtgtcctttcacatacattcgtatctgtatttgcctgtgtttatgaattcagcctgcatgcactgcacacgtgcatttgtacgtcaatgtctgtgtgcacctacatgtgtagaaaatgcatttatgcatttgtgtttttcatgtgttcatcctaatgcaagtttgcataactgcgtttataagcgtgcatattagcatgaatgttttgaatgcacatatatctgtgtgcttgtggtctgtgcaaagttaacccatatatgaataggcaggtttgtgtctagttgcttgcatgagtgtgcttatccctctgaatgagtgtacatgtgcctatgtagttagattggcatttcaaagcacacctggccttgctgttcatccacctctccctcgaaaagaatacacgaaactcaacttttcttggatgctccagacagcttctgctgatttggatagtcattatgaaccatggaatgctctcctctgccagccccgtatgagttgtcacttcctcaggcaggataaagtcacccaactggactgtgtcctaattatctggcaagagaaggaggtgtggcagatgctgcaatggacctgggaacccctctgcctacagcagcccctggtctccgttggctcccgggaagccacccctggagcctgggctgccctactgtctgagtgccacaagggctggtggaacgtgctgcggattgaaatgttggtgtggcagcagatgtcagtgccagacaggcccagcacacctgttttccacccctagcctgcatagacgggtgtgagcggcagatctgcgcttcctgtcagtcagcctgtatactctgagctggcagcgccgccgggctggtcagtttgtgacagtgatgcttgggagcggagaaactgggctcttgtccaaggaggcctttggcttccttcagca

SEQ ID NO: 38468 - DNA, 719 bp, Bovine  19866881002170
  misc_feature (1)..(1): n is a, c, g, or t
natgactgtggaagaaacacagcaggaaaagatgggaaatggacctgagaatgagcagaacaactgtgagcaaagcctgcaagatgccttttctctttgcaggaggcgcatccattccgtgatcaaacaggaagtacacagtcaggtgcggagaggaaacctggtgtttgtctttgtactggagacaggccccgaggccgctgcctgatcctggggccagggctggcagctgaaggctccggtatcctttctgtgagcacaactgctttgtgcagcgatcaaaggccctcccatcccacatcccacgcttcagtcacatgcccctggagagagagcttccccctcttctttcagtcacttgtgtttcctagcaaaccaggagcagttgagcctggcggttgagatccatcctgccacaatttgttgttgacattgttctcagttttacgttccctgatttaacaactactggctttcatttttttttaaaggagggatgaacaggggctctgtgttgataaggaggaagatttgagcccccgtattttctaactgcactgtcataggccagttacttaacttcttggtgcatcagttcttatagccccagagtttgaattgtaatacccatctcttaagattttcctgatggatatacaagattgtgtatgcttttgcaaacacagtttaaagcccatcctctgctcaacacacgggat

SEQ ID NO: 38469 - DNA, 1869 bp, Bovine  19866881037705
  misc_feature (1)..(1): n is a, c, g, or t
ngtggtcctgatgactaatgacatggagtttttgtgcttattgccttttgaatatcctctttttgacctgcccagtcatatcatcattatcagttgcctacttccccttttggtcattttttgggggtaggggagacatatcacatttattaaacagtttagtgagaactttgtgaagaaaaatgtaaatcgtgataattgcatctcctctggtttaaagagactcagaaaggagtggcagactcaggcagtatgaactgccttctagcccagcatccagccagcgtaggagttatttatggactataaatacagtctgtgattgggtagaggtaatgcaaatatattttctaactcaggcttgtctttccactctttgaatggtatcttttgatggatatgttttaatcttaatatagccctattaatcaggtgtgttttttccccctttatggtgagctgtgttaagaaatctttacctactccaatctcgtaatgatgcccctctctgttttcttctaaaaggtgctttagagatgctaatattgtattacttttcacatttagacctataatccctctgttaatgaaactggggtatagaagagattgtgtcaagaagagattttgaggttgctgttttaatatcaatattcaatggatccagcaacaattcttgaattctttccctggaattttaaagctgtacttatttcaaaaggaccattttctttgtgagctcaagaggaacacaacagtttgttttcgtgagagacagtgtgcgcctactctatgtcaggagctttgcatccattatcttatctgatctttaagacaatcccacaagtaatgtattattcttccattctgtagttgagaaaactgaaacttaggaaggacaagcgattagctgaaggttaagtaacgagcagcagagctgggattccataccccatcttttctgactccagagccacatctagctctttcttcaagcttcatggtgacagcattcattagaaccgtggaaggtgagtgaccagtgagattaggacattaagctataatcaactgggctgttctagtaaccaaaaggagtatttttacctggaacatttatgaaacacagttattctttgccctcagtaataataacggttaatggtcaatcatagcgccctttcactgcaaacctcccaggagttttgtgtgtctgattcttgttctgaagattaaatgtaaggtaggtattacctctcccgtttgacagataaagaaactgaggatcaaagaggtgaagtgagttatccaaggtcaaatgtccacagcaaaatagtggtagagcaggcccagcatttcctcggccgagtccccctccctgcctggatcgctgacctcgagggccacctctgtacttcaggatgcagccccttagccctgaccagctgcttctaccatccctgcctttcggtctgtgtctgcctttctgcctgcccactgcccaggaagagtaagtcgctcttgcagctctccacctgggagcttcctgctactctagcctctctgtcagccctaaggaggcttctggatccttccttcacttgccttcagcacagccatgccccaaagcagaaagccaaatttgaaaatgttacctgtcacctctttccagacacaaaactgtaactgccaaagctgtttcgtaatccttcccagttaaacttctgacaatctgattttaaagactgtcagatttttgcattgctgatcttcctctcctgccttctgccctcagcttctgccctccccccaaaagacctattgccttcacggcacaacaccaaaccagaaaacatctgcatcgtgggg

SEQ ID NO: 38470 - DNA, 1121 bp, Bovine  19866881047297
  misc_feature (1)..(1): n is a, c, g, or t
ntggttctatctgaatgatgagacattgacctagttttcattctcttttattttcttacataggtatgcttttttaaattttctctaataaacatgtattaccgtttcattaaagagaagtaaacaatttttcaaatagaaaatgtagcagaagaatagacaatttcaggacccagctaaggattcatctatcacggggtgccttcccacatctctatgttgtaattattatttctttccctaaattcttctgctacaagtgtttagaccttcttgctatacgtaagactccttccctaggctgaaggctctgtgatggctggatctatgttttatctaactgagaaagcctatagctccacaagcagtggaaggaacatgtatgcacaaagactgctgctggttaacctgaattaaatgacctgtttgaggttaagtttaaatgaagattaccagagtactgatgacataacagtagatataggccttgttaactttggaaattgcccattgatggtgaaacaaacaaacaaaaaaaaaccaaaataaacagaaaccctctacactgacacatttttttagtttctgctgaaagtggctccatttgaatgcatgctcagagggacaggtgagactgtgaaacacatgtgctggaaggcacttgaaaaggctctctctaccttgaacagggacaaagacacggcacagcaaaaatcagatttccgtaaggagtttcactatggagaaaatcctgagtcctccatcattccaagccttggacaagccctgagtttttaataaagagcctagtaatcttgtacctgctcgctttcttgcttttttgagggagtaaaagctgcgaggtgaggcctggcagttttgtgcttctctaggacttgttaaatttctctctccttcttcttctacctcttgaagtcttaagcgctgatgctttatgttccagcttgtaaatgaagcctgttattatcattgagatagtgtttttatggcataaataatgagctcaaacaggggaagcagcgttgggtggaattactgcttgagctgagatgaaaataatcaatatgtcctcacttacaaatctcatctgcatgtcaact

SEQ ID NO: 38471 - DNA, 1191 bp, Bovine  19866881085781
  misc_feature (1)..(1): n is a, c, g, or t
ncgttcggaattgaaactgcttctgcaatattttttagaaaacagattgtgggtggtggtaattctagcaggtttcttggcttagtggcacttttttctctgggagtggagtacattgttataaaagaaatggggaccaatgagcaccccgacctccctaattatactgttgaaagagttaaccttgacagagcacttcccaggaccctccactaggctgtatccttgaccttccagatattgttatattcttacaaaccccctccaggggcatattttccagcctctctttcacagaggaggaaactgagatttgcaggatttaaattaaaaagtagtttaaaatcacaaagctagcaaatggcggagtcaatattcccacccagcccatcagacttaagaatctactgtctcatacagtgtttattggatccaaattttataatttaataactttttaaagaaataaatttgatagtattatgcgttgattttagaaaatcaggaaaaattctgaaaactgtaaatcactcacttgtcctcttaacaagaatttggttcccgctgataaaagtagcacagtatattagcacagaaatttacagctttctccttattatttcaggtgctaaacatttgatccttataaaaagtgtggctttcttgcactaggtcagacgtggctcaggaaatttgctcatgcctcagttttgcgtgcttctcttctgggctgtcacatgacagattcctttacttttttcatttctctgtttcaacatccatcttgtcagaggcctttccaggttgtaacataagctctgtgagaccaggggctttggtttctactatattgctatgatggaacctggtatagtttctggcacatagtaggcactcaataatatttgctgaataggagcaatattgggtaaaaaaaaattatgtttcccattcagaaggaagggactgtaaaatgattcaggtgagaaggcttacttacggctagtaaatagcagaatagggcttggtgccaattctcctaattcttaaccacacgctttctcccacttagctcagctctgactctaacgtaattggctctgagcacagggccagcacggctgtgcataaagccacatcagtgtagcacacccagtaaatggatctgagtccggtacttaagggggaaaa

SEQ ID NO: 38472 - DNA, 1288 bp, Bovine  19866881204088
  misc_feature (1)..(1): n is a, c, g, or t
ngatgtaagagcctttcatcacttcgttgtcattgcctagcactatctgggcatatattatgtgcttaacaaacggtcagcattttatgtgcggatgaagggataaatacgaaagtggtccggctctacagtgtttgttgaatgacacatctgccttaactactagactgaaatcttcctgtgagaagattcaggatcattaaaattaatctctgggttccacatgcctagatttaagctgagttcaggataagaaactcatatctgctccttcccatgaagcctttgccagttatacaggagagcatgaccgtccatcctttggatctgcagcaacctgaacagacttggcttaaagatgactttatactcaacaattggagaaggaaatggcaacccactccagtattcttgcctagagaatcccagggacaggggagcctggtgggctgccgtctatggggtcgcacagagtcggacacgactgaagcgacttagcagtagcaatactcaacaattagatgttgagttccagagggtgagtggtggcctgaggcaagaaggactctatctgatttttctttgtaatgttcccagtgcttctcccaggtcaaatgaagagccaaagttcagttaccatttgatgggtagatggatggatggatggggagacagatgattaaatggatagatgaacagatagatgagtggagaggtaaatgattaaataagtgaatataagctagaagttagagccaggaggcagaggaaataaatattacacgtgtcagctcaggctctctaaggggcctgtgaaagagaaggcgaaatagcccaggtccctcaggactgagaactggaagaagcaaaccttagatcaagaggggttaatgggcttcttgctgcattattaagacttaatttcttgtttattaagagaacattctgtttagagttgctttcccatttgggcattcctgcaaattgcctcttcacccctcatagccctttcctcagtctttctgtcctctggggggttttgtctcactctctgcagcacttctttcgggggggaacaaagtgggacatgcagaggatgggcgatgaggggaaaaatccatcatcttaccttctgagtcactaggggacactgtttccagaaaagggaagggcatgtctggacttcaggtctctggggtatccctcagcctttccttctgaaaagcctttcctcagcctttccccagcaacttagttcacagtcttcctcttagccaaggggagctct

SEQ ID NO: 38473 - DNA, 981 bp, Bovine  19866881214038
  misc_feature (1)..(1): n is a, c, g, or t
ntctttactgctgagtcgccaggggagcccccaaccaataccaataatgatcccaagaccaccaagggccatgatttgttaggggccaaacacccgaaaacaagcactgtcaatgcatcattttctataaccttcaaagtatgcgtgaatagcagtgttatttctatttacacaagaggaaaccaaggctgagagtatagagtaaactgtcaaggtgacacaaaacttgtgagaaccaggagatcaaacaccagagtccgcccttctagaccctacgatctacagcccccttctctgccatcgcatgaggacactcttaagaaagacttttctatgaatgaatgaatgaagtgatgatgtgagaaggacctcacatggctgctgatgctgtgtccatcaacagtaaatcctcccgcctccccgctccccactccgcccgctgaggatggaggaagcatttagggcttgctgtccaatcctggaactcagtccaatgctctgcatattttaaaatgttgtgctgtaaaaacaggagaggaacaaggctctgtgaataattcaccacctcgcctcagagaaattaaaaatatatttcactgcaaaagaaaagtcgttgttatttgggacttccggggacttggacagaacacagttcctaatggaagaactgcattgatcctagtaactatttttttttttttttcccaagtgaaatgggaggtgggggaagtttaaagaaaagagtacatgttaatgccacactcaatgtagaagtgatttcattttcattttatgatagagcagaatttatatgacatgatttaacattcatcagttaaccaatacacgctggctgattgattgttggattgggcgggttggcaggtcagtgagctggttaaagagatgacagatgttgggtcaaaaaataatgcaaggtttgtggatggaaaaccctaagttaaaatgttaattttgtca

SEQ ID NO: 38474 - DNA, 715 bp, Bovine  19866881230021
  misc_feature (1)..(1): n is a, c, g, or t
ncagaggtatatgaaaaaagactttttagaagggaaagcattcagctaggtcttgaagactgcttaggagcttaactgatggcagaaacgtaagtaaaccataaaatgtgtttcgaggaaatgagggccttcctggtggctcattgataaagaacctgcctgccagtgctggagatatgggtttgattcctgggttaggaaggttccttggagaaggaaatggcaacccattcctgtattcttgcctgggaaatcccatggacagaggagcctgatgggctacagtccatggggtcacaaagagttggacacaacagagcaacagcagcaactagggaatggggacacactcagaaccaccaacacgaaggtacaggagaaggaggtggtggcgacagttgtagtttggggatggatgatggagggaccttgagtgccaagccaaggagcccagccaactccgcttacactgattccctgagtgtagaaatgagacaggctaccaataggtcaggaattacacacagttctcattgctcactgcctttcatgcctggcctggcggagatacttctccttataggggatgttttattctgtttttaagagctcttcatttgtcacttgggacaggaagttggagctggttgcagtcggcaatccatcagcctgcctttgcggaagaactaccaggaaaggagtcttcctccaccgt

SEQ ID NO: 38475 - DNA, 3428 bp, Bovine  19866881232490
  misc_feature (1)..(1): n is a, c, g, or t
nacaagcagaggcgatgacaatcctgttaatgtgtgccccttgctgggcctgtattgtctaagcaaacacaccgtcagccatctcacctgaagctcactaagaacctggaattttgcaactatcagacttgtttcatgagacctgttatccctttgtgcacgtatgctaagtcgcttcagttgtgcccaactctttgtaaccccatggactgcagcccaccagactcctctgcccattggattctccaggcaagaatactggagtgggctaccatgccctcctccaggagatcttcctgacccagggattgaacccacgtctcttaggtctcctgcaacagtgggctggttcttcaccactatcactgcctggaaagtgccattatccctttggacagatatttttattcaagaactggtttaagattcagttctcgggttggtggagcagtttgcctgacttccactttgtttttcatcatctatgtaaatgcattacgtgggctaataagactttagatgtggtatttacataactggctaggatgagttgcagatattttcttccacctgtgtaaaatgtaaatgcatacacatgtcctaagatgatctcttcccagcactttcattcattttcaagtggggagtgggctaggaatgggaaatatgagagaacagattctgtgtatattttctcacagagcttaagtcgtctctgcttgcagcagttttctatgatcatcatacatttcctgccctatggaaataaacatcatttctcctaggtcgatagcacttcttaaggttcatctgtgaagatgcattgtatcattggtaatgacatgcatgccaattctttactagatttaaagtcctttgagggcaaagagctgactgccaccttctcctacctccttttccttatctcaagccttgcacagcagatgggctcaatgatgataactatattcaccttattcacaccttgcaatgttctattaatttgacttgtatcctccccttgctttgctcaacatgcagcagccatatttgcttcctagaccagggagggagggatgtaagagggtgaaagaaattaatattaccaatcttctaggcctagtgaaccatgcaaaatgcttgcagtcaaactatttcttggcacaagtgtaacaggatgatgcaaacaagctctggaacctcactgcctgggtttgaatgggaatccgagctgtgtggccctgtaacattacttaacctgtctgtaccttactcctctcacctgtaaaatgaggacaataatattgtctctttcgtaaatagctaaaagtgttaaagaaaatgaaccacttaaactgcttgaaattggtgctggacatattagaacagacacacacacacacacatacacacaaaataagtatcagctagtgttactttgtcccgatgcaatgttgggagttaattgtttacatatgaataccatttacaaataatggaagcaaaactcagatacctcaaggaatacagttaataagtggtaggaaccagtgtttgcactcagttctagaggctgataagaagtatgatgcaaaaagaataaccgcatgatttgccgaatgctgtgtgtgcccagccgcgtgctaaaagctctgcagacaccatctcagttaagctgcaacaacaaaatgaggaaatttctaatcactggccagattttacagatgatgacctcctgcctcagagagacacacgccatgaagttagcggcggagtgaggaactaaagccagtgtgcctgatcccaaagcacacgtacactactaaggggtcggaagtgcatctcctctgaaaggccaggggctcacatacgtagctcggcagcagtggggtggaggaggagctggtgaaggaatgaatgtaaacagcattttgaaggagagtcatttataagcgagattatggagtctgtttgaagattccccccgaggacacgttaaaaagatggctcacatgcaacctaacgggaggttagatgaaacgcaccgggctgtgtggaggcgggatgcacacggaaaattaaatccacgttggaaatgttaataaatgcatacacatgttcttgtctgtaatgtgctccttgtttctctcattttctccgtgttggaaccgtgagggcatctttgctggatctccagggactggctttttccctttggttgttgtgctcgctctctctccttccccgctccaccatcatgccctctaagtgtgatttcatagcttgagatattcaggacccagaagtgtgactatgcacaaagaatgaagaaggaggagagatgactctctcggggcttccagaccatgcatcacacggtagccatagtgatgtgaaaaccaaaagcatctcatcactccctcacttagagacttctcagggcttcctttggggcttcatgcaatgaagtcagacacttatgcaggatctttaagtctccaggtgtactggccactctccagacccctggccattgtgacttttcatgctctcatgctcttttccactggagacctccttcattcattcttcatatctaattcgagcataatctttttttagtgaagccttccctctaataccccagggaacaggggccctgggctcttagttgctctttcacgtcacccctttctgtccattaatactcccaataacaaacaggtcaccattttattgaatgcttaacatataaagaactaggctaaatatcttacatgagctttctaacttaattaacttttcaagttaatttctaactttctaactcagactcattttatcccaatctaaagatgagaactctgagactctgagacatttacaaaatgtcttagtatgtgccaaaaggtggcagagctagaattaatgccctgatccttttggcttcaacacctgtacaattaacaactatccttgaccatcattttacgttcatggataatggatgctcacataagtagagtcactttactattctctctctctgtgtgcatgctcagtcatgtctgattctttgcaaccccatggactgtagccagccaggctactctgtccatggaatttcccaggcaagaatactggagcaggttgccgtttccttctccaagtgatcttcctgacccagggatcgaactcacatctcttgcagctcctgaattgcaggcagattctttacccattgagctatttggaaacactaggcttgggtatatttaaaggcggacatatttgcttagtcttctgaagaaggtaggatagtgtagtggagaaagcacttattctagagttcagttcagttgctcagttatgtctgactctttgtgaccccgtggactgcagcacgccaggctgccctgtccatcacc

SEQ ID NO: 38476 - DNA, 1762 bp, Bovine  19866881352907
  misc_feature (1)..(1): n is a, c, g, or t
ngaaccttgcaccatcctaggactatcttggctccttgtcacatgtccttcccctttacccttctacctgcaggctccccactctcccatcctctgcagatcttccctcctcggcttcttccttctctttgttctctgtttaccccacaccctctctcaccttctcatcccattctttcctgccctcctctcctctcttccacaccttcaggtagtgaaagaccacagtcttgagggaattgcctcaacttcaaacgcgaattcggatgcagaaacgtctgcgctgatgtgggatggcgtctgggaagaacctacatctggagaggtaacagtagacacaagcgccttggaaataaacactggctgttaccacaatcgccattgttttcctcaccaacaccaacataaacagcaacaacaggacttccctggtggtctggtggttaagagtcagccttgcaatgctgggaatgtgcattcagtctctgctcagggaactaagagcccacacgctgtggaggaactaagctcgtgcaccgcaactagagagcccgtgggtcacagtaaaagattcctcatgcggcaactaagatcgggcatggccaaataagtattttaaagacccaggaatgacaaaatgttagtctttctccaactttcctatcttttcatttctgcagttcgtcttctgaccctcggtttctcctgggtgagtgaagtcgctgtcctattctatgttgtcataacgcgtgagaatccctctcggagttctcatctcaccggctcatagtggtctgcttgagcacccttctgtcgtctcccctcggagcagggcactggcttgttcagtgctctgtctttagggccagggacggtgccagagtgcagtaggcacgagggccaggactgagcagggcccagatggaaacatttcaggagacactctctctgagattcctgccccggtaacaggtactcagtaaaaacacactgaatggctttatgggttagttcgttccatcttcccttcccttacgttctctcaatcacaaagtcattcccttgctctgtctttctcctctctcctgctcctccattaactcccgtttttcacccatggttttcgctgccaggtcctgtccctttaacagccccgagatctccctcctctatccctccttcattccccaccccaggcaccttcccttggaccctccccagcccttgctctgtctgcttgcttgaagctggcaaactttcttatctctgcctcttcttttattgatttctatgtggttagtttgtccatagagggaaaggatttctttgatactccaaaggatcagactgggcacaaaagccatggacaagttttgtttgatgtggacaattttattcccattcaattccctgggttttcaaacagttgtagatctctgaactcaaaacatctgaaccagctcatccccccctctcctgtaagtgcacaggcattttctaagtctttaacaaccagtcctgtatctcagtgaacagaggtcacctcattagtagggccctgaattcatcctggaagataaaactgttaaattacgaacagatctaggcacaagtttttaaataaaagtgaaaggtacaagctaaaatctaaactacttccttcttcctgtcacatgttggttgcgccctgaactttctaaggtcaggctctttttgaacacttacatctaccatatgagccacttttaccattagctgcaca

SEQ ID NO: 38477 - DNA, 907 bp, Bovine  19866881358305
  misc_feature (1)..(1): n is a, c, g, or t
naaaaaaaataataaagaaaataaccaaaatctaaaaacaaaagaattttacaattttggcacaagagagctgagtgagacttcgggataatctagtggattccagcattttatggatgtctgtgcagaaactgagtcagtaatgtcttcaaagtcacacacctaggcaggttagtgcaaatgagaaatcaaaatctgaaaagagaaccatgggggatgggaagaagggaagaggaaagacaaagtcaccagggtgatgagagagaagaaagagcaagccattaaaacatctaagcgcagtgggaatgacatgtattgaatctaccctgtcagcagagcgagcagagcgcagtatccaccctgataaatgccaggttcccttgctgacacttgataaaggttccacccagcagcacagcggcagccagaacagggtgatggtgccgcccgctggtttaacccctgctgctctccagcatgtggcacagagttggtgctaaatgaatgtggagtaatgaccaaattagtgaggtcaactccttaagcatttccgtcatcaatgcacacacacctagcattgctgtgtgctttgtgtttggttgtctagctaactatgagtgaacacctttgttccccttctttttacatcattttgtgtctgtgctactaaaaaaggtgcagtctcaggtgttcatgtcataccgtgtgtggccgtccttgtctgccctcagtcgtgtctgactctctgcaaacccaaggaccatagcccaccaggctcctctgtccataggattttccaggcaagaatactggagtgggttgccacttcctcctccaaggaatcttcctgacccacgtccccctgcttctcctgtattgcatgagggttcattatttgctgagccat

SEQ ID NO: 38478 - DNA, 903 bp, Bovine  19866881466847
  misc_feature (1)..(1): n is a, c, g, or t
ngtacacaataaatgctcgtgctttctgtgctctaatagaggcatttttattctttttgagagacgaagtaccttccgaactggtgtttcccctcctaggtttctccctgcaactaattcccttaaggtcaagcagtaaaaacggatcctggagaaataaagtccaaagctattgcaaaggaaagagcttcagtcaaccttagcattaaactcctaataaaggagtctgcctcataaaggagtcgccttgccaccctttctcgtaagaactcaggttattaactattaccccctggagagacattccccctgacagacacatgtgcaccctttctgagcagtccttgcttttccgtgatgaagccctggagagtcattgcatcccgcttggtaaaatagtgatttaataagatgcttaattatttttgaaccaacaacaatattttgctgaatactgtaattgcattttccattttgctagaaaattgaatgctgagaagcatgtgaagttgtcaagtcagtgcacagcctggaaaatcaacagactcaacactaaaagctccttttgcaatcagccgtaataccctgaattctgagcaacaggttttgcggcctcgctgaatgcgactcaagaggaaaaattcatgcatatataatttgatcggcaatgtagaaagggatggggagtaaagttaggcaggcgtgaattctgtacaaggattctctggttaccgatatgtgtctttgtaacaaaactgcactatgtctgttaagtcttaatttactgctccctgaattaagaataatagtgatgcctacactgttggttatggagaggtttaaaagataccaccgccggtaatgactgacacctagcaagtattcagtaaaacagagctttcc

SEQ ID NO: 38479 - DNA, 875 bp, Bovine  19866881645333
  misc_feature (1)..(1): n is a, c, g, or t
ncaactgtatctcaatgaagccagaagaatacaaataaactaaaaagagagccaaccacttctagtcaaaaaaattattcttgtgttaaaacggcagtagttgaggctgcagtttgatgaaacttttgtgactgcattttgacaataatacaagacaggtaattacatttccaccaacaagtgataccacaaggatgaaaagcgacatgccgcaaacagtcaaagaataaaaagggagatgatctgattatcctggtgcaaatatatttctatgaaaactgtgaagagaaatatagaacatcagacccacagacataaactcactaacacttatgtcagcttcaagacttaacgttcatgtgttgaatggatgttcatatacaatgagatgttcccatatgtttcctatgttaatatgagggaatattccatataaaataaaaaacacccaagagatgtgctttcttttttgaaacagctttgtcaagttaaaaaaagaaacccaaactataatgccagataattagtttatatgttgttattggtgggcttccctttggtgggctcagtggtaaagaatgcccctgccaaatgcaggagccacaggggatgcagggtcaatcccctgggttgggaagaccccctggaggaggaaatggcaacccactccagtattgtcaccaggataattccatggacagagagcttggcaggctacagtccagggggtcacaaagagtcagacacgactgaagcagctaagcagacatgagcacactgttttggtgagtcacttgaagcatgatactcaaattatggaaaataatttcacaacataaactgctttgctcattcattccttcattttgtgtgga

SEQ ID NO: 38480 - DNA, 679 bp, Bovine  19866881705674
  misc_feature (1)..(1): n is a, c, g, or t
natagtacagattgtttgctattacaccaacttgaactccctgaaggaaaagctgaaggttttgcatcaccattctgcttttttgggtaacttgcccacatattgaattaatcactgagtctccacatacttttctctaaagtgacactactcacatagtgaagtgtttctgagggaacaaacggaggagcactttgaaggttataagggcttccctggtggctcagatggtgaagaatccacctgcagtgtgggataccttggtttgatccctgggttgggacaatcccctaaagaacagcatggcagcccactcatgtatttgcctggagaatcccatggacagacgaacctggcagcctactattgtggagttgcaaagagtcagacacgattgagcaactttcatattgaagcctataaacaaccttcccaatatgaatgaggcatcctcacaatcattgttactgcctgttgctgacaaattgtgagggttacctctgctactgcagttgcatctgtcagaagagacagagagagagaaaaatgtatttgatatgccccccaccttcattacccactaataatgaaaaaataatgacctctttccccgcgttggtgaatatttttcctgtcaactctgatatgctcataatgtgggcagacagattatttatga

SEQ ID NO: 38481 - DNA, 934 bp, Bovine  19866882206856
  misc_feature (1)..(1): n is a, c, g, or t
nataatgaagaaattacttgaccccaggacacacagttagcagtaatgatggtccgtgtcattgggcctctctgccatctgtgcccaagcaagcggggagggcaggggaaagatggagaggctgagatggtggaggagaactccaaggagagagaaggttgatggttcagaagccggaagggaacagacttttgtaaacctgcttctatggtcccggcatttcacatgcaggatcccatttagttctcaaaataatgtgctaagatcactataggctgatccttttgaattgttcttaaaaggaaaaaagaataactgagagtcaaagaaagcaggtaaaggaagagaggcagaaaataaaggaaacggcaatgtgccagtttaagtctctgaaatttggaattgtccaagaatagatctgaatctagtcttctgcaatagaatggttgtgtgaccttgaacaagggatgtgtgtgtgagtgcatgcgtgcacacacaaagcgcttgccagcttctcaacattcactttctatgtgcagaaagtgaataataacaggatcaacttggatgtgttactctaaaagttaactgagataatggacataaaatttgtagcctggtttcaggcacaaaacaactactgcatacatgagaagttttctatttttgttcttcttgttagtactcagataaaatgatcacatgatgtgtccagcactcaaatacaagcctgtttccttaattctttgctctttctactccaggacacggctcaacaagtcattagtaaaagcaaatagaaagggcaagaataaagcattgaaagttctctgtgtcatcataatatatctctataggttgactggggtagagccctctggcctagatttgtaatttctaatttttagagcctgaagagttagtcatctttctg

SEQ ID NO: 38482 - DNA, 1625 bp, Bovine  19866880362502
  misc_feature (1)..(1): n is a, c, g, or t
nttgcctggaaaatcccatggacggaggagcctggtaggctgcagtccatggggtcgtgaagagtcggacacgactgagcgacttcactttgacttttcactttcctgcattggagaaggaaatggcaacccactccagtgttcttgcctggagaatcccagggatgggggagcctggtggctgccgtctatggggtcacacagagtcagacacgactgaagtgacttatcagcagcagcagcaaggggtattggggaaaatggggagcaaccactgagaggtgcttccttttggggtgaagatgttctaaaattgactgtggtacgggctgcacaattctgcaaacatactaaagccaatgcattctaacattaaatggatgaactgtgtggaagtggagtatatctcaataaagctgttattttaaaacatgaattgtcaaatgtgataaaatattaacaaccaataactgttgggtataggtgattcgtacctgtgggtacccatctttactttttacttttgagatgtaatttacttccgagatgagatttacccatctttaattctctttacttctgagatgtttgaaattcttcacatctttaagactgtttcattttggggggtacagtacacttaataaatgagaaaggtactcttacctgtatgagttcgaacatgctgaacataattgttttttctgtctgaaaaatagttgcattttccacatgtgtaaactttccttggaaaatggtttctcaggtgtttcctccagtgatattcactcactgtggtgtacgtgcatatgatacacttgtagactcgctcattgtccccggctcgggtgtgatgtttcaggtgagcagtatagtgatcatagcgattggtattgtagccacagcggtcacagcggatggggcccttggagaaatcgccctcttccccagtagaagagccggattccctggcttttgcttgcttctcggcactttcctccacaaaaaatttcttggcgctgtgaactcggatgtgatgcacaaactgctcttcagattctgcttcatactggcatggtttacagcggaagggtttggtcttcaagttcttgcacttgtcctctgctacgggtgtttcctgagggacgtctttatttgagctgtacgtttctgaggcagctgctacctcaaacacaggccgtggctgcacaacactgagttccaaactttccagttccatgttctccagcccactgggttcgcctttcacctcaggagactcctcaagtccttctccatcactatctgagaagttgctatccccaacaggcatcaattctgccatctgcctttcttcgccaaccaggtaatcacagcagccgccatttacttccccagttaaggccacgtttgccaacatgatgagctgaggcgcagccagttcagctcgagagagatcaggcaagtcatacatgtcgtttggcaaggccatgcccatgctgccactgccggtgaacagccctcctcctccggaagactgccccattacctgggtggccatatctgtgctctgcattcaaaacaaaacaaaacaaaacacacaaaagcaccagttaagcacaacg

SEQ ID NO: 38483 - DNA, 981 bp, Bovine  19866880401051
  misc_feature (1)..(1): n is a, c, g, or t
nacgtccgggagacgctcctcgagaggagatgcgcggccgactcctcctcccggcacccagcgcctgggacgtggctttccccgtggcgcggtggcgactgggggtaacccaagaggggctgacctggaggagagttttctgttccccgaatgcgtccaggattcggagccggaactgaccctccaagactagctgtgggagctgcagcagcggcgggaggggaaggagcgacagcggcagcggcgacggcaggagaggcggcagcagaagttacgggccagccaacaggtgctcccggcccgtacgccaatactgcttagtgttggtgcatcaccagcgcgccctgcgctttcaggtgagccaggaacagttcctggaggtggtgagcgccgctctgcggtggccggaacccgccctggtgttgtacaaggtggagctgctggatctgcccgacgtcctgctgctgcacctgcccggcccggtgggccccaagcagctgatcgtgctgagaagcaaggtggaccttatgccccaggacactcccgactaccagcagcgactccaggagcgactgtgggatggctattggcgccgggctcttgccgccccgtggctaccgaaggccacaacatctcagcgggcacaggccaccggatggggaggagaatgagaatgttccgtccaagatccgcacggtactcagagccgtgcggcttatcagcgccaagactggctatggagttgaggcgttgatctccgcgctccagcgctcctggcgctaccgcggcgacgtctacctggttggtgaaacctacgctggcaagtcaactcttttcagtacgcttctggagtccgattactggatcgccaagggcgctgaagctatcgacagggccaccatctccccttgggctggttagccttggggcacccacctccttcgttttcataaaagttataagtcgatcatgtttcaggca

SEQ ID NO: 38484 - DNA, 1884 bp, Bovine  19866880412500
  misc_feature (1)..(1): n is a, c, g, or t
ntgctttttagcgtctaaaaggagatgagtaataaaccatctatcctttgctcacataggaaggagtccccttatgtaagcaaactagcaattttgtctagtttaattgcaacattttattcttaggatgcacttttaaagtttataatatatataattttctactgggaccaaatagtttttaaacttttatttcttaacacaatggaaaagaacagaaacaaaaaaatcagtgtaattcagaaacacttcaatatgtactcagcaagttacacatccacaatatcctcctgttactcagattttctgagtcataaaagtcctttgcgtgtacttcacaggcattctgacactcaaggagcttctgttaaaacaggcaaaaagagtcagccatttactcttgggggtaaagaagatcatttctaaattgctcacaaaagcatatatgctcagaaataaaaagggaggaaatactgatacattcaacaatatggatgaatctcaagagcattacgctgagtgaaaggaactgaactcaaaagctgagtgttgtattgagatgagcaaaatctcatttccagtttttctataagatggtacagaaaaccccgaacagagtttttggccaacccaatatgataccccttacaatgcacgggaaagggcaagacaatacagacatatttcagatcagtggttgccaggtttggaacaagacggggggactaatgaaaagggacaagaggggcctttttggagtaatgggagtgttctctacggattctgatatggtcacactgttcaaagtgcccctgaaaaaggttgaagttcactgtatgtaaactagacctcaataaacctgtacaaaactgctacggagagttcctcgggcaaagataaaaggggaccaggtctaaaagtttccaataaattgttcttcaagttaaattctgaatgggagctaatactgtgatctaatactgtgattttggtcagaggcgcttcatttgtttcctctcaaagactgttcagggggcagctcagggccaggccagtctctgaaagcaaatgggaggaaggagaaacagcctgggcatctggaaggtcctgacccagatggcagtttctggccttcttcacagactcctgagacaggttcttgatccactgtgttaaggaagctgaagtcaatcatatcacttcctgctgtgttcggccgacccttatgttcatctcaaactgcccaggaaaaagagaagtgccaactgcagacacttgggcagtcatatcactgctctcggtgatgtttctaggactagttactgaaggagcacccatgagggtatctcccaagcacgtgacataacagcaaacaagaccgaaggccctgctgtcctggagcttaggttctgaaggatggcaaacagcacaacttttttttttccccaaacagcacacatgtattaagtgcttgctgtgtgccaggtgccacaggggctgaccttgaattcatacaactatggagtgcagaggcaattattagcatgttcatttaaaatttaggaacctgaagccctgcaagccaagtaacttgtccaaagatgagcagccagaagtggcagaatctggggtgaaacccaggcagactcactccttaagtccatgcccttagtaggaacactgcctctctgagtggtggacagtcagcagaaatgttgtccttagagggttccagaatgtcagtgttagatgccttatgaaatatcgataaacatcaaaactttcccacgtatatagaaacagtgttacctcatgagataaaaggtcaaatatcactaacagacaatttaccaaaaaataaaggtaattacatatatagagaaa

SEQ ID NO: 38485 - DNA, 3680 bp, Bovine  19866880427418
  misc_feature (1)..(1): n is a, c, g, or t
ntttaatacaatgaaagtatttttcaaaatatggtgccctgatttatatggagcaaaaaccaaaggacacatgtattcatggatattaaatatctgcttcaaagagaacttgctgctgctaagtcacttcagtcgtgtccgactctgtgcaaccccacagacggcagcccaccaggctcccctgtccctgggattctccaggcaagaacactggagtgggttgccatttccttctccagtgcatgaaagtgaaaagtgaaagtgaagtcgctcagtcgtgtctgaccctcagcgaccccatggactgcagcccaccaggctcctccatccatgggattttccaggcaggagtactggagtgggttgccattgccttctccgcaaagagaacttagaacacaataatcagtcctgcctttgcagagattctccaaggaaagactactttaaaaagtcaaagagtcgacagaacaatgaccctgaccctccaagtccaatgcaaatgctgggatgaatcccttcagttgaattctgtcccaaagcattagtcttgggaaagtgatagaaaattgaaagcaaagggaacagaactgctgtgttatgaacataatctctggattcaggcagatctaggtgatgttgggtaagttatctaacattttgagcctcagttttgtcacctacaaaatggggtaataataagtacccaggtctcatgggatttctgtgttacaagcacagggcttccttgctttctggcacacaataagcactcaataaatggccactgttatttatgatttcaaaatagttatcttaaagtgggataggatttgttttcctggttaaggaggaagctggaccaaatgactttcatagtgtctaaccaccatattctattattaacccatttcatgttaactgtttcccctctcaactcagtcgtgcccctcacatcccccatccgtggcattaacaacaatatgtaggcccattcattgactgcaccatgggcattcagatgtgtgactaacttaaccttctcaaccactccttgagcttggggctgtctcctgtcttacagagcagacaaccgaggcacaggaaagttgagtgatttgcctaaagtcacgaggcttaaaatggaagagccgggattcaaaaccaggcaatttggttctagaacgtaggttcctagccagcatcccatattatcttataagtaacctaaaactctgccccaacatatggaccaaccaaatacagtcaactggtcaactgtgtgctgcagctgatgaaacagtggtacaagatccagtgcgtgctttcagtctccatcgtagatcttccagctttacaccccagagcttcattcctaattatcaatttctctccctcccttcccacagaacactcttacccttgatggaccagtgatataaatatgcattcccattcacttctgggtttagggttaaaaaaaacttgactctaccaagttcctctgctagtgatacataccaggtccctggagggctggctaaccctgagcttaacagagccctgagcacagtcaggcatctcagaaatgcacttagatgatgacgagggggttgctctaacaatgaaaagttcccaataaagctgtcaggacttgagaggaccagttccaccaccccacccctgccggcctgggagctggcactggggcattgctggctccccacccacagggaacccaatcctcctggatcaactgactccatgcctctggctgcagctgttcgtttcctcttgttccacgtgtttcctccagcactgatggctaatgccctctcttttagaaaaatgaccttgctctccatacaagtaggggccacccattccatctacaacagaagtacacagctacttgattcagcacaagagtatcctctctgcggacttccagtcactttttcaatcaaggtattacattgtcttgtgatttcctttttttctcttaaaatgaaaacaaattgcaggtgatcccttgcattttgtgttgctaaaattcacattctgctgtacttcattagtaaaagctctttcccccccacctttccacaaggctctatgagatgcaaatagaaccatttcagttttccagttgaacagccagggaaaaaagtagaaaaaaaggagcagcaccctgcttatctccatgttacacattaacatggttctcctttgcagaggttcttcaaggtaagcacactttaaaagtcaaataactgacagaataattaccacagcactctaacatcaatgcgaatgctgggatgcagtcttcagttgaattctgcaccaaagcgtcagtcttcaggaatgtaatagaaaatggaatgcaaagggaaaggaatttcccaatttctccactaagatgtgattgaaaattataatagggctcaagggaaagaaagcccacaagtcaagttttctatgaaattttccgaaggtctccggtccgacaatctctcccctgctgaaacctatcacttctgctttgctctcgcactcctgtgctagaggtctcactaataatgatgataatcagtaataataaaaactattattcttaccatcgctactaatactgcctctaccaccatttactgagcttaatatacgccaggcattgtgcaagctttcccatattatttcaggaaactcttacaagaatcgaacgttcattagccccattttcaggtgagaaatcagaggctctgagaggtaaataactcgcatagagcctaccagtcagtaccagggccaggagtctacagtaggtttaactccagaacttgcgtcctgatcatgattcccagttttctgagtaatggccctttgacatgaacctcccaccacagggcttgcagggcacttgaatgaatgaatgactacgtgaaggaacaagccaataaacaagtgaatgtgctttctgaagactttttcaagtaaagttctctctctgccagaacaccaagaaatgtctaaaattgagtatgggaattctcaaaatgagatctttccttcacatctttaaaattcagcagagaggaactgacacgattgcactctacttccgttggttcttggtgctcctggccacaggcataatggctgaaataaccgaagctgacatattcaaaagaaccttgatttcagagacatgaaggttttcaccaaagttaacatcaatgtcttttcttccaatactgaactcccttcctcccactttagagggagcttgctgagtaatgtttactcttcttactttttatctagtattagggagagagaatatcaatctttacccacactcctcctgccaacacacacccaaatgacccatgggcatgaaagtgttcaagccgttagatcagcactaccaatgaaagtgttctgggtcacagaaaccgtgctgctttctttcccccatgaaggagacatctatgctggctccatgctctttcaatgtctcctccctgtcctgggccagcattcccagaattccttgggtgggctgaggacgctgagaggtgccatctggtccatctcacctttcctcctatgagaggcaaggccaatttcctctacagagcttcccccttttgtcagcataggaagtgagcatccca

SEQ ID NO: 38486 - DNA, 1074 bp, Bovine  19866880429853
  misc_feature (1)..(1): n is a, c, g, or t
ngataaattaaattgcatcctattaacccatatgagtgtatttctgtaagcatcatcacattgaaacaaagttttaaaaagcaaaaaaaaaaaaaaaggaggtgaaagttttcagggacaagtcaattttgaaaaacgttaagcacatttctcatctaaagaggggagtgttttaaaggacagtgagagggtttctcaaagagcaacccacagctccttgtcccctttagctaaggactgtttctacctgacaaggaagagttcagggacctccacataaagcacactcatgtgcaggcaggtccccgccatcaaagaaggcaaggtcaggcacagggaagagaaagatgctaaacgagctgtcccaacccaaaccatacacaggagaggctcacgttaatgcctgcttcatttgcttccagtctcggtgacgggaattagacaattgctttaaaaactcagaaggcaccgtaaaaatagaaaattattgcttcctttcatgaccaaatattaaacacagtgcacacctaatgactctatgcctccccaggggaggaactttatgaacaataaaatcccagcagacttgcactgtttgggtttggaggtctcattacaggctcactgatccaatacaatttacaagctcaatggactccacttgaagtgaaaaccgccaagctgcagttgtaaacggaacacctacagtgaaaccaccatctcactcctcatcagggaaggaaaaggtgaaaggaaggactggggggtaaggctttaggggcaagcggctcatggcaatggctctgaccacctgcattgttcaaggtcagattcatcactagaaacacaaggcagggacttccctggtggtctggagattaggactctgagctttcattgccaaggacttgggttcaatccttggttggggaactaagatcctacaagcttcaaggctcagcaaaaaaaaaagagggtgcaaggcagtgggaaggaaagtagggagaccctaaaggtgaaggcagaaaggaaaacaatgatgaacaaagatgaaagaaagagatggggacaaca

SEQ ID NO: 38487 - DNA, 1196 bp, Bovine  19866880570356
  misc_feature (1)..(1): n is a, c, g, or t
natggcagggtgtggccatggaaacattcaccactggacactgtgatgtgggcaacttccaagctcttcccttcatttcagtacggtagctgcatgctcttcacactcttctcttcttcccattgctgtgaaaggatgacaacttgagcaaccaccttagacccagagatggaagccatggtgtgttccccagttgggtacttggctgactacgtgaagtgcagccgcttactcacctctctgatttaagatagcatattttggagaaattaactttctgccattttctcttaagccaactgctaagctgcttttttctaaatgagaagtgccatctggtctcaaatactagtgggagaaaacaatgtagcagaactctcttttaggtatgtttgaatcacacatacatacatgtatgtaccctactaaaaaaaataacgtgtttacaaactcagttcattaaaaagaggcacggtccttggtagtttaaaaagggttagggggctttattacagcagtatttaataaaatgtggtgcgatgcacacagaatgttctatatagttcatcttcaatgtgaacaggtcagcttcacgtatctatcttttcttctgcagattgtacataagagcaggaggccttttggttttatacgccacacttcccttgatgcgctttcctttgatgttaactatatgtggcaagagagggcgccggactgtcaggactgtcccttgaggtgtatagcctcggagggtcagtgtgtccttaaactgcggtgtcactgctacccaacctatgcaggcacatgaaaaaacacagacggtgttagcaaccatcctattaaaaacaccaaacacagctccagatggagaccccagggaggctactgctgcctcactattttttttaaaaagcatcaatacatttgtgaaaatgtacagattcattttcagagcaggttgcatcttatggataatctagcatgtatttcttaaaatatttggcttatgtcagttaaggcaaatctgtataaaaatatgataaactcttgtgcttggtgtaaaattacctgcagaggagaacttgatgtcagccactgcttcagattccccaagtccttcatctaacgtgatgtcttcagcaacaagaggaggaaatcctgccattctttcttctccacccactggtaccttc

SEQ ID NO: 38488 - DNA, 2304 bp, Bovine  19866880585368
  misc_feature (1)..(1): n is a, c, g, or t
nttggacacaactgacccaggcgcgcgtgccaaatatacaagtcctcctcactgatgggcctttcccttctcactagctcctcagtgacattggttgtctgccagcaccatcagcaggaggggagaaacaaagggacatttctcttctggctggtttgatcacagacacttctactccctcctttaattacgtgaaaatataggatttgcttgtcacacttgtctatccctcgagctcccttctttttcaccttccagcatttctacccttctcttttaactctgtctataacgtggaacattaccaaagctaattttctataggaaacatttcaggaaacttcaataagattgtatgaattccccctctaattcagtaattagacaaggtgattaaggtgaagcatactctcactgtgaaaataaaatctttttgaactttcaaatttatggcacagatgaggttttaagacttagcctattattatctctaggtgaaagaattacaggtagtttttattatcttttaaaaatttttttcaaagtgtcttctaatgacattttacttttatgattagaaaaataaaaattacttcaaaagatttaacctaagtgaaaactatttccacccactttagaaacatctttttccatataaactgctaatatcctaattagaaaccagttagctattcattaaagctggttccttaaggagttctactcggcaatattttgacagcttggttcaaattattgcattctttgcaagagccttataagaatgtcacttaattttccaaattctggattcgagaaacatggggtggtaaaggggaagaaaataaacatgggcaagaaagtaaaaatcactcgcaatccaatcaattgaaaaaaaagcatataaaacaaaaaggtaaaatattcccccacccctgttttcctacacataaacagacgtacctacaatcgcactttttaaaaaataaaagagggattatcatatttctactttttcacgtacacatctgcactgggcaatacatatatatgtaccttgtcctttttattggctatctgaaccataatttatttagccaattttcctattgccaagtaacaggttctttccaatttcttgttattgaattatggcttcaatgaacatctatatacatgtatttttatatacagtgatattacttctgcaaaattcttaagagtgctattctccaattaaagatgagttattctaaatcttaataaatgctatcaaattagcctcttaaaaggttaaacgattatactctcatagtacaagtacttcctttccatttatagttatccattttttttcaatcgttcttaatctgattccagaaaaaagattttcattcataacctcagaacacgttttcatatattttgtgccacttctgtaacttctgtaaacgtgtttaaatccactatgaatgttttactgtctttttcctattgttcactcttacatacttactgtccagtcctctctttgatgcttgctgaaatcactcctttacaatgctcaataccaaatctgccctgagtttaaggagacaccatcatctaaggacattccagcttctaatgttttcataccgtaagaataaaagacacccattcactattagtgatcaaaagtctaaagcttaacagtgcactggaaatgctgaaataccaagagaaacagcatcacaccacaggatacacagccatgaagttatttcttcacttgaataatttcatgtccacacaccacagtaagaatcacagcacacttcatcacactgggaggagcttaaagagacaaagccatctactctcaaatttttaaattatgacataggacactctcatcattagtcataaaaatatctcaatgcttaaaaaatctaaaataaaatgcacgaagaatgacaagaatttggttagaatggggagtttgaaggatatttttctccttttctttaaaatttttaaatggcattttactttcatcatttaaaagtaaatcttaattctgaacttagagtggtgatgggtacataactccatgaacatactgaaaaacacagaattgtgtaagttaaaaaggtgaattttatgtgtgtataatatctcaatgaagttatttttgtataagtagaattttaaagttaaaatatcacattgattttgctgtgactctaaaactgctctataaaatatatttaaaacaaaaaaccttgaatactctgtgttctcattaattttacattgaaaatt

SEQ ID NO: 38489 - DNA, 1952 bp, Bovine  19866880643627
  misc_feature (1)..(1): n is a, c, g, or t
ntggatacctgaggtcctaacccctgggccaccagtgaattccctgaaggcactatttttaatagctgggtcatttgaaacattatggtttgagagtctttttgtgaagtttagaataatttttttttattttttgttatttttatttatttatgttttggctgcagtgggtctttgttgctgtacttgggctttctctagttgcagcgagcaggggctactctttgttgtggtgcatggacttcaggtaattgtggcacatgagctgagtagctctgcggcatgtgggatcatcccagactggggatcaaactggtgtcctttgtgtgttgcaagacagattcttaaccactggaccaccagggaagcccctagaataactttttaaacatattttattaaggtttaatttacccacacaaaaatgcacacgtgttaggcatataggtcagtgattttatgtatgctttctcttgtttgaccgccattttggtgtagacatgaaatgtttctactacccttagaaaagttccctccttaccctttctagtcagtactcccatattcttccatcaagtgatactctgatttctattaaagatttaacatccttctgtaaaatgtttttgagagtcattccatgctgcgttatcagaatgttgtgtttattgctgagtagtacacccctattactcttgagttaaaaggtcccttgttattctatctgggctctacttgataagaatgtgtataagcttgtaaaactctcttgaatttgccttacatttataaattaatttgggaagaataaaacagacacctggcacatttataaagatgaaaaacaggtagaaatttttactagaactggaaaaggaaattaagttaaaactgttggtacagggcaaaataattttcattcagctaggtattagtaaactagtcaacttgatgaattgatcttccagtgcaacagatttaatggcaataaagcaaaaataggggtggggtgaatgaagcaaataaatgatgccattggaacagagtactaggaactccatttcttcatcatttcacaggtggatgcttgcatcttgcttgatgctggctatgaaaatgctctcattcattagggcttaaaagtggtgacattttctttataattcttttaagagcacaaatattttcctaacgagatcagcttcattcatcagctctttgtttactcaaaggtaaggtttatatagtaaggcaggataagcacctgaaatcttcctttgtgttctataatataccagttcattccaaaagtcataaattacaggtaatatgtattgactgtttggccatatgttctacactaagtgctttatatggattagattatttatagcttaaaacataagaatagtttagttaagatgaggaaatagagccttagagagttttcagtaccttgcttaagacctcacagtaagttgcagagcccgtacttgatccctgtaggtattcttactgtagaacaagttcttaaccgttatgtcacatatcttgtttctgccattctgtttctttatatattaagtagatgtttgtctccattgaagtcattcaatggaaaggacaagaaagggccaagtggagagtaatgtagcctgttgttagaaacctccctttatgaatctgttactggactaatgtggaaaagagcttatagtttgacatacttggataagtttttgtttttgtggtcaagtattctgtaatcagatatcttctaatctgtaaagcttactatctatggttttacttaatgtctgagtagttttgctttacgaaaaaatttaataagattttacgtgaatttgagaatgttgagagatgaattttcataaatgtcaatttccatttttctgctatgcattccatggaccagtggggtaggataccgt

SEQ ID NO: 38490 - DNA, 1031 bp, Bovine  19866880726211
  misc_feature (1)..(1): n is a, c, g, or t
natagcttaatatcataaatttctcagtagaagtactggggcagatcctggggtgaccatctctgagggctattatgggagggattcttattttggtcgagggttggacttagtattcctgttctcatagttcaagctgtgttaagtatcaaatgttacatgggtgacctgtgtaatagctcttaggacttaagtttgacccttcatacagttaactcctgtcctagattcatagtttaattgccgtggttaaaattaccagatatcaactaagtaaaaattattggtatgttctaagttgtattattaaaggaaaataaagttcactttagaaccctgtatttttaggtctgttttctatcgatcatacaaggaacaggaatctaaaaaagggtttgatcaagaagaagtttttgagaagcctacacgtgaaacttgccagggtaagtgatactgacagtgaaattatggaattcaaagttaactcctgattagtttttctgggttttgtcttcccaccctcctttatgcagtgtgggagtatgtttgctagtcattcttagagcttatatttaaggaaatagatatatttgcctgaagtctttacagctggagtgggcttactatagtccttctattctgctaggtctgttcttctatccttttattctgttaggtctattcttctatccttttattctgttaggtctgttcttctattctgcattgaggaaaggatttaggaaagaagagaggccatataattgcatgggacacacccagcctcattctcacttgtactgtgtcctgtcccttagtttacgtattttcatgggaacttcctcccctcttcacattctgatgtgaccatagtgtttgtctggccacagtatatgtatatatttagcagataaatagtgagagaatgtctacaactttgtttcttctgaaaaactcagatttattttctagttactgtttttacagacatttaaaagctatatacagcttttgggatggatggggatgtc

SEQ ID NO: 38491 - DNA, 1318 bp, Bovine  19866880738623
  misc_feature (1)..(1): n is a, c, g, or t
natacagcagatcaaatctgagtccttgtctctctgtgctcctgacttggcatgctggggtgcccggggtgcggggaggggacctgggggctcatctctttcatgtctctgcaatttcaccgtccgccatgtaaagccgagggggagttgggtgaaggtggatttgatactcttgagttcagagagagaaggggcattttcctcaagggaggccaccttcagtaaggtggtaaaaacgccgggatcctctctttctgtcccagtaagaagagggaagttcagtgtaaatttatgagaaccagtggagcacaatgaaaacagcactgaatatgttttagaagacgtggattcaggtccctttggtaccactcattcattccataagcttgggccagtcactggatcttgactttttttgtaaaacgaggagttccgataatgtgattgctaaggctttttgcagctttgtgggattaaatattagccacattaaagataaagatcagatgatgtattctggttttttgttttttgttttttttcttttgaatcataaaagacctaggtctagagcagtagttctcagccagaggcgatcttccccgccaggggacattggacaacacccggaggcatttttttggttgtccagacagaagtgaacaggggttgctgctatcgtctggtgtccagagggcaggagtgatgctaagcatcccatgatgtgcaggagaactccccacaacaaagaattatctggcctcaaatgtcaatcatgccgagcttgagaatccccgatgtagataaaggcagtaatttctacaatatattcgattcattacagtcttctttcagatgaccacagcttacctctttttcttcctcaatgtcattcattttctgtacatattaaatattttatatctaatttatcaagcccattaaatattttgcctcatattaaaaactattttgtttatatattttaaaataattccctttttaatccagcttttaattctaaatactctttttcttcctaatttctgtcctttaccctcctgccactgtccattcagctccctcccaccagtgatcagtctctttctggcccttactccagcagcctcctctgatccactgtgttccttctggcctgtggtcacagtgggcagctgcagcaaggcaaagaggacatcctagtggcagaacaagattgctttcatcttttccgtgtgtttagcatcaatcatggaaagacttcttggcctggggccttcttccccttggccgtggtacccactgtaacccaaacagg

SEQ ID NO: 38492 - DNA, 2721 bp, Bovine  19866880754371
  misc_feature (1)..(1): n is a, c, g, or t
ncaggatctctcacagtagaatgatttcttgtctcacctcttcaagtgaccaagaggagaaggaaaaacatttagggagcccaggatgcaggtcacaatagaaaagtttatcacagcctcggggacattatgcaggcaggtcagtggattgtggctcatccccaggtacaaactacatcaaaatccactcgggattgtgctggctgattttgcaattgtttgttaaaacaacaaaccaaggtgtttcccacatatgtgcttgtcttttactgtcagagatggcaagtcctgacctgtctgtcccaagtcctcagccaagaacttgaacactctaacttcctacatctcaatacatcttaaactgggggaaggggaagggtgcacatctgccattttttagccccatttcagaggctacttaggtatgagatatgcagcaggaagtcatgttgcctcaaatctgctagaacaatccatacatgcatgctaagttgctgcagtcgtgtccgactttgtgaccgcatggactgcagcctaccaggctcctctgtccatgggattctccaggcaagaatacttgagtgggttgccatgccctcctccaggggatcttccctgacccagggattgaaccggcatctcttatgtctcctgcattggcaggtggttcttcaccattaacgtcacctgagaagcccctgctagagcactatttggctctaaagtaaggaaatataaaagaccttgaagctggtcaaacacccgttctcttgactttgcagttatttttaatacaatcacaggggatgtctgattaaaaagatagttgctgtagatcctcctcagctggatttgggctctgtcttggaaatccttatctagagaggctcatagtgaagtggactctactgcaccctgcgggaatcatgtccaggccacgctgggccatgaagagccggttgacaggaagcttcctactcacagctttagttcgaaaaacctggggtagagggatgaagaaggttgcagatttcagggtgactcacacaagccctcaggtggaaatttctcctgctgctcagtccctggccctggaaagtgcaggggtgaagcgctgcagacctatctccacctctgtaaaaggcagagattaaaagcgccgcccccatttccccaactgtgaaaagtaacttctgccctctgggtcatttctctgaaggaggtgtggggtgtaccgccctccctggagaggctgcaaagtgctaaaccgctttagaggcagcagggcttgcaagggtgaggcgtcccgccgtggaacccggctgccagcccagcgatccgtcaggactgtcaccagagcagctccctctgcccggaggaagcgtttgaaggcggtttttcaaaaatcaccgccgctcttcctccactccttccttaaagcctcaaggcggggagggtgcggccgcctcctccttgcattgccctagagcaggggccccggggaaacctgttgtaaaaactggggtcaggagggaggcccaaggacgtgcagggatcccctaggcgcgcccccggaagggccccgcgcaggctcccggcacagcctgcagcgctggacacccgcgcgccgtgccaccgcaggcggggacagccccgcgggctgagggcaccccggatcgccgttcctccctgcgctctgcccacggcctcgctcatcaccgccgcttctccctctctagcagccgtgccggaaccatgtcgaccgagaccgcgagcggccccactgaggaccaggtggagatcctggagtacaacttcaacaaggtcaacaagcacccggaccccaccacgctgtgcctgatcgcggcagaggcaggcctttcagaggaggagacccaggtaagccccggcgagcgccccgcgcgcccacgctcccgccgctccggacagcctagatctcgagaaggtgagggcctccctcgccctcggctcccgcctggccttcttcccccggatctatcagcgtttctgcccgcaccctgggagcccagacctgcatcgcttccaccgcagcatccctgcttctcggctccacccgcgccgggtctgccctgcaccccagccgagtggctcccgcagaagctgcttagaaaccccacgcacgccctcccgtctgattttcctctctcccctgcagccagagaaagcactctctcctcccgccgggctgggagccgcgtcaatgaacccacttttgtcttgctttcccaggtttagttcccctctgggctctgagcgaaacctgccggagaggcgccgtgttcgcccactgagcccagcgtccacaaatctattcccagcgggaatgtcagagctggacgggatcgtagtgataagctataaattcagtcctcggggttggtaaacgaggaaacaggttcagagggagggaattgtcatgacggcacaggtcgctatgcatgctctttacaccacatctcgctgcagcttccgctcagctgcagagctaaaattgaagggagtcagggagatttggttccgatttttaaaaattccacggttctaaggagatctaggatcttctttttctggagttttctgacaaggtagacatctaacattacaactgaagggagcggagaaagatgtcactgtaagtgcactgatttatttatctattttaaaaacttctgtattatc

SEQ ID NO: 38493 - DNA, 1166 bp, Bovine  19866880777387
  misc_feature (1)..(1): n is a, c, g, or t
ntatccatgactatgactttaagaactcttcatttgactagtaccaaagataagattacaagcttccctataaacaaaaatgatttcatggcttgaataagacatctgacaagtcaaaaagaaaatcactgaaatcatactgcacaaatgaaaaagctgggcaaaggatatgaataggccgttcaggcaggacaaaacaggaatgcccattaaatgtattaaaagtggctcatcctcagaaatactcaaggaaatgtactttaaaaactaagtaccaagacttccctggcagtccagtggtttaaaagttggtgcttccaatacaaggagtacgagttcggttactgatcagggaactaagatcccacgtcctacctggagtgactaaaaaagaggaaaaaactaagtgccacttttttcttttttacctagcttttttattcaataagttcctaatacctaaagatttcagggtgtgccaacagtaggacaatgacttggaaaagcattatgaaattattgtatttcttttgacgttcattacctttatcatttatatcagaaataggaataagacgaccaatgcataaaggacgatttccatagggatctcggactgcataaatcacatctttgtgcattataagcagagaatatgctgtgggtgcttccttcattaaatttttaatcctgcaatcagttaaataattcaatgaataattttcattataaacgcatgcaagacaaaggtctcattatcacagctgcaagctcagtctacttttataattacctagctacccagtctggggtgtcatcttgttcctgaggaggggtataagccagtagctgggtgatcatttcactatcagaacttgttgacagaccaataccatgacgcagaagctatttagaaagaagaaaagtcataatcaatagaggggaaacttcaactcacccttcacccaagagcctgccatcacagaaagagatcagatattgtgtggatgctgttatgaaatcctgcattctaccaatggtaggtatatatatctaataatatactaataatatactgtatatctactgctggaggcaatggggaagtctctgaagcttttcaaacagggggataaaaaagtgctttaggaggtatacaggaaagc

SEQ ID NO: 38494 - DNA, 1058 bp, Bovine  19866880791597
  misc_feature (1)..(1): n is a, c, g, or t
ntctgagtaaagtcgagttcctttagttattataatatgtacaaattgcatagtaagagaattttctactaaataaacagaactgattttttttcattctcaaacaaaaagtgacatcatcaggtgacagcccttgataatctaactagattaccatgaatccactgtaaagagctatagaaatacaaaatatattctaacacacttacaatatttaacaatgatagacaaaacattttatttgctcataaaatgtacctgtaaaatagtcactctgtgatgggaaaacagaacagcagctaattttgatgggaccattttgacagaagttggcacaataagcaaagaggcaccacttgacaaagcaacaaatatttccaccacagaaggatcaaaggtcagaggtgaagccagaaacaaaacatcctcatgagtgatttcaaaaagcaccctaaggcaagagagaatgtaattatgagaaatgcctaacatttagtaaacatatatcctaaaaaagtatttatgatcattaagtttccagatattagcccgatttatttttctctcttaaacaaaatggtgctattaattctagaactcttcttcatatatataagggttaaaagccattttaagcaatatctactctttactatgacatattttatgcacttaggcactacttggagggattttgtagatataattaaggttcctaatcatctgactttaatcaagagagaggttatcctggattggcgggcttttctcagttggaaggcctttaagagagtgtttaggggactcccccagaagtccagtagttaagactttgtgttcccaatgcagagggcatgagttcaatccctgatcagggaactaagatcctgcatgccacatggcacggccaaaaaaaagagagagcgtgtttaggctttctctgaaaagagactccatagagcagctgggtcagcaattattctccctttcccctggattctctttcctgacttgcctgtagacaagcacatgcccactggggttcagtctattcacaa

SEQ ID NO: 38495 - DNA, 448 bp, Bovine  19866880801331
  misc_feature (1)..(1): n is a, c, g, or t
ncttgttccttgagtgaaatatggacaaaaactaagacatcatttagttcatgagtaaagaatcaaactgtgattcaatggcaagtgtttatgtagaagagctagaaattgaacaaacatctaaaaactgtagggcagttaatcctgcgaaatcatggcaactatgaagtagttcatctttaaaattatgacaagattagagatgataagtatgtgaactctggttgtacatggaaatagatctctgaaataatgttgactgaaaacaattagaattcaaaatagtacagttatttcaactatggaaaaatacaagcttgcctactggcaaagatggggacttaatttaaacctatgtaaatagtgcttatatttacaagggccttattttctcctgagttgtgttaatgataaaagtcaattgcagaggtagacagtttggggaggg

SEQ ID NO: 38496 - DNA, 1923 bp, Bovine  19866880933912
  misc_feature (1)..(1): n is a, c, g, or t
ntgattttaggccttgaacatcaatgtatttctcccttctccaatctgtagtctgttctgagtctctcagaagatgctttgaagattcctgatgagtcactcttcttaaatagtggtggagattccttgaaatccatacggcttctcaatgagattgaaaaccttgttggcacatcagtacctgggcttctggaaattattctcagcagttctattttacggatttacaatcacatccttcaaacagtgttttcagataaagatatgacacttagcaagaatcatgccatgaaaagaaaattcaacgttactcaagaggaaaccagtggaaaatctttacgtcaggaaactgtcatgcctttaaattgtgacaaggagatcaatgcttttattgcactgagcagagggaatcagattttgtctttgaatactgataagtatttaactaagttgggacattgcccttcaacctattcttctgatttaaattcacagactgacattcaaaatagagaaagcctaaatactccacctcttattgggaagtcagaagatccatcctgtgttgtggaagtttctgaagaggaaacacctgtgattagggctgagaaaatggagtttcgtgtgaggtggaggtcagacacaggcaaatgtgtggatgcttcacctctggttgtaataccagctattgataagtcatctgcaactgtgtacattggctctcattctcatagaatgatagcagttgatctttactctggaaaggtgaaatgggaacagattttaggagatcgcattgaatcctcagcatgtgtatctaagtgtggaaactttattgtagtgggtaagtttctgaatttgaggtttatagagttaaatggaattaccatatgaaaatatcagtagagccaagttaaatttaaaaaacctgtgtttagtgggtttggtttctgtcaaagaataataattacatgctgattcacagtgtgggccttgggtcagagtttctgggtctgaacctagctctaaggctattacccgctctgtgaccttcaacaagttgtggaactccctagaacttcagttttctcatgagtatatgggcataataaataaaacatggtgctgcatcacaaattattcccaaacttgatggtttagagcaataaacatttattatttcacagtttgtgtggatcaggaatttaggaggagcttagtggaaagttctggctcagggtttctcctgtggctgcaaccatgtgaaagcttgacttgagctggcgaaatctgcttccaagatggcttacagtgcggctaacacaagaccagttctttgctgagttttgacaggaagcttcagtttcttgccccatgggcttctctctgagtgatccaagagagtgagtgaggaaaaatgcagtacttttagtgtctaaagttgtaaatcataattcatgctttattctgttattagaagcacatcatttaagtctggcccacactcaaagggaggggaattggctccacgtcttgaaaggaagagtatcaaagaatatgtgggtatattttaaaactaccacaatgatcatagagcttctgagaggattaaatgtgataattgcttgtgaatcctttagtacatacctggtggctcagacagtaaagaatctgcctgtaatgcaagggacctgggttcaatccctgggttggaaagaactcctggagaagggaatgctgacccactgcagtattgcctggagaaatccatggacagaggagcctggcgggctacagtccatgtgattgcaaaaagactgagcgactaacacttttactttctttttcagggacagactaagtgctcattgagtattagctattacctgctactctgtttccctaaggtgcaggtgactttta

SEQ ID NO: 38497 - DNA, 1822 bp, Bovine  19866880952159
  misc_feature (1)..(1): n is a, c, g, or t
nccctgaatgttgtggtgttatgtattttatatataaaaacaaatggaatatcaattactagacagtcatgcactggatgcttaatccagatgggttcatccagaaatccttcttttttagtagtctggctgcttgcagatttataccatagctctgctttctgtcagggggaattttcagtgttaagctaattggttgtcctcttcagctataaagctgtgtgtgtgtgcttgttcatgccagataaatataatcaattacttttttgggcttaaacatcaatgagttctgaggtttgcagagttgggacaaaccatacaccccattgtagattagagatctttatctttaaaccacagtcccagttaatggagactagaatgacatggacatatttgaagattccgtaaaaggaattactaaaatttcagacgtttatcacatgtatcagctagttagcctttccttagttagttaggggacaaaaatgcccttcaagtgaattatcattttcctgtgttaggaactgaaccctacaactggtaaacattttcataccttttctaaaaatttatgacatttacctgatgaagttgggtcacatagggagtctcctgactgcaaaaatattctgaagaatcttttggttctgttgttctttgagtaagctgatttgcagcggtctcagaagcagttttcttaagagatacagatgctggttctgcaaaaagtatataacgtatcactagaaaggcacttgggaggtagaggggagggatgcactcagacaaacctatggaatttgttcccagttgtcttcatttagtttgttgggaaacccaggagtagattatcagagaacttgctttgaattgccatattaaggctggggttaacttttttgatttttatctcttagaaataatagccaaacatgttacattcctctagtgttttacattcccttagttggaaaagtgacttatcccccaaaggatcttaaggtactactgatttgtcgttctggtaagtgttgggaacagcctctttaacataagacttgaagtctaccaggtttcctagtaatagtttgatcttgggaaagtctcctaatttctgactctgtttctcacctgttaggctaggcttgtatattttaaagatccggtgcacaaagtcagtgcattgggaatgatactttcgtgtggttaatccttagcagtttcccttttcagtcacacatccattaaagggcattgagagaaggaaaacatgaggcaactcatctgatttgtaatttatgtcaaaaaatggagaataaaattttcagctttcgtgagatataagtgttgttgggcagggttggggaacagtggagtcctgctattctctaatattttattcgaaaaatatttgttgagctcgtcctgtgtgtatgcagggccctgtggttgacactaggaatactgtgctatacgaggctgatggtccctgcccccacagagaggcagtagagcaacagagcagacttgttcatgcctccatttcctcctctgtaaatgggaatcatggtatcactcacctcagagagttgtagtagggattaaatgtattaatatataacgtgcttagaacactacctggatatatgcataccctgtgaccctgcatcccactcctgggtgtgtactcaacagagatgcatacatatgtttattgggagacatgcacaggaatttgtatagcagcattattcttagtagccccaatctgggaacattggatagagaaagtagagggatgtatgttcctattatggaa

SEQ ID NO: 38498 - DNA, 880 bp, Bovine  19866881007261
  misc_feature (1)..(1): n is a, c, g, or t
nttgggagaatttctcttcaaattcaatgtctctcttcttatcgctagaacaattttaaagtgctaactttatataaagcaggcaaattcttcaagtcatttgctatttaagtaagccaatttttatagggctataaacgaagaataaactaaagtgaaacaggaacacagacatgaggaaaaaactgattaagttatatagctgaacaaattgacagattgctctaataccaccttggccaccttagttcaattaaaagcaaaaacagattaaaaaaaaaaaaaagctcacagatttagaagtctgctacaataactcccttggatttgctaaaatgtgtacatcagtaggtacacggagtccaagaaaaagagtgggacttaaaaatcaagattggacagtaattaattttaaaaacaaaaggctgtctactactccaaatgaatataaaatgtcagagaccttatacactaagaactgaagccttgaccagagtttcattactcctgcccttgagctgccttttcaaggaagtatacattaaccaaatggcgattgaggtgtttgctgtaatccttttcctttcgaaaagaacgatcacagaagatacaaacgaaatctcccgcggccactttgacagccaaggcatcctttccatctttcccactggtctcttgtggaactggccgagcaccgttcaatccagaatcgtcactgtcctctgacgtgttgtcacttaggtcacttccatcatgactgtggatgccttcgtcttcatccatttcctgagactcatttactgccacggtgacaggaggtgaggccacagcagttgtggacacggcttcatgtttttctagcggtagagcaggaagtggt

SEQ ID NO: 38499 - DNA, 1111 bp, Bovine  19866881008508
  misc_feature (1)..(1): n is a, c, g, or t
nattgtaaggctctagtcggctggactagcccagtcggggttcttccttctttgcttgcgcgttttgatctcccagagtctgaagctgttcttgtggtagaactgtgtgggatgtttgctagtcctagacctacaatacactttgaggtttcgcggggagcctgcaaccaccacaagcttttgtttgcaagagcagagctattgggcagatggtgtatttgaacgaaatcatagctatgggaatgtaaggattcaaacccggggaggctgaaccggttgatgttcaaaaggaactaccggttctagatcttatgaattccaacagataataatccaatcacggagaagtagtgaatgtgcaaaaaattctttggtaaacattttagataatgaatgaaaagattagtagtaaggaaatgccaaaataattcccttctttaaaagagggagagaacctgtatgacaaaatacacactgactttggaaaactgataaatcttttgagttaaaaaataactttgcttctgtgatctttccatttcctactaactgaactaagttttaatataaacagttttcttcagggtaagaaatataaacctaagcctgacatcactgaaagtattacagtttccataagaggatacctcagcaacaacttctagaacagttaaggaacttggtgataacacttatcagcaatatgggcgaaatatgtataaatgcattccaaatgattagctttacctccaccaaacttaaagtagaagtaggctttttgcttttttcagaatccagaatagttgggtttgagtttcacatcttgtatattccttgtttactaaaagctgagagtaatttagaattctaggatgaatcaaaaagaatatttttaatttgaattaattttggataactgtgggttgaccataatagagatcttattttaaagtacatttatgttattgagaggattatatatataatacaaggaaaaactaaaagctattcatatggtactccataacaccatgagtttataacattcttcagagaagttattttggatatcctgtcagggaagaggtgtacaaacacaagggatctttag

SEQ ID NO: 38500 - DNA, 1544 bp, Bovine  19866881025522
  misc_feature (1)..(1): n is a, c, g, or t
nattaagggagtaattccaagaataactttggcactagacttaagactggaaaacaattctccttctcctttgggcagtgaaaatgcctcaaggacagtaaaatgtgcaggagaatcaggctgagggccatttttcctcttctcctctgccagggtccacgtgtgtaaaacacatgaactgttggctaccttcctgagtttttactcagctgtttatagcaggcctgtaaatatgcacatcgtaaagttaaaaataaagccaaatagcaagacttcagagtgggagagacaagaaaatacttatactttacaagaattaaactaaaattccaacctcaactatataaggtaagttttttgaatcctaagaattatattttgcaatattgagtgtatcatttttgaaaaagccacatctttttaatctacttgggttaacactattttcaaatttatctttcttacagccattacatagaatgcaaagaagataaagaaacaacagtgctaaaatgtattcccagtaaattgatacattctctgtggaatctttttgcaaaaacggaatatggattaaagattaaagtaatgtaccaatggttataattcaaagtaaaagtgaagtgaaagtgttaatcgctcagtcatgtctgactctttatgatcccaccaggctcttctgtccatggaattctccaagaaagaatactggagtgggaaactatcccttttttcgactcagggatcaaactcatgtctcctgcattgcaggcatattctttactgtctgagtcaccagggaagctcaaccaatagttatattcaaatatattctaaaatacatataattgtactaagaggtaaaggagtattatgtatgtaatctacaaatagttcaagaacaatattatgcataatgaagcatccacatatatgtatttatagagatagtgaattataaaacaaatgtgggaaaatgataaaagttgatagattcattgtaatgtactgattgctactgatttgttcactttaaaatagttaattttatattatgtgagtttcacctcaatggaaaaaaatatataatggatttgagtgaaggtataaagggtgtctagaatttttctgtattactctgcatttctgtattattctgtattttctgtaagtataaaattatttttaataaaaagttaaagaaacctctatagaaactatagtaagtagctcagcagagagaatttaacttggaaattaaattagttatacagatgttaaaggtctgaaaaaagcaaagggaccctgaggtaactgaggtaaagcctgcgggtaccatgagccatgttctaggaggggctccacagagctgagactcagacctctgaggactacagtagttcagagagctggaaaaaagtctgaaatcagctgctactaccgtcagggtaaacggccgtgcatgcgtgcttcgactcttcagtcgtgtccagtcgtgtgaccctatgtacggtagtccgccaggctcctctgtccaagggatt

SEQ ID NO: 38501 - DNA, 1724 bp, Bovine  19866881064463
  misc_feature (1)..(1): n is a, c, g, or t
nataagactcaagctatttacaaggtaaaagttttaataacaattgattcaatatgggaaatatggacagttaaggatggtgcctaggttagaagtctgtacccaatgctattccctctcaatttagttgaatcggcatttatttatttatggccatcccactgtggcttgtggaatcttagtttgccaaactgcccccctgcaatggaagcatggagttctaaccactgggcaattagggaatcccctgaatcatgatttattacctaatttgcttttctatccattaatagaaataacataacattatagaagacaattgctaccagtgccaaaatgcttgctataaattcatagatgaattcagaagaggctgatgaggactgagaataattcatggaattgaaatttaagagtatggaaaactacacatctaggatggtgctgtccaataaagaacagccactagccacaggtgcctatgaaacatttgaaatgtggctactccaaattgagatgatgtaagtgtaaaatacacagtggatttcaatatttttttaaaaactcgcaaaaatcacagtttttatattgattatgcgttgaaatggtactactttggatataatttagaagtaaaaatagcacaaactatctttcctgaggatcctcatcacgcatggacaaaacgattataaatatgtaacatgataaatgcaaagtgaagcaagaaactttttgcctggtggttttgaaaagagtcggacacgactgagcggcactttcacttcactttgaaactctcattggcataaaatggctaaaaacaaaatctcgacaggaaatataaaaattttcagaaggttcaattattaattttctgaaacaggctattattaacctaaagggaaaagcaagactttggtttcgggaatcaacattagatgttcctgcgtttgttttgcaatacctattgattgcaaacgcgatttgcaggtatctctctaatttctggccatcactcgttccaatgaccctttgcgccttttcctcattccatgagaagttctggatgttacaaaaagttcggaggccccggagcgctttgtttccaacgcacggctccgcagcgtcagggccacgtgcccgcgcgcccagtggcctagagaggaggatgcagggagacggggcatagtccggggaagcatgccgtggggagccaagaacagcgcacaggccagcgtgagagaggcgggaagaccgtggagtcccaactcctgcggagcccaattaactcaccttcgactgccgccattgtccggagaggtctgaggccttcggccgcgctgcgaagagacgcaggactctggaaaagaaacgcgatcagagaggctcacggggccggggagcgaggcaccgcccacaggcacgcccctggcatggccacgtgacccctagcgccccctccgggtctcttcgaacatctccgcggccacggaatgtcgcgggtccctaaccttcccagaactcggaccccggagcaaggcttcccgccgcgcaggcgcagcgacgcgggcttccgccgccccgcccagcgcgggcgcagttcttgtaaagaaaaatggcgcgcactggcagcccctccccactttactgccgctcgctgaccgggcccctcctcgccagagagagcggctcagaagttggagcataccaagtagtgacgg

SEQ ID NO: 38502 - DNA, 1735 bp, Bovine  19866881072829
  misc_feature (1)..(1): n is a, c, g, or t
nttctccaggccagaatactggagtggatagactttccccttctccaggggatctttcccaacccagggattgaacccatgtctctcacattgcaggcagattctttaccagctgagccacaagggaagcatctatgggtagaactactgtgatatcatttctggaaacagaaaaaaatactgttttaaaagattttcaaatggaattatatagtctgtgtcagtactccagattgtgtcaggcagtcctgtcaggctattcttctttgatctgaatcccttcctttgcaccaataccacatttatttcttttgattctactctgttctccctggagagcattttgtggggatgaggcggtcctttgagaatcactgccctcccagcaggtttctcatacctagactaaaccttggacaatagctcagacaggtaatagattcaccctagcaatgtcctattctggggagacaaaaaagacacaaccactgtgttttatagaaactttccattagttcgtgcaccagatactggtagaataagcgacagcccaatcctgagagtccaagggaaggtgatttaaatttcctccagtgtctgggatgtattatctctttgactaataatccctgggttcacgtgatgcggaagttggagagaaacctcaaaggtgtcctttgtccttttatggttgggcatcattttgtaaggtaatctaggttcaggggttacaaacaccttagaaatccaaatgtttcccacataactcactgtccacagccttccaggagagtcacaggagctctactgcgaacacaaaggtcactcctgaaccaaaaacattatggctcagattttatttcctaaacacagccctctgggcaaatactgctgctttttggtttgtttgttttagcaccaccaagtctgctgctgctgctaagtcgcttcattcgtgtctgactctgtgcgaccccagagacggcagcccaccaggctcccctgtccctgggaatctccaggcaagaacactggagtgggttgccatttccttctccaatgcatgaaagtgaaaagtgaaagtgaagtcactcagtcgtgtccgactcctagcgaccccatggactgcagcccaccaggctcctctgtccataggatattccaggcaagagtactggagtgggttgccattgccttcaccaagtctaacagtggctaaacctgtgatttttttgtgtgtgtactatttctcaataataaggagagatgctcttcatctcaagaggttatgtaaatgcagggaaacaacccctccaatcttgaagatctgggtttatttggtcactgctgccattttctagtttcttgggacctcagtttccacatctgcaaaatgaagcacctaagctctatatgagggtccctccctgttttaaaactctaagaatcatttctttaaaatgtcagtgaacttcaggggcttccctggtggtccagtggttaagactctgcctttcaatgcaagggacaccagttcgatccctggtctggaaagacattacatgctgcagagcaacaaagcccatgtgccataactgctgagcccacgctctagagcctgcactctgcaacaaaagctaccacaatgagaagcccatgcaccacaaccaagagcagcccccacacgtaactagagaaagcccacatgtagcaatgaagacctagcacagctgaa

SEQ ID NO: 38503 - DNA, 1881 bp, Bovine  19866881114465
  misc_feature (1)..(1): n is a, c, g, or t
nccagggcagagctccaggtaggggatttctcatacagctttttcacactggtcttaagtatgtggcgtcaaaggaaacaggctcctgaatctgcttttcagctcaggcttgatgtcaactacttggctttgagactatcaaaaaacactggctccatttacattctacctaaaattcaccctttcctcacatcctaatataatcttgtctcgtcttttgtttagacggctcttatggtatgcagtcttcttgctacaggaagtcaaaaaacctcatcttgttggaccacaggcaatggaggtggagcaggctcatatcaccttgttaaaggctcaggaatttaacaagccacttgatatcacattggtaatttgaaattagccatggttgggagtatttacaccacagaaaaggacaaatactacaaatcacaggtatctctaatccctgaagacctgactgttaaatgtgtatcatcaccccactgatagtgggtatgtttctgatgatatttatccatgtcagagtttatgaatggggtggcaagacagcttgtgctctgaaatgcctaaaatgctgtgctagtttttacactggaggaaataaaacatgctttaagggaaaaaacctttaagtacacttaagtagaaatggacctgttctctctacctgtcactgatgtaggaagagtgttggcctttttgagttgttctctgcgctcaagcctggacactggtgtctctggcttcttctcttctggctgagtggtgggcttgtgcagggaactagctctgctgacgctgctgcttccaggctgtggggtgacactgacctgcatggacagaaaatcagggaaagcatgtattcatcctaaagacagagaaggactgaccatgcaaggcaaagctgcttagaggtttccatcagctggcccccatcttctgctcccagaggaggagccagactgcacagggagcagtgtgtgctcaaccctggcccccagccaaggagcagctcagtcaaatgtcccaaagaagggatgctacaggctttcccggaagagtcccatcaaactatacaatcagagccacagagcaagactcctaatttcctctcgacccactgcttaaaagaaagttattttcgttacttttcatataactgttgtgtgcgaggattctgccaaatcaggttaacctaagagcataaggaaaccaaatcaaatttctaactgaaaatacctctttggcttaacagtggtcaactgatttactgctctaccatctaagtattttccaccattcctggccagccttttctcattactgttgttttaaatcctgaactaaaagaaagccaagcttggaagttccctggctgtccagtagttaggacttggcactttcactgccagggcctcagttcaatccctggtcagggaactaagaccccacgagccttgtggtgctcaaaaaataaaagagagagtgagccaagctcagagttaaagccgaagaccaggctacttacttgttctctggcgagcttctctgcctgtttggcctccctggcctgcttcctctcttcccgagttgcctgctgctcccgaaaccccttctgtttctgcagcgccagcgttatccacagtggctggcgcggtctcaaccttctccacaagtttggagccatctaaggagtgtctgctctgaagcattggcttttctatgggggaaaaaagacagactgatattgtgatatactataagaaatacatatttgatctttgtccctgtttctggcactgaattcctaaaacccttgcaatgtcctaactgatgagagcataaaggtctcttttgttctgctaaatgaggtgattc

SEQ ID NO: 38504 - DNA, 1582 bp, Bovine  19866881191339
  misc_feature (1)..(1): n is a, c, g, or t
naaaaataatttttatcactgtacaatatgtgaagtggctatcgggtactatgtacaaaatgtcttaaaaacatgttttccagttgctcagtcatgtccaactctttgcaaccccatggactgcagcatgccaggcatttcctgtcgttcaccatctcccaagaggttgagcaaactcatgtccatcgagttggtgatgccatccaaccatctcgtcctctgtcatccccttctcctcctgccttcaatctttaccagcatcagggtggcagattatattttccaaagatggccacaacaacatagccccttatcccattatgctcttcccacaatgtggtcctgatgctgctccgttgagaggtgggagtctacgtgtcctccccaacctgcatgggcctctatagtggaagtgatgccgcacggattccaaggccaagttaaaaaagaccacattgcttctaccagtgctctagtggcacacaagcctttggagcccaagctgccatgtgaggagcctagctaccctgacgtgacaggctaaagagataacacacagatagagaaaaatgctgggcagtcccagctgttcccacaccaggtatgaaactcttccccacccagcaccacagagctgagtaaaagccttcagaagagtccagcctcccggctaatgtcaaatgaaacagaaataagccaccctaactgaaccctgtccagactgcagattcatgagaaaaattaatgacgtttgaagtactaagttttgggtagtttgttatatagcactaaataattaaaacatcatatatattactaggttaaaaggtatatgtattcatacatatataatatatagatagagttctggagtagttatatagtactagataactagaacactattatatatatgctaatacattataatatatattactgcatttaaagatagctatataatttatacatatgtatttacatgtcagtctatctatctatgtataggtgtatacatatagatatcttttaacctagcaatttcaattctaagaatttatgttaagaaaatacttagaaactatgcaaaaatgactctagcattattcataaaatgaaatattttgaaacaatctaaaatgttcggcaatacgcaaatgattaaatatatttctctatattcatatgatcagttactaagcagcaacaaaaaggtgatgatatgaagctgcagttggtgacaagatagtgagtcatgaatcaaaaattataattaaccaaattctttgtgcctaaggtccatttttcttactagttttttataggaccttatgtgcaaataaatggaccttgggtgtaaaaaactagattaatcatattcatcagtagctcatgcctggctcttttaaaaattttttattcatacaaagatattaaaggatatttacatgcaccctcaccaggcaactaaccctccctccctccctccctctccttctctctctctcatgggtagaaaacagtcccattttttacatatctaggttataaacttcttgtcgtatgttgcaaatattttttt

SEQ ID NO: 38505 - DNA, 2929 bp, Bovine  19866881205619
  misc_feature (1)..(1): n is a, c, g, or t
nttctctctagttcttttttgatcccagtgcctggagctaagtagattaacaaacctgagtagctgaatgaactgatgccaatacctaaatatacaccagattttgtacttccaattcaaagttttaggaagattttaggaagcactccaagagattggcttcctttgttgtggattttgtgaggctataactacttttatcacagaatttgtacaaaggcgtgtcagtgggcagcgattttgattactatggctattcaaacattggtcctcagctgttcaaaggaacaaacaggccaatgtttaggagccctgcttattatgttcctgacccagctactcaactagagcaataagatggccagacttgctgatgccgtatttttacacttacattacatggatcatatgttaaaaatatctactaaagtagtaatctcatttaaaatttagataaaacccaggagaccaaagataaaggctgaccctctaggaaaatgctgccttattagtcagtttacaagattttaaaattgagggtcattggtcagacttttagtaggagaaaccagagtgaagttgggggcaactatttaaaactacaaaagtgcaagtctgtgttgacaagcaataatattatattggaaaagatggatttaaaagaaacaaccagcaaagcataaaccccagtcccctaaagatgttaaaaacatttatatgaggttttaagtacaaaaggtcaacttaatagtctgtttccaaacgtgaaagaagaattgttgattccacatgcagaggaaaagctccagctgacagacaggccccttccaggagaatagtctcaggagacagtactgagattcttctcttgtgataaataactcctgcctgatgaatacttccttattcttaaattatcatatagccagtgaccttagatgtagaaggaccccaagatccatgttgtccaaattctcactttatagatgaggcttggggatggggaggggatggttaaacatttgcctactcactcatcattgccaggatgctggcagaaatggaactagaactgtttgaattcatctccttgtactttattaataatcagaaaaaacagtatctgctctcaatcagctggccgccatttaaacagtgtgaagctgagcgattagaaaggcgctgagcaaaagcattaagcatgaacagctgcatttcccaagcagaagggcagcacacagtttagttgtgggaggatgtccaatttgcatgaatggaacatggacaagataaaaccggctccagaaaagtaattcccccaattcccatgagccttggatttggcaaagtgcagtctgctcagggattctgggacgtggcaaatggtcctgggtagaccctccccagatgacctcagcccacgcatgcatggaggctggtcaaggtcccaggtgctggctcacccgcagcttgtggttgagacagaaaaacaaagaaaaaaagtgttccccacacatgcacataagcaaaaactatcttcccatgttctctgccaagagagctggagccaaagagaggagttcaagactctgattcatccatcaagacaaatcaactcagtctaaggaggttaggaaggcaatttaggaagtaaacaaaagttgggtttcagaaagaagctttggagaaaacaaagactatccctggaatccaactccataatgaaaacagaaaagggctgctacggcagcgaattctgaaaatgccaacagatggtcgcattcaaaggggcagctccagaggcaaatggcatcaagatgtcagccctcctcccacgtggagtctggtttctgagccagtgccttgctgagcagaagaagcatctctagtgaagaaggcctaatagcactgctcgagttcagcaacagcaaagtgagattggtgagaagtgctccccttcccggagtgccaggctcctgggctagcctggagcatccatccttgtgcttttacctctatcgcttttctggttgcctggccagttgttcccctgtctcccctccctccctcttggcccccatgccagtcacagatgagagttatgtccacatgctctttctctttgcctcccaggcatcactagagtatctggtctgggtctgttcatcccttctgcaacatgactttcccatttccttatcaaatactccctttttaggtgcagccaaatcctgctgcccttgaatgtgagctagacttagtgactcccttctaacaaacagaatgtgatggaagagacaatgtgtgaattctgagactaggtcattaagggcactgcagcttccttcttgcttctttttagatcatttgctctgggggaagtcagcctccatgttgttaggatgctcaagaagtgcaatagagatgtccatgtgatgaggaactaagtcctcatgacaacagtcaagtgagtgaggcaagctggaaatagaccctccaacctcaaaccttcagatgagtagtacccactgacatcttgaccgcaactgcatgagagacccccaagccaaagaccacctagataagccagtcccaaatttctgacccacacaaactgtatgagataacagatattcatagttgctttatttaggctgcaagttttggactaatttattgagtagcagtaaataactagaatgcaacatctttgaactttttagttgaaccatcaactagaattgtcccttgttcatcatctctttttagagaaagagattttttttgttagttttgcttttgtcataaagtcctttcctcaaaggttagggcaaaaccactcatatttataccgaccagacctcatggacggaggagcctggtgggctgcagtccatggggtcgctagagtcggacacaacgagcgact

SEQ ID NO: 38506 - DNA, 827 bp, Bovine  19866881226685
  misc_feature (1)..(1): n is a, c, g, or t
nggcatcagagagacagacaacaggacaaagattaagagcaggcagaggtgctatctgttggattcacatgagtctgaagtcttgtttttattgtttaagcattactctgacatttgagagaaaacaatccctcggggaggagaggagccaagagaaaatggagcagtctgagaaagaatggaaatgattctgttgctccacaagacacagccaggtgggagggaagccagggtaaatgatcagaggctgtctacaaaacagctcgtcttagctggagcacaggggtgcctattctgtgaagcaataagcagtctgccatgtctggcaccactggagctccaagttagtcatctgtaggaaaccagccttgatttccattttgcagagagtgagtgagcaagaagcacaagcacacaggattgtgtctgttctctacttctcggttgtcatggcaagtattgcaggtaacagacaaattagacactggggaactacacagtaaagccccaatgattggtagaacttgctgtttatggtgattagaaatacaaaatacatcaaacttcactgaaactttgaagaaaatgctattttaaaaggggagaaaaagaagatggaacgtcaacccctattctgtggacatgaggggctgtcctgacaccttgccgttaacttctctttccacctgcatgcatgctgccatggtataaatgattaatgctggaagggtactcttcatactgagaccagtggattaagaagtattagtaagttgacttatactcagaaaccaacacagtaagagaactttcttatagcaaatcca

SEQ ID NO: 38507 - DNA, 737 bp, Bovine  19866881235381
  misc_feature (1)..(1): n is a, c, g, or t
nttgtttgttttcttttgtttggtggatctctgaggcaggtttcagggtttggcaatgcaacatgaaaaattaggaaaaagtattaaactgtgtgtggaaaactagttattctgagagtgggtgtttaaggcaaaggacatttgaacttggaattgactgggaggccaaagatttaaagaagcagaaaattttctcaagatatgagtaagttgtgtattactgttgtgtgttttctgtacataatagggatttgtaaatgatgttgaattctaggtgaattctcagctccgacaatcattgtcaaacagatcaagctgcagatatttatgttttaaaacttaaattataaagctagttaaacctttctaacaactagatttaatgttcactagtgcattttatattaaaacgttaccttttccagtacatacagaaatactcatattaagtacaaattggagattgggaatcagtttggattctttgatacctcaaaagaaaaaaaattgactcctggggaattgaacgtattttcttatctagattttaagactagaatgccaaaaccaaaaatacaaaagaaattaaaacccctcattaaagtgatttgtgaaaacattgttactggaaattgaatggacttgaggcctttcctccagaaaacaaggacttgtttgtcaggcctatattaggttctgaaccttagtgccatgtatttgttcttattggaaaatca

SEQ ID NO: 38508 - DNA, 1698 bp, Bovine  19866881367525
  misc_feature (1)..(1): n is a, c, g, or t
ncttgcctagagaatcccagggacggggggagcctggtgggctgccgtctatggggtcacacagagtcggacacgactgaagcgacttagcagcaagcttatacggaaatggctgacctcctaggctatcttgccctgtttcctgtttactctttgaagctctataaacttgctgttgctcagactccctctgcaagagtgctctattgtctgtctgtaaggcaatgtactcctcgatccatggatggttttggcatggaccagtttccatggctaaactgatttcaaatgccttgaattcatacctatgccccaaaggttttaaagtattgtttcataaaaccacttattatcaatatcttcaaacatctcaaagtagagaaaatagggtaatgaagttcatatatccatcatttagtaaggcattgtttttttaaaattaaaaaaacttgatgagtcatgaagtccatgaataaaggtagcaagagaaaaatgcacaattggcttgtagtcctagctctgctatgaataagctagtactgaataattcatggtgccttgttcactgagacataaaacctggaacctgaaaggtatgtgtggggactctccaggccttgtgtcctatacttagattctaaagttccgctatctacattcattaagccaccattatctcttgccttagctaaaatccctttgcccattcctgctcttctacattccattcttcatctggaggcctcagaaattcagcttttaaaaatgcaaatcagatatctgatcacgtcattcctgtgctaaaatcccctcccagttttctcatttctttaaggcaatgtttgagctgcttaacaagttcaataagaagctgcctgacctgggctgctatctctcctgccaccaactcctccacactggccatttccagtatcagactatttccacgtgctgtttcaactacctggatggttcttccgggcctcagtacctaccccgactccaacacagacccactgtgcttgggcaacttgttctcattttaggaaccccctaaaatgtcacatcttccaggaagccttcagtgaactgcatcaagtcctactaagcctctgtgtgctctcttaccacctgttacttggatgttgtagctctaaacactattttaattgattagttacttgtatattaatttaaaaaactgatttccctcaccagactctaaattccatgtcagttttactattttggtcaccttcataaatccagcacctagcacagcacctggtacagtataggccctcaaataaatatctgtggccaaataattagtccctgctaagctttaggtcctggtttcatggctcagatgataaagaatctacctgtaatgccggagacccaggttcaatccctgggtcgctaagctttagggataaaagaagctcataacagtggcgagggagaatttcatggaaaaatgacaatgcatttctagaagtgttaagatggatgaagaggtgcatggcagcaaaccaggcctgtttaaggagcatctaatccagtctgggtcaagataggcttactgaaggggacagtgactttgtaggggaaatccattccacaagcctcctatagagtcctataagtagggagggatgagtagggggagggaactttctcagtaccttttagaat

SEQ ID NO: 38509 - DNA, 1316 bp, Bovine  19866881609259
  misc_feature (1)..(1): n is a, c, g, or t
ntggagaggcggggacaacagccatcctttactctttggataatggaagaaaaaaaaagtctcagaagatttctgcaaatgagctccactgttaattcacagggcacagcccccggcgcctgagagagtccacgttagagggaaggagcctggaatcccggggtgacagtacagtacttccagaaccaaacctggcccaaagtcaaagctcgaggccatttcttcaaagaatgagttaattattccctctgaatttcagctgtccactgctttgggtcttggagctgaataaagaatctaactgcagggacatcttgcatcagagtcctgggaaagggacaaccttcccttggggcctggaaagttttctggcataatccgcattcaaagggcacgaagtctcccctcttgcaacaggctatttccagcccacaattaatttcttgaaacagaaaggaaatgacaacagcatgtaagagttttcccactcatctcaagtactgaaagctgatttttaaaaaatccctcagggtagttttattttttccctttgtaagaataggcaaaacatagttttgaaagctctaaatatatttcttgcttccttccctctaaagcctaggtctgaaaggaagcatgtctcttggccaggggtcttagtctcttctgtggctaacgtggacacagtgagtaaagtggggctgcgtttgtgtgtactgctggctctgtttccgatgcttccttgtctgtcctcaccaacacaaggcccctcaccgcatcttgggctccctctagggccctgggacccaaagaacttggacaccatacagtggatctggctcaagcctgagggccccgtgaggctctgtccttcccacacagacttggcgggacaacctcaaagctcaggggatctcaagggagtgttctgagaagaatgccccagtgttcagagattggaggggacctggaacaaagctgcctctcacgtagcaaaaccacatgaggaatgcaagattcctgtgagattcgagtgcctcagccttgcaacaagccacttatttcaactcgcagccacttctctatagatggagcaaggagcagggtcattggtcttagccaaggcagtttctggagcccacatggaagaactctagcctgattttctgtcacatgtcttgaagacatgctatggattctctaacagcctaattttaaaactaagatgtccttagttttaatatagtccagtgtatcaaatatttcttttagattgatgctttttgtgtgttagatttttgttttggcccagacca

SEQ ID NO: 38510 - DNA, 806 bp, Bovine  19866881798643
  misc_feature (1)..(1): n is a, c, g, or t
naaactcatattagtaatatgttggtcttactggaatattctctggttttcttttttttttttcctcaccctgctcatcgttttttatctttctggaaatttctgcagcttcatcttccaaaccttttactgaacgatctacttcataaatgattaatttccaagagttctttcttttctctgaatgaataggtttctactcttttttttcacataggctgtgtctttctcttatatctttgaggatttaactgttttctttgaagttttcttctgctccctgcattgctctgatgtctttgagttctcttttcctgtttgctcactctggtctctgtctttcatgctggatactttaatcaaaggttgagtgattcttagctatctactcatattttaataatgaagcatgaaaaagctattttgaagctagcatatgaactggtagacttcacaatgaagtatctgagcaaaaagtcaggttaattttttttttaactacatagtgtattaggttataggctaagttgctacaacaaagaggtccccaaatacagaggctcacacaagttaagagtttacttctgtctcttttaacatttcatagttgatggttgttcccggctgctgctgctgctctttctgttctattccgctgctccactgtctcccagggtcttgtccttcccttatcagcaccacaaccacatcccaccctagaagggaatgagggaaaggggagaaagaagtagaggctcctcacagggctcagaaaagtttaatcagcagtcacacctcaccgcaag

SEQ ID NO: 38511 - DNA, 706 bp, Bovine  19866881869302
  misc_feature (1)..(1): n is a, c, g, or t
naagtaaagatgtgtttggtcgattcttttagccagatgtgtaaagccaagtgacggaacgaacagcagtagctcagaggcatgtgtttgagcctcagctctgccactgattattccactttcaattctgaataagaactggaagacaaaggaaagttccttagtctctctctagcttatcttgctcatctaagaaatgtgcttctcccagttctataataaggtccctctcttacagatggaccagtacaaaaaaatcaccttccacatctaaaaatcatatacaggtagttcaaattcaaagagcactcccaccgcccaccatatcaagttatcctcacattctttatcccacattttaacatcttcatttattgggaaacactacactacctcaaaattagaaaataaaaccatatccatatgtgtaactagttttttatcttttttttttttaaacaggtgaaggtgctgagctgtaaacctgcagaatgtattagtctgcatagctaaaagtagtcatgggtaactacagcctcctgttcttgcctagtaaccagtttcttttcatccagtccactaacacttgagctatattcactgattttacacagtgaaatacgaaattaagataacacaccaagactatctacaaaaatttattgtctatttacagaagaaaagcatgcgtatcattaaaacaaat

SEQ ID NO: 38512 - DNA, 1066 bp, Bovine  19866881871689
  misc_feature (1)..(1): n is a, c, g, or t
nacttttcactttcttgcattggagaaggaaatggcaacccactccagtgttcttgcctggagaatcccagggacgggggagcctggggggctgccgtctatggggtcgcagagagtcggacacaactgaagcgacttagcagtaaagaatgagaactagactccaatttttctactcttgtcttctgtcaacatggttaggaggctaagaagtctaccaactatttgatgtgcactagaaggtccccaaacagagtaaacacattaattcttaagtatagcatatactttttcaaataaaatacaatgacgtagtacagaataaaatcttgtaacattatcatttaacttattcgaattcatctgtatgctaaaaatgtaataataaaagttaatctaaataaagtagcttctccacgagtgagactcccaagcaatcaaacctgaaacaataaatgcacattggcacaagtaatggaaagaacaggtgaatcagtcacaggtttccccagcttagtaagtgaaatgaaatgcattgttctgataggcaggcaagtagatggtaatggcttccttaatattcctctatataaaagataaagaatggtttcatgggaatatacacacacacacacacacaacatatatatatattaataaaatacatatgattaaagagcttctaatgatgttaccaaaaacaaaacacttggtcagctttagaggattctaagtaactgacccattattttgaaaactggtaaataaaagcaaagaatcaagcatttatcatgtcttttactatatgaactatgtcaccaggtaaccagatgatgaaacaaaatttctctctatgaaagtattccagctaataaatgaaggaatgataaaattagaatctcatcagtctgcaatccctatttaattaaaggttttaggtaatgaacattaatgatcattaatagctactgaagtcacaaaagaaaaacaaccagatatgggaaagtatacaactttgaatactgccttttaagtattactattgaagaacacaaaccctttacct

SEQ ID NO: 38513 - DNA, 914 bp, Bovine  19866881874201
  misc_feature (1)..(1): n is a, c, g, or t
naactgcttatgagttcagagtttctttgttttttgggtcaaaggaaatattctggaattagatagtggcaatggttgtactatcttgtgactatactaaaaaccactcaatgacatactttaaaatgttttatgtcatgttaattatatctcattttaattatatctcatttttttcctaactgcatgttctcacctgtaattgttatattctctctctttcaattgatcaatgtgtctcttcttcaaaagcagcttttgtttttccacaattagaagtggtctacaaatacggcctgcatctgtatagatccgaatctcccgctctcgaatatctctgatcatagaaacctacacataagaagacaaaatagtctcataaatttatatcttctctgtatcattaaggctgagataaaataacattaataaattatcagataaaactaacagatcttagttgatcattgttcaatatgctaaaaacctaggtataatttaaaattttatagaagataaatatttaaccttgataattatagagctgaacaacatctggtagtaatgtcatgcaaaataaaatatgaataaaatgtattttggatatcaaaacactagtatgtgacaatttcttatttttgtctctgataattacatatacttcactgtgtaacagtttcaatatccagccctgtgtcactgcttcaatcaagctttcccaatcgtaagcctgacttctcatgatagtctatcagcaaatggtttaaaatctatatgtctaatacagcagtcactagccacaggtcactactaagcacttggaaatgtgaccattctaaaaggagatatgctttaagtataaactacttactgaatttcaatgataaaatttatcactaataattttccatgga

SEQ ID NO: 38514 - DNA, 1676 bp, Bovine  19866880116261
  misc_feature (1)..(1): n is a, c, g, or t
ntacatcatgagaaacgctgggctggaagaagcacaagctggaatcaagattgccgggagaaatatcaataacctcagatatgcagatgacaccacccttatggcagaaagtgaagacgaactaaagagtctcttgatgaaagtgaaaaatgagagtgaaaaagttggcttaaagctcaacattcagaaaacgaagatcatggcatctggtcccatcacttcatggcaaatagatggggaaacagtggaaacagtgtcagactttaatttttttggctccaaaatcactccagatggtgattgcagccacgaaattaaaagatgcttactccttggaaggaaacttatgaccaacgtagatagcatattgaaaagcagagacattactttgccaacaaaggtccatctagtcaaggctatggttttttccagtagtcgtgtatggatgtgcgagttggactgtcaagaaagctgagcgctgaagaattgatgcttttgaactatggtgttggagaagactcttgagagtcccttggattgcaaggagatccaaccagtccaccctaaaggaaatcagtcctgggtgtccactggaaagactgatgctaaagctgaaactccaatactttggccacctcatgagaagagttgactcattggaaaagactctgatgctgggagggattgggcgcaggaggagaaggagacaacagatgatgagatggctggatgacatcaccaactcgatggacatgagtttgcttaaactccagaagttggtgatggacagggaggactggcaccgctgagattcatggggtcgcaaagagtcagatacgactgagtgactgaactgaactgaactgatgcttaggttaaaaaaaaaaaaaaaaaagctataagttgttggaggtctctggttctctgcactgaaagggtttcccctctctgctttgtcttaccttgaccccaaagaatctcatgctatataaaatttgagcatttatagattcccaaaaggagaagacaatggcgacccactccagtactcttgcctggagcatcccatggatggaggagcctggtgggctgcagtctgtgggtcaaagagtcagacacgactgagtgatttcactttcacttttcactttcatgcactggagaaggaaatggcaacccactccagtgttcttgcctggagaataccagggatggggcagcctggtgggctgccgtctaaggggtcgtgcagagtcggacacgactgaagcgacttagcagcagcagcagcagcagattcccaaaggccagtttctaggtatacaagaaaaggaaaaattaaatctgcctttgtatggctatttgcttaatgtgagccagccagggctgaaatccatttgaattatgacagatgtctcctcatcatatttaagcttattagtgaactgcagatatgagaaatgcatttttcatcaatgcctcagttattctgaaccaaacatttgtgagacttgacctataaattacactctcaagaacacaaggattcaacaaaggaatgtattatgattaatggtctgctgccaatggaattaatgattttctattaaaaaatactatactcatgagtcttggtcatgaatgtatgagagatttcattaaaccatttactccta

SEQ ID NO: 38515 - DNA, 3203 bp, Bovine  19866880557669
  misc_feature (1)..(1): n is a, c, g, or t
nctcttgcctggagaatcccatggatggaggagcctggtaggctgcagtccatggggtcactaagagtcggacacgactgagcgactttactttcacttttcactttcatgcattggaggaggaaatggcaacccactccagtgttcttgcctggagaatcccagggacaggggagcctggtgggctgccgtctatggggtcgcacagagtcggacatgactaaagcgacttagcagcagcagcagcagttattaatttgtctaccagaattataccaaattttataatatgattaataaaaatgtaattgagtccctttacatctgtttatagataaaacaaacaaacttacactagcctgagagactacagtgacatgaaatcaatatattttacaccaaagttctgattaatgaataactatgagaaagaaaaatcatatctgaaacataactcaaaccacgggatcaatttgcacagaaactgaattacaatgaatttatggagagaaaacagtgagatatacttttattacagtcattaatgtaaaataattacacagaataaaaatgtactcttttataccattggccttacagaaatttaactttttgatgcatctgtaatgagaacacagaaataaccatttacttccatgtttgctttgggccagatgaaggaattcagattctatccattaatgactgtgactttgtaagtatctaaacctttttccaaatctcatgtttttctgtaaaatgtgaactaatacataatttctaaggctactagggatatgcaggaaaacagtatttgtgaggatgtttctacaaatatagaaaaagtatttaattctagttcttaaattctatgttgtctttaaaagagtagctcatagatgtaatttacaaatatgaagacaaaaaagttaaaacaaaactagaaattgcatatttgaagaaaatagttacaaagatcaggatttattttcccctaagactttttgcttttgttttccctgtccccagatttttactgttctcatacaactgctttcggctctaaactaacaccttgcaaatgatgtaaaccaatgtgatgtggaaattactagaaagcaaaaggaatcaagcacagaggaacaatctctactcctttgagagaagcaattgcataactacagatggaaattacagaagtcttatttaccaaggcgtttcccctgttctttcaatattggaaatgaaatcactgtcaagagagctctcagatcctacatatttcaaatgacacagtcactctcattctttatcttcttgcccagacataatgcattttccactgtttctaattccattaatgaggaaaaagacatgcaaataaattcctgttataaaataataatgctattcagcaaacatatgggttgaagacaaaatatgattaaaaacaaaccattttcagaagattcgaaggatctcatgtgtagagtgggttaccaataacaataacagtttcattctctgatgagaattaactaaagttaaatgcagacatatatcatatggaactaattcaagttatattgtgtaaattgcttctcattttaagttatatgattttatatagtccagggttagatgactccaagcaatcatgaaatttagttcttcctgagataataagatactgatctccatattaattgctcagaaaggttttgggaacagcttaaattataatatctccacagctagtgagtgacagggatagtaagagctgttgggtgagaacttagattctacatccaaattgcctttgtttaatctgtgtgactgtgagtaaatcatttacatttccatgcctcagcttcctcatctgtataatggagaataaaaatgataaaataccatataataggattttcataaggattggataagttacgtgtataaataacatagaataatgtctggcacaaataagcacttaacattagctggtggttgttcctaggccttgacgggctcataccttaagatctacagtttatactttgcacctggctattccagattagcaggttattccataggtatactggctatatgtctcccagaacaggtaagaatggtcatgggtgcataagactactcaccctcacccctgaatagtgcccagactgcgcttctgggcccttgggaaggaagcttccttcactcaacagctggttgccatccatattcctcttttcacactattaagttgtaactttcatagacaaagaggaattgtatcatctatatcattttaaaatcagtgcaatctttccattaaccacagtcatctcatatttatttctttcagttaggcagaacccaactcaaacaacaagtgtaaaatgtaaaagacacaactgagtcagtgttcaaatggtatcacctagactcttgttctctcaactcagctttgctctgggttggcttcactctcagataggctcaggcaaaggagaccacgcacaactccagactaatgtcatcacagctggtaatagcaaagatgtcctttctctcctgctctccaggtgagtctgaggcctgagcagctctgcatgggacagatactatcccagcaacaatctaaaggaagtgactggggaaatggattctctggtcagtgaaagtcgcagtgccacccctgtgacaaaggatgggtgcctcagctctatctaaactatatggaaacaaaggctgtgttgccactgtaagggaaaaagatgttaacaggaaaaaatagcatattcatcacattctacatttctcttgctaacttctttcaatggtagtagtctgtcaaacatagcttctcacaagtttggagtaatataattttaaactattttttaaaaaataatttctgtatgcatttggcaaaattgaacagataaaagtgttaaataaaaagtcagatttgtgtattcattaatcttaactttctgtaaaagatttaggacaatgtttcctagcagtcatagtatcttatttttatttgcctctcacatgactttaaatactacagtccttcacacttattttcaaagtttttaagtttcctaatttttaaaagattttattggctctactaataatttattctttttttgatgaatatttattgagcattttctttatgcttatca

SEQ ID NO: 38516 - DNA, 4369 bp, Bovine  19866880573530
  misc_feature (1)..(1): n is a, c, g, or t
ngaaaaagaataggaagaggagagtcctcaaagtcaggctagttttacaggacaccaggctaagcaattgttgacctcaaaattaaaataagcgcatagcaaaaacattggtacatttagctaagaaaaataattgcaacagattgtgctttgcttctattagctgcctagctagagaggagatcagtgtactaacctccaataaaaaaaaaaaaaaaaagtaaacctaaaagtcaataaggtatttagcatagcttactggcttcttttgtggcacactcttttctagatatcaagtgagcatcttatgagttttgaaagatttggttttctgaaagatgcaaaattttccatagtgaatgttaagacttctttgcaaaacactatatttttgaagaaatcatagctcacagtgtttcaggtgaaatataaatatgatctgcaaaagtgacatcttctggggtcaagaagaaaataaagactgtgtcaagaaccagagagattagtttaatgcgatcttagcactgttaactaactcctggcacttatgaaatattaagaggaggatttatctactgacctggaaaggaaatgagaaagctatgtactgagtggagctaaaatatttgccccagcttagagactccataaattagcatgcctcaaatcagtcctcaagtcaatttttaaaaatttgagaaagtagcattcagaaatattaaacaggtaaagaaagaggagttgtctgagtttcccagtacaatgtctatcatattgggttagggaaggaaacagcagttgcataggttttgctcctaattcaatttggtatcatcagttcaagggaaaatacacacacagacacagaattataattcattttataaatcataatgtagatgggaaattaaagcatacctgggtactattttttaactaattggagtatttttgtatcgtcagtggatattagtatccaggaaagatgatcaaatatctattgtttaaggattagtaagcatatctgaggagaaggcaatggcatcccactccagtactcttgcctggaaaatcccatggacagaggggcccggtgggctgcagtccatggggtcgctaggagtcggacacgactgagtgacttcacttttactttccaatttcatgcattagagaaggaaatggcaacccactccagtgttcttgcctggagaatcccagggactggggagcctggtgggctgccgtctatggggttgcacagagtcggacacgactgaagtgacttagcagcagcaagcatatctgaacctaatctgatcatcattccattaaataaaagaaaaaaatctttaaaaaagtgtttttttaggtactaatttaaatgattatagaatattttgtgttttcttcttttggcttatctcttattttttccctacaataaacatttattgatttgatacaaaattaaattattttaaaccaaataagcaaagaaaaggaaataagaaatctaaagctttaggaggtaattctttgaaggattggttattccctgtgagtcagaagtcagacttgtggattctatatcacatactatgtgagtcaattaattaccaagcagctgtgatattaccttatacccatgtaatgaacctcagaaagcatgtctatttgggaatagccaagaactaagcaatctacaaaaacaaggaaaggagtaggaaatggatggaaagataaagaaaaaagataggaatgaggaaagatggggaaggagaaaaaatacagaaaaataaggaatgagaaaaaaacatgtatagagtaataaatcatacaggttatttattaaatctcataccctgtacttcacccttcctatataatatttagtctcacttaaaacattttaaaaataagtatattaatctttcttcatatacaaatcaatttttttaaaaatagagaagaaactaacagagtgtctggcatacagtcgatatacattgcataaattgggtattttaatgagcttagtggttaactccatggtatattgaaatttcaaatgatgacttcaataattatgaaaatgttctattacgtctgacatcctttgcttaagaaataggcattcagcctattcatttaaggaaattcaataaacaaatacaagtgttaattaaattgtcaggacagaggaacagtaaaacgttcacatattgttggtggtcaagtacattgcacctgacttgagagaagtaatttgtcattatttactagtcataaaaatttaaaatcatgcagtacagtaagcccaataaaattcaaatatgaaaaatgtatatgaatatatgcatatgaataaaggcgtatgcttatcatagacttatttatcataatgttcgacattatgataatgttaactaaatgctccacaatgtggcaatggttaagtaaattatagtatatctactttatggaatataatgaatacattaaaatattgctttatactgtgtcagaaaaatagctatgatataaagttaaagaagtcagaatgcagaaagtgtaaattttgattgaaaaactacataaaatacatatcaaatatggattggagggtaaaaaccaatattggttgaaccagaatggtgatatatgtacattttattttttgttatttttttcctaaattatcctgtaccattatcttattttttaaaaaagcatatacaatagaataaaagtttgttagctaaaatacctgagtataaatgtgtgtatacatgtgagcacactaatacacaaataaattcatttgggtttattggagtttatgcaaatacaatagtttaaagaacttttcataaatatttaaaatatttaaagcagtaaggtcctttaagcaaacactttctgacaataggatttacaatgcataatctcatggaaggtttttattctgtttcctgttacttgtgtatttactttttgatttgagtgtgtaacgcgttgtacgctgatgtccagaggacagcagctctgtgtgtatgcctgatgctgagtgaatgaactggggcaacaggaaatgaagcctgtgtgccgagtttgctcttagtcttgcgtatgatgcggaacaatgctttttttttttttttttttttactcagaagcataatgtgattgtacttgcattttgaaaaggtttttctcacttgaagtcctgattctgtcttaatttaccctacagggagtatttgcatgactggctgttttctacttcttgggagcttggcttcagtaggggctggcttggaacactccaggctgcagctgccgcgggcttgtccccttgtgctagggttctggaatgtgtccacagcaacatgaaaggaacttgaggggacagagacaggaaagtgtattaggaaagctgttgtgataaagcaggtggaaaacaaggagtgtgaggagagagtggggcttgagatggcaagacagcttcgagaaatatgcaagaggcaaataggcagccttacagtttcaacttacactgtttctttaatgaaaatggaagcatcatttgtatgtacatttaatctaagaaaactttaaacttcttgtgtataaatgctactttttgatctgttgccccctcccttttctggaaagacatgaatgtttaatggttttgttttgttgtactcatatatagaactgtgttgctaaacaactgaaataataagaatgagcccttgacttcttgctaaatgcttgtctcaagaaaataaaaaatccaaaattaaaaatgcattttaaaaatacctggaatgattgtttaattatgactcaataattgacttgatacaggtaatttaaacaagtagcctactttagagtttgatctgtccagtaattatgctaaacaatagaaaattaccttcacagtaaaagaaaccatcaacagaatgaaaaggctacctattaaacagaagaaatgtttaaatcatatgtctgataaggagttagtttgtaaaatatattgcaaatatatgtagtgatagcaaaatttaataaacaatccaactaaaaatgggcagaggttccaaatagacactattttttccaaagaagacatacagatggccaactggtataggaaggtgctcacgcatcactaattatcagcaaaatgcaaatcaaaaacacaatgaaacatcacctcacacctgtcagaatggctattttcaaaaagataagaaataaaggttggcaacaatgtagagaaaagggaactactatgtactgtttttgtggaagtaaatttttgcagccaccgtgaaaaacattatggaagctcctc

SEQ ID NO: 38517 - DNA, 957 bp, Bovine  19866880598774
  misc_feature (1)..(1): n is a, c, g, or t
naaaatgtttctgggtttgagatcccagatgtaaaagtggggagtatagtttgagcaagatatttcacaactccggggctctgactactttacctctaaaactggaattacaatacctacatggaagagtttgtgcatggcagatattaaatgtcacagttattagcttttcagtcagttaaaaatgatttgcttgaaatgtcattatgtttccaagatccaatgttctaggaacttatcctaggttagcagacttacttaaatatttgcatggagaatttcaggtgctcagagtcacaaaatttcatattggtcataagaactgtcagcagctccacaaaaatcaacttcaaaagccctttgcattaatagcatagagtgtggttatggtttgagtctgatgtgtctctcatccataacaaatgacctttagggcagagtagaaaaattgtccttacagtcgctggctttgttaggtgactcacctttctgcttcagagatttctttaccaatgcatatttagaggaatgaggactgtaaagaacatgaaagcacatcaaatatttatctccagagtttcattttctaaggaacaggaagtgtgtcacacgatttctcagaggggtaaacacccctaggcctctcctaatattcaggagatagaaggcatagagtatgtagtgtgggatggactgttgctgtttttcagtcactaagttgtgtccaactctttgcagccccatggacttcagcatgtcaggcttccctgttctccccgtctcttggaatttgctcaaattcatgtccattgagtcggtcctatgccaccctcttctccttttgccttcaatcatatccagcatcaggatctttttcaaggagtcagttattcacatcaggtggccaaagtattagagtttcagtttcaaccttagtccttccaagaatattcagtg

SEQ ID NO: 38518 - DNA, 3003 bp, Bovine  19866880788759
  misc_feature (1)..(1): n is a, c, g, or t
ncatcctttgcttgtagaaaccctggataatttacacatcaatataatatccttgcaaaacaaaacaaagcaccccccccacacacacacaaaagaacaaaactctgctccttgccctaattacacatatttctctgagtatctgagaaatgtttatgaagagtcaaaagccttttactttttcagaagaacatattgtcacttctggggggaaatgctcaaaatatatgctattatggggaattaataacttctgattccaatttgactgtttccacatcaaagtatacttttatgatcaaaatagcatactcaaattgcacagttatagagtaatctttctaaaacaatgattcctgcttttagccatttaaaataattggcacttttatttatctagaacatccttatttactgtctttcatctatgtaattcctacttaaaatttatgttaactcaaatttcatctccacaagacctttcctgattcattactctgatatagctgcctctatactatgtccccaaagcaactgttgtataaatgtatcacagtatttggttatcattattttactggagtagaagcctcttatgcagctttttggttttgttttcttattcatattcccagagcttagcagaatcataatattatgtattcagcaaattcttactgaatgaaatacatagctgaacattttaaaacttatactagtttattggtaactgggattttaaaaatatttttctgtaattcgatatggaagaatgattttcaaccaagaggatttcatgtttttttttttttttttttccacaaaagattttgataagggcaaaaaaattgatctttgtagataaaaacttagactaattaaggaatgaaggaaagaacttaataattacccataaaaagtgattattcactattgttgatatggatccagatgacaatttggaatataaatgatatgtctgtgagtgttatgactgtcagcctggaattgtacttggtgattcagggaagggtaagctacaaagttaatcaaacaactctagttcccttctgacctcatgttattgtaacaatgcacaatgacaggttttcagttaatattggtatataagaccttgagaaacgtatatgatagtctcagaaatgtgaacagaatgtcagttatgctttagcataatagatgctgccatacttatacagacagaatgctctgggggcacaggtgataggtccaagttttgtggcacttatattggcatagttcattctccatatttttggagttactactgcacaaggtctggtgaactgcaggcattcagtaccgcttagttctcaatctcctctctttttctattttttgtatgtttttgtatgtgtgtcatcaataaatatatcagtctccttattttcttccctttgaccatcactgatttgctcattctcagatgcacattagggataaaagagatggctctatgaaaatatcagagtgatatccctttagagtatacctgtgtttgcttcttttaataagtgaatactttttttgcagttgatttggtcaacctttggcatagatatattttgtcaaaaatatatctataagtcaaatcccagtgcgttctcaggtgtctggtaatcagagagatgctgtgccaaatagactgaggccacagagcttctgttagggcaacaggcttgaacactctggggaaaagccaaaggtgagaaagggcagcccgtgaactcacacttggaacttgtgtaaagatgtccatgctgtcttctttgttcaggatacaaagggcatccagagatctccctttctccagcctgcaaagaaacctctgaagatcagagaggagccgtgggatacagctggctcaaatggagctcttctccacacagaatagctctgtctgtacccacttgcaaaagtatgtatcattttgtaaatcaaattatccagaaaagttaattagatgtccccatgattcaacaggcctgtgagggaagtgggcaaacatttaaaaaaaaaatttaaagggtatctccaatatttagctatagttcttagagtaaaagagaacagctactaaagaaagggagaacagctcattagttgactgtattataccctggatgaaaaggaactacccataagcctctgtgcctatgatagcccaagtctgaggatatttctatatacatcaagcaagctgtcttaattatttgtgctatttcttccccctttaaaaactgttttagaatgtaaaatcctattgcaaatgcgctatctgattatctcctgccatatggctattcaaacaaagaattcaaggatttgtggtctatttgagcatacgtatggtgtgatgccctggttttcaaactgtggtccagagaactcttcgaatatccacagatatgcagcaggaatcctgaagggggaagggaagggggtttcagtgtgtagccttggaccctcacacctgtgccaaacagagaagcacagctttaatatggttaaacataagtttctgtgaaaaattttatttggaacaaaaaagtgttcttaagctaaaagtatatttgaagaacattagtataatgtaaagaatgcaagctatagaaataaatgggctaatgctttatactgaaactctactactcgctaaggatatgattctgtgaagaccttataatttctttcatcttaatttcagttacctaaaaatggggccactctcacagattttacaagcgattctgtgtattaggtggaagggaactaacgtttctagaggcattaataattacaaggctctgaagagaaaactattcaatatattctgtattcctttctgctctccataccactctgccagtgtacagtaactacactaaaaacacacgtagaacataggtttgatccatgctggcatattttagtattatcatgtgttctgcattgcaagaa

SEQ ID NO: 38519 - DNA, 2470 bp, Bovine  19866880801507
  misc_feature (1)..(1): n is a, c, g, or t
nagagagagagaaggagagagagagagagaaggagagagagataaggagagagagataaggagagagagagaaaaagagagagaaagagaaggagagagagagaaaaggagagagagagaaagctgtcttttgcattttgcatcttctacacaagaaaggttattgacatcttgacttcatgaactgtgctccatatttcacccccccaccctttttttttccagatttcaacatctgcttctctcattcattccaggcaatttcaacgtagcagtaggtcagacaatagtttatattctccctgaatctgagttcattgtaagtgatttaatgtgacaggagatagaaaattgtattggcagactgttactaaacttaattactcaccagatccaaccccaatcaattaactgcagcattaaacaacataaattctgcattagccacaatgagaaaagttgcaactcctgtttcttctcagttaataacttcactcctttcatttactatgcagagtcagagccactaaagctgtgtcaatttataataactgtgcctgatatttatatgacaattgccattttcaaagcactttcatatctactaactcattcagctccgtcattcaataactcattaatggaagcaggtaacattattgccacttttcaggtcaggaaaatgagagttggagaggtcaatggctcacctaatatgacaagcttaagacatttcagatgtcagacaagtcacataacccttggaggttagcaactctaggtatactttttcagaaaactcctaaacagaacacacgaggaagccaatgctccctaagtgctctatttcttctcattatctccttgccctcacctaccattgccaggagcttggacttgtgtttatcagtcactctgccacccttctcagccaggcagcctcacatactttcagtccaacagtatatacttttatccccaatgatttttttttttctgtgcctctaagcttctcattcaacactcattcttactctgtgaactttacccatcatatttgtcccatttctaactttgaaaaacattcttatctcacttattccaatatgtctgctcaaactgaccagtttattttgatatttcttatttaaaaacgcctaaatcacacccctgttgtagaaaatgaaaagtgtgactaaaaaataagatagcacctacagtttgtcaggcacccatcagagacctctgcaaatgctattctcattgatcatcacagaggccgtttttgatagaaccagaaatgttaaatgaattggcaagttccactaattcagccacctgatgtgaagaactgactcatttgaaaagaccctcatgctgggaaagattgaaggcagagaaggggatgacagaggccgagatgcttggatggcatcaccaactcaatggacatgagtttgagtaaactatgggagcgggtgacggacagggaggcctggcgtgctgcagtccgtggggttgcagagagtcggacacgactgagtgactgaactgaactgactaatttagtgttagttttagaaaccagattaaaacactactacatctaaaagtaataataaccttgacaaaattactgttaatgtttttctcatatatcagagaatgataactgacttatactcgttacagaattttaaaatcacaatgcgtgttcagttgctcagtcatgtctaactctcatggttgtatggactatagcccaccaggctcctctgtccatggaattctccaggcaagaatactggagcagattgccatttccaactccaggggatcttcccaaccaagggactgaacccacaaatcacaataataatcataaataacactaaccccactttatacataaataagtcacaaaggagttaatcacactactcaaagctttataactcgtgtgtagtcaagcttgaacttgaaccaaaccaggtgattttatagctcttgaacttttaatcatgttcttatacttcagagaacatatatgtggcagtacaccatgatttattatcaaatttattatcttctagctaatacattctgtcacacattcctgaaaatggaatagccttgaaacttaatactttaaaacggtgtttggaagtctcctaaaataacactaatttatggaataacttggtaagtgccaagtcttatatatgcatattatatcaaatcataaattctgtgatataattttgagtattgaaattttataaacagaaaaaccaaggtctctaattacacagtaataaatggtcaaaccacaatctaaatcttgttctattgctttcaaagtccctattgttcattcactatttctcacaatctctcttgcattcagttcaattcagttcagtccgctcaatcgtgtccgactcttggcgaccccatgaatcgcagcact

SEQ ID NO: 38520 - DNA, 2218 bp, Bovine  19866880825056
  misc_feature (1)..(1): n is a, c, g, or t
ncaatgagtcgactcttcgcatgaggtggccaaatctcttgcattaacacatggttataacattgttggcaactgatatatacttgatagtggaacttcagtctgattttgctgaaactgaagaatccttcttgtatgataacatttttcctaaagatgaattagagaaagttgtggggaaagccttttctctacccatgatttgtaattcatgttaatgaaaaatcctactgggtataaaatgaaaattacaattaattatctatttggagacttacttattttgaaaatagattatgcaacattaagattctctaataaatgtgaggactatggccattatatgctcagcagcccaagcttgatattatagaaatgattaatgaacacattttacaaagtttaaggaagataggaagaaagttcctactaaacatttgttaaataaggagttaaaatattctatacactcagtttaacagtccatgctaaactgattaacattcctgcctttagcatttcaccatatttaaaaaataaaattcaacaagcatctcacattttttcaaggcaattttctctttttcatttagtaaattattagcagaaaaatgactaggtgagtccaattctttgtgtctctctcattatcagaaagtaactacattatggagaagaaaaacagatggaaataatacaggatgcactttgtatccttgtatttaatatttataaaaatcctgcaaagtaattattattataataaattaacatttcatgaaattgagccttagaagtgcagtaacttgtcagacaatgaagtagtggtagagtggaatgggactccagggacatctggtttggtgacagtgatacgccctctctttcaaaaggagtttgaaatgcaggagaccttggagaagggaatggttggttacccaccctagtatgcttccctggagaattccatggataataatgtagtgtaagtgcatcagttaaccatgttcagaaaatgctgagtaacagatcactccaaaactcaggcttaagacaagaatcatttatcttcaaacatctgcagagtggctggtctcagcagctcgggcctgaacttttctgtagcaaatgccttccgaaagtctcttatcccccttctggaaggagcaggctagtataggcatgtctggtgatggtagaagcatatgcattagcaacttagttttaccagtgctttgcaccatatttctaatatcccattggtcgaagcaaatgcctctggtgagatattacatggcacacatagttgtaggcactgtaaaatcacttaccaaatggcagatatagagaaagatggagaatcagagtccaggaatgcaatttaccacaggaggggataaacacttttacatcaatagtccactgcaagaatgagtcaagaactcctggaaagcttgctaaaactacaaagtttgggctacctccagagtttaaattcctttaaatatttattttaacaagtatgccagtgattcccaagccaggtgtccatactctgagaaatgtttctatattcagccccataatagttctcacagaaatgttttattcaatgtaccaacccaagacctgttcacctaaaaatgtcacatttgtgactcaataatcagaaactcagtttcctactctaggtcgagaaatgccattctttaaatactttaatttatttgtttatttgttgtttatactttaacgatattttgataccattccaaatacaacagttggttgtcgaagatctggtaatagccaatctgaaaagaattatcaatatgcaacttgactttggattgcaaggtaagacaatgagaagagacacatatatgaagtaatcaattgacagatttctctttctacttatgctgatgctttcatgtgtaaaacaccctaacttctctgttatattgataatgaaaaagaaaagaaaaaagactggccaaaatagaatttgataataatatgaaatagcaggtgcttaaatttcttcaaaattatttctgaagctctctctttcaaccaccccttttaattctgtgattttatgaggaggtatgaactatgaggtgctggtctctaatgctttgtatctgttagactttcctccagaaaattgcaggtttgttgttgttgtttccttttcaggacaagagtcaacagg

SEQ ID NO: 38521 - DNA, 972 bp, Bovine  19866880834075
  misc_feature (1)..(1): n is a, c, g, or t
natggcttcgtgatgtgagctctagtgatttctcatgtctggttctggcaccatcttcctgtcctttctatgctagattcatgacaatcccctggtttgtgcaactttttctgtctcacacgacgagctacaggaagggaaatcctgtaaatattcctttcataccagtgtccctaaaggggagatcctgcatatagatgcttttcaacaagcattttgcaatttcagtacaaaataagaaaaatcaattctatgtatttgatggaggttcccagaatcaatctttaacttgtcaggaaacactttattgtggttgcttaatataaaactctctaacctccgtgaagaatgcaaaaagaaagatgacaaagtattaaacaaacacatttagagatgcctggggctggaatctggactaaatagatttagccaaccttgatggaacatgagaaaatcaaatgtaggaaaaaaaaaaaaaaacgtccaggcatctgttatctttcctagggaccttaggcttgaattaatactgactgttatgaattaaagttggcaatagactggagacacagggagtcttattcattttattttatttttagtgttattattaggagaactagaagaaatatgaatgttcttctgtggtaaaggatcctgagagagcaaagatctgacactttaaaaatgatcaagccatttgtatgtaactgctctcatcttttataggagcaagtatgaaatgaagtttctgagtcttggaaacccctagtttttatcacttattgtgtaatgaaagaagacaccatcatatagacaggagggaatggttgaaaggagtcatttgtgacattttgtagtatagaatattaagctttgcctggagttggttcccaaatattgggggctgtggatacaataatttacaaatacaaattctggggggccttgtcctcacttaataatcagagc

SEQ ID NO: 38522 - DNA, 1497 bp, Bovine  19866880843227
  misc_feature (1)..(1): n is a, c, g, or t
ncaagaggactggagtggggtgccagtgccttactgtttgctattaggaagtgcggggcattgtgtgagagtttgtcatttttcattctcatctggtatcattttggtttcacgcttgacatgggcaccatgtcctgtgttagcaaggcagccaagatacggtgagtctgccattgtgtagctgtttctcttgattgctggcagactggattaaacaggaagtgagagataattttgttagccttaattagggcctgcagtacatatgttctttttccagatgcgacaacctgatgaaaaaagcagcagaaagtcattagaacaccggtaaataaggcactgctaaagatgggggaaagaggcaaaacatttggaaaacagattacctttgtttgcaagttgaaaagaaagaggcagtctttctgaagaatctgtgaaacttatatgcatagttttgagcagttacttgtcattttctagttttgttcataggttaaaaaaatgttggtatataattagtgtgttttctgttccagatgtaacaaatcatgacagcatttaatttgtaaatctggatgtctgataaaataattatagctactgctaccatattactgagtacttcagtgtgcagcaagcaagaatttcagagtccagattttgcaacattttcaaatgcagtccccttgatgtcctgccacagatcagtattatcatgccattatattatggaccagaaaactgagacttggggcagttgagtgcctcgcctgaagtcacccagctaacaggtggcagactccaagtgtaagtcttgtgtgtgttttgggactgcatttttttctctgtgttttaggactgcagagatgtcacagggagtaaattgcaggccttagtgggtacctctctctttcatagaaaaatcctcctttaagtctctcacttttaattattactttcctgtaagaatttatgataggcattgacagggcacatttagcaaataaatcacgtatagcatacactgactgcagtccaaggggtcacaaagagtcggacacgacttggccactgaacaagaacatagcatgtatcgaatataagtagttgaacaagtgcaacaaagtccatgccagccagtttccccaccgagcagcatataacagaatacctagcaggacagttttgttttattttttgagtaaggaatatgttcatcctatatttatggtcatctagattccccaggtcagggtaatcttatctctgacccgggaatctgaagctggtctcttggaaacatgaaataatgtgtatatccctgcagtatctagaatcataagctttaatgatctatccattaactttctccctaggtcaggaattcttggtctttgatttagctcataagccacatactgaaagacattgtcccatgcctgtaagatgttgccactcaggtctgtagttgagtttttcaaagtcaattccacaatt

SEQ ID NO: 38523 - DNA, 1066 bp, Bovine  19866880869236
  misc_feature (1)..(1): n is a, c, g, or t
nttaattagtaagatttatagttccttgtgattagagtctatggagatatccttatttctgctgtcccatgaccctgaatattatggtcacataatgggcttttgacaaaaattcattcatcagactagaaatgatcattcttacttacatgttgtttacaaagcaacagtgtaaaattttattaagctaaatagttcatgtatattttttcagacaaatgaactatttagcttaacataggaatagaagtctttcataggttttgactgttggtggtttcatgttttattgaaagcatttaactatatttcagcaaggaaaacataaaagaaggttaaaaggaacagtcttttagatagctaggtagctagtgtttgacagcataaattgaatctgtcccttatcttataaaggcagaatacactgagaatgaatgaagaaaattggacttctaaaatgataaaatattcaataactctactggaacaaaatcttgtttttcataacttgatttctaatcaaatttatgttatgtgaaaaaaataatactgcctagaaaacacttcagtctcctgcttcattttaaaacatgacaaaaacaatagcactgtaacaattggaaccactaattgggtttctgcactgtgcccacttttgttctaagtgctttgcctgtttccttgcatatcgtgacagtgccttggtttcacaggcaatgaaagtgagtttgacaaagatcaacaaatgcccaaggttctcagcaagtacagaacagctctgcttgaactccaaggtctctctgatctgaaagctcgtgtgtattccctatgttagtatttcccaaactgtcattatttatcaggcttccctagtggcttagacaacagtgagtccgcctgcaatgcaggagacttgagttcagtccctcagttggggagatctcctggaggagggcatggcaatctactccaggattcttgcctggagaattccatggagaggtaagcctagtgggctacagtccatggggtcacaaaaaagtcagataagactgactgactaaca

SEQ ID NO: 38524 - DNA, 2061 bp, Bovine  19866880946590
  misc_feature (1)..(1): n is a, c, g, or t
ntgaaattcttaacaagctgaggaggaaagttgaaccttcccttcttaaatttataaattctcaatctttgtttttgtttactgtcccccatcagtctaactaatctacttttctgctttgttcaagcaaggaattagtcacaatttaatctaagttttaaaatgttcatgagcccttgaacttgttttaactattaacgaaagaccatttagttcgggatgttcaaatgttatggtttacccaagtcttttcattaagacaatgcacagaatttctatgatttcagaaagagaactccctcttgtggcaagagcagtttttgcagctaattctagagaatctgagtttctgatgctaaagaactgggtaagatcttagaaatccccttgttttacagaggaggtaactgaaacccgaagaggacaagaagtaagttttcagtgtttatatctggttggtgactgagccagattcagtacccagggttgctgtctactagtcaggtgctatttctctgtatttcagaaatctcactgatgtgatttttcccccccaaggtcctgctttatgctgccactgaaagcagagctgatagagatgtcctcatgctgaataggcaatgttctttcccacatgaaagctgattctcggtgagctttccctatgacacaattaaccatttctcaacactgggctgtaagctacatgccttacacctgagagcagtttggcccagaagacaaggattctgttcatctctttggggatagctgccatctagcatcacttagatgctgcttcctgtctaattctctttcataggttttggcttattggggcaatgctatgctgtgcttagtctctcagttgtgtctgactctttgcaaccccatggacagtagccctccaggctcctctgtccatgggaattctccaggcaataaaactggagtgggttgccatgccctcctccagaggattttcccaccccagggactctcttgtgtcttctgcattggcaggcaggttctttaccactagcgcaacctgagaagcaaatgctcactagtatatggttaaaacataagaaatatcaacatggacatgcaggagagcaccaacagtggactgaatatcaaagaacttggcaaatgtaccatatgttacagagaagttgcttttccttggaacattctctatgcaaaaggtcactaaagataattccgtatatatttctggtatttagggcttccctggtggctcagatggtaaagaatacacctgcaatgtgggagacccaggttcaatcctgggttgggaagatccctggagaagggaacgactgcccactccagcattctggcttggagaattccatggacagaggagcctgtcaggctactgtccatggggtcgaaaagagtcggatatgactgagcaactttgactttacttcaggtatttatgggcacagagaagttccctctgttggaaaatatgtctatatttttaacaattagagttcaaataacttataattcctctacaaaagttaagaggttgaggataggacgttttggaagaataaatagcagtcaaatattgaaatcccgttttacccttatgtaattgtccttcagtttttccctttatattgggtactcaaagtagaatctgtaaaactcaattcctaaatatatagaacaatggttattcctacaaaaatgagttcagaaaactttattaaatccctaagtatggtgagctaacttgatggaatttgtaagtatgagggagagagattaatataaggatgatctaattaaataattgttgtgttgtaagttatgagctttcaattaaataaagtcttaaattattctttttgcctctgctaattagtggattttgtatttgcttcagttaagcatgaagactgatactagtacagtcttttcacttcagggactgaatttgcaattttcctagtcttctgggatttaatgcaattaaaatgaaattgaatccttagcttcatccttctgagggagttcactaga

SEQ ID NO: 38525 - DNA, 1067 bp, Bovine  19866880953695
  misc_feature (1)..(1): n is a, c, g, or t
ngagagtgccttcagtaattaccaaaggaactggagacctccagctccttccaattaacttctgttcctgagtgctgttaactgcctgcctgacagccacacacagatgggggagaggagtgcacacaagatttcgtagttcacagattaaaggcagtgtcaagagcaagtcagagttgagggattgatttattcggcactgagtgtccagggaagggccactttggagtcattacaaacaaggctgagctgctttcatattatgttctacctcttggtacacaaaccaaacaattttttttttttttcccatctagatgcatttactctgagtttcactgccagaaaatgtgactagattcagctttcttaagtctcagcactcataaccgtaatggtagctgttgtaaccactctggctcaagctcaaggcttgccggggggagctgctgatagtgggaacaagttgctgctagacaggtcagagaagattctggaagacttgatctaggcaaagttccagactgccagacacaaaaagatatcatagcagcacattagctataataatagttatgctataatggcaaccactgaaatatcatctgcaagtgttaggcctttccagagctgtgtgtgtgtgtgtgataggcggactatgcaaatgtctcacgcctcatcaaaatttctccctggattagcattcatcgatgattcttttctaatccagtctttaaggatacaaactgttaactttctaacacaaacacttctttcacattaaacaacaagcccttgacattttactgtaagcaagaggtctcccttccccactgattgactgatttggtctatttattatcagatatggtgaaattaatacaaaatttctatttttcaatcagttctttattgcacttaattattttcaaattgctgtgttccagttgttctagatttgttgaatagaagtcctgtcatgctattttctgtgctgttgtgacacgttttcatcttttctgaagcattccctagcttcctattaatagcgcaataagatatttttt

SEQ ID NO: 38526 - DNA, 1152 bp, Bovine  19866880954162
  misc_feature (1)..(1): n is a, c, g, or t
ngggatcttcccgatgcagggatcaaacccaaggtctcctgcattgcaggcagatccttcaccttctgaactaccaagaccctttgaaaagccattaacagctattgtttgcatttcccagatatgtgatttgataaacagttctctctcaacctacaagttaaattgactagctataggatatcatagtaacatgattgtatatagataaagataatccctaaataagactcaacatgaacaaatggcacataacaagagtttaggaatgctgtataatgcaactggcatcccgtgtgtgcgaacaagagagacgtgtgaaggggctcagcagagtgagcgaggggcagatgccagtctgagaaatgaaggtttatgccacactgcagctccacaactaatctgcaaggctgctgagaaaccagcctgtgattctcctgtcacttcattaggagacatatgccatatatcatcaaatattacaccccaaatggcaagacgctatgagacaatagctctcgtttgttttttttcctaaactcacataccagtccatgtgaaagatccttagtgactggaaatgaaaaagaattcaatgaagagggatacaaaatctggggaaacaagaaagcatcctttgctcctttgagatgactgtataacattggtggcactagtggtaaagaactcacctggcaatacctgagatgcaagagatgctagtttgatccctggatggggaagaccccctggaggaggaaatggcaatccactccagtgttcttgcctggagaatccccatggacaggggagccttgcaggctagtccatggggtcagagttggatacgactgaaggaacttagcacataaaacacggaataccagaagtgataccttaattgcattatttttaaaagaaatattaaaatcatgcttcctgccaaaccttgtagataaaaggataaataatgtagagccttgaactcacaattctctagtaaagggtacagtataaagatccatataaagaaaattcagttcagttcagttcagttcagtcgctcagtcatgtccaactctttgcgacgccaggcctccctgtccatcaccaactcccggagttcactcagactcacgtccatcgagtcag

SEQ ID NO: 38527 - DNA, 1108 bp, Bovine  19866881011337
  misc_feature (1)..(1): n is a, c, g, or t
ncatttcgaagaaggtacttataatgataagagaacaaagattctgcagagttatgaaattgtagttcacttaatacattataaaactgggatgagaatctgcttttggcaactgcataagccattctttttctacaagataatgttgagcattaagtttttaccactattagtcttacataattatggttaacttaggtccaactctgctgatgagtcagcagataacttctcacccaggactgggtgactggagactgctcattgagaaagaaaacagaggaagagaaacaatgttcgggtatattaggttttagcgtgttgagtttgaggcaactgtgtggtaggcaaaaggagattttccacggagctgaaaatatgagttcaacattcaggaggtaagtgtatgccagagatggagatttggggaatggtctataaagctggcagctaaagccatgctagtcaaagaggtccctaaaggagaatatgtagactgagaagagtgctaaaaggtcgttttatggaattgagtggagggaaaaaaacctaaaaagaggattttgataaaggtcatctaaagcagacaggaactaagctaaaactatagtagaggataagaaaagaaggagtttcaaaaaggagaaagtggaatatattaaattgaggtaaggaatgtccattggatatatcagctaggagttttgatttatcaaccacttggtaattttgaagttttagggttatttcagaatagctaaaggatgtttgagttgagagaatgttaaaagtacatcaataaagcaaaccccaggatgcacttttaagcaacttgaatggagtataattgacatcatggaaaagagtcattctctagcctcaaactctgacttgttttgctatcatgtatttattattatttaatatatggatatgtgtgtttatcatctgcctgcttatggtagaataaaagctcataaaagaagtcactttatttcattactactacatcctcagtgtttagaataagtgaaagttgctcagtcatgtccaactctttgtgacctcatgaagtgtagccctccaggctcctcgtccaggaattctc

SEQ ID NO: 38528 - DNA, 1285 bp, Bovine  19866881016139
  misc_feature (1)..(1): n is a, c, g, or t
ngggcaacagaggatgagatggctggatggcatcactgactcgatggacgtgaatctgggtgaactccgggagttggtgatggacagcgaggcctggcgtgctgtgattcatggggtcgcaaagagtcagacaggaccaagcgactgatctgatctgatcttaatttacttattactgcttaatattgattagacagaagagataaggaatcaggttttgtaattaagcatcttgggtttgaatgccacttttccattcactagcttcaagtccttggacaagttatttacatcactttgagcttcactttcctcatcagtagaaaagcatgaaatggcaacaacaaatacactatctcattggtttaatgtgaaaattattattgtgcataatgttacaaagtatgttcaataaacgttgtatatttactacactttcttttttgttgttacacaaaagatacctctaactctcgaccttggttcccaggagtggtctgtcctagtttgagaaaatgaatgtaggtgatgagagctgcttctggaagacgtgttctctcttccaggccctagctcctcacatatagaaacaatgatatactctatatttgcttcagagaatgatgcagaaacgtcccattcccattcccaagggacatggtgagacctagggagatggattcacagtttgcttttagtctaattccttctttctctggactgctcatgtttgtttctcttttaaaaagtcttccaaatttgtccatgcctttcggctatttctgctgtccaagacacaaagacggattcaaacacagcagtgacagctggagagcttcatattttcctttgggagatcccattggtcagcgaaatggaaaatgaaggcatttttagtcatttccctaaagtgcttctccaccatcttcatggctagtttgtttgcccacactgttctagcagaggtctgttaacatgatagcagaacatctgggggagatatttagatagaaaggagttgcaggagtagcttttattgttattaatgaaagtagctcaccatttggcacaatgtcctatgccttctgagggctgtataaagtaatgcctgattgcctgcgacacacttcatccccggagttcactgccaattaaaataataaataagcaacactaaccacagatattagagggaaagataattgttcttccttgtcaaataaatgaagagatgatcatgaaccagagaggaggactagagaggtatatgttttattctcccatg

SEQ ID NO: 38529 - DNA, 885 bp, Bovine  19866881057278
  misc_feature (1)..(1): n is a, c, g, or t
naaatactggagtgggttgccatttctttctccaatgcatgaaagtgaaaagtgaaagtgaagctgctcagtcgtgtccgactcctaaggacccccatggactgcagcctaccaggctcctctgtccatgggattttccaggcaagagtactggagtgggttagtactttttaaaaatcctgaaataatgataaattgataatttgttgactgaatgcttaccatatgccagatatcatttgcatatattagctaatcaacttgagggtcaaaatcattctaggattatgtctattttacattaaagattagggacattgagaaactttttcaagaacacagagatggtaagtgaaaaaactttcatatccatgcatgctcacatctgactgagcacagagcctgttttggagtctgtatatctaggttttctgacttttaagatcaattggaaattaagatttttaatctctggttgttgaaatattggctccgttttctcccaagcactgaatgtgggagcaaacaaacattttctgggcagcattcagcctccaagctgactgtttgcaatttctgctgagtctaacgcttacagtttacactaagagcataagcatataagttcagcaagcaggttaagaatatagaaatagagcctggtttcatgttttatgtaatcccatatggtattctcttgtagttcattataaatattcattgtatacattttatgtgatgggcactatgctggatactaaggattcaggataacagatataatcttttttcccttaaaagaaaaagaaaataagcaagtaagttttatgcagtatgaattctacaatataataatgaaagggaggttctaagggcaaaggagca

SEQ ID NO: 38530 - DNA, 1868 bp, Bovine  19866881067447
  misc_feature (1)..(1): n is a, c, g, or t
nccttttatttttcccctaggacagaactgtcatccaagtactttatgaaaattttgggagcctctcactatgtttaatcaagacaacactgtggtttaacaaactatagaaagtacttcttactgcatgaaattcaacttctacgttctccaaacttacgtctctcagactctgagttccagcttctaatttctagttctcagaggcagagtgttgacctcttgatatttgacccctcatttttcgtccatgtgtttcctttcacagcaaaaggaagtgtgtccgtagttacatgtactaaccagccaattttaaaatgaaaagattattctagattttggggagaaataaattatattctagtgcaatataatcatataaatccttaagagacaaaggaggaagacagaggaaaaagtcagagagtttcaaaatatgagaaacacgaccatgttgctgacttaagatcaaaaattcatgtgacaagaacaggacaaaaattgatttctattaaccagcaatgagcatggaagaaggtcacaagccccaggtgagaactacagttcagctgataccctgaattcagatttatgagctttaggttaagaatctagccagactatgttggacttagcctacagtatgagataataattaggagccttattaaactactaaattctgggtaataacaattaaaaaaaaaaaaacacacacattttgttgtgtgaaatggtgagtatgcctataccctagcatatccataatagtagtatagactttgaatacacataggctctgtcctgaaatctggctggaaaatcttatgatgcctggaatctcttgcttgtcctcctttgtgtgactctctcctgggctgttttgatcctttactgattatttaaccagaatttcatgttagtttgttcatacacatgtaccactaatgtatatagtcatcttgaggtcaatttttaccatgcgatcacactggacctatttctgtctttaggaaacagcctatacaatagccagcacctatcttaaaaaaggtaatacttgcaaaggcgaataatttttcaagccataaaggaacaatagtatggaacataaataactgagaatgtggatcatggtaactgatgtcaggccaactagtttatattcagcatcatttatctcttggacatgacaaaccttggtagcagaagggaataagttccagataatacacttttgaagtaatgaataacccttcctatgaagtactttaatgactcttctcatcaaatttatgattttattattaacattaaaaatggaagctcaaaaagatacagttgcaaatcaatttcactgtgccttcataatgagtccctaattgaactcaatttctgttacagttgtgaatttccttccatacttaattttaatgacatgtatagaaggatttagtgactgggaataaaaaaaaattatttaaactctattttttatgagtttaataggtgaaatgtaaatcataatcacattaatatgataattgagagtgtatttatgcctctttacaggttagagaatgatcacttggttaaattagtgtttcaattaactcattaaaaatagatgataagtaagaagaatactttcgccacctgatgcgaagaactgactcattggaaaacaccttgatgctgggaatgattgaaagcaggagaagaaggggacaacagaggatgagatggttggatggcatcaccaactcgatggacatgagcctaagctcggagagttggtgatagacagggaagcctggtgtgttgctgtccatgaggtcagagagagttggacacaactgagtgactga

SEQ ID NO: 38531 - DNA, 810 bp, Bovine  19866881327525
  misc_feature (1)..(1): n is a, c, g, or t
ntcaaatgtattttttcaaaatcagtagcagttggtttttaaggtgtatattcatattctattagttaaatgagttatgccaatggtaaatataaaactccttaaagttaaaaaacaaaacaaataagccacccaacaatctgacaaaacacttataaagcattttgtgtaatagaataactcaattgaaggattatcttgccaatactcattaactcactatcaatacacataatgattcaaagcttttcaaagcacataatgctctagtggtctataaaacattaatatatatggacagaattattgtatcatgacacaatcattttcatttaaaattccagagttgatgaattttgatctctgctacttctaccaaaatcatcacaataggccaattcttccccccctggaattctcataaaatagttgtttttatcctattaatttcaatactaaaattatcttaattttgtattttaatttttcatgtgctaatgaattttaggttaaatatctttcaaagtagatagattagtcttgtttctaaacatgggggatattaactcattgtatccatattttgttaagctcttgtgtgtcaagagaccttcctgtgatactcatatcatctagccttttacctcagctctttgtgaaattaaattactgttacagtttcatcactgacattaaaactgctataagctaaatatgtgtagttatttcactgagaattctgaagcacacatcctacattagaggacatatgaatatctatattgaagaatatagaatgaaagaagaaag

SEQ ID NO: 38532 - DNA, 1841 bp, Bovine  19866881352831
  misc_feature (1)..(1): n is a, c, g, or t
ntgaatccccagagactgctaatttctactcttcagcaatggaatctttacatttaggtgggcttgtgaccatcaaacatagatgtcatctttttatgcctccctagcagccaggtaagctcctttaattagttccagttaaataaatataagaaggaaaagagatatgtgcatcttttggagctaatgtgtaaatggtggggtcaaatttctttttctctgttcagctctttggactgcatcccaagggtaagcacagcagcaaaattggaagcagcctgcttatagaccactatggccctgcagtattagattagcattaacctctttatacttggatttaatctttaaaaaataataatacttctgcttttgttaagccactatggagtctctttatggagccaaaccaaaactctaaccaatatgatatgcaaaaattaccttcgtacattttaatgcaaaatataaacatttgggatcctaggcatgtgactatcctttctgtactcatctgctccgtggcattaaatagttgaactttaccttacagtgtcctagccgaactactggattgaaggacagacagagggtataaaagatacaggattttaattatacaaagtctcttggagagagagagtgaaaggttgaggttgagaaagggcatggagagaagcagagagacagggtcagagggagagggagagagagagagggagggagaggaactgcaactgtgaggtttggtgaaaaaacaaaaactgccacagaagatttaagtctcaataaacagttttatatgcaatttccgcaaacatattttcatttgctataaaacagcaaacggcttgggagggaaaagccagaaatatgcatagaggaaaaaatagtcttaaataaatactggcttgcaaaaaagaaatggcagtctatattgaaatatgtttatcttctggtactttaaaatgcaataaatttctcccgacaaacaataatttggtctgaggttaaaacaaattcccatttagtcccaggaatatgtaatttcagacttttgaggatgaatggttgtttttgcttagatattgatcattagccatgtaattctggctggactaggtcacttggactttgtagttgtaatgaaagaaattgcattaatctgattctttgaaagttaagcaaagatatctgaaaaaaaaaagaggtattaaaagttataagtcaaaagcaaatacaattttcattataaggaaagaataaaaatattttaagaaaagaacttcctttgggacagggacttaaagtgaaacatggcatgatatatttgaataattatgacttgtaatagagtttggctttatactcccaaagcattttaggttaatgagtaaaatctcagtaagatcgaataaaacagtaaatcacattgtactgattctaaacaagaacagagtaatagttttatatacatatatatatatatgtatgtatgtatatatatatatttctgtgtgtgtgtgtgtatatgtgtatgttactagggcatagggcacacgtgaatgttgaatttcacaacctcttttcttgatgagcttatggactaatgaaatatatagaagcaaataattataacatgttttctgtaaggaaggctgtaatcttaaattttatttataactcatatagttctagagagaagttaagaaaacaaaatccccatgatttgaaaatgaaacaaaaaatgtaattttgtttattacaacacttcagtaattaaaaaaaacaactttgtatttaaatgtccaaaaaaataagtcacttcaaatcaatgcatc

SEQ ID NO: 38533 - DNA, 4215 bp, Bovine  19866881363837
  misc_feature (1)..(1): n is a, c, g, or t
naagtctattgaagctaaaaggcattggcctaaaggttgaaactataccattgtacataaaatggcttatatttgaagatgactctgcagacataagtcttctctgatggcttagtggtaaaggaccagcctataatgcaagagatgcaagagacatgggttccatccctgggtcaggaagaccctctggaggaggaaatggcaacctgctgcagtattcttgcctggagaatctcatggatagaggagcctagcaggctaaagtccaccgggttgcaaaagctcggacacagctgaacgactgagcgagtacagtacagacacaaaacgccgcctctgtcggtgttaggctagagccaacgctgaggttagtgcctagtctgtcctcagcgctctcagtctccttgcaggtggcacaaaccgcctcttcctctgcttgacttcagcgaagagctgtgttccctggtcactgctgggccactggtgatgctccctgataatcttcatctcctctggttgttttcacttaccattcctagtctctgtggcctttttcactttcaaaacccttaatcttgacctatccttgctcatatgtcagatcactctaatttttctctcagaagaaaacaattttttcaacatttattaaggcaaaatatgtactaagcactgagctcgacactggagaagccaagattaataaaacattgctctgccctcaagaggtgctaggtggaaaagaggggaaatatcatatacatagaatgcacaatgtactaggcataatgctccaggcttcacgtaagtaattttttaatctgaaaattggtttatctgactcctctgatctccctttccccattcagctatttgtaaaattaaacctttttggttacccatatgcctgtttatttctttgaaagtgttgagtgagaaagagaaggaggaagggaggaaagaagaaataaaaaagagaagaagaaagaaggaagggagagagggcaagagaaaaagaaagaaaggagggaaagagagagagaaaggagaaaggcaactctgttggaagcatataataaggttaagagtgtggaccagtcagtcaaagtgcctcacataatttttagcatggtcttgaggaattaaggatgagatggctggatggcatcaccgactcgatggacatgagtctgagtgaactccgggagttggtgatggacagggaggcctggtgtgctgcaattcatggagtcgcaaagagtcggacatgactgagcaactgatctgatctgatctgaggaattaaatatttttaaatgaatatatgccaataagtatttttatgagtgtcagacatgactgaattgacttagcacataaaaggttagttattcaaatagtgttctctgagacatttcttaataaaattcttcatctatctctccttctctccttccaagagttctctagatttgaaatttgggatatcattcccaactctatcctagggctttaaattcatcagtaattattaataaacccataggaacagcaataatcatcctgtcctctctttatagagctcaatagcccacaaagtgctactacatacatcatctccagttggagaccatggtgtatatataatttaacttcatcactcagaatctttcagtaagggagacttgaaaaatggatagtaagtcatacaatggtgcctattttaaaaaattttttcaaaacttcagtattcattttctctaatatctggtacttccaggctgtttgaattttctgatatactttataacctaagcctaccattttctccttggtttcatcaattcagagcttttgccagactgtgaaacaaagacacagtaaagctactaaggggatggggggaggaattgcatattttttaaaggcactaaaagtccaaaccataaatatctgagactaagaaaccttttaggccagtgatgctgcagtcttctgaaggtggagcagtaactgaaccaacagagccagctgcttaagaatataatgcctattaatatccatttaatatctttgccctgaaaacacaatttgcttttgcgtggatgctgtggttgttcccactgaaaagtaaataatctctcctctttggaaacatgcacttaatagagaagaatccctcctatggctgaagtaatgtgtctccccacacatctgtagttctacggctaataaaaaggattatcaggcaaatagaaatatagtttatagttgcaatagctcacatcattaccttttacctcaatacgtaaaattaagcatttatgcctgaaaactacttaaaagccagcttttcagattccgtattcctctgacattgtataatgaatattttgtcatagcaagtaacagattttattacagctctaatgcttaaaattccatctgtttccacaaacagaacatgaacacaggaaagcaaccattaatcttaaaaggcactaaaaaattatcctaataaagggattctaaaaaaccttttaaagtattcaaagtctgctaattatgggatgctgtgtgtctgacaccttggtttccattcactggtccctcagagcccatccatgttaattctatagatttttaaggcaatttcaaagcaggaaactgcctaatttggcagtaggataaacaagtttcatttgctatttcatctacagttttgcaaatgcaagacagcatacaagggacttgggccacagagccatgcaatttatttttatcaagatgctcattccttcatatatccttcaaatatttattgaacaccttctatgtgttgaacactctgccctgaaaatttttaaatgaaattcatagcctctgttctaaactaattcatagttaagtggatggttggcagtaaatatgatactctctaatgagaaggaaatcaaggactatttctccaaataggtagcatatggggaaagttttaaataatgaagaggttttaactagacaaaaacgatggcttcccaggtggctctgtggtaaaagaatccgcctgccagtgcaggagacacaggagactcaggtttgatccctgggttgggaagatccagtggagaagggaatggcaacccactccagtattcttgcctggaaaatccgaaggacagaggagcctggcaggctacagttcatgaggtcacaaagagtccgacacgactgagcgactgagcgcacacacaaacaaaaaagaagataagaactatattcacaattatctaactcaactcatatatcctctgccatttaaaaatgagaatacaaaaaccgaaaaaagttaagtgattgtcataggggtattctgtaaatcaatctgcaataggcaatatttagcccactgttagcacattctgtttttcatacacacaaacacacacacacatgtatacgtatatatgaatatagattactaattaataatattactggcaattgcacttttgaaatatttgtttacaagtttctcaatcaaataattaaattattggagttatgattctacattttgggggatgtttttaattctcaattataattgagagtcccacttagctgagacataaaatttgtaaatgatgttatttatgcttttatttcagaattaaagaaataaataattagccaatgaaatgggagatcatgaactttttaaggacattgtcatttgtgacatttgtcatttaaccatatcttggttaaataacaatggcatgaagtgataaatgcaaataaaatgtatgcaagacataatcatctcacttctgtagcagatgaattcctggactactttcatgcatctattttctacttagaattctctgagatgttagcagctaagatataaaatatataaaatatgcatccagagtatacaagtatatgtttaacaacttgctttcagggcaaaatgctctgatttgtagcatttctcaattttgtaatataaatactcatggtgactgattttaagccaccaatataacatgaagcacaagttggaatcaagattgcgaggagaaatatcaatagcctcagatacgtagatgacaccactcttatggcagaaagcaaagaagaactgaagagcctcttgatgaaaggaaagaggagaggaaaaagtggtttaactcaacattcagaaaa

SEQ ID NO: 38534 - DNA, 1020 bp, Bovine  19866881424828
  misc_feature (1)..(1): n is a, c, g, or t
ntataagcagagtatgtcatgtgaaataccaggctggatgaagctcaagctgaagtcaaggtttccagaagaaatatcaataacgtcagatgagccgatgacaccacttttatggcagaaagtgaagcagaactagaggctcttgatgaaaatgaaagaggagtgaaaaaagatgacaggatgagatggttggaatgcatcactgacttgatggacatgaggttgcgtaaactccagggcttggtgatggacagggaagcctggcatgcttcagtccatggggtcgcaaagagtcggacatgactgggcaactgaactgaactttcactctctgccagtatagtgaatactgttccattatcaaaaccaaggtgctatttcgtgcgtgctataattaaacagtaataatactaatactttctatttacccagagtcttgccctccaaaatataaccaatttatttactaaattaaaaaatatttattaaggttcattggtaaaccagagtctctatcctcatagaccttacagccgtgagatattatagagctacaacatgtgacaaataaacctttactcatttaagataggtcttaacaaccaaattatgtctttagtcataattttaagaaaaaatgttaacctgaaacagtgctgattattttagtgaatttatgtatccttttggactttttattgatatgtggtattatcaagaaaacacattttagtaagagtgtgtgcttgggaaatgttaacaaattacttaagacaaatgatttccttgttcatcagggtttaaatatcagaaagaatatccaagccagttagcaattcttacattacaagagggagtcattttagacccgagagtaagactttgatacaatagttcttgacatgtgaattcatcatgttataactgtttgggaaataactgttttcctataaaagttagacatacactttcatctatatgaagtatttgaatcatatgtatcagtttcttatgttacca

SEQ ID NO: 38535 - DNA, 1732 bp, Bovine  19866881439047
  misc_feature (1)..(1): n is a, c, g, or t
ntttttagacttgctgttacctaattaattacctctttatagatgtagatgttgctgtttgcttgcctgatttgggttattatgaagatcaagttataagaatgaatgtatttcaatgtgagtctatctttctctctttttaggtgagcttcatatcacctttaaacgttggaggtaagttacatcctttgtataatgtattactctagaccaaccagagagcagagatcacctttctatatttatgtcccttgtcatgcactgttttgcaatgtatatacattgatattcaattaaaaaatttttttctatcttctaccctttttgaaacagaagaaatatggcacaggattactaaaattgacaggtccaacattagagatttatagtgatagggtcaaaattagaatctgtatcttcttattactaaagcaattacaaaaacaagattttttaaatgaaaaaaataaatgtatatagagacccctaaattgtagtgcgcatacagagaaggtctacttgctcacactgagagtgactttgcagtttataattatgcttctttagtttgctaggtgaataatcttagtgactgggaatgattttaagactgtcaatatattaagagaagacaggaaagatattgttctgataatatagatttgtcccttcacagtttcctctaaataaaatgcctggaacttttgcaaaaaaaaaaatactccctactcctttatctaaatttcccatattctttatatgtaacattttgacttggtcttcttgctgtattttttctttctttagatggaatctcttgtgtgaactaatagtctcttgacgtgtaagctgcttttaaaaccacattcatcttggggccattgtacatttatcttgccttctctgacatagtttctgggccataatttaaccttccttctgtataactgatgcttacaaagcttccaaaatagctatattttattacttgaaaatgtcagcaagactgagtatattaaatgtacactctagagaagagtacttgctcatattcttctctattaatgttaatttggaaaatgttcttggatttttccctattcacacagccccatacacaaactctgaatgtagacaatgcgatgatgaagacatgattagaaataagagttttatatctccacagagaagcattccaattttaatttccatgcttctaaactcttatttcaaaaatgaatttattttgaccatttttgaactctgagtgctccttgggtcctcgtacacctcacggtccagtcctcttgaccaattagcttgatgattaccaaacctaactctttcttgatggatggtaggtacagggaaacatattgaaaacattagcaaatttgtatgaacagaataagtcataaagagacagtatagaaaatatccttctataatagatccttgtactgtcttcacaatggtctatttttttcaatgatcatgttgtgactatgtcaaatacctgttcttcaatttttctttcctgagtaaaaagtgaaaaaggcttgaatccatattaactatctctctcctaactacttctagacaatctttatagcccacaggtccaaatttactccctgtacatagaagcaattaattttacaaagaaaaaaatgaaaggagcgatggaataaaagggatttgctatgggtgaagttcagtatgccctaggcta

SEQ ID NO: 38536 - DNA, 1317 bp, Bovine  19866881460932
  misc_feature (1)..(1): n is a, c, g, or t
ncattccgtcaaaatctgttgtctacattagctgagcataaagggacacatgcgtcccctgggaagcctttggtctgttcccgcctggcagccctccttcaacccccactccacatatagggaagatgggtttctctctgtgtcccccaaggaagttcttttgcttttttatatctttacctgccctcatttctgaggtatttacttttaaactctgacatccagagagggaaagaaagataagagccacatgttgtaatggtaaaaatgaaagagagttgaaaaatatatcatacagttatagatcagaagagagtccagcagagtggtaaagactatgcaagcattcctactgccttttgctttctttgattcagatacaatttgctgaccttcatttgcaggttgaccaggacacagggggacatgctgtacacaggagatctcaacaggcatcaatgtttgaccagggaccaacagctgagaacagagttgcataacttcagatgacagatgaaaacaaagcacagccgcagcactggaggagctggagtgcggccgagttactgcagcacacgcttaacttgccaggtagcttgaccccatatagtgtggtgcacgccccttagcacacaattccaaaatccggagttcgtggatattttcctggacctcgccagtttatttcagatatgcttcagtattttaatttctctgttctccttatattcctttaatttctcaacttaagtcctcaccaaggactctggatctaatttatcattggctatttctacttaaggaatctcagttcatgtacttcccatagcagagtcgctctgaatcaaacttctcatatctccagctggtcggtgcccttgtttgccctcctagtattctattcaaggagaaataggaggattcacatattgggatgtaggcacacacacaaaaagaaatacaccttgtttttttgaattggctccaggaagggtacttctcaaagagcatgtcatgcgtctaatcgttagagttgaagcacaggatccgaaaatgactcttcttcaggctaatctagttttcctgagttgtctgttttatgaccagaccagagaactgatcataaaacttaaaatgaggctaaatctgtttcaggaatcacctggcagcagatgtggagagttgggcaatttagaactttttttggtggaccattttttttttttctttttttggctttattgaattagttacaacatttccttctgttttgtttgaccttttggctgcaaggtatggaggatcttgactccctga

SEQ ID NO: 38537 - DNA, 810 bp, Bovine  19866881495743
  misc_feature (1)..(1): n is a, c, g, or t
ncttcagtactattatcttaattatcttttggcatcttgatgctttatataacctacttaaaattatagcaatcatccactcatctgtcatccatagaaaaatattttcctatgtaagttattattctattttagcttaacatttttcaatgtagatagtataatcctttaaaatattcaaatttatcatcttttcctttggcctgataattttttattcaaatctggataagttattaattcttcaccgatcctatttttttttttttttattttagttctttaaatcatctcttactagtgtaggtatactattttgatctacctttcaaggattgatttgcatacttggcatttttcaacagagggcagcactttgcatttgttctgccttgtgggtgcgtatttcaaccacagaacaccaaatgttctgaaatcttgctcctgcacatacagtgaacagcatgtacaagagcatttctatggaaacaaaggatgtattttcttatcatagaacttctgggagattcttaaatctactttgaaatgcaataaatgctctttaaatcaataattttggtgaaaataataaagaaagagtgcatgttacaaaaaaaaactgaatcagctttgaaagaagatagcgatgactgattttacccaaaccttttagacaatcaattctgactgaatgactaaaccaataaggcttgaatctcctgcagataatgtaaccaaattttgcaagaattgcaactaaagctttattctatatatgatttaattttaaaaatctacattatgttttaa

SEQ ID NO: 38538 - DNA, 1484 bp, Bovine  19866881605297
  misc_feature (1)..(1): n is a, c, g, or t
ntatgtggtgaattgatccataccccttatttcttgtcagtttagcactgtgatcaatgatacagtctccataactaggttactgggttcaaattctggctcctgggcaaacatagccttgggctatttactcagtatctttggattcagtttccatatctgtaaattgggaacaaaaagaatagcacctgcagcaataggttgtttggagggttaaaaaatcatggtcattacataataactatttccaatatcaacatcattatttttactcaaagcttcctctgactcagagcttcctcatctcaccttatatgattgttggcaagatttgatataatatatgcatataatttataacatgcaatggttcctataacataaacatctttcaaaaaaggtaattattattccttaaataggggagaaagatggttgagttgggtggtccagtacgaatctcagatttccacccttagagccaagctctcagtatcttcagaaagccatctttctccttgtgtgctctaaatttcactgcaaaggcaattttcaaaacagttaatcaggtcaggcttatgcatatagcttgagattcacatgtggccaatggattccctaatttagatccaactctctaacatttccatctggtttaaaagcatttattttctttaatgctctttctggggtcaatggttccccgtaaatgactttgctatttggccatattagtcaggcagtactctatctgtataaagtaacacccatttcccaccactttgtctttttgtagagtgtcttttaaactgaaagcaaaagagttgcaataattgtccctggacactatcatgttccttcctgattctttgattgtctaaaagtgaactgggaaaaatataataaagttctcttcaataattagttcattggccaagaaaaaattggctaaggaaaaagaattagcaattctgtctgtcattaaagcctcattattcaggggtccagttaacacagttttataaattagaactaagaacagctggtggataagatgaaagaagccaagtgcatttgattttctttgtactctacctcttccattattaaagaaaaacattaaattttattgttgcaaatgcagggatcaaattaaaatttggatgtatatgttgatgtcatataataaaataatactaaattaggggattgtacatgagctctgttatcacttctgtgattaactctgacctcagacaaattacttaaccttttggctttcagctttctcatcactcaaattggaataacagaacatcacttaactatatcatcaatcaataataataattaaatgtataaattcctgtgaagatactttaaaaagcataaaaattatatacatttttactttttgtggtcattatccctactatttgtaaaaatttctgaatgtagcatttacattagttatctagaaagtt

SEQ ID NO: 38539 - DNA, 628 bp, Bovine  19866881668362
  misc_feature (1)..(1): n is a, c, g, or t
nacgaacgctataatctgtaaaaagcaataaaacaaagcatggttacacaaggtaagcttgtacctgcttttttctttgaacttaattaaagttaaattcaattaatttaaaacttcattttctcacctttgccactctttaagggctcaatagccacatgtgactacctgctaccataccggcctgcaagactgggaaacgagtgtgagtgtgctttgtttgttcttgtttttgttgttttctgagtttatagaaggtaggacattctgataaaaagatgtttatcttttatgcatttccaataaagaggctaattttcttctttggtaaaatgcccggtgaaaataattgtgatgatgagtcagcattttaaaagttatagtcattacaaactaagagcgctctccttgaaaagacagttgtgtcttgattcagtcaagcaagatgcccaagctcctcacacaccagatgagccttctttgaggttctgttccctgaactgctgctgttgtctgctcgactaccactgagtgtcactgtgggctgagaagcttgtacgaaatcaacagctgtgagaactgcctgaaaggagaggagaacggaatgaaaatgcacgatgatacattg

SEQ ID NO: 38540 - DNA, 721 bp, Bovine  19866881707297
  misc_feature (1)..(1): n is a, c, g, or t
ncttgggggaaaaatagtgtccctggaccatgtgttttaatattcccaatttgagaaatgagaaacataaacatatttaaaatattgagatagtctttggtaaactcacttaaagcttataaatatcccacataacacagaataaacgttggaagaccccgtccttagagaagccatccattgtcttccatttgctcttctgcatatagaatccatgctgcaggcacaagtattctattaatttatagtggcactagaagtaaccataaaataagcaccatgggtcatactaataagatatgtcggttcaaagtcaagaatgccaactaatgatgatatgcctaaagcaaacacatattgataaaaactatttcaattttagaacatgacaagtttcttaaatatcaaactaggtattgctggaaggtataaagtcaaattttattaacatttatctttccaccgggaaatttactcacgctgacagtactgaacaaatttaaaggattatacaattctgtttagtttcagattcaaagacaaaactactaaattttctattatcactgttagtaagaagaatagaaaaaaattcctatatgaaaattagaccatgctcctcttctgcttcaaaacatctaatggtctttcagtttaacacaatatcacatcctataatttgttccttatttgcctcttcagccagaagttcaatatggct

SEQ ID NO: 38541 - DNA, 907 bp, Bovine  19866881931735
  misc_feature (1)..(1): n is a, c, g, or t
ntttattgtatagtagggatgaagggggattttgtgtcagatgagattcctgtgggatttttagatcctgggtcgtcaaggaatagtaagtggacagctgtgagtgctgcagtaatgggagaataaaacggaatgtgaggaattgtctaagagtcgcttaatctactgaaaagccagttcagatgctttcactgagacttatgctgatatatggaattgctgcgaggaggttagtaataactattgcccctcagaacgactttgttctcaggttaagacatagcctataaatgctgtggctatgactgtaaataggtgattctaacgaagtgcagtttctaaaaaagtctaggatccataatagaaccctgatcctacaggaagaaacaggcacataaaaatatggaggctccatttccatgtagatataagataactcacctgtaatcgatgttcttggctgggtaacattaactactgctgctgctgctaagtcgcttcagtcgtgtccaactctgtgcgaccccatagagggcagcccaccaggctccccagtccctgggattctccaggcaagaacactggagtgggttgccattgcattctccaacattaactagctaagtattaatgatgagaaagtggttattgtgtttgatgtgtaatgtattgctagaaataagcctgttaacatgtgtaatgctgaacaaatgcccagtaggaactgaaatctcctcatgatgggtttgatgggctggaagagcaataaatgcattgttaataatttgtattaatgggtgtggttttcagatgatggtgattggtgttcgtatagttgaataacaatgatgatttttcatgtcattggccatggtttgagtccatgtgagaataatgataacatata

SEQ ID NO: 38542 - DNA, 1088 bp, Bovine  19866882113513
  misc_feature (1)..(1): n is a, c, g, or t
ntgtacctccaaagcacacgcccagaagagaagggacggatgtaggtaaattactactttatgtaatctccttgcaggggccttcccaatcaaagtatggatattgtgctcatagtctcttctcttatacagtgtcatctctgcctcctgaatggctctcattaattctctcatcactggggaatattgccgaaagagaaaggcagtatacctctttctcatatcctggagatattggaaaaatacagtggagcaagttaggaagctctgtcagttctgtttcccccagatcttccctcttccatctcttgcaagagtgaacacatagaactgtgttgctgttctgtatttcaaggtactttgacgttgaagtgtctgagttgtttcacataaagctctttgaccttttaatgccagttcagtgatatatcttcatcagccctgaagctaaaagaagatggaataagaagcatttcagagcaaggattaggaagattaagtgaaaagtcagctcattattgagtttctacaatagccccaacacagcactagatcatgataatgaagaaggacaaaggagacatatccattgagtagtagagctacacaaagtacattcgcgtttgttatgtgctcagtacttacgagagtccaagatagacattgctatgtctattttaaagacaaggagactaaaatattgggggtgatattttactcacttcgcctcagtcagatagctagtggaattaatacctaaaccttcacaatttcataatctagggggcagggaagagggacaacaaagtgtaatttgattttttaaattaaaatatatttggggaggtgaaatcgacactaatgatgtaacatcaaacacaggtgtttcatggcaagttgataaattatataatttagaccacaaatgctcttgaaattaaggggtcatgggtggggaccttgaccattcatggactcgtgaaatgttggagtcagcaaagaagtttttgctgaggtcttgaaaatcaagatagtcctaggatgaaaatgtactatagggattggacatcaagagagaataaagagca

SEQ ID NO: 38543 - DNA, 3770 bp, Bovine  19866880339911
  misc_feature (1)..(1): n is a, c, g, or t
ncttcattccatattccaagaccaaatttgcctgttacccccagttgtttcttgacttcctactttttcattccagtcccctataatgaaaaggacagctttttggggtgttagttccaaaaggtcttctgggtgttcatagaactgttcaatcagcttcttcagcattactggtcagggcatagacttggattgctgtgatattgaatggttaccttggaaacgaacagagatcattctgtcgtttttgagattgcagccaagtactgcattttagactcttttgctgaccattagcatttcccaaatgactcatgatgctgagtatcttttaatgtgcttattggaaatttgcatatcttctttggaagaatatatagaaccttgccccttttctcatatagtatttgtattttgttgtcaaactgtaagtgttctttctgaacgccggtttcttagcagatatatgattcacaaatattctgtatattgtctcttcatttttttaatagtattctttgacgcacacattttttttaatttacttagttttaattgaaagataattgctttacaatattgtattgatttctgctatacatcaaacatgaatcagcctcaggcatacatatatctactctctctgggctctccctcccaccccatctcacgcctctaggttgtcacagagcactggtttgagctctctgagtcatacaggaaattcacacaggttatctgttttacagatgatagtgtatatgtttccaagctactctctccattcatcccaccttcttctttcccctccgtgtccgtaatctgttctgtatatctgtgtctccattatggtggtggtggttcagtcgctaagtcatgtccgactcttgcaaccccatgggctgtagcctgccaggtcctctgtccataggatttcccagataagaataccaaagtgggttgctgtttccttctccaggggatcttcccgacccaggaattgaatccaagtctcctgcatcgcaggtagattctttaccaactgagctatgagggaatcccgattcagttcagttcagttgctcagtcatatctgactctttgcaaccccatggactgcagcacgccaggcttccctgtccatcaccaactccctgagcttactcaaactcacatccattgagtcggtgatgccatccaaccatctcatcctctgtcgtccccttctcttcctgccttcaatcattcccagcatcagggtcttttccaatgagtcagttcttcacaacaggtggccaaagtattgcagcttcagctttagcattagtctttccaacgaatatttagggttgatttccttttggattgactggtttgattttgcaatccaagggactctttctttgatagaatatccttaacattatcgtcaatcctgaataatcctgaaactagaacaagaaatgcacatgatagccttctcttgaaagcacagtggattaaatatgaaatgacttaagacaagtctcatcactggcacagagctgagcaagatctgcccagcaaccacttctcaaaagtcaaaatcctgaaaagaattaagttcttaccccactttgtagggtatttgtgtatttttccatctggaccgatcccccttgctgaggctctgtgaacctctgcaagtctcaggtcacaagtctttgcatcaagtcttaatctgtcctgatttcttaaaaaaaaaaaaaaagagtgaaatgcaaaggaaacagacaggaaaaaaatcactatgatctctctttttcaatttgtttgttttcctttttcctgggcgctctggtcttcaggattaatgctcactctggggactaggcttatgtagtcatggcaaagtggttaaggaaatgaactagaaatccactggggtctccctgagcaggttcaaatcctgttgactatgcattccttttagggtttcccggtggctcagacagtaaagaatctggctggggactagactaaaaattggtatctctggctaggatcttggggaaggcccacctagataatacagagatattaaatattgacccctagaggtttcttccaccccaaatattctgaggtccagaaaggaatgatgatcccacatagatctttccaaactgggatttttactcctgggctgggaaaaatgtactcagagccccactaggtggcgctggcagacaggcaagaaatggctctgattttaaaatgtgagcacaaacttcctataagccagagaattcctttgtttctggatgaccaagatcagcttttgtcaagcacatgtcagaatagctttctggagtaacaataatctaactgtacagtttaccctaaatcaaccaaatagtcaagactgaacgaaagcagaaggaaatacgcgtaggggtaaaagtatgctataaatactttaaatttaagaactataaatctctcaaactatgtagtgtccaaaacaaagatgagtggtgaggagacttaaagatgatcaaaggtgataaattttagattcttattctgatgtggacatgtctttaccaatgagatgatgctgatacgaatttagtcgctcagtcgtgtccgactctttgtgaacccatggcctgtagcctaccaggctcctctgtccatgggatttttcaggcaagaatactggagtgggttgccatttctttctccagggaatcttcccgacccagggatcaaacccaggtctcttgcattgcaggcgtattcattaccatctgagccacagggaattcaggaatccccagattaaattaggaattagagtaggacctctccttcttcccaagaaaccatattgttttaacaaatctagatctgtgcaaggatttgtctggtgggtcgtctgatgaatgtttcactagagctggacaggacttagcaactcaacaaaaacaagtagggtcggattttggatttggaggggcacaggcacggcctctgtctctctcttggctcccacataacctcttccactttaacaagggcttgtccagtctttaaactgtcatgggaacagcaaactgacctctgtcttctatttccagacagttccaatagttagaaaattcgttctcagattaagccaaaccctggccctttttaactcccacacatgcatccccgttctgccttttagagcaatgcagaatgaactaacctttttttttttttttaatggcttctccttaaatatgggatggtttaggccttctcagcctccaacggtatcagttgttttcaaccatatttcctataacagagcttctgcatctcttagttacctttctctgcagtgggacccttcgctgtcttgatttaaatactgtgtatcaataaatgcagccaaatttggttaactctcttcactgtttttcctttggagcctgggggcaactaaaaccccccagatcatttccgtgggtgtggtaggtcccatcaacccaatccttgcatatgccactgatctttagaattaaaatgcggatgttgggctctataataccgcgtggatttaagctcaaagctgcggtctgtcgaaatgacacacgatcctttcatcccaactctggtaccagacatccctggattcaaagttttgttcctgccctcctgagactgtgtcatcttaagcacatgactcatctcagatcatcaatttcctcatgtcagaggcagatcacattcccatctgc

SEQ ID NO: 38544 - DNA, 2524 bp, Bovine  19866880366249
  misc_feature (1)..(1): n is a, c, g, or t
nctcagttgccaaggcccccaggggtggctccagaagggttggaggaccacactgggctgtctgaaagtggatgctcctgtcctctgcagagccatcttggagcagagagcagtggccccttctacgctcccacctcattaatcactactttaaaagactaagtttgggggtgaattgctacacagcaaaagatgacctgaatactcatctcctgagttgtgaaaagtcataatgtatttaaagtgcccagcacacagtaggcattttgtggtaccatttttctcaccatccccactgttcacaaggatttccgtctttctccatatcttttgcgcaagtatgttggcatactcctttgcaggattaatgtagtcattccaccaagaacttactgggcagcgcttttatacctagcccatgagcaggcactgggctttagcaataggcaaagacactggaatgaccattgaggaggtccaatcaccttggatgcgcgtgcatgtgttcagtcgctaagttgtatctgactctttgcaagtctgactgtagcccgaaaggatcctctgtccttgggatttcccaggcaagaatactgaatgggttgccatttcctcttccaggggaacttctcaacccagggatcaaacccacatctcctgcgggttctttaccactgagccaactgagaagcccttaatcaccttggatgttttgaaatatacggaacttttatagaagagctttctttggaaaggactctggtgggaggcaagagggcctatgaccgggggtacaggggagctctccagggtgtgagttaaatgtgtggtctgtacagtaagtcctacctggtaaagaaatcccaaagactaattttgctgttgtcatttttcttacaccaggtctgcaatgcaacaaaatggattgaatagtacaagtgaaatgcttagaacatgcctggttcatggtaagaacacggacactgcactcacatttcaaggccctgagctgggggctctgagttcaactcaatcaagcccttctcacgtgctggagattctcccagacgtaatgtgtcctcgtgaagttctttcgacaactctgtgaagttgatatactgtcgctgtctccacatcataacagatgacacaaaaacacaagagaacagcccacgtggtggagtgggcttgcgagtccaggatgccagcatgatcttccagaggtcacccagggttccagggacagggggtgggtcccaaccttgctgagaatcatccagagagttttagaaacaccatgctctggttctacccccagaaactaagacttagtgaagaagaaactagtacctggatctttttttttaagtccccggatgagtcaaacaggtagtcatggttgaggacagttggctatttagagatgaaaagacccatttgaggaaaaatccctaagtcacagagaagacccatccaaaactgtaagaagcctcacattatcaaaaggtccatccctaacagaggtccttgagagagtaaagctgtgctgtgggttggctgagtatgcagaggtttttgaaggatgcttggggaggactatgctgtaattggaccagttatcctgcctaaccccttcatggatcactgtcttgtcgtggcaaagggacttgcataactcaatgaagctatgagccaggccaagcagggccaccccagataggcaggttggggtggttatatctccaggagatagtgggggacagggaggcctggtgtgctgcagtccatggggtcatagacagacatgacaaccgaacaaccacaatccttctttatgagatgccacagaaaaaccaagtcgcctgtcactagaagggtccagttggactcattatttggcatagatgtagtagcagagctgcaaactctggaaggctgagcaatgcctctaatgttccatccaccccatcattgtctcctccaagccccacccccggaagatgaagaccgtgtgtagtagatgttcttcagaagccagccaacccttcctctgctgcctccccaaatccagcacctgggctcagggtgcagtttctctggcctgcacacatactgtttagggaaacccagatgccagcttgttcaaatgtggttgctgcaataagaggggatgtataagacgtgtcacgtggcttcccacccccgactcctcctcctcgggggagctcacacgtggccagggctcacatatggctgagacacgctgcagtgaatccatggcgcctcaagaatcaggccacagtcgttacccatcatcacctcccagcagcaaacccagcagtgttcttagtgtcttctgggaggtgggagccaagccaaggctgcagcagccagccacctggctgagccttcagacaacccctcacctgggggagttctcctgcatgaagcctccacagtcctatttctccccaattcaagccaaattgtttcttaaactatgtttcccccaaacaacttaaag

SEQ ID NO: 38545 - DNA, 2127 bp, Bovine  19866880367533
  misc_feature (1)..(1): n is a, c, g, or t
nacagctcacacctgccccacaagtgttcacagcactcacaccagaccctgactggtaggccaggcggaagccagcgtgcagatgaagccagccccagagtctcaacaaggagaacgccgagcctggggggtgggcttcccagacgagaggcacagcctctacccactgaagaggaggacaagccccggagtggcaggtggagggaacaggagagggggtcctgataggggatccggggaacaaagccacaagcaccctggggacggtgaatctgctgctcggcatggtaggaccagacgagcatggcggggttgagagggtggcacacaggccagggaagacaggaggaatttttatgtttgttcacctctgcctggaaaggtatctggcaggcaagaggtgcctgtactattctgcctgtgaaatgggcatttaactataggctggataaattgatcagagaatgagtgcacactactggagatgagagcagtgccaaagacaggaggagccctggcgcttctccccagaggccaccttccagagcccagaggccccatcactgagaaaaacacacacagcctaccttcatcgacttctcaggctagagtaatcagctaaataaaacagtctgttggcctgacccacagctattcattcagcccaaaagatgcatgaaacatctgtgtatgtgtgtgcgtgtatgcgtgtgcgcgtatgtgtgtgctctgtcgctcagtcatgtctggctcttgtgaccccacggactgtagtccaccagggtcctctgtccatgggatttcccaggcaagaatgctggagtaggtagctattccttctccagggaatcttcccaaaccagggatcaaattaagcacctactatgtgccaaggatggcactgggcagtggaggcccagtggtgaacaaaatgatcagttctctgccctcctggacattatcatccaatgaacatcatcagagcaaatgagcagcagaattatccatcataagaagtgctagagctcctgcccaagtcacattcttctgagacgaggcagtgtagcccagtggacagcagtgtgagctcagaaagcacaccacctgattcggtcctggtcacactattagctgtgtgacctcgggaaatttacttaccctctctgagcttcagttcatgcatgcacgcaccctaagttgcttcagtcatgtttgactctttatgaccctatggaccatagcctgccaggcttctttatccatcggattctccaggcaagaatactgaagtgggttgccacactctccctggggggatcttcctgacccagggatcgaacctacatctcttatttctcctgcattggcaggcaggttctttatcgctagcgccacctgggaagcccaagcttcagtcccctcctatgcaaaataggaatcttagtaatatcttcatcttatctgggttactgcaaggatgaaataggtcatccatataaataccacaaaacagtctggcatcataaaatgtcacgaatctgtcatggttgttgccaactgttgtcaagggcaaggatccatggccaagctgcatgaagtcatttcatcagctccctaagagctgatgtttcctaactggcctgacggtgccactggtcagcggcaggaacagaacagtgcagcccgaacttttcactgcctgtctacgccttggtctaaccagcaccaaattcctcccttccagcttgtgatgtgatggttcccctgtgcagaatcagattcaggcttagagtggagcgataaccgagtgtccgtcatgccctgagccgggggatcacagggcccccggcagctggtgcggcaattagtgacccgcgggccgtcgtgtccctggtgtcctcccctcttcgcccccggctcccgccctgatgcccacaagcacaaacagctctggagctggacggccacaggggacgccgagcttttgtttaaacctttgaaccgagtcgataaccagctccaggctgttaatggccacaccagccacaccaattactcccaaggccctgataggctgtttctgagtcccttctgaactcctctcatcacacatctaccagatctact

SEQ ID NO: 38546 - DNA, 1591 bp, Bovine  19866880578548
  misc_feature (1)..(1): n is a, c, g, or t
ntgcggccccgcatatgttccaagttaacagacaggtgagactttaggcagagtggggaggtgggggcgtgaaccctgaaaggtacagcccacggccacacgctgccagcagccagaaccccaggcagctcccaccctccttgagccctagcgcccacctttccaacagaaggttgaacctcacaatatccccacctcccaccccagccccgagaacctaagttttctactcagctccccgcccaccctggccgagaggcaaggaaaatagctgtgtccactttggggtgtggaggtgaggtctctgaggctgaatggtttgtccccgagctgggagcccacctctctgcctccccagagtgagctggggcatcaccagccatgtcagcgctgcggctgggagaagggtctgcggccgatgcccgacgactggtctgatagtcagaccccacttcccttggggaaggcagtaggaggtgacagtagcagagctgggccccccaccaccacggctcaaatcccccagttaaggagacaggtgccccgagatgagacagggtcccacggtcaagggggcgggcagagaccaaggcaggaaccgaccactgaaacacacatacagagcgggagggaacggcagggcttcaggccatgacgacatgaaatcaagactgctaattataccccaacgaggatataaagtcagaatcgatcacgtctgagttcagggacttccccaaagaggaaggagcagaggggtgtgagttctttgatcaagtccagggctgggggaggccgacctccaagcagatctgaaatggctctccccctctcctctgggccccctcttctgcagggtgcacacgaacatgcacacacacacacacaccacacacacggacaagtgctccccacaccaagacctggcggggaaaggaggccacttcatgaagggcaaacggaaaaataacctcgatgtgacgcgtgggttggcaggagctgggcagagctcaatgaacagaacagaaacatattgacaatagcaaaaagaaacaattaccacgcattttcatatgagatcccatccccaggaataaatttgctctggcttttgcttattcgacagaaaaacacgaagcaggagacggagagggatgaggaccggcagaatgcagacgctggcattttgtgcctccacgtttccccgaagctctctaaagagtgttttttggagatacaggctgacacggcagtcaggaggaaatagaaagaagaacattgtaagtggagaggtttcagggtgctgcctccagggcagccacaacatagaacaccgtcaaattaacagggagaggggccgctcccaaccactcggcacagttttgcaccttgggaagtagaagttatgggaaaaaaaaaaagattttaggtccatggtaccagcatggtgggcttcccttgtggctcagctggtaaagaatgtgcctgaaatgcgggagacctgggttcaatccctgggttgggaagatcccctggagaagggaaaggctaccccctgcaggattctggcctgtccatggggtcgcaaaga

SEQ ID NO: 38547 - DNA, 1068 bp, Bovine  19866880599840
  misc_feature (1)..(1): n is a, c, g, or t
nctagcatttaggggcttgagacagggttgagcgccaaatccagaaaactctgctcatgtgtctaattgactactcattactgagtgcccgccgttcatttatggaacagacgcacatgcaacacccactatgtgcgaggaacggggtgccttcctacccaccctacatcccaggagcgggaccctgcctgtccctgctgccacccttcaggagccagctgcctgccactccactctaacagctcccaggattgttgtgagatgcaaactggaaacctacatgaaaggatgttcattgctgttgttcagtcgctaagttgtgtccaactctttgcgaccccatggactgtaatccgccagggttccctgtccttcaccatctcctggagtttgctcaggttcatatccattgaatcagtgatgccatccaaccatctcaacctctttggaaacagaaggctgtattagcactggtggtcagactgtccctcccctcccttttctttcctagggacaagatgccagcccagctcaggtgtccgcaaagccctctgcagctcagcaccccaagaggctctctctccctcccggcatcctctcgccccagtcaccccaccttccaagtcaggactgtggggggtaggcggaggtcccagagagatgaaagaactgagaaggtcatcccatcaatgggagggaggtgcccagcagcagcaagtgagtccctagcatccggggagtggcagctcactcgggagattgtctgtatcctccagggcagagcaaggattacactgctgtgtcatctgctccaactcttcctgccaggagtcgggtatgatacctcagtaatacggccggctgacgctccccacagagatatgcaacttacacacgctggatcaggcaccgcatgctgacatctgtctcatgtgaggccagggacatcctcctcagggcagcatgaagctgcaggcaagacgcgagcctggggtcagggggcgcagggggccagccccagtgacccaaggcccaggcaccatgaccgatcagatcgttgagctgcag

SEQ ID NO: 38548 - DNA, 2757 bp, Bovine  19866880670919
  misc_feature (1)..(1): n is a, c, g, or t
naacccactccagtatttttgcctgaagaatcccatggaccgaggagcctggtgggttacagtccgtggggtcgtggagttggacacaactgagcacgcatgcattacatatgttatttaatttactctcacagaaaccatgtgagcttcagagacctctggagtgagttgtccaaggtcacccagttggggctcccctggtggctcagtggttaagaacctgcctgccaatgcagaagacatgggttcaattcctgatccgggaagatccctcagaccaactaagtccatgagtcatagctacggaagcctgtgcacctagagtctgtggtccacagcaaaagaaaacacagcaatgggaagcctgcacaccccaactagagtaacctccggttgccacgactagaggaaagctggagtggcaatgaagacccagtacagccaaaaataaataaatagaatttttttttaaaagatcgcccagttagcaaacggcagagtgagggttaccatctggtcttgcccaactccacactcactgtctttaacactgaactcggaggtgtaattatgggcttcacagagagtcacatatcattttgacaccaaaacactggcatttcccagaccttttctggtttgcttttttaatatatatactaaaagtctttagttgtacagtaaactcccatcccccgggttcaacaatgatcaacatttcctcacacttacatctccccattccttcctcttctctcttttttttctacagtacattaaagaaaattcctgacatttcatcattttgcccctaaatacttcccatatgtagctctaaacaggggggaaggcgagggaaggagggatttctgacagaatcacgaaaccaaaccacctaacacaggtcacagtttctgaatatcgccaaacagccagttgaactctaatgtctcctcgtgtctcagaaaacactgtttcacatttgatttgtctcaagaaggatccagacaagattcatctactgtgtttggttaaatgtcccctttgtctctccattctgacttgaatcctctttttttttccggcatcatcggttatgaaagaaatggtgcccactgccacggatgtttcactccctgggtatgtgggggttacttccttgtggtgcatttgacttcttcttttatcccctgtacttcctgtggagtctaaattcaaagacttggggaggtgcatgtttcagcaggaacaccacacggatggtgccgtgtacttatgaaatcacttcaggacagagggtacacggtgctcccagttttagtgctgagaactatttacatgtttagatggttaccagatatctcaatggcttatagagataagagataggctattttaaaaaatttcgttgacgcgtagttgatgtagaatgctgtattaatttccactgtgcagcaaagtgactcagttatatacacatgtattcctttgcacattcttttctattagtgatttattaacatcataggatattgaatatatttccctgcgctatacagctgtgttgctcagtcctaagttgtgtcccactctttgccaccccacagactgcagcacgccaggcttccctgtccttcactatctcccggagtttgctcaaacacatgtccattgagtcggtgatgccatccaaccatctcatcctcgtacaccctcttctcgtgtcctcaatctttcccagcatcacggtcttttccaatgagttgactctttgcatcaggtgaccaaagtgttggagcttcaacttcagcatcagtccttccaataaatattcaggattgatttcctttaggattgactagtttgatctcctccttgtccaagggactctcaagaatcttctccaacatcacagttctaaagcatcaattcagagacagaatatttatttattaaaatgtttcagccataccacgtggtgtgtgggaacttagttctctgatcagggatcaaaaccatgccccctgcattggaagtgcagtcttaaccactggaccgccaggaaagtcctgaggtagagtatttaaatccttcattgtcatagactatctggactacctgctggcttctcttgtgtgccaggtttgaagataaagcctagtaacatgggaaagctaaacttttctggcttcaagagggctgcacctttggggatctgaaagcctgtttgatggaagagagaggagtcactcttaggtgtggaggatttgccctttaatagatgtaggcatcttctccctcaagtgttatcctgtgggtgtgcttcacagttataagctaaacaatccaggaattagaaggtggccggctgatgctggcaggggagacaggaaggatgagccaagtcaagagaggcaggtgtggaccccatgtgctgagggagattatggaggagagagcttgaggggtatattgatgctcttggggagagtgagcaggatacaaaagacaacagaacctggaccaaggagttgaaaagactccatgcaaggaacttcatgcagagtgaggaataccagcaaatcatgaggagagggaagttatttgtgaaatccagctcaaagagtcttagagtcagggagtcctcagactgaagggactgtgggatagcccactatatcagaaaacaaaggatgtcggggccatgaaccagcagccactgcagctgcctgaccgtgcacactgaggggattctgg

SEQ ID NO: 38549 - DNA, 1005 bp, Bovine  19866880701439
  misc_feature (1)..(1): n is a, c, g, or t
nacggtcatttctcattagtgggtcataaaatagtttagtgggtcaggaagaggattttttaaaaattaaaacaaaacacaaattcccagaatgtatctcacacagcagtttcgtggaacactttttcaggggtagcacacacgcacacagcttccctggtggctcagtggtaaagaatccgactgttaatgcaggagacgcaggagatgtgggttcaatctctgggtcgggaagatgccctagagaagagcatggcaacccactcgagtattcctgcctggagaatcccatggatagaggagcctgacggactacagtccacggggtcacaaagactcggacatgactgatgaaatgagcacgcctgagcaaacacacacacacaagcacatgctgagtcacgaagtttgagaaacacagccctgggcctctcacggtgacatgtgtggcccacaacagtctcagaatatgggctggccgctcatgagaatgtgtgctttccagacacaagctcataacgagttgttttctacaggcaggccacacctggacgcgatggttcagccaactgcaggaaatacacttggattcaccctccacgatggaaatgtggctacaagatgccaacgagttacatgtcccatgaagaaacagggcaggaaaatgtgtctgagtccccagattcagcaacagcatctgccaggcagaactctggctgggaaagtggacacagggtgctgagctatgagacgggagatcagtgcccacctcacagtgaagcaaaacctcaaatggaccatgaataacacaggctctttattcatgtattcccctcttgattgctgaaacaaatcaaagttggtttaaaaaatgcatgaagttccctcagcacagaactctaccttcctaacccattaaaccagagaaaaccaattctgaattgagccaatattttatccgttacaaattccacttcagctgtccacctcatgcagctgaaggag

SEQ ID NO: 38550 - DNA, 1107 bp, Bovine  19866880728309
  misc_feature (1)..(1): n is a, c, g, or t
ngtcagcaggtgtgggctggggccccagattctgcatttctagcaagttctaacgagccagtgctgctgggccagggaccccactttgagaagcaagattctaaatccttctcaaagacgtttgtgctccttcagcaagaatttgaggggcgtgacccgtgtgctcagcgtgtcccaggcactctggagggcccaatttggtggccctggatttcatgggcaggtgccagaggctgtgtcaggtggcgggggtgtgttgaggacgtggaacggtggcattggaaatgcaattgatctcaaggttcttgaaaagctacgttgttctgccttggcaaccagccaccagagacgtcaggtgatggatggaaacttgacacctactcggattggagagggactgaacacaagcagcattggcgctggtggcgcagctccaacttccatggcgctccgccagcccgcacccccgcccggaggagggagggtggagcgggagctttaagaacagcctttgggttcggaagccttattgttaagtgaatggtggccagctgttcccagcaccccatcccccctcaacctgaaagctgtaccagaggaaagggctgagattatacacggcaaagcctggctcctggacgaggttgcctggggcgggaacagctgctggggaggagtgcagttccctgacctccacttggaccttgtcaccgtctcaactcagccaccgcctggctctacaatgtgggccagtcactcagtgaaggagtggatgggatgctctggccctcatgttctactggggctggccctgactgtctgggggcgccaggatggagcatatggactagaggaccccagtgatccttccagcccagaggaaggagctgggctggaaggatcttcacccacccaaacgccttgggtgaagaaaaggggcctctgccccaccttaagaggtgttctggccaccacccaggccccttccacctttactggcccgcaggcctcctgcagaagaggccaaagctggacccagacacactctgaggatcctcccaccatcttacctttcttgtgtacctacgggaaatcgcagccgttaga

SEQ ID NO: 38551 - DNA, 1903 bp, Bovine  19866880749337
  misc_feature (1)..(1): n is a, c, g, or t
nttaatgtagcctaagcaaatggggtttcaggtaccaaaacaccaaaataggctatgtgatgaaagatgttaaggaggaaaacgatacattaactatttcttctctaacaaccaatctgagagtctattgcttctgtggctgctttctatagaaagaaagtgaggacaggagttgtgtcgactcttttgagtccaacccgacatgaacaaactcatgtgatggctaacagaggtaagtagtacaagaacaacatccatgaaaaaagatagtggctcgttttgagaagagaggatgaattatagtgtcacagggtcaaaagatttaaaaggaaatgtttggggttctgggggcttaaacatagctttttccttttcatactaattcagatttctcttcaaatccttaatcaaatgttttacgaggcctacaggtagtagtggaattcagtgaaactatacagagaatcaaaaaattttgtatacatatacataccagtatgtatatatatatacacacatatattttgagatatattataattatatatggatatatgggcttctcaggaggtatggtggtaaagaatccatctgccaatgcaggagatgcaagagatatgggttccatccctgtgttgggaacattccctggagtaataccccactccagtattcttgcctggaaaatcccatggacagaggataccactgagcacacacacacatacacacatggatgtatatctattcatatacctatatggagatgcacacacacacaccatacatacttatacatatatggaacacacacatatatatatatatgtacagacatacatatggtatatatacacacatacataatgattttccttaatttatgattggatgtacatcctgataaacctatcataaattgaaaatgccataaaagtcaaagatgcatttaatacacttaatctaccaaacatcacagtttagcctaaccaaccttaaacgtgctcagaacacttgcgttagccttcagttggcaaaatcatctaacacaaagcctgttttgtaataaggtgctggatatctcatgtgatttattgaatactgtactgaaagtgaaaaacagaacggttgtgtgggtccagaatggctgtaagtgtatcgattgttcacagctgtgttcgcagagctgactgggagctgctgtcgctgcccagcatcttgagaaaatatcagaccacatagcactaacccaggaaaagatcaaaattcaaagtacagattctattgaatgcatatcacttttgcaccatcataaaatcaaactcttgtaagtcaggaccatttgtatatgaatacatatatgtgcacatacattcatatatgcatttaactggttatggcacagctattcaactgcatttaaaaacaattgaactcagtcttatatcagctccaaaaataaatgacaaaattaaagacaattgtacaaaaaaatactttcaagaaaatccagcacattatatgtgcttatatgtacaaaccaccagtgaaagccaactttcttgactgatgcatttcttgatctaatacagaagctataaagaaaagatcagggaggtcccttggggaaggaaatagcaacccacttcagtattcttgcctggaaaatcccattgacaccccatggggtcataaaagagtcagacacagtttagctacataacaaccaacaaatttgctcatataaggatttaaaatctttttttgacaaaagaaagtttcccttaccagataaatcgacaaaggataggttcaggaatatttgtaccacagatgacaacagtttttgttttgtttttacaaattgacaaaagtagacaaactcataggaaaatgaataaag

SEQ ID NO: 38552 - DNA, 2788 bp, Bovine  19866880783723
  misc_feature (1)..(1): n is a, c, g, or t
ngagtggagcggttgctcctcagtagaagaggccccagtacaaccccctcccccacccccaaccttggcatttgcagggccagtgcccgtacccgcacccggggagtgagggggcgggcccagagagaaccacaccatccagcccaccaggccaactggaggaatgcgaacttgtcttccaggccactagacacgtggtttcctggctcagctcatcccaaacgaggtgaaacccatggccacagtctctgctcagggaacccctctcatcaagggctggaagctgccctcatggtggggagggtcccagggggccctgcaggagggctccaatgctccagttttaaggggtccaggttgggtgtttctagggtgccatcatggccacacctgcctttcttccacttcgcctataactttcctgattgtgcacaaggtgcccaggtccctgccagccagtgggggaaaccccctccatgtccctcctcctctctgcgccacctccccctccaaacccccagctcccccagcactcaccacgtttttggcatttggcttcatggatatagtcccgtagatctcctcccctctccggacagtgaggtaatcttccaggtagaagacggtctgcttccagtgggtgtagggggcatcaggggctgagggagagaagggagagtcacaggagacgcctccaggggctttcctggtggtccactggctaagacctctgcgctcccagtgcaggggaaagtgaaagtcgctcagctgggtccgactcctggcgatcccatggactatacagtccatggaattctccaggctagaatactggagtgggtagcctatcccttctccaatggatcttcccgacccagaaatcgaaacggggtctcctgtattgcaggtggactctttactagctgggctaccaggaaagccccagtgcagggggccagggttcaattcctagtaggggaactagatcctccgtgctgccgctgaagatcccacgtgctgaactaagacctggtgcagtcaaataaatattttttaaaaagagagagagagatgtctccagaagggctgggaccccacccggaagctgctgggtttcttctgggacatgctgaacactctgcccagccctctcactgggtcaggtgcccaagttctggcaggcctccccactcagcccaggggctcaacttgtcatcaactccccacgccctccaaactgaggatcttagtggacaaccagaggagaaaccaactgacattacaaggtcataccaagggtagtattaacacaaatgaatctcaaaatgctgctgtttcattggttcaacagagtgaagacttgcagacaaatgtaggggagagatacagagggcagtccatccactctcctgttaaatgacagcactcacaccaactccacagctaaaccagtttccccagtttcatggatatcccagccctacagatagttttctctgcctgcctctctgtcctagttcacaaaccatgggtgggtggtggcttcaggatgattccagtgtgctacattcttaggcactttatttctattattattacatcggctcacctcaggtcatcaggcattacatcccggaggttggggacccctgctataacccatcctgctgctcttggcttaggcctgtagtggggtttcgaacaagccttcctacctagatagggtaaaaattcagaatgattctccttctacagacccaatgctggtccacagctcacacctcatgcatgaaccaaagtcacactgatgctcacacctctcatgaaatcccatccatcctctgggctcatgacaaattctactactagatgaggggtcctgtcccagaagctgccgtccctcggacactcttccctccttaaccaccagcctctcccttcctcatcctccaaggtcaattctcgggagagcctcacctgaccacctagctggattaagggcatcctgagcctgtgtgattactgtagcagtcacactgctgcataaccatctctgtctctttttactttctgtagtctccacaagactgcaacctccatcaggacaggggtctgatggaatactattacacccttggagcccatcaccatacttgctaggtctgtgagcgccgaatacatgaccgatagtaaaaagccagagcgggtctggtgtgaggcttcaaggtacccagggatgttcagcaacattgaggctttggaaccaaagggttgtagaaaaatacatcttacagccagttcctcttgtcctgcaggctcttaccttcctccactaggaggcgtgactcacgaacactgattcattctctttccattacaaccagagttgaaggtgggaagccttggggaggactttaaaatatttcaaagtctgtcacatgaaaagtctgtggccttatggatggctttgggggcagaacaaaggctaggccctggacatcatcagaaggcaaagttttaattcgcaggaagagttggggctgtccctcagtcatactggccactggtgatccagcctgaaggaattcacacacagcctgcctggagatttatcgcaggtcccgcagtgggaccaagatcattcaaccctcaggatctattttaactgtctgtgtccttcgtaagagactagcttgatcatatgtcagtgctttgaatacagatctgagtagccttcaatatgtgtctttgggaaatcgatgcaaagtcaaggtcgtggggagaggaa

SEQ ID NO: 38553 - DNA, 943 bp, Bovine  19866880802090
  misc_feature (1)..(1): n is a, c, g, or t
ntcactttccactcacagaaaggactctcgaagcgtctttcagcggctccgtgggtcgtaatggctttctgacattatgacgattgctttctggccacggttggttagctcagctggatggagcttgaagccaaagacacaggcttctcaggctcccgctcagcttcatggtcatggatgaactccagccagccttggagtaaacagagctggggctgcagcctggattctccggccaacaattgagcgctgcagtgagttaccagaactgctgtctcctgggtggacccttcctctgtgaaatgccatgatgatcacacctctgtcccagactgttgtgagctgacccaggaacacatcccgcatggtgagatggtagcccccttttttcagaaatgagggatccggacaagagcgtgtaggagcccctgggagggagaagcccctccaagctgagcctctgtgcacagtgggtcagagtgctgcttccaggggccaagtggccaaggcccccatcctctgtttcttggaagtgactctgacagctggcctggggatgcacagattagagacagggtaggaggtcagagcagggccagggcttggaggaccccaggctgttcaataggactcaggactgggaccacctgcaaacctggagcccgtggtggcggggaggctcccccgggttcatcacagaggacccaaggtcccctaagaggggggagcctggagcacagtggaatgtgggctctgggctggagcaccaggttcaacccccagtttccccacaacctcctggctgtgtgacctgcagcttccctgcctcaatttcctctactcgcaaactggctataacctttcccctctgcaggggcgttgatggaggtaagtgggagccgtgacggggatgcggtgagtgggcatgggtttactgtcatga

SEQ ID NO: 38554 - DNA, 2278 bp, Bovine  19866880805485
  misc_feature (1)..(1): n is a, c, g, or t
nagactagcgacttcattgtattcgtgtgtctgattgtgcaacggaataagctggaaagagaagttggcaccgtgttaccggggttcttccccacctctcccgcgggcgggtggtcgctgggtgctgccctcacctggtagggcagctcggtgttcacgttctcccagtgtggtggcatggggatggcctcgttctcacagatgtaacttggagcagaaaagacaaaacaacattttagaagccgattataatcacggtcaacgactcagacattttctcccaagctgaattatcatgtgacaaaagcagtaaagtgtcgtccttggtttctttattttaaaacacttactgaatattggcttgtgtgcaacttttttaggggctgcgttgagaaatctgatgggaaacttcaaaaacgatattatttcgatcttgttttcctgtatttgccagagtttcttttaaaggtaggaagactttaggtgaagaaaagtaatttccgagaagaaaatcaacttcttgattaaaataaaactcctttaacagatttagtgtctattaaataccactcagaaccctcagctacatgttcaatgtccttcaagatctattattaactcaaatctaaacctttctctctttattgtccactaggcccctgcacggtcctaattaattcacccaaagcagaagctggcaaagtcatctaccacgtttaagccactggatgtgaacacagaaaaagacaatgaccttggggagcttgatggcagaaggctgtaactgatacatgaatcccatctggtgactggaagttgtggaagaaatgtatcaacttctagcctgtctttaacttatttttttaactcgttttccctttggggacatcacacaatcatgatttaaagatggggacaagagtttgagcaaactcagggagacagtgaaggacaggaaagcctggcgtgctgcagtccatggtatcgcaaagagtcggacatgactcagcgactggacaataaaggtgtaagagagtgagtggtggatggcttccctccctctccagtccccggtctggttctcacctctggcctccatgccaagtaatcactgctttcagtctcttgggtattctagaactttaggttaacacaaacctatggggttttttgtctgtctgttttgcacacaggaatggcagcatattcctttgtcttttgtagctgctctatgtttttcactatgttctcagagagccttctgtatcatggagagaactctccagcacacagcctggcacacacagacactctggacactggaggatgaaggcgtgcattctactgatgcaggtaccccagtgcacggacacacccccctcctgttgaccacaagttccctgtggatgacatttggctgtttccaactcttgctgccattaaggatgctagagaacaagtctgtccacttgtcattgtccatggccgcttgtcaacttttaagataacattttcggaatggcatttctgggtcaaagaatatatttattcctgactttaacagaaactttccagaggccctcctcgaaggctacagtcattgacattcccagcagaaacgtagagaatgcctacttgtccacaacctctccgaagaggtgtgttaccagactctggaatttctgtccatctgatagtaagaaataacctggtataatttgtatttctcttttttataagtgaggctgcatgaactgcacaaattcttttcttattcttctaaggggctattggttttctacttagagattcttcaaagtacttcatatactccagagactgtgataccacgtgacaatacctttcccaggttttctttgttttttgtttgtttttttcactttgcctgaagtatcttttttgcttcccaggtggctcagtggtaaagaatctgcctgcaatgcaggagacctgggttcaattcctgggttgggaagatcccctggagaaggaaatggcagcccactgcaatactcttgactagagaatcccatggacagaggagcctggcaggctccaatccatgggactgcaaacagtcaggcacaacttggtgactaagcaacgacagaagtatctttcagctgtgtgaaacgttttttgtttgcttatttgttgaatatttacagcccttggttaattgcaaatttcttgccaacaggcaatgtgctattcactttgcatgtcatgagagctcggtatattcccgcaatacaca

SEQ ID NO: 38555 - DNA, 1072 bp, Bovine  19866880829058
  misc_feature (1)..(1): n is a, c, g, or t
natatttctcatgcacacagggaaggaaggagaacagcagatggagaacaattccgagccgccccacccactgacacctcccctggaacatcattctctcaccaaggatggggcacgccctttgtcccttccagtctccgggttgcatggtcagagcacatgtttggcccgctcgctgcccagtccactgcaatccctcaaaagcagctgccgccacccgatggcagcacccctcccacatcctccttctccccgcaagccccaactccctggggggtggggcatgttgggcagagctgcaggccactcagaggcccccttgacctgggacaggggccccacagcttttcctgggattcactggaaggaggggggaggggcatgacctcctccaccagcggacctcatgcccataaaatgctgcagactgtgttctacgacatgcaggaggaatataagaagaaactcggaaaaccatctgcacttctgcctgaattcaactcaaggtcacagctgttaaaaattctgacccccacacctatttctgcacaggacccagttggaggcacgggtttcttggggacgggggtggggtgcaggaggtggcggcaaacttcagcagcctcctaggagtagaacaagtctctcctggaagagttgcagtgtccattcagccaccaaggagagagaaagatgtatgagagagggaggggaactgtgttttaagacccacttaccactgtgcagagagcagggccatgctgctcggagtgggtagagggtatgtgcttaagcaaagaggagaggccaaggcaggcgagacactcggaaggacttacccagaatatcaaattgaagaggaacatcatgtacttgaggcagcacaggcagcccctggccatgttgcacttcttaaattctaggaggaaaacaaaggacaggtccaggtaaaacaccacgtacttgctgcctttgggcgcattgtacttgtcggtcttcacgccggcctcggcgtggctctggccgcgggagcccgcggtgccgtaaaaggcgccggccgtgaagccgcggc

SEQ ID NO: 38556 - DNA, 1019 bp, Bovine  19866880864398
  misc_feature (1)..(1): n is a, c, g, or t
ngtaagctcaaattagcttggaaagactctcctggaaccatccaattatttgggttgtaaatcctgagtaattacccactttgtcttcacctccactgagccccactgggcagctcctggaggtaatttcagatctgcagtgactaaagggggcctggggagacaggagtgcgtgggacggtggcccagctgcctgctgtcctatcctgaaaagctatgaatgccttgttgtggtttagtcaccaagtcatgtcccactctgcgaccccgtgggttgtagccccaccagactcttctgtccatggggattctccacgcaagaatactgcacttggtttccatttcctccttcaggggatcttcctgacccagggatcgaacccacatctcctgcatcggcaggcagattctttaccactgagccaccagggaagccctgctataaatgccacaagagaaacgagaataaataggtgttattcacatgagtaaagttgaagggaaaaactttagggcgtgtctcctattattgggaatgattcctcaatcaagtcttgagattcctgttgttcaaagaatttaaaatgaaacaaacaaaaaatgctgtttaatagcatgtgatttgtaggagatgcccatttgcttcttccaaggagatgttttgaaaggattaaagaaaatagtttttgaagtttctcttcttgggactttggtcatatattttaggatcatgatttataagttatgcaagtacttgtgtaatgaatgctctaggaagggagagaactttacttccttactagctacattatatcctcattcttaagtacaaggaatttaagaaaggaattgcttatctttagagggtatgtaatctgagagaaaaatgagacacaataatgaaaaatgtctatagtaattgtatgtcactatatctggtgtctttttgtgggggagaggcatgtaatgcaaggcactttgttcgctcacagaccatagaagcaatagcacaaagacag

SEQ ID NO: 38557 - DNA, 3685 bp, Bovine  19866880886359
  misc_feature (1)..(1): n is a, c, g, or t
naggagcctggcaggctacagtccacaggatggcaaagagtcagacacaactgagcagttaagttttattaatatttgtgtttatgaaatccttaacattttgaaaatcatggatcacaaccttgttatggcgaaggtgctcacagaactcaacgaagcgataagccaaggcttgcagggccacccaagacagacgggtcatagtggagagttctgacaagacgtggcccactggaggaagggatggcaaatcactcgaggggttttcatagggctcttgctgcaagaaccatatgaacagtatgaaaaggtaaaaagatatgatacttgaagatgagccgtttttttgcagaaatgaggactggggaaggggtatgacacagaggcctgggggtgatcattgccattcattcattcatttcattaatgctcattcagaaaacgctcactgagtccctacccggtactaagcatggcgaggcctctctggacaccaggccctgtctctcctcttgcctcctgtgctctggcccctgcccagtcccgtgatgctggtcttcaggcagacttggtggggactccggtacctgtgcagacagtcacggcggatggagcctttgccccgcattccgcggcaaagaggaaggaatgtgctttcattcttcccaggctctacctgggtgtggtgggcactgctgtcaccaggaggctcctatgaataaagcctgcttaatctccttagccggacggtggtgtcagccggctgggagccggcaggaaagcagcagtcatgcctcagattctccaagttgttgggagcggtgagtgatcccacaatccgaggggcctgcactggcttgcccaagggaggggagcggggctcagggtttcctctcggtctgctgctccgggcgtgctctctgaggccctttagccaccccagaagggctgagcagattcccaggatgccaaggagttggacagtctccaggagcaccaacgctgcctcgttcccactggagtgccctggagcttacatgagacatccaccagctccccagcttggcccttgaggctcaccgtgaaacatatccagagctctgcctctgtgggtccctcgggcttaagcaatttgtgaggccctctttaaggaaaaggacaccagccaaagagctggagcctctctgggtcttgggaagggtccaggcagtgaggagccctgcggatcagcttcatccacatagtgaaaagacccccattgcccatgcttcacttttcagtctctcttgactcctccgtggatgcgtccaacccaggcatcatccctgctcagggggcatctgcctgaccctgcctggcttcctcactcatgcctctgcaagctaagactacatggaaacgagctttcattccttgacatgccagattagcgacaatgactactagagtcattagacaacaactcttatcctgggtgcctcctatctcttggcttcgtgctagacgctgaccccctgcaaggcagggaaatagattagagactatgctgttcacagcaggcactgaatctcagatgtgtccacctagctgctggccaggatgcagggcaggtctgtgttgccctctcctgggtttcatgggtcctcctcatcccatctcccattgtctccatcctgcacaccctgtcctctgccctcccaaagcctcagcatcataaccaaactggtagagtggacacgtgagaaccctgagatgctgctgtccggctctctgatagccacctttggctgtcctttcacagaatccataatcactcatccgttcaatccattactcattggaaaacccgggcttcacatgagggagatgctgctccaggcacttagggatacagtggtgagaaaaacaaacaccctctctgcctttctggagctgaaattatactcaagaggattaatagacaattagctcagctggtaaagaatgcatctgcagtgcagaagacccctggttcaattcctgggtcaggaagatcccctggagaaggaaatggaaacccacttcagtatttttgcctggagaatcccatggacagaggagcctggtgggctatagtccatggggtcacaaagtcatacatgactgagtgactaacgagaaaggattcagtcaaggcttccctcatggttcagatggtaaagaatccacctgcagtgcagtagcccctgggtttgatccctgggttgggcagatcccctggagaagggaatggctacccactccagtattcttgcctgggaaatcccatggacagaggagtctggcaggctacagtccatgggggtagcacagagtcagacaaaactgagttactaacatacgtacacacacatacacaagcacacacaaagaatctatcaggttggtcctaatcgttgggcttctgtttgttttgatttttaagggttacggtaaagggtcgatgctttacccaaataagtgagtcactaacagcagaatttcaggcagttctgggggaaaaccttggggattccttccagtctccagactaaggtcacagacagggacgagcttagagatgaaaaacacgcagttaggagtgggagggaaagcaaaaagagtgcagattatttcagtaaaaaagcgaagactctggcagtgcccctccccaaagagaagtacgtggggacacctccggggacgtcccctctgtcaccagctgagcacctggagaaacaaacccgaagggcagagtaaggggactttagggcccattgttcagagcagcgctgttagggaagatgcgtgtggggaagattctcacaaccaggctggagaacatcccacttgaactcgaaatgccattcttctcactgtgccctcaactgcaggcccagcagacatacaggagaggggtgcccactgagaagtaccagcccctccttcctccgagcagccagagagcatctttgcatcctgctaacctgattggccatgaagccttcagactctcccgtcccttcctgtagatgagggtgaggttttgtttctagtaacggagtctccccagagggagacgcatcagaggtcacagtctgtctccaccacgggacagtggggagttcctccgatcttaaacaaacaaacacagcatcacgagaggaggtctcttgttcctacatcctcagagacctccactggggtgccatgtatgcttctctgagctgcatgccttctaggtttccactctttccaaatagttcctgtgccattggaggcagaggtttccagtgggagttggagccctctgcctttgatctgggtgccatgctctcaggagcagaaatcagaaagaagcctttgactttgctgtgcagccaaaggaagaagcactgactgccctggatggtccccttggctggctgtgccaggagtgccacctggcagggagcccagtgaaggagccccaacttcttcccttcttaatctctatctacagattgcagcctgaaacctgccctgcagagagtgagacagagagcttcagggaagacaaacctggataacccaggaaccagagcaatcgaagggcttccctagtggctcagatagttaagagtctgcctgcaatgtaggagacccaggttcaatcctcggatggaaa

SEQ ID NO: 38558 - DNA, 973 bp, Bovine  19866880993039
  misc_feature (1)..(1): n is a, c, g, or t
naatttttgagccaataaactggcaaagtcactgacccaacaaacctagctcagattcagaaattcataacctaattccagcagggctttctgtagattctccagagcagttttttcaaataaccctttatctttcccacttctcagctactgctttatagccggaccctctacatgaaggacggcggaagtgatggagaagctggcctgtttagcacttgagctccagtttgggggaaggatatggaagccaaagactaacaagaggttttggcattatttgtgaatatctccttattctgctattccatttccttgggcacttaagctaggctcatgatgtataagggccaactaactgtttacttaaaactctaccccagcatcctcagcgcaacctctcaactaactgccagctgccactcacttgccccaacggaattaacggaagctgccaacagctctgccctaacctcattggatagaattgtgtcctcagcagacacgagtttctctttcttctgagattgcctccctcctgtcttggagcgggaaatgttctcatgtccagtccaagtttcagagaggggaaggaacggggtgttttatttattcttaccttttacttattcttatttatttatttattcaatgtgctcctgtatgggtgtcaggactagtcctacaagcaactgctggcagggccagagataagccaaggagaggggtgccgaggaattaaagtgtttggggagggtcagcggtcccctgattaccaccgacaatccaaaaacatggtccttttggacttaactggtcaaacccagtgaagtcacagaaatgcatctgttaggaagagtgggctggtccttttccctgagatcttgtagcacagatgcaggtggatggaaaagacatggaaagccttcataactgcacaagtgtgggtggggatcagtacttactggggaat

SEQ ID NO: 38559 - DNA, 1240 bp, Bovine  19866881017406
  misc_feature (1)..(1): n is a, c, g, or t
nccaagtccctccctgggcccccttctcatagccacccctttccagaggtgggctggggtccagcctcaggtggaaaactcacccacagtggccgccgagcctggggagaacctgccatcacagaaccggcccaggaaagacgtcttccccacggaggagttgcccacaaacacgatcttgaagagccggtctggggtggatgggaagccttcctcctgcagaaggcagatagttgggtcaaccattggcatggtcaccagtccccacacttgccactccccaaccctcacccatccctgcagcatccagagagacaccagcaaccagcaagggaggctgctcggcctcggatgcaggaagcttcaggttcagggcactggggctccttccagcatcagatgtgggaagagagacatgccttccagcaccagtgatgcccatgtgctgggccgcagaccctgtgctgggctgggtttgtggtggagggaaggaggccatgtttacagagtcacagcatgatgctccaagtgtccagggagcacggtcaggaagtcaagggtcttggggtgcagggggctttgggctgggccttaaggaggagctggaggttttctgtggggggtgattaggaaggacaaggtggggtgttggcagggagatggggagatagaaaaagaaggcttagctatatcttggggtcagaatgatcccagatgggggtcaggcctcttatttctgccccatcactggaaacctagactggatggaggatgagcctcccttcctgcacactaccctgccatcccacctcaccagcttcatctaggggccccatctgccctcgaaataaaagaagaaaaaagaaatccacactcatttaaaaaaaaagctttaaaaattaaaagtgatactcattttaaaaattaggaaacttagtagagaggaaaataattattcatcattcatcccaccaccctgaaatgaccactgtttctattttgatggatttctttcagtttttttttttctatatagatgaagcaataggtgattcttgagagcgatttgagatattatatgtaatttgtttatattattatacatacatttaaatttatatgtaattttttatttttaatatattattaaattatgaatagttttctgaattgccaaagttttttgaaagtgtgatttttaaaaattattttaaaattaatgaatttttgtttcggctgg

SEQ ID NO: 38560 - DNA, 1501 bp, Bovine  19866881232566
  misc_feature (1)..(1): n is a, c, g, or t
ntacccggagcatccaacctgcacagcagcctgctcagcatatccaagagtgggtgagaactgctcccccatcttcccacccgattttacttccttgagtgccaatcagatggagtggatgccagtggcttgtttacctacaacacatgtggagtgggaagtcaggaggtgggtaggagggaccttggctccatccgaaagccaactgtgcagggagtcctggtggacaaggcacaggggagccagaataaatattgaactttcactttgaaaccctgcgccactggggagtcgctgttgtgatgggcaagccgagagggctaaatatttacactttctgattgttcccaccaacctgctgcatgctctcactctgctgaaagttatctatttgttcattcattcattcatttaccttcttatttttaaaatgtgttggttcgtttgggaaaagaggttaggaggggttaggaggccaactgaaggtgagtcaagattctcttccatctcagagaaaggaaataaaaccacagatggaaagtcaaggtagagaaagtgctgactgacttccaaatcatttactcacagttctttttttttaaatttttttattttgggataattttaaacttatcaaaatattgcaaagacaatagagttcctgtacatctttcagccagtttcccctcaagttagcatcttatttaatcaagctacacgtgtcagaagtgagacagtgacacaggggccacactgttacctaagctcggtgtcagcagttcccccattcctgccctgttgctgtttccggagccaatctaggaccccgtgttacttttaatcatcatagctccttaagcatcctttggtctgggtcaatttcccaggcttctcttgtttcttatggggcttcccagatcgtaaaaaattcgcttgcaatgcaggcgacctgggttcgatccctagattgggaagatcccctgaagaaggaaatggcaactccagtattcttccctgggaaatcccattgacaggaccctggcaggctacagtccagggggtcgcaaaagagtcagccacaactgagagactaaacaacagtggacatatatttgaggggacacaagtcaactcagtacaatccatatggactcaaaggtttattctctggattagaatctgtttacttcttcaaattgttccagctttgtccttggggagctcttccagcttagtgttggcatctttttcataagtctccatcttgctttctcttttcttctattttgctttctcttttcttctattttccttcctcttttctgtctttttcagtctctgtctgtctctgtgtattttccttacttcctgagactaaaagatactccaggctcattttatatcatccctgccccacccctggaagcagccatttctttatacagccccgattccttttatggggaatgttacttagaaagatccaagtgcagggggtgtt

SEQ ID NO: 38561 - DNA, 1417 bp, Bovine  19866881236427
  misc_feature (1)..(1): n is a, c, g, or t
ngaggagaaggggatgacagaggatgggatggttggatggcatcaccgactcgatggacatgagtttgaataaattccaggagttggcgatggacagggagggctggcctgctgcagtccatggggtcacaaagagttggacacgactgagtgactgaactaactgaactgaggtgaatttatggccttattgtttttattcaattgtggcaagacaatctccatcagtagtgtggcaaatcctgagatgccaggctatgggcagaactttccaaaacacggtcacactgccccttctctgcccagcagggggggggacctggagctggccagcgcattactttgcaatgctccagccagtaggaaatggacttgctccaggacaagggggatggggtgggaagccaagggtcgtgaagtccagagagccacccgcatgcccaaaccctgctctcaggctctgcccggtactgctggctgagtgagcaggctctttagaatccatttagaagtggatctggggggagttagctcttctcatggacaaatactgtaatggagccgcagctggtcttagcagtttcagagaaaagccattaatagccttttggggagaaatcaattccatgccatacttaggagggaattcaaggtcaattataggaatttgaactcatctttaaaaaaagagaaaagaaacccatgctcagaaacactgtcccagccccatgttctttattcctacacaagcaccactctctgccagcctggggtctccacgcgtcatttgtttgagattaaagctccgtgcggccacagtgtcccaggcccgtgacaacaaggaacatgaaaccgaggctggaaggagatgctccaggccacggaggtgggggctgaccttgctctgcgctctccccagccccgcccccaccctagcagagcacttattttccagacaggataccaccaacatggtgatggctcagctgaggccacctcacagggtggctcagcaggatccatctcacatgagtggcgaaccctcccagggtccactatcagcccttaacctggggaacaatccacccgcccacgacaatgagacaaccaaattgtggggcgggggcttgagaaacgatctcccactagcaagttaggggctctgttctcattctcgtcaaggccactctttttttaaagctctaaaaaaaaaatgtgttacaaactaagttttaaaaccaggaaacttagttgagagaaaaataataattattcgtcatttatcccaccaccctgaaacggccactattcttaaattgatgcatttcttccaggcgtttttctacattcccttttcacatttgatgaatcaatatgtgtttcttgagagaggttggacctattatatatatttaca

SEQ ID NO: 38562 - DNA, 1469 bp, Bovine  19866881237868
  misc_feature (1)..(1): n is a, c, g, or t
nttgcctgaggtcacacagctggtcggtggcagtgcctgggcgggagctcggggtgctcttgtcctgtttcagtgctctgcttgctacaggcctctgggaaatcgactgccagacagttcagtgaccccctccccagccgaggggggactccatcagctgacccagggcgggggtagctggccaggatgtggacacagagggctagaactcctggctgaactaatttctcccacacagccgacagtgaccttgactttcagctcacgaactttataaccatcattaaactgggacaaaagcatgaatggaggccacttacagatggatgtgaggactgaaaggctctgaagtaagtctctccctgcgggggtgcaggccacagaggggccccctgcagggaagattctaagccctgagctgggtcactgcggccactcaggacccccgcctccctagggaacaagggaaccgttggcccttctgggggtgtcatctgactttcctgtggctccttgggggtgatcaaggctggggtcagagacggagtgatgagggggagaaaataatccaacccctcattttacaggtgagaaaaaccaaagctcagagaggccaagagagcagagcaaggtcacagatctagctggctggagagccacacggctcagacccagagctcctgatttcctggttctgcttctaacatccacagaggaggtgctgggacctacttttattcagtgaggctgggactcctcccagcctgaggtcccaaaatgctggggccttactgcccagaggcgggtagggtggtttctaacgggtcttgggtaccagcctatctggcttaaaggaatacacactgcctcttacgtgctgtgaattctggggacgcgttacttacccttccactgcctcaatttccctatctgtaaaatgtggatgatgataaatatccgaatgaatagacaagatagcacagtgccgagcatggctgagggcctagtgcatgtgagccagggcttagaaacatacacacggtgtcagcttgagcccaggcccagctcgggtggatgactgacaggcggcagtgccggatataagacagaaggggtgttcctggtttgcacgtgtctgtgcagagggcgggctgacacaggtacccactttttcagggcgcactccagctcattcttctcctcatgggcttctaggagctgcgagaagattctggtcaggaaatcctcaaagttggacagtaagtgaggctcgtccttcttgagctgcagccagagctgcttgacatcagcttcactgcaagagaaaaaggagcattgaggcaggagtgtggacacgaggctttctgggacaccccgaggccccaggggcgacaggggcagccagagcatcatcactgtggtcgggacagtgacgtcaggggctggcatttattgagtgctggctgcat

SEQ ID NO: 38563 - DNA, 1871 bp, Bovine  19866881266442
  misc_feature (1)..(1): n is a, c, g, or t
nattctttgtgtattcagtatggaatgcccatcctaggttgatatctttgtgaaagcagctggttcatgagatttctcctacagacagaatttgttagatcctcccaaggaggcagtgtttgtaaggtaggctttcaggaataagaaatcacctggatgatggaatagccttcacaaaaatatatgacttttgggcttccctggtggctcggtgataaagaatctgcctgctgatgcgggaaacacaagttcgatccctgatccaggaagaacccacaggtctcggagcaactaagtccttgccccacaactgctgatcctgtctagggcacgtgctctgcagcaagagaagccactgcaatgagaagcccgagaaccccaactggagagtagccactgctcgctgaaactagagaaaagctcatgcagcagtgaagacccagcacagccaaaaataaataaaattattaaaaaacaatgatttctctattctctcctactttccccctccctctctctgcccttccttgcttcatccctcccttcatcctctccatcccttctccctccctcccttcccccatccttccatcctcccttcctgaatcacatgatgaccaagtgtgagattcctgcacaaggcattctggacattggttcctgcccttaagaagtttccaacaaaagatacacaaccactcctcctcttactgtataagccgaattttattgcaggttaaactcaggtacaaaccacatggtgtggcctgtggaaggagaaacaggatcgtgtactggagctagaagggaccaccaggcagccagcatggctgaaggactgtgtgcgcacagaagagctggaggtgcagcccgtggggtggggctggagaagccagaccctcagagataacgcggcagaacagctgcagggagatgcagaaaggcagccatggacctaaatgagtccggtggctcagatggtaaagaatctgcctccaatgcaggagacctgggtttgatccctgggtcgggaaaatcccccggagtaggaaatggctgccctctccaatattctttcctggagaattccacgagcagaggagcctggtgggctacagtccttggggtagtaaagagctggacacaactaagtgactaatacaccactgaataaactaaaagagctgcagtgaggacttcctggtcctactcaaaggcaaggagagtgagcaaagctttaggaacagtgacatgacccagatccgatggtggtggcccaggccgtcagccggccttggcccaatgtcctgaggctacgatgctttctgcacttttccctgcagttgaaggacgcgctgggcacttctcttggaggacgaggcccggggattcatctggcctggggctggatctgtctgtccttggagtgtttttctagagaaccctcccctcccttcccactcctcacccaggggacggtcttgaccttcagctgagacggagctccaaggtctctgaagctctgtggtccctctagcggacggcccaccacgaggggcagagggcctcagggcacctgcctccttctccggctgcccagtcctcaccgcatcacggattttcctggagggaaatggaggagtccacacactcttggcttgaagagattccacgctgtctgcacaaacagagcctggagcctccgggagcgccttgctctcacctcacccccagaaagcctcccttcccggcccctgcagacaggctgtgaattgtgactctgaccgccacacactagtgtactgtggggctgaggcttggggtttctgccttaaaaaaataaatccctgcctctcctctctcggcggtca

SEQ ID NO: 38564 - DNA, 1358 bp, Bovine  19866881296044
  misc_feature (1)..(1): n is a, c, g, or t
ngtggggggcctgtggctgcccctcgggagtggagggaacgccgcgcgtggagtggctgccgtgtccggaggtggtgctgggggctctcctgaccctggcaggcgatgtctgcatctctgtgtccagtgcctgccatctgacttctgagcagagctgtcttgatggaggaggcaggtctcagggagtatctgatggccagcaaggatggggctccagaacctggagaatggggctccagagcccggagggtgggacatggacagccggggagaaggcagggcagtgggatagtcgtggaaggttctgcgtgagagggggcagggcagcatggaggacatgggggcaggaaaaataagatgatactggaagcctggaaaaggtctgatgcgtccagtgtggtgggcagggactttctccctcacggtcggtggagcctgcaggtggtgggtttggagagcaggtgaaggttgcctggcccgcaaacccccacggccctttgccatgggctctaaggaaagatagaggattaggtggttggatggcatcactgattcaacggacatgagtctgagcaaactccgggagatagtgaaggacagggaagcctggcgtgctgcagtccatggggttgcaaagagtgggacacgactgagactgaacaactagggaaggtgcggctgctggcaggaccttcctgagccttccatgctcctgtggtgagcagcagcagccctagggttctctgtggcaaggcgggggcgggaggtggtcaggtgtgttccaagtcactgtgccccccacctgctgaagggaggcctcccacctgcaggcgagaagtcgctggacccaaatcagagtgacagcctgtcaggccgatgagcctgggccctgggcacgagccctgggatgtctgagccatttaggacacggtcctgactgggccctgaggcctgcgggggagggtgcgctggggaggggatgggcaccctggtggaggtgggggaaagaaacgtgtatgcaggcagaaggtgcttgattccttaccatttatggcagccaaagcgagcgatcccctcccgtctcccctctgcctggagccccctccgcctgccccgagctctaccgcctgccggggatggggcgcctgtgtgggtgtgagtcaggagcggtggggggaggagtgacaggattctcagcattgctgttttgtttcctctcctccctcctggatggaggcgtggatggaggtgcctcgtcatcagggtggggtgggcggggtgggctgggcagccccccaccccccagcgagcccagctatgtagactgcctccctcccggttctagaagtgcaggagtc

SEQ ID NO: 38565 - DNA, 1487 bp, Bovine  19866881303119
  misc_feature (1)..(1): n is a, c, g, or t
nctttggctctgattcagaagtggtctttgcaggttcttgtcacagcaccaggaaagtccactgctcaaagtataaggactcctaaggaccagtgaggcctgtgctgttataatgaattatgactggatccatctgacctataacaataaataatacacataaaaactctgcactgctaatcaaaaatgcccaaagaacatggacagagagaatggaatcttttttgactcgaaaaagaattaaagtgtggtactcaaggggactcataatgagtttggatcatgtgaccatggaactggagtttgatgagcacatgtagcatgaggtcaagggcagaagatgggggtgctggtgcgacatttggccaagggttgccaggctgctctgtaaaattactgtgtggtgtttatttatacagagtaagggcacaaacatccatctctgtggcctcatgttgggtacactggccagcagcgtttgcctaaagacccagctgagagcagagcatcacgagcacctggtgggtcactcggctggtcacctggacccttgtggcctggtagacccatgggtgtgcctgctagttccagtgaggagctgcttccagctttaaaacaaagtgtccaggagcgttccagctgccgaggtctgattgcctttcagtctctgtgcggcccatcagagcgtccatctcattgccctgagctgccccggctcccgctggcagtcatccatgacccacaggcagctcgacagctcaatttgacttgggctttgtgcctctgagcattaaaagatgcttccctgctggccctcttctttccttgtgtggaaccagccaccttcacccagacagtcccctcccaaacactttctctaaagacctgtgcagagtgcggacctgcagatgtgtgtgtggccgtgggcagaatctggacccacttgctgctctgagccccagcttcccaggctgtaaaagagttctctctgcccagctacactcaccgggcatggacgggtcaaaagagaactcttggggacagtgcttagtcaaccaaaaagttccagacaaatgttagttattacctctgtctctcgtgaagagatcagaacaaaacacaataggaaagagagaaatctcacatgcctgggtaactgggagaagctggggtctcgggtaagagcattgcttgtgtctctgggcaaatagaataaggaaaccctacatatctccaagctagagatgccgtcccagaacagaactctctgtgtcttcccgccctccgtggacggtggactgggagcggaatccagactccaggctcccccctccacactacctgcagggctcaggtctcagtcccttttgtatttattagaaactggcatgcaacagacactggttgggtggatgggtggatttaagattttagatattaataccacactccagatagaaccatcttcaccggcaggtttataaaca

SEQ ID NO: 38566 - DNA, 867 bp, Bovine  19866881342724
  misc_feature (1)..(1): n is a, c, g, or t
nccttgcactgtgaactcatgcaggaagggcctgtcttagatacaggctcagagaccccagggaagcagcagaggccgagctggggaagaagccaggcgtcccgggtctccagacctccccctgcttcagctcgctctctgccacagcacagtgactgtggatccgtacatgtgtgtatgcaaggcggtgagagaggacactcatgcatccgattctaaactccaattttcattttgggactcggatgtaaatctgctaggtattaagttcaggagatgatgtaatttattgaagagcgtttggaagctgctaagctccctgataaataaatcatgtttcttcatccccaggtctgtgaaaatgcatcttctagggactttcatcatcccccatcttgcccccccgaccaaagtattagaatctcccctgcaggagagccaagcatacagaaacctgtctctttggagatgctcgatctttccgggccaagaaatagcacactcgtgtggcaactagccagcaacccctgtactgtcaccctaattctttccaaaagagctttagtttcatgagttacagagggaggatgttatagaaatggacttggtatcagaataccctagctattgcccacattggctcccgatgtaatcggtgccaattacatcatcaccaggagcatcattatccattgttcccaaggtttggaaagctgtctgcagatcccaggtccagaagatgggagaaatcacttagaaatcacttcatccccatattggccagggaaaccatttctctattctcaccaggtaagactgggaagggctgggacacaaacctgtatttctggtcttcagtcctggttt

SEQ ID NO: 38567 - DNA, 1884 bp, Bovine  19866881364745
  misc_feature (1)..(1): n is a, c, g, or t
ngagtggtctgcccatctgaatggagagaaaactggtacccaggggaggaggaggaggagacacaggcaggatgagacatcgggccaggtatgtcagttctaagtgccacactaaggtgtttggattctagaccacattgtatcctcaaaaccacaatgacaagaaaaaaaaggacctaacttatagacttggtgatggacagagaagcctggtgtgctacagtccatggggtcacaaagagtcggacatgactgagcgactgaactgaactgaacttatagcacagggaactatattcaatactttgcaataacctaaaagggaaaataatctgaaaaagtcatctatctatggagtggagtgttagttgcttagttgtgtctaactctttgctaccccacggacagaggggctcaacaggctcctctgtccatgggattctccaggcaagagtactggagtaggttgccacgccctcctccaggggatcttcctgacccagggatctaaccagtattgcaggcagattctttactgtctgagtcaccagggaaccctgcctctccatctatctatctacatcttacacctgaaactaacacaacattgtgaattagactcacagacttagagaatgaatgtatggttactggggggaagggtggtggggagggatagattgggactttgggatggacttgtacatgctgctagatttaacatggataaccaacaaatacctactgtacagcacagggaaaacggctcaatatcatgtaacagccgaaatgggaaaagtatttgaaaaagaacagatacatgtatgtgtataactgaaccactttgctgtaaatctgaagctaacataacattgttaatcagctatgctccaatataagataaaacgttaagaaaataaatcaactattcttcaattttaaaaagagtagagcaaattttattgagaggacactgaaagacgaggcaaatgagagcaactcgttagaaaatgtttgattgcttgaaacataaaacagagaccatcagaccttgaaggggccttcaacttcatctgatccaaatgcctgatttcccagatggggaaatttcagctgaaataaaaccaaaacctgcccacgcgcactcagtggataaagggaaaagccaaagctagaaaccagtgtggtgttttttcaccacccccccacccttaataaattcaaatctccagacgtagacaaatcacatcccacgttgctcaaagaactcgcagaacccttgtcaataatctttgaaaaagcatggagaatagcagaactgttaagagacaagagaagaacaaagttgtcccgattctcaaaaaaaaaaaaaccaggggggagggaaggggcacattataaaaacgataagctagtcagcttgacaattatccctggcagaattctagaacagaattttaaaaagctatttactccacaaacattattataatgatagaaacgaagggggaaataacccacaatttgaccactttaacccatcaactgaacagagtattaagtagactctttgtaagtctttagaaaaggagagatcactcagagccaacccgaaatctcaggaaacaaaacacgtcttcatttatttcttttttgatagggatgttagactggtagaaagcagtggcgtcaaaaccatgcttgctttcagcatggcgcttgacaagatccatcataatctttgtgggtgagacgtgaactggctcacagccagtgggaacagccatggctggggtaaggattgtacctaaagactgctgattagtgtgtacatcagcttgaagggacgctatggtgctgagccacagaggtctctctttattc

SEQ ID NO: 38568 - DNA, 1440 bp, Bovine  19866881423072
  misc_feature (1)..(1): n is a, c, g, or t
ntctgactctttgcgaccccacagactaaagcccaccaggcttctctgtcccaggatttttctgagaaggatactgacgtgggttgccatgccttcctccagggggatcttcccaacccagcgattgaaccgcatgtcctgtgtcccctatatcgcaggcaaattccttaccactaagccaccagggaagctcccagtgcccacagttgtgagacagttttcatgagaccctttgccaacaaaacggaacagaacgtaaccagtagcttcggaccagcagatgccatggaaattgagaagcagcaggagagaacaggtgtcggggctggagaaaatgactgactttccgtgatgggcatgttcctgaagacagcaactgcatagttctcagaaagctctggggaggaggggcagaacggagcccagggagcagacagcgtggagggtgaggaccggagtccagtaggcagaggaacagagctctacgagcagccaaagccaccatgtccagtgccagagaagagcccagggagcatccaaaaatagcaccagggcagagagtcagatggccggagatggacgcctggtcctcctgtaccacacttcagaatttcctctgaatgtttatacacgagatgtctttagtcatcactgaaaccctgtaaaagtctggacacataattattgccatgtgacagggaaggaagctggaggtcagaaaggttaaatggggtttgcatcataacctgaatagggaaagagagaatgaagaccagagcccacaggtgccccgtgtgcatgtgacttctgcctgataccctctgtctccatggcgaccccggctgagtgtagagtcacctgcccggctcacatcccacgtggatgctgtgatccaaatccgggatgagggcttaatccaactctgggcaagatgagggtcaggggaggagatggtctttctgcacatctgtccataaaggaaacagagagcagcttggtggtgtccttccagtcaaaggagagacaggcccctgttggcttggggaggggaagtggggaggggaaaggggggaggggttggggcacatgggcaggtctgctgtttaaggccattcaggaggaagaaccaggagccaagcatccaattaacctgacatctcttgcagccaaaatatttgaggatataagaagaaaatttaatatgtggaggcttgggagaaaagtgactaatagctggaaaacagccccagtttatttaaaaaaaaaaaaataggtcagacccaacagctccaaaagattccttcccagcagttccagatctgggagatggagggggtaccgcatggcggcaatgcccccccgacatgaagcaggtgtggctattgtgccacaaaaagatggcctggtgctgccaggaagtgacgggacaccatgcacgtc

SEQ ID NO: 38569 - DNA, 1164 bp, Bovine  19866881514533
  misc_feature (1)..(1): n is a, c, g, or t
nagatgccggttcgatccctgggtctggaagatcccttggaggaggaaatggcaacccactccagtgttcttgcctggagaatcccgtggaccggggagcctggcaggctacagtctatggggtctgagtgtacatgcacacagcacagttggtgagtttggatatttagtaataggaatgccctgggggaggaccctggtgagcagttctccatctgcactgaagacggaaagccgtggaggacaagatgtggagccgtgtacaaaccagggagcccaggatgcggtgagtcccacccggccacgtcacaggtgcgcttggaagcgggggagtgtgacgctgactacatagccgattgaggtttgggatttcttccctaaagccgctgtcctgctccgaatgggggggcttcccccgacctgagcctccaggacttctctctctgatgctcccattcccccgacacacacccccgctcacatcaccaggagacacgcactgaccaccccccagctgtgccaccatggagtccactggccctctttcgacagctctgctcagggccagtgcctgctctcattggtcaccctgggctgccagaggctccggccagccaaggtggccttgcctcacagcctagggccctgcaggagcctgcgtagctttgaccccaggcctgagcatccatgtggcacagtaggcttccctcacccccaggcccatgcaggacgcatctgcagacctttattaaacaggcgttggtcaccacttgctttggatccacgatgtccaccaggggctccttcatggcaacgtcccgaatacaagtcatgtcaaagccatagacgttctcccaccctgtggggacagagcgaaatgtgagggccagcagcgggacccccagaagtccctggggccccctgagtcctagagggtgggcggcagcttgtgttccctggtctgacgacaggagaggtgcttgcctgggggagagtttcacaaggtgccaaacggtccttcacaccatctaatgtgcacaggtcccgattcagggttaggaaaagtgaagctcagagagggtaagaaacttcaccgaagtcacacagctagactcctgtcgggccaggactagaacccagattcctactgttctgtatctgctc

SEQ ID NO: 38570 - DNA, 828 bp, Bovine  19866881516761
  misc_feature (1)..(1): n is a, c, g, or t
nccctttttttggtttttgagaaatcggagccttccaggtctggatgggagtttctccttcgatggtacaaggtgaccttcccggggcagacttttagggaactgtgtgtcctctgtggggggccctggcctagccatgctcttccgtggctcgtcctcatgacagagctgaggtcccagaagaatttggcgggacagccctgggtgcgtgggtgtgtggccaggtgccctaaacacattgactctgcctctccttccacacaggagatgctgaaggacgaggtgcggacgctcacttaccggaactccatgtaccacaacaaacatgtgttcaaggacaaagtggttctggacgtggggagcggcaccgggatcctctccatgtttgctgccaaggccggggccaagaaggtgttcggggtgagcatggcctctgcggggacactggcccttcccggtccttctggtccttcccagttcccgtccttgctggggtcacacacaccctccaggaggcagtcaggcatggctctcgggaggcaggcaagctccttagctccctgtcacctgggcattgctcctggccttgccttggagctgctgacatgtatagaggacttgacttttctgaaaccattttgggctcatcattgccttggagtccttagtcctatgtgggcttgagaggcagggtggccacacctgtgagctctggttggaatctccgctcttccactcccaataggtatgacctggactattcacatctcttctgtacctcggtttccccacctgtaaagtgggcataactacagtacctgcccacag

SEQ ID NO: 38571 - DNA, 813 bp, Bovine  19866881676759
  misc_feature (1)..(1): n is a, c, g, or t
ngcgattggtggtcttctccctgaaggtggttaattggtacagaatgtagacttcagttgtcttgccagccccgatgaaaacgcagctggcaggtagccgagacggaggaatttgtcataggttagatcagccccagctctaagaaccgaatgtacggcttatgcaaatagttttgcttagcatggatcctgtgttcctctccccccctcagtcccccccacaactattttttcccctgaagggtggggagggaagcaggggtggggggccgagggtgagggggttgcggacagaggaaggaggcagagagagcacttgcttgccagatctcattctccatcagaaaggagcaaattgctttccctaaaaaaaagaaaagggcaggagaaaaagaagacaaaacacccatcctttgggctaatgtaccgagcatttgaaagctgaatggctcggtaagaaaggccagccatgagtgtatttgaagagactgttatccccatcaaaacccattcgtactctctgggaggcctgtggagcacctgggtggggacttggaacaggggcatctcttcctccctttgccatgatggcatcacctccccaaccctgcctcggtgtccgaccatggcagatgctgaccccagcctctgggtcacccacaggtcccagcagagagacggctgcagcggctactatcagcatgtgtatccggcagacaagccagttccaagctgtgcgattcaggatatatcgcttaacctctctgagcgacggtcgcctcatctgcacaaaccggggtagaatggtttcct

SEQ ID NO: 38572 - DNA, 1743 bp, Bovine  19866880457903
  misc_feature (1)..(1): n is a, c, g, or t
ncccagttagcctctactgtatagattgaacatgaaaaaatcttcacttttgcagttcactctaactgcagccctcgctctttatcatattgtttagggcagcttcagatctaaagaaccatgtgtgctctgctctgatagtagtcaagaagtttttgtagtttatataggaatccatcaagaaataagatgcatcctttctgaaagcacctcctgtgactcataggggtctttactggcccttttacatgatttgaagagaaaagtacaatctctctttccccacacagaggagtaaggaaataatagatctgttatctgaacaaaagataggtaattcctttttactcatttgaaaagaccctgatgctgggaaagattgaaggcaggaggagaaagggacgacagaggatgagatggttggatggcatcaccaactcaatgcacatgagtttgggtacactctaggagttggtgatggacagggaggcctggtgtattgcagtccatagggccgcaaagagttggacacgactgagtgaactgaactgaactgaatttctttttaagactaaatcttttaaagcaaagctctttctatcatccaacagcctactttcaatttatcttttcttatatagatatgttgcaacttggtaatgggtttaggattccaaaacttgctcaggccacatcttaccacaccctaggaaaaggatctagcactactatattttgatacttaactatcactcattgtcctcaatgacttcagacaaaacactgaacactcaaaaggattccatttatctatctttatttatgatttatgatatttataaatatcctctatttatgagcaatgatgacctaaatatttaaaagtaataatttctacattagtgaataaagtataattcttactaactcagaataaactattactttgaatatatagctccattctgaatgttgaatgcttaaaaatcctccagtggtccctattttccagaaaataagtttaaagggcttagtatgaatatgcaattcatggtcttatcccattatctctcactaacttgttttcttcatttttcaacataactggtatcttcaaggtacaagactaacaggataattttacagatccacttaggctgaactcttatgaccttactctatgaagattttgccaacacacacatgtactgaagcaaaactaatacatgatgaaataatatattaaaaattcttaattttatatcaatatagcagattaacttttctatttttaacctagactatgactttctgttgtgtatatacatatgttcatacacacacacacacacacacaagttcacacagcgaaaaaaatgtgagtgtagtacagtatgtgttaaagtactatttgttgaaagaataaatgagtttagactggcagagtttccagactttccatattagaagggttcagtgagcaattaaattttgagaatgcttcaaataacatagctagtgataattatactctgaatctatcaaactctcttcctttgatcatagatatatgatatattatattgttcttttggggttttgaaataaaaaaataagcatttaaaaaagtacttacaaagataaatatgtttatagactaaagaaatagtttggaaatacattaatccatattggtgatgagcatatagtaaattgcacagtgggatataaaccaactttttt

SEQ ID NO: 38573 - DNA, 1374 bp, Bovine  19866880561151
  misc_feature (1)..(1): n is a, c, g, or t
nttaggaatagagtattttggtcataaatatattattgatacatttcttttgtaaggttattaactttgaaagcataataataacctatgtttcagttatataattgtttttatataagatatatatggctttataatagtgtcaagttccacatgttctataagttaaaattatactaaaaagttccctcttcacctaagtagtgtatttttaaaataaaagaagcaatgtcaacattatcaaaaaatattttaaaattttaataataatttgaatgttttgatcaaagtaaaaataaaaggcaatcggtaatgcactagaccctcattgtcactaattagacatagcaaagctgtttaacacaagaaatattatacaacagtctcagaatatgtggaatattaacaagattgattttcttgagcactttattccttgaaattatgtcaagattaaaagaaaataacttgacattttaaaagtgtcaatatgctttaatataaagcacaaatgcagaggaatagttagtctttacaagcatcagcttgtcattttcttagtatatcaagcaatgcacattctgtagaataaataacttggcaagtacatagaggttaaacatgtgcattaccacacaatcaaagaaatctgaccacccctgtcaataaactcaacataaagtggcaataagattatatataataatctccaaaagaaaatgaaatgtcaaaagcaataggtcaagagaaaatcagagtgtggatggggcagtgcatctgagtgtcaataaattctcacaaaatacatctaaaatctacaaatggctcaaagaagacatttgaaatcacggacatggaacagaaataatttccctagcaattcaaataccaaggaatattctcaaggtttaatttctctgcttttcctttgcctaaatgtctttccttggagaaggcaatggcaccccactccagcactcttgcctggaaaatcccatggacggaagagcctgatgcgccgctgtccatggggttgctaagagtcggacatgactgagcaacttcactttcacttttcactttcatgcattggagaaggaaatggcaacccactccagtgttcttgcctggagaatcccagggacgggggagcctggtgggcttccgtctatggggtcacacagagtcagacacgactgaagcgacttagcagcagcagaagcaaatgtctttcctatccctgtttccttgcagaagaatcaatgattgatagtcagtatatatgtcaacagaagccatgaatgttaattttagatttcaataatgactaaatcacagtcaaataggcactctgataaggaaataaggcctaaa

SEQ ID NO: 38574 - DNA, 1403 bp, Bovine  19866880802153
  misc_feature (1)..(1): n is a, c, g, or t
naatatgcctatttttcctagttattttgtatgaataaaaacatttatttcactttcttctaattaagtttcctaatttagcttttcaagcatgcagttctgatgagcatgacagcaaatgaaataaggctattatatgttaaactgttttctgaacataatttttgttgctaaggaaacagcatttcttttcctcataggatacattttcaaattcccatttatgttaagaaattctaactgtatttaggaattaaaaagacttcctatgaatgaaatacatacagctgcaaaacaacttaatcttatatttcagctgaattaatatattcaccagtcataattttcagaagtgcatctgagtctagttggtttttgtttagcataacaattggatgcaatttacccctccattatttttattttcatcaccttcaattatttaattttaatatatctcactaatttttaagcacttttagtgttttaccagaatgcagtcctacatgctttaaatttaaaaccaagtatagaatcaaatttgggcttccctggtgggttcagttgtaaagaacccacctgtcaatgcaggagacataggttcagtctcttggtcaggaaaatctcattctcctctgggtcaggaagtaaatggcaacccactctaaaatattcttgcctgagaaatcccatgaacagagaagcctggcatgtcacaaagtgtcagatatgacttagcaactaaacaaaagaatcaagttcaggccttgattaagaatattttttaaatctctgtaagagggacagaaatttcctacagaggtcaggattctgtttgatatttatattcatggactaccagattttcaaaacaggcatgtagctgcatgaacatacataaggctatttcttcccaaacttgtcagaacattattctaaatattagaatctctgattatcacagttttctttaaacactgttatttatgcatttcatcatatttttcctcctgtttaaagtcatacatttatgacttagtctatcacaatcatgttaccacaaataacgcttaaatttatgaaggaccattaaaactagatctataattcgtctctcacacctatgttactatagacaacttaaagaatagtacaactggtattatactactgttccaaataacaatattccttgtagacaatacaaacatgaaaaaacctatatctttgctctgaaaaaggataacacagatattttaaaggtataatatacatcaacattttattgtgacagtatatagggaaaatactccactgatccactaaaattagtgacatttttatcatttcctggatttttagagtgggtgtatatttatcatgtatgataaatagttccttca

SEQ ID NO: 38575 - DNA, 2557 bp, Bovine  19866881016562
  misc_feature (1)..(1): n is a, c, g, or t
ntataactgtatcttgaactctttatcagacagattgcttatctccacttaacttaattctccttgggttgtatcttctttcttctattgcaatatattcctctgtctcctaattttgcctaattccctttgctagttttatcttttaggtaggaagattaaaattcccattcttggagaagtggcctcagtaggagacatgctatggggcccaagcacactgccctttggtcaccagccattatgctctaagtatacattctgagactgaatgggcccttttactgtggtgggacaacttctgtaggcatgcctctatacaggactggcccacagcctagttggttggtgcactggctgcctattcactggtacatgaggccaggttccagtgtggctaactaggggatcctaggggtactagatctgttactggtgagtaggatgggatcccagtgcagctggcttctcagcccaaggggactcataactgacactagcttctgatgggggggtaagtccctagtacaaagaggctagaaggatgattccacaatggcacttgccagaaccagtactctcatcatacaatcaacttcccaaatagtttctgccagcatctgtgtctccagagtgagtcccagttgcctcctccttctccaggaagctctccaagatcagcaagtgggctgactcaagctcttttgaaatcaccgtctctgcactgggactcagagcatgtgtgatcttgcacaccttttaagtgaactggagtctctgtttcctacagccctcatgaccctcccatacacaagtcctgctgcccttcaaagtcagacctttaaggagatcattttcctggtgctggactccaagtctggggagcccaatgggaggctcagatccctcgctacttggggagcacttatattgttgttattcagtcgtcaagttgtgtccagctcttctgtgaccccatgaactgcagcaccccaggcttccctgtccttcactatctcccggagtttactcagactcatgtccattgagtcagtgatgccatccaaccatctcatcctctgtcatccccttctcctcttgccttcaatctgtcccagcttcagggtcttttccaatgaatcagctctttgcatcacatgaccaaaatattggagcttcagcttcagcatcagtccttacaattaatattcagagttgatttcttttcggattaactggtttgatatctttgctgcccaaaggactctcaagagtcttctccagcactttggcagctgtaattatgttcctgtttttgtgtcacccacccagggtgtgggtcttaactatttcacatccctgctccttctacccatctcattgtgattccttctttgtatctttagctgtagaaaaccttttctgctagtcttcagagaattcttataccaatatttatttcagtgttgagatttttataaaaaattatctctccactcattctcttatcacttatactggatatatattgttttaacttttcaatgtcttaaattagaaaaacaaaaaacatttgtgccgcttctttgacccagcaacccagcagagctatgtttcataggtgctagaagaggagattctatagtagaatttcgagctagcattccttagcaattggaatactgtacgttttaattagctaggtttttcaacttccaaaacattcctctttaagaagagaactagtttaaaatgttttccaagtattctcacatatataaaatactaaactagaaaaaatgaggcagactttagaatgattctttctgtgtttgagtatcctgaattttataacatgatttctgaagttggttttctttaaagcatcattgttcgtttaccttttagtcaacattttctcatttgctcggaaaatgagaaactccatttctgtgatgttcaatgaaacttttgacatttaataaagaaacctcaggagtgcagagggtaagcaaagagatttttttcccctcatatcaggaagtagcactgaagtggtgaatatgtggctttatttctgttcttagtattatatcctggcctgcctgcccctagttttaaattgggaagcatctcagagaatcctctgaacaataactagcttttccattttctcgtgatttgctagctctattagatgagagtggcaggcactcacagctagttcaggttgaaggaggatccgtgcttcctcccaaccaatttcttagtgttctacagccccctctccccacctctggccagccagaggaacatattagaacctatattctcatgaaggaatttctggctgtattctgttgtgctgtgaaaacatatacacaagacacgaccccggataggcaggggtagcagtgtatcttggggtctgtgcttttctatgcttctgtttaaaatcatctcaggtatatttttccctgagggaggaaaaaaaggtgatctgtatcactaggtgatatatccaatccaggcccaattacctaagaaaatcttgtat

SEQ ID NO: 38576 - DNA, 5615 bp, Bovine  19866881054489
  misc_feature (1)..(1): n is a, c, g, or t
ncaatctgtggaaaattattaaagagattggaataccagaccaccttacctggctcctgagaaatgtgtatgcaggtcaagaagcaagagttagaaccagacatggaacaacagactggttccaaatcgggaaaggagtatatcaagtctatatactgtcaccctgcttatctaacttatatgcagagtatattatgtgaaatgccaggctggaagaaggacaagctggaatcaagattgctgggagaaatatcaataacctcagatatgcagatgacaccattcttatggcagaaagcaaagaagaactaaagaaaaataatttttttctgctgaatatgttgtgggtagccattcccttctccaaggggtcttcccaaccgagggactgaacccaggtctcctgcattgaaggagaattctttatctgagctacctgggaagcccaagaatactgcagtgtgtagcctatcccttcttccagcagatcttcccgacccaggaatcaaaccagggtctcctgcattgtaggcggattctttaccagctgagctatgagggaagccctttaatgtaggtagctggactctagagtccattcataaataatcataatatactttatggataagtatattaaggattgcataccagtgcctaggttcaatacttgaaaacagagtatatataaaattaaatatcaatccacttataactacatataaaaataatgcaaatgaagtaaaaatacagtataatgtaatattagtattttatcataatactactgtaacaatttaaccattattaatatttagaaatttataaatataatttaaacagtcagtatacatatagtattgttcttgcctggagaatcccagtgacgggggcagcctggtgggctgccgtctatggggttatacagagtcggacacgactgaagtgacttagcagcaacagtggaaggtgacttactgatgcaaaacttcagcttctattcaactatccaatttcctctaattatatttataatttctttcaatcatttcaaaagactccttcacaatcttatatattccttcatagaatcatctatcagttattcaaaatgacaccctgatctgctaccagtacttgctatgataaacaacaaagagccccgtgtttgctccatatttcattagatcgttcatgaaaaatggcctatgacacttgtgccttcagcctttctcttgacagaagctgaaatctgttcctgctgtccatttggagaagaaaaacattatatgttctctcttcctcttctaaggtttttagatttattatgctcccttttcttcctcagacaagtacgtcatcccctagagtcataagcagtcaccatcttttagaagaccacaaagaagtatccttcatatcacagatactgatgtgtgaaagcaatctgggatataaaatgtcttgcctggtaaacatgacatatttcctaaataagtaactttaccaatcaacatgaagctaacgtatctcatcaactgctgatgaatattggaatcactgctccgtcagttcagtcactcagtcgtgtctgactctgtgaccccatggactgcagcatgccaggcttccctgttctttggaatcactgctatgtagttgctatttggcttagggtggtgcattcttctgtcatgacacgaggaggcaaccagttctttgagtatgtcacattaaggcaaggagaatacaaggacaaaaagttgagaaccatcagataatctacaaatatatctacaacctcatatctataaccaaatgtatgtataaacaaacatatgtataacctataattctataacttctgctgttgttattggagtcactaagttgtatccaactcttgcaaccccatggactgtagcccaccaagctccttgatccatggaatttcccaggcaagaatactgaagtgagttgccatttccttctccacgggatcttcccaacctaggaactgaatttgcatttcctacactgcaagtggattctttagcactgagcccctggggaagcccataaactctatactattatacaaaatatattatctaatgaattaatatatatacaagggtgcattttagattttacctaatagttctagagttgtaaaaataaatatatttttaaagatacagtaggcagtattctggagtagagatttaaatttagacaaccagtttattggtatttctacttcatcacaatgacttttaaaatttatgcttaatatcttccttatgttatagattctttgagaatctggaattgatcaactaagcaattactttccatttcaaagactcagtagtgatgtgactaagttaccatatgccatttgccatattttaaagagaatctatttaccaagaggtccaagaagtcctacagttgatgttcttggacactgttttcacacgggactgatttttcttgctcccacagttataaaaccccaagtgtaacttccttaacataatataaaaataactgctatgaaccttagcacatggttggtggcatattttaagtaacactatcagattcatatattaatagtcaatcgcaacgtggtaagatctacatattttataattgctactttccacattttatatatttatttcaacttggtaataatagcaaaaaatccagcttaaaatgcatgtattctctttgctacctttatgtattattaatgcatctctctgtctatcttgttgctgctactgttgttcagttgccaagtcatgtgtgactctttgtgactccatgaactgcagcactccaggcctccctgtccctgaccatcttccagagtttgcccaagttcatgtcaattgaatcggtgataccgtccaaccatcttatcctatccacttgctttttatttattgaagattccaattctaggatgtcagagatgaaaatgagactggatacagtataaagtttacttctcaagcaaagtctcagaagctgtagtgataagaccaagatcataggtagtcaaagtttttggagtgaatatgtgagttctttagaggtaaatggactaatggatatacaaattaggtttcccctctcagtgcaggaaaactgacgatcttgcttatattagtgaagagaacttgctgatatcagggctggaggaatgagtagagaggcagtggtttgaaaccacaaaacatgagatactgacatagtagtgccatatataagcgagtggttaatattagtgcaatcaataaaaataagtatttttgaaaatgttttccatagtatacatttgggaacttaagatgtcatgctccccatacctcttacacagtttttaacctgaatgaaaggcaatgaaactgaatggaccaaggcctcatttcttaggtagcttaagtattaaccatatcttggaaacatttagggcaaagaacaacaacaacaacaaaaatctcttgaataataagaagtaaatataaaaattaacagtcatggagatgctatattgggtaataaccatcttcttagaccacttgtcatgtataattcctcttaagtaacaataacattggacataaacttatatggttaagaaaatattgatattatgtaagtcaaaaatacagccatgctgaaagatgtgaaaatagtacaaaagacatacagtcattttacttctaataaaaagtgatatttgaactgagtaaaggacagttaagaggtcaggagagccctcactatgctacaagctccatgagtaaaagatgtccttaccttatcaataagtatattctcagtccataaagtctggggcatagtaggtttcaaagaatattgacctactgagtgagaaatgttgtcattccctaggcatgcttatagctactattttgcaagtttaaatactattcattcattaaacttcattatgttactgaggtaatgctcactgattgatattgtaagctttcagaaaagggacctgtgggaaacatcaaaagcattttgattcaatgatttctgttttttgttagcaagtatagccatctgggacatccacatttttggccatgatgctcctgaacagatacatgtattgaatataatcctgagaagcagcacagactagatactgaattgggattttattgcaggggagctgtcgccatggcagtatttcaaggaatgacaaagtaaacatggcagttctcattaatctgctgtatctgttgccagaccacgtggctggaggatggatacctactgatggaatatttcttagctccaaaacaactgaaggtttttactagtttaattgaaaagctcagaaaagtttgagatgtggagtgaagggagtgttcacattattaccttaaagcatgactgcatggcttaatgaggggctttcctgattgaactatgtggtaaagtatctgcctgcagtgcaggagataggggttcaatacttgggtcgggaagatcccttggaaaaggaagtggcaacccactccagtattcttgcttgagaaatctcatggacagaggaacttccatgggttgaaagagttggacatgacttggtgactaaaccaaccaataaccagagtttaaatatgattcatcaattatcaatcctttgctaacacaaaaaattatatcttatcgaaacattgttattaggatttaaggggatatgcacaaaattgctataaaacaaaaaacagtctgcaattattttctcccattctgagggttgtcttttaaccttgtttattgtttcctttgctatgcaaaatgctcagatggtaaagaactgtggcaatacaggagatccaggtttgatccctgggttgggaaatgacaacccactccagttttctttcctggagcattccacagacagaggagtgtggtaggctacagtccatggggtcacaaagagtcagacacaattgagtgactaacacttgctgtgcaaaagcttttaattgtcacatttgtcatatttgtttacttttgttttttttttccattactctagaaggtggatcaaagaggatcttgctgtcacatttgtatacctgtgacatatatatatataccttaatttatggcagaaaccagcacaatattgtaaagttattatcctccaattaaaaaaaaatagtctggacactatatagcagtatttgtgtcctgtttttgcaaactgattttttttagcatcatgtcattgttaactcatttatattcactgtaatagcactagtcataatgaattcattcagattaatatggctgtcacacatactttcataaaaattctatagcaattcaatcttaatttaatatactattcaataaagtgtagatggtttaagtcacttaataatgccattatacgaagctgtaaagattataacagtatagattttctccagagagatgtgataatctagaagtggcatctctcaacttccatcagcagcctaatggctatgatcacaggcaactaatagctctctgaatggggtatgggatcctccactggg

SEQ ID NO: 38577 - DNA, 1079 bp, Bovine  19866881395098
  misc_feature (1)..(1): n is a, c, g, or t
nataccatctcaaactgctcaaacgggatatattttcttatcaagcagtacatttcttatcgtaatgaaaaggaaaatggattcatgggtaactctgataagttaacagagataatgtgttgtagtaaacattaatgtatcattccattgctaagaaacaaaaggaaataaaataataaagaaggaaggaatgttttggagcagaactgtataaccaatcaatgaaaaactaagcaaaactggatagctgacaatcaattaggtaaaatatttaaaattaaattctctacttttgaaacaaaaagctctagttcctctttgaaataaagtgatcataattaggtaaaagttataaacaatatccatccaaaaaagaataaatgaaattgtcaggtacaatttagtagcatgttgaaaatctcatttgtgagtggaaattctcattacccaagaagtttttccaaataaacatattagccttctgttagctgatcattgcagacatcttcagctatccaatgaagtaatcagtcttccttttgaaatgcaaaaaagtttaagaatattttcaataatgttgtaaagttataggctactctatgaaaccgaaaataaaggacaaaaattagatttacagtaattctaaactagatccctctgttatcaagtaccacaggaacaatacagacactggcatacaaagcaattagattagtccttactgctgctgatgctaagtcgcttcagtcgtatccgactctgtgcgaccccatagacagcagccaccaggctccctgcccctgggattctccaggcaagaacactggagtggttgccattgcccttgcagccatgctgttgttgagaagaatacatatttcaacattattttaccaattttagcaacataatcaatacacataattcctgccaacataccaattatctgtattttgttgtatcttgttaccactaaaattgtcacatatttgtcaagtatgcccctctttgtggcttgctgctgctgctgctgctaagtcacttcgcttaaatatgcattcacatgtttcattcaaatt

SEQ ID NO: 38578 - DNA, 1239 bp, Bovine  19866881745293
  misc_feature (1)..(1): n is a, c, g, or t
nattatttaagatgttctgagattgtatatcctaaggctacttgggttctggaaggttaattttatttttatagatactttcctaattcattgtgactcaaagtgactccccagttgcattcctgagacctttcctttgtctttatttccatggataagtctgctttgtatcaatggtatcacatggtatacaaaataaattatattttgcttgaaatttattatacagaaacaacttatcttaaatataataatacagacaggggtatagatctatatattcttcctaccattgctctggcaatttaattccttttcaggtataacaatagagttacttaaaatgcttgcatgatttttttttataaaataaagattttatatatatatatatatatatatatatatataataaagaactgactcattggaaaagaacctggtgctgggaacgattgaaggtgggagaagaaggggacaacaaaggatgagatgattggatggcatcaccgactcaatggacttgagtttgggtgaactctgagagtttgtgatggacagggaggtctggtgtgctgcgtttcacggggtcacaaagagtcagacacaactgagcgactgaactgactgatgcctggtccacagtacctgccttccaaacgtcaccttcacgtcaccttgagcaagtgacactgagaaagaaaagtcaaagaggaattcatgaaccaagttactatctacaaggcaagctgaaaaagcatttatggtaaagttacgtggagacttctgtatatgtttgtacatgaatgcacatatgtatgtacctttaagttttatgtagctagaaaacaaggtcatttcaaaactctgccattattctatctatccaacacatgttaccccagttctctgccaggaaaaaaatgtaaatttcctattcgtgtcaccagtacaatgggtggtgcacacttgtacatttccagcccaactcccaggaagaatgagtataaatgcagcaattagcacactgttatactaaacttcaaaacctcgtctgctatacttaggatcacaaacttgacactcgagcacagtttggcaaggaaagagtttctctctggctaaataaactctgctttccattttaaaatgataactccaattatacaaaaaaatacaatatactcctcccctaaaaaactctcttagtgctcccaagagatattgcctcttcctgta

SEQ ID NO: 38579 - DNA, 918 bp, Bovine  19866880200547
  misc_feature (1)..(1): n is a, c, g, or t
ncactgctactgctgctgctgctaagtccttcagtcgtgtccgactctgtgcgaccccacagatggcagcccaccaggctcccccgtccctgggattctccaggcaagaacactggagtgggttgccatttccttctccaatgcatgaaagtgaaaagtgaaagggaagtcgctcagtcgtgtccgaccctcagtgaccccatggactgcagccttccaggctcctccatccatgggattttccaggcaggagtactggagtgggcattcagcacaatgaatagcaaatattaagcattcaataaatatttcttgaatgaatgtgttaatgaattaagttttcttctcaaagagaatgagtgagaaactggaaaaaggactttaaatcatttatttttaaggctgaaaagaaaaattccactgataaggacaaccagcttgaatttgctaattttagaatttcagtgactccatgattaagagctcttgagcttatacagtctctaaagaaagaaacaaatgagtaaaactctaagatatttacctaaacacaaccaagggactggctgctctcatagccattactccaaggtagcaagagaaccttttaaggcaactgaggacagtgtttcctaagtaacaactctatgaagtgttggctcccacatcctgaatagacagatactcatctgaatagctcattaacatgtgatggctctgcggctcgaccacaggccacttatcatcattatcacttatttactcatttatgtaatggtggtggcattatacttctcaacagttaatggccttccccttatgatatcagtcacaccaaatctgcagctttgatatatagcatgcactctggaagcactgggccttcagtacacagacagttaccacggaagacaaacg

SEQ ID NO: 38580 - DNA, 1942 bp, Bovine  19866880353255
  misc_feature (1)..(1): n is a, c, g, or t
nctagataacatattcaaaagcagagacattactttgccaacaaaggtccatctggtcaaggctatggtttttcctgtggtcttgtatggatgtgagagttggactgtgaagaaggctgagcgctgaagaattgatgcttttgatctgtggtgttggagaagactcttgagagtcccttggactgcaaggagatccaaccagtctattctgaagatcagcccctctgggatttctttggaaggaatgatgctaaagctgaaactccagtactttggccacctcatgcaaagagttgactcattagaaaagactctgatgctgggagggattgggggcaggaggagaaggggacaacagaggatgagatggctggatggcatcactgactggatggacgtgagtctgagtgaactccgggagttggtgatggacagggaggcctggcgtgctgcgattcatggggttgcaaagagtcggacacgactgagcgactgaactgaactgaactgaactgaactagctatgggaccctggtgggtgagtctctaagctcccttggcttcagattctgcaatgtaaagtgggcgtcatcacatgttatggtgcttgggggtcctatgaaattaccagagaatatccactttactaacatcaaatataagacccagtggaattggccagaggttaaaagactgagattgaaagccaagcattcttgagctcacagcatgaagtcaccaaattctttctcttccctcgatcccatgtgtgactggccaatggagctgcaggcctgtctctgagcttatgggctgagggacagtaaagcaccaggtcattctggttctgggctttcgaggccggggagccgtacctatcctgccgccgctggcctccaggctctctgctgcctcttgttgtctctgcagccgccaggcctgctgcaggaggtggtgcaggctcagggccagcgcctgtctcatgtccttgatagcagcctccaggagcccctgtcccctcggccctggcctctcctgggagctccggagcactgtaatcactcgcctctgggctgccagcacattggcatccagcaggtcctggggccctcctgtatggggcacagtccggccctcctgtagggaagccccctggagccgggctggcttcctgctcagtggctccacaaagctgtcaccaggcagcaggaggttccccgaggcatcttgcagtcctcccagtgcaagcacctgacctggaggcaggaaccagagagagggggatgcgggaagggatgggggtgaatgaggcaaaagagagaaccggggggccaggacagagtgagtgacaggatgcgggtggaggtcagggatggggcagagtctagggtgagggagggcagaggggagaagggagggcagaggggagaaggaatgtctttcttgatggaaaaacatccatatgcttttactgcagaagcagctcagttctcgtctctgcctcccaccctgggcggggcgggggcactgtgctgaagatgagggtgagggaaaccgggaaggagaggaaaggtggccagagcatgaagggtggaaatacaggtgggcttggggtggaggctgaagactggaccagaatgtggagggtctgggctactgaggggaggggcttgggaagccaaaccagagggaggaagggcagaaggaaggcacgagggctgccagcagacctgtgttttcatccaacccgactcccaggattggcgagatgcctcctgtgacaggatcctccatggggccccccagctccaaaggggccagggtctgggtgagcggattgcagtatgtccccccaagagtgagccactgccttgtttgtgggtgcagagtcacagccagcacaggcacctcgatgcccgttatggggtctgtcatgagagcc

SEQ ID NO: 38581 - DNA, 1418 bp, Bovine  19866880411388
  misc_feature (1)..(1): n is a, c, g, or t
nattcattgactcttatgacaggtcagtatcttcattctattaccttatagggtacattcattagtgttacataaaatttcaagtaaaattaaacaattaaaagtacagttaagaacatagttgatctgcatgagaggattcaccatcatgtaccctagtccctaatgcagttattttttctgtttcctgggcctctccagcttagactcattttcatttcagagaatataaaagtggctccactgagctctcgcccatgagggcccagctgctgcatatcagtgtgtgttgacccagtggtacctgtccacccggtgtccagcagtaggcctgtggcctttaggggtcttatgcaacgcatgataagcatttcctaggaggcccatctggccatccctcatattcttttttcggggaatagcaaacaccctcttccaacaacacaagagaagactctacacaccagatagtcaacactaaaatcagactgattatattctttgcagccaaagatggagaagctctatacggtcagcaaaaacaagaccgggagctgactgtggctcagatcatgaactccttattgccaaattcagacttaaattgaagaaagtggggaaaaccactagaccatgaatggtatgacctaaatcaaatcccttatgattatacagtggaagtgagaaataggtataagggactagatctgatagacagagtgcctgaagaagtatggaccgagattcgtgacactgactgaactgaactgaagtcacatcaggctaacattcccaccatagttactattaacgcaaaaaaccccccaaaaccctgatacattgtaagcgtgatagcattaaagatatcagagaatcacggaagcaaagatgaaaaataaactaaatttccagacattcgggaaatgctattttttatggtaacttggacatgagaaaacttttggcgtcattatgttgattgtggaaataaactccctggtaaatacatatgtcaaaagtttacaaattttgtattttaaatatttatagtttcattatatgtcattcatacctcaataaagctgtttaaaaaattaatcaaaaatttgttaaagggtgccagatgctcaaaacacctgccaacatcttatttattccaaattaagtacccagggaactgcagaattactgctcatattcctttaacattaaaatgagaataaagtaactgtgataggcattttctctacaccttcttagctaactctggagttcaatgagatcttcagttcagttcagttcagtcgctcagtcacgttcgactctttgcaaccccatgaatcgcagcacgccaggcctccctgtccatcaccaactctcggagtttactcaaactcatgtccatcgagtcgatgatg

SEQ ID NO: 38582 - DNA, 1207 bp, Bovine  19866880447369
  misc_feature (1)..(1): n is a, c, g, or t
ncacacacacacacacacacacacacacacacacacacacatatatatttttaccagttgtaactttagggacaaaactaaagggacacaggctctaactcaagactttcctatacactttcttatcctttatgtttgggatctttttttaatcaaccacagatgtatagcaggcctccctatcttctaatattttttcatggtggcttttttctttttctaggttttccacgatgatgatgccattcctggatgggaagggaaaattgtagcctgggtagaagaagaccatggagaaaattaatgctgagtattagattggggacttgcagaagttggcacaccctggatgcttcactcaggaaagaggactaaaaccagaatacacaggaagtttgtgctgccaaaacagaagcttctccaagtgtgacagccataggccagtcctgtttgtgtgcctggcatgtgtggtacctaaaatctctgtccaaaagtagaccacaggttcttctggagttccttgtccgtgggaacacactgttttactctactctgcggacaacaaaccgaaggccttaaccaacggggatggatgatcccgctcctttgtgggcatggctgctattatctggaacccgggaactggatgcatcactcctatgtgttacagtattattttcattttaattggtctcagtggttgcagcaatcagggtcccagcatttgtactcacagacaaggtggaggtaccagcttttttgcttctttgcagctattgcaaaccaagaataactcaaaaggtggtaccaaagatgaaagcccactcttcaggaatttttttggactggacgtggatggtgctgaattgctaattggattgaaaaagggctgtccatattgtgctgtactatgctaaaaccataattaagaccttgggctgcctcttgcgtcttaactgattctgcaaattgtcctttagcccacagaaggcgtatttcatgtactgcttgtttttctctgtggactctctaactttagagccatttccccccctcttctaactgatgaactttgtgtttgaaaggaataaggagtgaaaatctcctttcaaatccaggcgggtaggaaaggtgctgctacccttatcttcttgactttctttctctcatgacttgtctttagcccaggcatctccttgcagtcaaa

SEQ ID NO: 38583 - DNA, 3117 bp, Bovine  19866880454771
  misc_feature (1)..(1): n is a, c, g, or t
nctaaattgtttgagcccattgaccatcaggtgtacctggtggctcaaatggtaaagaatctgccttcaatgcaggagaccccagtccctgggttgggaagatcccctggagaagagaatggctacccactccagtattcttgcctggagaattccatggacagagaaacctggcaggctacagaccacagggtcataaagaatctgacacaactgagcgactaacactactaaccattatggacaaaacgcctgctgacatggcctgacctaactttactctggcttcttccctcccctgaagagcctgaaccttgacccactttcaacctgagccagcatcagaacaccgcacagcccttcctgacgaaacctgttggctgctgctgctgctaagtcacttcagttgtgtccgactctgtgcgaccctatagacggcagcccaccaggctcccccgtccctgggattctccaggcaagaacactggagtgggttgccatttccttctccaatgcatgaaagtgaaaagtgaaagggaagttgctcagtcgtgcctgactcttcgtgaccccatggactgcagtctaccaggctcctccatccatgggattttccaggcaagagtactggagtggggtgccatcgccttctctgaaacctgtcggagacccttgcaaatctccggctccaagcactctattacaatagtgcccctcccctcattgccatagtcttttcaaataaaatatctccatatcttcctctagaattttttttttaactgtaagaaagtgctgagaggtgtacccagtgttataaatattgaggactatggaaagtgaaagtgaaagtcgctcagtcgtatccaactttttgcaactccatggactataaagtccatggcattctctaggccagaatcctggtgtgggtagccttttccttctccaggggatcttcccaacccaggggactgaacccaggtctccagcattacaggtggattctttaccagctgagctacaagggaagcccaagaatactggagtgggtagcctatcccttctccagcagatcttcccaacccaggaatagaaccagtgtctcttgcattgcaggcagattctttaccaactaagctatcagggaaggccagaggactatggggtatggtctaaatacttaaccagacaatcatgtcttagtcctattttacaggtaagaagatggaggtagcagaagtctaagagacttgctgactcacagcaccgagcgcagatttgggaatccaggtgttatttcttgtctcctaggaaacagtgctctttccagcatgtgcttgcaggctaagtcgcttcggtcctgtcggactctttgtgaccctgtggacagtagcctgccaggctcctctgtccacgggattctccaggtaagaatactggagtaggttgccatgttctcctccaggggatcttcctgacccaggggtcgaactcaagtctcctatgtctcctacattgaaggtgggttctttaccactagcaccacacagcacaaacatgctcagttctggtcaatgtttagagtaggtttggggaaattattgaaaagtgttggttaaaaacaatcttgtgtttaaagaaagggaagttgtatccaagagtgaaaaaaatcagtggaataccctgagcttcaggaaacttctgatccgtggaagtgaatgaagaccacccatatgagaacaagcaaaggctattgatttagagcttgctctagcaagggagttgaccatcatcacttgcacgtgacagaaactcaaaagcaggcagaagggcttccccggtggctcagtggtaaagaatctgcctgctaatgcaggagacgtgagtgcaatccctggtccaggaagatcccacctgccatggagcaactaagccggtgtgccacaactactgagcctgtgctctagagcccgggcactaagactactgaacccagtgctgcaactactatgtgcccagagcccctgctctgcaacaagagaagccaccacagtgagaagcccacacacctcaacgaggaatagcccctgctcaccgaaactagaggaaagcctatgcagcgacacaggcacaaataattaaaaaaaaaaaagcagaggttagagtgtgacagttttctggcggataaaaagggtaggaagccctgattggaggctgttagcgtggagaagcagtagataggccagtgagacatggagctttcctgtgtaattggttacgggtgcattctggctttctcctgtctgtcctatagcagaagtaggtacaaaaattagggaggctgtcagttattaatcaagtcctggctgtttgggatcaattgccacagggattaagatttggctttctggactggctactgttgttaggaggatggcttcctgggcagattgcagcaagctgtgggccagggttctatttttatttatagtctggccaatgtatgttcagtctctcagggctctacagggaccttgcatttagaagaggctttcagatatctgaccaatcctgcagaggagtctatatgcaggccagggatattggcaagaggttttccacttccagtctggagaagggaaagtattgtcgacttgaaaagtagttacaatttcctacctgacagaagggggcaaaggtggtcacttgcaacccagccaatcccactgctgggcatacacagtgaggaaaccagaattgaaagagacacgtgtaccccaatgttcatcacagcactgtttacaatagccaggacatagaagctacctagatgtccatcagcagatgaatggataaggaagttgtggtacatatacacaatggaatattactcagctattaaaaagaatgcatttgaatcagttctagtgaggtaggtgaaactggagcctattatacagagtgaagtaagccagaaagaaaaataccaatacagtatactaatgcatatatatgaaatttagaaagatggtaacgatgaccctatatgcaagacagcaaaagagacacagatacaaagaacagacttttggactctgtgggagaaggcaaggg

SEQ ID NO: 38584 - DNA, 2367 bp, Bovine  19866880490123
  misc_feature (1)..(1): n is a, c, g, or t
ntactatatggagaaattcgactagaaaaaatggtgtatatcctgagcactcagccaagttgagggaataaaaagagagaaagaagaaaaaaatagaaaagttttgcagcaaaagagacactgatgtatagaacagtcttatggactctgtgggagagggagagggtgggaagatttgggagaatgacatttaaacatgtaaaatatcatgtaagaaacgagttgccaatccagattcgatgcacgatactggatgcttggggctagtgcactgagacgacccagagggatggtatggggagggaggagggaggagggttcaggatggggaacacatgtatacctgtggcggattcatttttatatttggcaaaaataatacaattatgtaaagttttaaaataaaataaaattttaaaaaaaaagaaaagaaaagttttgccagaatatcattattgtgatttaaatcttcataatttgcttttccatgttttccaattattttgtttctttgcttttacagtgagcgtactcttttttttttccccctattttaattctaaaaagtgggcttccctggtggctcaggggtgaagaatctgcctgcagtgcaggagacacccgtatgatccctggtctaagaagattccaggtgcctgggggcagctaagcccctgcatcacaactactgagcctgtgctctagagcctgggagccgcaactactgagcccatgtgtgcagctaatgaagcccgaacactctcgagagtgtgctccaaaacaagaggagtcaccgcagtgagaagcccgcgcaccactcccagcaccactcccagcactagagaaaaacctgcgcggcaacaaagacccgacacaaataaataaatacaattatattttaaaagacggaaaaactacagaggagaaatggaaacactttacctgataaatactctttggattgctgactttaggaattatctgaggttctttgttacaactgtcttcatcagaggaagcgccggaggagtagtctaacgtggctctattaacagcatcactgatttgttgggataatttccattcctcccatctgcctttgaaagaagcaattgtaaatggatgatttttctcaccatacctaagaaagaaaggaaaataatgcattcattagggactcaaattctcacaggtttttatttctaatcttttctggaaacagctcagtaacttacaagaagagttacttgaaaacaacaaattgtgagaattaggccaagaattagtagcaagaccctgagcttaccttctctcctgagcacaccaagattacaactatttagacagcagttattgatgacagactgaaatctagcagaaaagatcttctacaattaaagtgataaagaaggaaccacaaagagacaggtaagaggagtggagtacagtccagacgcatccctgcaggtgggcaacacacaaacagggggataatgacagcggttctcccaaagagcattcagtgggtgagccccacatcacactccccagaccagggagccgaccccaggaagatgagcccccagaatgtttggctttgaaggccagggcgcttactttctggagagccagatggctgtgggaaacagagacaccactctcaaaaggcccacacaaaatttcacatgctctgggacccagcgcagaggcagcagtttgaaaggaacctgcgtcagacccacctgctgatcttggagagcctcccgaagaggcaggaggctgtggagctcaccctggggccacagaaactagcagcagccattccgaggcgctcgttccaccatacgaacactggtgctggcgagggccgctttgaagtcctccctctagctgactagatctaggacccagacccgccactagcccatcagcaccagtgctgagcctcagcccaaacacctggccaggtggggaaacagtcccacctactgtcaggcataatgcccaaagacgagcccacagccaccccagaatactacactgtccaccagagggtgcagcacctggccccacacaccagggcaccagcactaatcccaggacccccagggccctgcaagcagagacctaggacccagctctgcctaccagtgttctggaaccaacctcaagacctcctgacccctgggcccacctgacaatgaaccagcactaacctgagggccaacttcacacaccagtggacatcaagacctctgggccctggccttacccaccaatgggcagacaccagctctaggaccaccacaggcccacagcctaccatgacaggaccaagcacacccaccagcaggctaacaccagctt

SEQ ID NO: 38585 - DNA, 3237 bp, Bovine  19866880508938
  misc_feature (1)..(1): n is a, c, g, or t
ntttactcccaaatgggttattttagggacgtgggagttggaagaaagaatgtaactatggggtggtaactaccagtaactactcaaaaactgctcagtacactagaggaagccaattttctcccttgattcagttagcatttcctcattcatgtttatctcttgaagagtagtccaacagcaaacttctttcaaaatctgaacaaagaagtaccttcagactacttcacctggcagtgttctcctgttggctgcactgagtaaataaggtgtataaggtcaaagtagactattacaccattcatccgacaggtgtttatagaatgctgggtattgtgctaagttctcagcaggagcttacaatctagcagagataaaaagatacataagaagcccttcaataataatgaaaggcagtatgtaggcaaattttatttttttatttttttatgtaggcaaattttaaagtgagttatacaggaaagagattgaaatgctttcaaaagaggaaatcagtgtagacagactttattgaggagatggaatttcaactaggcctttaaaaaagacaagacttgaatatgtagagtgaaaagaattgttcctgggctccaggtcaacgagaacacagatctggaatcagaaattcacacgttctattttgagaatcaaaatgaagattagcctagttatgggttttgtggtcattagcttagtaagaagtccaccagccagtttccaaagtactgaagacaagggttcaaattcttcctacttccattaaaggcaaggagggaacacaggaccagaacaacacagcagctctatcaaggagaacagttccatacaccattgtggacaaaactgttacatgctttgcctgtttctagttttaatgatcatttaattcattatgattaaatcaattacatccttcaagattcaattaattgacatgcttaaggggatgaggggggagggctcagaatccttcaggcagaagaaacagtaatgtgcaatgacactgtgacagaagaagcttgttaaattcaaaaaaactttaagaaggcacataaccagttagtacactggggtcattcacagcccaggctctcaagtcacactccggcttcaagccttggttatgttgattatttgcttgtgtgctgtgtgacttgggcaaactgtgtaacctgtttctcagtatcctctgtcgtaaaatggaaatattagtggtccctatcttataaggtttttgagaggacaaagtgacacagtaaatgaacagcataatgtccaacacatggccaatgtccaaggagcgacagtctttgttgtaattgtttttaaggctcagacacagcacgtaatcatctttactggccttgttaaagttcctggactttattccaaaaacaatggaagcctctggaaagttttatcagttctaattggattttggttttaaaaagatggcttacttagtacctgctattagaaacctcaaaggaaaaatttattctagaatttactaccagataatgtttttctttctttgaagaataggtatcttttttttttagataaaattctgtagagggctacatcttatttttatctgacagccagaaagcttagagcctaaccggaagctgttaggcccttcctgcttctgtatttgtgttctcttctttcactttccacagctgttttataggtattctgattcagttctttattcttgtttctgttttagaatgattgcttttgtattattttcatttaaagctatttcaatcatctgcggaataaggtgcaatctaattaaccaaacaaaaattaagggcataaagacctgtagcctcataacgcatgaatcatgcactgtagacgcattctcagcatgccaccaaaatcactcttttggcctaaacctagtcagatgaggcaagaaaaccagatggcgcaggaaacctttctctatgcaaaggagtgggtgaggagagacgaagacccaaggcctttcccgaatgagcagggcagtcagggcagtcagcgccggaagcacatgggaacctgcaagcagcgaggtgtcgcgagctacgcacagactcaaggttagagtttttatttttcatatacgcatggtttttctcccaaaagtacttcaccctcgtcttaaccttcagctgctccactgctctgtttcttggctcatgagactcctttgttgcttcactcatctcgcttctgaactcggatctgacggttagccaccttaacgctgatcccactggccactggaacgtgtgcgggcctctggcctcgtcccctcccggcacccagcctggctcattcacggtgtccactgtttcccctcccgggttggaaagcactgctcattgggagtctaccatgaaggcactcccacagagctaatgatcgacactttcattcatcccctggctgtcatatgaacaccaccagctgctctgaacccttccccacaccacagtcttatgggttgttctttccctgatgtctcacttgctacactacagaattaagtctattctatacaaacaaactcatcttccttctatgtcccccaaagtgcctttgtagccatgtccttggtccaagctttaattctcactgagcgcgcacccctgcacaccttctcagaggaggaggaattcctctcctctaagccgaccattccctctgtgctcctcatcccgctgttccttgtctaacctgggaccttgtttcaccaactgtttcttctttcctatctgtattcttttctttcctagcttcttcaaacactaagaccaccaccacaaaccgtgacacatactgaattctacagaccccaatttatccctcagttttttccttttctcctttctaccttaaaaaagcctcaaaaaaagtttcataatacctttctcccttttctcaccatccataagtccataaccttttgaaatttggctttatttcccaatttattgaaaagtactctcttcaaagcactgatgatctctcttcctttttttgaccaaaaacactttactaaattggctttcaccttcatcctttcaaacttaggccaagtaaaaaataaacatcacacacacattagttttttccaactttgctgttgttgttgtttagttgctaagtcatgtccgactcttcttgcgaccccctggactctagccccccaggtgt

SEQ ID NO: 38586 - DNA, 1980 bp, Bovine  19866880522556
  misc_feature (1)..(1): n is a, c, g, or t
naaaaaaaaaaaaagaacatcctttaccttccttgaaaagactagctttcttgtcatatctgtgaaaagttatgcacctcgcccgtgggaacaggaagtgaacttctggtacgacctgtctcagaatggtggcagagcctgcttcagatggatacctatacctgtacatacttcatcacacattttctggagtttccaacaaatcagtgtttatcctttcattgcaccaggaagaattgtcgtatttcaagggatttgtacatttatgtatatagagagaggattaatgttcccgaactttccattcttgccctatttacaggcacagactgtggggctcccggtgaccgtgcattcacccagcgtgcgagcgatgcgatctgccctcctcccacaggcatccaccgtggacgccttcgcgtttcccacgtctggctgtcaggcagaggcagcgttcatggaggaagagtgtgttgacactccaaaggtacggacgtgtttgagagactccgagcttgcgggttggctggagccggcagcttggtctgcagacattgtactttggcttagctgaactttgtcatttcctcaaggcgctcaggagtgttgtttttgtgcagaagacctgagaaacgtgtccagagatgacctcggctccctctccatcttgtcttcaccatgattatgtaactcgtcagagctcatgtgtacttttcagaatctttcttccttctgtttccttaaccagtctcttctcacaagctctagatccctcataggtcttgaatttttttaagccaactgtaattctgaaaacaaaaacgtaactattgtgctgacttgggctttgcctgttactatggcccctcctctgcatgtgctgcagctacaaaataatgagccttttttgttcaactaaaatatctctttgtgtccagtttgaacatacctaaaggagataagtttattctggcgtgctgtataaagttggcttttagtatgtggaagatgatggcttctctcatttaatgggtgtttgctgttgtttagttgctaagtcatgtcctgactcctttgtgaccccttggactgtagcctgccaggcttctctgtccatggcatttcccaggccagaatagtggagtgggatgccatttccttctccaggggatctacccgacccagggatcaaaccctggtcttgggcttggtaggcagattctttagcgctgagccagctgggaagcccagtagatatttattccacttattatttgttttatatacttagcatcaagtgatatactgaagatcacattaatgggaaggtcttagagtatgtttaaaatagactcatttcttctctagctatgtgaacttggacaaagtgactgatttctttgaacttacattctgtcttgtaaaacaaggaaaccaactttatgagactgttgtgaggattaatttagagaatgcgtatgagattctaggcaaattgtagatactcaataaatattggtttcctgtcttttagcctcattaggtaataaaaagatgactcagacattaattctgcctcaaagtctgtagtctagcagaagagacatgatgcataactaacggcagtgatgccgagaactgaataaattgatacctaattggtcccttaaagagacaaagattaaaatgctgcaagactaggagacagttccagtttgatcagtaatgtctttgatttaactgtcagagctgggaattaagagacaaaatcaggatggatggaaacgagggtgtgctggctctctcagtggaggggaaatgtcaggaaagccccatccctacaggtcagagccggagctcagcatggctgagggagcgggcctgtgaaggggagtcgtacaaaataaagacaaatagcctgccttgaatggcaaagccaagggatagactctctctagtctgaggctctcagcatgggga

SEQ ID NO: 38587 - DNA, 3200 bp, Bovine  19866880545967
  misc_feature (1)..(1): n is a, c, g, or t
nacgactgagagacttttactttcaccttggctgagatgcttctactagggaggccggacagcacctattactacaagggaggctggaggcctccttttccagaaaacccacttaaactgcattagcccccaggtcctgaatgcttaggcttattcacagaccagaggggaaacaccaggagaaaatgaaaacaaagcaggcttagggctgctcttctctgacaggcctatattccacggacagtggaacatccgaattagcatatggaaacctgttgtcctggtacagggaaattttagagggaaggacaacgcacccagctgaagtccgccacaaagaaagggacctctccggccgaccaccgtctctcacctatgttcttgcagctgctgttccaggctccgtggcggttctttgcaataaagctgacaggtgttctgggcttttgacagaaggctgggcttctagaagagcagaaaaaatacaagcatgacatgttgtcatctaggacacagtcatcagcctgtacttctgcctggagtatgaagccacgtgagtcctccagaagctgcaggctgcagggactgacgcttgctcgctgagagcacgggagagcctgggagagcactgcgtcagcaggcctggggtggtctcagttccaacctgctttacttttcctgtctctaaagtcctccaggaccaaggaggttcatggagactaagaacaatgagaaaagtggaggttaagtctctagcaaaggcacctactgaatgagcaaatgattcattcttgggtgggatctaatattttcaagcaccaacagagagcttatggtacctttttgctaagtattaagaggcataagggcttcctgggtggcactagcagtaaagaaactgcctgccaatgcaggagagacgtcagagatccaggttcgatccctggatcaggaagatcccctggaggagggcatggcaaccctctccaacattcttgcctggagaatcccatggacagaggattctggtggtccagggtcacaatgagtcgtgactgaaacgacgtagcatgcacgtaagaggtgtaaaacagaagcaaagaagccagagttcccttccctgctgctcagtggcagtaccctttccaggggtctgaggacaagcctttttctgctgccaagatagagcataaggctaagtttgaacatgtttctagaaactataaatgcagagtcagacctgcttgcctataaaggaattaagcagctacccaaaataaataccaagcaaaataggttcctgctgtgcagagaggcagagtggggatgatcacggtgagccggagcgacaagggggaggaggatcccacctggagtcggtgctgcaggtactgggcctccaggctgtggcgctgggagagctgcgggtgtgcgctgcccccggggagcgcagacacgctcttctgctgtggaggcgcttcctcctggggagcgaagggggggggggggacacactttcagtttcccacgtgggagaaagtttcaaatctgagtgaaagcaccttggcaaatgtccaaggggaactccagctctgttaagacttaatcctcaaggtttttatgtaaccagtaggctgagggtcaatcactttgcagaagaggaatatgggcttccccagatggcttagtggggaagaatccactggccgatgcaggaaatgtaggtttagtccctgggtcgggaagatcccctggaggagaagtggcaacccactccagtgttcttgcctggagaatcccatggacagagcagcctggtgggctacagtccacggggtcgcagagtcagacccgactgagcgactgaacaacaggatgaatgcatgctgtttacccgaagtaaacgatgaccgagtcaggacaggagcaaaggcccctgccgtcaccagcagtttattcccttcatgtggccatcaaacgcactaatatttttgatgtactgaacatgggctcacataaaatgaattacataaacagccatatttttttgtacttttagcacaaataactcacaatatttaatgaagtgatatcacatcaaaaataaatgtcaacaagcttctcatttatgttattactggtaatctctgtgtgtgtgtgcgtgtgaacgtgcatggtggagggagggagttccagggagactaagagggaatccatatagaatctgtgcgatgaactgagcagagcatgagtgtctaggcttccatgtggtactgaccacctgggccagtgggggtgggcctacccagcttgtcaggcagacaacagctacccagaaagctttcaggctgcaggctttccaaaaggacgtgtctgctccaggaggaggaaatcctcggaatgaaatgacacacctttaggacagactcatgcctcgttctcacacagccatgggggcagggcccagagcacccacctgcgggcaactgctggccaggtcctggagctgagcggcgggagaggccaggctggggtctgcctctgagcccatctgctcataaagcagctgcactttgttcaactctaggattcctttggttctagccagattctgaaggtgttgtctaaatgctacaattcctgaaagaaagaagagtggccaaatggtttaaatagaacacaaggcctttcaagtgagcacaggtatgaagccaacatggcaagggaccccatggagtcccacagaagcgcccagggccagcggagagcgcaccttgggtgagggaggtgtccgacgcccggcggccctctctgaagctcactggagacctattgtgggcctcgcgcttctgggcgctcagggcctgcatggcggggttggcaggtctcaggctcacgaagggagatgtcatgcgcggtgagggcgggttggctaacatcatgtccttgagggaagggttgtcctcaagaaagtgcaggtccctctgaacagaccccatatcatactcagagtccacactgtcaagggaggggttgtcactcatggagaaaattttcccttgaagagaaaaaaacaaaacaaaacaccaagatcaccaccaatacacagcatcttcttggaacatggaatacaaagcatgcacggctaccatgtcttccacctccaaccaaaatttttttcaaaacttttttacatgtca

SEQ ID NO: 38588 - DNA, 1051 bp, Bovine  19866880558413
  misc_feature (1)..(1): n is a, c, g, or t
ngacacactggggaacctgctttgctgattttacataccttggctccctttatttgacacaagtacagtgaaaacctcgtctttgttattctgccactggtcttctgcagagtttctttggatctgctttccacccctctcagaaataagagcaaaggttaatctcgttttgagagaagtgacctgaaatgtgctcattcaaccaacaaaaaaacaccatgtattattccggaattggtcttgctccttgtctccctattaacaatacgtctctaagcctccttggtatttcctataatatgctcccattttttctctcgatgaaatatttgtggagttacatagaaaatgaggctggttctacagtgctgcttttgtaaaagaatcttgtggatttttaaaaactcagcccctttccctattccttgggacatttctataattgtgttcccagagcctgaaattaccagaggtactgtaaaaaacagaacccaaagtttaaatttgttgccatgctttttgggttttgttttactcccaggtatcagtttccagaaactcaacgcagcctcatctgcaatgccctagtatccagcagagggcaccctgcactcactagaagcttcagtgggttttttttcctccaggagtctgattagtttcatattagctgtatccttggtgtcaaaattccagtgtaaattgaaatatctgagttatttctatatgcctatatttctaaatataaatttattaatataatattaatatatacctaaaaaataaatatatacctatgcgtctaaaattgcacagttttcctgggaaaacccatgtccataatttgtgggagctggatcatcaccacaacagtggttccctgcttggtaaatgacccacaagtaaaattttcacagttaatttcccttctgtttgaagtgaccttgatggtattcaggcagtaaaagatatgtgtttggttaagatggggaagcgactacttttaaggggaatacaggagaccggattcaatccctgggtgggaaggtcc

SEQ ID NO: 38589 - DNA, 1828 bp, Bovine  19866880568028
  misc_feature (1)..(1): n is a, c, g, or t
ntaatgtttctggaattgcagctgccctcaccagtgcagtgttgattttaaactaatctttctattttacatccctttttttatttctggagttaataaaggtgctctaatgagttgtattaaaacatcaatttctccttttgttgcatccacaagtttatcatggtttttaatcaaaatattgagcgaatatgtaggaaggagcttaggatgtcagagtctgcctggatggagaagctgcagtgggagatggctcatttctctctgacactgtctccgagaagctgtttttccccttcggaagaggtctgagatcagggaccatttcatgggcgtgtgatttgtgtggttacacaggtgccaggctcagaaggacctgtgcttggtgtcatgctctgctgccactgtcttgagtcttaatgccttttaaaaaagagatctcatattttcctcaaccactgggccctgcagactgtgcagccagcctgtttgaggatctggcagaatcagcccctccttgagttagtgctagtgtggagtgggcaagaagtggatggggaagcaggtggggtgaaatcttagaaatatatatatgcacacatccatatatatacatgtcccttgcttccatttaaatcaattatgcatgtgttatacatgcattgttttggatcttcctttttttgcctcatcctatatcttggagataatttcatcgcaacaatagatttgtctgattgaaagttttgcaaggatttaaactggcatccgtgtggaatagaacaaggggaatggagggagaccaactgagagggctctttcaattttccattcatttttattcatacatcaaacatttatttaagtctttgctgggttctgtgatatcaagtcacataagaaattagccttgccttcaaagagctcaagggagctaagacaagtaaacaaataaatcataatgccagtgtgcccaagtgttgtaaccagagtgaagtgacaagtatctggactggggtgtctccaagagataaaaaaaaaaaaaaaaaggaggttgctggaatactttttctttggaaaaagtgtcaacaggtgcagtctgataaagggtaacgagcattttggaagggatagactgacacatctttcatttattttatattctcctgtctccccatgcccatgcccacactgtcatggtgtctgatgctgaggagtgttacctgacagagaacaaggctaaggagaggcttgagatagggatcagtgggttctcagccgttgcctatggcatctccagctcctgcctggctgcagtagaaacagtgagcgaattcttgattatgcagggagatgagcctctgattcatttttgatgttcaacattatgaggcaagctccccagccatctgttcaaaggagggatgtgttacatattttgattaatttatttttatcttaatcaagtggcaacctttccgtcttggtgcatcttaacctggagcagttgtggcttggagggcgacaggcttgagcagattgatgagggaggggggaaggtgggctgcctggtgcgaagctagtgtcagatgcaggagcagagtctcccctgaactgccctttcacctccctaattagggaagaaatcacaagccctccagtgggcactgaaatgcttagagcgccaacctcctggggctcattatacagataggggcagaaaaccaaaacagccaggatctgctgcttatggccagcgggccacagggaacccaggcttgggggtgagaagcatgaacagcttcctgaaatggttacatacaagtga

SEQ ID NO: 38590 - DNA, 2834 bp, Bovine  19866880584922
  misc_feature (1)..(1): n is a, c, g, or t
ncactgtggctccgttatattctatagacgtttttgggtattcatttccattatggtttatcacaggatcctaaatatagttccctgtgctctatagcaggaccttgttgtttagcccaatcttcttttctactactctatttcttctccccaggaagctcactcagctctgaccagtcacttgctagatgtatgtgactcacatatctgtatcttcaccacagcatttcttctgagtcatatttccactttccccttttatctgactcatccttataattaatgttcccaacactctgacacatttttttcctccaaccctctttccagtatcaccaacccatcatcattgttgctgttgtttagttgctaagtcgtgtccgactctttgtgaccccatggactgtagcccaccagcctctttgatccataggattctccaagcaagtatacgggaatgagttgccatttccttctccaccaccagcctcccagttaccaaagtcagaaccttggaatcagccttaaccgtgctattactacgtcctatctctcactaggtcctgtaaagttcgcctcttaaagacttcttggatctgtcggcttctccacatccccactgctacagttcagccactctcattctctcccagtctctctgcttctttccaagatgcaaaaatttctctactgcttttcatcataacccctcttgtgactgccctgcctacagttaagacagacacgtaccctccccaggctgtctcctgaggcctgctccttggtttctgtgaccctgttgcactgaccttgcagttccccaagttcactaatttcatggactagatagaccagagggccctgggaagcagaccagtccaccagacaaattcctggtccctgtctgcctgtttgctttccggtcccttggaccctgggaaaattgtgttgaaaattgttgggacagaaaacattaccagaaaaagagagacggttttaacatttggaggtgggggagctgtcttcaggagagattttgggttctgctttactctcaggttgtggcagtttcttggagaactaccatttcatccccgctctttggcattaattgttgggatcgatgctgcagcggttatataatgtttattgcaaccaccacatatctgaggcttaagtgttgctaaatgtcactttcacgctccccagtgtatggtgtgtaattataactggttcactaccttctttgtgagggaggcagatgcttttagcctgaaaaggagaagagagacgcattgtctctaatcttacgaaaagcactcatttccggagagatcctgggtggagggagaggagcgtgacatgggctcttcatcacaaacacctttgctgggtgtcacctagaaagtgcaggacccctcctccctgccttccccccgaggctgcagtgggcatctgtgaccctgagatcaaattcaagggcagagggagatagaccaactggggatcagagtgacagccagtgaagcaatgaaacaggtgtcatcacattacagaaatgtgacctgaaagaaagagccatgggtgggcaggcggtgatgtggcttgggtctgtatctagctgtgtggccttggataagtcactttgactttctgatttcacttttgtcatatgtcaaatggggataataaatgctgcctgtactacctcagttaaatccaaccctaagactatgatttattgagtgctgctgtattcaaggtaccagaggacccagcagtgcacacagcaggcatggtcctgccctcggtgagttgaggtctatggcaggaaaactgagttgcaagccaaatctggcctgggccctgtttttgtacaacctatcagctaagaatggatttcacatgtttaaagggttgtaaaaaaaaaataagaagaataagaatatgcaatagaatgtgtgtgtggctaaaaggctcaagatgtttatctggtcctttacagaaggacttttgatgacccttggtctggaacttgacagccaccacgtgggcaccgagcacttgacacttggctggagacgcgctgtgatcctccgtgtcctgtggtggggctggtgtgtgtgccatgaggttcctcccccgcttctcactgcccccctgtgccctcctcctgttacccagcccccaggcctctcatgcccttctgtaacccatgtggctcagtggtaaagaatccgtctgccattggaagagatgcaagagacacaggtttgacccctggggcagaaagatcccaggaggaggaaatggcaacctactccagtattcttgcctggaaaatcccgtggaccaaggagactggccatggggtcccagacagttggacatgacttagcgactgagcaggcaggctgtaattgatagagccactctttcctcctgaagtgcctgcatttgatcttggaaaagcaaaggcttcaaaatcctaatggaaatgccgtaggagaaatacattttattaggaaccaggagatctagatgaataaaacgccaaagagccactaacattaaggtcttgctaagtgtttcacaagcattattttactgaatccaacagcaatagcaggagaactcaatgtcctgagtttacaaatgagaaaaatgggagtgcagagacctaagtgaccttcctggctggcaggtggcagaacctccatccactgacctgagtatggtgctcttcccgtgatcttagaggtcattcagggtccagggtttgtcctgcatgaggggtaataagggaaagcaggtagggtattggggttagtcgg

SEQ ID NO: 38591 - DNA, 1513 bp, Bovine  19866880638723
  misc_feature (1)..(1): n is a, c, g, or t
ncctctactttgggtctagcagccctggtggtagcatcagaatgaccacattccttggctcatgagggagcaggctgcaggcaccccctcccaagctttacagggtcttcagtcacattcccccagagctttcagagacccccaggttccctcctacctttgccgtctgcatcttccatcgaacctgccacgggtgtggcagggccagcatccctgtcactctccatgcccaggatgggcaccatgagccctgagccctcagggtctgggatctccatcccatacagggcagggacccacagtgctgtccccggatagcgcatcacccctaaaacaaggtgagggacacagcggcaggaggtgagggtggagggccacaccaaggttcgagtggctgtgtctctgttcatccctgctaagactgcctctgtttgcccaccttagcattttgaattcatcaaggaaggactgaatacttaaaaacaaggcaggaggtctttgggaggagctgagaacaatttctaggctaggctgaaaaggtggaagacaggggacagactttcttgaaacacctacatgtgccaaaatctaagctcagaactccatataaaatgtattttatttggtactacaattaaatctctaaaggatgtactattttaatcctcattttaaagatgctgtaaacagaggcagagggaggtttagtaacttgcccaaggtaaaagaggttataaacggtggggcaggtcttcaaactcaagtcagttccgatcccaaagcctggttcttttctgacacatcctgggcagaagtttctaggagtgtgtgagataagctccaggaagatgccactgctacttcctttccctgcctttccttgtgctggtgctgtaggggaggtagaggagttgggtgggctcctttcctgagtttattcacgggaagttgaaggctcttgacaaggagactggggactccagagactcaggctttaggcctggctaactagctacggtcccatcacttcatgggaaatagatggggaaacagtggaaatagtgtcaggctttatttttttgggctccaaaatcactgcagatggtgactgcagccatgaaattaaaagacgcttactccttggaaggaaagttatgaccaacctagataacatattcaaaagcagagacattactttgccaacaaaggtccagtctagtcaaggctatggtttttcctgtggtcatgtatggatgtgagagttggactgtgaagaaggctgagcgctgaagaattgatgcttttgatctgtggtgttggagaagactcttgagactcccttggactgcaaggagatccaaccagtccattctgaagatcagcccctctgggatttctttggaaggaatgatgctaaagctgaaactccagtactttggccacctcatgcaaagagttgactcattggaaaagactctgatgctgggagggattgggggcaggaggagaaggg

SEQ ID NO: 38592 - DNA, 1083 bp, Bovine  19866880749136
  misc_feature (1)..(1): n is a, c, g, or t
nccatagttagaatccaacacagtaaatgtttattggagaaactctcaaaagttgttttcatgccacattgtgttcataactagagagttctgtacagagttctgaactgatccgtgttactgccaacaggaaagtgatttcagagtcagacaaagaagaccaggaagaagtcaaagccttggactaatttgattgacacctgggagaggatggctcacttagaccttcacttttgaaacaaccagctcttacatcagaatcaccggaatcaattaaattagaccaagaaataaaagttaaatatacagcgcttctaggagtaccagctattgagtacttgtgtctgttttacttactcaaaaccactgcatttgataccacacagttatcatctgtctcattttatatattctcaagctccaacttaacttgctttcgtttgaagggtatttccagaactgctatatttgatctatattatgaatatcagataaacaagaaacaaggactttatatgcctcaacttgtagaccaccataaaaacaagggcttcccaggtggtgctagtgctagtgctgccaatgcagcagacgtgggttctacctctgggtcaggaagatctcctggaggaggaaatggcaacctgctccagtattcttgcctgggaaatcccatgggcagaggagcctggcgggctacagtccatgaggttgcaaagagtcagacacgactgagcgacagcacaaaagcactacatactccacaaaagtaaaaacaataaggaaatagagatgaaagatcagtcctgaaaactttaaagttcttcttgctattaaaaaaaaaaaatccattatccaaaacttggtttattcagcttctgggacatgtctgaagtcagaagtgaattacttccagttttgtgaatagctggctcaacatccccatgtcttatacacatgtccataatcccagtgctaacctacctcacttacaaaggtgggatacactggaaaagagaagggtaagactttgtcccttctgcattgcccaactggcaggcctactcaggattgtacatgaga

SEQ ID NO: 38593 - DNA, 4791 bp, Bovine  19866880752506
  misc_feature (1)..(1): n is a, c, g, or t
nttgacatgtggtcatgatggttgtttttgtccataactcaaataatatgcttgcatttctgtttcttgactcatcactttgaagccgctgctgctgctgctgctaagtcgcttcagtcgtgtccgactctgttcgaccccacagacggcagcccaccagactccgccgtcctgggattctccaggcaagaacactggagtgggttgccatttccttctccaatgcatgaaagtgaaaagtgaaagtgaagtcgctcagttgtgtccgactcttagcgaccccatggactgcagcctaccaggctcctctgtccatgggattttccaggcaagagtactggagtgggtgccattgaagcagtagctattaactccctactatgatagatgaggcatgtatcttctcctggcttctttctgccaatttttgttacatttttattcttctacttattttctctctggtttagaaggaggtgcttaaactttcatttcttgattcattaacttagtatctcttgtttctccaccttgtaacatgagaccattactccacattgcctccttcctcttccttcccatctcagtaagtgctaactttatgttatcaaagtttagaacatttatatttcatactgcaactatatagttagtcttcatgttttgtttatatacctgttgacgctgaaaattgaaaatcagcacatagctttaaccggtattgtgattttgtaaatattattcactgtggaatcagtagagtaattggatctatgtcgttgttcagtcatgtctgactctttgcgactctgtggactgcagcacgccaggcctccttgtccctcatcacctcctggagtttgcccaagttcatgtccattgagttggtgatgctatccaaccatctcctcctctgtcgtccccttctccttctgccttcagtctttcccagcatcagggtcttttccaatgagtcagctgtttacatcaggtggccaaagtattggagtctcagctttagcatcagcccttccagtgaatattcagggttgatttactttaggattgattggtttgatctccttgcagtccaagggactctcaagagtcttctccagcaccacagtttgaaagcatcaattcttcaacactctgccttttttatggtccaactctcacatctgtccatgactactggaaagaccacagccttaactatacagacctttgttggcaaagcgatgcctttgctttttaatacactgtctaggtttgtcataacttttctgccaagaagcaaatgtcttctaatttcatggctgcagttaccatctgcagtgattttagagcccacgaagaggaaatctgtcactgctatgactttttccccttctatttgccatgaagtgatgggaccgcatgccacgatcttagtttttttaatactgagttttaagccagctttttcactctcttctttcatcctcattaagaggctatctagttcctcttccctttctgccgttaaagtgatatcatctgcatatctgaagttgttgatatttctcccagcaatcttgattccagcttgtaactcatccaacctggcatttcacatgatgtgttctgtatataagttaaataaacagggtaacaattaactgccttatcatactcctttctcaattttgaaccagttagttgttccatagaaggttctaagtatttcttcttgacatgcatacaggttctatagaggaaatgtaatcctagtcatcaaatctgggctgctgaaaggaggttgttccaagcatcaaggtcaagtggattactgctgtactctatcagttctttaaaaaaaaacacacaaaaaacaacccactgatttttgtacgctccgtttcatatctggagcatacacctgactctcatcttggaattactaattgaaattctcccttttcttattgactgaagtaacaaaggacttcttcacatattactaagaatgtccagcttcttaatcattctactgtataagtatgaaatggccaatttcaaatagatttctttccaactggatcctgagctttttcagtgcattcctgacttagctccactgtttattggatctcatacagtctcttagatttgagatggacaaatggacaatgtccagatgatatgaaaaaataaaatctgcagcaaccaacccaggacaccagcccattattcacagtaactcatccaggaagccagcatgttatctatatgttagacttgtaggagagttgaccactatcgtagcaaaccagcccatgaagccaaacaataacctctgaaacaataggaccaatggggcaggactggattaatatctgaaagtttccccatttttgttcctgattccaacttaggaccaaccagggacagccagtgtccacctgtaaccaatcacacaggaagttagcccacccatgacttccccacgcccacagcctccagtcagcgcacatctgaagcctttactttttccaacatacagctttcttgttctgccccacctgcgtctctgccagacacaagtgatggggttgactcccttgcaagctctgaataaataacctgcggttgtccttatttggttggtgtttatttatttccacaggttcatttttgcttgtttgcttttctggagtatatcctcaagtaatttttctcaagtaagatgtctgggtcttaccaggtgtgaaatatctttattctgtcctctcccttggctgacttctgggttcaaaatcactttactcaacattttagaggaactgcccccactgtcttctattgtctagagttgcgactgagaggattatcaatcctttgtagataaaatgtttcccctactggctttagaatcttcccttaatccacgttctgaaagtacatgaggcgagatgtaggaattatctttttagaatcatcgtgctcaggacttggtgggccttttagcaatacagacctcagaagtatttatttgactcttttctccatttcttcttttttggttctctctccctggacttctgtgagatggatattggctctgattaatcttttatatcttttaatttttctctcatggctgtttatatttttgttttccacattggagtacttcttaaatttctgtttcaacaattatattttcatagcatattctttatgaatacagtttcttctcaaatctctttggggttactaaattgagttctttgagttctacacacttccttagcaggctttcctggtggctcagtgttagagaatccacctgccaatgcaggagacataggttcgatccctggtttggaaagagcccctggagaaggaaatggcaacctactccagtattcttgcttgggaaatcccgtggacagaggggcttggtgggctagtctgtagggtcacaaaagagctggactcatagtgactcaacaacaacatcatcaacatttccttgagtctatgtctttgagctgtttctttttttcctgttctctttgagggtctgctgacccttgactgtctgtgcacatttatggggggaggagcagactccccctcatagggagtctgtatgtaggtttcctggctattgcccttcatctgaaaaagagggctgagtgttgcaccagttttacatgcaggcttcattttgggtgaagttggttggatggcatcactgactcaatggacatgagtttgagtaaactccaggagttggtgatggacagggaagcctggcgtgttgcagtccatggggttgcaaagagtcggacatgactgagtgactgaactgaaccaaacttcattttaagtgtgtgagtggggagctgtaggcaagattgggatgaccctactttaggatgccaattccactgtaaagtgctacccgtttccagaaagaactttccaatttcttctgatttttcagattcagcctgggggcaaaatgctgggaagcccaacccttgaggagcccacttcagtccgtccttcctggcagctcctccttcaccctgaggctctagctgctaatttttgggtggagatggtgaggcagggtctctgccgccctcttgtctctgctgtttgccgtcaatatgattgaattcaccgtgtgacctctttggtcctttcctaccctatcttctgctttgagcattttgatgacttgattccctttgtactttttaaactgtcattttggttgaattttgaagtgttctgtttttttctactgccttttaatggattcgagtgcttttctgttagatttaggactgaggtagttagaacaaagtttctgtgaccaaaggcaaatcaatacaatcttacactctatgctatcaccccaaagcacagtcgaagccacaaagagactgagaacttgggataaagaggcggtgacaaaaagagtgggagtgctcttcctccttaccttttacccggggtagatgcggaccccatgggagcacacccgtggcccaggaaggtttaccacgtgccgtcacctcctcactgctctgaggatggttagagaatattgtgcagaactgcagtggtttttggaagaggcatgtagagtctatttcaccccctcctagattcttccccctggcagaagtcagagttatggtagcctgacttgggaatagcaagacagatatgtttcccagaacaattcaaaaatgcattcatcaacaactttgcagagggggagaaaaagaa

SEQ ID NO: 38594 - DNA, 1234 bp, Bovine  19866880788358
  misc_feature (1)..(1): n is a, c, g, or t
nagacagtgctccgcaacaagagaagccccacaatgagaaacccaagcaccgcaactaaagaggagcttccacccgccgcaaccagagaaagcctgagcagcatcgcagacccagcacgacaaaacaacaaataaatcaatcttttttttttaactgtcatcagaaatcttgcagcaattcttaaattctagtataactactagctttggaaggaacggtttgcatttgggaagaagcagaattttaaatctccagaagcaaatctagaggatatgatggaatgtgaggctgacactgccatctgaagagccctctttctttgcacccaccttgagaacatcagcaccaaaacaatctcaggggttgtggggtctgcaggcccagccccctctcaggaattctttccaaatccatcacccagacaacagtgaaagtgtcttggattcactgacccacttaatgtgcccctgaagtctcccaggctaatcctcacagccacgatcaggagttaacatttcatcttcctagaaaccacgaaaaacaagagccaagcacagtggaggcagccagtgatttcaaaaagctctgaagcagcctgacgactagtgtctcaacctcctcagtgtcccgggttttgggctttggtgggaatgacctcaaccagtaatacactctcatccttatcagaaccatatgggaaaaaagttgtcttttgctcctgcaaattaaaaaaagtgtcacttaacaatatctataaatttacaacccaaacaggcagacaggtggagaaaggcaagaagtgctatttagaaaaggaaattgctccagggaactctcttatccatctctcaccacttaggcaatctgacttccaggtcaacatgaattagctgctggaaaagcaccagtctaggggtaccattcacaagaagaatagatttatgctcttcaggcctcagcattcaccttcttatagaaatggggatccgagtgcagaaagaggcctgcaccccagctgctcctctttgagaaatggtaagaccacactttcccagctgacaaggcgctgtggctgacgggtgcccctgcctgcatccggctggaccacagtggatatgtgtgagacgaagggggtggggggtgggaggagtggtgtgaacctaggatgcggggaaaactgctttcctgagagcagagacgcatgctcagctagatcagcccagcggctccctc

SEQ ID NO: 38595 - DNA, 3168 bp, Bovine  19866880795378
  misc_feature (1)..(1): n is a, c, g, or t
naaaaaaacattgaaactaatttgggtactaatagtctatttctggagaaggcaatggcaccccactccagtactcttgcctggaaaatcccatggatggagcctggtaggctgcagtccaagcagtagctaagagctgggcaagacttagcgacttcactttcacttttcactttcatgcattggagaaggaaatggcaacccactccagtgttcttgcctggagaatcccagggacgggggagcctggtgggctgccgtctatggggtcgcacagggtcggacacgactgaagcgacttagcagcagcagcagcagtctatttcagtctcagtgtaaatatctcattcaagagaaaaaaatatatggaggtttgagaacactatcttatctactctacaaaaaatattttacctttcacatttgggcaaatactttctttaagtgttttactttagccttattaatgtggttttaaaaactatctttaacatataaaactggttgtggtcagcctttcactatttggtttttataaattattatttagatacttttagatcaggcctgggtaaactataaaagataagaaaacatgaatgctattaaaccaaaaggtaagatatgaagtaaaatagaaattaccaggcagggtagatttcccaacatgttagaattaacaaggaaaaaaaaaatataacacagttaagttcaaacaaattgaatgacctatgcactcaaaagttttggaaatccccaaagaaatgaaacttcttgcctctgagaagaactgcaaattttctctatttgagactttcaagtgatctgtatatgtgtttgttgttttatattttgcttcgtttggtgtaactgtttggagcttgtttatttccaaagatattttgtttaagatattttagcctttctgaatcagcagcatcctgcatgtggctaaatggtactcggggtaacggtggtggtgataatggtggtatgatcttcacactcctagaagcaactcgattctagtattgctacagaacagtgcattataaaggtgaagtacggggacttccctggtcgtccagtgggtaagaatccaccctgcaatgcaggcaatacaggttcagcccctggttggggaactaagatcccacatgccttgccacaactaagacaggatgcagcccaagaaacagaacaaatgagtgtgaagaatgtggtactgctttttttaaaaaaagagtgaagtaccacaagaaaaattctgtctccaaaatattagtagcatataaatactaaatttctgatctaatatgctaggagtccttactgagcaatacggagtacttacttgaattagggggccaggactcccggtactcactacctgcttgagttctgggtgacttgccccgaacctggggagtgacgcaaaatcacaagagctatgatcaatgggagaatttaaccaagaaatttgaatcataaaagtatacttaaaatatatacttttctaccacagctttttccacagaatataaaattggatgtgtttatcctagcaataacaacgagcacgtataaaaagcattctagttttcaatgcattgtctcgtatatttcctcaaccaatgccaagctcattcagggggaagaggacagagagtaagcagtaaagggagacctgtgggtcaagagccacaatcccttagacagctacacagctgcttagagttatctgtgaactccctccttgactgtcataccatgatgaacggtcagctcccctgagaggaaaaccaaagagaaaagcaactgtaaccttcagcagggccttctatcttagcactgccttcatctatatcaaattgacaagagcaggcttcttcgggggatgagagaaacatcacagaaagagggttacccttctttcttgcttcctctgggtctccacggcatgcaggcgctccatgaggctggagatgccctgctccaggctgtcgatggtgtggtgctgagggtcgtggccactgaagctggtgcgtaggctgcggagggcgtctcgcacaagctgcaggtcgctgctctgtgggcaaaaccatgggcccgcggtgccaccttattaaccacatcccaaccgtggggctcaagagcatacaggggaggggttttcaacagatctcttatttttgatagaggaggtggaaattgtaggaaaactttttcctccatagacgcgagcccactgatggctcactaattcttaactttggatagtaagtgcctcacagctttacacacccaacagatgcaagaattggggaacagggatataaaaggccgactccactggcgatgactagggtacccttttggttttggctggaagtggcaagtctgtactcaaatcctaaagacatacccctctgtgaacgactgaagcagctccttttcctgccgctggaaggagaaaaccattgctttgagagctgtgattgttgtagttggtcacctagagcagcaagaagaaaggatgcttgtacaagggaaaattccaaagcaattcctcttatttttcttctttacacgaatcacttcctgatgtagtgcaaagatctttttccctttggttcactgctgtatctccaatacctgacactcagaaggtactgctgaatgcagagttaacaaaatgaaaacctccatttggagtccctcgcctagcctctgcctggccccaggaaggcctgagaatgctgctccagcatctcctgcctttgcttcagtaataaaaagaaaaaaaaagaacagtgactaaaacgttttgagcccaactctgtgccaggcagatctaccaggactgtgttgttacttagatggactatcttatgtattcttcatcatggcagagaagggcactgctatttccattttccagatgagccttatttctaaggttcagaagctaagcaacttaaggtcacacagtgggaaagtgtgtaaaaaaaaatgtttttttaaaaaaagaggtaaagctgggatttgaaaccagattttcttatcccagaacctgcacttttatcctccccatcaaacagaaaccaacctgtggtgctggttcagccctgagttaataacgaatctccctccttgcccccgtcaacg

SEQ ID NO: 38596 - DNA, 918 bp, Bovine  19866880802239
  misc_feature (1)..(1): n is a, c, g, or t
ncttcacaagactgcgtatataaggggctggctgcagctgcggctgaaggagctgaccagccagctgacgccccacactcacctaaccaccatggatatcgccatccaccacccctggatccgccgccccttcttccctttccactctcccagccgcctctttgaccagttttttggcgagcacctgttagagtctgatctcttcccagcttctacttccctgagccccttctaccttcggccgccctcatttctgcgggcacccagctggattgacactggcctctcagaggtaagtctccccttttcccggacaggagagttcattctggaaccttctggaagcatctccatccactgtccttttcctcctggcctaaatctatgcctaagggtcctacatgtcttaggcacttgtgtgtcctgcagtgaagacgggtgaggcccctagttcctctcttccccagtcacctatttgtatttggtgtgctcctctgtatcctatttgttacattttccatgcactatgaaggccattctctattccttatcttctgggtaggatgtccctttctggtttggttcataacaatctacagggaaagagttgccttcagactcctttgctcaccccttctaacacctcacactcctgacaaatactgtcatctcacgtttcagagccaggaagacagtcttgcctcatcctgagctttccacccctgctgcatggagctggagacagcaaccactattttcttccttcttattccctcacctatgattttccgggtttctaagggttgtgacagggcgctggcctgggtccaagcctaatgagaatagaatgtaggtccactttagggacccccccctccagttgtcctaagacggtgggagaatgggggaacagataag

SEQ ID NO: 38597 - DNA, 2619 bp, Bovine  19866880809646
  misc_feature (1)..(1): n is a, c, g, or t
ntcggacacgactgaagcgacttagcagcagcagcagcaggtataccaagggcttccttggtggctcagatggtaaagcatctgcctgcaatgcaggagacccggttcgatcactgggtcaggaagatcccctggaagaagcaagtggcaccccactccagtctcttgcctggagaatcccatggatggaggagcctggtgggctacagtccatgggtttgcagagagtcagacacgactgagcgactccactttgactttcacttttgagggtatccagggagttccatcaacaatctctaataaccaatatgggggaaagtatgaatgtgaatagatatatgtatattcaaaattaaaggccacattttgaacaactataattcaaagaaccttgcattggagaatgagaaagtatatttaatgataattacaataaggacttcaggtatatttattaaaagacagaaacacacaactttgtgtttattatgatcgactcccctctaatgtaaaaccccaatttagtactttgataaggctctcattgcctcagtaaccacagttggacaagaggaacctctgttgcccttgaccattctctccaacagccacctaaaaactcttccttacgggcagttaagattagcaaaatttgatgggctctaaatgttaacggccatcaaaaaaaaaaaaaaatcaggggaaactaataaaaaacatgaaacagggcaaagaacaaaatatcaaaaggtaaataggtagagccatgaacggggcagggtcgggccctggccggtgggcgcgagtgtcctgccttgtctccttcagcgcgagccaccgcctccacagcaaatctcttagtaatgaagaaaacttgaaattatttgggaagtgcaacaacccaaatggccatgggcacaattacaaagttgtggtgacagtacatggagaggttgatcctgttacaggaatggtcatgaatttgactgacctcaaagagtatatggaggaggcgattatgaagccccttgatcataagaatctggatctagatgtgccgtattttgcagacattgtaagcacaacagaaaatgtagccgtttatatctgggaaaacctccagaaatttcttcctgtgggagttctttataaagtaaaagtatatgaaaccgacaataatattgtagtctataaaggagaacaactcttagagattactttccatccatatttgaagaagatctttatccccttgagcaattaagaagacatcaccttactgctgtacttccacattgtgttgaatcattgtgactgagtcctgttctagactcaaatctaatttaaaaccaagtttgtaatgtattctgagtatcatttaaagagtctttcatctgtagattaaaatcacttcagcaaagtgttctggtgtagaatcatttggaagcaaaagaaaaaaaaagtaaataaatttacaatgcttaaagaaagagtacactaaaattacttaatgtggtaaatcagagagatatgaaaattaaaatgacaacgaagtatcacttcagagaactcaaaaagaccactatcaagaagtctacattcaagaaatgctggtgtcaggtttaaaaaggggaacttttttttttttttactcatgggatgtaactggtcactgtcattacacaaactaatagggaagtgacttttttaaagtcaaaaatagagctgccacatgatctggcagtccattcctaagaataaatgcagaggcatcataatttaaataactaaagcacccaaaagtacactggaacaggatgtctgttagccaagacaaggaaggagacaaaatcatgaatggataaagaacaagtcataatgtgcactacggaatacgactctgccaggacagacatgaacaagtgtcatttgcaatgatatggatcagtctagagataatcacagcaactgaagtaaatcggaacaagaaaagtaatatcctatcatatccatcgtgtgtggaaatgagcaattgttctcaatgaactcactcacatatgaaatgatcatattgtccaagtaaacaaagttataataaccaaaaagaaaaggcaggttgaaggataaaattagaagactgtaataaaattataccaatgattagtgtaaaacatattatcagcataggctgacattactacgagagttgtactaaacactctgtaataacctagttgtaaaaaaaaaaaaacatgagaagatacacgcctggctataaggaaacaagattctgtaccactagagcaaacacagcgttggaagtcaactttactccaatcaaaaacacattatttaggaaaagaagaaataatcagacccgagctttggtggctaataatctcacattccattctaatttgtgatcaggaagcaggactatccctaaaactctggttaccgtagcacccagacaaggtcgtaaagtaattccactgccctgtgctatttcctaaacaacaaccttaaatctattgttcatgggcacctcatagtcatacagagcccacaaatactggatacctgcagttaaaacattttcagggaaacgaatcaaaa

SEQ ID NO: 38598 - DNA, 717 bp, Bovine  19866880810284
  misc_feature (1)..(1): n is a, c, g, or t
nctgtggcaagacaggttgggtagggcacgtaggggaggatggcagcttctgaggttcggacacccaccttggacagggagacagggaggtgttaacacacgctggcctgtctgcatccctcctgagcccagcagggcaggggcagagagcctctggcatgagtttctttcatctgactgctctctccagcatggtacctttgtagcaaggatgttaaagggagggagggggagaaggtgtttactgctctgtgtccccaagccccactgcccaaggccagagccctgcttcccatgctgtgtccctgggcgggttcattccggatagcccacactgggtggagttacagagtggtaggagtctcaccagaactgcagtcagtggtgggcaccagggttgcttcctgcacatcgtaacctagatttccagcctcgggcagcacccgccctgtgtcagggtggatgaagtagccttggggtatgggcgctgcctggccactggctgggagcatcacacagtccgggccagggaccatcaacttggtgacaggatgcacaccgatgtttttggcaccccctggagagcttgctgaggctgcaggaatgcaaacaccggcttagccctgggtctgaggccacatctgagaggtcaggggctcccttggggggagtggactggaaggagccggtgagaccccctaaccaaaccaaccctgg

SEQ ID NO: 38599 - DNA, 1284 bp, Bovine  19866880822088
  misc_feature (1)..(1): n is a, c, g, or t
ntgctgtacaccttgaacttatacagtgttgtatgtcagttatattgcaacaaacctgaaaaaaagaaaaaagattgtaaatataaattctgaccccctcatgctatcattttaagaattaataaattaaatgatttaaaagccttataaaattccatttatgagcacaacaaaagcactgtggttagaaatgagaattcttttgttatgaaattaacaagtaaattatttattccaactaatacggtaaactgtaagaattttctcttaccactgaatttatttaattatcctggctgagagttcttagagtagttggaaatgtttttgttctgatgacacagttgcctacaatagttttgttatttattcccaggaaacgtatccaggaagcaaaaatcaaatcatatttgaaaactttgtttctggtgcatattatattataaaactgattatatattaaaatctattataattaaaaaggacatgaaatcaaaatttaaatgaatgaattttaccttactattatttagaatcttataactaaatatttgaccgtttatactagaagcattatgacaatatattaatatcttgcctgtgactaaccaatattttctattacacagaaaataatcatattagtttttgtttataggggattttaagaactaaacttcctactgtttaatttcaatctctaagactttttttttgcttagactagtaattgtgtattagacaatgtaatggtttcattcattcatatttcatgactcaatcaattcagcagaaattcattgagtatcattgacaaggcactgctaagcttgaaggaaggataaaaggatgagtaagactttgaaagagacatggtagcagctatgagataaagcaggcaaagtaagatcaatactgtaataaaagtataaagtgctatgtaatcacagtatgggagcatttaattcccactgattacatgtgtaatggaaaagttagaaaagaaagttaatattgaatgtgctcagtcattcagtcatgtctgactcttttcagccccctggaatgtacctgcccaggctcctctgtccatggaattttccaggcaagaatactggagtggtgtatcatttcctactccaggggatcttcctgacccagggatcgaacccacatctctcacctcccctgcattggccagtggattctttatcactagtgccacctaatacctacattgaaagtatcccaggtctttttctataaatgctattttattcaatc

SEQ ID NO: 38600 - DNA, 1054 bp, Bovine  19866880958050
  misc_feature (1)..(1): n is a, c, g, or t
ncggacccagacagatctgctgatacaattcaagtagcaatctttattatttgaatcaggtaaatgaaattttcactgaactaactttgctccacccttataaattaaatcaaatcatctgactgaaaagcaagaaattaagttgctaaacattgtgtagacaatattaggttattaagtgacttttccaattttttttttcagaactttaaaaaaatcaggggagaacatattcatgttttctttaataacatctgataacattaatggaagttggcctcagtaccaataagatcagaataaaaattctattacttcttgttaatccatgaatgtagtatgcaaataaacatctgtcaagttaatgttgagttagacacattgggtttcagtcataatacaaagatggagacattttttattagggattctttagtcattaacaggtgatagccagtttcctttaaactcttctggaccctgtgcctggtgctgctgtagcagtattctgggaataaggcgattaacactgaactgtgaggctagcccttgctacatggattaagatttagcaattttaggtatgcctttggttgtatcagagttgaaaatctagaagacatggtgttttgccaaaaatgagagggctcagtgtcggtgggagagaggggagctgagagggtgtgagggcaggtggatacagttccctggggtgagaagggagggcaatggaatgtgtacagaggctcaaggctgatctattcccctgtttgcatctacttatgcttttgtattacacagataagcgaacacacacttctatgtagatgagaagaagaaagttttctcaaagcaagaaatctctaaaacggtgagcgggtttttataaagatttgaagttagggagaaaactgagtaaggaaaaaagaagcacttcttcctgggaaaccagaaaggtgatggaatttcagttgagctatttcaaatcttaaaagatgatgctgttaaaatgctgcactcattatgccagcaaatttggaaaactcagcagtgg

SEQ ID NO: 38601 - DNA, 932 bp, Bovine  19866880959576
  misc_feature (1)..(1): n is a, c, g, or t
ngatgtcagggttgtgggatgtgagaacactgggcatctccttgtagcagcaaaggggaagaacacttccagcctttttagagggaaagctttccccagttcagcaatgagtttctcatttatggtcttgataggatgacatgaaggtgcttctaggaagcccctgattaaacacacacaaaaataacttttaaaattataaataatgataatgtagctagaatcaaaaagaatagcttaataaaaagaatcatcaagttgatccagaaaggaaacaaagaaaccatctactataaagaaagatggcatgggtttcagaattctgacagcctataatataccagaaaatatgataattaaaaaaaaaatttactggagtatggttgatttaaaatattgcttttagtttcacatgtacaaatcagttatacatatacataggctgtgctgtgctccgttgtgtcttgactctttgcggccccatggactgtagcccaccaggctcctctatccacgggattttccaggcaagagtactggaatgaattgccatttcctactccaggggatcttcccaactcagggattgaaatcatgattcttccatctcctgcattagcagatggattctttaccactaataccatctgggaagtcccatatatccactctattttagattctttttctacataggccgttacagagtattgagtagagttccttgtgctataaaataggcccttattagttatctattttatatatagaaatatgtgtaagtcagtcccaatctccaagtttatacccccctgaccctttataaccattggagaaggcactggcaccccactccagtactcttgcctggaaaatcccacggacagaggagccctggtaggctgcagtccacggggtcgctaagagtcgga

SEQ ID NO: 38602 - DNA, 1548 bp, Bovine  19866880983312
  misc_feature (1)..(1): n is a, c, g, or t
nagaaccatcaacaaccaaatattcaaagtgtcttatcatagagttatgaatacaacgtctttcaaaatttgtcttaatatggtcttaaattggtctttaatatggctttgtgtgtgagactgttttatcctagtaaagtctgggctcgctttaaaatagcatgacaatctagtcttaatcaaattctatatggccctaatagcaagacactggcacttgatatgcatcttgtatagtattttgtccctttaatagcacttgaccttttcttgaatataagaaaatagtaagaatgctcctattcctttgcggacagctcaattcatgtcagcatcttctgatggatgtcacagttgaatatatcactgctagatccttatgttttgaggaaggcgatggcaccgcactccagtactcttgtctggaaaatcccacggacagaggagcctggtaggctgcagtccatggggtcgctaagagttggacacgactaaacgacttccctttcactttccactttcatgctttggagaaggaaatggcaacccactccagtgttcttgcctggagaacccagggacgggggagcctggtgggctgccatctatggggtcgcacagagtcggacactactgaagcaacttagcagcatgctcttatagggtagatgttacttttattcttaacttacagatgagaaatctgaagctcagaagtattaaaagcctctttcccaagacagagatagttgtggagcttgtattaattagtactctgccaaccaccatttatgaagagatctcattttattttaagaaagcagaactgtatatagtactctgaggtactggcgagaagattcaagagtgcttagaataaatgagagcaaagatcttaagtttattataattcatctttcatactctctacagtatattaagaaaaacaaagatcttctcctttttacccacatggaacacttcctaaaaagcatccttgctgcagagcaaaaactcccaaaagaaacaagagatcagcttgcagatgaagataaggtgagatgttcgggtgacctacagcactgagaccatactttgctatatactttgcaacatttttgtgttttttgtttgggactatgtttatcattgaacatgtcagcagaacacaagattggaaatgaattgtggtatgaacaggtaatatcatcagtcacttataaaactttatcaacagatggtggatcttaggtcccagagttaatccctctgctttcgggcaggtcaggtattaaccttaaagaactggagctgagacttggacttgccctagttcacccagctggaagagaacagacagtcaccagatctactgccttctcatttgggattctcccactgttccataatgatacctactactgttttggttttaatctgaagcatttaaaacattgttatatctttaacaatccccccatactttggttccaaggaacaaacattaatattttgtcacatataattgcaaagagaaaaattcccaag

SEQ ID NO: 38603 - DNA, 1139 bp, Bovine  19866881015393
  misc_feature (1)..(1): n is a, c, g, or t
ntgacaaagactaaatagaagtcattaggtaaactatttcaagtcattttttttaaaaaagaaaaaagtaaccaagacattgaaaaccagtcttcaggctaagaaaaaagtaaatgatttccaggaatcaacacaacccaggcaacttttaatctccaatagtgtgttataatgtcttatttataattttaaaaatcctcctacagagaagcagatggctttcgtgttaaatttatccttgtttctaaaattgccagtagaattcagatatccagtcttgctgaagagttacatgtcttttgcagttattataataggagagaagaagacaattatgaggaaatgaaagctgacaaatgaaaagtagcagagtgtggagccagagctgacccactgcacaaactgaatgccaatcagccatcactgacgtcaatgcgtattttgttgcccactggcaagagaaggccagctgcacagtttactgccaaacatcagtcacctcctccctacctgacaggaggacacaagaacaatcatcacagctgacgtgaaatgtgatcctgctgaccagggtgaggcatcttgtttgtccagtgagagagtttagtgagctgagaggtgaattaaacgctcttcctcagcccaaaatggagtgaggaggaggaaggagatgaagaggggagaaataagacaaaaggaaacagaagcctttgagccaccttccatgttccaggcttaatgcctggccagggctaagcaggcttgaaggataaagacaaggtctcactctgtttgctgatgcaaagctctctgcacattttacataatactagtggcaggaggataacaaatggaagacttttaataaatattttactaacaaaacctgtttcagcctatcccacccttttttggttccagggcagaaaactagaattatatatacagaaatcatgatctccagttcttccagtaagcaggaagattgctagaagcaatcatgagagatgatgggctacttatagattacaggtcagttcagaaaggaagtattcctcttgggctaacgacaagagacctgtgatgcacaggttagacttattaggcttattacacacaactaattacacggaaggtcc

SEQ ID NO: 38604 - DNA, 1393 bp, Bovine  19866881059261
  misc_feature (1)..(1): n is a, c, g, or t
nttgcttttcggaatgttgggtctgtggcactatgtggcgcgtctgtgcgcgacgggctcaaaatgcaccaagggcaggattcggggctcagtggacggccttgcaggaggagccgggagctccgtgcgtgaccccgcaggctggctcgtcacaccagcaagaccacagggtatggcagggtccccgcattgtgcggctggagccccatctcttgggccacaccgtggaatcgcgtcttgctgcagctctggggatcgcctagccgcagctggcatagcctacccacgcatcagaagattccattgccttcagttttcccttcaatgcaggcaggcaccatagcccgctgggaaaagaaggaaggagaaaaaaatcaatgagggtgaactaattgcagaggttgaaactgatgaagctactgttggatttgagagcgtggaggagtgttatatggcaaagatccgtgttgctgaaggtaccagagatgttccagttggagcaatcatctgtatcacagttgaaaagcctgaagatatggaaacctttaaaaattacacacttgattctttggcagcacctgccccacaaggagccccggcattaacccctgccgccgctgctccatcacctgcaccttctgctcaggctcctggtagctcatctcctactcacatgcaggtggttcttcctgccctgtctcccatcgtgaccatgggcacagttcagagatggggggaaaaaagtgggtgaggagccaaacgaaggagatttattggcagagatagagactgacaaggcctctataggtttcaaagtgcaggaagaaggcaaaaatcatgatccctgaaggcacacgagatgtccctgtaggaaccccactctgtatgattgtagaaaaagaggcaggtataccagcgtttgctgactatcggccaactgaagtaactgatttaacaccaccagcacaccagctagcccatccatcttcaggccactggccagctgctccagctggaccaaagggaagagtgctccttagcccgcttgcaaagaagttagcagcagagaaagggattgaccttacccaagtaaaaaggacaggaccagatggcagaatcattaagaaggagatcaactcctttgtgcctatgaaaactgctctcactctagcagccgctgtgcctcccctaagtcgaggagtggctccagttcctacaggtgtcttcacagatatcccagtcaccaacatttgccaagtcattgcacagaagttaatgcaatctaagcaaacaatacctcattattacctttctattgatgtaaatatgggagaaattttgttggtacgacaacaaaaaagaagatgctacaaggaaaaagcaacatttccgt

SEQ ID NO: 38605 - DNA, 2645 bp, Bovine  19866881077606
  misc_feature (1)..(1): n is a, c, g, or t
ncttgacagtaaagtgggataagcgttcccctgaggactgctgccctcttccaccttcactgaacagaagcctgaaagatctcagcgttggaagttatcagattcctgtttctcaaatggccattggtgtttcttttgctaacagaagaaaacaaagaagagaaagttcgattacctgggaaggcaagggttttggctgcacgatattctttaggtcatatctttcctggttccagttgcccatcagggtacggtttgaataggcatcttcattagtgttgcatctccatccatactggaaaaacttggacatatcattccaatccgtccacacttcagcatggccatctgcattaatgaggctgccatagtgtgggtttgtaaggaaacaggcgaggacctgtctctgggaaaaggtggcaatagaaaagtttgttgcacaaaccagagagcagaaaacacatccctttctcgtccttggccaagcataagtacaccttctaaagatctaggctttcctctcagtttaataattgtcatcctgtttccttccaagttcataaatcctttgacctaccctctcaatcagcagtagtagatgactaaatggattaaatacactcccccccaaaaggcaagagaacttcagtacccctaatactattggagaactagaaaataattctggtgattttgaggtgtaagaatttaaggactaattactgccatcttcaaagagaagacagagaagtgagagctggataactagataatatgatagatcaatgatcaacaaatgatggtttccttcctttgggcccagctcaaacgccacatcttaggatatagcattcccttttcatgatgccttacttcaagttaacttctctcaattgtctcacacagaactttatcttcacacttttatatatccataactttatacccggagaaaccaccggcacccccactccagtactcttgcctggaaaatcgcatggacggaggagcctggtaggctgcagtctgtgaggtcgctaagagctggacacgactgagcgacttcactttgacttttcactttcatgcattggagaagggaatggcaacccactccaatattcttgcctggagaatcccagggacgggggagcctagtgggctgccatctctggggtcgcacagagtcggacacgactgaatcgacttagcagcagcagcagcagcaactttataccacatgttagagttcttcaaggaagtgtggaatcttttacactgaaatatgcatcccttgaggacaagatctgtcactttttcattactgcaccctctccctctgtataccctcccaatcaatagtaatttgcacataccagatgaccaatgtctgaatttcaatttttttggtaaggaatcaaaagccaaccatttctaattttggttaaaagttcagtctggtcccttggcttaggagcaagacaataccttctctgaagatgaatactttgaagttgaggagcttgtgtctgaagattttatagcagagtaacagcaaaccttactctgacgttccatattctttaaaacaagagatgacactaaacctggccttcccagttctccaggcaaagaaagaatttagatcacccagatcaccaggtggccatgatttggtggtcatcacccacgcacctttccacagctagagacaaagccaacactgtaagtttaaaggtaactgcccgcacatcatgggcctttgtgaagatagatgcatgcacttatgtcaacaaacagcatgacaactaagagcagttggtcccacaaagtcctcaggccatgtactcagatgacactgtccctggggctgttaaggatagacatccccacccacttagttgtccaaacctgaaaactggggcttatctttgactcttggtttctccttcaactcccttacatctattcaatcactaggtcttgttgattttttaatcagtgcactaccctccatctccactgaaagtgaaagtgaagtcgctcagtagtgtctgactctttgtgaccccatggactgtagcctaccaggctcctctgtccatgggattttccaggcaatagtactggagtggattgccatttccttctccaagggatcttcctgacccagggatcaaacccaggtctcccacgttgtagacagacgctttaccgtctgagccaccagggaagtccatctccactaccaagtttcaattcagatcactaccagccctagtctccgttactgcagtaaccttctatctggactccttgccaccaaccttgttcttcttctatcacttctccataggaaagcagaatttttgaaaatgaaaatttaattgtgtcatcttcctacttcaaaatctttcagtggctggccactgttttcagagtaaggttaaggctataaaaaatgcctatatgaactggtccctgcttttcagtctcatctgttatccactctccctcagactacatttcagtcaaactcagctactgtgtttttccatcatgcttttgcatttattgttacttctgccttttcagtcctccgactcaggaaaggtgtagtcccccccagtcccctagcttcaact

SEQ ID NO: 38606 - DNA, 781 bp, Bovine  19866881088552
  misc_feature (1)..(1): n is a, c, g, or t
ntttagagtattgcttggcacatagagtgtacaagaaaaatattttttgaatgaaaaaattgatgactgaattttaaaaataacacttattgttatgagagtaatacatgttcatcagagaaaatttgaaaatacagaggaatataaagtattagcaaagaaaaaaagcagcgaacattttccatatttctttctccccccccaatacacatgtacaatacacacactcacactttttttacagaacagaattgaggcctgagttttattgcttgaatttttttctcttaaaattatactgtgaatatttttctgtgccattaactattcttcagaacattattttttatggcttcgttatatagtattctataaataataaatcatgatgtagcctaacatattaaccactttcctatttttgagcatttggaaacgttttataagaccaagagctgcatttatttgtcgcttgctctgttccaagtgttacgatgattttcccccctcttcatacatgatctcattgaatttccttctcacagtgatccaatgaggaggaattcattatacccaccttacagagggaatacctggacatgggaggagtgaagtaccaaaggtcacggtgctggtaagtgacaaagctgggattcaaaccaggtcatgtctaatgtcaaggtgtgggtcctgcaagcatgactctagacccctcccctggtgtgtgtgaggaaggcacatgactccttgggcactacggggttgcagaaacacacatccg

SEQ ID NO: 38607 - DNA, 1906 bp, Bovine  19866881114348
  misc_feature (1)..(1): n is a, c, g, or t
nacttccttgagaaggagttatattttcctacacattcagggtccactgactatgccattaaacacatggtttgcctgtgatctgctcgtggactagttgaggcgacccctctgtggcagacttgccaggtctggaggcggcccctgatggccacaagctggggaaacagcatttgctgccatgtcctgaaccctgaaacttggtaactgcagacagcttgtcaggctcccagcaaaatctcccttcgtcctcgcagcagccctgtgtggtgggtgctggtggctctgtttctcgggtagagaacctccccccaaccctgtcctgtctactgggtgtcttttccagcactggaggcccagctgtgctctgcttctgaggctccaaatcagtcagcccggtaaaaccccctgtcctgactcagggagccttccctgagtctgtctcactgaaggaaatggactccgggtgagatggaaagggaattggctgttgccaggcagagccctgtgtgtcaggggccagcagccaagtgagtgatccaggaagtcatccagttgcaaaccagaaattgttcttaacccctcactcactgtcagtggcacgtagcagattggcccatctgcccccggcggggtcggggtgagccccggctactgagagccctgggaactgcctccagtgtccactggcctctgggccctgcgggaaccgtttcacaacccggggcttggcctgcctcttgacccaagacaggatggccccgtgggacgagggccagttcctgcgctgacgggtgcctgtttggggcctcccagactggcccctggtggctgctctctgctgacagagctgccgacgggcctctgtcaggcgagggttaacagaggatttgtttattgaatcgcgaagtagctgtcacatgattttaatcaaaacaccatttccctgacaacagtgatgtcagtcttgttattgcaggaaggagcagctgtgagggacagtcaggctccacgctgagcccaggttcagagactcagatcaagtgaagcatcatctgttgaggtcgcaggcatggcccccctgaacctgctgtcgtgctctctctgactcgacagcctgtgctgtgcagacgctggccagagcccggccaccctgtctccactgacattgccccttctgcacccattcttccttccacccttttttttccttctggtttttccagttctccttatttgccccaagctcagcgtgtcattcatttgggcccctaggatctctgacccctgcctctggcacctgtctcccctctgtgttttaaaccagcagttcttgccagcttgaggtggggccctcctgctgctcgggaatcttggctcctttggagcttgcttcctggaggagagggacagcttgtcctgtctttttctctcccgagagcaggttggggggcctgggtgctgcctgagggtctccagggcagttctgaggagctcggctgaggacgtctaaagggaaggagctcctcaaggaagggccaaccttagggtaggaggttggttttcttgagcccagaatgatgagagaaggcctgcatccaatctggagatcagggcccagggaggggggcagcagaccactgccacagagcagtgtcctcagggcctgccgcctctccacacctctctcaggggtggggactgagcagctgtctctgcagagaaagactgtgggccctccagccctcctgtatccagaagctcagtcttaaaaattggagacggaggagaaaagccttctaggtgggatatggattctcacagctgttcttttatctgtggtacccatgcttagaattcatcactgaaaggagaaatcctaggcgaagttcttggttctttgtat

SEQ ID NO: 38608 - DNA, 1055 bp, Bovine  19866881237013
  misc_feature (1)..(1): n is a, c, g, or t
ntacattgtccttctgaaataccaagtagcagaatccttaccatatagtgagacctttgaaattaaaacataaacacacttttcaagctcacacatcaaatcacaggtagaatctgaatataccagcctatgatttgatttaatagtgactgtgattgagtggtctacaacgaaacggtttctgaaaaaagtaaactgctaactgctaagtcgcttcagtaaaagtcagtagcaaatggagttctccagttacccttttagaataaataaatttaacttttttcccaatttaaaatttgacttgtaataaacatacactccttgacccaagaattccactgctatgggattattctaaggaaataatcagatagatgcacaaagatgtatataacatgattattctctgaaatactattttagaaagagaaacagcaagacagaaatgatctaaatgttcaataacaggaatttattaaaataaaatatagatggtcaaattcaaagatactatttaaccatgctttagacatttttctgtaaccttggggaaatgttaacaaacatactaagtaaaacacacagattttatgtataggtgacatcaattttattacatacatataaaatatgtgtgaacagctaagaggataggaaccaaatattaagtggctgtctcttggtctggatggtggaattaaaataagaatgtttttattttcttcttcaagtttttcaacaatgtctacaaagaacatacatatatttgtaactggggaaaaacacacaaatactatgtttactttgaaaaagaaaaaacaaattttagcatcaattttcagtttaattcacccaagattcatctcttaacctgtttaaagtatttttaaaatgaaaagtttctgatgaaattcccgaatgtaactgtctttcattcttgtaattatctcaaacgggatatatgggctatttctctttgaagggtgggaaagcattgtccacaaatgtcctgtataaagaacttttacctaaataacatatttcaaatatatgga

SEQ ID NO: 38609 - DNA, 1112 bp, Bovine  19866881253903
  misc_feature (1)..(1): n is a, c, g, or t
naattatgaatcatgctgactctttcatgcagttagtagttcctaaaagttaactagaaaaatgtacaagtaatccaattagataaggtaactatgttcatgaatcaaataaaaatcccaaaagaaaatatcctaagttttatacccaaggacaggctaactttatctgtctgaacttaacatttgcataccccttctgaactgtacattggtttaatatctttctacactgatatctaccatccacaggtacatgaaagcaacatttgcctatacatctgcataatagattatgtccagttaattaagctcataaaacacatgatgagctgcaactggaaaggcagacagggggctaaatcattatatcaattctatatgaactcttgattttacacactgaaggcaatggggaagaacagaactattttaagcagaaaactgacaaggatcagatctacattttagaaagatcattctgacagcaacatggaagatggattagatgagggacaaatttggaggtgaagagactttaggctgctcaagttattaaagtgagaaatgatgaaggtcaaaagtaaagccctgatgaaagacactggagaggttaaggacacatttaagcactactgcacctgggaccctagttaataattttaaaacccaaagaatgaaaacttaaattctggaattataaagtaaggaaaaccttcacaatttatttaaacttataataaaaggcaaatgaacaatttttcaaacattacctttatgctgttaagataaccaaaggctgcaaaaattgtcacttagggtgtctgagtaaccacgtgtctaaaggtattttggctaaaacaaagccccttttcagtcaccagagccagcatcctaatacatttccactgaaagggaaagacaggaaatgaatcaataaagctcaggcatatgcttggccttgaaagatacagaatatcaaggagcagaaatttgaaaacaaaggccctgaataatttaatcaccaggctgtaatctgctgactgcggtctaattgtttgaacagtgcccaaagtgtccgacaaggtgaccaccctaagattttgcaccttttt

SEQ ID NO: 38610 - DNA, 1263 bp, Bovine  19866881272306
  misc_feature (1)..(1): n is a, c, g, or t
ngtcctgtggcgctgagctgtttcccgctcccctctcccctctgttgctccctctggtctcctttccctgtcccacacccatgacaaggaactagtggcccgggagcatcaggggcaaccactgagatgagacaggattggaggcaacccctgggaagcagtgtgatatgctcagcacaaaagcatggaattcggacacccacgtacagttcacttatccagtcaatcaaaggaagacaaggttagacttgccagttcttggtcagatgaagcatggagaatactgagaagcacaagctgacgggatccacagctctgagtgtcgcaatagaaaagggttagtcctaaggaagtctgaatgacgtcaccgtgttctcctgcctcttgcctcacgtttattagggttgcctcttctgcagagctctacaagtaagcactccttcaagcgctgatctgttccagagtcaccccactgggagcaaaggctgagtgcagagaaagaactgtgcataggaggttctctcagggcagacccagaagcaccattctctggagaaggccatcgagaaagaggtgggtggctcagttcaggcacggaaaaccagaggcatatacagatactttccaaccctcttcatttagcgagatgaacctgggaaaccgattcccaggtctgtacttaattcatggcagagtagtaattatcaccacagcattaatgacatttcaaatttatatttatataaagaatgtcttcattctgtgagactcaaatatttgcccctcaactctaccttgatattttcttcttctttctctttttccattttgtggcaaaattttaatcccaacgttatggatgggaatacttggcaaagaaaaagagactttacctggactcacacagtgactcaaagaagctgaagaactcataaccagggatgctcactatcataccttgctttatcccccagcccccaccatgccacagcttaccactgtatgtaaaaaaggtattggaggacttctctggtggtccagcaattaagactccattctaccagtgcagcaggcatgagttcgatccctggtggagatcccatgcgccatgcagtgtgaccaaaaaaataaacaataaaaaggtattggatttccagagcaaatctttctttgaattcttgggaagaatataattcttgggaagagatggttctgactcaggccagtctatacagtggttaagagagtacacagtgaagtcag

SEQ ID NO: 38611 - DNA, 1042 bp, Bovine  19866881274611
  misc_feature (1)..(1): n is a, c, g, or t
ntgattttgccgtcttagaggcccacagcagtaagatggtggagggtgctactggcagacagcacgagggatgaacagagacggggtttgccatatgcaaagtcacttatgagcaattaaactgggaggagggtggagagcatcatgagcgtccttcccatctcggcgtctctgggagaatcctcaggcgtaacaacaggagcccagccaatgcacctgccccacatgcatgatcagaggcgatgtctccctctccacaaagcaagggctggtcaagcccccttgcagctgtttcccgtggagaggaaagcccctaagttcccaggcagtgtaaactgcccgtgtgtttatacaatatgccccatggcccgagaacatgacaacgcctcagacgcacaaactggcagctggtgcagcggggattcagggtgcttgggagcgagaaggagggcgtgggagacaggatgcttgaatgccaaatcagcgtggctctcctctggagaacacccaaatggatctaaaactgaagctctgaaaataacaaacatccaagccttttgaaacccaagttgtgcccagacatcttttaaagccgagtggctgacccccagacggtgcgctgagagggtgggcatggacactgcccagcaccctgggggcagcttctgctccctgcccgaggtctgcgggagcttcgctaaatgcccacctgcctggctgttgcaagagggagcggagagagcccactggtgagagggcgggagtcaaggagggttctctctctctccctgtagggggggtgggggtgccttcagatgagctgttttgtttcacgctgagctgagctcacctgggcgatgaccttgtgacaagaatacccggctgagtccagatcagcaaagggaggacaggaagaggaagaggaagacaagcggaggcagccatgcgggagcagtgactggcagaaacctagtcacaactgctggttagcatcgtctttagtccttcaaccaaagttgataaaacttggataagggcaagt

SEQ ID NO: 38612 - DNA, 1881 bp, Bovine  19866881277429
  misc_feature (1)..(1): n is a, c, g, or t
natgagaagagccaactcattagaaaacaccctgatgctgggaaagattgagggcaggaggagaaggggacggcagaggatgagatggctggatggcatcaccgagtcaacagacgtgagtttgagcaagctctgggagatggtgaaggacaaggaagcctggagtgctgcagtccacggggtcgcagagagttggacacaactgagtgactgaacaacaactctgtcctttaccttggcattcaatcccttcacagcatggcttcaacttaaccactccgactctttcatttccctattcttcagttcaagtgaattaactggaacaagtctatactggcccacttgagtacttctggtcacactgcttctgtctacgtgtgatgcctctagctgctgcctctcctgaacagctgtgaggctctatcttaaatgccatctctcccacaaagccttgcccgatcagatgtatctctctcccctttgccctttttctaaaaaacgttctatgacacatctacacaagttcaaaatgatgacattcatagcatcttctaaattttgccttttcattatttttgaaggattgctattcatgatgttgtcttattttgcttctataatgtaatgactctgagggcacatttatacatcctgagggcacgttttatacatcttcttccctgtagtgcctaataagtgaacctttcacagtaaatctgcaataaaaatttattaaatgaaattgaatgtacagattagttacattaattctcaacataaatgaatgattttaaaaaaagagagaagcctcttaaagaaaaaaaaaaactgtctgaaataaaattaaacccttacaaataggaagatggtaaagtttttgagagcctagtaaacgacagacagaaactttaccgagaaacaaggtgtagaggatgaaatcctagccctttgtactacgccacggaaaacgtgtcaaacgtctgaacaggcacacgcaccgataagactattggctaataaggcgttaccttggcaactgtttgttcggcgatggtgctaggccgacgctggcgggcatcaagtctctgctccacaggaaaactgctcctgtgtgatttcaggcgctccaccaacaagtaataaatggcagcaaagtggttatagctcttgttctgcaaagcctgcaagagaaaacaagtgccaaaggcggagaaccataaaaaccaattcagtgatttacacctttctaaaaaagagggaaaagcacaacactataaatcaactaatcttcaataaaatgaaaaccctaagggaatatatgtacacctatggctgattcatgttgaggtttgacagaaaacagcaaatttctgtaaagcaattatccaataaaaaaataaattaaaaaacagaatgcaaggagtctggctaaaataagtaaataaataaataaaaaagggagggaagagatcatgtgttcttaaaaacaacaacaacaacaaaaaaaagagtaacaagcaaagtctgcctcaaaatgaaaggtattccagaattcagaagagaagacagataacttcattaattgtataaagggtgatacctctgaatgacttgactggtccttttacattaattggatccatttatttttctgcattcagagaaaacgccatcattgtctcatgcagcgttccccaacgctgtcactgtggtcccatctcatggctgtaactaggctgtaaggctggttagcaacctgagcccacaggctctaattccacagcctcgacacaagcccaaagcactgccaaccctgaggtcaatgattaaagtctttggggaaatttctggtgattattttgggctggagaatgacgt

SEQ ID NO: 38613 - DNA, 1249 bp, Bovine  19866881310754
  misc_feature (1)..(1): n is a, c, g, or t
ntagtcctaagataaaagcttggtttcaggattccccagtattatttttattcttttcatgactcctgttagttccaaagtcacatataatgtatcacttgaatgtatgttttcatgcaatggttaattgttctttcatgtagaaggactgaatagacccttaagttgttgagcattacatttttaagaggttatttttcatttctagagctctgttacatgtatgccagatactttatataattattgtgtttatcaaaagaaattggtgtctagtccctttttttaatctcttccttccttttttcttttaatcatttttcctactgttattcaaagtccttatttgaggagaaaagtaattacctgatagatatccttggtaattactatcagccttgagtagcagagcaggcagattaaaattgctgtactatgttcagtacagtaaaattggaatccactctgaatttaagtatgttcaaaatgcttctttaaaattaattcactcatatccattgtgttggcatttagaaatgatgttttcatgatctttagtgattgaatgaccccagcattttacctgtgagtttatgtttttatagggaagtaaatttttacttgtgaatttaaagattcattcaacaaatatacatttatcaaggctttatgggaggcaataaaactataaatctgtgactgtgggtgacaattactttttaaaatttaattttagtatataaaaaataaatgaaaaatccagaaaaatacttgaaatctttccctatcagatgtttcatcctaggccccagaattcctatttgaaaaatagagagagagacaatcccaggatcgtactgatgtctggcagaatgatgtggtggcaagagcactgactgggctgggagttaggagaagctgggactcttttctaaaattcagtgaaatgtattttattcttatatgatttcatgggtttccgagacccttgaaatagctttgcatctctaatttgctgtagctacacctgacttccaattgtagtgtttagatttcagcttctcccatgacctgttttctaatcaagatatttcatggtagaaagtgttatcttgaaacatgatttctgggccatgtgacctaatgaccagcatgggaagtctctctgctgtttctgtcccaaagttgagcatctgtgtcatggcacctgagtggtgatgttttgagagttggggaagacatggctgca

SEQ ID NO: 38614 - DNA, 665 bp, Bovine  19866881378020
  misc_feature (1)..(1): n is a, c, g, or t
nttgacgtttgacccaaccttgagccccaagtctttccgatgccccaagaggaaaatttccaggaagtctcagcagtgtgtcttcactcagctcagcagtactgacagagggtctgggtaacctgacccttgtctgtgggacccgctacctttcccctccaccagaaggatcaccccaagatcaggacagacgggagaatattcaacagcaaaggtaataggaaaagacagtgttacttcagttctgaaaagacagtttagttggagatccttcagtcacagtatacattataaaaagaacttcagatttgaatttgagtgttgtcatttctggagtcatcctgggacgcttagaatgaggaaagcagcctcttgttcttcctccatagctcagaaatgctcagtgacttgatcctcagcccttgttccatccttcctctgcactagaagaattgttccaacagcaggaaagagaagagacaatccaaacataaatagaagggcactgggaaagggaattgacattttcagagagaggcttcttctaacactgctataacgaaggcttgtctttcttgttggatggctatcagattacatacagacatgaatgtacatactgccttgcacagaagctttctaagaacttaaaacaatgaggtatg

SEQ ID NO: 38615 - DNA, 1652 bp, Bovine  19866881612306
  misc_feature (1)..(1): n is a, c, g, or t
nttacgaaaatagtattcccctaaaaagtagaaaggcttatttatttctaaaatacttctttattcctattgtagaaattataataatataataccctagtagagttgtaaaatctttggagtaatcattagtttagggaaagtaaaggcctggcatcaatatctaaatattatatttaatattataaacatttacatgttgagctcatgtaaatcattcttaacctcttctattttttctattcagaccactggtaattcaaatagcaaaatatacattctttgaattgattatgttgcttgtttttccctaagttattttatgtttaaagttagaaaaatacttttttataaaaactgtacaaagtaagtgaaaatagcaataataagcttaaagaaaggttgtattcaatagagctaaaaccaaagtgaactctacttttatgtttacctaataatatggctggtctcagtaggcatgcattttctagaagtagtactgtttcgttttgactttcagcagagaggaagagttgtatgttctacctttgatgttatgtataaaaattaaatttatttttactgcttttattgaatatcttataagtctttagtgaagagcacctctgagttcaagttagattaataatattgttaagttgcctcaagatatattatctttgctgaaatgcttaatatttcatatatcatatacaaggaagattggtttttaattcactagaataaagtaaaattaaaggtaatttacatttgagttattaatgtagtgatctataggagctgtgctgagttgctccagtcgtgtcccatgtctttgtgaccccatggactgtagcccaccaggatcctctgcccatgggattttcccagacaagagtactggattgggttgccatttccttctccagggatcttccccaacttagggatggaacccgtgtctcttatgtctcctgcattggcaggcaggttctttaccaccagcactacccgggaagcccagttcagttctgtaggagttagatgggctttagctgaggtctgatgggaaacttgctctttttagttttagtgcctttttttttaaagataaaataatgtgtttacttctttttggtccagtacatgtgtacaaaggtgaccattgtttgtccattcattctttcagtagatatgcagtgaacacctacaataaggcaggcacttcagtttgattaatttgtttcagtgtaataagttacggttttggctttaccaatgacaagtatattactctggccaggatgactttgcggctctgtagcatctggtaggtggataattttaatggaagtaattcgctacttcaaaagtattatataaatactacataaggataattgttagctataccaaggagccaatatcagatgctctttatacaaatatgtatcccatatcactttgtgattgaagatgacgcatgggtgtttataagatctcatctagacgtttctttataaatctgtcaaatttatggaaacactgaaaaacacacagtaataaaaatggataaatattaattatatatagatgtatctaagtgtatatacataaacagaatatgtatatataacaatgtgtatatatat

SEQ ID NO: 38616 - DNA, 1066 bp, Bovine  19866881887283
  misc_feature (1)..(1): n is a, c, g, or t
ntgactttcccagagtcttaccaaacctggaccagaacctctgactgctccttcagcattctttcctataccatgctactcaagtctttttttttttttgtcctctcaagaataaaaagaaaatagaaaatgttttaagacccaaggctcaatagagacaattttgtggggaagtgagactgttaatacaattaacatttactgagtgcttactgggtaccagacactgttctgagtacattacattttaatgctccaaacaaccctatgaaatagaagaaaatgcgttgccatcttttctggaccctcactctgttgttctggtgcctttgttcctaatgactgggactcaagtttcttttccatgaagactggcagagggcctgagccacaatgtacatataggaggctttagcacaggaggatggatggacggatggctggatggatagatccaaatacaccttttcctaagttgaattgcgtcgttgttgtttaattagtgtattgttactgcacagaacagtcagtgaagtcttactgtctgcagccctcaaaagctctctgcaagatctccccaaacctcagataatgcagaaggaagagctgatacctgtgccgtccacagacctctctgccagggagttcgtggtttaccaacatggcctgtccatcctccacctcctcagcccccagcttcaggtgagtctggttctggtctctgtagagcagtcatccatggagtttagaagggcagggtcaccaggaaggaggctttgaggtagcagatattccttaggctgaagcaccggggacagagaacattctaagtctctcttctgagtgaaccattttaccaattgaaagcctaatctctcaaatgataggataatgggaagaagaatacaggcagagaacagactctcctctgatttgagagatcccaccactgcttcaacattcattgtctttaacatgaagtctgtatggactttataatgtagaaagcaactttgtatactttgttttgtttacacctagtaacctgaattctgggtctatgaga

SEQ ID NO: 38617 - DNA, 852 bp, Bovine  19866880439676
  misc_feature (1)..(1): n is a, c, g, or t
nattattaaaattacgaggtgtttgatgatagctttcccatccccccccaaaataagaaatccatgaaagcttccttcccaatttcctaaccagatagtatgatacagagcgaacctatcttagtctgaattccaccaccaatgaacagttagtagcaagcaggcacgtccacaacccacacaacccatcctatgagccaagggacccctctgtgagctgtgttttagacacttggatagcctctttcataaaaagttcatttgaaatgtatgtgacaatcctgtcagtgcaatacttagctaacccagtcagacaggtgaacaaatcaacagtataatattcagactcaggactgcttgaacttcagagctcagggcctttccaagagactgagcaactagccttgctcaattcatttgcaaagctcatacaagacaggctcaccatgaaatgtttctaactatctaccttttttgaacactattattttcatcaatgaaaaaccattttagaaatccattatgctaattaacacacccgtaggtgctgagctaagccagataattgaagcacttagggaaacttcctctggaatgtggggctgtgatccttccaatgttagataactgcccctacagtgcagacgaaagcgtgcatgtgcatgcacacacaaacacatgcacgtggtcacatgcagcatattacctatgctttagctttagaagtaaatcacaggcaacacagaataatagccaccttgtaatgagaacttactagatgccaggtactgtgctaaagaccagaaagaaaactgatcacatttaatcctcactgaggaaactgggccccag

SEQ ID NO: 38618 - DNA, 1634 bp, Bovine  19866880451662
  misc_feature (1)..(1): n is a, c, g, or t
ntttgcttttgtttgcagtcagttttgcttagaagccaagaacatagatgatgcaattttgtatcccatacttaggtaaaaagttgatgcaactgtggattgtgaagcctcagaaggctcaggaccatgtcctcaagtcagttgctatatcctctgtgtctggacaagtcagttgagcaaaatatgttgaattggacagcactggcgtgtggcatgtctcagctcttgcaggatgcacagtcaacgtgatgctgctttgttcttcttccctgtaggtctccaagcccaaaccaggacctaggtatcccatgcggtcatctttcagagcccaggcagtaatactgatctagatttatgtgtgcatctctactgtgtaatatggttgagtgtgttgcccttgaactttctgtgaaaatggctaccacagaccccagatctcagagctgagaagtctagtaatctttgctggcacatgtagagtttccctttccccttaggtcatttggacccagaccaaagaagataatgagactttatttgctctccccactaccctaaacttggatttcacagctctccaggcagctgcatagaaagaagacagaagaaagacctgtgtcccaacctcctaacacactgacccttctgaaaggggtttttcctgcagaaagggtctataattggagggcattttaccatgatgctgagccaggcacacagaagcatttttgtattaactcctttggttacagctttcttctctgcctttaaaactgccacattagtgaaggtgatacaggctgtgataataaacatttcagtcagttcagtcgctcagttgtgtctgaccctttgcgacctcatggattgcagtacaccaggcttccatgtccatcaccaactcccaaagcttgctcaaactcatgtccatcgagttggtgatgccatccatccatcttatcctctgtcgtctccttctcctaccaccttcaatctttcccagcatcagggtcttttccaatgagtcagttctttgcatcaggtggccaaagtataggagcttctgcatcagcctcagtccttccaatgaatattcaggacagatttcctttatgattgactggttggatctccttgcagtccaagggactttcaagagtcttctccaacaccacagttcaaaagcatcagttcttcagcgctcagctttctttatagtctaactctcacatccatacatgactcctggaaaaaccatagcttgattatatggacctttgttgataaagaaatgtctctgttttttgatatgctgtctaggttgatcatagcttttctcccaaggagcaagcatcttttaatttcatggctgcagtcaccatctgcagtgattcgggagcccaagaaaataaaacctgtcactgtttccattgtttccccatctgtttgccttgaagtgatgggaccggatgccatgatcttagttttctgaatattgagttttaagccagcttttttactttcatcaggaggctctttagttcctcttcactttctgattaggggtgatgtcatatgcatatctgagggtattgatatttctcctgacaatcttgattccagcttgtgcttca

SEQ ID NO: 38619 - DNA, 1686 bp, Bovine  19866880518473
  misc_feature (1)..(1): n is a, c, g, or t
natcctggtttcctgccaaccctccaaacacagctggggatgtgctgggttaatgtgtcttccttctgtgttgggagggagagcctagagccggcatagcagattctcaaggctgtagaggtgaggcctccagagtcgcatatctctaaggaagagtaagacagttggtgtccctgagggcaaagaggcatttctcactgtgactaaatcacattagacttgcctggaccttggagtcatgactgccaaagtgtatcactgaaacatttaggcatctctatcctagaacctggccctcaacctggcatgtctctagtgggcaagggaaaggtctggaaccagcaccaccccttcacagtaaggactggagaccagcacagatgcttctctgggtatcacagctacccagaacccaggcctccctccaaggcccttctcctctcccagctgtgaccagctggggctgtttccagccgccaatagctaattccaggattacactttgtaagttgatgaaatgtaatatccagaatgtaaaagttgtagacttgctcccagcagccaagcctggggtgtttctccaggggctgaagatcgcatttagaccgcagtagagcatggcctgcaccataaaccctttcatgacccatggtcccgtgacaccgagggaaaatgcaggcccagaagtattaactttatcacaacatttttttggctcctgaggaattgaaaaatctgctctaagtcacgttctcaaaaatgtgtggaaaaaggacagggcagggtaggaggcagggggttagggggtggagtttcttcgaggtgctttgacattctctctccaaagtttcacactcagagtgcatttaggaaaggggttttgaggatcatagaaagaaaagaagcatgtctaaaacagggagctatttctcatcttctgtggtgaattgacacctatcacaaaataacatcaatccatggaaaggcctttgttagggctgttttttttagtttccttctcacctgaagaatgatgacattttccccagattttttttaaattagacattcaaagaaatctaagcctaagaaaaattattagtaacaaaaataacaagaagaatcatagccatcattcatgaagcacctaatgtgttttaaggttttcactataatgcttacatccactaaatctcagtataacaatagctctgaagatgaaggctgttattatccattgttttatagataaggaaaccaagctgaaagaggcaaaacaattttatcaatgttggctaatgagtttccaatattttattaaatcatcatcagaaaaatatacacattataagtaatcagggggatggatttcatgaagtgaacactttcatgtaaccaggatgtggatcaaaaagcagaacatcatactagcccctgcaggagccccgtcttggtcctcccacctactaatccccaagggcaacctctactctgatttataccataaactaattgtgctcattctaaaatgcacagaaatggaattgtgcagtcaatagtcattcttgtccaaaatttcccacaatgtcccggtagtgaggttcacccgtgttgctctgtgtggtactagtctgttcatcctcattccagggtaataataccacggtgggatttccaaacgacaag

SEQ ID NO: 38620 - DNA, 2635 bp, Bovine  19866880520107
  misc_feature (1)..(1): n is a, c, g, or t
nccaaaggtagcctcggtcattacagcagaagaaggaccaagtcaggaagaaaataccccaaccagtggccctctgctggctttgggcatccgagggcagctgctggcagttcccattctctgatcttagtgcaaagccgccacccagttgttcccctgggagaaggggccaagtttcgggttactgggatggcaaaggccttgaaagcctgaggcaggtgagggttgcttgtgtcgagttaattaggagactcggctacagcgcaggcaagcccgaggtcagatatgcagatgactgtgcaccccacccactttcttcagaagcaaaccctcccctctccccaaaaacctgtgatatcctggagctacaatttctctcctctgaacagttcatttggggaagctctatgcctcacaggagagcacgagagaaactcctctgctctctgaaaaagcttcaatacaactcagattttcctgtttaaaaaataaaatgcctgaaagttatctgtaagaaccatatcaaagacaaaagtctttgccacgaagccattgttccattttaactcccatgtccgctttgatcacatggtccagccctgggtttgactggaatcattagtgaaagttaatcaattccagctgtcatcatggcttataggatggaattttccagaactgtcactaaattgctttctaactttgaagagtcacagcttcttgatatctcaccagggcacggctgtatgctagtggatctggcatttgcaaattcaattacatgtggtggccaaaagaaaaagggaaaatgaaaaaaaaacaaaaaaagagggaggggtagaaagggaaataattgaaattgtgcaaatgacttggccctccatccacttgatgagcatatgttccacagagaacaggagactagaaataggactcagctgtcccacagtcactcgaagcctgagccaactcttaatcacagctggtctcaactgaaggaaccacagcgagctccaattcggagagagaagttcactgtgttgggactatgagatggaactcagtggtttccaaaacggagccttcctaaaggattttcaaggatgacacgggctgctctccacgtgctgctgacacaccgctggcctttagagccttccctggtgcaggaatcaactccgacgagcatccatgggcaacaagactggcaagttctgcagtgcctgacaaatccggaagacttctaccgcagcctgatttatttacacgttacagcagtcacaccttcggaatctctgacttgacccaaagggcaaataattattccttttaattgtgataaatcaccctagagtaggcaaatatttgattctcaattaatttccaaagcactctgagagttggcaggtgccgttgctgtcactccttcccctttcccgtcaggactcggtacggacctgagtgaagggacaggcggctgacagtgacttataggggacgggctatgctcggcgagcgtgtgataaaaaccaaaattatgaggagattaatatgcagctcagaattggcatttggatttatcagataaatcagaggccatcctctgatactccaaaactgctagagaagaaaacgtgctgattgtgggatcagcatttttgtgctcccagtgccaaaagaagcgaccgtttctctgaaaatttggttgcctgctttcctcctcttcaaagactggggttatacagaggagcaggggatcaagagagcttttttctggctccactcctcactaactaagaaacagtattcaaattacaaccctatgtatgattccctatgaatgagtttctttgtctataaaatgggaagtcagcgcctacatctaagggtggttattaggacctgataagtttttataaatattcgttgcataaatgaataaataaacattagtaacattgtacaggaggtagtgatcaaaaccatcctcaagaagaaatgcaaaaaggcaaaatggttgtctgaggaggccatacaaatagccaagaagagaagcaaaaggcaaaggagaaaagggaagatacatgcatttgaatgcagagttccaaagaatagtaaggagagataagaaagtcttcctaagtgatcaatgcaaaaaaaatagaggaaaacaacagaatgggaaagactggagaactcaagaaaatttagagataccaagggaacatttcatgcaaaaatgggcacaataaaggacagaaacagtatggacctaacagaagcagaagaaattaagaagaggtggcaagaatacacagaactatacaaaaaagatcttcatgacccagataaccacaatggtgtgatcactcacctagagccagacatcgtggagtgcagagtcaagtgggccttaggaagcatcactacaaacagagctagtagaggtgattgaattccagctgagctatttcaaatcctaaaagatgatgctgtaaaagtgctgcactcaatatgccaacaaatttggaaaactcagcagtggccacagaactggaaaaggtcagttttcaatcccaatcccaaagaaaggcaatgccaaagaatgctcaaactaccatacagttgcactcat

SEQ ID NO: 38621 - DNA, 1549 bp, Bovine  19866880570112
  misc_feature (1)..(1): n is a, c, g, or t
nttccagcatcaaggtcttttcccatgagtcaggtctttgcatcaggtggccaaagtattggagtttcagcttctacatcagtccttccagtgaacactcaagacatctccttacgatggactggttggatctccttgcagtccaagggactctcaagagtcttctccaacaccacagttcaaaagcatcaattcttcggcgctcacctttcttcatagtccaactctcacatccatacatgaccagtggaaaaaccatagcctttgactagatggacctttgttggcaaagtaacgtctctgctttttaatatgctgtctaggttggtcatcactttccttccaaggagtaagcatcttttaataaaattaaggctacattaaagcttagctttcagatcgttttagtcaaggactccatccaaatcagatgaacagccatttctacttacaggattactgctgctgaagcttttttctttcactgatcttttagtgtggctttcctcaaacttcactatgctggtgaattccttggggctcctgtaaaagtgcagattttgactcagtatgtctgcagtggggcctgagactctgcatttctaagaagcgtccacgtgatgctgacactactggtccgtgaatcacgtgtgcagtcactctcttagcaggcagatgcctcccacctcttacttgggcgccctccctcctagctgaggctgtgttaatataatagatctaaggcctgtcacatgcagctgcctggccacatgagtgtctcggttttgttgtttagttgctatattgtctgacgttttgctgccctgtggactgtagcccgccgtgggatttcccaggcaagaatactggagcgcactgccatttccttctccaggggatctttccgaccaagggatcaaagccaagtctcctgcttggcaggtgggttctttaccactgagccaccagggaagcccgagtgtcctggtagcacgtctcagttcctctggttttattctttttgtagatgaaggaacccctgggagggaggccacgctcagtccccacctgcctgcacctggggtggagggaggcagctgatgacatcagaagccaaaggatctacctacccttagcagtgggcatagggttgaattgtaaacagtccactcccgtgtttcaaggggagcctccagagagcagaggccttctttgctttggtttattttgtaattaagggaaaaagagcccaacctaaaacgttgcttgagggtcctggcttttaaatttatgtcactgaacagtctgtgaatcaaggggctcagtgtgaaactgtcacttctgatatcagttccctcgctcaatggctgtatgcaaatacactgtgctctccaggcagtatgcttaatggggacatgagacctggtccatcctaagctgaatgagtgttgggtgtgcactcatgtctgactgtggagctcctgctctgcctcctcagcctggggtatggaggtaccttagttattccaaaaacctgtttaggggaggg

SEQ ID NO: 38622 - DNA, 1407 bp, Bovine  19866880802360
  misc_feature (1)..(1): n is a, c, g, or t
nttgaaccaagccaaatgtccactctaatagataaactaagacggtatatccatacaatggaatactattcagcaataaaaaggaattagctactgattcacattacaggatggatgaacttcaaaaaaatatgctatgtgaaggaagccagacacaaagggccacttaatgtatggtcttatttacctgaaatatccagaaaggcaaatctatagagacaaaagtaaattatttctgatctgcagctccaggcaggaagaagggttaactgtaaatgcacagagagattttgttgcagggaacagaaatatcccggaagtggattaaggtgatgattgctcaactcagtaataaaaaacgctgactggtagacttaaaacagagtgaatttaatgaaatgtaatttatgcctcaaaaaagtttttttaaaaaaacttaatggaaaatttggtgaaagttcagaaactaaaagatttagaggttttgttgtattctggtgttaacatgaaagaagaggatgaagaaagagtgattagagacttcacaactgcaaaagagagaatctggctttatacaccgtggttatctgtccagatatttgggatggatatggttttttgttttgatgccagggaagaaagcttatctagatttagacacaatgaatcatgattctatttccttaaccaactgtgggttcctggagaaaagaaactaagtcctagccttgagtattaacttttgccaccaatctgctatgtgaccttctcccaatcacttcatttttctgaatttcagtttatcttacagaagtgtgagttgtactaaatggttcttatagccctgttcagctgcagaattcttttcctgggcattcacccctcccaaggattgccctagactcttatctagtcctaatgcttgttgcttcagtttctgtatcctccacatcagataaagtgacctggttccaccccatttatctgtattttttcccctgggagcctttgctcaggccccaggtttatcagaaatgagatttttctaattgttcacccccctacacatttctctatctctggatctctctcactggatttctacacttgattgtctttcattgctattctgtttatcccctgctgcattgcaaaacctccctcaaacctaacaatttgaaacaacaatcattttcttaggctgaaaattttgtgagtcagaaattagggcaggcaaagtggggatggcttgtctctcttctgatgtaactggggcctcagctagggtggctcaaatcctagaggtggctgggatgggactgtaagcttcgagctgtgtttctggctaacagcaagatttctctgttcttcttcatgtggtatctgctgaggacttagatgtccaag

SEQ ID NO: 38623 - DNA, 2531 bp, Bovine  19866880846538
  misc_feature (1)..(1): n is a, c, g, or t
ngagacctactggcctgatgggcacacatttcttcattttctctctggagagtctctgccttcactctgctgaaactcacattagccttgtttagatcccacaagaccttttcttggcgctgcccatctttaaatggctctcccagtgctgaccttagcagtactttcacaacaaaagaaaaacaagaatcattttcaccctgttgtagcgtgtcatttctcatcctcttcacttcctttctcttgtttgacagatgccttagatttcactgctccaagctaacttcactttttagtttgttccgtttcacactccccgccccccaccatgctgcccaaggcctgcctcgctgcccctcctgtctctgtggttgaggaggtggtgtcaggcaggtgaggaagcagaggagagagaaagagtccaggttgtcctgctcagggaagagatatgtctgacaaattaaaccagaactctaaaaatgttttcccctggaagccttgctgcacgcttgtaaactctgtattgcgagtgctctatttccagtttattttgaattgagtaaatttgtgggctgcccagagaatctaactatgatttataatcatgtatctttaggaaaattcattctgagcctcctaaaagtaaattgtaaaagaactcttggaatgtagatttttccaagtttggggatctgttttttccccagaatgtttgtgctctgaagtattcagatattctggatgtgacttccaaaaatgaaagagcccctgggccccttcatttcactggcatgtgcttacattaaatgttggtgatgtttcgttgttcagtcgccgggttgtgtacaactctgtgacgccatggactgcagcaggccagacttcctcgtcctttactgtcttccggagtgtgctcagatttcacatctgttgagtcagtgatactatctaaccatctcatcctctgccacccttttcttcttttgccttcagtcttgcccagcttcaggggtttttccaatgagttgactcttcacatcaggtggccaggcgctcagccttctttatggtccagctctcacatctgtacatgactactggaaaaaccatagctgatgttactttagctcaatggattgtggtagggctgagaggctttttttgagggttttttttttttattgcaggaattctgatggtgtggagagttctatatcttagtctctccctggaagattccatatagctggtttcattgtagtgattttgctgtgccacagctgttgactttaagcctgggcatcagtcaccaaccagtcattctattttcaagtctgttttaacagtttgccttcaaccctctaccaagttatttcccttgatttcttttcaactaatagtcttcaagctgcttccagtttgcttacttatcccttgcagttggtggtgggaatggggagattgaagaaagaaaaaagagctttagaaatattttgtattgtacaagttttcttcccttcataattctagtcaaaagaaaaaagactgtatggattgtaggtggttttactaatacaggtgttttttgtagagttggacttaggaaatgtggtaatgttgaatattactttggattagatttttaaattttcaagtggaaattatgtctattaaaattgtccttaaaaattcttgttagggatgaaaaggggcaaggaaataaggacagatcccaaagttggcttggtcttgggggattgactaaaaagattgcatttctcttcaaggggagtatttacagggacatgaaaattatctaagttttgggttgctgacatggcacccctggcagcagcagctccatcttgggtctagaaatttatttcaacttgcccttttataatttttaaatctctgggagtaaatgggggaataaatggagaattagatgttcctgtttgcttggagaggtttattctgttctggttttcatgttaaacttttatagctttaatccatgttaatcagtttgtttgttgtaaggattaaatgaaataattgatgtgaaagcttctaacagggcctggcaaatagtagatgtttaacaaacatttgctggatttgaatttaaatgtcacaggtggtataatgacttatctatctattagattcttcttgtgtttgggcattttgtacaaaattagatatctcatggctcaaataggagacagcaattattctttctttcctgggtgttcttaggatgaacttgagtgatgttatcgatattaaggatccagatttcacctctgctgctgaacgaaggcagaaacgcctggctgctgagctggccaagtttgaccctgatcattatctgtaagtattgagttttattttttaaggtttaaataatttacttgaaattgagtatttaaaaaaattttgagtgcgttcttgaccatgttggacatgtgctttttggactccagaaatgagtgatagctcacaatcttaattgacatttaaattaa

SEQ ID NO: 38624 - DNA, 1587 bp, Bovine  19866880849809
  misc_feature (1)..(1): n is a, c, g, or t
ntgtatatagcactgtaataggtttataatacctttcacacacatagtacagaaaaacccaaacacaaaaagtaaaacattttcaatctaacagtatggtaccctgaaaagtaccgtcgtaccagctacatcactgctggttttatgtttgcttccagacatcctgggcttgaaataaagatactgtactactgtcatgaaatatagatatagtcgtgggtactgtataataaagtaccccaaagcacagccacttgtagaggaggcacgcacaagaaaatgcacaccagtcacgtgaactaacttaggggatcggacatgcaaatgcatgtttgcatctttgaaagtttgcagcttgaaggcgcatatgtaggggactcattgtagacctttgcagccagttacttgagatctggttgaacgtgggatgcagaggacaaaaggaaaaaaagggacactgagtaggaaattatattctccaggtttcttccaaaggtcaggcggtaaaatacccacttacatgtagaaaacttcccctaagatgcctatggaaaaatattaaggtgcaatgaagaattgctggcaaaagtaaatatatactttcttatactttctttgtgtgttttagggagaggccctttgaaataaagcagcatgagccaggtccttcttgtacagagaatgaaacaataggaagggatgctgactttcagagggatctcagctcaggactttgtaattactttcatcctgataacatcgcagaccaggatgtttttattgcttgcaaagaagtgccctcaagttatctgctactctagtcaaaggcctgtttagaatggtattgaccttaagacaataataaagtgcggagttgcaggagtgtgaaggcatattgggtttgttggggttctaagggacgggggttgccactggggaccagaagggcagaacaggactggagagctgaagccgagcaactgatggaaactcatttggattcttttattttgttctgacttggcggggccagaggtagtcatacagcagagatcatcctggtgcctggtgtgcacacagcttcccttacttcagcttcagtgttggaaaagtgcaggaagagaaggggatttaaaaccactagttcagggtgtcatattgtctccttttccagaatgtcatagagctggaattacagagtatgcagccttttcagatcaaataaccacattatcagtgactgatttggaggcatttaataaacaaataggtgtatttgcttaagttctgcaggtgaacatgtgtctggttgctctgaaggctaacggaaaagtgtaaagcgaaagttggcaagctttttctggaagggaccagacggtaactattttaggcgttgtaggtatttatataaccatttataatgtaaccatttaaagatgtcaaaaaattcttggctcatgcatcctgttggatcaggcccacggctatagtttgcttacctccaatatgataagatttagagagacaactcagcatacagacaattgccccctcttcagtggccatcaaccactctcatcccataag

SEQ ID NO: 38625 - DNA, 1245 bp, Bovine  19866880921428
  misc_feature (1)..(1): n is a, c, g, or t
nagcaattaggtagcaggatagcggtagaatgagacagtttggatgaagctgaaaaaccagcaaacaatattgcgtgttgttcacagacgtacggagtaaaagtcatcatgttatgaggatgagaaacatcaaaaaacaaggcagtggttacttccggggcacttaagtttttatttcttaagatgagagcagggtacacagaaatgcatgatgtaattgtctgtattattcatgtgcccaaactatgtgacaaatacttaattttcttcttgattaaaaaaagcttgcacttccctgcagcacagcaggccacttttctttgcaggcttcagtgatttgggcctgcatggtacacagagcaggagctggggcctgcagtcctttttggtgtctggtgacaggtactaaaaaagacaaataaagcttctcctggtggcagttcaagtatcggaggctgggatttaatgagacctttgctgccccctactctgttacctctcatgttacattaaaaattgcaggcttcaggtaataagcgtttgtgttctgtggccacaaggaataatcaagtttaagggtgctgaaatggtgtgccttccaccaaatcttaccagtgggacacaagcccctctcaaatgtcacctgaagacctgcaagggtcaagggatgtccaggctacagacctcagacttctaaacctcctgagttgccaggtgttggtggggaatgggagatgggaatcgtacttgaactgctctgactgatggttaactatgtccttctttacactttataaaagaagactggagtagacattggctgtccaggagttttacaggcctgctgctgaggctgaagctgatggcaatcaactcagctaccgcactggtagagcctggatgggagtcaacagggtggaaagcagagccaaaaggaggcaggtcagatgtcaaatggcataacttgggcacctgaatccaggtgaatggctttaaccctggaaggtcattgatcaagccaacaaattttcttccctttaagtcagtttgaaacgaacttacaacttagcaataaaaagagtctacataggtcttagaaataggtttcagattgccttagactcactctgcttctcttctcaaccttgagtcatcctttgaatgctctatgaatccatcccctctctgaggctcactggttggatgacatcaactcaaggacattagtttgagcaggctccagga

SEQ ID NO: 38626 - DNA, 2504 bp, Bovine  19866880940368
  misc_feature (1)..(1): n is a, c, g, or t
naccaaaaatatcttaaaaaaaatatcttagaaggtaaaaagaaagaatatccaaaaaaaaaaacacaaacaaacaaaacagtgtgtttccccagaagacagattcctcaaaggcagtagctcttctgttctataatcaacaatcctttaaaataaaatactgctagtctaaaccagtaggatgaatttaaaaagatctttcacttaactatgattcatttttatgattatcatctattttaaaagaatctacttcaaagatgacttttccccccagggcaggaaaactatgggtcacacagaagtcaaagaaaaacctagataaatcctaggagggagaaaacagtacagatgtgattattcccattaagcctaatgatataaaggaacgaacttcttcctttctccttcttaacctcaagtctgaaaactaaacctccagaagcactgttatctaaagacaaagaaataatgagactccctaaaaaaaaatataagaaatgaccataaagtataccaagtgagttttaataaaaatgaactaatacatacaaatggatgttgtcccattaaaaaagtcattaccttggaaaatatatacttaatccagtgatgctgttataggcacttaggaatttgtttcagagcttagaattttccacatccttaaaaatagcaaacatttgtcttttggggtttgatttagcagtaatcaagtaaccagagtagctgaactttctctggagaacctttcctgatctgccaaatccaggttctgtgcccctcctaggatgactgtccttcctccaacagagaacttttcactcaccgctggaattgtttacttacttaccattggtcaccttggcaaaactgtaaacttcacaggagcagggaacttacttattaatttactcgcaaccctaaaataaagcctagaaaattacaggcatctgtatgacacagaaatactgaatgatacaatctactatatacaagatgttttggaacactgtctgtatttaccctccccactctcgaactctaaaaaaagtaccacacctgtctgtatgattatatacctatagagagagacaattactttatataatacctgagaggaagagtgtttggattgaatgattttcattacttatttttgtaaaggaagaaaagtaaaaatcaatgactacatcctcacagactaaaaacatttaacttttcactctcaaatttgcaagcataacatcttacctagctgcaatatctttatagtgtctctgtaggttttcatcaccagcttaaaatggcggtacagtggataacacaaaactcttcttccaaaagacaccaggatttcatgaacgttggtccaagtctgtgaagtatcatttacatgaataatcatttccatattacacaaaacaaaagcaccacaacaaaatgtaaaactattctcaattaaaaaccaagtctgagtcaacatgaagccaagtggaagataaatacagtgccatacagtgagactctttctgtaaacttataataaaatttttatctcggcctttgtaattcctcatactttatcaacatatcacaagtgctccttaaaaatcacattcatagcaggaaagtttttaaagtcttttaagaattaccactatgaatgtgaaacacatggtactaacaaaatacagatgcgcataaaatgcatctctaaatgatacatgtttcatgtttttgtcctttaggaccattcgagataatacagatgaaaaatgcagaactctttattgcaacgtgttcagagttcccttctttcctctctctctttgtttttctgctttgggcatgagtaatacatggcatttacttcagtaatctactttcacttatcaaagcgaaaactacccatttctgtgaaaaggctttatcttgaatggtatcaaactgatgccatcagcaatgtaaaacttaatgaaaacacattttctacaaaattgttttttaattgggttttgatttaaaatgtataaaaatgttaacctgcaaataaaacttaacatataacattaaaggagtacaacatttccatgtatattcacctttaataaatgagtgatctgattaagaatactgagtactcaacaaagaatagttgatataatataaaaaacaatggtgaacttctaaaaaattctggcaaaaactaaatacttataaaagtttgacagagctggttatatgtatgacaatagcaagttatctaaaaaacaattaaaaatgtcaaaataaaatcataaatcgatgaactttttcatgcagattttaataactaaactatgaaatgatctagtcaccaactactttgttttcaatattggaataattactgtgagtatcacaaaagccgatttatccactatatgctgattgtggaaatacacagaacccaaggaggagtccagagaaaagcacttttccatcttaaatatgcatatgaa

SEQ ID NO: 38627 - DNA, 2049 bp, Bovine  19866880955445
  misc_feature (1)..(1): n is a, c, g, or t
ntagtgcaagttgccctggcatcaagtgacaggcagcctagggcaccaccgctgcacgtaatttttgctcttatccagaaccccgtccactaagtgaacgtgaacctgactgcagcgctcaccaccagttttcattttacagcacaagctaactcgtattccaccaggaagaagaaagatttcagattccgaggctgtcagacatttccacttatgaatttagcgaggctcctaaatcatgactgagccacagcttgcaatctccctcccctcattcgcaggctttctaatatttcccctgctctttgggtatcttggagcaatcacactaataggaacaatttaatggagtcctgggcaggcaggggtttggaggattatagttcaacctttggcttcttatcatagagaaacacccttccttaacagatgccctgggttgcagactggctcttttctctcttcagcacatccagctgcacctgacgaatcaaaactctggctactgctcctcctttaatctcagttccagtcaaggatgggccaagggcagaataaatgccaatcaaaaatcaggagggaccatcaacatgcaaggagctttccagatagcactagtggtaaagaacccacttgccaatgcaggagacgtaagagacacaggtttgatccgtgggttgggaagatcccctggagaaggaaatggcaacccactccagtgttcttgcctggagaatcccttggacagaggagcctggcggtcaacagtccataaggtcacaaagagtcagacacgactgaaatgacttagcatggtttcaaagaccctggtcttgatggttctattttatgccagttacttgccatggattctataaaagtacacatcttctgttgaattctttttttttttttttttacagtaagcttctgtaaatttagaataaaatccttaatgcagagtggtagctttccagctgtgctgcctttgaacctttgtgtttttgacctgcgccagagtgacctgttcctaaaaggtagcctgttcccagttacccagaaaaatttagttactagatgtaataattatctgaattttaattttgacttgtgtgtaccagaatctagtacacgtattaaatatacacaaaaatagtatctagtgtaaaagtattgatatatacttattttccttcaatgattgtatcttaatccacgttctacagagacctcaggcctcttacctgaatagctttgagagcctaaatgcgactatgttctggcctctaagtgggcagagacctcaggttcctctcctccccttggagctggaatcagcagcatgggatggcatcagtgttgtttagcatttgtctgggaaggtagtactccacatgtctttttagttattttgctagtcctaaaatggattcttgtatgagggagatacctgggagtatctttagttttataatttcagttgaggatgttaaggcacaaataacttaaaggcaccctttgatacagagcctctgacccctttgctgagtttttttttttaatttattttaattggaggacaattactttacaatagtgtgatggtttgtgccatacatcagtatgaatcagctataggtatgcctttgctgagtttcttaaaccacgctgcctgttcactgtggttcttgttgggattggtactgagctttcttacctagtgctgggtgaagcccttaaacagcagggagaagcaggtctgcattttcatgtagagttaatagaaatgcctgcataaaatgttactgtcacagagaccctgaaggtgggcaacaagaaagttatgtggtgaaataactagggggacatctagaggccaaaccgcctatggcagtggatgacccaggatgcagagcagcgctgctgtctacccgggtgtggctcttcagaaggcttctgagaactccgctggggtgcaggcggctgcgtggacagtctcagaagactatcagaggaccgacttcctctcaaacagattgtcaacggtgg

SEQ ID NO: 38628 - DNA, 3045 bp, Bovine  19866880998649
  misc_feature (1)..(1): n is a, c, g, or t
ntccttgtaatacttatttccttttttctgtttgtatctttgatctgtttggggggttcatcctctgtgccatgtgaagtatagatccagctttattttgtcatctctttaagctgtggaccctgttatccccagactagttaatgaatagtcctaataattgttcttaaaatggttttcaaggtccaaaaagttggcagctcttgcagaagccttaaagaaagcatccctaaccaaggcccagctggggttagaactggaggagctggaggcagcagcatttctggtccaggaggaagaagccacatcaaaagcaggagtccattccacttccaggcagcagacaccttcctccagctctgagacgagtggttcagaagaatcagagggcagtgcatcacttgagactgaggagtcagactcggaacaggaggagcctggaggcggtgaatctgagacagggcattccttgctcggtccctttgttgaagaaagcagcatggccctgcttcttaacgatggtggtatgtgtagaagcaccactttcctggggtctgatggtggtcgaggacagccgctggcctcccctggggctcccatagcatttgggcctctgatccaggagcttggagaacaactggagacttcggttcagatttccgagcccaaagactctgctgctggacagcaggacagtgtgctggagagagaaagccggcagacacctgaggattgactcctgagtggtctcatttgttattgagaattatgtcagatttggttttattgactgaattaaaattcttcattttcactttgtacttttccttggtatatacaacattgtttgtgagctaacattgacaccagttggttttcttgtacctttaagaacaaagttctaaagcaaactgtaattaatatcaggcttatttcatgcagtgttgttattttgagattcatcaatgtagcatgtattgagggtttgttgtttttttttccgtatctgagtagtatttcattgaatggacatttgggttgtttccagcttttggctgttccaaataaagctgttatgaacatttgtgtgcaagtctttgtgtggacatatgcttttatttctcttaggtaaatatctgggagtggaatgatggagccgtatggtaggtgtatgtttaacagtgtaagaaactgccaaactgttttccaaagtgactgtaccattttgcacgcccaccagcagcctgtgagagccctgcttctttctcattcttgtcatcacttggtatcatcacttggtgtggtcaatttttaacattttaataagtgtgaagtggtatctcattgtgattttattttgcattttaagactacttgtgttaagcatcttttcacatgtgtgtttgtcattcacatatctttggtgaagtgtctgtttaaatctcttgccggttatttttgacctgggttgcttttcttatttctgagtttgcagaattctttataaattctaaatacaaatccttaaatgagtcatccttgcctgcctgataatctttgattggataaacattgtgagttttacctcattgggtgctggatatatgtattctcctaagtattctttagctttgttttgggatgcagttgtttggaaatagttttgatcctttgggtcttgcttttttaatttgttatataggtctgaaacagtgctccatctaggacaatttcccagccctaaggaaagatttttcccatgccccagggattatgtgttttgcagtccggctgatgaaaatagacacctgtgtgaatactggtccctctaatcctttcacatggctctttcccagcctcattgacaggctctcctcagtgagtagttgaccctctcctggtatctggtgttctccacagctctcacctttcccatactctgtcttgtagactcgggccaagtccccagctctgtctcctgaactgcagagtccactgagttctctctgggttgcccctcgctgtgcagcctggacaatcatctgggacagtaggtgaggccctcttaccctcctagggtttggttttccattcctcaggatcactgtccttcattgcctcatgtccagtaccttaaaaacccattgcttcatgtactagttctggttttcttttttggttatatcagaaggggggaggttaaacctagtccctgttactccatcttgattagaaacataaacttccattaatattttatatgtgaattttctcacttgagtgtaagctccttgggaatgatgtctgtgtcgtgtcttgttaccactgaatcatcagcccatattctcagtgcaccataaatatttgttgagtgaatgaacaaatgaaataaaccaatttactttggggaggaaatgaaatgaaatctgatatgtattaatctcagtagcatttttatttcaggaaagtgtatgatcccttttattctacttctctgtgggttgcgagtatttgtatttccactgtaaattccagcttgtattaacaggatagttggggtgactgtgccatttgacacgcacgttaactcctgaacactgtaacagctttgttagaatgtgttcaagacttttctcaggctcccggagagcttcaaaatccctatgaccattgaaaatgcatttctcctcagtagcacatgacctgaggccagtttgaaaatgcattatctgttattcctctcatttactactactaatgtcaagttgaacaaatctactcttgtctaaaaatttaaagctgtggaaatttctctttccatcaacttctgtccttacttaggaatctaaagaggatctactttggtgagactcaccttgggtggaaaaatctgtgactcccttactcagaggatgggcaaatgtgatccttcctggacatcctcaaagcattcttatcaccatacaagtctcatgcattggaaagacaaagagaatgagcactttaattttagattccatgtctgcagcgtttctcttaccctgt

SEQ ID NO: 38629 - DNA, 1015 bp, Bovine  19866881036240
  misc_feature (1)..(1): n is a, c, g, or t
ntccctttatagcggtgatctttcttcctgctttatattacaaccagagtggttccttttccaaattgcctggcagccaggggtgttttatgcatacttgggtttctagaaacaagccgtggtcccacagcctggatttctccatctccaccggcctgttacactcatcctcagacaggcactcccttgtccttaaaatgagaagcgccttctgtgatggttgattctacgttttcctgagagtcttagttgatgaggacaagaccagattaaatgctgtattagatggcatctccctttatatttttaactctcttcgcaaagggagtctgtgtcactgttcgccatgacgtgccctgtaaagagaagggcatgtcagaagtcaggcctggattaggatgggggatattaaattgtttgtattcactggccttaaaaaagaatccctattcctgtaaaggaagcttggccagaatgggatggtttcactagctttctgcttctcacctgcttgttatttccagccaggaaatctttctggggtaggcacgttcgcatttctactttcactgttccaaaagtagctccagttttgtctcgtctaacctcatttcttgctacttgcaggcatgctaagcatgaactatgccaaatcttttagtttcttgaataatcctcgtctccactcacctcttggatctgctcacgaagctcgtgtttcctgaaatgtccctctgcctggaactctgcccaccacccgctgttcacctggacctctcccttcagtctgagttgacacacaacccctgggaccctctctcaaaagggaaaatgaggttggagccattctcttgcacacatgctcagataagactctaattctcccaccagagcactcatcacaactgactgttagcctgatgacttgttagattgaccccctactctctgttgaggttgggacaagccaccatgtttgcatctgtatcttctgtgtctagcaaaatccctgcac

SEQ ID NO: 38630 - DNA, 1266 bp, Bovine  19866881085872
  misc_feature (1)..(1): n is a, c, g, or t
ntcttcacattgatgttattaaaatgcaataggttgaaaacaaagacaatgaactgaggtggaaaagcaaaggcaaacctcaaaaaccaaattatgtccaagatgaaacaaatatatctaatactgaagaagtgaaagtactgcagattgatgaataattaaacacctcaaaagcaaaccaatgaggggggaagagggtactttaaaaaaaaaaaacccagagatttaaaggcataaatcatgatttataacccatgccaactctgacctcatagaaagcaagaaagatcaaaggtgatgcttcatcgtgtatttattgcttggccaaaccattattcatccatcttcattttgaaagatatatatatggagtacaaattctaatagaaccatcacagggaaatttttatgtgcagaatttatcatgaaatctgcagctaatagcacaatatgcctaatttgtaatttgcctgtctcttctcagatttatagcatcacagctttacagccaaaagatgcaagctgcaatgtgttgggagacggtagctgacagttcaaataaagtcactataattccgcagagaccttattctttaattctctaatgaagataccaggaaatgaccaccactgctgccaccatgcacacccacacacgtgcatgaaaactccatttggaaagatcgctgcattgctgacttcaaaaacaaagtcagatgtcagttttgagtgagattgcttttttaattaaaaatgcatcaataaaattatattaatagaattctcttttctattcatcttggttggagaaacataagatggcatgagagacgtgtctctaatcccagaatacaggtatctagtaacaaaacactgaaacctacgctgacccaaagtgtaattctgaaacactcagaagagctctagctaccttaagtgatgtcaaatctatttaaatccctttcagcaattttatgaggcgacctagcaaggtgacaggcctgtttatttgaggagaagaaaaagtccagaatttctggactggcaccaaagctgcccagcatggtgccaatcaatgtggcgcagcacttgtgttagcagaacacctccccccattgccttacagcagccacgggccctgggctgctcatcttcaggcacgagcatcctcacctattcacccagaagggaaaatgggggtgcagtaaagttttcctatatggtgtccatcagagacatactatgatggttaatttcatggatcac

SEQ ID NO: 38631 - DNA, 2078 bp, Bovine  19866881099853
  misc_feature (1)..(1): n is a, c, g, or t
ntagcttagaatagtttgcaacaattgctttcaataagtaacagaattacagtggaatcaaggaataacgggtttcctctaacttaggaaagacgtgtcatgacaagtcagaaaattgtgaaagtaaagctctatatagcatgtcctggaatagggttctaatgctatttttgtttgtttgttttagctgctaagttgtatctgactctttgcaaccccatggattgtagcccaccaggctcctctgtctataggatttcccaggcaaggatactggagtgggttgccatttccttctccaggggatcttcctgacccagggtttctaacccacatctccttcactggcaggcagatccttaaccaatgagccaccagggcagggcaaaattagaaggagtgtgtgtgtgtgtgtgcacgtgtgcgtggatgaagagaggaacaggtagaagataggagatgagtaaggtgaatggagaattctgctaccatttttctcccaggaaacaagtgatatggccaaatgggatgagctagagtttggccctcaggtcaggatttgaatatggcctctgtaagtgattttaggcaagtttcttaacctctctgaatctgcttcatcacctacaaaatggatataggaatgctttcctctgagttgtaattaaagcaaaaggacctgaaaccactttgcaaaatatcgggtacagaggtgactctttattgaatggcatcaggggctgtgccaacagtatccaggttacaaccacaaacaggtttcccagagtttacaaactaacaatgataatgaactttaccaagttgtttcaggagaactccccagtatgactgttaaaaatgcaggtgataggacttccctggctgtccagtgaagactccatgcttccactgaagggggcaagggtttgatccctggttggggaattaagataccacatgctacaaggccaaaaagtaaataaatactaccaagatataaaaaaaaacattcaggtgatgatgagttccatccaggcctcctgaatcagatgatcagtgggtaggctgggaacccatttttgagaagtcccccaggtaattctaatgaaccactgacttacactctaattcctacattaacttcaggtttagcaaagcttccacctcccttcaaaggctccctggcccgtgagtctgaccccgactgtgcccacatttgtgggaggcatcacccacttcacagtctgaacccactccatggtaatagaggcaagagagttactccttgttttgcttgttttgtgggcagtgctcatatatcatcatcagaaacttcaaaagacttggctgagcatggaattgacacgttataacttgagttatgcaggcttcagtgtctaaactctgtcaacctggagaaggccctgcttttcagatcagtatctaaaaatagcgaaaatctagtcagatgttgctactgtctgcatgtgactttgggatcatttttcctactctctcacctccttaaaatcatgtgctatgcttttatttgcctaaagaataattcatatatccaccatagaaaatggaggaaatatagcattgacacagtaaccagagtaaaaagatactggggatccaggttgtcccctccccagataacccaccatgaatatctttggtatgtttccttctcgctttttttcggtgtacatgaatacaggtttttgtttttttccttgccacaaaaatcaaaatactgtgtgtgctgcttttgactggctcttttcatttcagaacatgttttaaggtaaaacattaatggttttttttataccatgaaataatctacaacagtggtttcacactggttctagctttcatgctggtcccaacaaaaccccccaagggtcttacaaagtacctaatgattacctgaggtggaggatggggggctggtggggaggccccaacaccttgttttagtcacagaagtgccacttggtaactggaggagccatgtagggattccatcacaagaagattggaagcaaaaagaaaaaaaagcaaaaccaaaa

SEQ ID NO: 38632 - DNA, 1622 bp, Bovine  19866881103583
  misc_feature (1)..(1): n is a, c, g, or t
ntgattttggagcccaaaaaataaagtctgccgctgtttgcactgtttccccatctatttcccatgaagtgatgggaccagatgccatgatcttcgttttctgaatgttgagctttaagccaactttttcactctcctctttcactttcatcaagagcctttttagttcctcttcactttctgccataaggatggtgtcatctgcatatctgaggttattgatatttctcccggcaatcttgattccagcttatgtttcttccagtccaacgtttctcatgatgtactctgcatttaagttaaataagcagggtgacaatatacagccttgacatactccttttcatattactaggtaagcacagtaaaacagaaccacacctgagtgcaggccatccaggaaaagtcggccctggcgctgtggttgtcaccctggaacatgtcactattccgattccatgaccctgccaccagacactctgattcaataggcttcactaagtcctagaaacctgactgttataacaaactccccagaagattctgatgcagatggtccccaaacacatcataataaacatcctaataaacataataaacacacatcataataaacactgtaatggtttaaccatcacaccgtgaactcaaaacaaaatgatgctgatataagaagcacttctccccatcagctggaggaggagacagagggattatgggatgaagctggacgggaagtcaacgttgtccactccccagtacgcctctcacacacacttacacaccccttgtctacgtgtgcaagttgtacagcagcgtgctgcagggcatgtgggattcccaggagtgatagtggctgtggtgactgtttataaggcggctggttgtgaacagacctgttcctaatgaggacagaaggggtgtctgaaccacagctggtgtagttaattggtgggaaagttttgggctctctggttcaccgtttagggagctctgtttagtctaacacagatgacaacactgtatgtattgcagattcagcccgaaggtgtgtaatcaaatctattacacattaactcttactggcccaggtaagacaggttcttatagatactgattaaatgattcccactacaatttggcaaggttttggaaagcctctgagcccctggaattcatgttgttttagaagcctccaaggggttctggtgatcatcaggtttgagaaccacaataactctatcctctagatgagaaaaatgaagcgacatgcaacagaccccagccctgattccctagggttttaattcttacaaccctcctccccgcaagggaatcctaagagaatacttaaaatgcagccttttatacaatccaatgtctctggccttaccccagagcatggttccaaactgaagaatctgccctcgagaaaaaagctgatgtttgtacccactctacatctgtttggggttatacatggtgtttagtatgaaaaatgaagcaataaaatgtacacaggtattatcacattctctttctaaattttactccaaaaaaaaatacaaacatagattttaaaacaaaaaccaatgtttcataccctaccatttgtgctaaaa

SEQ ID NO: 38633 - DNA, 1542 bp, Bovine  19866881401337
  misc_feature (1)..(1): n is a, c, g, or t
nctatgactgtacacacaaggactgacttgaatgcactcttccaaattcctgaatgctgggtgcccctaaccttcacttacaacacacccaccttttcctgggtggtttgagttccagtttggcctaagtagttcattaaaaatacacagaaatatttaaattctgaacttcaaacaaagaaaccagagataataaataacaataacagcaaaccgggaaatcagtagagaaaccaaaagtctgagctccctcaggcctttcacattagagctataaatcatatcacccaaagggaaacttggggagatttgcacacagtcaggtccaaccaaggagaagcaccacaaataactacagacgcggtacacataatacttggatgcttgccaccacaattaacatttataataaagtcaagcattcatgtgactttagctacacaacatagcagctttgctatccagttcataacattttggttaattatacttctgtaaacaatctacagggtttcccaggtgactcagtggtaaagaatctgcctgccaatgcaggagattcaggagcgtctcacaggttcaaaccctggatcaggcagaacccctggaggaggaaattgcaacccgctcaagtattcttgcctgggaaatcctgtggacagaggaacctgctgggctacagttcagggggtcacaaagaatcagataagactcagcaactgaacacataacaacaaataatctacagtcaaacaaaagcctatttcgggctctatttggggaagaaactggtgccttaacatggaagcaaatggcccaagatcacctcccgagatgagaaactccaccaaaacatttgaagaccgccaagtggctcccaccaaagtggaaagtgactttgttacttcacttcaaacatcatctgtttttattatttttaaatctttgctgcctaattcccttcccaaacatccttgtcctctgtgggtcaacaaatcatacatgatctggctcctctcagagaaatgcaaacctattccattgtacactttctggaaacagatcaggggaatcagaagaaaaggtactgcactcaaacccttggccccagtggccagccccacagtgttgcagctttcagggctgatgctgacagtttaactccgcaaacactggtgccaaacaggatgtccctgctaggaagttcaccgactacgagtgttacgtggtgtcataacaagcgatcatgtgccaagattcttgagctgagattaaccgctgagacacaacatgggaaatgtggtaagttcatcctcatgaaaccagagctcagtgggagcactgcatttaacacttccatttacaagcctttggggagggaagatccagatcattacagaattgaagacggcaaggaaagtctcccgcgttgtaactcagagcgacgtgacgaatatgacaaaagtcataaccgaggcaatgacaggggacaaagtttatcacctaaggcttatctggaaatcaagacaatccagcttaatg

SEQ ID NO: 38634 - DNA, 948 bp, Bovine  19866881421140
  misc_feature (1)..(1): n is a, c, g, or t
ntattcattggatgcaatgtttctattactattttgaataaactgtttaaccaattatggataagaaaaataaaagtttttaatttacctcacttgttccttttctgttgttgttgtcctcgtacagacccaagattctgacataacataatatgttttctctctgaagaacttctttttaacatttcttgcaagttaggtcatatagcaaaaaattcccttaattttcatctgagaaagtctttctttttcacttttgaaggctaattttacaagacctagaattcaaggttggtattttttcttttttctctcaataccttaaacattaccactccactgtcttcctgcttacctggtttctaagatatcagatgtaattctaacatttgctcctctataaataaggtgtttttttttttttttttttttcttctggctttcttcaagattttttctttattttttattttctgcagtttgaatatacctgcctaagtgtaggattttctggcatttatctgagcttcctagatcattgatctgttatccaatgtaaatttaaggaagtttcaatcattattgcttcaaatatttcttttgtttctttcttctacttctgatatttccattatatgaatgttacacctttgggaattgttccaccattcttggaatttccaggtagctcagtgataaaaaatccaccaatgcagaagatgcacaattcttggatattctgttcattttttaagcacctttccctctttgatttagttttgaaagtttccattgacataatctgaagttcacggattttttcctgagcagtgtccagttcattagtgaacccatcaaagtcagtcttcatttctgttaaaatgtttctggtctttagtgtttcttttagattctttcttagaactctctgctctctgcttcattact

SEQ ID NO: 38635 - DNA, 957 bp, Bovine  19866881500163
  misc_feature (1)..(1): n is a, c, g, or t
ngggccacacaggctaactggggaagatggtaaaattgtaaaagtgaagccacagaaaggtacccaagtctctgtccttgattgcagggctaatgctctgcctgatgcagaaggaaaagggagcacatgaaggggcctggtcactgtggacagcgctctgtgcagcccttggccctgcccctccttggctccacggagaaggagataatccttcatccatctttttacccagcctcctgtggtccctattggcagcagctgcctgacaccacctctgaaagatgcttaagactctgccaacccagtgtttaatgcatgcaaagccctttccaaagaagtcacttaaaaagattacagaggacaggatcacccctcccgcctccagcttagggagtctttgcagctggcctggagctaagctaaggaagcagagtctttagcagcctgaaaataaagtgagccttcatttgagaaatcactcagaataccagctgcaagggctccattcattgatttgttcagtaactatttgctgcacacaaaacaagtgcaggcactgctctgggcactgggacagcctggggacacaggccctgccctgctgcggctgacattccaagagaaagtccccactgttaggagccctaccttcccatgtgcttcccttgtcgtgggggttctttctcctgctctcctctgagaaaagctcagatgctgagaagaaaagcgcttctcacctgtagcactttggggaagcagtaagattcatgcgtgccctggggaaggagccagtctgatttctttttcttttcaatgtctggtctctctttggggcttcccaggtggtactagtggtaaagaacccacctgccaatgcaggatagtaagagatgtgggtttgattccctgggtccggaagattccctggagaagggcacaataacccactccagtatt

SEQ ID NO: 38636 - DNA, 1320 bp, Bovine  19866881940854
  misc_feature (1)..(1): n is a, c, g, or t
naactgaggttccccccaagaaaactgaggtgtctttagcagaaacacctggaaatggatgctagtaagaaacaccaaaaccaaaagcagagaaccactggaatcaataagcccattttacagatggaaaacctgagggttagagatggtgaaagtgttggcccaagagatggaacagccaagtcacagacctagaatttgaagccaggtctatgtgaaactagatctatattgcttaaaaaaaaaaaaaactttatcaagggagggtatttattggttcacataccttaaaagtccagtggatatactagcttcagacatgatttgatctttacttacaaccacactgtatttgagaacacttacaaccacactgtatttgaactgttttcttgctttccagaatccctttgaagaagatacctttaatgaaatctctctctttttttaactttgaaaattgtttatatttataagggaaaaaacagattataaaagttatctcatttttaatgctttctatatatttatgtatgtataaacacatacccacatatattggttatatctctggaaggtggtatctgcctgtgtgctcagtcatgtccaactcttcgcaaccccatggactgtagcctgccaggcgcctatgtccatggaattttctaggcaagaatactagggtgggtcaccatttcctcttccaggggatcttcctgacccagggattggacccgtgtctcttgcgtgtcctgcattggcaggcggattctttattactgcaccacccagaaagtggtataccagaatgttaacagaggttatcaaattgggtacccctttttttgcttgtctatattttgcatttttctatgctaaatatatggattacttgcatattgataaaacaatttaaagtatattagttatcataaaaataaaaaatcccttattggcctgaggcataagaagatggaaattagttggggaaactacttttcctccctttaggttggtaggtccttcatgctctgttttggggaatgaaatagaggtgcccattcatggaatatataatccacactcttccccctcatatgtcaccagacatttatttcaaaccagcgctctggttcatattttaaaaatctcaatagcatcttaatttgaaaagaaaagggagatggagaaatagaattccctgtgtgtcaggaacaatcataagggggaaaactgaagcgagaattagtccaggcagcatcctaaaattttggaagaagaattatgaactcaattgtgtacagcctcagctaaggacga

SEQ ID NO: 38637 - DNA, 2173 bp, Bovine  19866880346120
  misc_feature (1)..(1): n is a, c, g, or t
ncatatctggacaaaactttaattcaaaaagatacatgcacccctatgttcatagcagcactgttcacaacagccaagacatggaaacaacctaaatgtccatcaacagatgaataaacaaaaaggatgtggtacatatacacgatggaacgctactcagccataaaaaataatgaaataatgccatttgcagcaacacagatggacctagagattatcattctaagtgaggtaagtcagacagagaaagacaaataccaaatgatatcacttacatgtggaatctaaaatatggcacaataaacatctacaaaacggaaacagactcagatacttaaaaacagactttgccaagagggttgtggaggggaagggatggagggggaatttggggttagcagatgcaggctattacatagagagcttataaacagagcttactatacagcataaggatctatactcaatatcctgtgataaaccataacagaaaagaatataaaaacaaatgtgtgtatatacatatatatatatatttcagctatacatacattcatatatctgaatcacttttctgtgcagcagaaattaacataacatcgtaaatcaactgtacttcagttaaaaaaaaagatctttccttcaccatgttgtttcatgtaggtgaaatgtattctttacactgtgtggcatctcatattggggcttccctggtggctcagcagttcagaatccacctgccaatgcaaatccctggatcaggaagatcccctggagaaagaaatggcaacccactccagtattcttgcccaggaaatcccatgggcaaagcagcctggcgggctacagtccatggggtcacaaaagagtcagacatgacttaagtgactgaacaacaacatgtcatattatgaatatgccaccacgtttttatccattcttctggatatttcattattcccagttttggaacactgggaataaaattggtgtgtgtgtgttagttgctcagtcgtgtccaactctttgcaaccccatagacagcagcccaccaggctcccccgtccatgggattcttcaggcaagaacactggagtgggttaccatttccttctccaaaaggaactatagaaagaaagaaagtgaagtcgctcagtcgtgtccgactctctgcgaccccatggactgcagcctaccagtcccctccatccatgggattttccaggcaagagtactggagtggggtgccattgccttctccattaatcagctatactccaatataaaaacattttttaaagatacactgtatattaatgcatatatgtggaatctagaaaaatgatgtagatgattttatctgcataagatagagacaagacatagagaacaaacataaggacaccaggtgggggcatgaactgggagattggggttgtgattggggtactatctataaaataggtaactaaagagaacctaccatatagcacaggaaagtttactcagggctctgtggtgccctaaattggaaggaaatctataaaagaggggatttatctgtacatatggctgattcactttgctgtacagcagaaactaacacaacattgtaaagtaactaaattccaataaaaattaatttaaaaaaaatttttaaaggtatcctggaagagaagagaaaacctagggagatggacgcaaggataaatacacattcctaaaattccatcaccatttgcatcattcacatatatacaccccaaccctcaactctagagaagtactttctatgaaaacataatattactatgatttcaagacttgttttttcaaattagcaaagctcacatttctttagctagtttacaaaagaatggcattggttagtgaaaaaacagacttgactaatgagtgaactctgggaataggctcctgtgtatctgagaagctttaactcacagaaataagttggaacaatgcctctggctgggaaaagaacaaagatggaacaagcagttgcctagggtagtgaattaccaagggcagcagacgttcaagtggcttccgtgggagcaaaggcagcctttgaatttggatgtaacccactttgcttggggtaggagagggtgggatagggtattcacgggaagttaagcaaccattccacggg

SEQ ID NO: 38638 - DNA, 1098 bp, Bovine  19866880417861
  misc_feature (1)..(1): n is a, c, g, or t
natggtgggggaggttgtgtgcagaaatgatttctggtgccaggtgactcatttttaagcaacttcccccattttggcagatggtgctaatgccagcgcttaacgatagagctgagcaaatcaggacggcatgtttccacacttctcagatgcttatttctaaacagtatgttaaaaccacatctctggctacctctctctgcagtgagtcatggagcccaagtgaggctgctgcctctggagtccatgctggcaacggaatcctacagtgaaccacacgtaaaagatccagacactcatttttcagatgctgaaaacctcaggccatagagaacatttactacagacattttctgtcttggccatttctcacatgaatactgccctattgaaaggacctttaccctcatcaaattctcatgtatttcagacaaataacatcatgtaaccatagaacctatgggatagaaggaatttatggtcattaagatcagggcagaaataactctttgctgaatattttgtggtccctgttccatgctgcagcattgatgctgaaacatgtctgcccaggtacccaacatatttcctaaggccccttcacagacatgtgactagtgttggccaaaagaaagtgagcagaagtaacatgtgtcatttctggccaaaacagttaagaataggctatgttatttcttctcctctcccctttgtcctggatacagaggtgcttaagcctttaagggatggcaaagccatgcgataagacatgcctgggtcactcagagcctgtcatactgagtgaagtaaggctcagacagagaagaagtatcacatatgtggaatctaaaaagaaatgatacaaatgaacttacttacaaaacagaaagagactcccagacacataaaatgaacttatgggtttttgggggaagggatagtaagggagtttggggatggtcatgtatacactgctatatttaaaatggataaccaagaaggacctattgtgtagcatatggaactctgctcagtgttatgttgcagtctggataggaggaagggggtctggaggaaaatggatacatatacatgtat

SEQ ID NO: 38639 - DNA, 1434 bp, Bovine  19866880434699
  misc_feature (1)..(1): n is a, c, g, or t
nttgctgctgtcagaactaatacacaactcaagaatgagtatgttaaataccatatgatgaaacttacatgcgaaataaagtatgacacaagtggatctgtgaaacaaacaaaatcacacagagaacagtcttgtagctgccaaggggagggaagtattgggattagcagatacaaaccattatgtataaatatatatgttttcacagagtggataaacaaggtcctcctgaatagcacagggaactatttcagtatgctgtgataaaccatgatggagaagaatatatgtgtaactgagtcacttttctgaatagcagaaatcaacacaacaatgtacatcaactatactccaataaaaatttttttaaatgaatgaatgtcataatgtctgtacacatcttgggcaaaagatcagtgatgcaggaactagacccaaagaggaagagcagacatagctaagtcctctgaaaacagctcagtgtgtgatcataaatgaaacatttacctctttggggtctcccagaaatatgtgaggggataggacaagaagagttcattgccagcaatcacatgagtggaaccattatattgttatcatttttgtatcataggacgtaatcttttttggtgatgtcacaggcctgtacattgggattgtacttgcgttgtgcaaaagaaaaagaaaaaaaaaaaagctgacatcagcacccaggtccaaaaatgatcatcacagtcatccccttgcaaagctctgcttccatgtatctcaagggccttgagatcttggtgcagctatacagctctaaacaaataaaatgcttacatttctggcaagttagaggaatctgtcccagagcatgactcgctccaccaaatgggaatccacttccaacctaggccttgaggaagggctttgacacttatgtcacaagtcaagctcatatttactcacgtggtaaccagccaacatatccctggaaccaatccaaataagcagttgtatgaaaaatacgcaaagaaagagtgatagcctgtggaaatcgcatcctcatgtatgacaaaggccgtacactcttaaatattcacaattattcagacacccctccagaggtgtaaactagcaatcatgtagtttgggtatgaggaaacctttcatctgtatttacaactaccagcttatttcataattttaagcagaaaataatcaaagcaacatgattgcatattcccaaccaaacttgtgtgatttagcaaaaatatgaagcgcgacctcttcatctctctccattagaactgataaaagcctcagaacaaatccagtggtccacatttggttccagtccattagtctgcctaccttcaagataaagcaaactaaattttttattgtgtagtgctaagggaaatactcccccgactagagaacccacac

SEQ ID NO: 38640 - DNA, 2151 bp, Bovine  19866880635427
  misc_feature (1)..(1): n is a, c, g, or t
ngaaaaggaaggaacttaggaaactaacttgacttttgtgtacttttccagactctgcagaatgtccattcctacatggaggtagaagggattcttggttgcctagagagaacatgagagaaggtgatccagggggcctgggagacacgccacccatacacactgtgctgcctgcggggctttcccgaggaggcacggccactttatcctgcagggtctcgaacgttaaaaggactaaggtatacggtgaattctggtcaaagtgcacctccaacctgcttaacttgaatgtcgggctggggatggcaagaaggcctgcttccagggcagatcaaccccctgcctttggctttcctgatcccccatcatgacagtcctgcgtctaaggacaaatccagtttctgtgttgtctgagaactcttcagaaacctcaaccgcgagcacagaaaacaggactttgcctccattccacacacagcgctgggaagaactgcctggggacaagatttctgaagcatctgcaggagcctccacactctctgtcctctaatcacccccaggacgcagacccggggctgctgcctcttctgtcacagactcatagatggttttgtgagggaaagaaaaattctctgggaggactagactttcctcccaaaacaagtttaaaagttggggataatctacaatccattcccagtgccaagcccgcaggagcagcagaagcaaacaaccacaaagtcactgtctctggattaggagagtgcagggagaggcctcagagggcaaggcggtaaagccgaagatttctttggcttctaagaaaataggcaatgtgaagaagaagctgcaagaggaaagaaacagtgacagaagccaagagcctaaacccaagggcaacagacctcagcttaaggggaggccacggacggtgcccgagagtcacccttggagcgtgagtggcctgactcggccctgagtccagggaggcagagtcacaagctggctcctcctctgacaggttacaactcacaaggtctctctacccccgtgaggtcaattaccagctgcacaggatttctgcctcttttagaagcaaatggcaaggattcggtgtttttaaaaaaaaaaaattattgaataaatctaaactacaacactgggaattcttcagtggtccagtggttaagaatcctccttccaatgcaggggacatgggtctgatcctgggtcagggaactaagatcccacatgccatggggtaagtaagtccatgtgccacaagcactgagcctgttcgctctggagtcgaagcccacgcaccacaaggaagacccagtgcagtcaaaatgaaaaaataaaaataaactacagcactaatcctgctagcagagctcgtaagatctccttgcaagggcctgctcactacacacgtcattatacggctgctgaacacacggagggccagcttctcagaaagtgagcagctctggtgctatatttgcgaatggctgacaactctcggtgtgtatacatgcatggcgtgcacagaggtataaatatctgccttaaactgtgggggagaagattcttcacagttaaagtgacatttcctctggcattcgtaatttcacaaaagaaaaagactgttttttttttaaaggattaaacaaaaaataggtattcagatgaatcccaggtgattccctttccagctaaggaacagacttcgttcgtctgaataatttacacagcccagggttccccagggagagttctttggtccaatatatttggaaaacagtgagtaccaaatgtgcctcttgattgttttaagggtgggagaaacaagtcctggagtgaagataggagccagctttgcagaatgtgggtcacatgcgtacgtgaccgcagacgccttccctgtcctgtggaaccacagctgacgctgcgcgctcaccaggctctgggcgggcagtcaccccaacggtcactgtgaagtaacttggttctccacctgtcggcaagcactccctgtgaaccaactgctccaggccttcccagcagtaccctggtagaggagatacgtggactccaccagctcgggcctcagcggatagaagagcacgtcgggggcctgcagctgccagg

SEQ ID NO: 38641 - DNA, 1180 bp, Bovine  19866880678690
  misc_feature (1)..(1): n is a, c, g, or t
ncgtctgcctacaatgcgggagtctggggtttgatccctgggtcaggaagatcccctggagaaggaaatggcaacccactccagtactcttgcccggaaaatttcatggactgagaagcctggtgggctatagtccatggggtcgcaaagagttggacacgactgagcgacttcacttcactatagaaccatgtacctcttatctatagtacttagaatactagcaaatccacatttgttgctgtaatacatttacaatgtcaaacacactctgcatttattcccggtgactgccatagtatttatactcagcaaatatttgctggataaataaagcacactgctccatgatcaatatagttgtgggtaattctgcagcagaatacttccataaaatttcccttctcaatttgatcattctaagtccagattgtctaaaaagaaagaccttgttaaggaatccctcatctgtatttttctgccacttacaatgcaaagcttaggaagcgatgctccattgcaaaccatcttcagatgccatgtcctgactttcagaggcactttgctctactaacatgtggagcagattcttaaatcttttgttctcactctgagaaaggatctcattaatgaaatctgtagccctgaattatgcacaagcatttgatttcaatgcatacagcatactggctctcaggtttaaaacacctccactccagtagtaatgttttttgctcttttcaaaaggagaaagctttgtctctaacattgagtccaagcactgactcaactgaagcctctctttgtgaccctgcaaattatcttttaaaaaagataacttagagcgcccccacctggcacccatctccttgtcaaacaaaagccaaactactgagctcagaattcaaagccctaggattaggcaccaatctgctttgacatcctcccttccttggtgttaccctggtggctcagatggcaaagaatctacctgcaacgtagacccggttcgatccctgggttgaaaagagcccctggagaaggaaacggcatagacagaggagcctgatgggctacagtccatagggttgcaaagagttggacacagctgagcaactatttgagcttcccaggtgacactagtggtaaagaacccaccagtcaagcaacagatttagag

SEQ ID NO: 38642 - DNA, 1005 bp, Bovine  19866880692547
  misc_feature (1)..(1): n is a, c, g, or t
natgaatcttgataagagattttgggtgggtgaagtcaagagggggtcagagagaccaaaatgcaaggggtgttctggaactagtgggtgacttactttaagaggcacccaagtggctggagggtggcctctcagatgggaaactgaggcaagggtgtagcataggccagagtaaggagttggtagaaatctagagatgcattctcttagaagcctgaaggacaacaattcatgcttttccgtggctgtctgatgtaactgcattctcctatccttccagggaactattggattgtaatcagtgacaaacaaggaaactagctctcttaggctgaggatccagtaaatgaatggcttttggctgtaagtcaatgaataatgttaatatatgcagtcaccaagtcaccattaacaaagcactgccgagtttcaatcttctcatcagaattcctgaaaatcttatttttaaggcagttcaaacagaggcgaggcagcctagcctgccaggaacacagagtcctgcctctgagggcgcccctgacttggtgcgtgaccttcggcaaagcgcttctctctatctcagctgccttggtaataaaatggggataacagaccttcgccacctcacaggagtgggacggagcgcaataaacgtccgccaaaagctttcaagataagtgctcctggaaaatgagttgggaagagttctctttcaagagttcaagaggggaaaaaaaaagattttaaaagtcaaaataggtcactgtttacggcttctaagagtcaaaagcttttcaacacagaaagggtcgttgatggaagaaacagaggctgcagatggctaagggtgcccctaaaccagcaggagggttctgtgacagtgttctctcacttaatatgagggcagaaattgtttgggtttagggtaggacaggatactaaaaagcagacagcactgccctgcacgagagggctgcacgtggcccgcagtatctactttcacag

SEQ ID NO: 38643 - DNA, 793 bp, Bovine  19866880731907
  misc_feature (1)..(1): n is a, c, g, or t
nccccatcccacccctccgggttgatgcagagccccagtttgagtttcctgagacatgcagcaagttccccactggctatctattttacacatggtaatgtaagtttccatgttactctctccataggtaggtttaactgggacaggatgatggggtgatgctttagaagacagttcaggacagggtgccatagaggtcaggtgttgaatactcagaggatagaggatcagaattagagtggattctttatattttgcagttttgaccaataggggctttgacattggacagataattctgactttgtcacttttgttacaaatagtaaacttaccatgaagccaatacacaagttaaggctctgtggatattatagaattttaaaatgtgaattcagttttcttacatctctcttgggaatattttttgtctactccctattataattttagaatttagcattcattcttttgactttaagcaaaggagttaattttgttctgaaaaacatttagttggaagggtgtaaaattccctgttctgtgatctttttaaaaaacatataatttgtgtgtaaaggagcttaagaaatatcttcatctttttttgtctctaataaatggtttttaaaaagacttcccatgtggtccagtgactgggactccacactccaaatgcagaggacctgggttcgatccctggttggggaactagatcccacatgttgcaactaagcaaccaaataaataaaataagaaatactaaaaaaacaaaacctaaaaatagagctac

SEQ ID NO: 38644 - DNA, 3239 bp, Bovine  19866880731978
  misc_feature (1)..(1): n is a, c, g, or t
ngatgtggttatggtcccttgagattatactataattaagataacaaatacagaaagtagagaaagtagaaaaaagatgttatagactatagaaaagagggtcctacataaagataattaacaacctgcaagttcagaaacaaacaaaaaaaaatgatgtattatataaatacaaaaataaatgatgtattcaatgataaaatacaagagaacctccctacccccaccaaatgaaaaatttacagattaaaagatgactagattctggaaaattctgatacagattgttcataatgatacatggcagagctaagctactttgaacaaaaagaaataactcataatgtgtccagaaataaagaaagtaccatatagggggagataaatcaggctggccttagacttttccttgatgaagacagtggaacagcttatatcaagacatgcggaaagtagtgtgaccaaagcatgtcataccaagggcagatgtcattcaagtgtaatgaacacaggcagaccttctcgagagagaagcagctcagaatcccagacacaaggacttttcttggagaaacaagttgacaaataatccagataattattaataacacactcaaaatgaagaactcaggaatagagagaccatggtggaaggggccagtgatgaccactgaatatgtctaattattgaatgattaccaaattactatggaaattatattttctgaataaaatataatcattatcaaactgagcacagttactaagaatatacaaacaaaatttgggagatggtcaggaagatggaagtaataatcttagagaggtataaggattgcataccattcaggcaatccattacaaatactattaatatttctctcaaccagactttgaaaaagcacttggatgacaccaattgtgagcctgtactccctgatagatggttggaaattaaatttatgagaatagatccattagcttgtggagttagcaagcctaacagatccataagcttttagagttaaaaagactaatagatccatcagcgtttaaagttagcatggctaatctcagttagttgatctcagaaagtaggcaaaaccacttagttcccatttttactttcatggttttcagagagaatagaagaattcaaatagaaagctgaagaaaaacatataatgaagaaattttagcccaacatcactgaggagctatagaaagggacttggtcacatgagagaagcattctcatttctggagccagaaaagaacatcccagagcccagaagaaccacaggtgtgatctcaggcttctgagatctcacagcaaaatcatggagaatgaagaagggcttgaacactggaaacagaaatgtgatcctgcttggcaaaagagaaagtagttgaattaagaatatggactaacaagattgaggtctggaaaaaactcttgaagagactgtcaaatgatgaatgggcttttaggaaacagggaactaatttttaatgataatttacctatccaaataattccattccccataacaactgtgtgatgtattcattgttcttatcaaagtgaagacggagaaacacagtgtcggagaaacacagtgtcagagaaatcagttatttgttcaaggtcacacagctagtagatgctggactatttttggttggtggtattgtttactcactaggttgcatctgactctttgcgaccccatggactgtagcccgccaggctcctctgtccatggaattttccaggcaagaatactggagtgggttgccatttccttctccaggggtctcaccaacccagggatagaagccaggcctttctgcattggagacagattctataccatctgagtcaccagggaaacccgtgtgtgtgtgtgtgtgcgtgtgcatgtgtgtgtgtctgtgtgtgtacatacatacgtataagtattataaactagaaggacagttttaatttggctggccatgtgaaaacaagtgaacagaccaccctaccaaagcaaccagcaagaacattcatacttagtatattttgaatggattcataaaattcttattttctaaaacacatagaaatagcagctaatacttatgggacttggaacttggtgtgtcctcaattgataacaggctgcctgggccatgctgagttgtctccagtttatactaaatgttgctctttggctttaatggacctatcttgtaatttaagaagtttaagcaagggcatactctctgaaactgtagtcccagtttaggaattttttgtaaaaaattattcagaggtgagttcataaatttatgtatgaggaagaattatttcaatgtaactcaaaatcataacaatttgaaacaacctaagtgtttcaaaacataagcaaagttttagatcatttatggtaaatggtatcatgagatattttccagacattagtgagtttgtgaaagttgctcagttgtgtctctttgtgatcccatggactatagcctgccaagctcatttgtccatggaattctccaggcaagaataccagagtgggtagccattcccttgtccaggggattttcccaacctgctgatcaaacccaggtctcctgcattgcaggtggattctttaccatttgagccaccagggaagcccaagaatactggagtgggtagcctaacccttctccaggtggaatcttcctaacccaggaattaaactggggccttctacattgcaggcaaattcttgaaccagctgagttaccaaggaagcccagacattaacatacgatttccagacattaatgtatggctttgaaagatgggaaaatcctcatcatctaagtaacctgatataaatgtaggatataaaatttcatattcaagataacaagtgtgtttaaaaaatacatgcttaaaaactagaaagaaaaattgcatcaaatttaacactgcttacctcaaaaagataggattatggatgatttgggtttttattatatttattaatattgtcacaagttttattgtgtataggacacatttttatcagaaaataagagagatgttaataaaatctagaaaggaaagctaaaaagatgatgtcaaacaggttaactagccagtgtgattgggagatcaaaagcaattcaagagatattaaacatttaacacaccagcctacatttcagtgatttccttttgttgcccatgttag

SEQ ID NO: 38645 - DNA, 2194 bp, Bovine  19866880769135
  misc_feature (1)..(1): n is a, c, g, or t
ntgaagaagaactaaagagcctcttgatgaaagtgaaagaagagagtgaaaaagttggcttaaagcccaacattcagaaaactaagatcatggcatccagtcccatcacttcatggcaaatagacggggaaacagtggacacagtgtcagactttattttcctggtctccaaaatcactgcagatggtaattgcagccatgaaattaaaagatgcttactccttggaaggaaagttatgaccaacctagacagcgtattaaaaagcagagacattactttgccaacaaaggtccatgtagttaaggctatggtttttccagtggtcatgtatggatgtgagagttggactgtaaagaaagctgagcaccgaagaattgatgcttttgaactgtgctgttggagaggattcttgagagtcccttggatgcaaggagatccaaccagtccatcctaaaggagatgagtccttgggtgttcattggaaggactgatgctgaagctgaaactccaatacttcggccacctgatgcaaagagctgactcatttaaaagagctgaccctgatgctgggaaagattgagggcaggaggagaaggggatgacaggatgagatggttggatggcatcaccgactcaatgggcgtgagtttgggtaaactccgggagttggtgatggacagggaggcctggcgagctgcagttcatggggtcacaaagagttggacatgactgagcgactgaactgaaacgaagctatccatgcatgctgcttaaaaaaaaaaaaaaagatacactgttttcaaacccctggagaatgttgcctgagtgaggaagggaagagcaaggcagaagtaccagtccggtggctggagtaggaggaagcgccctttaatgaaatcttgattttctgtggctttttcctaagtaggaaaatcactggaaattgtaccaattttgcccctacccccctttttttgagctttcaatctactgaggcgccctgccacctcatccatctgtaacttttcaccactttttcctcaaagtaaggaatatgtcccagaaaatgcacctctgtgacttagcgaagtgccaaagtcatctgagccttcccagtgttccaaagaaagcaatgatttgaattcagctgctcaaacaattaacctctaagcaggcagcttgaaacatccttaaagtaacagaacagtgtagattctggaagggaaatcagcttgttggtaattgttttaatttttcaattaattgattatacatctggttgtatatgatcttttgaacctgatactctgctaaattaacgttgatgttatagtaaaattgaagcagaaccaatttctgttcaatgaaattatgtgttttctgacactggatcgtacttgcagatacatggtaataatcatgttcatatgacccccagttttactctaacagtgtatatgttatatacacacgtatgtgtgacatatacacatataacttatagaggtagcaatgcatgtgtgtaacatatttaggtgtgtatgtatatgcactccaaaattacaatattcacaatagcactattcattattgttataagttggaaacaactcaaatgtccatcaactgtggaatgaagaaataaattgtgacataccatggagtattacataacaatgagaatggctgaactactgctacaaaaacagatgaatttcacaaacaaaaccctgagcaaaagaagtcagacacaaaaggacacgtacaataattgcatttatatgcagcttataaacagtcaaagctagtctctggaaatctattctgatagaaatctgaacaggaggtgtctttggatggagacaagagagattctggggtttggtaatggttgaaagtcactcagttgtgtctgactctttgcaaccccatggaccatacagtccatggaattttccaggccaggatactggagtgggtagctgttcccttctccagcagatcttcccaacccaggaatcgaactcaggtctcctgcattgcaggtggattctttactagctgagctaccagggtagctcctggtaatggttacataaatatatttgctttgtgaaactcattaagtggtacaataatgatttgtaaacttgtatgtatgcatgttctgtccatagaaatttacttaaaaac

SEQ ID NO: 38646 - DNA, 1215 bp, Bovine  19866880775136
  misc_feature (1)..(1): n is a, c, g, or t
natggcgtatttggtaaaaacagtactgtttgctgcttgtcggttgtgcattgaggatggcagagaagtgccatttgaagctgcagcagcttctaccctgtgcctcctctctcttcctgggtcttcccctgtgcacttggcgtctattaagtggccagagcaagtgacagctactgagttgcttgcttggtaggattttctcggacacatttccaccctagctgttgtatgaacaggcaagtgctatgtttaggtaaaaggctgtttggccagagttcagtcctttttattttttaaagcccctgcatttactaaatcgagtggtaatccctgagctccttggctctgatgtgctcctccaggcccaggccctgtggtgtaggattctattagagacgagactcttctgcagaaagaactaggcttccccactcaggtcaagactgactcactgtatataccaaattgaaagtgaaagttgctcagtcgtgtccaactttgcatccccatggactatacaatccatggaattctccatgccagaatactggaatggatagcctttcccttctccaggggatcttcccaacccagtctcccacattgtaggcagattctttagcagctgagccacaagggaagcccaagaatactggagtgggtagcctaatcccttctccagtggatcttcatgcccgaggaatcgaacatgggtctcctgcattgtaggcatttaccaactgagctatgagggaagccttgtacggaaatgcttttgcattggctggaaaatataccaaattacatggaaatattactcaaacctgcatgtcaaagtgctttctgcaaagtgcagtgacaagtcaatgtgttacgatggccaagttcggaacttttgtcttacagtaggtgtcatctcgtgctagagtactgtattgacagggagaggcggtctgtctccaaaggtttaaagactgtgttgggagcaaaggttgatgttgattccactgaagtgaagctgctgggggctgatggaggaacagggctagagctgtgtctcttccttctctctgaccattctgcttggctcctcagtcgggaagcctgtaacgagggagaaggggacccgcccctctacgtcaacgtgaacatgttcagcgggcagctcatgaacacgtggatcgactctctgcaggccttcttccctggactgca

SEQ ID NO: 38647 - DNA, 1375 bp, Bovine  19866880802375
  misc_feature (1)..(1): n is a, c, g, or t
ncagcagctgatagctgcactgctccagtctctgcctcaccttccatggccatcctccctccatgcctcttctgcttttctcataaggacaccagtcagactggattaagggcccacccaactccagtatggccttctcctaagctacatcgtagttacatcagtgaagaccttacttccagggacttccctggtgctccagcggctaagactccgcactcccaatgcaaggggcccaggcttgatccctggtcaggaaactaacatacatgttgccacaactaatcgtttgcatgccacaacttaagatcttgcatgctacaacaaaaatcaaagatcccacctgctacaagtaagacccagtgcagcaaaataaataattcttttaaagattctatttccaactaacatcacagataccaagagttaggactccatcatatctttcaggaggagaaaccattcaatccacaaaagcctccaagatggtttcaaagcaatttcagacaccatctgcccccttctccatccagcatttgaaacttcagcacccctactctgatcaacataagctttctgcagtccactgcttattaaaacattgagagtgtttatgaaagttttcagtacagatgggcacttctcttcaagagcaggttcagctttctagcacaggcatgaggcagggaggggcggggggagagcattgtgtcctgttgtcatttcaaaccacttaagtgatcatttatggcaggacataaaaatgatcactgttttgaaagacaataagctagtattccaggtaatgatacctccaggctaactcattctttttcaggagttttaattatcaggatgggcacaccggtgtttattcaattctctgtatactagagatggtgtctgggaaagatgaatgccacccccttttcggctatgctcagctgaatggattgttctcattttgcctcttccctcatcagttgataaaatcaagaacaggatccaaaacaatatgtacccacacaggacaatgtatcctggtgcctgtgggcaggaacagggcccccacttacagaacccaggttccaagccagcctccatcccattcagcacatcgcaccactacttctgggattctcgtgtcccacagaggtgacaataataactatctccttggggtttgtctacaggcgatgtggcataaggactgatgttaagatctcaagttcaaagacacttaaagacaaaaaggagatgtagcctcagagagctgattcatttctcccatccaagacttgtagacaagcctttccagtctacttctgttcagaaacaaaagcaaactcctcacgtcaacgtggcaggatcactg

SEQ ID NO: 38648 - DNA, 3541 bp, Bovine  19866880821037
  misc_feature (1)..(1): n is a, c, g, or t
ntctgcaggtgctcttgtgcagggcggagaggctggtgtgttcaggagcacactgtgcggcctgccccaccctaaatagctctgtggcctagggcaagttacttcatttcctggggctcagactgtccattctatagattctgaagattaagtgagttagtaaatgtaaactgtttagaactgtgtctggtccataaaagagctcaataaattatgttggtattgtttagttgctaagtcctgtctgactctttgtgactccacgcactacagtatgccaggatcctctgtcctccactatttcccagagtttgctcaaactcatgtccactgagtcggtgatgccatccaaccgtctcatcctctgtctccctcttctccttttgccctcactctttcttgacatcagggtcttttctaatgagttggctcttagcatcaggtggccaaagtattggagcttcagcatcagcccttccaatgaatattcaggattgatttcttttaggctcgactggtttgatctccttgcagttcaagggactcttaagagtcttctcccacttcccaatccaaaagcatcagttcttcggtgctcagccttctttatggtccaactctcatatccatacagtcaattttagataatattaataactattattattatttactatatctgagaactactcccagaccttgatccaattaaactatggatttgtatgacttttcttacttggttttccagctatgcacattcatctaattcatccaatagccttgctctcaaacttcccagatctgaattttgtctttgctttcttagcatcttcactgtctcttacctttaggctacaacagtctcccccttctctttcctaacacactaattcctccaccagacactcaaaactttgctcagctcccctggctcaacacacatgcaatgacctctattatgctatgctatgctatgctaagtcacttcagtcgtgtctgactctgtgtgaccccatagacggcagcccaccaggctcccccgtccctgggattctccaggcaagaacactggagtgggttgccatttccttctccaatgcatgaaagtgaaatggcctcattcaatatgcagttagatctgttgagagaatctcttctgattggtgcaactcacagggtcagatgatgtttcttcaccatacctttaacgccctcccccaggtctccagtttccagaagctgggaacattttaaataacattgtcatttaagttaatgaactttggatccttgggggaaactctcccttaaatcatgcttctgaacacattttctaggtgtttctatatatttttgcttccattctgctggcatacacattctgtgttggagaattgtccttgaatacgtgggcaggttgagttggcccagggactggtgcttctcacctcagctatacattggaattatcttgagaaacttagaaaatatcgttgttgggttcccaataccaaatacggtgatttaactgatgctgaagctgaaactccaatgttttggccacctgatgggaagagccaactcattggaaaagaccctgtagttttctgtttttttttttttaacatgccttctaatggattccaatacatgctaaaatttaacaactgctaaacttgagtattggagaaggcaatggcaccccactccagtactcttgcctggaaaatcccacgggcggaggagcctggcaggctgcagtccatggggttgctaagagtcggacacgactgagcgacttcactttcacttttcactctcatgcattggagaagaaaatggcaacccactccagtgttcttgcctggagaatcccagggacgggggagcctggtgggctgccgtctatggggtcgcacagagtcggacatgactgaagcgacttagcagcagcagcagcagcaaacttgagtgtacgacctgatcttggggccgtttaacacttttcagttgggcttcccaggtggccttagtggtaaagaacctgtctgccggtgcagaagatacaagagtcatgggttcgatccctggattgggaagattccctggaggagggcatggcgattcattccagtattcttgcctggagaatcccacggacaggggagcctggtgggctacagaccatggggtcacaaagagttggagacaacttagcaactgagcaaaagcaaaaaaaaaaaaaaaaaaaagggtctcctgtgcagcctgtgttgagaaccactgcagtggttctctctggatggcataatcataagagttaccagcttttaaagattagtcgagcttttgataacaaaggttcttcctaaatagaagtaatatttttcatccatttgtgagcccctacatgtgctaagttgagttacccaactgtttccaaatgaagttttcagctttctaaggcagaatagattttgctattgattcctgtgtcatcttttggaaaatggtctattattgataaagttttggcatgggatagggagttcagtctctggttgcatttcacccagttcctaaagaagcctttttatatgaaagactcgacagacgagacttgaagttaaatgtattgatttgcatattgatttcctgtgaatcttgaggttgccactgtatatcatacccgaccaaaatctgctctgtttggataagaaagataattcagacggttgggtttattgcccaggctgttaaattgcaaaataaaataaaagttgtcaaccattttcgtttatggctgttggaagaaaggtttagattaaagttaacattgaagaggctgaatgttgacaggctgtatttctttaccctagattcaacagttctgttcatttctgaaatagcctcagttaattctgtagcagtggttgtctactgatcatatttagaatcccctggtgggtttgttaaaacacagatcactgggctccagagtttctgattgagcaggtggaaggtgggacctgagacttggtgtctaacaaggtcccaggtgacatggctgctctatgggctcgtggggctgtggggtggaggggaggtgtgtgacacactttgaaaagcactgttctaaagcattttgtattaaatttcatagtactttattctgtaggaaatatctgaggggaaaatggtaaaatttatctttataaggattacccaggagtgtgtttcatcacaggaagtagaaatatgctagaataatttagaaatgtttcctctacaaatttgatgctatcctgattccatgtgtagtgatggggacccagagtagatacacaaaaagcagaggtttatctgtctcagtgatttgtgaggcttttatgaccacaccatgtccacgtacataatgggaatattctctgaaatgcctaattcaaaggacaaatgcttttagaaaatgacgtcagtgtagcaatgggtccacatgagaggacctttttcaatctcctcctatcatatcccacataga

SEQ ID NO: 38649 - DNA, 1502 bp, Bovine  19866880855366
  misc_feature (1)..(1): n is a, c, g, or t
ncccagaagaacccccgtgcagtagcgactgccactggtgcccattttagagatgaggagattgagtcaaagaggagctaagcgactggcccaaagcgacacttgtcagtggtggcaaggctgggatttgaacctgtctgatcccaaggcccaggtttttaaccagcgtcttccactcctttttctgaatttttggaagtgtccttagactgtgattcttccacagctggggccctgtcgtatggatgtcttgtgggtactccacactccatgcttccctgtggctgcagctcgccttcctgttctcataagcagggcttctctcggtccctgccatctgctggcccagttccctccactggcctgctgctgacactttgactcccaactgggtgacggggacacagtaggcactgtagtaacccaaagaatgacccgaaggcctgaagttctcctaagagttgtgtcttcaaggaagtgtttctcaaagcggatggcatcatccttagagggtgtttcctggtgacagtgcttttagttttcacaaggattgcagtgctgtggggatggagatgaggaagtctcacatcctcctggctttgaggaccagtatgagacagaactgtggggcaaagagctgtcctgtgtcccctcaagatttgaaatgcacccccccacaatgatatagattaagaacttatttttttttaattatttgagcacatatcttaactttttctttttttttttttcatataaacacaagcatggttttagtaggcaccatgcttcctaggaatgctgctgccactgccaagtcgcttcagttgcgtccgactctgtgtgaccctatggacagcagcccatcaggctcctctgtccatgggattctctaggcaagaacactggagtgggctgccatttccttctccacctaggaatgctacttctgtataaatggaaggaaggctccagcactttaccaagagttgttcgccattttgaaaatgacgtcatgaacgcagtatcacattcggaatctgagtcactagggccacatggttacatcagttttcatttatagctgtttcattcatggagagtctgcgtatgcctctctagcccttatttggaaatagcatatataaaacaaaagggtcaacaacattcagtcaaatatggtctaattcctctgaaattcagatgtaatccttaaaaataggtccaaacattggctactcacctattcatgaatcatctgagcattttcatgttacaaaataattatactgtaaactctattttttgtatctcccttatgtgacaaaacagtacattgatttttagaaattgtttgtaggtagattataccagctgtgaattgcaattcaggaaagtaaggacaatgttacaaaaacattgttttaagaaaaaggggttatgatggaattttgaactatagttttaagaaaatgagatcgatttcctaattttggcacaag

SEQ ID NO: 38650 - DNA, 1917 bp, Bovine  19866880881467
  misc_feature (1)..(1): n is a, c, g, or t
ntagttttttttcttctcacctgcttcctgtacttgctctttactcgagaaaccccatgagactttggttcttgagagactcactaaacagagtggttagtactaaactgggttctacctccctatttatgacaaggaaacccctagaaatttgtcatctccagtattgtcatgccatagcctcagtagaaatgcagcctgacagcctagattggattctagtgtcataatcttgtcagaattctcatttcagagtcttattatatactataagggtgtaagccatccaagttaagatataagccaaagtagtaaggcaaacaagagtaaggcaagtgggttttctaatagtcaaccccagaactttacagcttctgctaccctgcatggcattatgatctcctttgtccacgagggtggaggaaaggttgggagcatcgctgtctctggagctccttcatgtggagggaattgtccactaatacttcaattaaacaaaattctgtctcatggaatttgtgtattctaatataaccatctagcttgaaatacagtattataaattaccctgaattcaagcattagaaaccagctgggattcttgagttaaaactccactaatactagatttttcatgataaatgcattttggaaggaaaaggtgttcagagctcagagcagattaaatagttcccgtgataattagataattttaggcaaatgttggtgagagcccttccttcatgtgccatttagggtccgtggtttttattggtcagaaaccaatgaactttcattatttagagaaatagctattttacagtggaattgccattgaagctcctccatttcctttaaggggagccttggggctgaatgtgtattcagagttatcacaaagtaaggtgaagggtgggacttttattttttaatagaagtatagttgattgacatttctatgttggcttcaggtataaagcctagtggttcagtatttttgcagattatactccattacaggttattaccagataatgactataattccctgtgccacagagtatattcttattctttatctaatttatgcattgcagtttgtatctgttaatttcatgcccctaaattgcccctccccaattctttctccccttgctgctgctgctgctaagtcgcttcagtcgtgtccaactctgtgtgaccccatagacggcagcccaccaggctcccctgtccctgggattcttctccccttgcataaccacaaatttgttttctgtatctgagagtctgtttctgttttgcatgtatacatttgtgctgtattttagatgagaggctagggctttgtgcccaagtgaaaggcagccattgagaaggcctgtgaccctgggtaaggcagttccctgcagccagggggtagtttgcagcaagggtgtcaggggtgaacggccacagctgccatgcctagaagctgcaggtcagcagtgtgcaccccgggaggggtcttttggtgagccccacaggctccactacatgtaagtgtctttttctagatcagacacgcagccatgtggctaactacataggtaaactgagtccaagacctccagactctctcactttccactctgagagactccaagtcacatttcactcattaagcatctctaatcaggttagatacctgctgtgtccttaaatcatcaagacaacaggggtgttcaggatacctgacttgtgggttcctgtcagagtggcattcaaggctgattgggctggagacatggatttagagagtaacagatagcccttatatagcatttactgcactaagtcctctgcatgagttcattcatttattctcccttagcatgatgtgacaggtgtattctcattttttatagttaaggaaag

SEQ ID NO: 38651 - DNA, 2972 bp, Bovine  19866880898617
  misc_feature (1)..(1): n is a, c, g, or t
ncaataaaacagtgtgactggatctctcattctgtttaccacttatgataaaacagggaaacaaatacttcttcactttaaaaaaaaaaatagcagcacggccgagatgataaattacagcaacactcatgtttcatttggtgatacggtagggggaagtggggactgtggcaagcaagagacatacccccgctaaaggacaacttcctctccagtcccaactactgtcatatgaaatggcagctcagtgttaggattcctatttttaagagaaatgagaaatctaggtttttgactgccttgtcctttgaatgaaggctcaaacatttaaaagatgacaaactggaaaatagactagtgcacagaatcaagccattatgcctctagcacctttggctcagatattaaatgagttcaaaagaagactagctctctctgaattgtaccaatcaaagaacgcacagaacctggaagacctgagatgaaccctgagaagtaggaatgttcttgacaaagagagggagaatattccagtctggaggagtttctcattgaatgtgaagctataatcaaagatcatcaaggtatttccaacccccagctgggtcataaagatggggatccatggcaatgttgccagataaagaagacacagatgtataaaaggtttaaaaaaaaaaaaaaaaagctggtaaagagaaataaaagagccttcctctttaaactctatgcttatgtagatcatgtggaagagaagaggttcctgaatcttttcaagctcacacatattcagaggaaaaaaaaaaaaacttctgatgatcattttataggaattctaaaattcagagacatcttgtagagagaaggaaaaagaggaaagtggttgacaaagctaaagattgtgtgtacattcatttatttatagtgtggagcatccactaagagccaggagttattttaggagctgaggatggagccctgaataaagtaggtaaacccccatcttaagggagactctatcccagtgaaggaagacaggtatcaaataaacatataaatacataatatgtcacttgtgccagccacgggactctctgggaaagagtttcagacagagggaacagcgagtgcaaaggtcctggggtgagactgacagccacatgcttgaggaatcatgtaggaggcagaattctcctcccttccctgattactcccatgactatgcattgggttgtccgaaaagttcattggggtttttccataacatcttactaaaaaagccaaattaaatttatggccagcccagtatgttaaagtaattctgccactgacattatgattactaatcaaaaaaattactaataatttggccttcactgaggattatccaagtggacctaacctaatcatacgaatattcaaaagcagagagttttctctggctggatacaggagggggagtcagagagattcaaagcatgacaatggtccaaggcacccttgctggattggagatggaggaaaccatggggcaaggaatctgggtggcctccaggagctaagagtggctctcccttgacagccagcaaggaagccgggacctcagtcctacaaccacaaggaactgaattctgccagtaagtggaatgaattctggagtaaacttttccccaggggccctagacagaagtccagcacacaagctgattgtagcctaagctgaaaatgtggttgagcccacttgtagttctgatctacaaaaatgtgaactaacaacgcatggattgggtgttgggggttttgaggtgctaccattgtaataactgatgatgctgcaacagaaatccaacagaaacagcaagggcaggagtggagttagcaaacaggactgctgagaaggatgaaatctgagagagagctagaggctagaaaatccaaagctttgtgcaccttggtcagtccactacatttaaggcaaataagaggcacaggttgggagggtttaaacagaggaaacgtgaccttgacttgatcctgagagttcagtactgcttgatgaactgatacccagagaaagaactccactgaaagagttcccgaggagctccagaggcactggtacataccagattataaaatattcagaagaagccagcaaaacaaatggagaacaggcagagagtttgggagatggagcatatcaaaaacagcatttaagatacgccagcaactgagaagagtgaatccatcaagagagattacatgaggcagcctgaaacacaaccacacttcccactttgctcagttcccacgtgcactggagaaaatgcttttggtccaggcatgtttctcgaacagacatatctatactgtatagattcagcctcaggaatatctcgagctttcccctatgccactctggtaaatgattaatgtatgattaaacctgatgattagccacggccaggaatttgatagctaatagtcagagactcgggggagggcaccttttattagcagttgagtgccttgcagcaaatgcctcctagagggaactgggggattggaaagatgactaaggagccccatggtgggaaaaattaaaccatagacccatgagataataacagcaatagagagacaggcaaagcttcccacgcacatgcaccaagtcagaaatacctcaggtataattaaacccttctccagaatttagcacctttttgttagaagaatctttacttgcagttctcagcattctgttgccttggcagaaaccctatctcttgacatttgagaggtttctgtaccctttttcaaagaacagcactggcaagcatgcttttgaaaatatggtttgtagccatggatgactttaccattgagtgtatacactcccatcccacctgaccccaggcacaatctgttcattccctttatctgccttctctaatttcatacccacatttcac

SEQ ID NO: 38652 - DNA, 1205 bp, Bovine  19866880912373
  misc_feature (1)..(1): n is a, c, g, or t
nccaggccctcgcacgcgctaagtttccaataaaagttttctcactttaaggttggaggggagtatgcaaggtgtgggccctgtgtctactgagtggcttggagaagaaggagcagatagggttctgggtgtgactctgctccactgccgggactcctctgccgcggggtggggaaggagaagcgcttctcacctccttccttcccgcgcccaccatctctccgtgcgctttgcaggagacctacaaactgccgcaccggctcatcgagaaaaagagacgtgaccggattaacgagtgcatcgcccagctgaaggatctcctccccgaacatctcaaacttacagtaagtgagaagctggcccctctccaaaccagctcctctgcccaaagggcgggcgagggtcacccgccgcctgcaggctctgccaggaactgcagaccagatggctggatcctagctagtggctggctctgtttgggggtacccttctccagtctcagaattttctggcaacctcctgcaaatgagataagaatcatttgtacttgtccagcttggcaccaacaccagccggccttcctttgctagagtttaaggtgattctcagggttctccttttcccacattgagcaaatccagcaacccactttttttttttaacccccttccccgaatccctttttaaaataagaggacttgttttgatgtgtcccttttttttttttacgtcctgtcctttcttggcgatcctcaatagattattagcgtggcagcctttggttggggaaagaagaaaaaagtagaatttaggagaaaaactagtatttaggaagcaacaaaaaagcgtagatgagctagaagttatgacagggtgtcaggaaagaaactagggaaagccttttggctgccagacacagtagaagtctctactagggttgacaccactgcagagaaatgttatctccggattcccctgagttaaggtcagcaacggctgctggaaaaatttatctgtcaaagctttctcctgagctagctgctacttccaaaatgcctccaaagatgggggacacttgtttgctgtcctctaatcaaaaatatatgcatatatacgtatttttaaacatcatctataaacttaaaacttaatttagccaaccaagaacagtttttttatccccctttagagacattcagtggggg

SEQ ID NO: 38653 - DNA, 1672 bp, Bovine  19866881106525
  misc_feature (1)..(1): n is a, c, g, or t
ntttctggaggctggaagtctgagataaggtgtctcagggttggttccgtctgtcccaggcctctcccccagctttgggtggtttgccagcgatctctgattccttggcgtgtggctgcatccctccagtctctgccattaccttcacgtggcatcctccctgtgccatgtctgtctccttgtccaaatgtcccctttttataagcacaccaggcacaagggcccaccctcatgacctcatgttaacttgcttacctctgtgaaggccccctgattgcaaataaggtcacaagatctctttgtggaggacacagttcaacccatgtgctccagcactcagtcatgtgtttgactctttgcgaccccatggactgtagactgccgggctcctctctccatgggattttccaggcaggagtactggagtggattgccatttccttctccaaattccacccataacaaacaccatttctcatcccctgctgcaccctaagagacatcctccttatctatgccagctcaggtgagccttctctgaacaccccagaccacacccagccctgctgtctgcccttgaatgctcttccctcatatctgttgtggatagctggtatctgctgtgtcaggatctggtcagtgcctgtgtcgccttcagagactccccttcataagagcagaagcgtgattgttctgtctgcaaccccaaagcccaaaaccctggactattgacaaagagtatcagtgaatgcctgtggcctgaatgaatgaaggattgagaagttaatcttcatgtgcaagaaatattatgtgctcagtcatgtctgactctttgtaaccacatggactatagcccaccaggctcctctgtccatgggatttcccaggcaacaatactggagtgggttgccatttcctccttcaggggatcttcacgacccaaggatcaaacccgcatctcctgcattggcagatgggttcttttaccactgagccaccagggaaggacagattaatcttcattaatcacaaaagagaagagacaattctaagcaagggtctcagaggcagaaagattagtattccttctggagagaaaggatttgctccagcatccaccaagggcccaacccctgccctcacacacccctgactccctgactaatggtcatggctttcccttctaccctgtcacacagggagaatccgctcagcatagctttgtagggaaggcctcaggaacgttggggaagctggaggtgagtcagaaaggccggtaaattgaacagctctgaaacccgacccttggcattgagctgaggggtggcgggtttgcagaaggtaacagtgcttgctttaaaattcagggggcccaagggagcatcatcttgcagaaaaccgctctagttggtgaggagccaagtgtggtccaggctccaggtacctgggtttgctgtcccaccctggcctgtgaaggtgacagcatggacgttgtcaggtctgcccttcccccatagctgtcctgcactcacctggtaggaaatgaagctttaacttttgtagcctctactctcctgtgtgtgggtaaggagaccaggtagctacatcgagagaccttcatctgtctcagttgaacccactcaacctacccacccacaaaacaattccagcc

SEQ ID NO: 38654 - DNA, 1010 bp, Bovine  19866881132358
  misc_feature (1)..(1): n is a, c, g, or t
nttcatacattttccattactgtactttttacctgtcttcccaaatatcttgtgtaatagacctaatattttgacaaactcacaactattttctaccataaaataagcctatattttctctggggttgggacaaagaggcctgctttgaatgctttgcaaatatcccccattcttcaaagcaaaactttaacttgtcaaggtcctataagaagaaaacatggagtgagttggggcagacgcaaaatactttcttcagagacttaaaccaatagctaacaatgagtgtaatgagaatagcagaaaaccacagggatcaggttaagctatgacactgagcccacactttttgaatatgtttacaacatattcaaatgtttgtttcagtgaaatgcaggcttttaataaaatggagccaaacatttcataaaaagttagggagctgatatctaaagtatgcaattttctaaattgctgtaattgaagttattgttaggtttcaagagagatgacttcaggagatccctaattggtccccaagcatgccaagatttcaccagataataaatgctcccattaacacatgctccctacaagtccccagagaaaactgcttgttcccaggttagtgaagatgccaaacctttcagtgctctgtgttcctgatggtgagctgattcagaagagaagaaggctcacatatacttcttcctagaagaccaccacaggttgttttaggtgtttggtgagtaggtggaggagacaaccaacaattcatgacattaaattcaggaagctttccaagggcatcagagacattgacagctatataattatgttgtttacaaagatgtgtcataagtaattaaattgaggtactaacataagttctatatatctgattgctgaagaagccaggcacagaaaacagaagcctggttgcacatatcctgctcagggttaatgactttattgaacagagattgtgttttcctctgtgaacttgcctgga

SEQ ID NO: 38655 - DNA, 798 bp, Bovine  19866881209802
  misc_feature (1)..(1): n is a, c, g, or t
ntgtctgcttctctgctataacgccagcacacagcccagggatgcttattacacctctgaataaagaaaaaatacatgacaaatgatggggtagatagatgatcaacgatactttcttaagacaattaatgtctcttcactaaaaacaaacttccttctctactcacagatacatccccatacttcactcaaccaaagagaattggaacttagcacttctccatttttctatcaaccaccactcccagatgcagtgcattctggggacctcccatggcatgctaagccacagggaaccttgccctccctcccacacctgcagccctttcttctgattctttttaggaccatcttctacaagaaatcccaactgtcagacctagaaggtccatgaatgaaggaaccagccctggtttccacctgcccacgctgacccagctgaagaaggctgaagctcacaacaaatgaagcatctcccgtctgattgcttcctcactgcctgtctgacccaggctcaggaagcagatgaaagtgaggacaggatcattaggaatcaaatctgtacaaatgaggttgcttacagcagattaaaaaaagcaactcagggtcctttttctgggtattgcatcatttctcacaaggcgcctttgcaaacagcccctaatgatagagcgggcctcagaaggaccacatgaaactgaataaaacatcagtgctgggccaacaggggttgatcatgcattttaaaaaccccagtgtgcagagaacagagaattggctccgatcagccagacacat

SEQ ID NO: 38656 - DNA, 957 bp, Bovine  19866881449077
  misc_feature (1)..(1): n is a, c, g, or t
nagtaaagaactatattttgatgtgaataaagtctctgaaactgtatgacctgggcatataaatgtccactcagttattctaaaaatatttactatgcacttaccttttgcacagggtcaccataaaggctcatttcctttcttgtttgtaatttatgttcactgtgtcaatttagaatatacaggaaggcagaaagtaaactaaaatcatttataattcaatcacctagagagagttattactattttgatgtatacaaatccagactcttttctccacacataaaataataatagctattatttattgagagcctcatccatgctaagaattaggctcaatactttatgtgggttattatttcttttatcctcacaataattcaattcaatatcctgattttatagtttgggaaactgagacatagcaaagttaggaaacttgtacaagattacccagctgataaatggtggggctagaattgaatgaaagtagtctttattattatttgaatacaaaaaaaaattggatcatactttttttttgtattttgctttatttgctcaaagatatatcttgaagatctttccacataataaacctatcacttcattttaaggcactgcagtgcattctaagacatgagtgaactccaagtcattcaaccaaatgctcacaaagacatttaggcctggttttcattttcccacagccatggtgcccataggccaggactggctaggccagtcgcctagggccactcgcctgtctcaacaccatggagttgtcgcttctaggcaccctgaatggcaggccctttcctgaaagacatatcctttccccctggctacatctttactttaagtctctcattattcaaaatttcagaaattctcaatcctcaaatgtcacctgacacttttcctgattccttgctgggtggcttgccacttagg

SEQ ID NO: 38657 - DNA, 1757 bp, Bovine  19866881493079
  misc_feature (1)..(1): n is a, c, g, or t
nttggaaaaagtgacttgccggccagtcaccatgtttttccccagtgaaaggctgactcattgcaacaggcctgggctggctgggactcgagtcagtggcttggaacatgcctggacagtcagtgccttgtctgaaaggctggtctgtgagaagccacgggtcaggggagctgaggccacagctctggggagcactcacatacaaccccaggagccagaggcaagtagagggtggaggtccctatctttcctccctccttgggggcttggcctagcacgagttgggtaaggtctgcaggggccctaccacccagggggaattaagtcctaatgtcccgagacattagtattatggttcttcctcctcacaggacatgcaaacaaaaaaacactgaacgtatatgtacagaaaaccaatcgggcttgattttcttcatgaggttatcttaatactttcctttgaaatatcaaagtggaattgttttacagtctggggcaagagggaggggaactgggaccgctttcctagtgtcccaagaatgtgtttgtctgccgatggggtaattccacaccatgcagagtgcaaagtctgactgtgaaggatccccactccccctccccagactgtcttccctcctcatgcctttgtccatgttgaccttcagggctctttggcaaggactttttgaatcatagttggcttaaatcctggctatgcgatctgcttgctgtgtgaccttaggtaagtcacttgatctcaagtgactaaatttctgtacgtgtcacatggaaagtaggcaagataaatgcatgcagagtgcctggaacagcactcagcacctagtctggctgacatactagatctcttctggcttctccctttattgccctacaaagctgctttttaggaaaaaatactgtcagtcatttacactttagtgtgaataagctcctgtacctactttgtgcagatttttctttctaacctcataacagtttctgcgagatcattaatattctcatttggtgatggaggaaacagactcagggaggtgaaagaacgctcccaaggtcacacagcagaacctcgttcattcaggaaacactgattgaacttctgccctgcctcaggatggggactaggagcacagagatcagtgagtcagacccctcatcttaagaccctcatgggtaactggctgtatttgaatgtttctgtcatcattctaattgttcagatccctgtaaaccttgtgcatataggcagggagagccttcaccttccctccaattgcctgttccaaagagtcattttcttcctagtgtgcaggactggccctgcccgaggctgatctaccagatcaaaaaagcctcctgccttttctttccacatcatctcctggggctctgctgagtacagatttccaagtctacatcagaattccattcttgtcccttcttttgcacttcatgatataatatatattacagaaacacatgtctcattgtaaaagagagagagacagaagagaagagagaagagcaaaattttcagagtaacagtaactccaggtcttgcaaagatggctaaaattttgttgtattgtctgccagaactttctcttatgcaattagaatataattgtgataataataataaataatataattgtgataataataataataatactctaccacttattttaactacccctgacttggagcttcctctgtaccagatactgttctaagca

SEQ ID NO: 38658 - DNA, 1039 bp, Bovine  19866881802853
  misc_feature (1)..(1): n is a, c, g, or t
ncaaaatgtttgcgaaagtcaatggcttgcttacacagtggctccttgttggaaaaagtgaccattttggttgatattatctatgatttgataatttaaaaatatactattgaaagcatgtgatagagtccagagtttgactttttcatttattttcatctttttgtttcaacattttaagcagttgttggagaatttacttgctgatggtacagtttcttgaatttggcttcaacaagctagttgtccttggtctcatttttccagttcaacgtatattatttaactgagagtacagtatgaagtgcaacaatcataagaaatagtcgttgaaaatgtaccatttccattcaatatttatgtttatcatttatatccattttatttcaccattttggatactgaggaataatacagtgttaatgttctttcatcttagttttatgacttgtttcctctatttttcttaagagaaaaaagtctttctgataagtgaagccttttaattgtggtagaaatcctgactatttataatgttgcattgagaaacagtagtctcctttaacatttttgttgtttttttctttgtttcaaatgaaatgatcaactcttgcaatgttagtgtggcccttagccaaagccatttatttcttactttaataaaggggtcaaaaattttaattgaatgtatagcaagtacttcagaatctgctcataaaattgatattggatgacaagggttgtagacttcagaaaaggaaaagtaaatttgtgtctaccctgtgctttattaaagtaaaagttaaaaatatagggaattagtagtagtagaaagcactgatggataaaaataagcccttagactttgagcaacatgggttaattaatgatacatatatgtatatgatatttatatgtgtatgtactattgtgtgatttacagaatgctttcactttatctcctctcatcatttcttctatatcattttgatataggtcttgcttaatatcattttgatataggtcttgcttagtatca

SEQ ID NO: 38659 - DNA, 1201 bp, Bovine  19866880396959
  misc_feature (1)..(1): n is a, c, g, or t
natgagggatgggaagagggtataggtgtgtgcaagcatgccaaatcagttcagttgtgtccgtctctttgcgacctgtggactgtagcctgccaggctcctctgtccatgggattctccaggcaagaaatactggagtaggttgccaggccctccttcaggggatcttcctgacccagggatctaacccaggtctcctgtgtctcctacattgcaggtggatatttttttaccactgagccaccgggaaagtcctgtgaagagatttgacattcaaaagatataaacatgtacatacactgtatctagaaatttctcttctggaaagaacttgaagaaaattcactagcatgctcaaaaatgaatatataaaactgtttattatagtattattataataacaaaagaggagaaataatctacatgtttaacaaggggttgattaagtatgttacatctataggctggaatttttccacttaaaagctgacatacgtatgtatatttatagctatgggagataattagttaaatgaacaaattagattttgactatgtgtgcatggagccatcaaagtattatttatcctacaacaatagtagaatcaataccaaaatattatcaatatttatctctagatggtgtgttacaactgcttttgctatttatttatgcttttctgtgtttttcaaatgttccatcaatgaattgctttttcaatcattaaaaacagtaaattctataaaaatgtggaaaaaaaaaaggcccagcatgaaactgaattggaccaccctgcctgcccaactttgcctcttctagctacatggaagaacatcaataatgctactttcaaatgcaggaatacatattttttcacaaatgtttttgcacgcatattctatacattgttcaaactttcaatatgttctactctgtaacaaaaaattattaataccagttcagactttgctttagtgaggctcaattttctttatttcactatttgacagttgcattttttccatttattcagaaaacaaaaaaaaaaattcaaggaggcaaatgaaataatgagctttccttgcactattggaaattaatttgctaagcagaattttgagtgggatgaactattctcaccccatccagtaggcatgactaatggttacttattattagcctctctggtggtctaattat

SEQ ID NO: 38660 - DNA, 2510 bp, Bovine  19866880484911
  misc_feature (1)..(1): n is a, c, g, or t
nttataattttatttattcatttatttttggctatgctgggtctctgttgcagtgtgagcttttttctggttgtggcgagtattagctactctgtagttatggtgcgtgggcttctcattgcggtgattctctcattgcagagcacaggcactagggaactcagggcttcagtagttggcggtttccaggctctagagcacaggctcaatagctgtgatgcacaggcctagtggctgcatggcatgtggaaccttcctggactaaggattgaacccatgtctcccatattggcaggcaggttctttaccactgagctacctgggaagcctaaccatcgggattaaaaaataggaataccctgaaaactttttaatttctgtaaaatgttatcaaagtttggaaacataaataattttatttccttggatactttataggatcataagagaaagaacgtatgtgatgagttgagaaagcaaagattaagacaaatgaattttctttttaaatagagtagctagttttaataaataaacaactgagtttgaaaactgccatactagtgctcataattattaggtgtgtagtgaggatgaagacttttgtattaataaacgtgaattataggcaaatgtagagatatggctctattaccatgccatatccatcatgtggccataggggtaccacttttaaagacagtagaactcccctgcacacactgatatctgtgaagctgtaaatcgactgcaatgtcatggctgataatccatctggagagtttaggagtttgtttccagtgcttaggtggtctggcccaatcctctgtggcccaagctgtttggagaccccagcctggaagaaggcagttctggggaattgttattgatgtaaatatagctattgcccgcaaaatcttaaaggctgactttgtatacttcatcctacacaagccttacaaaagccctatgacatcataagcagcctcaggggctgctgtcatccccattttacagaacacaatgcttctgttaaatcgatcactgcagggttgaccagattagcaacttcattagttactctgcctggggctcctataccccagctcctaaggcaaggtagggtcctcctccaactgcctggaaaaaaaaaagcaattccaggcataagtatattatcagtgcatttgtcccaaggctgaaaagaaaccagaacaaaaaccaacccaaagacctcaagatttctatttctgtttccagctttctttctcttggctgtgtttttggttccagaccttaagctgtcaaagcaaaaatggaaaatttggaaagtcgaggacaatgttgaaactggagataagttttaaaatttttgaaaaattaacttctaatttattttgataaattttaaaaaattgaagtaatttgaagttcgtatctagttctcagccatgattttattgtattcacttaagggaaaaaaattcataaattgagaaaagatgttcatagtcctgctaattgacatatatgaaaatgaaagtgttgcctgttccaattcatagttctcctaatgacacatatgaaagtgaaagtgttacttgctcagttgtgtcagactctttgagactccatggactatagcccaccaggcttctctgtccatggaattctccaggcaagagtattggagtgggttgccatgtccttctccaggggttcttcccaacccagggattgaacccaggtctcccacattgcagggagattctttaccatttgagctacttggaaagtccaatgacatatataataactcttcaacttgttttttgaataaaattactgacgtgaaagttttagaaagtgtttcaaggaatgacatatttgtcatatctcacatccatttgtccttcttttctttgatcacaactcagcccaatttttggtaatcaatcagtcattatgagacctgctgctgctgctgctgctcagtcgcttgtcgtgtccaattctgtgcgaccccatagacggcagcctaccaggctgccctgtccctgggattctccagtcaagaatactggagtgggttgcttccttctccaatgcatgaaagtgaaaagtgaaagtgaagttgctcagtcgtatccaactcctagtgaccccatggactgcagcctaccaggctcattgtcaaagaatttctctgcatctattgagataatcatatggttttttatttttcaatttgttaatgtggtgtattacattgattgatttgcagatattgaagaatccttgcatccctgggataaagcccacttggtcatgatgtatgatctttttaatatgttgttggattctgtttgctaaaattttgttaaggatttttgcatctgtgttcatcagtgatattggcctgtagttttctttttttgtggcgtctttgtaaggttttggtattagggtgatggtggcctcatagaatgagtttgaaagtttaccttcct

SEQ ID NO: 38661 - DNA, 1879 bp, Bovine  19866880581918
  misc_feature (1)..(1): n is a, c, g, or t
ntctcttctcaggatttaaaaggaaggccctgtaataaaagaacgtgtaacacgattgaataagatggtgaagatgaaaagggcaaaggtttcagctgtttgtgtttttagcaacttgcaaaacttgctgctaattaaacaagccctatttgggttttctaaaacaatcaagttgaaaatgtgagtactagaagccaatgtggaactggaagaacccaagtattttctatttcggggctggtttggatcaactgagctctgaacaatatctgggagatgacccagaattctgaatttttttgcatagtcattagtttaagaagtaagccagctatatataatactaggaagtcttctgggtgccgatagtagtgaaaacatacggagttaatatgcagagacttgtatgactcagatttcctcttcaatgcataccagataatgaattgattggacttttaaactagtaatagatttctttttctgctatgattttcttgtctttggaaagtgctttattttgggtaaaactgctttctagggtgttggatgtagttatttgtaatacctgcacacttactctgcttttgttcctctggttgaaaagttagctctgttgctgttgaatatatagtccctgaaacatatcatgcatctttttccaaataatggcagaagtataaatgggctaggaggcaacacaaaatcagaatgagatctggccagacctggcctggggtgcaatgactcacttgaccagagcaaagtaatgtgcagtgagagatgctgcatcaaattctgctgcagtggccatctctgttccactcagggtcttcacctctggtatttatagtgtgtatatgtggcctcttgaggatcatccatagttcacttaaaatactgcaaataggcaacttgccttactatttttgtttttgaagaagattgtattttctgtggcttagtctcttttactcaatttgtatctacttattccttctttataatatgcaaagagtaaagtgttggggataactatattttatggggaagtcctaaggcagtcttagacctcgagttggggtctttgcatttttacctctaatatttaatctggtgttaaatgaatggacaaaaggaagattgaaaaaaatgtgttcaggtgaaccctggctttattttgggtggggcttctttgtgccagcagactttgacaatagttgttaaaagtattgtcttcctgtgaactcttatcatcaattcttcatcatcactggtatcgcaattaggaaaaaaaaaattacaaaaccctgagtagatgtctgccaacctaggtttcaagttcgtttttctttgtagcagtgagtaggccttctcttcctgtcaatcaccttttgtaacctgaagaaaagagaaagttactgactgacaccaaggagaatttctttacattccattctcggtatccaaggggctctgggatttgagactatcaaattagtgtcaatttgaaacatttctgagagaaggaggaaaaaaattggagattacctgaattcatcttccatgtggcccattgctaacatccaatcatagcggctgtcagtcacagagaagggcattatatttcaatgactgggtatctctttaattatagaaatgaataatccagctctcttcttaacagctgcagcccatgaaatgaaaggtttgaacctgaaggatcaacacaaacagaaaatgcagcaatttctattcctagtttctttcctattgtctgaacacaatatttccttactgacagaggaaatgaatgaggtctgaaaacacttttctaggcttcagtggcatttaatggcattcccttcaccttctcagg

SEQ ID NO: 38662 - DNA, 766 bp, Bovine  19866880694840
  misc_feature (1)..(1): n is a, c, g, or t
nactgtggaattatgtttctcctttaaatggataaaaagtggaatttgataaaggtgtaccacatgaagccacgtaggagttatctaagataagggtatgcttttgatgggttaaaatacttagctttatttctaaattaccacagtgctaaaagtaaagtcttaatctaaataggactttgtgtattgaacaaataatattttataagtagaaatgtgagttctacttccttttactcttttaaatttagttttaggagaaaaatatgataaaacatattcatccttaagttctgtccactttaaaaatatttttgctaatttgttctgcttaaaaagaaataacaaacactggttttcagcatccagttcctccaagtcaggcagatcaaagttttgctgtgtttgaggtgtgtcattgaacagaaagccccaggaaccatatgttctacctgtgtcttgcctcttcaccaaaacttcacctgaattaaagagatgaataacaactgcttttgatcatacatcaagaaaggacatcctaagtatattaataatttctgtttgaaacaaaatcttgtcatttgcatatgtaacccatggtgactattgaatattctctttaattaatttgggtgcccttgatctacttgatgaactgccctgtatattcacatttgctgctacaagaatgacaaaacaaatgcaaaacttgaaaatcttcccaaaagataaatattctttgaatcaacacagatgtgtttagacc

SEQ ID NO: 38663 - DNA, 1793 bp, Bovine  19866880720732
  misc_feature (1)..(1): n is a, c, g, or t
naatgtttttactattaaatttgtttcagtatattttgcgtgcgtgccaagttgcttcaatcgtgtccaactctttctgctcctatggactgaagggcacccaagctcccctgtccgtgggattctccaggcaagaatactagagtgggttgcccatttccttctccaggggatctttctaatccaggtatcaaacttgcatctcttatgtctcctgcattggcagatgggttctttacccctagtgctagaggtaatgataattatcttgatgtgttcagaattacataaacaagaaaacaataaaaaacctttctgtaaagtgaaaagtaggtttgaagaaggagaagctgagagatctgatagcttaaaatttgcccacttcatgaagaaccatgtagtcatgctaaaagagatagacactaccctaatagcaaagggaatcactgaaggatttcagggaagaatgattgatggaatggcactacagaatttataagaccaccatggcagaaagtagagcatcaaggcagagaaaaataattaagcatttagaaattcctataattttactgaaagacagtaaacgcctatataggaaggaattgctgaactcagggaaggatttctgaagaaatttcatttgcggatcatttgtaagtgaataattacaaaggagatttccaataaatttaggcttgatgaaaaatttcagtcaaaattaacctaaaaaacacaagataattcatattaaagaataggttggtgctttgtaggttttaaatatatgaagtttgagttgactgtagaactcctaagtagaattcagtgaaaatagaaatcaaaggaaacagtggaaaacagctgcaaataaggtttaaggtttagcattggatcctagtaataagtgaaattttttcaaagagggataaaaatgttaaagggagtaatctgggaagaatctggtcactaggatttggacaaaaatggaaagaaatagtttaggcagaagacacaaatctgtaccaaacttggtcacaccattgtgtttattctatgagcagattaactggttttattcaatgagaagcaacatttctactcatttcatctcatgttctttctgactgagatgaaataaaatgaaaaatcccaggactatatttctggaatcatttccagtttgaaatgccttggcttatgttttggctcaaatctcaaagggcttcctttttttgcatttctaattatggggcatgatataatataattttccctaaattaaatctattaagcttgatattataagcactcttcctgtgccctctctccctcaacgaagtcagttttgcaacaaaagtgggtatgaacctgaaggttttgcttctttgaacagttgaatgatctaattggatatgcatcattaagtttaaaaatttataactattgtggtttttctgctgagtgactttcttttttcaaggcttattagagaatccaagcccattctcatatcctcctgatttccattgccacatcagctcagataaaccattgttgagaatgctgaagtcaagagcacgctgatctttcatagtagaagcaatttcctgttttcaaaaacttgtaatgagatttaaaaaaatacaaacaaatctaatatatccgcagtagagattacagagttggataaatgcagacaaactgatgtttaaactgttgtaaccgtctcgaacatcctattattattttgccagcttgattctctactcagggagtgggagagggtctgg

SEQ ID NO: 38664 - DNA, 3381 bp, Bovine  19866880803428
  misc_feature (1)..(1): n is a, c, g, or t
ntgaaagtagaccatgaggctggataaaggcaagtttttaattcttaaaaattaattacatggcattactcttatcagtacacagaatgcattaattatacaattaataaaaagatgaaagggctgtgttttttttttaatttttttggcaattgtaatgcacaaggggacatttgtttttatacccaaaattgtccttcaggcatttctataatcttcttaccaggcaatgtcaagaccttaaaccagttagtaggaatactgaatggagtgggtcttcatgttagcgcttaaacacatttcagaaaggttgtggatttccatgtaattgggatctaaggtgtaataggtttaatttgaggtcctctttaaaagaacaacaggaaaaggcatcttcagcaacgtctaatagccagtaagaagagacaatgggcttccttaaggatgaaaaagtgattatcttagtacagcagtcatttctttgagtgcctccatcatcagcatggcaccaaaaatgccttgtgtgtgctaccattttatccttggaaacatcacagaagaaatgtggtagtgaagacagctggttctcaggagcagagccacaggccaagcccattttaacaaactctgagggattatccaaattctcttgctatcttgcaactatgttttattgactattacttggaatgaatggtcaatcagccaaggctaggaaatctgtttttgttacataaaaattgttgatgtaatgtacagcgggacaacacagtcatattggaaaagtatttgacttagttgacctgccaggaacattgtgtgtgcaaagaacactctacaacttcatctcacctgaaaagatgtctttcagctactttaagactatgttgtgaacacgtgaagaaaatactgaaatagactttaaataaccccaggcatttataattttagaacaaacctggagcgatatcccctctgtaataacaatgactacttcgctgtttgggatagagaagggggaaagccctaaaaatagaaaatataagatcacaattagtgctggtatctaagaagtgaataaggagcaacccacttcctcctctcccattatctctaccagtccccagtctttgatttgaattattagtataaagtgatatccaaactcagcttcaactccctttctatgtaaatctgattgcataggctatgatccctaaatattcagaaatataggatctactatgcgtctctactgccaattctacctgccctcaaccccaagccacccacagacctacacacactacaaatactgtttgtctttcctgtaacctgtcatcttacatcttgttgctttctgcttttctgtccctaggcatatcaacagtccaaggttaatgatgaggcaccttgggaaagtggtgtttgtttagcttaacgtaatgttttaaatgtctttctgtgtgtggcagtctcattgcttctaaaacaaaacccatctgcaactaaacctgcattccatattaacacctcagacacattgctgtagttttgtgggggttttttttgtcatcctgtcctggttgaaaaattatatgtgagactggaggtggcaaacaatagattcagcttgatgggttcaaactttgaaaatcacatttctccaagccttattatcaaagtgatgtgctgtagcagcatgtccttcctaagtttcctgaattcctggtaaatagactaaaggaactgggtatttagccagagctcacttataattctcttggaattataaatatggattttagtcatgttcatttatgaggttttcaattcttatgagagtaggtaacaaaaatttcccctagatattacgaaattctttactttacagagatgaatttgttcacagtatcaaatagggaagaccttttatttccaattatctgtctcacagttaagctaaaaggggagagtagctgtcaccagggcacatatttaccccccgtcccccaccccactctgtgtctaagtaggtaagtaggctgtggctctctttggatagtgttgttgatgttcagtagctaagttatgtcccactctttgcaaccccatggactgcagcacgccaggctccactgtccttcattatctctcagtttgctcaaattcatgtccacggggtcagtaatgctatctaaccatctaatcttctcctgtccccttctccttttaccttcaatctttcccagcatcagagtcttttccaatcaatcagttctttgcatcaagtggccaaagtattggagctacagcatcagtccttccaatgaataaagaaagaaagaaaagaaatacctcaatgaatattcagggttgatttcctttgggattgactggtttgatctccttactgtccaagggactctcagagccttctgagcaccacaatttgaacatggttagccctcagccttcattatggtccgacgctcatgtccgtacatgactactggaaaaaccatagctttgactatgcagacctttgttcccaaagtgctgtctttcctttttaatactctttccaggcttgtcaaaggtttcctttcaaggagcaaacgccttttaatttcatggctgcagtcaatatcctcagtgattttggagccccaaaacacaaaaatctgtcactatttaaatttttccccatctatttgccttgaagtgatgggaccagatgccatgagcttaatttttgaatgttgactttcaagccagccttttcacgctactccttcacaatcagcaagagactctttagttcctctttactttctgccattagagtggtatcctctgcgtatctgaagttgatatttctcctggcaatcttgattctagcttgtgaccactgcaccacctaggaagctctctttggccagtgacatggggccaaaagagtctattgctttcttactaacactttaagatccaatggtcgattcatctcatttcctttcccttgccaagtaaattctgggagttcatttaaaatggagtgtccacaggcttcggattcccaggtggtgcttctggttaagaatctatctgccaatgtcagagatgcaagagacatgggttcaatccctgggttaggaagatctcctagagaaggaaatggcaacccactccactgttcttgcctagaaaatctcatggacagaggagcccagtgggctacagtcaagggggtcgcaaagagtcaggcacaactgaacaactgaacatgcatgcatgtccacaagcttagattagcgggtaacgatagttcattgagattctactggccctgactgagaatgaaaacaaaacaaaagaaaa

SEQ ID NO: 38665 - DNA, 2045 bp, Bovine  19866880810520
  misc_feature (1)..(1): n is a, c, g, or t
nattacattagggcaaaactgttaagatcttataattcaaatttggaaataatcaaatttggataaggcatggtagtggtggtagtgatttagttgataagttgtgtccaactcttgcaacaccatgaactgtagcccgccaggctcctctgtccatgagatttcctgggcaacaatacaggagtggattgccatttccttctccaggggatcttcctgatccagggatcaaacccatgtcccctgcattgcaggcggtttcttgcattacagatggatagtttaccaagccaccacggaaggccctgcatagggcataactttcaacaaagtgaagtgattcacaaagatacaaagctacagaattaactggaagagcaatcacatgtaaacaagccaaagtttggaccctcaggaatttagaaagatttctacataatatcccaccatgtctgcttcataggcaggcttacataggaaatttttttgttgttgcctttgctcccagtgaaatttgaatctaaaaaaatccacaactcaaccattccatttcattattgtgcattgattgctcatgtgtatccttctaagaaagcagagaaacacagacggccgttacaaatcctcttactgtagaccgatattctagtttaaaaaacaaaagtggtagaacacaattaaaatgactattgaaacgcatcttgaatcaatataattcctctaatcagataagttagccaagcaagaaaggagaatcatttctctgcctgccatctctggttcatacctactaagctccccctaaaacacaaacaaccgctgaatggtgaatagcaaggataaattgttttgggaacttacgtgaaggtaaaccattctgaactgcagaaatggaaagcaaggaatagaagttgccaagatttttggaacattgctccttacttctgtgttttttgtatctaattagtttagccttttttctccttaggaaatatgagcattacaaatctttctgctgccaggcaaaatactttaagtcacaaattatgacatttcacacatcttccaagcctgctttctttgctggaatactgattacctaaccgatttctagggactctgctttccctcttctctaattggaagctctgttccctcctgttcaataatttaacttgcataattttgctttggaaaattagacctatctaattttccatggttttccaaactttaatgtataattttattaaatacatgtactatatagagtgttaactttattagaaatacatttggttttgatgtttttatattcctttatgttaagtgtaatattttatattctttatcttatctttatattccaaaatatgtgaaataaataaaaaatgttatactttttgaacttagcttaatgaaaacagtgtatttgtttcatctttgtcattcttaccagcatcctgggtcagttgcatcagttcatccctagaatatttgcattattctcttttctaatctttctgcatctgttctattccatgcttattttttataccacccatagatgcatcttcaaaaatagtgtttcaagccttcatgaataatacattacttagaagagaacactgagttttctagagaacatagagttttctagtagttcagagactagtaaaatctggcttcgggttttcctttctaaaatctctcccactcttctccacttatagaaaaaaagtcagttatgatgcccaaatgacattttgcttatattctgacacttgcctgagaactatgcaacttgaaggatcaacagcacatatttacacaaactttatatcaactctgaactccaaatttctgtacaattatcatttacttagcgtttactggagaagactgttcagggtcccttggactgcaagatccaaccagtccaccctaaaggaaatcagtcctgaatattcattggaagggactggtgctgaagctgaaactccaatactttggccacctgatgcaaagaactgactcatttgaaa

SEQ ID NO: 38666 - DNA, 1979 bp, Bovine  19866880849974
  misc_feature (1)..(1): n is a, c, g, or t
naaacatttaaaacattcagaagggaataggtgatcaatacgggttgacaggtctcacatattcatattggttagagctcaaatggtataacactccatgtgaagattaatgaattttccacccatctgttatattttgtgaattaaggacatagtaaggttatagtattcccagagttagggctaaggcccttttactgaaagtcagactgcataaatcaagttgattcttttgaagagtaaattgtcaatgatctaaatttaatatcaatggttcttctttgaaaaacaaagatttcatagttaatgatttatttgaaaactaaagatgttatttaattttttaaagatacctgcaaaaattgttgaaatgcaatgttagactactccaattagtaagtaaaaatgggcttattaaaggtaggccagaaccttgtatataagaaaataaagtatagaaacacatttttcacatctgttaatcaataaacatctctctgtaaccaaaataaagtcataatatattttctaataatatggaaaacttataataaaagactaaaatgactcagtcatgattctagaaatgaggaaataaaaggaaaattaatgcaaagagatagtgtcccaccatccccttttacttccctttatatataatgatcacataaagtgaacaggaggaaagtcgggcttaatttatacagaacagaatggtgacttttgaatctatatttccaaagaaaattagattttgaaataaaaattggcaatctagctaaaactactgaaagtcagtactgaaagtcaggtacagtcaaaaaaagctttaagaaacaaattaatgtggaaagatgtgaaaacaaaactaaatttctaagtggaaaatggccacttacatcaattcttgtcatattagttaagtgttcagttttgctcagcacatgtaaaaatgaaaggggacttttaataaattactacagaaaatgtaatggatcatattttgatttgactggaatttattgtagcttctgtgatgatccaatattcatattttaatttgtaggtatgattaggacataccttttttaagcctttcattttctatgaaggaaaaagacaagataatttaaaaacaacttaatattcctgaaatgtttggcctgagaaaatgaatagaatgtgtcttttgattattgagcagtgttattttaaaattctcatgtaggtcatttcttactctagaattggatcaatcaaaggaaggtgaatcagcaaggcacaaaagaggaagccaccttgaaatggattaagtgaaataattttgtgaacatatggcctggaaattaaattgattcagctaaacaagttatattaaatagatcaggtaattttcaggcatctgatcaggtgatcacaatttaaagcaattacactatttgaggcttgtagaaagtggagactactagtctatggtttatggatagagaccacaaaataaaattgaagttgttagtaaccttttaagagttttccctttatgaaagggtgcatgtaaatacaagattcttgatggaagccaccaaagaggttttctaaataaaatttatcacacatccaagttgtcaatagtttattcatttatttactcacttaaatgtttattgagcactgtctctttttatcctcattttaaaatgttccagttttcaaatttcctattctagactgctgagtcaaaatattatatgactttatatgtatttagaacagaaaaacaggtgtctttaattgataaactttacctgcagaatctcctctgccataatgatattttttttttcttggtcttatcttatgtttgagctcaatgtaaaatacacatttagacattacctctcttcatttggcctactgtttccaaatatataggtatttcaaaattaccagaaaggagctggttactttggtaacttaag

SEQ ID NO: 38667 - DNA, 1115 bp, Bovine  19866880854318
  misc_feature (1)..(1): n is a, c, g, or t
naagagaaagacacttggcattcttttgactatgcctagcctggtagagagaaacaccccatttcagtatcaattctggatttaattcttagctgtggcattaagagttatgtaaacttggatgaattgctttgtcttatctgagcttcagttcctttatcttcaaatgaagatacttaattcaaggggttatataaggagtaagtgcacattatgtgctccaaaagtagtggctactctctattgatcacacaagttgggctgaaaccattgcttcatttcaaaggagtcaaggaaaatgcccttggaaaggaggcatttggttgatgaaaggctcttgaaaaggaaataaattttgactctattctatgtagatatgagtagcaaggaaagatttttgagatagaaaatgacataatgcaattgatattttagggaggctttctggcaatgagaaatccatgaagaattgaacaaggaagaagctggacaaagatagttctgttcagggaactccacgatcaatgtttttaaatgtctatcaagaatatagagttttcttttaaaagcctgtcccatatattttatttgacatttctcaatattctatgaaatataaagacattaatgccagatctttacatagtgaaagtaacagaaaaaagatattttctggcaataactgaggaactgaatgaccttcaccttccattagcaacaactggaatctttgaagtggcatcagtaagaaatgaacaatgagaatgagaaatgaccacaaaaaggaaagtctattaggaatttcctgtaaatggcaaggagtaaacataaaattactttctttcaaatgtgggcatagttataaaatgcctggtttgacatcagaaaatatttagaaattttaaaataaaggaagcaaacataacacagaaaatcatctcctattataacagcaatgcatctcaattccatgttggtgagagctccaaccaaaaatacattcacagtttcctaagctggtatgtactttagtgtttactctattttctagtattgagtcacatatgcttcaatcaccagaaggaagcatttatcagcttggaaaagttcctatc

SEQ ID NO: 38668 - DNA, 2687 bp, Bovine  19866880901092
  misc_feature (1)..(1): n is a, c, g, or t
natccttatagctttaaaattatgtgattctaaatatcaaagatgtttcaaatttttccttcttttggctctttgaatcaacatttggacatagacttaatttgacagtttcccccctaaaggggtattagattaatggatggttagaggtagtttatatattctatccccaaagtaaagctttatctgacatcctgaaagggttctgggtacattagggaaaataacatttccattccagattcaatactgatccatcaaatctgttcgcctgctgtcagcagaagttattgccagatgcttgagagaaatggccagaacattcctgaatgccaccagttagctgcacagaactcagctgtggggaacagttctctcttgttcctccagatactgcttagacattatgaattattagctttaattatatttttagtagcatggctctgagagtaaggatcagttactttcaaatcctccacaaataagttgtaaaaacccagtcacacagttagcttaactgtttcagtaatagataaatgttccaatgtgttctaaataatcccaagaaaatatgctggaatctgtgccagtttatttcccacttctggaactatattgctttaatgaatttcaactttttaaaaaacatagattttgatgttttggttagagagtaagtccaagtagcttcaagttcagagtgaatgagtatggatgcatgaggcatgcatacgtttacatttaaaattattttcatttttaataatggggcaaagcagagttttagctaaaatgatggcagtaaaagcgatccccactgccaagggtgctgttttggcttctctaaggttgaactagctcagagcatgaataggcaacttcatgagagatgaaacgccaagtgctctaaggcctaaatcaaataaagatctagttaagtgcctaatgaacctctcaagcagatgtggacagtttcaatatgctaactattgtataaggttattaggcagaaaatgcaaaataaaatcatattaaaccattacactagatatggaaaatggacaaagcagaatggagacttttcaaaatgcttttggactgaacttcagttcaagcttttagcatatgtaagctctgaatggcttcttttaaaaaatgatttcaaagatagttcagacttaaaccaagttaaatcccaattgtttcagctcctgttagagatcttactttttgattcagaggaaacaaaaattttaagcttcttccaatatctataaattagaattaaatctgatcctgttgaaaagaaacagctatcatcttttaaaggtttccacctagtggcaaagttattatgagcaagagataggacctcgatgattaaaacaaatagacacagtctaattacgaaactgtttaacccttactctttagtaaagttgagaactgtgcattaaatacattgcagatactaatagcaaaagtaatccactaaccaggcacttagaataagacctctttctcttgggttcacttagattgccagctttgttatatctttgtgccttctgtgatttatacgattgaactatattaaagataataacaaagaaaaaggcagagaatacacatgttttcttcataagattttgtcacaacttcactattgacttatgtaacaaaatcttataaagcacttggaatagaatttggaaatatatctagagccaatactgcatttaggtgacatactcttatggaactgatcctagaattgtaaggatgatacttgtttaccagtgtgaccaaagacttccattacttaggtgaccagatgcaagaaatgcgggttttaaatgtttacactatttaaggctatctttatttgaagtatacattttagcaacacactctgtaaattggccagggagagagagagggagtatccatgatttggatacttcctgtggacaatcaatcacatgtaagattcataaatccagtgattaaaatgaaaagagtaccacagacacttacatgtaactaacatagtctagcaagttaccttgtatgtacattaatcatacttagtgtagaaggctcctatcagtccaccttaaggaaaagggcaacatagtgactgtttcacattactttcccaacattttgctatgttgttttcaggtaaaagtggctaaagtcggccttgaaatgccaaagaaatactaagtgcattcaggcacctgagctcattgtgcttttgaaattgctccgttttctctgcaccgagtacactgaccactgaggttaatcgtcatcaaacagggctttctgacctattggaaatttagatcttagcttactttgtgttccagcgtcctgtgctgatcttcccagcctataccacgagctgtagaaaacaattatgggcttgggaagagatgaagccaaagagagcaagattagcgtcctgaagtttgccttttctccttttcttcacattagtgtttttctccacaatgagttaacagaatacggtggagaaaattctcccatagtttaagaagttgaacctctttccttgcttaggtgatagcactgacacttcacacagagggctaatttacatttaatgctcggaaattaattacagaggataaagataatgtaaaatcacccccata

SEQ ID NO: 38669 - DNA, 988 bp, Bovine  19866880935805
  misc_feature (1)..(1): n is a, c, g, or t
nctgattttatgctcttttagtctcctgctcaccatccctaacaagcggtgatattacccaataaatcaaagacgtctgcttgtcactgccagatgcttggccacatcgccgccgattatgagacatacaaaaggacaatttcatgtagggagctcagcagaggtgttccactgatattctgtttgataggaaatcagcgtgaggtgaatgtagtaaaattcaataacttttatgccttatagcaatgaagaactaagtttaaataaaactgggaagtaaattaggacctcaccttcattgattctttatttattctttttatgattctaaatcgcttcctttatcacttcaatacaggttagagaaagaagatatattttaatgtaatcagtttatttttctgggtccaataattcagcttcctttcctcaatgcatcaaaaaggacattttcatccatttattaaaacatacattatttctaaagaaatatgatagcatagtaaacttgtgtgaatggtaatcaatgtacaagaactattaaaagttgctttcaactattcaaaactatccattaggtattaattgcttgcattttccaatatttgtctcattagccaaattcctgatctaccataatgtacacataccttttttgtagtataaataagaacaataagagcaaaatgaattcatagtgctcaaatgactatgcaagatattttatgaaatgttccttaataaaatattgaagtttaaaagaaatacaagaagttcatatttttccttccttcaaattatggaaataaagtaaagtagagatatttttccttaaggaattactgtttttcttcccagagaggtatatttatacattgattatataactatattaatttagcatttttgcaatattaacaaattaccaaatacagcctatgtaataaagctaattttatgtagaattacaaaaaggcttatataatta

SEQ ID NO: 38670 - DNA, 4520 bp, Bovine  19866880949525
  misc_feature (1)..(1): n is a, c, g, or t
naatttactttcttgccttgagggatgtatatgcaggacaattaaattcaaactgaagtaacagagttatcatgtcacatattctatcacctttcataacattcaggcaagaattgggagaattgaatatctctaaaactgtatttgtaatacaaggtaatctacttgaatcatcatgtcactggaactctaatgtatgaaactttatactggttcaaactaaaatatccccatggtagtgtttgtatatctctgcatcatttacttcttatttgtctgtgaactgatgtgtatatactctatttaaatgaatgaaaatggtaaggatgataaatactatattcaacctcaacacccacattatacttcttttttatgctgcctttacatttgtaatactcaaatataattccccaaactatatttttcctgctactacaataatttatgcttatttaactgtctctttttgactatgctttatttgaaggttgtcctcattttgtcaaaaacatatcaacaggggagtttaaaaacatatacttataaccaatataaattccaccttatcccaagagtaaattcttattttgtattatttactattctagaacttaaaatatcactgtttgggaattttttttaatggaaagagtattaaataatcaacaagatgttttttataaatttcttttatttaaaatgtagttccacagactaaatagcattataacctggttcaaatctattttgttggacatgtagaagcacatgatcgttatgtaggctatatgtccatttaattttgataaggatttatactattagaaacaaaaagctttgtgttttaacaattaccatgtgaataattatcataattatggtcctaatgcatcaaagtagagaacctaatgtcaaacttcatataataatagacttatgtgattcttttgaaaactatagtgcaagaacactaagaaatgtcaccataatgttagaaaagagtgtcattttctcttgcatttgggaaagaatcaataagtattttactttattttttctcttttatatatgtctttttactttaatttttcactgggggaaaattgccctacagtgttgtgatagtttcttccatacaacaatgcaaatcagccataattatacatgtatcacctcccttttgagccttcctctcttcctctacatcccaccactctagctcatcacagagctcctgactgggctccctgtgctagagagcaacttctcaacagatatctattttacacacgagagtgtatatatgtctatgctactctctccattggcccactctctccttaatgcactatgtccatgagtccgttctctatgtctgcatctccattccttccctacaaatagcttaatcaatactattttcctagattccatttatatgtgtgattatacaatatttgtttttctctttttgacttcattcattctgtaagacagattctaggttcagccacctcactagaacggactcaaattcgttcctttcagttgtgtgtgccacgtcttcttcatcctttcgtctgtcagtggatatctacattgcctctctagtatttgccttttgttgctacatttcaagatactgttaatgagtgtagggtggatacatatgaagcacagttttgtaggaacttactataagcctgcagatgattgtaagacagatcaagtaatgtgtctttggagagtacgagtgttggggttcaaagaaaggagagtttgtgaagcacatggaagggaactttttgaagtgaacattcaaatgtagataagcatttggcatgtgaagatacagagaaagtaagtggcaaagagcaggaagattaagaaaagaaagagtgctggggattggtggagtggttctgtgtgtatgtatttgtgtgtgtatgtgcttgtttgtggatgcacgtgtgtgtgtgtgtgtgtgtgctggagtacacaagagagatgattctagtatgcacagaatggtccatgcattttgaaattttaaaaaactaaaaaaatttaagttaaaaaatctaggatttaaaacaaatagtgctacaaattaaaataactgttatgtatcataactattcacagtatgtcaagaacagtttggcacatggagctgtgaaataaacagcttaatctgttggttatgtgcaattcttatattttatttgtgttttcattattatctgtcctttttacttcctcttctcaagaaaaacattttggaaagcatgggaatgaatgtgttgcatgcatgagttcacactgaatttttttaaaagtatatcattcacaaacttaaggtttaaattacaattgataagtaatcatagatgatatacttcacaacagttgtagtatgggagtctcctaacatattctggaggccagagacaatgaggactaactggagatttcaccgtctctaagattaagtaaagcaatggaaattgtgctttggatatatggctttgactttgtgtgaaatgaattggattgaggagagtttggcaatctaaatagagaagatgaacttttaataaaggctgatagcaatggatatattaatagaaaagaggaaggtatacaagtgtgactatatatggaaagaacaagaacagtccattaatgacaggtaaggataaaagaagtttctgagagtagattgctgacagcatggtagtgaacagaaataaggcagttagaaatagtagacagctggatcatatccagtgttagataaatgaataggatagagaccaagatggcctactgacaggataacatttaattttgaatctggagagagaagtgtaactataatttggaggtaatagttatagaaatagattaaaggagcagcaaataataaacaaagaagaaagatgaggactaattattaatctaaagtatttttatctaagtaatgtatctatttagaacaaagagaaagaggaaggaaaggatatcaaaggaactttgggaaagaaaagaacaagcatgggataattcaaaataatccaaagggaaataaatgtaggatgaatgaagaaggaaatctatcaaaagctcaaaggttatagagattgtgctatgagaaaaaagctatcatatttatcaatttggtggtaaccacaggacttgaaaaaatctcatagcatataatacctgagcattatcaatgtgccagaagttgtactagagtctgaagttataagtatagggatgaataaagaaaatataataatatataaagacagatttttgtactcatggtttttaagtcacagagataatggaaaataagaaacgtttatgaagtgaataaaaggcaaagacattaaataagtatgtgtatattacaagaaggaggggaaaaaagatctgtagtatgaatatacctttgtttttcgaggcatatgtatgattatattaaaatagctttcttttctcttaaacaaaactaattatctagttgttagagttctttgttgttgctcagtcatgtccaactctttgcaaccacatggacggcagcatgccaggcttccctgttcttcattatctcccaaagcttgttcaaactcatgtccatcaagttggtgatgccatccaaccatctcatctgtcatccccttctccttctgccttcaaattttcccagcattaggagtcttttccaatgttggctctttgcatcatctggccaaagtattggagcttcaggttcaccatcagacctaccaatgaatattcagtgttgacttcctttaggattggctggcttgatctccttgcaggccaaaggactcacaaaagtcttctccagcaccacagttcaaaagcatcaattttttggtgctcagccttctttatggtccaactttcctgtccatacacgactactggaaaaaaaaaactgaccatacagacctttgtctgtaaagtaatatctctgctttttaatactccttctaggttggtcatagcttttattccaaggagcaagtgtcttttaatttcatggctgccgtcaccatccacggtgatactggagcccaagaaaataaagtctgtcaccatttccattttccccatctatttgtgatgaagtgatgggaccagatgccataatcttcgttttttgaatgttgagttttaagccagctttttcactctcctctttcaccttcatcaagaggctctttagttcctcttcattttctgccataagggttgtatcatctgcatatgtgaagttattgatatttctctcactattcttgattttagcttttgcttcatccagcctggcactccacatgatatactctgcacataagttaaataagcaggagaccatataaagccttgacatattcctttcccaatttgaaccaatctgttattccatgtcggttataactatgcttcttatctgcatacagctcataagatag

SEQ ID NO: 38671 - DNA, 1063 bp, Bovine  19866881030022
  misc_feature (1)..(1): n is a, c, g, or t
ntccatgaggtttcacttgccctttatatctgatgtccctttaattaatttgtatcatgcttcttaaaggacccggcacggcacccatataccccatatgcactcaaagtcttaattggaaataatgataatgatcaaccctcatgaaacattttaaactctgtccttgttcacctggcaagctgtgaacatgaaagatgggcagagaactattcactaggaagcaaaattaatgagcagggacaatgtctaattctatatatttttaatcgtgtctattacagttctcactcaatgcaaattaataacattaagaacagaatttgtagttctcttataagtccatggccaatgtcctaaaagacaatgaactgttaggttacaacagtcatatttttcatttgttctttttttccttctttcagcttttccttcgaaatgttgaagaattattttaaagtacttcagaatcatcaccattttcccatttctttaagtctatcaaaagcagatgacatattggattctcttccagggcatttcttatggatttataaagctattttcatataaccttgacgaaccatcttcatttttattctgagcgatttctcacctctctgagatactgcttcacttgcaaaactgtgagttgggaagaacccaacatggtaaaaacaaacgtcatgacctggatgtggcgcacagacctttccagggtcagtctgagggctcagaacggggatcaagtaaatcctttgtttttcctttttctctttcagtctttgatgatgtgtacaaatgcacatgaaggataaaagtggttacagagcttgctttccctttcaatggcctgtctcaaggagatcaggggagatgacatattttttggatattcttaaactctgcatcggatgttattttacacactttttccataagacagttccagtgatagaaattagtcattgtaattgatttattacctaccctatgaccaaattatgcttgtttagaaaaaaatctgatacatacatagacagaaaaacactggaatgacatg

SEQ ID NO: 38672 - DNA, 1220 bp, Bovine  19866881047087
  misc_feature (1)..(1): n is a, c, g, or t
ncttgtatatgcttttttggaattcttttcatatctacttttcctttctgtattgcctatcactatgctaattcagactctcattaccatttattagaattaccataagaacagcctcctaaatattctctctaatttttctcatgccatatcgtctacaactaaaatgaataatagttactattcactgaagatttctaatataccaggtatagtgctagatataggtcatttatattgacaatgccctttaaatagagattttattttctttcccatgtggaaactgaagcactgagagattaagaatcatgtctaaaagtggcagaactgtaagtaaaaaatccaaatctgtttgattttcaaatgtcttccagtggaacactgcttctctctttctttctcttaatcagtatgagaagctgccttgtgttaaaattagagtttccttaaactctctagtctattgtatgctccctgaggacaggagttttatgtgctaacacaaaaaattgtcctgaaaattctaccaactttaagtcatttacgtgtcatgtacataatagaataatgaaaaggataaattttatttcgaatttgcatcattaattttttattttctctgagattgtatttttattttaagtcaaacatgatctttcatctttgaatttgcttaaaatacccattatttaaatatggcataaatatgaatatcagctccttcataataaaaatctccatgattccaaattagtaaattaaaatattaagaatgagattatttagctgccaaaattgagccttcaaaattattattattttacatggagattcaatatcatcagtacagcctaaggcacatattatttttataagcataaaataattaccttaagaagtagaaatataattttacatctattatattatcctagttatatgtaaaatatgcacagaaaaggactgagaggatatggcactgattgaaatgttaagtgcttgtaggacagtgggtgatttttttcctaccttcagcctttctgcatttttgaatttttaatttatttttaaaaagttttattgagatacaattcacaggcaataaaattcacccattttaagtgtaacagggtagttgtttttagtagatttacagagttatacggttgtcaccattatgtaactttaggacatttccattatcccagaaaggcaca

SEQ ID NO: 38673 - DNA, 1831 bp, Bovine  19866881111743
  misc_feature (1)..(1): n is a, c, g, or t
nataatgaaggatattttgggaaatgatatatgattggattagatatcgaatataaaattagattaaaattatttatttttcaaaataattagattgatcttcttattttgaagactgttcatttcacttgttattagttagaaatagcatttgaggtagtagaatgaatagttttatgaaaaatcattttcttttggaaagttttccaatattcatatttctaactttgtagtgattatttgtaggcttattcttatttggcttgaggaaaagattttgttcatatgaactgaaaaaattaaaaactttgatactatatataaaaatttataacttaaagatacagcctttatgcttaaattcagataaataaggaacacattttaataagttgtcattcagattaattcgaaaccctcctaactctgtgcatgtatttccacaaaggtcagttcttacaaggaaataatttaatatagatgaaacttgttagccccaacatcacgaactaaattttctcaaaccataattagctaaagctaaatgcaagaaagcaaaaattataacaccgtttttattaataacaaatgttacttgatcttagtttctgatgttcattaaatagaaaagtaaaaactacttcatgttcatctaatgcataaattttaggtatccaggcaaatgttaccatttacaaggaattaataaaaatattttaattttctaaacatcttaacattttaccagtttagagatgctgtgctgaattctgcttgttactgtcttacagtaaagggctcattacaccagtgaagatttctataatttacagacttgtataccagattctctccatcttgaagcctcaatcatgagaactttcctcttaccttcctaaggatttatcatcctaattttttgagtcatcttgtcagactagatgctaaaaagaaggcccgacagtatacaagttttatgtgctttcaattattcagctgtctgtcatcttatgtggaatctggacaacccagatcaagtgaaatgcaataataagtagcagcaacaagtaaacctaccccccatgataggcacaggatagaaaaggtgttaggagcatgctattcagtaacaggagagccacactaacttctaatcttacaaagggatttgtattgagacctgcaattacaaattctaattacacttgcacacccactatctctctgcaacagaaggttttgaagcctgaggatctttctaccaatcttacaaataattaaatggtacttcaaaattatctgattccaataaaacccatgaaataacacaggaaacagagctttggtgatgccattattttggataaggaaaagttctttcctccttttcaaagcatttaccttgtggtccccctgcctttccagctcttcattctctccttcacaagttcaactgtttctgccaaggtactgctgtcataatttctccaggctctatccaaattcatttcttcttttcactctatacttgctccctcacaatttaatgcatatccatgtcctcaattgttctctacacatatctctccagagctttagattcataataccttaattacttgaaatcttttttgaatatcatggctgcgtgtcaagtccaaaatgtccaaaactgagcccaactgagaccatgagctcccaaagatctttagtaaattatgctttttcctcctggaattatttctcctgccatcttcctcctgttatctcctgcatattcattaatctcatcaatttctaggtcttcttagtaaaccaaattctcttaaac

SEQ ID NO: 38674 - DNA, 1539 bp, Bovine  19866881177375
  misc_feature (1)..(1): n is a, c, g, or t
ntgaaggaaaattttgcgatgcaatgcagagaatgactgtcatcacagatactgcgaagttaataaagattaatgcagagcaatataagggactagcaactacagagtggagcctaaggagttaggcatttatttaaaatgcagatgcatgacttatctgtgtgtgcctcgtctgcaagtggatattaagcagaatattcacctcaatagtcttctatgaatcttcagtaagagtatctcacagtgaaagttcaataaatgttagccataactattaatgtgacttagagaatgttttaaaaatgggaatggaagtgggaagacctgagaaaaattgttggattcaatcatcagcaagtctcaggtgactttccaagggcagcttccgccagctggaaaggaaaggcaggaaggcaaagtgcagcaggttaaggggtaaataggcaataaatacttgccatgaagaaatcaatagaagcagaaatcaatgcagccaaggaagttcatccatttcagacttggagagtgaaagtaaaataataatataaagtaaaatggtaatgtggtaaaaacaggttttctctcttttaaggaaagggtgattcttgaaagcagagggcatttaagtggcaggggtgagagagcaggttctggtgagactgagggtgctttaggttaatgctttaagagtcttgagtgaaactagagggaggctcagtcttaagagcagcatgccatcagatttatatcctgcaggatcaagggtatttccttactagacagagtagcttcccactatatctaaagctaaaggaccatgaagagtcatatgacccagactaaaggttgctcagggatatggcattaatgaattaagttgcaggaccttagaatgtgtttagctgtcatttgagcaaatggttttaagtaaagattaagccccttatggcctgctgctggaaatgtaactggcatcagtagagaaaaactaagtatggtaggtatcaaatatgactatttatgccaaatagatgtatttaagctgctgctgctgctactgagtcgcttcagtcgtgtctgactctgtgtgaccccatagatggcagcccaccaggctcccctgtccctgggattctccaggcaagaacactggagtgggttgccatttccttctacataagaataattatctgttttatttctggcttccatacaaaaagtggccttcaacagaaaatctcatgtttactcttcaggaacattttttatgtctttacaaagagtttgagagacttggagtgtcattttctttcatgtcaaagacctattttaaaggcaattataaaatatagtagcaagcagatgtccattcttctaggctgttgtgatgagtcaaaacaaatctatcataacaatttgtattaaactgtgtaatctgctcagtgaagtgagtaaaatatatggattacagacagtatccagagggacatgattacagaagttataaagacagaacaataatagcccttgtgtggctag

SEQ ID NO: 38675 - DNA, 738 bp, Bovine  19866881240819
  misc_feature (1)..(1): n is a, c, g, or t
ntttacagaaagatgctgaaaccaatccctaaaatactcccttgataaataaaaaggttatataaaactcaatatttatattgtagtcttaagaaaactttaggatatacagatatatttcacatcctaaaaatggtgaaatgtttggtattaaaatgaacaggcagagcaactgaaaactccattaaatagatctgattttaaattccatcaccaacagaaaatgactctggtactcccaaagtaataaagccaagagttctttctgcgaaactctggaatgcagacctggggcaggtgaaagttacagaaaggctgatttcatcttcatataaggtgggagtgatgatgcatgatgagatagagtgcttccaggggctatatacaattaaatagaggatagatagcttctgttagacaacctagaaaaggcttctgactagaggttctcagtgtttttccccacattgaagattgtataattctgtgcttctgtaacctttgtagtgaccctgcaggaatatttgagatgcaaaccaaatctattaatatactttgaatatcaagtccttattaagcattttttaaaaaaacttgtcatgctcttcatgaatgtatcatgatcacttacacatgagctctcacatttggagtttcctaagtctcaaacatgctttagctccttctcttttccagcaaatcctcaatatactataggtcatcattgtgaattacctt

SEQ ID NO: 38676 - DNA, 1268 bp, Bovine  19866881257859
  misc_feature (1)..(1): n is a, c, g, or t
naatttaaattaattggtcacatttaaacaatatcacaaaaatcacatttgatttatcttgaaaaactggaaggcatagaaaaacatttatattatttcctgggaaactgttaataactattgccctctttaggcaggtaggcactctttaggtgctaatacttaatgtgattatttgtttgtaatgctaactttgtcctctccacatatttatactgctttgtcaccctttacactcactttagactttaccactgagggtatgattcctgtttctttggaaactcaatgataaagggtatacaggtacacacaaaaataaaggcatatcccatttactgtcttttaaaatgaagtggaagagagttccataaatatgagtaataaataaatcaaagtcttgacagcccctttggagatgcattctctacaaagtgattgaaaactaaattaacataaaagtatgggataattgactctccctcactctatacagatgttgaaatggtagagcaagcagatagagcaaggtcccatatccatctaaggttcacacatgtgatgctgcatgtcatcctgtttgttcactatttgagaaattgtcaatatatttgttgaaaatcaaatagaaattatcattagcttagaaagtttgttaatagcaaagcgactcaagagcacaaacaatgcagattggcaagtgccattcaaactgagaaaagcacagtattacactatactaaacagctatgaataattggtgctctaaggatgtatacctgtaaatatgccattaagcacactgctataatagatgcaaaaagaatggggcataatggaggacaaaagatagagatcaggaaagattaattctagctgggagttttgtggagaccttggaagagggtgggtatgaacagggatttaagtaaatcaacataggctaatgaagaaaatgaaaagatgtataatcgctcatcactcaggataacattttttcttgatcctaaattaaacttgcacagagataaacatttatgacaattagggctacagcctgaagcattttggctcacaaactaagtgcaatggttaatgagcaaagatttctgttcctttgcatgcatgaatactaagtgtagaatttatcattcactaaatcatatccacttttttcttatgcatttcaccagtggttacatcaattgtcatttaactgctctaaataatgtgttctcttccctgttgaattaagcttttcctatcaa

SEQ ID NO: 38677 - DNA, 2150 bp, Bovine  19866881371289
  misc_feature (1)..(1): n is a, c, g, or t
ntgttttaaataatagaagtcgctttccaccctagtcgaaaaattgaaccattgattgagtaataaatgaagtcaaggaattaacatgaattttgttaatatcagtgtgagtacctaagaaatattcatagtttcaagatgcctaccaaagttttattgaggaagaacagtgatcagaatttgcttacactagactatatatactatactatgtatactgcataaattctgtctcataaaaaataagtatggtaagttcttgataatttttgaatctgagttatatgttttgtaactttgaggataaagttcttcaaaatggtgcctttttttttttaactaggaaaattctgtatttagattacacttatcattctaattgaactttcaaaaaactcaaccttgaacttttttaactcaatgtttcaggggtgggatttatgcaagaaagccacctttagggctcctttagaatctactgagaagaaaagcttgattctacataaatatgttgacacaagagtatacatttatttgtttactttatgttcagataaaatggtaaaaaaaaaagactgagttgtagcctcatttaacatgtttcaatttttcagaaaaatgccttttctttgtccttgtactgtatgccagaacacactctgttggctgcctcctgtgtgtgggtagtgatacatccttcagcagggtttccctaaccacccatcccctccccagaatacagatattttcatgtatgttttctataacaacatttaaagtattttatgtttattacctgttatattgccagcattggcaaatatttgttgaatgaataagtgaattaacatagaaacaaatactgcttttaagacccgggaaacccaagggatgaagttgtgtctgtatagtctgctgctcaatgcttcctagtatataggatcatttaaaaataatagagatcaatacaatattgtaaagtaattagcctccaattaaaattaataaattaaaaaaataaaataaatttaaataaatatattaggagatcaaatcttgacttctaaaacataaacacattcatctaaagcctgatctactctgtgaagcagccatattataatggagtctgtcacggcttagaaaatattgttctagttttgtgcccaagcctgagttttctatgtaacagacaaggtacactcagtgatactttctggtctccaacaccatcttctttactgttgaacttccatgttttacaaaggacaaccctgtgtcgaatcatgttaattgtactgatttcttgttaaacactgacataaagaaaagatgaaggtaatttaccaatacttgcagcctaagatgtctcatgcataagcatttctagtctcagtgttatgtatcttgttaagagtaaagtgaacatggatgtaaacaaggaagagttttgcactctaaaaatgaagaaaatgccatgtagagcataaacgaagaaacttcagtatgtaaccaacagagcatatctgtcaaggaagaattcattgcatattaatcacagactggattttataatggtttatacttgtttcaaagtcctatttttgcaaccccaagttattagtgttttttcctgattaaattggatttcttccagtacacctcagaatagtgagctagatttcttcttttttctttatgtggcaaaagtaacataaatagcaggtattaatataaagattttccttcatccatccttaaaattttaactgaaagtttcctccctgtattaaagtattccagccacttgacaagataatgctcctctgatgtgtatctgatctaacccttgtctttgtcaggaaaagagagatttttcatggagatgtctcagttttaaagaatgcagtttgtctctttaatagtcagtgagggagttgtagtgtgatatatgctgtattttggcataggcatatgccatgtaaaatgaagtgcttcatttataaagtaataagaacattagctaaatttgtgttcctaaatataaacagacaagtcaaataaaggttttaattcaaacaaaaaatcccaacctgtcacattgttaggtttttgacagttgcgattgatggtcatctttcatcagtcac

SEQ ID NO: 38678 - DNA, 2984 bp, Bovine  19866881532840
  misc_feature (1)..(1): n is a, c, g, or t
ntctccaggttcacaggttgtatcactgaacttgtttttagtgctgaagaatatttgcttgagattttaacttaggttctttggtaggatttgacatatatcaggatgatctaggatgctgccttcccaaaggaaactgccttccaaagaaaattgtatagcctcttttctgggcaggttaaattgcagtagctaatatttactaagcaattactatggcctatgtatggccccaaacacttgtattagctcatttaatccttcaatggggaaagttttatcatgcccattttataggggagaaatggagtggggatagaaaaattaggtaaattggccaagctcacatagtgctgtaagtgacagagatgagactgaaatttaggcagcctagttagaaatctcctgcattgcagacagacactttaccgtctgagccactagggaagccccagttataaatctatgctcttaactactgcctctgaagctgtgtatgcaaattacttaaatagtatttacttcattaaaattggattcaattttgcaggaaaaatcagcaaagtgtttattaacgcattaagtatatagaggctactttacagatatgcctgagtcattcaggagttcaagtccagtggggcattgtaaactattgagtgataaccagaaattacactttcagccagttcttttgcagtcttcgaagtgtaatccaaatctgtcattctataaccctctttggaacactttctgcatctttctttggaaagccaaattgtttccagggatcgtcaaaaggagaaattgtaaacaacagatttttactaacacattgaatcactctctataattttgaaacttgtataagtggcagatagtcatttgagaaggtttatgctgtctttttgacttgactaaggtgctaacaaaagaaatgggtcatcaaagtgtaattacagattgtatgtattttataatagaaagtattgtctgagcctaagggaaaacaactgagaaatatttttggctttccttttcctcactggcttaattcaaatgtggaccactgttgcgttctggacttcctctttaagttcttggctgaacgtaaggggggctgatcatgagtaagataaaccagaaaacctcccttgattctcgccttcctactggggtgtggatatggtggcctgtttaaacagatgattacaatacctcacccaggagtatagaagccaggatcagtgcttctaatgggaaagcatttctcagaatgctgaggaagaattaaaatgtcaaaaatcagtaaagccaaatagattggagagaaaacgaagaactccccagcaattgcccagtgagattaagccagttaaaatgtgttttggtttttttttttttttttcattttgtatgcttttcttttttattaaacgattaaacaattttgctatgtgaaaacattctgccatgttatcattcatccaaaaagcaatttcttctggctacataaaatgccacatttgggctgtcccagctaattttataaaaaagatcttaacaagttatttggaaaattatactacaaagcatctatattgatttgttatcttccaatgctcatttgaagtcaatttcgaagttcaaatagcaaataaatgtttatatgaatggaaaaaaaattttttaattgaaatagccgtatgcagctaaagtgcacagatgtaggccacgggatgaagactccaggagaaggggtggggagaggagagggccagggctctgaccaccttcatggtatgcccagtgagccagagaaaaaaagctacttgtttccttctcatggtgatgtatctgtgacagttgattagttgaaaactgtaggacaagcattgtagacacacactgccaggctgctagcaacagttagtagaactcagacatgaaggtacagttcttcgttagtttctgctgttatcttaaaacaaaaaacaaaaaacaaaaaactccatactcttttctggattttcattaaaaaaggaatttgaaggaatttcaatgatctgtttccgattagtcatcacatattagatgataataccaggagaaaaagataatttttaccactgtatcctcccacctcttatcttttattattgactccagttgcaggtataaaaaataagaaaagtaggtctgagcaacagtatacataattaaattcaaaaccatctttgtaaaaacagaacttttttagttactcatgagaagttgaaaaaacgaggaaaaaagtttgattaaattccatttattgacgcattacatagatttcccctaaaaatatgatttattgagggtattatagaaaaaataaagacaaaaagtgtttggcaaagcttttcagaagaaaatgtttttgtaaacactaaggggaagagaacaagaaagtccagtgagtccaatgagatatgtagcaagcacttgacaacggtaagaaaaatagcatgagggtcccagggccagagaagtaactggtgaccataaaagcctatgatttaacatgacttaagatagcattttccagctctgataagggaagagaaatagctaaaatggaacttgagatagatggttcttgtagttttacctaacatgactggatgaggggagaattacaaaaagaatgtttcagtgtgcagagtcaaaagaaagggcaaaaggatgaaacagaaaagagaaaattgaagaagcagagtactttataaatcaattatttcccacaacgtatttacttgtttgaagaaaacaaacctgctaacagcactgtgatgtattctaatttatctctcttctacagtacaatttctttagctgtaatttaaaatttaattatgttcttaattagccatttctgctcaaggagtgatatgcccatagagtggcagtaaacaattattaattcaccaagttcacattgagcg

SEQ ID NO: 38679 - DNA, 1382 bp, Bovine  19866881624530
  misc_feature (1)..(1): n is a, c, g, or t
ntgtggaaatgaaaatgaaaatgccctcagaaatctgcttcagcaaaataggccaagttaaatgttgaattttaataacatactgttaatcatgctttcctttctgtcttcgacaactatgtacttacacatcccagattagaaatggaactttttgacatttcctaatattttaaaatgataaactgagattaccctttggaaagcataattgttagtaataaaaagctgctatatttctctactatgaaagatgtgttttaagcacaagcgggatactttgtgtcttggctgttcttgcacatcagttaaattagaatgctttgatatgttaattatttatcattttaaattatgcatcttcgaaaatcaaagaaacacataacctataatttattattcatttagcatgaaaatgtgtctttatgtggcagtttctcttctaggtacagaacttctgttttgatgtaaaacttatcaacatatggcttcaaatgcaggatagaaaaattaagttatttgaaaaacttcacacacaaaatctctagcaattgttttccaatgtgattttgccactttatatgtcttaatgatgttctaaacctgtgcctctgtggatagagacagacccagatacagatacagtataattaggtatggcatccgcatctgtgtcgttgcctgcacctctatctatgtatctttgtgtatatgtatgtgtttggtttctgcaaaaataaacattctggaattcagacaaatgcatcaagttcatagcatgttgaaatgaatagagggctctctataaataatgaaatatataattaaatagcgtttcctctacttctaacaggcaagattctttcttatctgtctttacagtaaagggagccatataactagaaaaatacaatgtcctttttccctaaaaacaatctaaaacatctaaaaacaaatgatctaatatcagcatctaatcccttaaacaaattagtacaacatacatcatgttaactgttgatgtatatgttagggatcacccaaagaagaaagtgataaacacgtatagaaacggaaagggcttgctagttaagaatttgagttatttaggagtgtttatgcaaaagtttgagagacaagcctgaggaatggttatactacattatagtttttccccaactttgtttaatgccgtattagaagtgataactatcctttgtcacctaaccattccaaaagaaaaggatatcaaatgtactgaatactttctagttatgaacactaactattgagctccatttatgtttcatatcctttagagtatttttctacaaattaaactttagacctttttaataaagaccttgccccttctaatgtaa

SEQ ID NO: 38680 - DNA, 992 bp, Bovine  19866881653436
  misc_feature (1)..(1): n is a, c, g, or t
ntttcccaggtttgttgtaatcataattctccataagacctcagaaagcttaaaaagtatttccaaatctttcctagaggaatacattttcctctatattcattcttgggagagtgtacctgcactttttgtagagggtttttgcatttgaaagtactaaagcgaagcctatctgttttcttttcttcatctttcttcccataatttaaagaatacaattgctttatttccaaagctgctctttaaacaagtccaaatcatggaattctagaattttaagcatcttttatatatctgggaaatatgcagataaggggattggtgggcttgtgttactacagaagtgaaataaagtcaccagccatgaaaacacaggataaaatgaacaacaaagggaagccgtggcaggatgacaaagagaagtcgaaggagattgtgattatttaccctggcagagaggccagagccacgagtaatgggatggaatgctgaaacgtgaggggaagagagagtcttgatagaatgtgggtaaaaaaatgttctgacaggagagaattggattcagaagtactgtcctaagggaaatggtggaaaatccattactcagtacacgtgtaataggacaggaccaagctctggaaactgtcgtaggtagtgattctgtatcggctccctggggaaaagtggagaagcttttggtgcaatctgatttctgtcactatttttgacctgttccaagtaacttgaccattttttaaatttatatacatgggaaactgaaatccagggaacttctgatgaaagaaagatggaggaagtacaatatgcagtgcctttaccatgactgatgagtccagatatgattatcaggaggatggcggtaggacacagtcatggtcgagtccagtgaaccaggcggtgccctgaccctcaaggattgtatccagccatcgctgatggggctgtccctctgtaatggaaggggatcgttt

SEQ ID NO: 38681 - DNA, 1002 bp, Bovine  19866881797375
  misc_feature (1)..(1): n is a, c, g, or t
ngggaaactgattgtgtaataaggaaatgggggaaaccttcattttcttgaatcatttcaaataacccgtgaaaagcacaggataatacagcaaggactggcctctggagggtattagatgacctacagtaatagatcatttccatccttaatgtctgtgattaatatgtcataattttgaatggtgtattcaggaagaagagagctactgaatactaatacaaagagacaagccatagcacagagaaggggcgtgcaatactagtgactgaaataataaggctaggaagagtgtatggagagatcttctcttcataagagattggttaaactatgcttctaagattattctattttcttcttatgtgtttttctctgcttattagctttaaacatgttttagcactaagctcaaaatgtgactataaaaaaataaagcaggtccagcagaacatgatatagtttacctacaatttttaaaaataatattcaatgttaaataaaggtcaaagaaaaaaatcaaagtgtaacaatattaccattaagctcttttattgttggaaagatgaaaataaatgtttatgaaatggaaacattctacattaatgtgaggaacaagtattcctttttgtttatttgcttttatacatttattgatgaataaaccctactttaaaaaaaatcaagatgattttgttcagcatattgtaaaacatttggacttctcataatctgccagcatatttcctagactatatcacatattttttccttcaatgagataaccccaagaataataccaatcccaactagtccataactaaaaattgctaatttatttgttgactgctcattgattattcatttgggctattatctatatctaattaatataaaaaagaatgtttaatgttgaatggaaaatgaagctagctattgaattttaggtaactttttacattttatattccagaataatatgaaaaccatgtaagatcatga

SEQ ID NO: 38682 - DNA, 975 bp, Bovine  19866882035970
  misc_feature (1)..(1): n is a, c, g, or t
nttgtgttggtttgagtttccttattttaaggctcatagaaataaatgctaacacatcttcgcataggcattcctttatttgttgttttgttttagtttttagcttattttggtggttctcaaatattcggtgattctctaaaattactgaagaaggttttacacatcagaccatgtaaattttataggggatttagggaatttgcaaagataattttgaacataatcagttttcaatgctctaacttgatatcatagccaggaatcagctgcaccatcatattatttgaaaagagttcagaaaataatattttaaaattcgacacttaacttgcaggataatttgcagggcagaggccattttgtatttgagattctaaatgaataaccccactactctataaatgtcaattcatttattaaaaaatgaatcacatttccttatgtgaattatgtgatataaatgcaaagcagagctctcatataactcatattgcaacactgtagagtggctcaatgttgctaaacataaagaacttaaataaaatgaatggattctactctaggaagaaaaaaaaagaaaaacaacccatattgtaaccttactacatgtttttgatcacacaaacattatttttactgcttgatcctgaaatttcctatttgacacaaatgtatgtcaaaacaaattaatgtagatgggcatcatgtttctttaaaggagattgggaaaggactcaatcctgaaatagcaagtttgaaaacattagttattttgttgtagcctgttgtttttatgtaattcagtgacagtttagcattgatacccactgctggccttatgttcctgcatctgctgtgtgaagaaaacattttttccttaaagtagcatccaccatactaattgttttcattttcagttcatgttaagtgttagatgaacaatttttctttcaaggcatgtacgtgaaatca

SEQ ID NO: 38683 - DNA, 1183 bp, Bovine  19866881094233
  misc_feature (1)..(1): n is a, c, g, or t
ncagcccagttctggagccgggagctagggcgggactgcggggtccctgccccggggctggggccggggagtgggtcgtggagagcggcccctaaggtcggaggatggtttccgctgtgcggtctcttgaaccctgggcctggcggaggggtctcgaggacccagtccgccttggaagaggctgcggggaggatcccaagctccaggtggccaggctctgggaggggcgttcctgaacccggggcggggcaagcagagggtccttccggaaattggcgcgcggaatcagacggaccccgacctgagacgcgttaaacctaggccggagatcacgcttggcccttcactgctcctccggcccatcgcctccctgagcctgttcgtagggacagggccggcgatagagaatggctggttccgggccgggtcgtggccacgcgggcggcacctcctcctccgcgcagtccccccggccgccacctccgcagccgccgcgctcgccctccgcttcgctctcgtcggagttgtcctcctccaggtagcggtagccgcgcactttgtgttggggccgcgggatgcggggctggcgtgggaccacgcctcgccgcagcttctgctccatccacaggtacgaggctgcggacgccaccagcgtcaccagcagtaccgtcagcttagcctgggccaacaggggttaaatgcaggggacccgcggccgccggccccgcccctcgcccggataggcacgccgcagctcctcggctgcccttccctcctcctgggggccagccaatctctgggtaccgtcctgccggcaaggcccaaaccccagctctgtcccttatggccaccctacttctcagggcctcggtttcccttcctgtaatgataatccttttgcctcccgaggtagtacagagtttgactgtaacaggcagtcagaaataattttacattataaggcagtacattcacacatattcacaggcatactccctgctattctctattctgtcattaaaaaaaaaaagtcggccaggcatttccctgatagtccagtggctaagactctgtgctcccaatgcaaggggcccaggttcaatccctggccagggaactagatctcacatgctccaactaagatcctgtgtgctgtaactaagacccagtgaagccaaataag

SEQ ID NO: 38684 - DNA, 2348 bp, Bovine  19866880599175
  misc_feature (1)..(1): n is a, c, g, or t
natgtgattaataactgatatggtttaaatttgaaaatgctctatagatttagaggagagatgtcactcccagctaatgtgtcaaaaatagcagtaggtctactcaacaaatcactttataaatcacttatttgatcattcattcattcgagatatttattgagtgactaccaagtgtaaagccctatgagagtcccaggagatccaaaactgaattggcccttccctgctgcagattatattctcaggaagaaggtaagatgtgaacaaccgattatacaatacactcagggtgttattaaggtcaaaggcacaggaatgcatggtgctctaagagcatttgctgcagttgtccgactcttttgcgaccccatagactgtagcctgccaggctcctctgtctatgggatttcctgggcaagaatactggagtgagttgccatttctttctccaggggatcttccagataaggccacctaacctagtgggagagatatggaatgtgtgcttgaggagtgctggtaactgagctttaaagggttcagagtgaattcctaccatgaaagacaaatgaaagaagtagaaatggggtctgaatatggagagtttcaaatgcaaaaggctaaaaatagaaagggacagaagttattcaaagaactgaaaggaaaccagcgtgccttggagtgcacagtgcaataagaaggtagtcagagattaggctggtgaaacaggcagcggccagataccacaaggcaaggtttcttaatcgtagtgctactgacatttgcagtcaatacttctttattgtgaggacctgccctgcacactggaagatgttcaacagcatctcttgtgtctacatggtagatgccagtggcactattccctaatcctcacatcctaggagaatcaaaaatgtctccagattttgccatatgtgcccttggggacaaaaccatccccagttaagaaccactgccataaggccttgtaggtgatattaatactgagtctgacctttatgcttcaagcaatgacataatactgaatactataaggaaatgagtgatttttcaaacaacctgggtagggcaagaggaaattaaagagtgaagttctacagctgtcagagaaacgatagctctccaaacctacagaagagaaggggtatcagttggtcgacccctcctgagatgttctaaatgaggtaagctgcctccttggcagtggacacaggaccactggttgtatatttcctcattgtccattcacttatctgcatcatttagacttcaggcgccttttgtgcatctgtgttcaccaaacagcctaggagtaatgctgggggagtgggattttgctaaaacttagtatgggaaataaattgtaaatgaggattataaaatatagaatatgtagcaatgattatgggcttccctggtggcttagtggtaaaggacctacctgcaatgcaggacactggggttcgatccctggatcagaaagatctcctggagaagcgaatgacaacccactctagtattcttgcctggaaaactcgatggacagaggagcctggtgggttacagtccatataatttatgctcctttgagtatgtcctcatgtgtgtgtgtgtgtgtgtatacatatatatatatatatatatatatatatatacatgaatatactctcatactttcatcacaaaactaaaaagatcaaatttcaaagccagagcaaatatcaaatactgaaaatgaagacatcgtgtcaccagaaggagtaattcttttttaaagaaaaatcccatgtactaacttgagacctttattgtttagaacagaatgtcagtcaactgttttcacccttattaactcggttccttctgctttaagaaaagcatgtaatttgtcactgaggtttctttttacttcagtcctgctgcattgttagtgatttttatatagtgagtgcttggtgggtatttatcatgttatttagaggcaataaattaagtaaatctggatgagcttctaaaagacttgatatgtacaccctcattaagaaccataagcaaatgctttctgtcataacactgaccaggtgaaagttaattttgtttagtgcctccaccttcagattttgtctctttttctctcttgctccttcccatgtgtgggctgtgccactgaactttttgttccttctccatctgtgctcacaaaccatggcccatctgtgcaggatgagtttcattcaaaccagtaaccaagaagcaagaaccagtgtccctaagcatccaactgggatggataaacactgccagttgaatccctttgacccaag

SEQ ID NO: 38685 - DNA, 1044 bp, Bovine  19866880686618
  misc_feature (1)..(1): n is a, c, g, or t
ngccttctctggcccataatactaagtaaagcccccactactgcccactagaataatggtataatactaatactataatactaatcacatgtattataatatttacttaattacctcttttccctggtcacctgtaagctctatggaaataggactgtatcttggccactgcagcaggcacataataggtacttaacgaaaccagttcccttccttctctcaataaaacaggtacttgatctgaggttgtgaacaagagtctgttgcacgaaagagccagttgtgtgtgtgtgtgtgtttccaaatgacccaagcaaagccacattcttagcaaaatctgacccctctaactggataattcaataaattgcttagcaatccagtgacaggcatcagaagattgccatcagatttatgatttggaaactcaactactcaacaaaagtaaaaaaccccttcatcacaaggttatagagccagcagagtgttactacaacaaggtgagaaagatttggaaaattcattataaagcaatggattgtttgaaaatgaaaataaacattgaaaagaaaaaacatgtaataaaaaatagatcttatatctcatggtaaaacaaccaaattaaataagaaaacaagctttccttttagaaagcaaatttagaggctgatttaccacctttgaattatccccacttatggatatcatcagctcaattaagttagcaacaaagcttgcattatgcaatcatgcaaaaaatcatatgaagtgctcttagaaaagcgtatcttttgaccggtcagtagctagttaaagaatgaggacttatttgcaatgtgaactacctgataaagaatgtaaatctcaggagaaatcatgtatgtatagaaggaatgcctggctccttcaccctgattgatttttctctgctctctgtgtctcaagagaagaatgctctttttcatgccagaggcatcatgatgaatgctgatgagacgatatttgactcatcactgcctagacacttattttgcatgcaatttt

SEQ ID NO: 38686 - DNA, 797 bp, Bovine  19866880804349
  misc_feature (1)..(1): n is a, c, g, or t
nttttactgttatacaacaacaatatactgttatacttacaaagcagaaggaataaaaatataacttctcatccccagaagtatccccatgggctagtgaggacattatttagataagatagtttttctgaaggccctgaagatgtaaatagctgcctaaggtagcaaagtctctgagaaaaaaaaataatatgaaaccagaacctctgaaaaggagaaacctcaaacgtggaattctgatagaaatgaagcctcaatgaattttagattcctccaggatatcagtccagatttaggtgattaactttctgagatatttaatataaatgaaaatattgcatattcttctaatcctagataattatttataaattcatcagccataaaaagaattattcaacactagataaattattaaactcattaattaccaacctagagaattattgttggctgacttgattaggtctctctttaaaaccaacagtttaaagaaatttcaattaatttgacgctagtgatttcagaagctgcaaaacatatgaacacagcttgatgagatgcttttattctgtgttctgttttcattaattgacaaagaaatattcacggatattttggctcaaagtcactgcatatgctgtcttttacataagagtaaattaaaaattaaagctccttcttaaattagcaagtaatgattgtttaattacaaaagaggaaatgcttagtaacttctttctgaatatttgaaaggaaagtaatattgttggtgaagaaatgaggattagcatcaa

SEQ ID NO: 38687 - DNA, 966 bp, Bovine  19866881059425
  misc_feature (1)..(1): n is a, c, g, or t
ntagaagatgtcacagtgcgtgatcatatgttgaaatgcttctattttaacaagtgttgacagtgtcataacaaaaaaaaagcaataggtactagcatatgttcacacatttaaaatgtatatttttttctatgtcaccacttttcctttttctttctcaagaagcattattctcttaaaagctttatttttaaaagaacaagaactatgtgaaatatttaacatttaaccacttaactacttccaggaatgtgatatttttatagttgttttttgttgctatattttatttgtcttaaaatgattgatcaaaaggaaaagacaatacagtattccaccccctatccttggggaatacattccgtgacccccagtggatacttgaaagtatattccatggatggaggagcctggtgggctgcagtccatggggttgctgggagtcggacacaactgagcgacttcactttcacttttcactatcatacattggagaaggaaatggcaacccactccagttttcttgcctggagaaccccagggatgggggagcctggtgggctgccatctatggggtcgcacagagtcggacatgactgaagcgacttagcagcagcagcagcagaaccctatatactatgtttttttcctatacataaatacttatgaataatttataaattaggcccaataagagataacagcaataataatagaatgattataacattataatttaataaagttatgtgaaagtggtctctctctctacatatctttactcagccttcttcttgtgataatgtgagatgataaaatgcccacatgatgagatgaaatgaggtgaatgaaaggcattgtgatgtaccattaggctaccattgactccttttttttttaaaagacttaagttatttgttacttattttttttaattggaaggtaattgttttacagataaatgtc

SEQ ID NO: 38688 - DNA, 2574 bp, Bovine  19866881105579
  misc_feature (1)..(1): n is a, c, g, or t
ngtttaagccactttttactctcctctttactttcattaagaggctctttagttctttgctttctgccatagggtggtgtcatctgcatatctgaggtgattgatatttctcccagcaatcttgattccagcttgtgcttcatccacaccagcgtttctcatgatgtactctgcatataagttaaataagcagggtgacaatatacagccttgacgtactccttttcctatttggaaccagtctgttgttctgtgtctggttctaactgttgcttcttgacctgcatacagattactcaggaggcaggacaggtggtctggtgttcccaggtcttttaagaattttccacagtttgttgtgatccacacagtcaaacgctttgatgtagtcagtaaagcaaaagtagatgtttttctgaaactctcttgctttttcgatccagcagatgttggtaatccaaactctggttcctctgccttttctaaatccagcttgagcatctggaagttcacggttcacatactgttagctatccacatgtaatttgcatttcggtcttgcatttggtatgttaaggaaaatttgtttgctagaagctagagttttttgttttgtctttattttttagcccagaggtttttgaatgggattccatataggtatatatttttcagagttttgagattttagactaattacatgttacagaagaaaatcttattgatttcagtgtagtaattgttttataagcatattgtcctctagggactgttctagatctattaggtattcctaagtgaggacttgactttaggtcttttgattttacctgagttctgaactcgtaagtttgcaaggcagcttcatacctccctagtctcttgagtgcattattctccttaagttgcgattaacttgaattttacatttcttctttaactcttatttcatgctatatcctgtgaataattaatttgggcctttggtgaatttgttctaatttcaagactcttctttcataaatattaaaaaaaaataagtatggtttttgttttgttttttaaaatacaacatagagggtttggtgaagaaaagcagtattattgttactattattatcgtaaacttgtctggagttctagaagtggacatttgctgattcccttcctagcattcattccctcttgctttcttcagtgataggctgcacttatccttcattttcaactctttgcattcagatgaattaatctcgttccgtgctccaggataccttgagtagtttgacctgatttaacctccatacccacacttaggtttctgcccacacagccacacccagtgccagtgtgtgctcctgggaagggaaagctcccttctgttcctcaagtgctgcttgaagagatcttttctctctttctgggtagtgtcatatgaagttgtgaggtatagaatggctggaactaattttattgccaagttttggagtggcctgaggatgaacctcctcatggaacagacagaaccaagaggatggcagagaagtgaagctatagttatgatggtgatttgactgtctggatcaaatttcctctgcatttttcagtgagaggacagtaaagtccctccctctgtttagaacttttcctttgcttatttataaatgtttatatatatatcctcaggcttccttggtggctcagttggtaaagcgtctgcctacaatggcggagacccgggttcagtccctgggtttggaagatcccctggagaaggaaatggcaccccactccagtactcttgcctggaaaatcccatggatggagaattctggtaggctgcagcccatggggttgcaaagagtcggacatgactgagcaacttcacttagcttagcttatatatatatattctctgtttgcataatgataggcattagtaatatggggagatgaatgaaatagattttttatcctcacagggcttacagctagattggagaaacagacatgtcataggagaaacagaataaaccgtaggtacaaaccatagatggctcacagagatggaaggactttttgatacttgctatagaaaaacaagttatggaagaaattatttctgtcactgctcctggtgccagaatcagagacgcctgcaccatcttcatgttgttagcagtggtttaatttcagcaaagcattatttgtcacattaaattactgttcactttatttgtgaatttgttggctttataatttaagagttataaaaatacggagtttataatttattaatatttatgcctacttaaatttgtcagcaactgggtaggtccatgagacttatttctttttccttttgaaagatgtccttacactattcagttttcagagacaccactagacgtggactcggggggccattgaagagcaagacaattgaggatggatggaggacaaggttttaagtggagaaatttcttactttagattgataacaagaagtttgaactgaggtgtagaaatgacatttagaagaaaaaaagcacaagatgtgttcactacgcagcc

SEQ ID NO: 38689 - DNA, 734 bp, Bovine  19866881161025
  misc_feature (1)..(1): n is a, c, g, or t
ncctttttccccactatatcctgtaaaatgctaaccctgccccctttttaatccctgattgccagctattcagtctgcttcctgctttcatttcactccagtctgccatagcatccactccgtgaacctaaagcagatttcacaaaatacaaagtgaaatattagccccaaaccctgagtttaaagactagatgtaatcagctgcaaggaaagataccagacaaagatgactataacttaaatagccttcctagatatataacagaaactctgctccaaggaaaaattcaccagtatacattaagcttgactttaattctacttattgatttttaaaatctttcagtactatacagtacttaaatttttcattaacctcatatttgagattgagttggggaagaagcatagatctatctttttcaatatgttccacaatggccctagttcaatagccttagatcttaattataaagtatgtttttgaacaataccaagaaaaatcagatctagtcagtgtaaagcctgtcctttgactcacattaaaaagttccaaaaatatgttttatatttcaaagactgaagacattatgtctaagggctttgagcaccttttgaagcatacagggatgctaaatatatacaatttaatgcaatcttttacaatgaaaacaacacaatccaactttaagtttttaatgaactaatcagtgacgtttggtttttagtataca

SEQ ID NO: 38690 - DNA, 2922 bp, Bovine  19866881170040
  misc_feature (1)..(1): n is a, c, g, or t
nctttttcctctcctctttcactttcatcaagagactctttagtttctcttcgctttctgccataaatcatctgccataagtgatgtcatctgcatacctgaggttattgatatttctcccaaaaatcttgattccagcttgtgcttcatctagcccggcattttgcatgatgtactcctgcgtagaagttaaataagcagggtgacaatatacagccttgatgtactcctttcccaatttggaaccagtccctgttgttccatgtccagttctaattgttgcttcctgacctgcatacagatttcttaggaggcaggtcaggtaaggtaatagtggtcatggactattataaaaagcactttgaccaacctgtgccttgagttgtctttccttctttaatcagatgttcagttcagagagaaccctcttggctaaaatcgctaatcagtattgtgtaaagaacaaacaagactgattagcattttttttttagaacagccagcattccatattcaactgtgaaagcgattgtgaagatagaattagctaagtggcgcatttgtcactctttcttttaattactacttaatacattctctcaatctatttttaggctaatggtattctgttaaagttatcactattcattttaaatacaacttgctttcagttatattgtttataatatccttattataattattaaggtgcaaaaatgttaaagctggcattgctaactcaaaggtgacttgtggcataggaatgatttacgcttgtgggattgcagagtctaaaaatagggcttgatgttgcatatgtactgcagtatggaggcccaatagggtcagaagaggatgggttttcatctctgtctatcagttttcttgcttttgtctccaagtctgagcagcactggaataattagattgcccatttgtatcatttcccttcagtgcataccttccggccccgccaactcccaggtgtttacaaggaagcacatagtctgtaaatagcctttctatacaaccctaaatactatcttactttgaagatgtgcttagttgctcagtcgtgtccgactctttgtggccccatggactgtagcttgccaggctcctctgtccatggggactctccagcaagaacactgcagtgggttgccatgacccctccagaggatcttcccaacctagggatcgaactcaggtctcctgcattgcaggtggattatttaccatctaagccaccaggggagcccatgaatactggagtgggtatcccccatctactgaactgggtggtgatagacccttgctgttaggttctggtgtggttagtgtgggactttaaccttaggatgacactttcatcagagtgtctagacatagagcaaatattgcaaaaagaaggtatttctgtaagcaaggtgcatgacagcaattctgggcaaggagcatttctgaatgaacaacacacattttggttcttgttccttctggtttgatgcatctgcttgtggctaagtgtgagatgacagtgttgacagatgctttccttcaacctttccaagtatgaactctaatcagatgagtggaagtcatgtaattgagttcacagatctattgttgatggggccagaagttgcatgagcataagggtgtgctatagaaagggaaatcaaggccagcaccattcagaatatatatgggtgactcaggaattgggtagtttatctcctcattggctggactggattggactgtggataagacagataagctgacggagcatttatgttcggtatagttccaggcccttctttaatgaaatctgtgaggattaaacatgatagctctgagtttgtgtagataccatgagtcactagcttagtttttctctatcagaatatatttgattatgtttcttactttaaggtgatggggccattgggttcaggctatattattatcctgtgaaagaggaattgtgtagattttggaaatagctctggagttctgtaaagttgtggtaatttataactgttctgacactgttgtttaataggtagttcagctcttggagtttcctggaagagatctcagggatcagcctctcagcaataattttatgtcagtgtaatggcttctgtgttgctgtggtgtaacaatgtggaacctgttatactacttgccagctgccaatttaaatacacactggggagagtaatctaattttcagggagtattaacctgatcttaatgaatgttgatgtttaatttaattgtgaccttttaagttatactttttgaagaaaaacgtctcatgttttcacaacatgaactgttgcagagtcaagacactgattttataatggatctcgaaaaacattttaagtagaacaatttaaatattttgaatctagcccattccattttaatccaaaaaaataaacttagtgaatctctcctactttacctactttaaactcaaagaaaatatagtcaaaggaaaacaagcactaatatgagagcagaaagaaaaatttcctctcacacacttataattagttatacaggaagagtaagattactcccactagctctatctcagcttcttaaccaggcaaactcctacttgtcctacaaaacccattgataaaattccttttttttttttctcctgtgaatacttcccatttcctgggctacccacaggcagagttcattactctcccagcactttgttcatattttgttagcactgctatgttttaagaatttacttttatattttcctctttcccttgactatgagtttcttgaggatagaaactatttcttacttatttcaatggatcattggggaatggtaaacttagtattagacgtacagtagggactccaaaaatacttaataaa

SEQ ID NO: 38691 - DNA, 1495 bp, Bovine  19866881235798
  misc_feature (1)..(1): n is a, c, g, or t
nctgaaagtttgtggttaggatgtctgtctgagaaacaaagtaaatgtttgttgtaggttggattgagtggaggcagatgctgggacagagtttgggggacagtgtatttattgaggatccaccccctgtgaagggaaagagaaagaaacagaattgggtgaagggagaagtagaatggtgatgtaggtctggcaaagccttgctcctcctgggcgtgagctttggaccaaatatcatgcttcagagttgtcctgtatttgcccaactgtttatcctcccaccttgcttgcatactggatttgggtgctaccagagggcttgatggaggaaatggcagcccagtgttcttgcctgaagaatcccatggacagaggagctgggaggactgtggtccatgggattgcaaagagtcaggcacgacttggcaactaaacaagagggtgtgagctccagtgaggcagttctgcagctgatgggaagctggagaaactgagagcttaagctgttctttttgttgggcaggaggaaatccatctttgaatgtctaccagaacattttagaatgaagaaaactgtcattcctgttgcagatactccctcacaaaactgcttcttatctgcagacattggtttggggaggctgggataaaaatttaattcaacaaccgaataacaggaaactgctaaagtatttaacaataaaatccgccaagttcccaggacaaacctctttataaagcacactcccccaagagcccatatgctctggggaagtgaaatatacactgcccctctggtgttgtctttctaaggtctttatattaaaaatacaaataaacaataataaatgaccatgacctttctctgtctttcctcctgctacttaaaagaaaggtaaaccaggatgtcttgagtactcaaaatatagtgaaaagatggttgattgggggttaggtgactttatcttggtcctggctcagtcactgtgtaagctgggttagtcacttctcaagtccagacctcagctatcttgtctgtataatggaaaattgggccggatgccttccatctctggtgtgttggaataataagaaagcttctctctaaagtgttggctccttggtctttttttaaaatcgcatgccatggtttcaagcagtgcttgttgttaagacataggtcattggtcccacaacctgctcactggagaaaatgttcctctgctgtagactttggctaacatattcttattatttccaaccagtagaagatgtagttatgaatgtcttgatctgttgtttaattttatattaaatcagtgagtcaactataaaagagtaggcataaacttcatattctgtcataaaattctgtttctcttttctagtaaaaacaacttggagtgctgattctcaggggtagaatgtttcagtttatcctgctgctgctgctgctaagtcgcttcagtcatgtccaactctgtgcgaccccata

SEQ ID NO: 38692 - DNA, 1119 bp, Bovine  19866881297154
  misc_feature (1)..(1): n is a, c, g, or t
ncaaattctgatgtgcaccaaaatctgagagtcattcctatactttaaagaatagagcaataattaataattattgctgaaacaatttattaattggtcaagataaaagataattgacaacataaattttcatacctgataatttgacagtttcctctactagactgaaatctctttggaggaaacaaaataccataaacaccttttgtaccccatactagccatatagcagatactcaacaaatttcagaaaaatgagtacttatctacatacatgaatatcaactctaatcagttttcttatttcatttgtatataagaaaaacttctagacatacataaagcaagaggaaaagatggaatgccaggatcctcatttcattttatcacttagaggtgctatgcaagaaagtacaacatatcaggttcccaggaaggaaatccatgttccgttcacccatcttttccaccatgagtgtattttaagtctcaattattacaggaaattaaaatcagccatttgtacatgatagtcatcaagctcccaggaagaaattagattactcccgagttcctcacccagtcatctcccatatgcccattcaccgacctgactgctcttcatggcattactgttttgtaatatctgcctcagaagacgcctgcatcttttctaaaacagtgtaatagattctgtccttgccacaagtggcccacaaaggatattctagatcccacattcgatttgagacatcagcagctcaaatgcagagaaaatgcagaacaggaaatgcagaatcagaattcctaatatgcatgtacaaaatgccacgggtacactggattgtgaggatatacaaattcatctgatgtgtcaaactctatgcaccatatactagttctctattttatttattctgaacccatccaacaatgacaaatattcttctacttatagagcactccatgaaaaccgctgagtaaggacactctaataggttctccgttcctaataaatcactataatttatgttacacaggtccccctggagaggataataagaggctgatgtgcataacatatttcctcaaaaaaaaaaaaaaaagaagaagagaaat

SEQ ID NO: 38693 - DNA, 1246 bp, Bovine  19866881303716
  misc_feature (1)..(1): n is a, c, g, or t
naatacatgagaaggctaatgccttgagtcagcctcattgagttcttcccctcatgtcttattcttttcccttacatatttttgagctacattatacttggatcatagttgctagaactatttgcttatctatgctaatttgacttttccaggcaatacaaagcaaataagaagggtttcaacttaattttaccatcaaagttcaatcactatgtggacatttctgttgttaaactaactcttgtataacctccaatcacttgaacaaatgatcacttgatcatttgtactgaataagaatgtataattagtaactgttaataactgacatttgcaagggacatatggatcgcttttggtaaaaattgttcagtttatattctccagattgtttccttgctataattatgctaaaacggtagccatccatatattgcttgggcatgcctgcacatgaattgtgtataattacaggtgatagagaagtgagcaatagtggtgtagtgggaatatctctgttattttgttattgttgttagaagtcaggtttgagtcccagagtaactttataaattataatctttggaaaatgactttaatgctctaacctccttttacacatctgtaaagcaggaaataagtttgttgtaaaaaatcaaatgctttaaaatacattagggtctttgtaaactataaaattatacaaacatacacacacacattgaaaatctgacctcaaaatggtaaatacgtgtcactcatgacagcgttattctactagttcatagaaaatattactaatttcagtagtctttctaaggagtgtatgttcgtgtatatacatatttatttacatatttacatttatagtcagagtccttcttaacatagctcccagttggtcactaccaatcatccagagatgtccactagtttaactttcttccttttccttgtttaatttagcaaattttatttgtatttggagaaattgtgattcattcattgagtcagcaaacacttattaagtaccagaaaaggtacaggatgctaatgattaaaatacaaatagagtatatttctgatctgggagcttctgtctgatggaagaggtggtgggaggagttaacatgattatggtagggtgattagcaatacagtgtaggaggcagagaaagaaatgcttatttatgccccttgagattacagatttgattaaagcagccctcagggcttgggcgtggga

SEQ ID NO: 38694 - DNA, 1689 bp, Bovine  19866881327434
  misc_feature (1)..(1): n is a, c, g, or t
nggtaagaataaacatcgtattttatattataagccagactctccttgactaaacttgaggaaagtgaaaggaactgaaggtttaaaacactgtcctagaatttaatttagagagatggagaaggtgaaagttgctttgaatgtgaagttgggctgattatgcgatttaccctctagaagccacagttcattcgtgttgatggacaatgctgtctgacaccaaatgaaatccaatcaaggagacgagctgctgcactgagagcttaaggactcagacctcaaggctggatagcaatactggatttattttgatttgtatattatatcctaaacatggataaacaaaagaaaatagaagtattttgcaaataatttccactagaagtttattttatcctttatacactttatcttctggaaatcatcaaggacaaagtattaagcaacagtcttctagtcctaaactcttaggggagaaaaacaaatttctttaatttatactgtctatcatcatgaaatacactgaattgttatgataattctgtatggtaattttttaatttgcctatttgtacatttcatttttaacctttattggcatatacttgattcacaatgtatgttactttctgctatatagccaagtcaatcagttatacatatacatataccaacacttcttttagattctttccccacataggtcactacagagtatggagtagagttccctgtgttatacaataggtccttattagttatatattttatactttagtatatctaaaatgttatcagttcaacatgtaattaatatgaaaattagtaaggtattttatatttttaattgcatcaaataaaaataaatggtgctactgtatagtatgaaaaaagtgcatgtgtctgtgtagttggtcaatagtaatgaaatcacaaatgtaattcaatcttcagtacgtggtatttattcaagcagaaatcaaatacagtccttacaaaaagaaggctcttttgaaacaactcaatatacatgtattagaaattttcactttcctcttcttcatggctatttctctcagatgttaggatcagggtatgtataagagagataattttttttattccaaaaaatatatttataagtgtataagagtcaaaagcataccaattctctgtttgaaaactaaaatcattcaaatttcgaagaattacataaaaatctgatattatataaatcagccttgataaaagtcaaaccaaggagaagacaagcaaagcttctatgtcagaggctcacattcctcagcactaaagccaccacctgataaaacgaattctcttggtcaagaaaaagagctccagcaaacccacatcttggggaattatttaaaacagaagatactaattattttctctaagaatctcatctgagatagctgagtttcctcctccaaatataaacaaagtcattaaaatcataattttgttatagtttttaagcatccagttttataaatgaggaggataaaaataacctttgtgttcttttcaaaattcacagaacaagcttgcggtacagttttcagaatcttagtgcagcaagctccacgactcataaatcataatgtgcttcctcttggcatccttttcacatgtggctgaattaaaaaaccaataaggagtggtgag

SEQ ID NO: 38695 - DNA, 2622 bp, Bovine  19866881422644
  misc_feature (1)..(1): n is a, c, g, or t
ntttcactaactggcttccttctgggtgcttttactgccatgactggtggcctggggtgagggccatgctggatgcttaccttgtgttcagagtgcttttctttttgagatcgatttttcttttttctttcacttttcttattttctctgttattttcttaacttcctccttatgaacactccttccttttccaatttgaatgacattttatccgattcagaacattttaggggcagtacttcagtgacttactagaacatatattacctccctctttcacactctttctatgccctggtacgtagatacactggattttagcatttttaagtagaaaaggtgaacttatgcagtcagttttcagttctgaaatgataatacagaaaatgaatcatcttttcaacacattttctctatttgactttgtttcttttttattaatattatttaagtattcattttattcatattcattttattcatattatttaaataatatgatctaaaatccatgattttgagatattctttagtggattaatttttaaaccttcattgaagatttctttcccttgttgatccagtaaggcagtgattccttttctcatacacagattccacttagttattggttctccaaggataattactatttaactaattatgtgctaagtgctctgcagtggtagggtaattatacaactgtactgcaccataataaagcaactgtggtgtttgggggagtttgtttgaccagaattcattttgatggtaattcatttgatactaagagggcataacatcaagttatttgtaagaaaatggcaaatgtcatttagtttcacattataacctattatagtttagcactgaacaagtgaagtgcattctctcatgaaaatgaatttcacacacattcttggttactggagagctaagcttttggtttttccgattaggagatagttgcaagggttcatttaggaaatattgactatgtgtgcctagtttgaaatgccatgcacatataggcaagattaggcaagagtcagtaagcatagccactgctcacatgagacttcggttcttgcattttcttggagtacagtgcatggactgctgctttgcagtcactggtgaggacactgagcctcagaggggattcttctagggttttacccttccccccagcgccctaggttccaattcaatagtttacatggagccccagaaatctgcattttatccacgtagacttaaatgctccccagttgagtccaagacatcttcaactttgatagccactcagcgccacaaggacaaccaggttaatgcatgtgagggtgtgtgtgacctgtgggttgcttgttctttattgtcctcgccccagtgcttctctctgacaaagatgtatgtcacatcttctttctgatataggaacatttatcctttgttttcaatttcaaaattcatgttcattttgaaaatgattaagtcccccatttagagtatttgttacaaaatattgtgacattaatagatgtatatcttggaatgtgggatatggtgtgtatgatgaatgcagctcctggattcaccagttattttagaagtcatttttagagggtgttaggctttttggagatcattattaaattctcctttcaaagtaaggattaatttaatttggcagttactcagaggggcagagtattttatgtacatcatcccttttaatccacctcctcttgagagagtaatattacatttatttccacatgggaaaatgtggtatagggaagctaagaaacttgctcaaaatcacacagctcagtaaaaattcattgctaaacaaaatctcggtaatgctgctatggggaaagaaaaataataatttttcctcaacccttctaggttcttggctgagacctccctcctttaataaataatagattaacaggacaaaaacaaacagcagatgacttgtttacttcttatatacaagggagatacgtaggaaaactaaagtgacttcccccaaatgacccaagctaccaccttaaatactttcttcagagaaagacaaaggagatgttgggagagagagaggaggtcagttttggaaggttgccaggggaaacacagcaatcaagggtaggattgttatgtggatttaaattcatgccttttccactgataagagattctagagatttaaacatcctccctcctggtatggaaagggagatgtggttacaaatggagacttcctttgtaaatatctcttacaaaagggtgacttctacttgattttcaagagcttttcctatgtctgctatttcttaagaataaccagtaccctaaaataatccttatgccaaggggacatatttgaggtaaattctgccttccttcactgcttctgacacccataccatagacagtgttgtggggctgttttcatgaaagtgaaagttgctcagttgtgtccaacggtttgggaccccagggactatatagtccatggaattctccagggcagaatactggagtgggtagcctttctcttctccaagggatcttcccaacccagggatcaaacccaggcctcccgcattgca

SEQ ID NO: 38696 - DNA, 1702 bp, Bovine  19866881853099
  misc_feature (1)..(1): n is a, c, g, or t
ntattaacctccgaacctgacctaaaacccaacacttaacaaatactcaatatgtattttgtatattttaaagtgagaaaaggaggtcacaaaattttatacagtttttgaaagcgtaacagtggttattttggaacatgaaatcatgaatgactcttatttctgcctcttttgcttatctatatttttaaaatatcaattattgttgttgttcagtcactcagttgtgtccaactctttgtgaccccatggacgacagcatgccaggcttccctgtccttcaatatctcccagagcttgatcaaactcatgtctattgaggcagtgatgctatccaacaatcttgtcctctgttgcccccttctcctcttgccttcaacctttcccaaatcagggtctttgccagtgagtcagctcttaagtgtcaggtggccaaagtactgtcgttagtaaatatttattgctttggaattaaaacaaattttgttttaatgaaaaaaatatattttgtttattgggtaactggttggacacataaataaactatcaaatgaaccaacaaataaatcaagaactaccaaaaggaaaaaactaaatggctgctctctcatgtaggctttaggctgaaaatcacagtttaaccttttttctgaaaaaatttcatttaatcaaaagttccaactcatattagtaatcacctaatatgacactgaaggataacatataattaaatgaactggcaaaaccaatacaatattgtaaatttaaaaaataaataaattaaaaaatgtgtgtgtgtttaactctcatctgtgtatcagttcagttcagtcgctcagccgtgtccagctctgtgaccccatgaatcgcagcacaccaggcgctccctgtccatcaccaactcccggagttctcccaaacccatgtccatagagtcggtgatgccatccagccatctcatcctctgttgtccccttctccttctgcccccaatccctctcagcatcagggtcttttccagtgagtcaactcttcgcatgaggtgaccaaagtattgaagtttcagcttcaacatcattccttccaatgaacactcaggattgatttcctttggaatggactggttggatctccttgcagtccaagtgactatatcccacactaaatacagatcactttccaactcaaacattcaatgatgattcgttctatctaaatttagtttggatatgatgggtataggaagaaaagacaagaaaacagtcttctaagattatgactgtttttctattgggaacttggcattctaaactgaagtatttcctctctgatctccactatctgaagctatacctgatgtaatttcttccaaggggaaatagtgcttatactttttgattggctgtcacaatgctctgagttaatcactacacccttcccaaaatgcccagcctgaaacaactgtgagaattcaggacagaatatctgtggagatttgtctgtgggtgagggacttttagtgcccaaagctcagaagactttattaagcaggcaatgacattttctgatttttagatatctcatttttcaaatacaaatgctctagatttctacagtgtttctacattgtgttaaaaaaaacagagtaaaactattctgcaattggttgctcttgagaacacagtgctattgcactggtatt

SEQ ID NO: 38697 - DNA, 783 bp, Bovine  19866881886097
  misc_feature (1)..(1): n is a, c, g, or t
ntgtgcgggcttctcgttgcagtttctgctcttgtttagattacaggctgtagggcctgcaggcttcaatagctgtggctcgggggctctggagcacaggcttaatagttgtggcactcaagcttagttgcttcatggcatgtgggatcttcctagatcagggattaaactgtatctcctgaattggcaggtggattctttactattgagccacaagggaaactatggtataccatttctttgtgaaccaattttatatataaagtgaagtgaaagtcacttagtcatgtctgactctgcaacctcttggactgtagcctgccaggtctcctgcattgcagggggattctttaccatccgagctaccttggaagacttttacacaaaaggtggaggttaacttgatttcatttagagtagaaatcaaaataagcaatatacgaaatgcccgtaaaaacaaattaaatcctagtaggaatgcaaaaatggaaatgggagtggatatgcagagcactgattatgcttgccttttccacattgccattgctttccaggcatggtgtgtgtatgtgtgagtttgtgtgttccaattagttaaaatagatttttaaatatgtcttgatgaagggattagggattcttagttgtttctctcctttttataatcattcttactgtatgtgatagaattagcaacttcagttactactgtgtaaggttttcgtttaggaaggcattgcattaatataagtaagtaatatcagaattttgggatagtttatt

SEQ ID NO: 38698 - DNA, 655 bp, Bovine  19866881992734
  misc_feature (1)..(1): n is a, c, g, or t
nttagtgctattataagaaaattaaaaaaatttttaatatagataatcctgaaaatccaggattatcaaccttctgtaagagatccacggcctacaaataaagttacatatgggaaaggatgactttaagtaattttaaaaaaggttctttcttttacctggttttgtgaaagtggaggatcatggttaaatgttaatcctgctttaataagtgaagttaaggcttctgctccccattctctcattcgagagtttggatgctggcacacctaagggtacatacatatggaacaaaaattaatctttaatttgtatacttaagctatacatcacacattaatttaagaaaaactaaaacattgcatttcatactcttccacatttaaaaaatcatataaaatgtttgtcaataagggttgaagaaattatgaaaatatacaaaatgtaagtaagcttaccttctgaatacgaggcaagaggaagcaataaagagatagaagataaaagatgaaactaaacaactcacagaaaagaaaggatttcataaaagtaaatgatgtcaccacagtaaacagaagaagcagacactaaggttcctaatctgctctatcttcataatcaaatacttagctaaaattttaaaaacgtatttttt

SEQ ID NO: 38699 - DNA, 1023 bp, Bovine  19866882117479
  misc_feature (1)..(1): n is a, c, g, or t
ntttgcagagcctctgaagactctattaattagccttgctttttttttaagactttttcatattcctgtctttaattctatagacttaggataaattcctaaaagtagattcattttcacctatgattaaaacatgtaagttcttttacttgttgctcaaaaactatttctcactaattcccagccaggtggctatgccctagatgttattaataatgtataataatcactacagtttgagtgtctactttattctggctttgtgtcagattctttatatacactgtatttattccttacaacagtcctaccagtatgtaatagtatttatgcattctgtatgtgggcattgaggctcatagttgttaagtacactcgacagaggcattttcctattgtatgtcagagctaggatcatattcaggtaagcagttctgccttgcaagccatgctctgaaagaaggatctttgaagaaatagtagtagtgctgatttagcacataactttcttttaagttcaagccatcacacaatttcttattagttttaatgccattcctatttgaaaaaatagatggcattcccattttataggttgaaaaggaaggtaagtgattcagttgtaataacatgcacagcaatgtggtttagcttagccctcgtcatttcaggtgtctctcataaatgattgctttattttgcctatagtgtttttgtctgttttgggtattagcacttggagccttagaatattgtatgtttcaggaaaaatcatttgaaggataatacatttctatttcctatcattatggtctgtaggtggcaaaggcacttatgtaaaatcagcactttggttgtacattactaggcatcaagcaaaagcactcctggattttctatacccaccaaaattgcagtattgtaggaaaatgaatggaagtataaattttgggtgaaggaaggaggcaatagtggttcttaaaagaggcttatatttgctggcaggcaatcccttagaaacca

SEQ ID NO: 38700 - DNA, 948 bp, Bovine  19866880417418
  misc_feature (1)..(1): n is a, c, g, or t
nacatgaatgtgagcaaactccaggagatagtgaaggacagggaaagcctgacgtgctacagtccatggggttgctaagagtcagacacgactaagccactgaacaacaacaaattggccacctgtatgtcttctttggagaaatgtctattcaggtcctcggcccttattttgagcagattgtttgtgaaaatgactcttagatttgttatttcccacttaagaagagcctttgcattggcctagtctgtagaggggactgccgatcccaaacactccagaataagaaaaagacagtggtgacattgtgctggggaagacgtagctgcctgttccccgagccacccctttgcctccggacttctctggggccagcagccacccaagcaggggcccggggccgcggactcagccgactaccatgggctctgtgtcaaaccagcagttcgcaggtggctgcgctaaggtgccggaggatgcggcccgcgcggcgaaggagccgcggctgctgcacggggcaggcatctgtaagtggttcaacgtgcccatggggttcggcttcctgtccatgaccgcctgcgcgggggtcgccctcgaccccccggtggatgtctttgtgcaccagagtaagctgcacatggagggcttccggagcctgaaggagggggaggccgtggagttcacctttaagaagtcagccaagggcctggaatctctcagagtcactggcccttggggggtgttctgtattgggagtgaaaggcggcccaaagggaagaatatgcagaaacgcagatcaaagggagacaggtgctacaactgtggaggtctagaccatcatgccaaggaatgcaaactgccaccgcagcccaagaagtgccatttctgccagagcatcaaccatatggtagcctcgtgcccactgaaggcccagcaagctcccagctc

SEQ ID NO: 38701 - DNA, 1070 bp, Bovine  19866880473327
  misc_feature (1)..(1): n is a, c, g, or t
natcccaattaaacacctgtctttacagttgcctgtcattaggctcgagttgataagatgggaaagtcccaattaagaggcgtccctaattaagcatacgttatgtagaacagattgatgactctcaaactatcttttttcctatcctaacttcaatagcatttttattcattacttatatttttccacttaagtagttatgtaatatttttctcaaaaaccttttaccagagtaaagaaaaatcacttggcagaaatggatcaaatatttgaaaattcgtttctctaaccactaagctaaaagcagtgtatataagattttattctgtaatagtttttattatatttattctggattttctatataatacttaaatttgcactgaaatttaaacctcttaaaatcataggtagctatcatattttgtgtaatgtttgtgaagatgatgcaatattgttcacctagtgcatgttttattcctgttatattttacaacttattaaaactagtcagattaattggttaaaactgagactttgaaactaaaatccatagatttctaattattcagaagttctaattattcatgcattattaactggaatgaaatatatcattgggaggaatgaaattgcacaaaagctagtctccaagcctctcacaccaactgtaccaatagaaacataattattatttgactttttaaattcattgagttttagaagaaaagttcagaagaatgagtatattatgtatttattcttatgaaacaaatctcaaaatgagttggcttaaaaaaccaaaaccatttattgtcttacatgttaataggatatgggatttcgattttggttgattgtgatgctctggctaggggacctacacaagactgtggtatgtatcatcttgactgtagactttttatatcatacatacatctataggattaattgccacagaagtcatacaaaagtaacttcatgtacttgggaagttggtgctggtggttggctaggagccttgcttcttctatctgtggacctctttaaggggttaagtgtcatctcag

SEQ ID NO: 38702 - DNA, 1065 bp, Bovine  19866880640698
  misc_feature (1)..(1): n is a, c, g, or t
nttctgttggtgcattcagattttttatgtattctagaagaagcttcacttttgatatgtgtgatagattgaatttctggccatccatgtccctactacataaattgatatatattaccttcctgttcactttgggttttacattttatgccttcttaattgggtttggaacactgtcccctactttcacaatcacacacatatacaaacacacaactgcatatatttggtttgcttctgactcaaaaaatgttattcacatgtcctaaaagttttaaccactccagtgttcttgcctggagaatcccagggacggcagagcctggtgggctgccatctatggggtcacatagagtctgacacaactgaagtgacttagcagtagtagcagtaaagttttaaactaggtgtcatcagaaaaaaacttttccaagtcattatacatttggtatagaaaacatggcctaacattgagattggtctgaagaaaatagttatttaggaggagtgatgacagaaaataaatcagatatgaataatgtaaaacttaatattgcatttgaattttagatatacttttattcttagaaaaatatttggctatactttgcattatttatgagcatacacataatggtatttataaatttgagtgattatatgatgaagatattaaggccacagccaagtgtgtaatgatcatttctgtgatattaggcaataagaatctttatgttgtactttaccacctgtaacatatggggtttcataataatataaattttccatagttggtgtaaggaatattttgttatgtatagagtgttcagagaagtttctgatgcttaataaatgctcatgtgttagctcttattttgtttttttaaatgattaaagcatagtgtcatggtactatttgtatatatcaaaaacatgtgtgtaaaataaatagctaatggggaagttgctttttaccacagggttctgtatattacagcctggtgctctgtgatgacctggagggatggggtgggaaaaaaagctaaaaaggagggcttatgtatg

SEQ ID NO: 38703 - DNA, 1408 bp, Bovine  19866880642879
  misc_feature (1)..(1): n is a, c, g, or t
nttcactttcactttttactttcatgccttggagaaggaaatggcaacccactccagtgttcttgcctagagaatcccaggatgggggagcctggtaggctgccgtctatggggtcacacaaagtgggacacaactgaagtgatttagcagtagcagcagcagctaaaccaaggtactaagcttctgtctctctctccctccctctctctctctctctctctctctctctcacacattatatccatgctgatgatgttaatttaagtgacttaagccacttaagaggagttaatatgtaagtccaagaacccatacttgcttatgagcaagtgacttgtacttgaacaacttgatacttctggttaatgtttgaaaatctaagaagttaattagctaaaaaacagtaagtgagggagagaaggtgggtacagtgtacacagcatatactttataatcactctatatatcactgggaaataaagatgcaaactggtcaagctgctgacctgacagttctgttctacttctgccacttaccttggtttctttccaagctaacccacattctgaaacattcctcctctatatttttgctttttttttttttttttactatattatgtatgcaaacccaggagccataggctgccagtgaaagtgattccctcattattgtcctttcattctttttatgagagtaatcaagcttttcacctggagcaataacatgtatcagcctggaggtctctctatgccatgcattgaattcaaataatttattccttagataccctgcaggatcgatatatattttttctgatttaaaagaaatcaagacagcagggaaagagagaaaaaggagtggaaagaaacaaaatgaagtaaaaacaaagagcaaaaataaacatacaagacaaaatcagctccaagtatcttctcaatttgcttgctgctgctgctgctggctaagctttttcagtcgtgtctgactctgtgcgaccccatagacggcagcccaccaggctcccccgtccctgggattttccaggcaagaacaatggagtgggctgccatttccttctccaatgcatgaaaatgaaaagtgaaagtgaagttgctcagtcgtgcccgactcctggtgaccccatggactgcagcccaccaggctcctccatccatgggattttccaggcaagagtactggagtggggtgccactgccttctccaatgaggtcaatagtcaaatctaattaaactgtacatctaatatttgtgcattttctaatatctaaatgagacttcaggaaaaaaataacagcattaaattaatattaacacactcatttgtgtgtttaaagtcttcatcttaggagcatgttggtccctggcttctcagacatttcatt

SEQ ID NO: 38704 - DNA, 885 bp, Bovine  19866880805514
  misc_feature (1)..(1): n is a, c, g, or t
ncaggaactgtgcagaaagtgacctgggctgatctgaggcacgtgtattgagagctttaggaaaacgacttttcctctctaagcctcggttttcactagtatcaaagtgacagattcaaatgtctctcagaagttacttatatgaacaaaatgaaatattctttattttcataaagtacttagcctcacacctggtatacagaaaatgtagaatatatgatgattaaatatccatccccagagtaaaggataaactcatattttcccaaagcagtcttagatgacagcatgaattcgatgatagtagccaatccctttttatatcgagaggaaccgtagcgttatggggctgagaagtcttatttagactataaattaggttacaaacactttgcagtcagggaccaagtcatatatgatttctttatccccagtgcctagcaaagtgcccagtaaacagtagatgcaataaaactttgatgaatgcagctattaaaagggaaaaggcagagccaacaaacactttctgcccatcaactgtggcaaatgggaatagaccagtttagataattttagttgttgaatgagaagtgagtctgaagggcttgacatagccggctttgaattgagctgtgatactcttctgtccaccagggactgaaacaatcatgctgggctagcaagttctcagaacacttctagccacagtagctgttatgtattatgatctaattgccattgttttttctgcaaggatcttttccactaaactatgcaatgatacattctattaaaataatgtgtgtgtatatatatatatatatatatacacacatatgtgtatatatatatatacatatatatatgctccttccttaatgcaca

SEQ ID NO: 38705 - DNA, 852 bp, Bovine  19866880922290
  misc_feature (1)..(1): n is a, c, g, or t
natatgtgaagcaaggacaagatctttaacgatgctgggcttttccttcttagcttctggagagaccatcagcaatggcttctttgtggttcccagagccagggtcctactctgctgcagcagtgattagtctcatggcagctaaaggagaaagggcggtgggggcggcgggttcgtttacaagctgtgagatcactgcagacctacctcactgtgttgtcacggggcaaatgcaatagaacgcattgggtgatgtgtgtctgatccttgtctcccccagctgctgcccccctctagttattatatttgtctgggctttgtaggacttcacaagtagctgatttggtgactgctaggtggcctagtttgtgtaaatataatgtgttggtcttctccatgttcttttggggttttattgtttacaaactttttatattgagaaaaatagccaaagcatctttgacaaaatgttctgcaccaggcaaagagatctgaaacataagcttgggggcccctcttgaagttggggggggtcttgaactacactttcttttgtgttccccttcctctatttcctatttcaaacaagatctgtcctgaaaactagattcctattccctcttctttccacctttgtgcccccccgaaatagaccatatacctatacatttaatttgtggggtatctgtgattaagtgatttgtgcaaaaatcctgaaaaggctaagattgctccatcccttgttcccaatttcgagtcctgtccattccttgatgtaactcatgctaaatggactgatgtatttggttggattaagaccaactccaaaggtagagaggagcaatgaagggg

SEQ ID NO: 38706 - DNA, 1137 bp, Bovine  19866880948598
  misc_feature (1)..(1): n is a, c, g, or t
naatatagacagaaattccaagtagtataatgaaaagctactgttagaaacttatggttgaaatagaaaagtggattggaaagggaagtcagtctccttaaaagaagagatggaaaattggtaagcagagttaacagaaacattcaacaaaaggtaaaagttgtggaaatgtgtccaatatatatttttccaaaataaaatattttcagtttaggagagctgctcttcaaatacaagttcaagtacagcagtgtattgcacatgcagacatttgtagcactgcttcaattatagtctataagtgcctttaaagcataaatgtttttatgattgacatggggagagtagtaaagagtgaaggatgcaatggatttctggtgcaacaagggtgtgtgcaattcataaatacactaacaagactgttgtatcaaaaactaaatatataggacataaaaaaatcttattttacagaagcatgtttgtcttttgctttactagtgttgttataacacattaacaaagaaaagatgttgttttgcaaccttcccttcacacatttgtaggtcctgctgatggcagaaacaagttttgcctttcctctttgtagaattgaacttgatgaaactactccacttatctataattttacttttaataactttcaagatttcaggggctaaagagagcatcatttctatgatgcaatcatgaagaaggttgaatgacccaggtgaattacaattttgattcattttgttttgtagactgctgagtttgtaacaaaatgctcagtcaagagacaatctatctctttgcactaaaatcccctccttaaaaacctgtgattttaggcactcactgttccttagctttccctttaggttgctgataacagctttcatgtgaaataaactgtgataccaaaaatatgccatgatatcgctctaggctttttagatcaccaaaaaatatgctgtttttatgatcactgagttcttgtgctttgtgtcttctactaggtcaagtattaatttcatacatataatattattttaaaattatcaaaaaattcaaattacaaatagcttattttaaaagttgatatatttcacatataaatgtaatatcacagaaatg

SEQ ID NO: 38707 - DNA, 1100 bp, Bovine  19866881179598
  misc_feature (1)..(1): n is a, c, g, or t
naggtaataaattaagaacatgtgagaaaatttcatggaaatgaagcagcaggcttacatatactaagtccttgaatcatttctcaaaagacatgtaatccataaaattattgtctactttgttctggagcaaggcaaaaatgcactattcactaaactatctttgataatataagggaagattgatttcatctttttcccttttcatatgaatagtcattctccccagagaatgcctggtgtaacttagtgttaaaaaagatacaaatttatgtgcaccatatgcttccttggatctgctttatggcaaaggctaaaaattattgcagcaaagtagtgatttgtgatcaaagggtacagcctcagctagttcacagaaagggctgcgtctgctctggactagaactgagtgagttcagtcacctgaagtcacagaaattaaaactgccatcccaagacattgaaagggctgtttctacctttctcaaggattctgcaattttgtgccttaattctgccacctgctggtatgataaagaattgaaaagagttgactagacttcaatgtgagttttgcaagaaacatcaaattgtttcaaattactttgacaaaatagctcatgttttgtcagcaaagttaatgtgtttcttagactttatgatttcttaaatagttatataaatatatttagtggaggaagataaagattgtgttttatgtcaataatttcctattttccataatttgctttaaggacttgatgttaaaagattttcattgtcagggactcagaaaatatgcaacttatcaagtaattttataggaaattcaggtaacaaatacatatggcttgcaaaactaacaattaaaaaaatagtttgtaaatttccttggtcttgccagtttcttggcttctcatgccttctacggtaatgtgggccagggagtgtagccacaatacagtcacatgagaagaagctattgtgttgttgctgtacaataatcatacagaagaggagctaaatctgtgctgagagaaattataggggcactgtgtaattatggtttgcaaggaaacctatatgattataatttgagg

SEQ ID NO: 38708 - DNA, 1155 bp, Bovine  19866881866079
  misc_feature (1)..(1): n is a, c, g, or t
nttctggaatctattgactggagaaattgtaaaatccttaggaggaaaattttgcaactgaataccaaggttacaccatactgattcctccagttctttccaaaaagaatctatggccattcacttggtttactttacaataaggaaaggagaataattttatattttgacaactaatgaacacagttttgagatggcatggattcccagagacctagtatatcagcatggacatcatggtggaggcagcttatggggaccaaataataaatatcatagttgaccatgggccctgcctgtgggggtaagagttaacactgcagaaattcacatccccgtctccgagtttcacaaagcaatattttctgtgctttggtagaaaaatgaatgaactaacctggaagcaaagagagaggaagatactgtgatccagccaaaaaaaatgtgacagaagtagactaaagataaattgagaattaaatttaaaaatatgctttaacaactgtgtctgcttcaaaggattagaggaacaacaagggaaattaaacattaaaggaagatcataagtatatctaattgttatggtaaaggaggtctcaagtaaagagtgtttatgcagtcactgatgttctgcaagttatttgagacatgggaaactcaaacactgagggaaggcagtgctttggggagaaccagctggtagtttctcactggatgcgtaatgtaacagaatttagaagaatcaatacagtcagcttcagttcagaaatctgttaatgatgatttttcagttggtataaatgttcagagaagagggaagtttttccaaagggctgaatttatggacctagagaactcaggaagagaagagaaaaatgagtgaaagttagtcaacaaataaaatacattccaaaatggccttgagtttctcataaaatggaagaaagacagactgaataacatgagagtggattatgttaaggctgaaaatggcaactgtggcttgttctcaatttagagtgccctgttcatcatagagaacatatttatgcattgtgattcttgcatggagctattaaggaaatggaaatagagtggtttcaaatattgaagagctccattatgggtagaaagcataccaaactattgttatta

SEQ ID NO: 38709 - DNA, 739 bp, Bovine  19866882123952
  misc_feature (1)..(1): n is a, c, g, or t
nacatggagaagaccacacattatatttacacaaactaggcccctagcagtcaccaaatcagctacttgtgaagtcctacaaagcccagacaaatataataactagaggggggcagcagctgggggagacaaggatcagacacacatcacccaatgcgttctattgcatttgccccgtgacaacacagtgaggtaggtctgcagtgatctcacagcttgtaaacgaacccgccgcccccaccgccctttctcctttagctgccatgagactaatcactgctgcagcagagtaggaccctggctctgggaaccacaaagaagccattgctgatggtctctccagaagctaagaaggaaaagcccagcatcgttaaagatcttgtccttgcttcacatatccatccctggacagctcaagatgggtacagaggcattattcttataaacctctccttaccaacttccattttttataaaaacacacacaccctgttgtgcatggtcggcctagcccagtcaggtggaggatggatctggtatataaagtgagtaatgtgccctaggattatagatctggaacaggaatcctttgtcacacatacagacgacctttgcctaatcttggcttcccctctctgcacttcttacctggcccagcctctcctaacctctctgcaccacgttttcctgttcagaccaatttccaatctttcagtaggaaggagaccaagtcatgggg

SEQ ID NO: 38710 - DNA, 1497 bp, Bovine  19866880437880
  misc_feature (1)..(1): n is a, c, g, or t
ntgatttttttctcattttttaaattagttggagagtcaaaactctcttttctggctcaaactgttcataggcttcctacccatctatcatggaagaagcacagtgccttttaacaaaagaggaaaaataaagcataggatgcaaagtacatcaaaattaagactcaaattaattgtttaagtgaactgtaactgctttgtaaaaagataaaattgccctgcaagatcagataattttctattcacttagagaaaaataaaatgtgatttccaaactagcagaaagggcaactctactgaaaacagaacgatggagactactggctgactgcaaattgtatgttatttaattaaactgtattacaaatgtataaattttctataaaatgtgaacatatttacacccaaaggaggagatattaaaaactatgtctgaaataatgtcatctcttagaaaattttcatcaaatctgtaccttcctaaagtgtctacatgattaatgccatcctaaaccctttctttggctttcagactctcagtgcctctgtttcatctgatccttcaaatcagtcacccttcctcatcctttaacttgttcccttccacacctgtcttttgcccttgattctaatcaagacatatttgggaatctcaataagcttaaaataagagaatagtaaacaaagggtacacaaagatataaggtgatctttaaataaatctcatttcaccatattgtagtagaggaagcatttaatgagttttacatctggcaccacaatctaaacaccctgaacataattttccagaaaacgactagttagaatctgttggagagcctagacagagcctttagtcagctgatgctcggtaccacacactgcgtgagacggatgtacgcttacttggctaataagtccaccttcaaactcagaaaactcaaactgaaataaataatcaggtaactatctcagcagccacagaaaaaaagtaaaaaattagtaagtttctctgcaaagaaatatcacacactacaaaaaaaccctgtttcaccacttctaagaccttgtcaatgataagatgcactcttatttgatattccagcaagttttttttttttaaactgtcaattcaagtatgacatgctttgattccaagatgcattctgatagaagagatattaaatgtgaaaagaaattgtatctcctaaaattaaaatgtgataatctttattttgactttagcctttgcctcttcaaagggaagtctcagtctcaatcgtagaatttctattttcaaaatttgcttaagcagaaaatgactttataaatgtagacatcaaagcccaaagagtgacttgatctgatatcagagttgtagacactggagacaaggagttaatataacagaaaagaaaaatagtctttgctttttgagggctaacgtttgggggggtgtgtttactgtatggttctccataccctatttaattctat

SEQ ID NO: 38711 - DNA, 4499 bp, Bovine  19866880468515
  misc_feature (1)..(1): n is a, c, g, or t
ncttaatttgggacacatacattttcatatgttatagaaaaacagaatggcagaaaacaaagaatataggaatggatcttgaattacagttctggaagggattgtataaaatgagtccaacattttgaatttatgaagaatgtaatatcccaagacactaagggatgtgccccaggtcacagttagctaattgcagaaacatttctagaaacactaatcaggttacaaggctccaaatcaatttctttctctgttgtatcagccttttgaatatgtttaagttgggccaagtcattactcatgtgcattctcatcttagtattggtcatagaaaagttctgttagatctagttggccccatgagggtagccacttcagggttacccaggtgacccctggataaagtcttaaatgacttgctgcacattccagctcagttccatgggcccaatactgatggttcttcatcaatgtgtttttaagtttttgccaaaatatagggtgagtgaatttccctcatgtctcacaggggtgttgctaaacgacttcctcagacctacactctgtgatactttcccatgagttgttcccagtccagtgtccagagttagcaggtttttatttcttcgtttggttggattgagaaggaatcttcactttttgacaccttcaactttgtatataaaaaactactgcaagaacatcctgtgcctaggtctctccaccttggaggtttacctgtggttctactcctgtgaggatggagtgccaccccaccccacccttcttctgctctgctgccagttacttagctgatatacaaacctggtattttttgatctgcaggatatatagttagtatacctgcaatatacatacatacatacatatatatatatagttggtatatagtaggtatatagttgtggtgggagactgttggctctttttcaaataatatatttcactctttctcatggtataatgtgcacaaccagtatttaaaattttggttctgtttgatcagtctgaagttagtgtaaatcttctaagttttggtaataccttgattttcatttcttcttttcagtgttgttctgaagttttttgttttgctttttcttatgctcccaaggtactttattaagaagaaaggaaaggctatatgagaggctgatacagttattaatatattgtaaactggaagcatttattatttctgattttataatcataaaactctctaaattactttctatttaatatgatacagatttcaaacataatcagaatgagggcagacagtattaactctgaagagtagatataaaatgtgtgcatgaacagaaaaattccataaaatgcttatcatgttggtttaaaaacaagtgtggaataaagtaaaacttcacccaaactggttgattttgaaccccaaatgctccaaataggaagtaaaatttgtgagtttttaatatattctcctttaagcttaagagttggaaatagattgtcaagaaatgtaaaaatcatgcagcacattgtgtctgatgcatagcagtaatcaataaacattattttctctccctttgttccttctttccattggcattcttccttttgttcaccccttcttttctttttgaattttgacttatactgaagatgcaaccctataacctaatagcatgtgtcaatgtctttgttagtgggagacagccatggtgcaattccacttaagtgtttattgtctcagatgaataatactaattttttaagatctgtctatctacccatgcatttatccatccatctgtctcttctgaggaataagtctttggttactaatttttgaaaaagtaatagtgggaaagacttcttttcaaatagtcttatatttcctaatgatggcagttcagtagaagaaaaatgctagaagcaataccactaatttcaaaagagtagaatataaattatatatgatatctctttattaatacaagagtaatgactggagaagtatttttgctatttctttcccatctttaccatttttctcagtacctaaactttaaatatataattattaaatctagtttcaatatttgacaaaatactttgaaagaaggtatttaaagctctatagcttgactgctggtcttttatacaccctgggtggctaaagccagctgtatagaaagttcttcaggtgtcttgaagagctatcaatggaccattaaatggccctgtggtgccataaagctatattcctagcaacagttgacccctatcaccatgttcttccctgcctgtcttctaaaataacagttcgacagctttatgtacccatgtgtagcctggtaatgggatctcaggcaaggtgtcaggatcatgttcagctcagatatgttgacctgtggtcaaacaatggataacgtgtcagtcacaggattcattttcaatatgagactttgttctaaactgtgacacatttttggtatatgtcacttttgtgtaaatcttcaggtgaaatcataattttgaggaaaagatacaggtaaatgtatttgggggtcctttctgtttttcttttcttaatgtgtgtgcccctgtcaactgccagtcaagttcatggaattcacttcatgcatatctttgggaatgctttatggtcattagagtcaaatgggaaagatggcaaacaaagcacagataatgacaactaaaggcagcatgctaggtgaatgtggtgatgcacaatttattgctttgaaagatgggtaatatacagataggtcaaatagataggttaggtgatggtgggcaaaagggttttaggcttgttgtggaggaccaaattctcgagaagagtagaaactcacacaaaatagtatttaaggaagattgataaaacagtgggccatcaagagcctgaaatagaattatgattagagacgagagactataaaactatatttgcctacatgtaatgacatgggctccaaaatcactgcagatggtgaccgcagccattaaattaaaagatgcttactccttggaaggaaaattatgaccaacctagatagcatattgaaaagcagagacattactttgccaacaaaggtccgtctagtcaaggctatggtttttcctgtggtcatgtatggatgtgagagttggactgtgaagaaagctgagcactgaagaattgatacttttgaactgtggtattggagaaggctcttgagagtcccttggactgcaaggagatccaaccagtgcattctgaaggagatcagccctgggatttctttggaaggaatgatgctaaagctgaaactccagtactttggccacctcatgtgaagagttgactcattggaaaagactctgatgctgggagggattgggggcaggaggagaaggggacgacagaggatgaaatggctggatggcatcactgactcgatggacgtgagtctgagtgaactctgggagttggtgatggacaggaaagcctggtgtgctgcagttcatggggttgcaaagagtcggacacgactgagcgactgaactgaactgaactgaactgaatgacatgggagccatagggtgcagaagaaaggtgatagcccaaaaagaaagaggcagattcaaaaaaaattttgtgaaggatcgttaaaattcagatgcgaggcataagtggctaaatgaaaggatgatagaaggaggaatctaaaaattagttctgctggaatgtgtatccctaaatttttctctttacattatattttcataaaatagtcaacgatcttaacttatctttccaaatacatggcactaacatctaaaaggttacagcaaatatactaataatggagagaaataaagaagtaattgagattggaaatggtgaaaagagaatgatgggaaagcaggaatagatattgcccccctatagtcttgagagataaaaagaaactgccaagtacactgaggctttgatattgcatccctatgtccatgagtgtgaagagccaagctggagccaggtcagaagttgctgatgagttcttacctggtttagagtcatcactgcagccctaaagctctgtaaccctacattgctagagaggtggttggagaaataccatagcaaggtcttcctttaatagcacacatttcttgtttcctctgtgccaggcagtcttcatagatctttatgtgttttcatttggtcatcacagtacttctctgtggtcagtatccttattatcccctattttgtaggcaaagaatctgagacccagtgaagttaaatacttgatttctgttacaaagctgatgaatgttagatatgaattaaaactctgacaattatcctgagttaaatgaaccagtgctgctcacccgaagctttttctacagcaaatatcaaaagcacactgaattactaaggaccccattaaaatcagaatggagagtcaataaggcaatcg

SEQ ID NO: 38712 - DNA, 3608 bp, Bovine  19866880554133
  misc_feature (1)..(1): n is a, c, g, or t
nggagagtgaggactccatgagatggcaacatcacgaggagggagagggacagggtgtactacttaagatgacctggtcgccatgtggttgtaagccagagcctcatccagagagctgggtgttgtgaagcactgacctagattagaaattcacaggggcgtttaagagcactctccacattgatgagaatgtgattttaaaaaagactgaagagaatgtgtccactggaatgggtaaagggaagatatatttgaggcaagactcttgcaggggacatatccttaggtctgcaatgttgtagcagtagacccatcagaggcaaggtcttgcagagggcacaatgttatgtttttatggtttccttttttatagcagatattacctaattaggaaaaagagattttattgcagattttactttactgtaaaagtcaaagcactttcaggaaatgaatgtagcattctcccaaagtgcttagctaaatgagaatttcaaaaaatagcaactggcaaaatcttcccctttccctgtgaatgattgaggaaaagagaaataatagaataatctgccagaaaaagataaatacctgttcatgtagatgaactctctagtgctagacattgtaaaactgttcagtgaattcgatacaaatatcagcctttatgggaatggcagagttgaacttacatattcattcaattttgattatttactactcacagccttgtgctagatgttattaaggtggctccactaatgcgctctctttctgcattaaagttatgaattcattaagaaatatgacaaagaaatgggtttgtcctaggattcccatccatttcgaaatccccacggagactatcagtcagtagttcagcttggacacaccaggtgtagaccacgagtttttcacaaagatactgttaaagcaacactgatacaataggaagggttataaagaaggggaaggaagaaggatttgataggaagagtttcaaactgctgtgcagctccaagaaacttctgctaggttgatccaaagtgcttcctgcttagacattcaaaggaatggactgtagtgatatacagtgatatacccacaagtttcagttatttgctgtgatcaacctgatgtagcaaagcctcaaaatatagggtcatccagagtgcagctctgcaggctgactgcccatgacctcagtagcaggagaccagggagctgccattcctgtcaccatacccggtgtggtactgtaattcttttcctttcagactaaagtccagtcggtatagttatgtactggtttaaaaaaaaaaatcattttttccatctgcaaatgtctttgctttaccttcatgctttaagtatattccctgggccacaatactgtatcagccgattttacttcagtcttttgaaaacagtgtcgcagagtcttctagctttcattttgtggtgtatcagttttcagtctaattctctattttaaagtaagttactctttctggttaattttaagacccttgtctttgatgttctgcaatgtcagtacagtatgcccaggtatcatttatttatgctaacagatttgtttgcattcctgaatctaggcattcacatctattatgaattctggaggttttaaatttttttcttctgcttccattattattttttttttctggatctcaaattagacttacattcagccttttccctgcagttgtaggaaggtacatggggatagactttgctaaactgaaggaaaaactgattaaaattatgatacttctaaagatctcctccattgcctaaggatgtagtgagagtgttgtgttagaaatgtctgagcagagtttgggtgtgcctgaggaatccttcttgctaatattccaacatgataaaggtgaatttataagataatcttcaacttccttaaaatcttaaaattctaattttagtataataatgctcaaataattttatttctaaagcctctaaagagttgttaaatatagtactttaacctacatctcatgataatatgtgtaaaaatggcctatcttaccactctttcaagaatgccaaacttaatttaaaatgttctagacagttgaccttgatgttcactcagcatggattactgttgacatgaatagtgcagttacctgtcaaaattattttagattgcctcagtgttcttgtgaagctttaatcaatttaaaaatgtgtattaaaaagcaaatcttccctctttggctacagttcccatttactgttctgtaagtcttaaaaaaaaaaaaaaaattctggcctatatggtctttgaaaacagaaccagtacttctgtttatccaaatgttgtcttcagaaagcgtgtccaccactgctcctgatttcttgtactctttaggttcatcatgtaattcatattgtttcaggaaaagggaccccttccagggcccaaaactgggctcttgtctaacactcagaaaagaatttttcaaggagacacatgctgacaaagcaagagattttattgggaagggcacccgggtggagagcagtagggtaagggaacccaggagaacagctctgtggtgtggctcacagtcttgggttttatgttgatgggattagtttccaggtggtctttggccaatcattctaattcggtctttcctggtggtgcatgcattgctcagccaagatggatgctagcgagagggattctgggaagtggacagacacgtggtgtctcctttcgacctttcctgaactcttcctgttggtggtggcttattagttccgtattccttatcaggatctcctgtcataaaacaactcatgcaaatgtttactatggtgcctgtccagggtgggcggtttcagtgtgcttcccctaacaatatcaacctactcccccccaccacccgccccatactgtctttattatcactttcttctaagtcaaacaaacaaaaagtaaatacattaataggtgtagaacatttaaaacaatgacagctgatacatgagagagtgacatatgaaactgggagaagagtttgtggcatctctagccttgttcatggtcatttgggtcatctttatcgtgctgtcctctgtgactgatggtgtacaacgcccctctgctccctgtctggttaaaggacccctttagttattgtacagaaacatgaccgtaggagcaacctacacacatgaacactggaagtcctgcatttccgggagtgagaatcagtgtgttgggagtctgtgttttctgcaaggattgtgacctaaagctttttaaagaaccatccacctttggggaagcgtttgtgaattatccatcaccagctgtttgttcctggataccaccacaaatactagattgacagttaaagcggttatttaatttgagacacctctggatctggatgagacattaaattgtcttcccactgccaccccccgcccccccattaggtgaacagtttttaaactattagttaaatttcaagtcttcagaaaagtatgtgcatggcccatagcacagtacaggtagcattagtaacagtttccattgtagaaggttttca

SEQ ID NO: 38713 - DNA, 1103 bp, Bovine  19866880629627
  misc_feature (1)..(1): n is a, c, g, or t
natgttgaaaaaaatacataaataatgtggagagactatttggagaccatagcatcattttggtgtaaactgatggtgacattcagtaaattggaggtggcattgaagttgtagagaaaaagactagtaactaatgagattttttgagtgaggaaattgtggtgcctctgtttctatcttgggcagttgggtacatggtgccatttatttaggaaaagaaccattgagtggaataggatacatttattttggggcaaaggaaagataaaatattatgcattcaggataaaagttattttctcaaccacttattatttatcttttcagttattaatgatgatggcttgaatcctatatgaagcttcgtgcttgcctatgtctaaggctgctagtctttgaaattgggtatataaaaagtctgaatacaaacaaatgaaaagcaacaacaaaagaatggcaataaaaataattaaatgcattgtagtaaaattaaaggaaaaaattttatatgtacagaatttaatactgtgtcatccaaggagcaatagcaatggcaaagaaaacaatcattaattaatggtactctaaattctctttactcttttttttttctgattgtaccatgaggcatgtgggatcttaattccctgaccagggattgaatccgtgccccctgcagtagaagtgtagaatcctaaccactggaccacgtgggaattcccatgatactttttatgcttaaaatattaagttttaaatctaccttagttagatgtaatttataatgtcaacagctctaaatgctgattcctatttatttcatgcaagacttgcatggtgttctataaaacttggtatagcacctgtgaactaaagttaagagcctaataaatatgcttttaatgactccttatctctcacatttcactttcatttttatctctcacatgaatacttgtacctggctatttaaaggtaaattctggtatcaaatttaaccataccttataactaagtgttgggcaggaagtgtagtgatgtgcacactaaaaatgtgatttcttttacaaggaaaaaggttaaattagaagttaggaggccaa

SEQ ID NO: 38714 - DNA, 2847 bp, Bovine  19866880652615
  misc_feature (1)..(1): n is a, c, g, or t
ntgaaatttctcttaatctcttgtttaactatttatttcaaatctgaaacctaaatctactgggtaaaacatacacaaaaaagaaaacttaaaagattatgcatcaatctacatacggcagcatccttgttatctccaataatgatttttccaaatcatgaagattaataatatataagtagtttaaaaataaatgatggtgagcaaggaatattacagtgagtgctttaaagaatacttttacattaatttgaatagaaatgattctgtagaaattaatgcctaacactatttttattgctataaagaaaatgtatatatcacagtaaattgttggaatggctttttgttcactataaagcattcatctgactcattaaaaaatgttttctatgttttataatttctctttgtgttattgatcctttttcccacataaatattcacatttttattctttatgagttaccaaaatgtttgataccgtcagcagagctgggatttgtaagcaaactcaaaagctctgctatattctgatatttcttaaagcaattctctattcagcttcattcacatctggttcatgctttgtttcaaacaaaataaattataataatgtaagcttagactatttcaaaactatttcagactactattggttttgttgttcagttgcccagttgtgtccaattgtgcaaccctgtggactgcagcacactaggcctctctgtccctcaccatctcctgaagttcgcccaagttcatgtccattgcattggtgatatgatccagccatctcatcctctgacagccctattctccctctgccttcaatctttctcagcatcagggacttttccagtgagccatctgtttacatcagatgaccaaaatactggaatttcagcatcagcatcagtccttcaaatgagtattcagggttgatttcccttaagattgactgggtttgatctccttgctgtcaagggactctgagcagttccaacaccacagttcaaaggcatccattcttcagcactctgtcttccttacagtccagtgctcacaacagcccatgaccactgggaagaccatagccttgactatatagacctttgttggcaaagcaatgtctccgctgttcaacacactgtctacgtttgttatagccttccggccaagaagcaactgtcttctgatttcatggccgcagtcaccatccgcaatgatcttggagcccaagaaaatgaaatctgtcactacttaaaccttttctccctcaatttgtcatgaagtaatgggacaagatgccatgaccttagttttttttttaatagttttaagctggctctttcattctcctccttcaccctcatcaagagggcctttagttcctctttgctttctgccattagagcagtatcatctgcaaatctaaggtcattgatgtttctcctacctattacacttattccagcttgtaatttatccagcccagcatttctcaagatgtgctcagcatatggattaaacaaacagggtgatagcagacagccctgctgtactcctttctcaatcctgagacaatcggttgttacataaagggtcctaaatgttgcttcttgacctgcatacaggctcttcaggagacaggtaagatagtctagaattactattacatgcattttagagaagagaaaactgaggtacagaaaaattaaatatttggtttcattaggcatttcattggtatttctaatcactctataaggtgactgagtagtctgcagaactttgtcccccatcctcactaatttctatgactgtaggagagacttacttacatgttctactgatgatttttctcttcattcctctctcaacgtttatgttatttttatgaggaagaaaattgcatgagatgattctggtaaatccctttgctcagtgttgtccaaaaaaagtaactgctccattatatgtttatgatgtggatgctgatagcaaaaatttaggataacagggagtattttgtaagctttaagcaaggttctaacaatttgtaaattccaggtagattgtctacaaatgaattcctggaatatagcctttctattagcagtaaagtcacttttttattcctttgaaatatgaaacctttgttaatgtgtggtggctggatgacaaaagggtacacaaacagctgctgtattacaggtaaaatgaaattgctttcgacaggatgggcaaaagaaaccccagcaggctacagggcaagatgcagtgtcagcttgcataagcacccacactgaacggatgcaaagaagctggggcaagacagcagcagacagaaccacacaactcagaaacatcagacaacttggcggctcactgtggaaggaagaaaaagaaaggaaacgctgtttgacaacagagtaaaatcagtcttcatttgtatgcagctggaaacaagggtctgttggctttcacttgccttttaaaccagatttgcacagacatatagccacattatctacatatgatacgaaagtgaaggacagtggtacatgtgttaatccttctacctttatcccattgctttgaaaattctccaaaaaattcttaaattcaacaaaataattcaagtgcccaggggacaagtgaagtcactccccagcctggatgacactgaaaagatattcccttcttgatggatacaaggacaatttaatggcagaccagacactggctattccaggcagaagaggagttatatttggaattataaaaagattgtggctaccttcatcccagagtttaagatgacatctcactttactcaaagtt

SEQ ID NO: 38715 - DNA, 1501 bp, Bovine  19866880664857
  misc_feature (1)..(1): n is a, c, g, or t
ntatttcacaggagagttaaatccagttcttgttatgaatcagtatgtagattgtttattacagaagtttactctgttctaactactgtaaaaaattattataaaaagagtgagctgaataacttgaaatatgctgcatggtcaaagcagtcaggcagctattgtagcaaggacacagataattcaggttggatagctatatacctctcttgtgtcagagaaaatattttctacagctgtcacctttgataacttggaaagcagactacatgcctactaagtttgccattctagaagaagcatttgtatagagccagaatgtcaacatgtatcagtggttccttgaggattatagcagggtactataaaaaaaaaaacacataggtttaggcaaaatttgtatgctttagaagcaagcagtggagttaattaataattcaggccctttaaggttggaaagctaactgcaatttcattcctcccaagactggtgtttcagatagcctcaagatatataccattgtgtatgtatatgtatgcatgcatgtgtgtgtatgagagagagagagggagagaaagtagagcataaaaataaataaatggagcaagaataagttccatatccagaaaagattttaatgtgaatattagcacatagatcttactataatcacatgttcctagaaactttttatattttttggagaattatattactgatgaaatctaaaacttagcctgagaagtatgtgcctaattgacatttgatataactctttggatcccagacttacaccttttaaaagtagactatggaagagtctcattgcccaagaaaggcatactctcctatttacactaaactgttgtattaaaggatcatggctaagtaaagaatgtctgagcaggtgaattcagagccaagaagagcaatggatgatgtatttcctttgcttgaggtattttctccatttatagtgaagattgccatggttaagagtaagctggtcataacttttgggctagcactttgactcaaagagattatctgagaatatttttcatgtgtgtacaagacatatgtaaaaggaatccctttctagcattatttataaaagaattactcacacaatgcagctgtaagaaccattttatagatatatgatttcaaatgtgggaagatctctaaaacttagtaagattttttttttaaaaaagattatataacagtatccatggtatgctctatttctgcaaaggaaaaaaaaaaaaaaaacaccaaggagtgaactgtgtatataaaagtgcaaatgggacctaattaaacttaaaagcttctgcacaacaaaggaaactattagcaaggtgaaaaggcagccttcagaatgggagaaaataatagcaaatgaagcaactgacaaacaactaatctcaaaaatatacaagcaactcctacagctcaactccagaaaaataaatgacccaatcaaaaagtgggcca

SEQ ID NO: 38716 - DNA, 922 bp, Bovine  19866880696570
  misc_feature (1)..(1): n is a, c, g, or t
naaatgtaattatgtcactgaagtacctccaactaagggaaaatgagaaaataattttcttgcaatgaactatgaagcttgagatagggacatgttctcattacttttccattttatttctctgggactcaatttctcttggaaatagaatctatttataaaaccaacacaaaaacactgctacattcttttaaagatactgggaactaaagggatactcctaaattcaaaaccactattttattaatagccgtagtgaccattaatttttttgtctcttttcctaattgattttgacctgccaataaaaaaatttaactcctgaatggaaaaaaagaaaaaagaatcactgttatattcttttagatttcattctttagatttcatttattagcttaaaaagctaaaccatagaaaaatcagtacgactggttaacctaaacaaagattaaaaattttagtacctataaagtgatataacctatacttgaatagaactttgttgtcttagtagttatatcacgtatatctgaaatactaaaaaatgtacagtccttaagatatcaatccatttcatacagccctggcaaaagacagagaagcgatgccagctgattctcaaccctgtgactgagagggaatgattaagaacatagcatattaaggtttttctggagaaagagaatcaataagagatcagatataggtagatatggatgatatagatttattttcaggaactgactcacacaattgtggaagctggcaagtctaaaatttgcagggcagaccagcaggctggagaccctaggagagttaagttcaagttacagttcaaggccacaagccaaagtccctcttcctctggaaaactcaatctttttcttttaaggccttcaactgattagaagaggcctatcta

SEQ ID NO: 38717 - DNA, 1551 bp, Bovine  19866880703606
  misc_feature (1)..(1): n is a, c, g, or t
ntgatcgtgcgtgcgtgcgaagttgctttagtcgtgtctgactccgtgtgtccctgtgaactgcagcccagcaggctcctctgtttctggggttctccaggcacgaatactggagtggattgccatgccctgctccaggggatcttcccaacctagggatcgaatatgcatctcttacatctcatgtattggcaggtaggttatttactagtgccacctgggaaacctgaaaccgaaggtaatttcatggtaaatcttcctttgtgaactacagaattaaagctgtgaatcagttcatattgatgtccccagtgccagcttggtaacagtaagaatttccttactacctctcgctggagttcaagatcatttaagaatctgtttgtaattatttcagtcttcttgttattaatattagtgtactaacatcagtgctgttaatattaacagtataataattatactaaaatactatgagcggtaataatattagtattgttactgttactttcccttacaagcattccttgtaaaggaatagttctggagcaaactgtgcttggtttatgcaagtgttttcacctagaacagccgtgaatcaggctattctaggcattttctttcacaagtcttaaatatcttgggtgtaggaattcaaagaggtgtctgtaaaatcttcattcttagtaccatataagccacaattttagatctaaaaaagtcatgtgacaatatgtttggattagtaagttcatacatcctgaaggctaaatttccttacaataagtaaaagtgaaatggttatatggaaactactatagcatacaggaaaaattgcaggctttgggaaagcctttgggaaacattaactcaaattctgttttgattttaaaactttctgtattctagctacttggccttatcacctttggcaaaatgaagaaaataatgccaacttacagctctattgggagggtggaaaaggtaatgcatgtaaagcacctatattactgccacagaatagatggaaaataaatataacttctcttttcttttttcatactagcagataaaactattaaacattatttttcttaattagaaataatgtaagtgtatggtgcatgaagattttaattgattcaacatttaatgatttattaagttgaaaatagcaatcatataaaacactatgctattttaaagtaaagcaagcaaaattgcagatataaaaagagaaacattcttctgatgtagtgtgaattaagttgttatccaggcagccttgagtttggattctgaaaacaacatttttgaaaaattcaaagttcatcctttgaggaaaaaaatcaatgatatattgtcgacttagctacttcagttatcattcctattagataggaaaccatatggaagaaggggtaaacactacttcaataactcagatcttagaatcaatatggtgatggaaatgatacctatgagagttaatgaaacacctaggacacctttattgggggaaacactctagaaaagaaatgggaattgaat

SEQ ID NO: 38718 - DNA, 589 bp, Bovine  19866880713102
  misc_feature (1)..(1): n is a, c, g, or t
ncaaacaataaactgcacccatgtagttaaaagaaatgtcactctggagtcactaactgggctgatgctaatgtgtgtttttctgaagcaaaaatactttactgtcaagcttggagaaaaacacagagtaaagcttgtaactcaccactcctttgctgatttcttttgaagactgataaaagtttggcaatactgattttatcctctaataatcatcctgtaagcagtatttcagaatgtcattacaaccccaggaaaagagagtgagaacaagtttaacgctctgtgtacccatttgtgtggcactagtggtaacaatttctgataatgtgcctccatttataggagcagtcatttgagttttcagcatggctggagtagttttttagtttacaagaaggcagtaccgatccatttcagaaaggatatgcgttaatgtgtatctaccctggaagagcaaacacggcacatccacaggaggcttggtgtttaatctaaaaagagaagcaaagggtattctcagttctgagaactgtttctcacataaaattgtgttccctagaaaataatgaaagtcatttttgggaat

SEQ ID NO: 38719 - DNA, 1396 bp, Bovine  19866880758999
  misc_feature (1)..(1): n is a, c, g, or t
nattggcagatgcaagctactctatataaaataaacaagaacgtcctactgtatagctgctgctgctgctaagtcgcttcagtcatgtctgactctgtgcgaccccatagacagcagcccaccaggctcccccgtccctaggattctccaggcaagaacactggagtgggttgccatttcctccgccaatgcatgaaagtgaaaagtgaaagtgaagtcgctcagtcatgtcctactcttagtgacctcatggactgcagcccaccaggctcctccgtccatgggattttccaggcaagagtactggagtggggtgccattgccttctccgtactgtatagcaccaggaactatattcaatatcttgctataaactataatagaaaaaaatttttaagaaaaataggtggattagggagaatttcataatactgtacagcattgttctaattgtgaaaaatacagagtatttcaatcaatgcaagacaaaataattttcttctcattaaaaaaaatttttttggctttactattgcatctgacatttttaggtcctattttgtttctctttttaaatttgaaacactatgttttcttatgattaagtgagcaaaacatttttcaaggtaatcttaaagtgcagtgttaattttacatcccacagagtcagacacgaatgaagcgacttagcagtagcagtagcaacagtaagacatttctgctgtagaaatcatgagtgaggatcatggagtaaatgctaaaagctggaatacactttctccctgaatatcagactatcttgagtgctgttcatacgcccacaggcagttttcaagttgataatggcatgaggatctttcaccttcacgtagaaagtggacgttctatggcccatcagtttctggttattctaaccactattggagtcatgaaaaaaacatgaacaactttcatttcttctcttctatttattctgtcatttgcagaatttagctgaggtaaagaggcacctttttctcattaatcattgtaagttatggaataattttattgatgggaatgttttgggcagtgtgcccaactcaaagtagaacacgttaagccaacccattttctcataagatgtatgtttctgtatcttcaaccaatattccttagcctgctgaaatacattaaaaaataggaaagataaatagtcccatctggctgttttgaggtagcggattaaactataaggcacgtggaagagataggttcatgcctgcttatagtacaataaataagtccaaaaatggacaaattctttataaataaaatcttgaaataaacccaaagccttgaaatataaaacactgaatgatcaagttgaaataggggcctcacttcacttagtaac

SEQ ID NO: 38720 - DNA, 754 bp, Bovine  19866880807287
  misc_feature (1)..(1): n is a, c, g, or t
nattgaatggctggcagcagatgctgccgtaaaagctcaataattaggaacccaatatggagtgatttgattgaagaaaatttcataaagtaaagacatcttaggattttcttacagttttatgtcattttactttcttcatgattatcactgtttcattattcccaaatgacttttagaaatatttttgcagcctattgatatagaattatttattaacaaatgaaatgcttgtgttagattttctttatttcacaaagagcagaagtaattatgattaaaatgtagtccaggtgccttcatctgtttttcgaatttcttccttttatttttatttcattgaaaatgtattcattaccacattggagaactgatattcatatttagttttattaaacccattttgtatgtatattcttgaaatatttcaaagccattgaagatattgactgatgaaataccatgctggtgacatggcagataatgatttgtttttcaagaaacactttgggcatagtagatgatatatttattgatttatcagtatatgtggagaaagagcacagtaatataaagtaaaacatgagtctcttataccataaatgtttctggtttgaagtattcaaagtaaaatatgggattcaataggttgattttgcctgaaatgtaatgacatgctatgtttacatttaagaatcttaaatctcaagaagacatagttgtctctgtcccctatttttgccagagtgatgaa

SEQ ID NO: 38721 - DNA, 1571 bp, Bovine  19866880905244
  misc_feature (1)..(1): n is a, c, g, or t
nttttgagtgttggtaagcattcctacagaatatgaagattaaggaaaaaccaaatcttccttaagattgtaggatataagagaatagatgccagttgttctgttcaaagtgctgtgtgtccattttaacagagaagatttcaattctgtcatctcaaagattccttattaagtgtgcccttgctttagaaattagatgagttgttttttgtttgtttggttttgatagtaaagtatggagacagtacatttgtctcaactatctaaaactatcagggaagataaatggtgtttctctagatgccttgtcagcattaaggaaaataaaatagtggcttttcagtctgttgggtggtatagtctgtgagggaaattgatatttctcatgtactcacagaaagcattgttttcagctaaagtttggaaaaacagttcttttaaaaccaggcagcaacagcaccagaaatggccatttaaaacatggccacatttgacacattgcatggttaacaacactgtcatcaacaacaaagttcattttgatgataagtgaaatgtgacagttttaacttttttgactatttgttttcttcagtggtagcacatcagaatcacctgtgaatttttcacaatacagataattgcctgatcccacctcagatcctgattcaaaagtgttgggagaggcctaagtatgagagattttttaaagtcctatatgaaaaataaataaataaataaaagtcctatatgtaattctgaggtgtggaatctcagggttgagaaccacagatccaatggaggtgagtactattaataaaaaaaaaaaaaaaaaaaaagaggtattttgggatagctaagaatatagcaggaacttctctggtggcacagtggtaaagaatttgcctgccaatgtaggagaaacgggtttgatccctgggttgggaagatcccctggggtaggaaatggcaacctgttccaatattcttgcctgggaaatctcatggacagagaagcctggcaaactacagtctgtggggttgcaaagagatagacatgacttaacccactgagcacacatgcaggaatatagcatcaggttcagaagccagaaactattttagttttatagtagtattttcatagccattctaagtgtccttgtttatttaactggaggcacaggccaggttttgaagttactttttaaactcaagctagtcatcttttcaccaggccatgaggatttatgtcttttaggttaaatgatccagagaaggcactggcaccccactccagtactcttgcctggaaaatcccacggacggagaagcctggtaggctgcagtccatggggtcgctaagagtcggacatgactgagcaacttcactttaacttttcactttcatgcattggagaaggaaatggcaacccactccagtgttcttgcctggataatcccagggatggcggaacctgtgggcctgctgtctatggggtcacagagttggacacgactgaagtgacttagcagcagtagcagcagcaggttaaatgatcaacttgtaa

SEQ ID NO: 38722 - DNA, 1592 bp, Bovine  19866880938631
  misc_feature (1)..(1): n is a, c, g, or t
ncctttttttctttccttttttatatgattttgttgcatttatatgtatcccttcaaaagcgtgttttccttttcttttcttcttttagttgtatttaactttctggaaaggtatgctacatgtaatattttgggagaatgtcccttaatgtaatattattttctaggatctatgctatatttcttttctcacttataattattttttcttctaggtgtgatgaatttaattaaatcaatttattttcctagtttaatttgttgtcactgggacaaatttatgaagaggctaggcctaaccctagttttatttgtcatggccatgaaatagtgaaattcaatcttaaattcaactttaacttaattgaatctttgctaccatcaagtaaatatcaatagtaaaatataattgaagtttttttggctttgcactataggacctttcctcagatggaccttagcgagatgattttagccaaacaggatagatgccgcaatttgtagtttgcatcctccagtcagaatgtacgtgaaatatgtgttaaagtagtagatactggatatgtcagttacagctgcatgtgaagataactgagtgatgctgtatctctcagatcaagcaaagttaagtacaggaagtttgtcatatttgaccactcaaactttttttaagttattctcaagttataggaaaaatttggcacctgattaagtgtataatatttgtgcccagtttcacaagaaagtatacaattccagcatttttctagccttaaatcaaaggctttcttgagcacctagaattgtgtatagttagaacacctcatgtatcagtaatgtatgctcttttagtgatgaatttgagatatattagattctcatttaaattttaatataagggtatgtactatttaaaatttatattttatagtatatatgaaaaagctaaagtatgaatattttatatccatgtttttatataactgaattatataatatttataaagtaattctgtttaagtatatatatagtaattggaatagaaacacagtctcattatgctttaatgaagaaatgagaatgatttatgattaatatttcagttgtttgtatgccatgcatgaaaacaatttattctagcaatatttagatttaaagagcttcctctgttaattttatttctctaaaagagggtttagcaaaactttcttatagagagggaatagagtgtagtagtttcaagcatgtcttttggaatcaaaactcatggttacaaaacaaagcctacctccttcatatactaactctatgatcttgggcaagttgcttaaccatatgaagacagtttcttgatctgtaaaatggtataaaaattagttctttcctaataggtagttatggcttcccttgtggctcagcggtagagaatccacttgccagtgcaggagccctgggttccatctgtgggttgggaagatcccctggtgaaggaagtcgcaaccagttcagtattcttgtctggaaaatcccatgggcagctaagcctggtagactacactgcacagattcagaaagtcggatcaaacccagg

SEQ ID NO: 38723 - DNA, 1052 bp, Bovine  19866880982763
  misc_feature (1)..(1): n is a, c, g, or t
naatgagtctgttagcattaaaaaatgaaacaagcaagttagccatagactgttcacagatgaaatcaataactcatccaaaacagcatgcatttctagaaatgtatttgttaactggttcacttgacctaccagtccacttccggtaactgtactgctcattacatttttctggcaacggggtatatttccaaaaaaaaaaaaaaaattgtaaacagatacatacatcttttgcaggagacctgggaatgatccctgggttgggaagatctcctggaggaaggcatggtaacccactccagtattcttgcctgggaaactcatggacagaagagcctggtgggctacagtccatggggtcatgaagaattggacatgactaagcgacttccctttcacttttcagtttcatgcactggagaaggaaatggcaaccctctccagtgttcttgcctggagaatcccagggacaggggagcctggtgggcttccatctatggggtcgcacagagttgacacgactgaagcgacttagcagcagcagcagcagcagcagagtgactaagcacagcacatataaatttttaatagggagaaaacttgaaaaaccacaggactttaaaggaaaactctgaggtggtagttctcattattgaatctggtggctttgagatgaaggtgctaattttatatctttaaatgctcaggaaaggggttctcagtgataaacagactaaaaaaaaaaaaagaagaaaaatctgcttgggtcctttcaaagttaagtgtgttttaccaaaggaaggagttaaatgtcaattttataaataaggaccaacatgtaaacttttttcttggtgagcaatcttccctaaaaataagtgctgttcactagctctggttacctggtgctatctgtttggagttactaataagcacatgcccaagtatatgctcaccaaataacaaacactcagtaatttagctttatccagctaattgagtaagtaattctgttttcttgcagttatttaccatatctcagaattcacttt

SEQ ID NO: 38724 - DNA, 1346 bp, Bovine  19866881005904
  misc_feature (1)..(1): n is a, c, g, or t
nttcatatttatgtgaggggcttaccctgacagtaaccataaaatggtacaagcctaagggctcaatctcagtttttcagttcttattaagtctctgttgtaggatggtgttttgtatttctgaagttgtgtactgacattacaaagggtggctttagtcctacctggacatgtttgctccagttgaattctgttttaagtctctgcttgctcctgcatggttcctgccatccagcacaatgagtctgttgattgcaaagtatttttcttcttcaggagccaatcttcctatcgatattgtttctctaaattacactttatggattttaggcaccactttcatctatttggaatctgaagtgtgttatcccagtactttaatatacagtagtttattcaccgaaaatatattctgacaatatttatttcatgtttgaataaccttgcctctccttcttgatgtttgtttccaaaatgtggagccattatagtagcctgcacgtctttctgtgaccattgttgtctcttcaaattgaagtacacagtcctagcaaactcagtaagaggtccagccagggaacaattttctaattttagactgtcactgcatatcgtttagtttcccctcagatttctgattgagattgttacaagggtattgtaaaaggaaaaggaagagggaagctttctctgaatatgatatcatgaagtatataaacttgacttacagtgggaaaattttgtgtattttctccaatatgaaatgctatttggcacagtatatgtttcccagtgtcatgttgctatagaatagttgcctatttgtcagaagctatttgtcagttttctcagtatctgcaggtggtaagtatgcttcagaattcagagaaggaaaattgtgtgctcccagggattcatgcaagtgcttgacaaaaatatgaccttatttctgaatatttgcacaacgtgaatgtgtgtagtcagaatattggctagtttttttttgctggcagggacagtttaatccatcttaatgagttgtggcagtcatcataacaatttagacataaaaatttttccacatatattttatttgttaattattgtattttcatttatatcaatataatttatataagaaagaaagtgaaaagacccaagtacctgtgagggagaagttctgttaatgtaaatatccttgtctggaggtttccatggacagaggagcttggcgggctacagtccataggatcgcaaagagttggacacccgactgagtgactaatacctttcagtttcactttctcaggtatggtagcatgtacatacttaggacaatggccttg

SEQ ID NO: 38725 - DNA, 1448 bp, Bovine  19866881026934
  misc_feature (1)..(1): n is a, c, g, or t
ncttctgtaacaaagaaagtgcatcctcttttattatagtaaagaaaataaatagcttatatattgttaccctctgggagagcttctagttttcacttttagtggatctgctctggtacattagagaactttacctgaattcaatacagggaatgatggagggaattaccagattcagaagtgacctagtggtcagtggcaagaacaataatcaaatattttatgactttgagtcataaatactatatatcatcaagatatgcattcataactcatgtgtgtgtgtgctgagatgctgtgtatctgtcttttgaagtatcttcttcaattcatcatccaactccacagtcacctgcaaaaatgctctaggcaaagtgtgtcctttcaattgatctgtttgttattgtagtgacagcaccttttccgtgcatggcccagtatttcagaattaagagcacagtacaaaaacaagatacaatattcagtgaaatgtccataaaatcactcagctgcaccacaagcagcttttatgattttcaaaaaacaacatcaaattcactggagcaataagacaattacacttacataactgacatttgttgaggtgagataaatgcttcttcagactcaggaagcaacatacacaaaatcgtaggttggcataaagctgtgtatgtatgtgtgcacgtgtgtgcactaacacacctgctgctgactggtctattaattagaacccagttactgtgccccgtgatgctcgctctagtcactgcgtgcagccatttccggtaactctaattagtcatcttgtgcatgtgcctgaagaatgtccgttcaattgcaaagagttgaaaataaaagttatttctcaagcttttggtgtctcaaggccatttcttccagggccatggctccaggttctcaagagtctttatatgtcctttatattctattcagagtttgactgaaatctaaccatatttcacatcagactgagtgaggagttctaaagtggttttgaaagatagcaaatatcttagactattccagagatggttttaacatgcccaggatcattttatcattaggccctactggcccaatgtctaccaactactagtttcatagtggtttgaaaaaagttagaatctgggggaaaaaactgaaatatgaaaatattttaaactaaaaatttttaattatataatttctgcagacatggccttaaatcatcctttgagctgcatgtcaatgattcattatatatgaattacactgaatttgtgatattgtatacattttaatgagtgagataatatacagttgttctcaaagactgaaggagcctgggtgcctaagctctgcttgcattaatggtaagtgaagtgaaagcgttagtcagtcatgtctaactctttacaatcccacagactatagccctccaggct

SEQ ID NO: 38726 - DNA, 815 bp, Bovine  19866881060022
  misc_feature (1)..(1): n is a, c, g, or t
nataggagcttcccacccaccacatgctccctggctcacacttaagctacagagaaagagcttttcaaagagtgatatatttttgaagtaaagatgatacactttggcatgactcattgggatagatcatttaaatgcatgccctgtttagaactttgctgcaactcaggtaagtggatggtaagcttgtcaacctatttgtatcaggtcacataaaagacctagaacgaggtggcaggggagtaggtggtcatggagtacatctctctccatggatacatcaggaatacaccgacacaggaagtgcatgcagaataccagctgagagcagacagaagtacttgaccagtgggaaagaatatatagacccacgcaaaacttgataggatgaaggaactaggggaaaaaacagtggtgtcagtaggactggacctgccctcagcaggtggggaaactgaagcaggggtccgatccccacactggggcagttgtctgagtcagaggagaaacattaaggctgagagtgaaacagctgatctgtggcagcttaaatggaatgagaatcgtacagtccttgccgcagccatacataccccagacaggaacgctggtctcctggaaggggcagcggctgggagctggagtttaggaaatgtggaggaatcccagggcgagggctactgtttgctgtggtgagatggattgaggggatgtgagggaggagattctggtgggaaatgctggtggaggaaagccaggcagccacggaagcaaggcgatactgctgagtcatgcgtagcgggtggagccatcac

SEQ ID NO: 38727 - DNA, 1801 bp, Bovine  19866881080744
  misc_feature (1)..(1): n is a, c, g, or t
ngtagggccttctccacatcatgctggcactaggtatcaaatttgtagcctccagtactatgagaaatagtacagtatatttctgttttttttagttaccctgtctgtgatatttttttacagccgcacaaatggtctaacatatccgctaatagttcagtgaaaatgagtttgtgcatattttttttaagtgctcagctaagcattgagaatctagcctagtcttctgtaaatgtttgcatttcctttgaaggttaaagccaagacgtatttcgttcttatgactctaggcaaaacatttatctctttttgctctagttttcttttctcttaagtaggaataccaatgaaatcaatctcaaaaggttgctgtgaggactgaattagtgcatttacctgtgtgtgtctgttttcagttgtgtccaattcttttcgaccccatggactgtagctcagcaggcttctttgtccatgggatttcctaggcaagatactggagtgagttgccatttccttctccaggggatctttgtggcccagggactgaacccacgtttcctgcattggcagatggattctttaccactgtgccacctgggaagccctgttaaatactaaaaagagtacttggagttaactgcttttgctcacttgagtttacgtaagctctttgaaggcagtgatttttgttactttaattcatggatatattctaatttcctagaaacagtcctgacacaaagttggcacttaaaaatttgtagatgggacttcgctggtggtccggtggttggggtttcaccttccagtgcaaggggtgtgggttcgatccctggttggggtatagatcccaggtgcctcacagccagaaaacaaaaacatgaaacagaagcaacattctaacagattttataaagactttaaaaatggtccacatcaaaaaaatcttgaaaaattttgtaggatggatagtatgagacattaagaatgttggtcttcagtagggcaaactgtgggtatttgttggattaatggcttgtgccattgaaggtctttcccacatgattcacctgttatgatctgcagggacatcaggagggtgaaaagtcatcatcgttacctggacaagtcatagattcggaaaaatcttagaggggtgaatgtggaaggttttcagaaatgtggatttaattgagtgtagagtgaaccacaaagaaagtttgaaaaagagaaaaagcctaaatcttgtcagaacttgcagatggtggtggggattgtgaagagagagagtttggtagaaaaaaagaagtgttggaatgaaagtcctccttggttttagccaagttccctacagatatactgaatttccaagaacatttaggatgatttgagagaggaagaattagcttctagaaataaatttaaatgtgaatgccacaaaatcctcttggaaactctcactgcttgccactctgagctaactatccagtcaagtctagattctatcaaatgaagattcttactttgaaaggaaagggaaatttgatcactgctgggagtaggcaagtcagtagctgaaatgaataagaaaaggacacagtttcaaaaagaaagtgagagtatccatctacactggctccttcaatatgtttcttgacagatgtgtcatcatctctgagcttcttttcttgaggaaggaagttaaggaagtgagtctctaacaaaggacggctctcaggtgcctcctcctgtggacggttgcatctctaggtgcatttggtgagttttaaaagccagagtt

SEQ ID NO: 38728 - DNA, 1112 bp, Bovine  19866881084230
  misc_feature (1)..(1): n is a, c, g, or t
ntacaggaatgggtttccatttcctactccaagatccagcttttaattcttctaatttagcactttttacattatctaaaatcatttaaaatacagtgttagataaaaagaagcaccttgaaatcaagtcttttaattacttacacctctggttatttaaatcattaaaactgagctgtgttagtgttggagaaagtgaaagtattagttgcttagttgtgtctgactctttacaaccccatggactgtagcccaccaggcttctctgttcatgagattctccaggcaagaatactggagtggattgccattcctttctccagggaatcttcccgacccaaggattgaacccgggtcttctgattataggcagattctttaccatctgagccaggagggaagaagccaattctgactccatgttggcaactgttttattgacttgctttttagtgcttttgttattacagtcatacataatagcctgcctcagaaacactgccccgtgcctaactgcaaacccaaagaggctttgttcagctcatagagaaattgtctgaccctgcctacttgtgaatagctaaaacgaaaagagataagatataaaggagtcatataggccccatgattaccttaaagatatttaggagaatgaatttatggttttgaataagatgagattcagttcagtccctcagtcatgtctgactttttggaccccatggactgcagcacaccaggcttccttgtccatcaccaacacctggagcttgctaatactcatgtccatcaagtcggtgatgccatccaatcatctcattctctgtcttcctcttcccctcctgccttcgatctttcccagcatcagggtcttttttagtgagtcacttcttcatatcaggtggccaaaatattggaacttcagcttcagcatcagtcctaccaatgcatattcaggaatgatttccctggggattgactggtttgatctccttactgtccaagggactctcaagactcttctccagcactacaattcaaaagcatcaattctttggtactctttatggtacaactctcacatccatacatgattactggaaataccatag

SEQ ID NO: 38729 - DNA, 870 bp, Bovine  19866881119575
  misc_feature (1)..(1): n is a, c, g, or t
naaatacatctgatttagttgaagaaaattataaacaccttgaaaggacagtaattatttaattttaaatccactgatgaggtgcagaataataataatgaatgactttacatttttggatattcagtatttaaatatgtgaaaagttaacataacattatatattagcttgaattttataatttaacatgaacttttatgaaaccatacaatatccaaataattattctataatcattgtgtctataggattattcttttgataattatattattttgattgcacaaggaactagagaggattttatagtaagaaaataaaatgatctttgtcccatctcttaatacctagctctcaaaacgctcatatcaatttcagtccttttgtgactctaaaccccaaaataaaatcattctcattccccaaactgagtttaaataaaattaactaaagaaataaagtatcaatcttctttcctaggctgcaaatatgaaactttatgggaatgcaattgctagctaaaataaatattttactgtttaagtatgtgcaattctgtattttactattaggaaaaattctcaggtttctttttagttctgagaaaaatgatagaactttcctcttaaagttattgtgacagttacatgacttcatttatgtacgtctgttatcactaagacaggcacatactaatgtatcagttacggtattgacattattgtttattccatcacttttgtcattatttatagaatgatatggagaaactttaaagcaagtattatggtatcatcatttctttttcttgaaaaattgctgtatactttggaagagtgtgtgatataacttttactctattcatctaa

SEQ ID NO: 38730 - DNA, 1912 bp, Bovine  19866881164828
  misc_feature (1)..(1): n is a, c, g, or t
ntcataatggaaagttttgaagtacattgggaaggtctctatgatcagcacagggcgactgttctgaaatatctacaggtatttaggaaaggtaagtaattttatctgaaattctccaaatattctggaaaatatgtttaatatttttcatttaattaagagacggatgaaggaaagttacatggctcaaaatagccaggagttaaaactccccttccagctcctcccccaccattctatgcaaaacaaagaactctctcaccagaagaaaaagatggacactaaggttgattatactcagctcccagccggtcccagactctggctgatctccagaattccttgcccaagccgtttaagagatatataattcgaacaaccttggagaagaacaggtccccttaagacatatttccacatatatgcctatacatacttattcttttcttgggttagggcagcagctcactaatctgattgctaccccctctcgcctcattaaaggtgatctgttcctatagtgccggtctcttttttctgaacctcaccttctctaactcccttaccctaaaaaggagaactctggtactaagttcaaaatgaggaaaggagaaggaaaaagttgagtaagttaccttagtcaaatgtgttggaacaactcactcttagacatcttgagtgcaattccacttttatgaacacatttccaaaattagtgttattagaggaaaattctttagttgacaatgttttacatattctgtgtattgaaattaaatgacctttatacctgagtaaaacatatgtaggagggaactgacaagaagagaatagaacagagagagtgaaaatttcagaaattcacaatccatccattaacttttctagactccgtcaattttcccagtttcaccctctcttcattccatgagtcaagaggacattgcagtttgtgaaaatgagggaaagtacaactgtagaaaaatctgggaccagaattgagactagaattgtaggcagtagtgaattatgcctaaggagcatttaaatcttgcatataatgccataaactttacctaagttttagtactggaaaggtgacatatttgtttctatgtgttgttaaatgccatcatgaactccctaaagggattcgtttgtacggctctagcgtggtttaccataatacagttgacacatgaacacaaaagatcacataacagaacccaatggaataataaatattaagtgaaataacaataaaggcctattatttgacctatgacacaaatacaactgtaacagaagaaagtggccatacctgaaaactcaagctaatatacccttcactgtgacattctcccggcctgctgaagaaagcaaaataaatcctgaacaaagctgacacgtggcaacatccagacaattcatgttcaaacactagtgtgtcatgatgtgtcttctccagtgcagatacttccctttacatgatacagagatcagtttcctatacaaaacaggggaagcaatgtgatttatgaaagcatattcactgaattgcttagcctgtctgaaaatatatgttcctcccttggtttaaaaagtatagatcaaagtaaattcatttttgtgaagtgacaacactatgtgacattttaataattctaattgtagcatctaagaattccggtcagcaaagataaatgagtgcattatttatgatttcattccatttattagattgccctgtcaatgtggtagccattagcaacgtgcagctatttaaatttaaattagctaaaattaaataaaacttcaaattcatttaccagcagcattagccatattttcaagttcataacagccacacatgcagagtagctaccatactgaacagtgaggatatgggaca

SEQ ID NO: 38731 - DNA, 932 bp, Bovine  19866881166014
  misc_feature (1)..(1): n is a, c, g, or t
nttgacataagtcctgaggtatttctttgcctccttcaagagcactagctttgtttcatgtcagagccctgagtgacaaatgatgaaggacagactggacagcgagccagactcccctgatgccacagtcacccagggtgctgccttccagagtcttgagacttgatttgcatatgtttcattatttggttgccctggagttggtgttagaatactcaaatattggaataatacagtgattatggcagcaacttggttaggtagatgcgcttgattagagaccaggctccaatgctgtgtgaatctgcacaagtggctgaactgctttttgcctccatttcctcagctatagcacaattataatagaacctacctcatgagtgtgttgtaaaaatgagttaacccatctgaagcacctatcatggtatctaactcatagtaagtagccgttcatatgactcttctcccaggttatccacagcaattgagccactctactgagtggcactgtttcccaaactatgttctgaagcccactattccctgaagttcagcaaaaaagaattctcttcttcaaataatcttgggaaacactgcctctgccttggaaattctaaatgcactaaaatgaactattaaagactttgagagaaagacctgcaagtaagaagtttatttcatttaaccctacgaatctcacatatataagagcacttgaccctctggttccacattcacttattcatctttgctagttcatctggggaatctccacttcaaaggcattgtcataacaggacagtgaggctcagatataacaatacatgtaataataataattttgccatttaaagtagtaatgcagatataacattattttatattatgtggaatccacatctgtctccagggaaacaagattccaacttctg

SEQ ID NO: 38732 - DNA, 892 bp, Bovine  19866881239622
  misc_feature (1)..(1): n is a, c, g, or t
natcctgtaccagagaaacaccatgttcaccttcaaggccttgaggagaagaatccattgagaaatatgaataaaatgtttcatgatttaactgtgcatcacatgtcactttgctttcaaaataacatttcagctttctgaacttgtaaaatgattttctgacccatgtctcaaacaatttttaaaagtaaattaatatctccattagacccagaatcactattgagctaaattctcatggttggttagacacttaatgatcatagttcatttgaccttaaatgaactaacgttggacacatatttaatttttttaaaattctgaagatatccttttacgggtagaaacatcctcttgaacccctagtctctaaaagatgtttttctgacaccaaattggaggtaaaataacaatgcagtaatttgtttgttgaaacatctgtatacattcaggaccgtaaatgcagagaagcataactgaaagtaattacaggcttgtatttacatctgcttgtggtaagacaaagcatattgtgcaagccaggggtaactgcacagtttacatttaacaagttatctctaaggcagctgtcattctagttaagataaggggctacacatcaaatgtaaattactttccacctcatcgatcagagtcaaaaagaaatgcataagagtaaacaaaaccaccatgatgctctccgctccacatgatttaagtcaacagttggcatgcatgctgaaggggaggaaagaattaaaaatacatgcagctcatgcttcatccctagacaaataactttcagacatttaattcaatcaaccaaatatttattaagtccctaccatggggaaggcagagcagacctccctgctttcacaagactacagt

SEQ ID NO: 38733 - DNA, 1078 bp, Bovine  19866881306499
  misc_feature (1)..(1): n is a, c, g, or t
ntggtaaagctctaaaatcttccttccaaaaatagtgctaatttatataaactgttatgtttcaatgattctttacttgctttccgtgttttctcgtcctgacccttagataaagctgattcccatgtataactatgctccctccctgcataccaaacattctgtaaacttattaactttgcagcagattggatagataaagctcatggggctgtcgcaggacacagcaggtcatccttttccctgtgctgttcctctaccacatccttccacctctgatgtcctgatgccagaccctacccatccccacagactcatctacccaagtggtctaatcaaggcattttccaaacaaagtcagcttgatcccgaagtctcttctacaagtgccaagaactctattttctccctcattacaattctccaatgagcaacatgggagtgagaggttctcgcaaatttatttcctaaattctctccttgaaccttaggtgaggaaaaggaaatgagcacactgacaaaccagcccactcccttggcccagcctctctcctacctttcttattaatttttattgccacatagttgctttacaatgttgagttagactctactctacagtaaagtggatcagctatacaaatacatatattccctcttttttggattttttttcccatgtaggtcaccacagagcattgagtagagatctctgtgctgtacagtagcttctctcattagttatctattatgtacttagcatctgtgctgggcttagtcgttcaggcgtgtctgactctttgcaaacccatgaactgtagcccgccaggttcctctgtccatggggattctccaggcaatactggagttgccattcccttctccaggggatcttctcaacccagggatagaatccaggtctccctcattgcaggcggattctttaccagctgagctaccagggaagcacagtatctatagtgtatatatgtcaatcccagtctcccagttacccccactctccctttttcctccttggtggtgtccactaaaataatagacacaaacctaaaagttg

SEQ ID NO: 38734 - DNA, 1838 bp, Bovine  19866881495421
  misc_feature (1)..(1): n is a, c, g, or t
natgcatgagctcatgttagattaagttttctgtggtaattcacatttatatttcataggcctaaccatatgcttacataaagcaaatccttatccttcactccaaatcagaggaaatatagtttaatgctctagtcatgacccaagagctcctatttgaacctaaaatcatctttttctaccttgcttgtatcctaccttccctaagagaaaattgagttgatgtaacctgtcacacaaagaaaataaactctatggatcgttaccagcatccaacagctaatatcttaaaaaaaaaaaaaaaagataaaacacacataagcctttttttatgtttatgcttaaggcaaacttattggctgtttttctgtaagacatactttcttttactctatactgaaaagcttaaaaataacagtcttcttgtgaaagtagctgccaatagacagtttatgttctgcatcataccaccataaaacaggtatattttgattaaagaaaaaagattaaaactcagcataaagctaagttaagtactattgtggcaacataggtgcatgatttataacatatattcaaatgaagatgttttaaatggatggatttcgaggttttcattccatctgtatgacattcagctctagaactctcctgaggcagtataacagagcaggagggaatagatcctgaggtaagaagtcaatatcagtcatgtaaataatgtgtcgtcaacagccattgaatcccttcttgatataaggatttcaattactcctctctttaagtacaaatttagcacttgaccttttacacctataagctgaaagcctacagttaaataattaaatgtagtaaaatgaattcaaataaagtcaatttgaaaggagaagcagtaagtgcaagcctgattagagctgttagcccacttgggtactattatttgagtagttgttcaccaaagaaagataaagaagtatttaaaaaaaacttgaatcaaaacacagcaacagtttaacagttttctagggcaatattttaaacttcactacatagtttacacctttttttcataataaatggccggctgaattagttaaggtccagggtgatgctaagagcatttattgtgttgggctattaaaagatgaagcttaggatagtaatggatagcagaaaatgccatccccaaaggtgccactctggcataggattatttttagctgaagacaattgagaagcagatattagaaaaactctctggccccatttgccttaaagtaggatacaaatttgtagagatatctccttccgctccgtattagggatcccatgcacctcccctaccagagaaaactccaaactgtcctgagccttgtgatcaccatcagaggactctatgtaacaaaccttgctaaaactagcctctaactgctgttgatttccacatatgtttgccttactacaatttgctgccccagtagatcaaactccttttcctttgtcttgctatatctctaaaattttattgttcttttgttaagatgcatacataagcacaagtttttgccacctgtttgagatacacatcactgagtggtccttgggtgtgtgtacatgttaataaacttatttgtttttctcttgttaacgtttcttttgtgtctaatactcaggaccctagtaagagaatctatgataatagaaaacgatttattctctcctctataacagaatggcagtggaaacaaagaggctggaaatagtaactctaggtatttaacttagatttgtgtgaaaggagggagagacttaaccctctccctaccaagctgctgctg

SEQ ID NO: 38735 - DNA, 1995 bp, Bovine  19866881805084
  misc_feature (1)..(1): n is a, c, g, or t
ntgtgaggggctgggaaaaatatgattatttcctgggactgcaccctgccctgagaatgttgccatctcaacattggagttgagttgacaaggaagaatgggatgggatggcaaggccgctgagcataacaaatacttttgctgcataagcccgtcaagagcatggatgggaacagcgtggatgggaactctgaccatgaagtagatctagttaatcacaaagcatggagaaaaacagcaaaatggtcatctctgagtattttgcatttttctttgcaaatccaaagtcacagttaataaacatcatactagtaaattggatagaagtagctttaaataattattttctgctatatttgtgatgaaagtatggagcctttcctggtttgaagcactaacttctcttagggcatgtttatctggtaacatcaggtgaaatgtatcttcttgggtaaaattgttttgcagctgcttggtatacataccagttatatgatgtgaatacaaataaggctcagaggaatttttggtagcacttgcgtaatcatgtaagctgaaattggcttatctttgatgcattaattatctcatgttatgggaaattaagagaattctctgactctttaagaggaccaggctgccgaataagctctcaaaacacttttcactcatagaacactccataaaattttctatttgagtcataagactttcaaaaactcatggcatgtatagtcagaaacatgcattacttacattttgcaattgggaggcattgcatattttattttaaaaataaaatctcagagtggtaacattgaatagtcactaagagcacagactttgaagtcagactatctgggtttgaatccttgctcagccacttaccagttattaggctttgaggactttgtgcctctgctgtctcatccataaaatggacatgaagttattatgaagattatgttggtatttttatgttcttcaaatagcatctggtccacagtactgtgtgcttccctggcggctcagatggtaaagaatctgcttgcaatgagggagtcttgagtttgatccctgggtcgggaagatcccctggagtaggaaatggcaaaccactccaatattcttgtctggagaattccatgaccaggggagcctggcaaactacagtccatggggttgcaaagagttgaatatgactgagcaactaacactttcactttccacagtacctaatgtttaagtgtcaaaaatacagatagacattgagtcacaggtacttgttttataaaaatttaaatataaattaaaagcatttttcagtaaaaagtaattcattctcaaaacagtattcctgtaatctgtaacatattttgttgtttttttctcactcatgcaagcatctacaggagcaattattcaacacatttttaatgagcgtctatattgtagtgttctttctggatgtgagcttattgagagcaacagtaatttaacagtctggcaaataatgtaccactgtgtgaagcttttggtaggccatcactaatgttctgttatctgaatggagcagtctatattgtcatatttattgtcaacatcaacacgtgttgacaaatgaaaaccaactgtagctggcaaatttagtgactaaagaaatacactttttaacatatatatatatatatgtatgtgtgtatgtatatatatttctattggagtatgatttatataccctgcattgtaaggaattaaaaatgagctgcttttgatgatcattcttgtgtggacctgaaataatgccaaggagagggggagagacatatgaaagtgagagatgtgttatacacaccagccctaaattgggaggcaggacacactataaaaaagagcatatgggagaagtgccaagggtgggctcaaccaaggcaagtggggagctgagggagagggaggacccatgggagggtgcctttgctggctgtcacagtg

SEQ ID NO: 38736 - DNA, 1038 bp, Bovine  19866880404002
  misc_feature (1)..(1): n is a, c, g, or t
nacatttctccaaaaaagacatacagatggctaccaaacacatgaaaagatagaactagtttttaagtgacccataaaaatttgtataataatacatgacacttgttctggagagcttggttaaactggctatttattttactaactcatgtatgtcctgtctgcttagacaggatttaaagtagaccctgagactgacagcagggaaacctatgcttctcgcctgtcttggccgctaatagtccttatagcctgcagaaggtgtggaacctttttgagtcacagtttcctaatctctaagcaatattgatatagaagtatagggtggttgtaaaaattaaatgatatatgtagatatataattatatatgtatatatatttatatagagagtatataatgaatacatcaccatacgcaatgaaaaatgggtgtgtttggtagttctgaggagttatgcatgatgattaacgatattttcctggattctttatattttatttgaatctgtctatagaatgcagagccaaaggctaaagcaatttcataaaggaggtccttaacgtttcaggttttgtatctttgttcttttccagcaataagcttcaggtgttccatctcaccaagccctctgcctgaagcagtatgggcagcacagacagtggcctggctaactaccagcttaccaggaggggaacttgcttaattgcctgaatgctggcttcacaaagcagctttcacacctaaagctggagcagctcacatctgtgcctgtcaggcttctgccttgcagatgaagaaatcagctgtgcccggtccccacaggatacccagggggtccaagcctcatgcataaagtcaaaacacacaagctcatttccatatagaatacaaataacatattcatttaataagataactcctgaaacttcccacacatatgatttcaagcttctatgcaggtaattacaatcctgcttaggaaaaatcgatgaaaccattagatcaaaaccaaattctcttcattttatttgcacat

SEQ ID NO: 38737 - DNA, 1857 bp, Bovine  19866880471800
  misc_feature (1)..(1): n is a, c, g, or t
ntggctcttcctttctaaactctgatgctcatattgtccccgttgaagtacgatcagtttcctcttccgatttctcagagcaggactcagcgtcttcttttttcccacctggttaattcaacctcggacaactcagaaacagatttactgatttagtacaactatttattttaatcaaattgtgatagcttttagacattcaacaagggattaacggttcttttccttgtgttttgcccttgaatcttcatcactatcttgagataagtggggaagatggcaaagagaggaaagcaaagtctttccttttaagaacctatgtgtaaggaaagtgagccaaagtccagtctctggaccaaactatgtctctacaaggatgctcagagaagaaagttctatcctccagcatgttcactcacagcagcacaaggatttatggcagtggaaaatgtaaaaggagggacaggcaaacagcaagttaactaactgttgtgagacaataaggatcagagtaccctttatgtgtacaagttccagcccagtgagtcaaccgatgagagcattcgaaccatctaagtgctctacctaagccacagttagttgcccagtgtattgcataatcttagaccctcacattcagcatgaggagagatgagggaaaggcaaatatatggaacccaagagaagcaaagtgcaattcccgtaaaggtagagaaggaatgtatgagccatgccctcacagtattttccgccatgacagctgttgccccaggatcacatggcctgtaaatcacaagacagagccaataacaaatgttgatgctataagacttctgcttaagtatgtatgaaagagaagtggagaacagtatcctaaaccacacaccctgacacttgagcaaaccatgatcatcattaaactcatataccatcataattcatatgctcatgtcacagtccttaatcctcctgtgaagaatactgaggagttcattgtgcctggagctgggtgatactatcaagcttgtgatgctatccagttactctgtatccaatgtcctaacaggtaatgttgccatcatagaatcctaaatgatgtatcacgaaacagtttgaataatacagttccacagccgagctacttcatacatcacatgggctcaaaacactgaccttagaacttaacaaccattttacaacgttcctatgaaaaatatgttccaggctccaaatggcattctttcaggcaaactttgagaacacaatctgcttaggaactgtctctactagtctgtgatatgtttgttttgcatataaagcttgtttcatgctctttttacaaagagttatcctgttcctggaagaggacttcaaataataaattgtcaccaaaaatggacatgaaattaaaaaaaaaaaaaaaaaaacaggcagggggtggaaaagatgagcaagctgaaaacaagtccattttgggaaggttttagacttcccgtttaagggagttttcatattaaaggaaaaagccctcatgtgttgtgcatttctttgttcatggcacttagcagagatttctacaatgtgaaaataggaagttggatttatatggcttttactttaatgatgctaaactgcctggaaatagcagtgcatgctattgcaagtttcagatttttttatgctgtattaccaaacacctttctaaattttagatgagatccccagtattgtggatattcaagagcaaagcaaggcaaatacaggaaattcagatactttaacggctcagggttcccaattatattataaagcgaaaagacactccagcagagtagttccttacaatcatctaatacc

SEQ ID NO: 38738 - DNA, 901 bp, Bovine  19866880689712
  misc_feature (1)..(1): n is a, c, g, or t
natgcttttgaactgtggtgttggagaagactcttgagagtcccttggaatgcaaggggatccaaccagtccatcataaaggagattagtcctgagtgttcattggaacgactgatgttgaggctgaaactccaatactttggccacctgatgcaaagaactgactcattagaaaagaccctgatgctgggaaagattgaaggtaggagaaggggaggacagaggatgaattggttggatggcatcactgactcaatagacatgagtttgggtatactctgggagctggtgatggtcagggaggcctggtgtgctacagtccatggggacacaattagtcagacacaactgagtgactgaactgaactgaactgagtcataacttgagtatagcttgctgtttcagtgcagtaatgtgacaaagttgttgttttttaagtcccatctataataaggtgataaactgcagaaaatacaaatattttaaggaaaaattgtgagcagatgcaactgacagcaaattggatgtgagtaaaaaattgtttgatagtttactatctggattaaaaatagaatctaaccaatatatatgtgattatatgtttttattctagttaagtttgtcaaatgacggcatcaaaattttaattcctaagtaaaattagtaattctactccataattgcaactcataaaatatatggtgttattaccatcataaaggataaaataaatacaaataaaatgacgtaatgtattctccagaaatgaaaaattttaattatgccgtattacacatttagctctgattcttccttcactatatgtcacatctccacctacaagtaaagaaaataacatgagaactcaaataaaaactgtctaaaattgttccaccaagt

SEQ ID NO: 38739 - DNA, 5357 bp, Bovine  19866880744420
  misc_feature (1)..(1): n is a, c, g, or t
ntctgacttaaccagagtgttaaagaactaaggtttggggagtatttttaatatgaggaattctgttattttcactaaaattccagcaaagaaagcttataattcattttcattttatacttctctgttatttcaacaactgaatatcaacattgctacatgatgaaaaatattgtctatttcccatcatttttagcattattcagaaatactgataggttctctgtgccagatattctgtttttcgttaatattttggcagtagcaccaagtttgacacgagaacattttaacttggaatcataattgtgtttatgtattcatgggcttaaaattatgcagaatactttagataaaacacatcccaacacagtttcattaaatttgtttctgaaagcataattcacatgattttttctctaaattactagcagggagccactttccctgactactcttttttcatataaactttttcataaacctgtatttaattagttttttaatctttgctgaatgaaaattatataaaacatatgagaacatgtatcttctttccaaaaagctgtgagcagtgtttaaaacagactgaaatcaatgaatttagtaaaacaggggaagaacattgaagttagtccaataattatgtccataatgccaaattactctttctaacagttttaatgttatatgagtatcaagtggaatttcagttaagtgaactcagaagaaggaaaataaatacataatttatttgaaaaaatattaaaatatttataatatgcaaagagaggactatgatttagtaaaataaacatcattctaaatacgcaaatataattccaggtacccatgctcaaactctgttgtacaagaaataattcagtatttttcataaacaaatttgtatttgaaatcctatttacccgttagtttggaaagaaagtcaattttaccattactgtgatttctttcacatacactagaagttgagcaaggtctcaagtttggggtgcagagtgcaaaagctccaactcaaagaagggcattcagggaggcttgatcttccacccaggtgggtaaccgcaagtacccatgttatcctaaccctgtagctccataaaggcaggaaaagccaaggcatccattcaatggtcaggttttctgtcctctttgcagactgaaagccttggtacccaagagtctgtctttatatttgacaatataatcattctctttgaaaccttaactcaaattccaggattcaggaggtggggtgtagatcatcgtcactcttaaacttcaaaataaactgcctgctggccttgcgcaaatctctaccattatctcaacctcagcaatcccaataacctaccttcttctcttcccccagcaaactctgctccataaatccaaggtttctaataagaaaaccagaagggaaattgtcctttggcaacttctgtcagtcaagttaatagggttgtaaaaaatattaagaaaatagatcacaaatacaaaattaatagcatgggatattatctgataaagccttttgatttggttctttcaatcaaggtaactttctactactttattacatatgtatatttttatttatatacttgtttggttcctaagttgtgttggactcttttgtgaccccatggactgtagcccgtcaggctcctctgtccatggcattatccaggcaagaatactggagtgggttgtcatttccttctccagggcatcttcccaacccagagattgaacctggatctcttacattgacaggcagattcttcactgcttagccgccagagaagcctacatttatatactgctgctgctgctgctgctaagtcgcttcagtcgtgtccgactctatgcgaccccatagatggcagcccaacaggctcccccgtccctgggattctccaggcaagaacactggagtgggttgccatttccttctccaatgcatgaaagtgaaaagtgaaagtgaagtcgctcagtcgtgttcgactcttagcgaccccatagattggagcccaccaggctcctcagtccatgggattctccaggcaagagtactggagcggggtgccattgccttctctgacatttatatacatttatatactaccttcttctaaaaggaattgaaaaatcattcatcttttccaaaagaagttcctaaactaacacatagtctagaaagcttccacatttttaaatatgagaactaatgaataagcataacggagaatttaaacacataggaatgaaataatatccataatttaaaccccaatcatgttttattatattagattattcctgtgataaaataggaataataattggaaagaaagccttacaaaagacatagaaatatagtacagaaaatacagaaataaatgttatgataaaagaacaaagcactgtggcctggcctggttctgccacaaaacaaagcaaaacagaagatgttgaacaagtgttttccataatctgactctaatcatgttattcattttttaaagatctctcatggggaagatgagatttctcaatgtcagacttagttttgctcagtatcaaattataaatttatctttgagagttagtattcccatctcatagaactagctggggctagttgtcactttctttgtggcagtaatagatgaacatactagggacatttatttcattagcaatgaataccagactggtgtaaagcttttttccaattatggtttgtattagagtatatgaaaaatgtaaagcaaaaaaattaataatcaggatacaagctgtaacttaattttgactcttgtaaatttaaatctctggttactgctttttaagctgtttatacattagaacaaaacaacttgattgatttttaaaaacaaaatttttttctaaaatatttctgacaaaaaggagtatatagcactcatacagagctttaataatagtaataaaaattataaagtaaacatcggtgaacccaccactgagcttgacaaatataacttggaatgttttatataatttcttgaatttctgtctagatttactaaaaatattccttcaaaatatttatgctttgtgtcgactggcttctttcacaaaatactatcatttaagaatttaccagatagtttgtttctaactgtagatctttcaaagtgattgatgttaagatagtctaatatttgaatatgccataaatttttcatctattgtgtagttttgactctttcaaacaaggatactgtttaaaaatattgtaaatatctcctgtacacagatgtatgagttattgttttctatatttttgtctactggattatagagtagaataagtgtgtatgtactaagttgcttcagccttgtccaactctgcgatcctatggaccgtagcctgccaagctcctctgtccacagcattttcaggcaagaatgctggagtgggttgccatgccctacttcagggaatcttcctgacccaggagatgaacctggcaggcaggttctttaccacaagagtagaatacacaaatacacaaatgtaaacacacactctgaacatgaaccctttttgtattgctcatattaatcttttttctcatatctaatgttttcaatatctttttgccctttcttactgttcatggggttctcaagtcaagaatactgaagtttgccattcccttctccagtggaccatgttttgtcagaactctccaccatgacccgtccattttgggagaacctagcctgcatatctcataatttcattgagttaaacaaggctgtggcccatgtgattagcttaattagttttctgtgatttggttttcattctgtccatcctctgatggataaggacaagaggcttatggaagcttcctgatggatgagactgactgtgggggaaactgggtcttgttccaatgggtggggccatgctcagtaaatctttaatccaattttctgttgatgggtagggctgagtaccctcccctgttgtttggccaaactatggtggagataatgaagataatggtgacctccttcaaaaagtcccaccgtgcactgctgcatgtgaccctacaagcttggcctgctgcagtccatggggtcgaaaagagtcagacatgactgagcaattgaactgaactgaatgttttcagtttcttaatagagtctttttaatgaacagatggtttttaatttaatgtgttgcatatgttaatgttttcatttatgatttttcattttgtgtattagttaagaaaactatgcctaccatgtgtccattaatagtgccaccaattttaaagtctgcatcattgattgctttcccttttgcatttaaatctattgtctatctgtaaggaatttttgtgtgtgatttgaggtagtggaatagactaatttttttccctttatatggacaaccattttgtcttaacagcatttattgaaaatacatccttattcccatagtctgcattgatagcttttaatctttttttctgtcccattgtgttggtttatttctgcatctattcaaactgtcttaattactgcagatatttaataatattcactttcagtatatgtaaattttccaatactattcttctgctttaagtctgtgagcaattcttggagggttatatagggcttccctgatggctctgtcacgcgagtgtatgttcctcggttctttgtcttgtcacaacaaagatttggagcaacggacattaaagccctcggcgcatcacagctcttgggtcttggacaaaccatgttacagctcttaggcaaatcagtgttacagctctattttatttagaagatagcagaagaatccaagactcgaagagaagagactggaggagtgcgtgggagggagggagggagtgtgggggagagacagagagagagagagagagagagagagagagagaacgcgcgtgtgcgcgcacgcacgtgggagatagagtccgtgagaaagcgctttggctcctccttttatatgttttttcctccacctgggcctgccctatgcaaattgggcttagccgggagtgctgtttgttctgtttgttctgcctgaagtcttcactctggtcctcggaccttcctttgaccttccttgtcttttagccaccgccattttggactccttttccctattctacctacctaacagctcagacagtaaagaatttgcctgcaatgcaggaaacttgggtggggaagatctcctggggaaggaaatggcaacccactccagtactcttgcccggatgagcccatggacagagcaa

SEQ ID NO: 38740 - DNA, 967 bp, Bovine  19866880747174
  misc_feature (1)..(1): n is a, c, g, or t
natatttacactctgatgagtttggatacatgcatacaccccatgagaccatcaccacaaccaaggtactaaatctttctatcacctccaaaaatgcccttgtggttttttgtgtatttttaggaggggaaattggttttgttttctttttttggtaagaatattcaacattaagaaatcttaacatatttgaatatatatgtccctgatcttgaaactctacctaattctctcctttccactttcttcctctgctctctccacctctctttccttctctctttttcttctcatctcctaacgcttcctctgataggcacacataaatatacaagcttcctgtttattgttaggacattttagagactggcatgataattactgacattgtgattactgatatagcaatcatttaattctcttaatgtaaatactttaaaatatatttttgcatacgctgaaaaagagtaagatgtaaagaaccaaaaatagtgaattatctagatgataagaaaggtattaattttatatatgagaatacatttaatgacatttaatgatgtctatacacacacacacacacttttttaaaaaaagtattctttctctctaaagtctgtgtactccaattcttcatgcatgggaaataaagcacacattctagaatttctttttttgtttatgttgagttctccatggaaaaactaagccaagaacataatgttctccgtttttgatgaatagctgattccgctttaaaaggaaaagccttcctttcaaaaagctgtaaaatagaattattttaaaaataactccatctggctcattgtggaatatcatttaaaaatgtatgctgagtctaaagtgttttccttggtcatgaaataaatatgtgtacgtagtctacatatctcattaatttaagtctgtgtctgctatgacctgagaatcaacggtcacataaata

SEQ ID NO: 38741 - DNA, 1001 bp, Bovine  19866880807764
  misc_feature (1)..(1): n is a, c, g, or t
ntagaaagaacaatacttgaagtcgtctctgcactggcctattggaagtttaaattttccagtcttcccttaagccataagacatgtggagaaaaaactacaaggatgcttcttaaccagtttcaatggcatttacctatgggatattagcatacaaaatcaccaaaaagagcagctggatgtcagccagctaccagtttagaggcaatgctgagaggtattcacttttgttagtttcaacatgtggagttgatggatgatagcagtacacttgagcagctggccatgtaggaaactgaaataagtttggtcaaaaaaccagaatatctgccttaagaatacccagaagcatagtttgcagcctaactccagacttctggaaaacagaaagagcaaaacaaattaattttaggaaaaataatcacaaagaagtctgtgcaagccaagttctatgtagctaaatatcaaacatgggagattattaacttaaaacagagcaaaggcatgccatccatgccaaaccaatgaagtcaatgaagactcatcatacaggcggataaatttgtcaaagtgttttagattcttcctggtagcagacaagactgactgactcttacatatggaagcataaagctaatagctttactgggaaatataataccctatttctttttggttttgtatttatttagggatcaacctttgttatatttaagatactagattgcatttaataagttaaacttgtcatgtaaatgttagagtccagatttcaaaagtaagtgctatttttctgaacaaagccaaggaaggtgtttgaggtatgaaccatgtttggaagctatattcttaataatgatattttaaaagtcgaatgttctttagaacatcaagagaaatatgccggtactatacaagaagttgtaaaaataaactctatagaatatgctgaaagttgctttggaaactggggttataagaaagaaaaactaaatttcaaa

SEQ ID NO: 38742 - DNA, 1497 bp, Bovine  19866880894607
  misc_feature (1)..(1): n is a, c, g, or t
naatgcagtcaagaatttgctatcccaccctttcttttgccaattcatcttagacacttgatccagattgctggaaaatgtttggcatagactttttcttttactgaagtaattctacaaactgatatgatcgaaagatactatcatttgaaaaattgctgtgcaaaacacttgctatttccttttgttattcccacccagtggagccaaatttagaaataatttatatccagaatatgttttaccactaagaatcacggtaaagtagagaagtaattatttaaatatctttaaataaataaaacaaattacaatattctgaataaacaatgactatacaataactatgtcagcttagacttccctggtggctcagaaggtaatgcctacaatgtgggagccccaggttcaatccttgggtcaggaagataccctggagaagaaaatggcaactcacttcagtattcgtgcctaagaaatcccatgaacagagtaagcctggcaagctacagtccactggggtcacaaaagagttggagacgacttaacaactaaacaacaattagcaatgacaagcatcttttcctatgcctcttggccatctgtatgtcttctttggagaaatgtctgtttaggtcttatgcccattttttgactgggttgttaagagttgtctgtatatttcggaaattaagcccttgctggtcatatcacttgcaaatattttctcccattccaacaggctgtctttttgttttgtttgtggcttcctttgctgtgcaaggctttatgtttgattaggtcccatttgtatatttttgttttcatttctattgccttgagactgaccaaagaaaatattggtatgatttatgtcaaagaatgctctgcctatcatctcttctaggagttttatagtgttttatcttacactcaagtatttaagccattttgagtttatttttctgtgtggtgtgagggtgtgttctaacttcactaatttaaatgcagctgtccaactttcccagtaccacttgctgaaaagactgcctttcccccccatcttacagtcttgcctcctttgttgaagattaattgaacgtaagtgtgtgagtttacttctgggctctctatcttgttccactggtccatatgtctgtttttgtaccagtagcacactattttgattactgtagcactgtctgaagtctggaagggggaggcctcctgtttattctttttcctcaggattgcttccacaattctggttcttttacagttccctatttaggcttatttgttccagttctgtgaaaaatgtcatgggtaactgaaagagattgtgttaaatctgcatgttgctttgggcagtataggcattttaacaatattaattcttctagtccaaaagcatgggatatcattccatttctttgaatcatcttcaatttcctttattaatgttctataggtctcatcataaaattttgtctttca

SEQ ID NO: 38743 - DNA, 1114 bp, Bovine  19866880949903
  misc_feature (1)..(1): n is a, c, g, or t
nttatttaaaaaaatagtttttagtaaattactgggtgaaattttaaaagaagccttgataagtacatttttttctgaaatatatacagatggataatgaaatttctttcttactcatcatctgatgtctgctcagtttttctttaagtggaattataaaatgttttccaaatataagactgtttactgagctaataaagtaattagtctgattaaactgatggtcagctcaggcaaacaaagtctgtcaacacaatctgtgtgttaacacagaagatatttataatttaaaacaaatgtgttcaaataaaatattttatgtagatagatctctggccaaccatggagagctaaataactttttgaaacatgtttggaaaccaattaaaagataaatttgatgacagcaaaagacaattaatcaaggataagcatcaaattcatatacaacaatttcttttacagaaagtgtgcagtttgacctgaatctgaaaacacaaatgacagaggaaacagaataggcagaataatggcccacccaagatgtccacattctaattcccaactcgaaattcactttggacctatgaatacattaccttatattacaaaaggactttgcagatgtgatcagtttaagaatcttaattaacataatatttgaatgcatccaatctaaataccaggaatgcttgacagttgaaaagcaagtgataggaagaaaatcagagtgatccagtgtgagaaaaacttgacctaccattgctggctttaaagataggtaagaggccacaagccaaggaatgtgaatgccctctggaagctggcaaaatcaaagaaaaataaactcccttagaaacttcagaaagaagtggagcaatgctgatactttgattttagcttagtgaaacccatgttaaacttatgacctacagaattgtaagaatatatttaatttgtttaagcctctaaagttgtaataatttgttacagaagcagaagattaatataccagaaatgagtgacggtgacatgtgagtataaattctaagttacgcctcctttgaggcattgtattcattactcaattgcattagtttcattatgacaccag

SEQ ID NO: 38744 - DNA, 3054 bp, Bovine  19866880959308
  misc_feature (1)..(1): n is a, c, g, or t
nctatttgagttggcttgatggctatagatgagattttggttaaaagactaacagactaaacgtgtgaatctacatttatacacatttacacacctaaaggtatgcagaactaaagggatgttgcccacaagcttaaactgtggataacggcccacctctgggaaccctgcctcccatgtaatgagcattaacataaaatacctttcttcatctcacaggaaacatcgtgaccaaacacacctgtgaacagcagcaggaagaaattaacatatcccttcagagtctgactacagccaggactttcccctctccccttttagtataaaagaagtctgaattataactcagagaatacggttctttgggacactattccaccatcttcttagtctgctagctttctaaaaagttgttatcacttgtcccaacaacttctctctcaatttattggcctgttttgttgcaagtccgggcttgggctcagtaacatgtctgacaccaacagacacatctttagtatttctcctggtttctggtggatactcagtaatttaatgtgcagatctatcttaccaaatgtttgcccatttgctgtccactgagacattgataaaagcctttcataaccttacaagcagtgttttcataacgttctccttaagctttcttgtggcgttcgaccattcttaaaagaatcctataattttgttcaatcccattttaaagtccttatacatgtatctaaacttctgaaaatatttgtaatatttgatactacatcatatctagcatgagatttaggaattatacaattgtctctctggaagaatttattgttacttttggatatttcatgtagagatctgggcaaatggataaaacattttaactaccccaccaaatctgtcataggtgtccctccaagtgtgagaaagacctctttggcctcaaggttttttgtttgtttgtttgtttgtgtaaattgtatttatttatttttaaactggtttctgtaagtagatgctaactccatctttaaagccaaagaacatttcctgaagaaattacagcttatctagttgttaacaaatcatataaaattgggtaagtctcaacttttaggtgctgtacggaatacatctgccctccaaaacctctatgccactaggaatatatttttgttaaattttatctgactttatttcactcaattcacctggcaaattagccataggaagggtccttctttggagcagagagaactgagcccatgggaagaccatactaataaacatgaatgtttacaatttatagaatataggcgtcttcttctctgctctgactgtatatatacacagcctgcatagacaaccatagtagataatgagaacttattacttcctgaacataacagctcgtcccttcttgggtctggaccccggcggggttgcaccacctgcttctgagtatacgcatgcaaacaaaactgttaaaaggcactaccttcctggagtgccttctttggagccacttgcttcctgaaaaagtatacttccttatcagcatcagagttcttttttttagtagtagatcctctctggatctcagcccctgccaaggtccagagggaagatacttcactactcggctgctggggctatgactctgtaccagactacctttcatagacttccccatttttacttatgttcctcaaatgtggatatcaggaaaggattttcctagaagccattcttaccaccctttctatctcccagagaccaatcctcctcatctccttaacattttcttgtcagccacttccatccagattttccaaatcagatttaagtctgtgttccctaatgaaacttttgaaatacgaagaaaagaactgaacccagcagtgggtcaagctgaagaattcaattctttttaattggttctgatgttcatttgaggtagctgtaactcagtgattgaaaagccaagctttattttgaatatgccttttgtttaacgctacagaattgcgttttcagtgacagtgagaggtttatagtgaaaagaaccatgtctaatgggtattgaaatgtaatttcacagacattcttggaacagctcttctaataatattactttgcacttaactaatcatttgcctaatgtgaagttagcaagaaaactaaaatcagagaaataaaaaatgccaggtccattttcatatgtaaaacatcaacagaaaataaatgcacttaggcactcaaaaagtgacttgcgtgttttgactaaaatagatgtttatcaacatgactgccttacaaagaacatcagggctgttatttgatagattacttttgaaaggtgggtctgcatcacaatattttctgtaaggttttgcttcattatgtcagtgattgcaagagagactaaaccataagagactacttccagctataaataggtcacatattcatatacataaacttttcctcacaattgggaacataagcaaataagttggcatatttttatcacaagggaaatattcaagtagaagcagagggaaataaatatcctctagaattccaatcctaaattggaaaaaccacccagtaagttttctatgagtatataagtaaaatcttcttaatattgcccactaggtgcttgttgtcattaaattactttgagtcaaggaaaatactgggatgatatctagacctggagaataatagaaccttcctttttttcttctctaaagacatcacgtaactacactggatcagcagaagaataatatcttgaaaaacaagtcggacaagtatagctactcccacttcagctaaatgtgttccacaaaaatatgttagagaggactcgaaaaaccaggccacttattagtaggggttcagtgagtatatggtgttttatctcagtccctatccccaagtgtcctgaatacaaaataaaaaaaaagaacgttttgcaccacaaaatagtcataggaagggcaattctatttttattatcttagattttataagcattca

SEQ ID NO: 38745 - DNA, 887 bp, Bovine  19866880979527
  misc_feature (1)..(1): n is a, c, g, or t
ncagtaaatggtccctggggtacaatggtttaacttacgattttttgactttacagtggtgcaaaagtgatacacactcagtaaaaaacatacttcagatttttatcttttcctgagctagcgatatgccgtctacactctcacctgatgctgggcagtggcagcagccacaggtcccagtcagtccacaatcacacggatacagtgaaacaaccaatacacttacaaccatcctgtacccgtacaacattctattttacactttcagtatggaattcaataaattacatgatatattcaatactttattaaaaataggctttgtgttaaattattttgcccaactgtaggctaatgtaagtgttctgagcacgtttgaggtgggttcagctaaactatgatgtttggtggattgtgtggtgtgtgctcaggtgctcagtcatatttgactctttggcaccccatgaactgtagcctgctaggctcctctgtcaggggaattttccaggcaagaatactggctgtgctaagttgcttcagtggtgtctgactctttgcaactccatggactgtaacctgccagtctcctctgtccatgggattctccaggcaagaatactggagcaggttgctatttcctactccaggggattttcccaacccaggactcgaacccacacctcctgcattggcagaaggattctttaccactagcaccacctggggatgatcactcgatggattaaggtgtgttatatgcattttcgacttacagtattttcaactcatgatgagtttatcaggatataattatatcgtaagtcaaggaagatcaatatcacattttctttatccaattcatctactatatccattatatattatta

SEQ ID NO: 38746 - DNA, 971 bp, Bovine  19866881004893
  misc_feature (1)..(1): n is a, c, g, or t
ntccccaccctcttatcttccttaactaagccaatgcactatttgagttcaatcttcaatcagaagaatatcgaaacacccaagaggtgctctctttgcttacacactgaacatgaacatgtattctgctactcccacacaaggggatatagagggactctgttacttaatctatgaaggcatcctgacataaatgtcctctcttttcagattcaaagtacaaatgaagatctactgaaaacttccagaacttagagatctatttctaatccgaggggaagatagaatctgctttggctcatcacatttttctatatcctttgagtgctaaccacaggaaatatttttaaactaacaagtcaagatgtaactctttctttcattccagaatctgactctcctctgaggcaacatgtgacactgactatgaaagaaataggaagcaaaaagaaaaaatgtgatttcagccacgaatagaagactgaaaaaactatccttaaattagtagagctttgtatatagatgttggttccctagggttaggctcttaatgatttaacactactacaatcgatgatttcaaagctattatattgtcccatctattgtctgtgcctattattatcctggcaatgggaagtaagaggtcaaagtttaggaagagaaataatgtctttccttgtaaaaccttcagaaaacactcctaagcaacagcacctcattctctcaattccaaataactgaagaaaataatggcattgatgtaaaaattcttattatggcacagtttgatcaggtatcttgactggtgatcacaggcattagtaaagagaccattgattattagtcaagggctttgtaatagattattaacatcaagtcttcccttcctgtcttctcatatttatattgggacctttcagatcttcccatgatatggaatccatttctccacttcttgattctgggtt

SEQ ID NO: 38747 - DNA, 1245 bp, Bovine  19866881072225
  misc_feature (1)..(1): n is a, c, g, or t
nttacctatttacctgaattataagggctttgtggtagtgttttccgtggagaaaggaaacgcctttctccactgagagcagagtgtgtctcactcttctctttttttttttaaaccacaaataagatcttttgtttgtcaccattaaaagtcttcattttaaacaggttcttggactgttggcttgtatccattagtttgttcagctttagcacctgtctcatcccagcaacttttccagaactactgccttcgccatgtagctccgtgagttttccctcttcaaactggggcttcttcagcatttttacttttctaacgaagacatcatggagtggaaaaataggttggcgagctttttctctgtcttttccagtgctgtctggaatcagtttgttgacatcctccttcaagtcatttttctgcacctctcaggtcatgatttccatcatcttcttgtgaatctggcgcacctgctggtgctgggcataagaggtcttcctaatctgattgttgcgttttttagtaaaacacacacgagaacagatgaagcacgttgatatcaacgtgacttcagtcatggtctgccattttttgaccatcgagcacattttgtcacaggtaagatccataccatggaaatctcaggcaggttttgccctgaacatcctccgtaattagcttgaattgtctaaaggcagcttcatcattctgcagatcagcaagattcatttcaaaaacacaacccttgaggccatcagatgtgattttgtttccttgagttcttgtggtcagtgctttcctactgttccttgtattgaacgtagctggtgctttcacatcataccaatctttcttagaaaatgggtcaaccactttcttcttggctccctttctacctcctttcgtaaggtgcttattcttgccgaccgtcttggtgacgttcagaaagccaaaagggcagacgcatagcttacttgagaacttcagtgagcggggcagaatgcactgtctgtatgaccccaagtttcttctcttaatcattcctatttcctacaggtcttcaaaagagtaagactcctgtttattcctgtagccataaattaaaatagaaataccagcatggaagcaaaatagataacatataagaaattatgaaatttacatgtggcagtgtttatcatactacagaaaagagttttttttttttaacatttggagtacagctatgtcctgggtgatctc

SEQ ID NO: 38748 - DNA, 693 bp, Bovine  19866881129240
  misc_feature (1)..(1): n is a, c, g, or t
naaaaagaaagcaggtttaggatggggaacacatgtatacctgtggcggatttatttcgatatatggcaaaatcaatacaatattgtaaagttaaaaaataaaatttaaaaaaaagatgtatttctcaatataagaatataatttggtctgttttatgaccactaggtgaaatatttgattggttttcaggataattgagatctgatgataaatttgatgataaatattttgttcaataatgatctccacatagttcactggttttttccccatatgatactcttttgaggcaaagggaagctctgagtttagaggaggaattatatgagcaaagaaagataaaaataagccttttcaaatgtatgtttctcctaaattccatatttcaccttttgtataacagtcctatttcttttggttctcccatgatagctcggagagaaatcacacagagtggatattcagtgtctatgactcagtttcttgggtgattggctgatcggctgatctatttctttctctttccttctaatggctgttcaaaaagtcatagaacagctactatagctgctgtattgatgtaatcaagtgaaaaagactactgcttctttctcaaatattattttctgctaacacagcacacttgtcaaagtccctgaatattccagaaataggcatcacataaacatata

SEQ ID NO: 38749 - DNA, 1378 bp, Bovine  19866881152664
  misc_feature (1)..(1): n is a, c, g, or t
ntttaatagcagatagggcactttggtgaaagctcatgttagtgagattttatttcacccaacatacaggcatagtatgcacttaagtcatcgatgggttgttgtaagtaaagcaaatagcatatatttacagaactgagcaaacagcattttatgatgctatcctcgaaacattcacactctaatcagcaatagctctccctttcattagtgagcatcagtgagacactcttctaattagctataaacttactgctgaagagcagtcatttcaaatactgtttgttactaaaacaaatacctggaaattacactattagtacaaaaaatcaatccagttctaaagcctaacactgaaagcaaacttaaaactctcactcccacatgcaacttgctaccagcaggtttttctttgtagtatttgaagacttctaacaagccaggatccaccaacaacatacatggaggcaagaaagggataaaggcatgtgcccaaattttataattactttggaagagaggcatattgacaacaattcgggagagagtggaagtgcttaatctcagtacccctacttggattctgttttgtcagaatgtttggggacacttgttcgcatcattaaagccatactgatgatgaagatattttcttgactttcaaaaaatatactatatcacaggaagtgggttgaagaaagaggcagatgtgtgtgtgtgtgtgtgtgtgtgtgtgtgtatcaagtatagcatcgtggtgggggcgacgaaggaggtgtccacagaaccctgaaagcattgatggatcttgtttaagaggaaaggcttgagaggatgtctagatttatttggatttggagtaagagaatatatgacattttaaaggtggcatatacctgtgacagattcatattgatgtatggcaaaaccaatacaatattgtaagtaattaacctccaattaaaataaataaatttatattaaaaaaataaagatcatcaggggaaatcctctgcttgaatctcatctcaatcatttgttaactacaaaggcttttttgccgtttaaaagctgggtgactaagtgtcttggttttattttaaatgtggagatgtgagtactgaaaggatgtaggtaaaacatatagcacagtacctggcaagaataagttttcattgacttctgctccttccctttccctttcctcccttgcatttccaccccttcctctccatgccaaatatcttgatctagaattccaagtcttttcactgacttcactgacctccaatcttctcagtgtccatcttcccagttcaagtcatttcttctttcaggaagccctccctttgcttacccttgcttggcatgccaaaat

SEQ ID NO: 38750 - DNA, 1532 bp, Bovine  19866881227579
  misc_feature (1)..(1): n is a, c, g, or t
ntgagtttttctacagagactgttaatgtacctatttgccctatacaaaagtaggttaattcctcagggtcctggttagtatagcattacatcagaaatacaataataaggcaataaaggtaccagcatttttattctaaaatatggtagtttaaacattgaagcatgaatagaaatggaataatactcaaactttttatcaattttcacaagttataatggatattccaattattttgtataaattacattaccaattctaaaagttgcataaatttttaaatctctggaaggaaaaagtgttataatctgacttgcaaatatttttagcaaacaaaacaagctttagaaagcgacaaaaatgagaataggatgtatacaaatataaagtgttactgaacagactgggatagctaaatcttctgtgaagctgagagatgtgtgcattcaagaaaataccaatttagctagtattgtttgcaaactttgtagttatacacataaatgtgtctcttctctcccttttgtattggcaccagcttagagagccttcattttatccatccttcatcaggacaatcaacttatctctgatactcaaactcaatctcttaaaatactctcctgtttttttttaaattttattttatttttaaactttacaaaattgtattagttttgccaaaacatgacaaaagtgcagtacacaccaatggcttattgtaggccctaagcattcgccattcagatactggattttctgagtttctgtatggttctgaaaaacctttttattatcattgtacctgaaacttgactggatatgcaattcatgtagtacatttgctacagaacctggtaggcttttcctgataatctttcaggcttaaatgatgctgtgtgccagtccaggttcgatgcatgatgctggatgcttggggctggtgcactgggacggcccagagggatggtatggggagggaggagggaggagggttccggatggggaacacatgtatacctgtggcggattcattttgatatttggcaaaacaaatacaattatgtaaagtttaaaaataaaataaaattagaaaaaaaaaaataaatgatgctgtggaaaatccgggactcctaattttatcttctggtgtgtggcttgggttatctggaggtagcctggagaaatctttctttatctttgaaatttaatagtgaaccaggttatgttttagctttgattgttctgaattacttttgcctggattagagaacattctctttatacttacgtatttttaccccattatcttagggaaattttgttttatagcccttaatatgtttctggttttatggttgagcttttattcttcaaagatgccagctgtcttatggaagcacatctttatatgtccttaatgttgtctcccttccttcccttcttcctccctttccaccttcctctcttcttcctctttcctttcttcctttgtttcatccttctttatccctttctttcttcccctctc

SEQ ID NO: 38751 - DNA, 1159 bp, Bovine  19866881338284
  misc_feature (1)..(1): n is a, c, g, or t
ntcttgtgtgtttgcatactaagtacttagtctgtgtgactctttgtgttcctatggactgtagcttgcctggagaatcctacagacaggggagcctggtgggaatactggagtgggttgccattccctcctccaggggatcttcccctctcagggattaaacctgcttctcttatgtcccctgcagtggcaagtgggttctttactagtgctgcttgggaaacacttgagaataaattgtaaaacaaaaagaggtaaaaactcaatgtgcatattcactcttttcttactcttccaataattacataatatttcacattcctaaataagaagcatatctgaaatgtaacatattgcttggagaaatgtatatgcaaaatatatctatcatggtcacattaaaatctccagcctgaaatcatagggaactttttatacacaacatataaagagtatagttctttctaatatatcttttgcctttattcatctatccctacatgttgataatataaactactctttgtcatttttatctaattcaccctgaatatacaccattgtttgtgaggctaaatgactaaacttggtgacatattcatttggtgtagctccttgcactttaaagtttggtttaaaatataatgctgatatatttttcatgctattttaataactgaaagcctggaagctgtgacaaattaagctccctcagaagtcaagaataaccatggttcaaatgatgtccttccattcctagcagaatcatgacctgactaaacttttcaaattataagatatattgaataattcctttgtacaagcttaatgaatatgaatattaaaggatgtttcttagaattagagtgagtttgaatcacttatcactaacattattaattgaatggctttaggttacatatttgagaatttaattcctcatttataaaatatagataccaaaaagtattcatagtagggtagttttataaaatacataatctttagtaaatatttattaaatattttaaatgtgtaatcttcctaaagagatgctttttaaagtaagagtgtattgagtttctaattttattctaataaactgtaatatatatatgtggataaagtatgcctagaagtgtgctgctgttccattcaa

SEQ ID NO: 38752 - DNA, 804 bp, Bovine  19866881391555
  misc_feature (1)..(1): n is a, c, g, or t
ngaaaaaaaaattagtcctttaatatgtttacttgctttgattttgttgcctatttaaaataaattgtaaatgcatatgaataaaggtaaggaaatataattctctaatttatacaatttaaattctttaatttttaaaatatgaaatgtcagagttttaacattatttctgaaagcaattttttgagtgaagaatgcaaaatgcagctagaaaattattacactgaaatgtttgaatatctttgagagacaaaaataaagtaaatgtgctaacaaggaaatagtgctagctacaattccaagaacaaggaatgtgatatgcagaaacgcatgataattaggaatgtaagtcattttaatgttaaaattgaaaattgaatcatattacagttattaaagtcaaaagttacggttccttagtaacactttccaattcacattgcccatatgtactattttctcttcctgtttggctgattttggctcctgtttggtttattttggctttggtcttcggcccttaaggcaatatgaattaacattgtattgttctggttttcaaagattgctttttgtttattcattaaaaatgaaattataaaaatgtttatcagacagtttatttcataaatacgtgtgttctgaaaatactgtgtagatgaattttagtttgaaagcaatttttttttcaataggtacttcaattttttatttgtatttagaaagtgcaaaattccaggaatcatgggcaagagataaaagtggctgaactaaaatgggcctggatcctcttttccacattag

SEQ ID NO: 38753 - DNA, 1349 bp, Bovine  19866881399814
  misc_feature (1)..(1): n is a, c, g, or t
nccgactctttgcactcccagactttagcccccaggctactctgtccatcggattgtcctggcaagaatactgaaataggttttcatttcctctgccaggggatctccctgattcagggatcaaacctgtatcttactgctgagccaccagggaagcccatatctaaggtataaggcagaaactcagttccaggtgtattgggaatgaggcaactatccaagacctggagatcagagcaggatgagcagttaactactttaacatctaatgaaagaataagggaccctgacacatattttgttgggctgcaaagagagacaatccttagggttcaagatagcactgaatttctaggaaaaaataattcagatgacttcaaaatataaacaccacacagacaagagcccaatctgtccattacatgcgtagtcctatctaagataaaagaagtttaaatatctctgctatccccgtgctcagttgttcacagattcatgttgaaataatgcaactatactgaggtattcacacagactctggtcttacataaaattatcttgatcaatctagacactcagaagttcaatatttgaaattatattggcatgtcacatctctaaggatcacattgctcatacaaacagaaatctccatgagagatgcctgcattttataagataattaaataatgaaaagaaatagatgacaacctaggctaggacatttccattttaggtaataaaatcatatctgaaaggctttcagattttttttctcattggaatactcaagaaagagaaaaatggattcagaggccaatgtttattgtatgcattttatgagccatatagttcagagaagcctggcgtgctgcagtccgtgggtccccgaagacatgatttggcgactgagcaaaacaacaatatagttcaatatgcaattacctcatttgtttctcacaaaacccacagtaaatttaccaccattttacataggaatagacggaaaacaatattaaatatctcatcacctaggtaacaaaagatatagttcaattttaaactacatctgtacctttccaaaatttgccatctttatatcagattccttgcctaattataaaattgaatttaataggatcatttggtcatcatatcatttaaataataggacatagaataatgactttgaatatgtctctgaataatcagatagagcatgtggttctatatttagctaatatgtttatgcatctttcatttagtgctaatagtttccttactactcaattctttgcttggtttcttatttagaggtttaaatatgatctaatttcctttgattaaat

SEQ ID NO: 38754 - DNA, 742 bp, Bovine  19866881466167
  misc_feature (1)..(1): n is a, c, g, or t
natttcctacctaacttgtcctttaatatagcatcccttgaacacacaagcatacaccatgtgctttatgcttcttcaaagttgtttccataatagctaaaagattattctctagctgaatcatacaaaaaattattttcatttacctaggctttactatgtgtcaggcacagttctaagctcttcacatgtattaaaccggttgatcttcataataaccttgatgacatgccaaacacagagcaggaggaaaacagccatctcacctctcattggtaaatttctttatctataagcatatttcatattcattcatgtgctgactgagcaattcaaagaaaaacacacccacagaaaatatgtaattccttatttgcagggaaatctgcagctggagatattttctaccattgccaaagaaaggctgtgaaatgtagaaatgaaatgaatgtctcaatatgatcaaaggctctgtattgttttctctaacaaagtgtaatgaacatgcaatgaactgagtatctgcatatctgaattttgacactaagtctctctagttataagacttctgctttattgactatgccaaagcctttgactgtgtggatcacaataaactgtggaaaattctgaaagagatgggaatactaccacctgacatgcctcctgagaaagctatgtgcaggtcaggaagcaacagttagaactgaacatggaacaacagaactggttccaaatagga

SEQ ID NO: 38755 - DNA, 777 bp, Bovine  19866881528886
  misc_feature (1)..(1): n is a, c, g, or t
ntgggagctgagaggtatagggaattcagagcccttaagcctgtttagtagaaaccctgtgggcaatctcatttctagataaagctgaactaatatcacaggtcaaaacttgccagctaagacatctaagaaaaatatataagtatcacttcatatcttattatataataggaatctacacaatattttacaaccaagaaaaccatgaaaggctaaccttgcatctattttgaacaaatgaatgatatatgtatataatatagttgcatatattctaaacccaaaatcacatcagcaaatttatagtttcagggcatatcagaagaaaaccaattgtcaatttgctagaaatatcagttgtttcagactatcctatgttgtaatcagttttaaaaggcacattactgttaccataaaccattaaaggtggtttataaccaggggaaaaaatcctttaaaatctctcactgctacaattcacaagccattgctacaattcgcaactcatttgttagtcttaaccgccctcagctttgccttgggccattaactaacaaaccaatcattaactgttagtaatgaccatttttcccagggattattgcttaattgaactcttgtacaggacccattattttctgagatgtcaaaataactatgctttactacatttttctataatattaacacctcccaaaataagcaatagcagtgtcggagaattaaattgtttcaatgtacacactattttaaaatacattactttaatgaacaatt

SEQ ID NO: 38756 - DNA, 1450 bp, Bovine  19866880438002
  misc_feature (1)..(1): n is a, c, g, or t
ntgacaaacaaaacatttcgtgttcaacttcagaaattacatcttaaaacaagattctcattaaaacacacacacccctcccacacacgcacaatgacaatgacaaaatgaaaacactgtatgaatactgcaggaagggttccaggtcatccacatcgaccctgggagcgggttcttgagcccagcccatggtgaagtgcgaacacactgtggattagtgtctcaggcacgggggccccgactcgagcaaccttgaggttaaactgttatgtacattatatctacatgcgacacagtattttaaattaggaggcaagcacacgtgtgaaggtgttactctactgaatatcaggagatggtggcgggtacggagaacagttaacagaagaagaggagctgtatcacctgttgggagagaatataacctggcatatagttctttaaattaaaagaaattggtacagaaaggaagtataatccaaaaaaatatcaatcaatccagagaaatgtttccattgtccaacatgttcctaatacaagtcagaattcatcatgcacttggacggtcaaaaggagaatgctaacttctgaaaagggaagccctggacattcctgggtaggtgtttggcacccaaatttcaccgaagaatgctgtttcttaatatcagaccaaagtgcaaagcaatataaattagaggccaagtcttctcttgacggtcgatttacttctgcaaaacagactttacgttcctctcatatgaacaatttacatttgaagcgttagatttgttttcactggtagggggaggaagtgggcttctgtactactgaaagtcggtgaggctaaggtatccttctcaaagcagaggccggaatcggaggtgagaaatatcggtacttgaagagttaggctgctttgcatctacccagcgtctagaaccaattccagcttcttaactcagctgtgaagaactcccttaggcatttggtagccgcgtagccagtagttcaagactaggaaaccctgggaaaaaaaaacacaaacaaacaaaaaaaaccaaagggagcatggatggatattctggttggatgtgaagatatatatcacagcccatacatctccacaaagacacatacattgctgtgcacacgttaacactgactgtcaaataaccagcatcaaaacagacgctgcaaactgttttgagcatactacgtaccaggcgtcacatttatttaaacctcacaacaaacttatgagggagcagctattatactcacttaaaagagagaactgaggctcagaaacattatttagtttaaagcattagcccttatatcctgggataaaccataatggaaaagaatatataaaaaagaatatatttatgtgtataactcagtcactttgctgtacagcacaaattatcacaacatgcaaataaactag

SEQ ID NO: 38757 - DNA, 1950 bp, Bovine  19866880443826
  misc_feature (1)..(1): n is a, c, g, or t
ncatcagatatgacccaataagatgctaaaaaaacagtcaacattgacacatggcagtgctttaatccacaattatccttgtaacttgcaccattccttttatcatccattagctttgattcccattatcccatctagaactgtgtcaacgcttttgtccctagggatttctctccactactaggatctgacagtcaagcttgagtactaaacaggatcattacctcttaaatccacttatctgatctactgaatagtaaattgaaaagctcattaagagcaacaatctgatttgttttcacgtgtgacagggtcatttaaaatcaatgtatgattactgcatttctgttaaaagaccatctcacattttccaaggtaccttatcatgaattcagagagcatgcagataatatgaaaatgtctttaaacatttgaaatgcagttataccatacatacacataatttgggggtgaggactaatttgtccagtgagcaaatatctgtaaaattgtttatcataaagcacaattcaatgaaagttttctactgaaaaaattctaacacagtatttaggggttttcaacattttctaaaacttctatcacttcacccaaaataatttttataacagcaagaagaaactatatcacaatacatactcattataaggaaaaatacaggagttggcataggaatgaaagaaaagggaaaaaagctcactttcagttcatagagtcctaatcttttctttcattatcaattaagataatttgatcctagtgaaaactaagcaaatatctaagaaacaaaagactaatgagcccatttgtgttgctatctctctctgaaggacacggtgaagccgcataaaccgtggtgcctttggctgcatgtttcgcagagtcagaggcgcacacactgtcctctagttttgccgtccatcgtgcctgccttcctctcttctttaaacatgcaggttttcctattagactacaaactccctgaggacagagatgatactctttcatcttgcatccctattactcaataactgttgaatgtataacaaaaatgcacattttggctgattccatttcattcataattattttgacaaaaggaaaaaacaaaaaaaaaaagtgtctttttatacaaagaacttttttgtgtgtaaaaataaaatattccaaattccactcactcaggtgaccacttgcaaaatttcattattttaaaagatgtagtttttaaaaatcattatcatttttcaattgaggtatacttgatttacaatgctgtgttagtttcaggtatacagcaatgtgatccagttatacacacacacacacatatatatatatattctttttcagattcttttatagataattacaagatattgaacatggttccctatgctatatagaaggtccttgttgtttactatagaaagaagtaatttcagtgcttacataatacttcaggaagaagccctccttgtagattcactaagaagagctctctcccctcctctggatgctcagagcatccactgttgcaggccggttagcggcacttttcacataacagaacatcatcctgctgtactaataattttccatgttaatatgtatttcctccattacttcatgctgcctgaggccagggaaaatgtctgtttctttttatagctccagatgtacttagtacactgtcttgataaacttagcaacacagaaaggcacaggttttggtcccaaagataactggatttgagttctgccactaattaggtgttaaagtctctgaaccttggtttcctgtttttctgagaaaacaagaatgataaaaagacctaccttatgggctttggggaagattaaatgatggtacctaacagagcctggcattgagtactatccaacaaatgcggcttccctccccaaccc

SEQ ID NO: 38758 - DNA, 2233 bp, Bovine  19866880475528
  misc_feature (1)..(1): n is a, c, g, or t
nttcaaaagttacctttctcctatagctagtcatacttgactagtctgaaaaatgagaggtccttataaagtgaggctgctttggggagtgggcaggtctggggtgcctaatcctcaggatcctttctgggatacttcaaggagaaactgcttggcgtttcagcctcctgcatggtgaacggttgtctgtgtgccaagtgtgagatggatgggctgggaaacagctgaaatgcgactccttccaccctgacccccaaaacagggtttctaatggaaagtctgacagaccctttactgtagtggcactactgggggcagctataatattatcctcataattctactatataataacaacaaagaaaaagaaggtgaagggtcattgtgctttgtctttagaattaagatggctgtcttcatccttacagcatactcttaattctggagacacatcttaataacctctaaatagttccaacaaaagagccgtgtcagaggaatgagcaggccccaaggtgtttcaactggagtgttttcatctgcctttattgctctatccctctccagaattaaggcaataacctgtgataaattattcaggaactgctacagggatcaaagcaaaatcattctgttaaagtgctgtttgcaacatttggcacttagtgcgaaaacttttaatgtgcgcatgctgaaaatctaggattttaaataatttaacattgtggagtttttacgaagggactaaagatagcaggttcctatttaactgctcctttatcctcctagaagttttcattcattttccttaaaaccgatgacgtcatggccaaatcaaaaatgatgcatgggaagtcagggtattggactgtattttactaagggtacaattatagggggaaacatttactgtgaactaatgctttagagccagggttgtcatggcagtttcttccttttcccctttacttggaaaagaaaaacccaagacaaaaattcaatgttctcttcaattttattaggactaagtaagaaaataaagctataaatttaggagttttacagcatttcctcctctcacaaccatatttcaatttggcaatgtaggtccttaatgtttgtgctcatcctgaaatctgcatttgaaaaatatctataaacagggagttagaaaatcctggtaaggattgcaaattaaatgaatttggcagtcctgcggcattttcatagagatattttaacagcatcacctcctgtggactggaatactaaatactttattgaagaacaaaacagtactgtttttatctttagtacttgcaaaatgaagtacctgaaagcacttttgcatgtattatttattcatcatgatagaaaaatagccttaacctaataaattacatttaaaagcatttagtgcaaaagttttgtttatgataaagcaacagatttacttctttatcggtagcttaaagcaccaagttttctttatacaaattagacagatggtgcttacagtagaatttactaaaggtctgtcacaacaaatgcagccaagctgcatatttaatcactgcagaatcttgtctacctgcagctgccaactgctaatccaatttccctgataaatgtggcaagagacacgatcagcaataaagagcatctaactccattttcctgcagggcgtcttttgatgaacatttaggacggaagcgcggagtgcactgtgtggccttggttcgtggcagctgcatgcattctgaggcacagttctcaggttactcacttaattctgccactatcattacgttgctattgatctcagtagctgttgcctacacagcattactctagatgaagctgaatcaggcagttatcatgcatcaaacttgctcaaaagcctggagatttccccttaattacttgtgattttatttgcaaataccgttaaagtgtaatcaagcagtcactttccagggtcgttaagaacttgctggtttagggatatatcactggaactccattaaaaatgactctgggaagatggtttctatcaaactagatgggattacatcaaaatgggcttggagtataatgaaatcttcaaatgagacaaatgtaatttttaaaaagatactctttttcaatcttactgcttcttttctgatataaagggcagcaatagccaccttaaagttgccaagatttactttcggtcattaaaaatatttg

SEQ ID NO: 38759 - DNA, 1311 bp, Bovine  19866880483518
  misc_feature (1)..(1): n is a, c, g, or t
nctcataatcctccccaacactgaagcgatacctgcatttttttttatttttacacacagtgaaatcttaccagagaaaggttaacttttttcaggtcacacagccagcaagtgagagttatgatacaaactcaggtgtttcaccctagagcccatgccctttatgttaaatcatgtgtctctaaggtcacaggtccttagaacttatcaccatttggcaagttcacatcaacagatataaaaggaatttggtttcctcaatattctgctatcacccacgctctgggatgtatataattcaatttgtatatgtttaagagtctgtaaataatggttaaaatgtccatgaacagaagtttgtgcaacacataccacccttcttttccctttagcagtctttctcccctatctatccccacttgtcttaagaattatcaaacagaaatgttaaaaaggtttcatagcatgaaaaaaaaatctaacattaatttaaatcaatatctattgcacacccaagcgctaaacatagtgaaggattcaaaggacaatcagctttagacatgatcaaacttccatgatacacaggaaggtctggtaagtcccatatgcattaggaacaagtcattatgagaattagtgatataggtgagaatttccagaaaagaggatggctaagatacaggcagacagcaataacccaagtaagcaaccaacaggaaagctcaactcaacatttactgaacaccttctacaagaaggcgctgttgaggagtttatcatttaacaggggacacaaacaggaaactctaatacaagcgcagaagatgccaagtgccacaggataaatccaaagtgccagcactcattcatttaacgatgattatcatgtaggcattgctatcgatacaaaaacaaaattatatctgccaccataatataaattgacatctagaagaggtatctaagttgtgttctgagaggagagaagaggacgttatcaacatgggtggaagagaggattgctgagatctcacctaaatcaatttggctggagagctattaggtccttcccattaatatcagtagcctgagacacgggcttaggtcagttcatatcagtgctgacaaaggaaatctgaagaacaatggtcctccacactttggctggaatatagaataagtgaggaatgtgagaagaaaaagctggaagggaggcaggaatctgaatagtgaggacttcaaatgctttctttccctttaactgtaaatatcaccaggtggaagccaagatcccaggctcctcacagcgca

SEQ ID NO: 38760 - DNA, 1941 bp, Bovine  19866880498259
  misc_feature (1)..(1): n is a, c, g, or t
ncattccttaccattgcaaaaccctctgtgttcttgcccagtctccctttttgctgctgtctctgcttagaacacatttatgatgaactccataactgtggccttctctgtggagtcttccctgattctcaaggacccagaagtgtccatcttcccgccgctgacccacagcatctttgcccagccctggttcctgttacctctaaggagtagtctgtcccaggcagcttttagctcctcaagaacagaggttgtggtagatgtctgtgttctcttacctcctcccaggcatcttgcagacttggaatttaagaaaatggatgagtatgacatacaggagtaggacgttcttggtggttcagtggttaagacttcgccttccaatatagagggtgtaggttcaatccctggtcggggagctaaatccctcgtgccttgtggcctaaaaccaaaacagcaaacaaataatattttaacaaattcaataaagattttaaaaaaataagcgatgtaggagtgaagtgagtaaatgagtaagtttagtgtatgaggaacgaatgaaaagatttttaacagcctgagccagcaggaaccgtgactcccagggtgacatgggttgggttccctttctccgtctgcatgaaggggtcatggagagatgtggcccctctataatttgaccatgtctttggtgaaataggagcctcaacagtgagctgagcttcttgctcggtgacccagtagagaggaaagcacgtctgggttgagaggcaggaactgatccccttgggcctgtggcctctgacttctcccacccagaaggttctcaccacatgtttcagtaggggcagctcttcctcagggagctgagagtctttgccaagagttcccataggcagcagtataggcttccagagtcaaagctgtttgtccagcaagtgccctcatggctggtggccggatgtggtgggcagcacacagaaggcctggggttggggcgatctcaagccagggcgccagtgtcatcatgtgactctgtcttatagatgatgtccgtcctcatgaacaccattgtctttgaagactgtcggaaccagtggtcagtgtccaggcctctcctggggctcatcctgctcaatgagaaggtgagtgtggctgctgggaggtccccaggaggcaaccgcaggaggagggtgcagccagacaccaggccaggctgtgagagagacgggggccagctgagcgtgagcgggcaccttgagcgcccaggacaaggccgtattcccccagaaggcccttccccaggggcctcagatctccttcagctaagtggacacctcaggctagcttttctggaacccagagcccccacactgggcaggtggttagctcagcagtgcttccagctcaccctcactcccttccctgctccaggagatgctgggcaacaatctcttttgccctttcctgggcctccttcctgatgcccattgaccactgccctcaatggtagcagtcccccgaatacagaggcagcaccctctatccaggacgtgtgtctctagcccttgagtgcacacaccactctgggctgcctcccaggttctccagcttccccttgaacccacccctggctccccagcagtcagtaggaacagtgcattactgctcgggagaatgaattgtctatacaataagagagtactggggaaaagacagtgagattagagacagccgcatacattaaaattcaaactgaaatcccagccttggaaggaaactaatagaagaagaaaatatatcaaaaagagaagagctgtctcatcattcacctgtgctaagtatccaattttagccacattcaatagcactgtcattcatcttccctcggtgttattgtgatttaaatccaagctctataaaagagagcagttcttttaa

SEQ ID NO: 38761 - DNA, 1473 bp, Bovine  19866880517815
  misc_feature (1)..(1): n is a, c, g, or t
nctcctgagccccagcagctcctgagaatcacctcactctggcctcccacaaaaggcacagccacggacgtcccctcctgaaaaaccgagcctgaagctgttaagatctcttctgttagaactttttaacggtgtcataaatcttttattaacattcagtattatactaattaaaactgtactctgtatgtattattaatttccctagcacttcttgctggggtgacatttttagccagctaagcagaatgcagcacagtaaataagaagaaactcatttccagacaattagccttgcagaaaaataagttggttaatggaaggcatgatgattacaaattttacctaaataaacagggtatcttaatggtaactcttcaagctaagtaaacagattggggtgataatgtcctaagcaatacttaaatgtaactgtttaataaattggtaaattactcatttcatcttagaacaaaatggtaatactgtagtaataacctagtatatattccgtaaatatgaagcattatcactttagctctgtagaaatcaccacagtgatatgtcagcattgatctaaaactgcagcattttatctcaagtttattacccatttttgagaatcgctgagattttcagagcataatggcaataaaagaagaatttaaaaagcgctttaatgtgcataagttaatcagaggtatcctccggggaaaaaggaaatttggtaaaacatgaattataagcatcatttaaacttactttggacactagagataataaatggcaccataatttagaaatagcttttaacatcaatgacggtaagtaccactttactgttcataagaattgcagagcaatggtgctgaggccaattttattagccatttttttctttataaaagcaatccagccctttccacaactgaggagacaggaacaagagttacgtgctaatatgcaaaatgcatttaagttttttgaaatagagaataataaattgtgccaaaagatagagtctggagacaaatgaatgatcatttaaaaagaataaggcgctctcagactttacatatttggggaaacttgataaaaaaaaaaaaagaagccaacaaatcgttcatacattttctcatttgccagagcatgcggatgcgctttcaaatccgagagatgaagccataaatcccagcgattggaagatgccgcaacagaaatatgtttttgtaaactgtcaccattgacaaatcatttataaactatacagagcacaggttcaatctgctcttcagggtgtccaagcaacctgcctacagagaagcctcagactctgacctctactcggcgagcacagcccgacaggcagggcggctggcagctgcactgttcaagcggagcagcccaagctgtaggtaggaccatcgccaggactcactgagccacctactaagcacccagcgtgctgagcat

SEQ ID NO: 38762 - DNA, 1530 bp, Bovine  19866880560539
  misc_feature (1)..(1): n is a, c, g, or t
nctgaagctaactgatgtacctcccacatagctgcacaaaaggatttttcaacaaaacgatttcagtctcagttttagctgagttctcaagacaactggtatcaaccgctcccatttcacaaaatgtgttaccaggtcacctatgcaaggctgtgacggctcctgaccattagctgacctcctgtgtccgatctttaaaagaggtttgagaggttgagggaggtacttgattataagagcttcttcttcttttttttttttttttattctctctctctctcctggtgattttatgaggacccctgcctagggcttccaagggggcgttggtggtaaagaactcgcctgccaaagctggagacacagagaaaggagggctccatccctgggtggggaaaatccaaaaaacagaagcaatattgtaacagattcaataaaaactttttaaaatggttcgcatccaaaggaaaaaaaaaaaacaactaaaaaaaaaaaatagacaagaatgatcttcctaacattggtgtcctctgtacttaaaaacttcccagctggcccagtggtaaagagtccacctgacaatgcaggagacactagagatgcaggtttgatccctgggtcaggagaatccccctgaaggagaaaatggcaacccactccagtattcttgcctggacaatccgatggacaaaggagcctggcgggctacagtccatggggtcacaaagagctggacacaacagagctactaagcacatgatgttagagtcgcagtctcaccactaatcttgttttgccctcagactttacagttccctttaatgggtttccactgaaacatctttctctccctcttgattctgctcactgtaccctgaggagttagtggttggcagcagaaacctcctttccgtaggacagaaagtgggccctctcccaggtttccgtaagttttgctggactaccacccctgacctccaaagctgccatgggtgcaccccctgcccgactaacattcaagttgcctgtgtgaaggagtgatttgttgcggcctctaactgcttcttctcttccttcctttttgtcatcctgcagtgttctgtgccaaggtctttgtggctaggctgcgccaacctggtagagagcatgtgcgcactgagttgcctgcagagcatgcccagtgtcagatgtctccaggtgcctctcttctttcttgttgtaaatgtgttttttacgtataccatgaacatttgttgaaacttgcagtagtgtgtttaatccaatgttaagtctgctaaatgttctgtgtaaccctctgctttcctccagcctgggtgccctacatggaggagttcatacctagaggggcccttctgagcaaatgggtctttggctgggccctattctgctcctctttttccgctcctgctttttatcctcccaacccctaccttgaatctgtgattctcatgtttaatagttgtgcatgtacccccaaaaccttgacattttccatttggctacctttaa

SEQ ID NO: 38763 - DNA, 1718 bp, Bovine  19866880579526
  misc_feature (1)..(1): n is a, c, g, or t
naaaatatttagagatgtggtattttagcatgtgtacatttgcgcattcctccatataaatatgttgaaacatacagtgcggggtggatgagggaatagggacgtttatttaaagtggtgtactcatgagaaatgttcttttaaaagatactgtcatgggagacaaatatgtcatctaatcataagctgactatctgcaatcatttgataacctcaaagtccatttgtataagaaactagaaaagcacttatatgaaaagtacacctcgaagacacatgtaagtgggaaattaagactgatggggcacgaagcacacacaaatatgcagacctttttctgaatttatacctagattttgtcctagaatgaacaaaatcaccttttctcatgtttggaaacaaacccacctttacatcttcttgtttaaagttgttattgaatatctgtaatactgtttcgaaagagactgtaagaggcagcatgaaattttcaaattcatcctcatcttcgcctatcagaaaaacaaaaggtcatcatggtttaaaatgcatgctactgtccattagccttcacagtgagcgctttattcaggctcagaaacgttctcgagaaggggtcagcctgcattcacatccgtatcacattctgtgctttggctcattgaatattctggtgttttgccttctcttttgcaccaaatgaaatagcaaaattacttaccagccatttttttctctggctctttattggatcaaacagactcatgccccaggcacctcagcctttcagctcttagggcccccagagcttccctaatgcctcaaggaaagcccctttcaaagcctcagagaacacggtctgttttccttttctctttaggtgccaaggccctaaaggactcacagactcaggtgcccagatagtgctaagttattattctcttttatttatgttcttttttattaatttgttaaatagatgtcagggaaacaggatggggtcctgccaaaacaggatgaggtccctcatgggtcattatgattttaaggacattctccgtgagtacacttctttttgcaataagcttctttttctttttataaaagtgggaagagacatcttctactgtttttcactatgaaggtagaatcttcacttaacatatggatacgcacaattgacaatttatattctatccttcacaagagtgggttccttcaaatgagaaagtttactcattcatcctatgccacagggaattgtgagccccactttacagatgaagaaacaagcagagaaatgttaagtgacttgctcaaggtagcatacttagctggaggtggaactatactgtctagatcttgtgatttctgtgctatcattttttaaatagagaattagagaggaaacaagatctcagagaagaagccagtggttctcaaagtttggtccctgccctagcagcatcagcatcacctgggaattcgttagatataaaatttcaggttccgtcccagatccagcaatttttgttttaagcagccctccaggaaatttcaggttcagttcagttcagttgctcagtcatgtccgactctttgtgaccccatgaaccacagcacaccaggcctcactgtccatcaccaactcccggagtacacccaaaactatgtccattgagtcggtgatgccatccaaacatctcatcttctgtcgt

SEQ ID NO: 38764 - DNA, 1418 bp, Bovine  19866880588688
  misc_feature (1)..(1): n is a, c, g, or t
nttatgctcaggctttcccacctgcccaagactacaagatccgggggcctgcattagtcagcctgtacaagaaatgcttcttgacattctaatggactagtggtaccctcttccacctttctaagctagtcttcataaaaccacatcttgggaattccctagcagttcagtgattaagactctgcagttttactgccaaggacccaggttcagtccctagtcagggaactaagatcctgtaagtaacacagcatggcccaaaaaacccaaaaaccaaacaaaaaaatgcatcttgagccaaaggtgtccagcctctttgcagtagaatggaatgctcattgaaggctgcctgtgcaacagaaattgtggaatagagacttgagtcagatcagccatgtgctacagcctcattgagggaactcttcatttagcacttgaagcccaccaaaaaaaaaaaaaagaagaagcagcaaacctgatatggctccaggattttctctgatcttttttctagtagacaagcaaacctttatctcagtaatttcaaaattgaggatgcagaggactcccttagaatatacttcttaaatgcccttttcaggacctcattccagaggttttcattttgttaagtctgatctggggatcagaaaactgtgtttttaacaagcacccctatgtgatttttatggaggtagtcttaatctcactttaataaatattgctatggtttatttctcttatgagtgttgtgcttctttgatactggtttgagtttcatttgaggttttccaggtgtatttctcatgcacttatcttttgcctgttgtgtatggtaaatattaagccatttacccagttatgatttagttatatgggttgacattgtgtgaatatagcagatgatgataccaaatcctattataacagcagatttctttgtgttaaaaaaaaggttccctagcccctgttaagcactgttctgtgttatattattccagcccagaaaaataattcagtcttctaaattccatactacaacagtgttgcttgcgcttaaccgttaaccatataaggcaaattgaaattacgtactatgctatactatagcttcaaattaggacttctagagatcaagatatttttattagaattcctttaaatactgaattgagaatcattacgtcatttgttccatgttaggttggtgcaaaagaaattgtggttttgcactgttgaactttgccatttgcactttgaatttgccatacattcttaaataaatgtggttatgttatacatcgttttaatacacatttatcactttatattttttgctaatgacttattacttgctgtttatttcatatttattttagactagggaaattatattaaaaagcaaattcgagtatttt

SEQ ID NO: 38765 - DNA, 956 bp, Bovine  19866880619511
  misc_feature (1)..(1): n is a, c, g, or t
ntctacgatgttttaaagcatttatgaaaatgtgtcacaaaatataatttcctaaaaacaaattctcttagtacatttgaaagtttgttggaactatcattttgtaaatgagttgtaaagagttaggaataatttttgcaaattattatattaaaatgcatgaatctggcatatactgtctctaattacaaacaaaggatcagttggcttggcattatctacagaaactttaaaagctggtaggattaataacttatgataatcagtgttatgaacactatacagctccttacagtaaatattgtcagatataaacaattaatatataactgtatattgtctttcaaaatacatatgtaactccacattatagcttaaatttattaaaaggcaaaatctgattaatcccctgagttatttaatgaacaatttagttgagccattttcttctaaaatcattatggataattagagtttagacaatcagagtatgagagaagagctgaaaaactgtcagaatcgtgtgatttaaagaacttcatatatattacattaaaacaaacttcagtcttgcccctgcatatatctcaaacaaaggaaaagttagaaacaacttgctttgtaacaaagttaaatttaagcctgttttcttctctcttctttgtttttttttggaataaagaaagaatttcagtaaaagtaaactccgtacaacaatgaaggtatcttttccttttctagttgtatcttgcatgctgatttaaagcaagttcacatgtaacaatttactatttatatatgaatatacacttactgcttggctccactgagaaactataaatttcatctattgaacattagcaaaaaattacatgtgtttatcatctgggttattctcagattaatagagataaagacaaaacataatcagtagcagctctgcaacttaatcattg

SEQ ID NO: 38766 - DNA, 1804 bp, Bovine  19866880672186
  misc_feature (1)..(1): n is a, c, g, or t
ngctgaaatcaagaaaggttatgtaatttatttttaaaagtttaagtaccgttcttaaagataactggtgctcattttcatcattatccaccttgaagtgataatctctgtcagcctttagttcacaacctgtaaatgaagaacaaaaccaactgtaacaaggagaaaaataacactgaaacttcagtgtgtgtaagtaaagaattaactcataaaggaatttttactattctagctaccaaaagggaagaggtaccactccctggatttcttgaacacaagtttatcaacatcaaataaaatccatacagagcgttataaatttcactttccccccacactatttaattctcaactacatagtctcagaaataggatcaaaaatttagtaaagctggaattgaaacccatcctaacaatgctgataaaatcccactatttaaaaaagttgattacctaccaaaattcccaagaaaagtgccaaccaaatttagaagtgccaagagttacacaaacacctacatccacagcttgtatttgtagcataaaaactacaaatgtagaattaaactccttataggggtcaacattccacttttgaggtgtcagaaattatgtacattaaattctgcttagcagttaaaacatggaaatatgttaaggatatttccaatagagttaacataaaaattttgatagaaatagatccgaaaagctagtttttcaaaatgctaggaataaaagccttaacgtatatagtgcatgttactactaccattcatgaataggcagttatttgatataccatcagaattaaataattaccatctaatagttactggaagagatgcctcaaagcctgacacaaggaaatggcttcaacaattaagtttagtgagactgaaaaaccaagacccttagtatgctacactgtgcatgagagggaaatacccaaaaccttacagaaggctgccttcgctggtctccctctaccgccccaaatcatttgtaatgcaatagttctggaagcaagcgtcgtctaattttccttaagccgcttctaagttcagtaccacatctgtaaagtgggcgcggtgaaattagaaaaatgattctctaaacgagtactaccaacatagatgttaagcactgaacaaagacctccagagtcctggctgtaccaaccacttcacctaacatttcccgcccaccagcctcaattaagccctgagtcgccgggctcgggggcgacaagacaccagaaagccccggatgtagctcccacaccccctcctcccaaccacgtggcaaccacgtgctccccgcggtcgcggcctcctcaagaccggccgggccgcgcctcccctccccgtgcaaccggccgaggcaacgggaccgagtcttggccccacagctcctgaccctgaggcccgatgacaacgccatgctcaatccatcttctcgttaggaaaggaggctcaggcctcacaccccgaaaccatacaacctcctgcaccacaaacccggagaccagcatcaggcacccgcccggaatcagaagcctatcaactcacaaagcccccagaataactgtagccggagttctaccatgccagctaacgccaaactctcaaccggtcgctcccaagttacttcaggccctaggccccgaccgctcatgccccagccttcaggccgctcctccttcccaccctctccgtgctgccggctcgactctcctggatccccatccctcaggctgaaggatcctggcagctcgcttccgactccctcagacctccag

SEQ ID NO: 38767 - DNA, 979 bp, Bovine  19866880682783
  misc_feature (1)..(1): n is a, c, g, or t
nctaaatacattttagttatctcctaagcaatattggtaaagttccaaatgtgatgtgccagctttattatttttttctaattcacatcaaaataaatatataatgataaaattacgaaaactttgtgccatttaatattttagccactcgaaaaaatactactgtataggaaaaaaaaagttttaacttcgaatggcactgatgatatactacaatctgatcccagttatgagtatattctcacatgcaacactttccttccaatatgctctattccaaatactgtccctcaaatatgaattttcatcacaactattgctcccaccaccacaaatgttttcaccatcacctcaccttcttttttcatttcagggccagatcattccttcaagaccttcccctacaacactgcttcttttgtttttcaactgatccatagactagccttctttttttttttaggcagataaaggcttgtcttttattgaatgagtgatctatgcaattgccgaggccactatgtacagagaagagggggagaactttatttcttggtctcttcctccttggacagagtcttgatgatttcctctttcttggcctggagccgctcttcacggcgcttgcaggcttccttggtcttagacctgcgggcctcagcctggtccgccagaaggttcttgcgagccttgtctgccttcagcttgtggatatgttctatgaggatccgcttgtttttgaacacattacccttcaccttcaggtacaattcagtctgaaccactgaaatgcagctgcttctgtagcgctgcatttaaaggcatctttcttaagtgcaaactcagtttcttttcccagaaaagcatccaaggagatctgcttgtattgtcaagtatctgtaagctcttaaaagttaactaagactgtattatcaaatgattttaaatagtgaattttcagtgatatcagtttatttaa

SEQ ID NO: 38768 - DNA, 2846 bp, Bovine  19866880710330
  misc_feature (1)..(1): n is a, c, g, or t
ntttgtgggcatgctggagattactaacctgtgcagctggcctccagctgatggccaggacacacatgtgtgagtgcatgcacacacacacacacacatttagaggatgcctgctgccaatttcttgcctggcaaaccagaaatatttcagtggtttataaataagatcccaatcatctcgggacacttctcaggttcaggcccatctgggtcaggtgcccacagggctctgagctcctctccattcacacccatactccatcccggcacgccttccacttcccataatgcacagagaatgcctcagcgccagagaaacatctgaactggacaatttcacaggctgcatcagtgctgtcttgatttgttctttttttctctcatgttattgaaatgttatttttttccactcacatactaccacctctcaccccttccaaatcaacctattggaaaagatgtttattttgctttttccttggcataatttaatatcagacaagtgcatctctgatgcagacagtatattcctggggcatacatttgagattctggttaattagaattacaaatttgtcatgcaatcctggccagtttggaattggcaccctgacatcatgtctatgcccttttggccttgccagcagttgctaggattgttggaggggcagggggagtcgcttttctcagctataagttaggatttcataaataattggcagcgccttaaaagaagcctgctctttaccatgagataatgtatgttttctttctacttacttggagtgggtcgtattgggagccacccaagttcacttttaaatcatttctctgcatgccagacacagcttttgaagtcgtctgccccagcccccagggaagccagggccagggcctgggcctctacccgtggccccactatgtgccccgccgcccataacaggaagtgtgtcagagcagggtgggcacggggtgggtggggcgggtccacagggctcagttcccccagacggaaaatcctctgacgtgtcctcagtgtgcgcgtctggagctccagcaggtcagatgtcaccgctgcctccaagcctcaacacccctttgtgtctgccccgctggccttcagatgtagcacatggcataacagcaggctttttcaaagtgcaggccacaggaaatcacatctgaagtgcctggcatggagggtgtttttatactgttcactttttcctttttcttttcatctgttttctgcatttttttttcagtttgctttttctccttgatttattgttgtattattctatttttaaaccaagacatactttcccatcagactctttaatgtaactcatatgaaaattagtgatgggtggacctcaagacggtgcaggggctgaatccagtaggaactgccttcccaaagcgcagatgcttatctgaatccacactagctgctgtggtccaggagagcagagtgaccaacccctcactaaccgatctgaggctccctcgtgtgggctcctgccccttctgctcgaacttgtagcaaacagtgtccttgtcccagtttgtcccccttccgtgggaaaacatggatattccagaaaggattatggaatccccaacatcgggaggaagaaaaccagtgtgatccaacctagcgtgttcatttggggatcagtccatgagggctggctttcagagcaagatgggatgatggtttaagggtcacactcaggcctctttgaagctcctccatgtctcaaggagaccacctcagcaccaaagccagagagccctcagctgagattcctgctagcattgtggtgaggggtgaacctctaacgatctgtgcctcagctagaatctgaatgcttttcttctagggttgtaaaaaatagagcaatggtttgtcaaggaaatggcaggggctcagtaaagtggtagctggtcttacgattcacaggtttgttcccatctcctcatttagtctgaattcatctccctttcccccgaattcctgctgagaatttgtcagtctcccttttatttattttttctgtgtcttatgggtctctccttcctctgcccaaatcggagaggttagaagggtaaggactgtattccatgtggcctggcagttaaaagcatgaactttagagaccagtagtctgtcttcactgctcatgagtgagcccactcatccattcagcacagatgcctgagttcttgcaagtgctgaggattctgcaaagagcagtaaaagcctggttcccacagcaggcacccctggttctccctattctatttcagccccagctggagcagacatttcaagagcaaaatggcctcacaccggcagcatcccacctaacaggtgtgctgcctaacgctctacttcctgttctaagaaattttctcacatccaaatggcctgtttggacgttatgcaaatgctgcctaggaggatgaggttaacatgccaggatgaggtaagcagtgccagtggaggccccttgcagcctcctgtcctccaagcagacaatgctgggaggtctccgcatattgtccgcagtgctagagggatggagctcccgtggcccacagcgtaaccttcaaagtgctcccacccccttgttgacttctcttccctctcctactcttctgctccctcccttctgcttcctcccaaacccttgacctgaatccttgacccagactctgctttcaggagaacaaaagctaagacaatttctgctctcataatctttgaaatttaatgagtgtagagagacaatagggagaaggcattggcaccccactccagtactcttgcctggagaatc

SEQ ID NO: 38769 - DNA, 1046 bp, Bovine  19866880753737
  misc_feature (1)..(1): n is a, c, g, or t
natgagggactcctgcttctctaccaattagagttttagactcattctagcattccttctttctaggtaaggtttattgggatacccagagaatttccccacttcctgacagcatcttatccagaataaagccccacttccttaaaccctcttccaaaccacctgacaactccttctgagatgttctacagttcttcacggtatgtgtcctcccttcctgcacccagtagtaaactcaacttgctcagctatcggtgtgccctcgctcccctttggttagaggtactgacagacttgacaaagttcacacagagctgaaggcagaattcactggaaggcgtctccagctgtattccttcttagcacctgtcactcctgcgattaatgcctgtcttcccctcactggaattaagctccttgagcagagaggccttgtctgtaaggttcagagttgaatttccagtgcccacactggtacccagcagaggctggaagtttaaaaacgtattttctgaacaaatgaattaaaggggctcaatatacacagatttcctttcatttctcagttcctcccggtacgtggtgcatatagaccataaaccttctcttcccctactaactttcctaacactcacttctaggacgcctctactgtcacagcctacccgtctgcctgagatcctcccgttcgttggccgctctcccacgcctgagccccacgaccaccccctccttgtcgcacgtcgaaacccacctgtcgcccacacctcaccctatcctaaacgctagcggatcagcagcgccgctacttcagcgtccagtgggcgctgcagacatcgaacgcgcatgtacggaaatcggtcgcagtatctctgacaagtgaagagttgcctcggagtttcggtgccggtccgggtagcctcgggctgccaggaagtcgggggaaggtagccggaaggagaacccgagagcagggctttctgggacatgtagttggggcgctgcccaggccctactttgagagagcccttaagtcttcaggtttg

SEQ ID NO: 38770 - DNA, 1740 bp, Bovine  19866880807794
  misc_feature (1)..(1): n is a, c, g, or t
ncgatgactgatggaggcggaaatgaaaagccgataggtgaactgtcttgctcaagatcacacagcccgtaagggagggtttggagatttcaacccaggcccttgtggtcctaaagcccttacttttcagccacccagtcagaaaggccaaagcttggagccggtggcccatgaggtcaactcagcatgcagacatgttttgcttggacccaagtctgctttaaaaagtgggaaatttcacataaaagacgaggtttccggcttctggttagaaatcagatctggcaaccctaggcccacctttccatgggaccacaactggctgagctgaggagtggctgcccctcagtccaggcttgtggttgccacaccccgccccagcccacattcctcatagatgtcccctgcctggcccctgagagtacctgcctttgcatcctggcaggcctgcaggcaccctctcaggagagagacccagaccatagtgtgaaggttctgagccccttcctcagcatccatctctgtgtgttaagtgcatattctttaaagtcaggcctggggcccatgggatttctctttctgagcttcagttttctcatctttaaaacaaggatgttagtacttatctaggactatggagagaatgacttgcattttcaatccctgggtttgggccactcataactcctccttccccctttcgtggaacaggataagttcagggggtctagcaatcactcaggcccaggcaacacccatcagagtggaatgagaacaggccaggtttgtgggtgttccatgggctagatgaggcactgcctctaggctgtcacagaccttgggccctttcctaaaccaaattgagtggacccgctgattccttctgtgtctgttgccctctttagaatgcacactctgcaaggcctataaccacattttattcccatctgtatcctgcaagctcaccatgtactaataaaatctcttagtaatggaggccccaaggctcagtccttggtccttttctctcctctgtctcttctctttgctttgtgatctttccaatcttaaggctttaaacatcattcatacaccaatgactcccagatctatacctctacccagacctgctcctgacccagaggtgtacctaactgcctattcaacatcgaacacttagataactactgctcatctcagactcagcatgtccaggcatgaactcctgatctccccgcaagtgactccacctgtcacctctcaggtgatggcaactccatccttccagctgttcagccataaagccacaatgccatccatcctctcttgcctggattattacaatagcttcctagctcgtcatcaccctgcttggactcttacctttgccagggtattctgtacacaagagtcacagcagtccttttaaaactgaaattaactgtgtctctaccttggtcaaaaccctgcaatgatgccctcttccttgcagtagatgctagagttcttaacaatggcctacaaaaccttgcataacctggagccctctctgacctcacttactgctctcctctgcactcagagtttcagttacttgcacaaaatcaagttctagcagggcaaagaggactagaactcaagtctgctttgtcttcaaggttctcaagcttctgctgcaaagcacaagttcctggcaagtctcattgttttcccggactgcggtttcctcatctataaaat

SEQ ID NO: 38771 - DNA, 1333 bp, Bovine  19866880853315
  misc_feature (1)..(1): n is a, c, g, or t
nttggggtaggatctaagaaaaatccctcatgaattttagcatagttagagaaatgtgctggataggtgagcaaatcggattcctttgtctcattccatattagggaaaggaactcgcaacagtggtggggtgtatttactttgtgccagacactgtactgagcccatatatgcacatatatatatatatatatgcatatatatgtgtgtgtgtatatatatatatatatatatatatatatatatatatatatacacacgttagttcactcacttcttataacatacctgagaaataaatattatttgccctgttttatggagcagaaaactgtgattctgagacattaagtaatttaccccaaaccccacaggttgttaagtggtaaaatcaggactggaactgttctaagttgttttctgccccccttacaaatctcatggtcttgacttatctttgtataatacgttatgcatattaatcaatagcactgattgcatgattgaaaacagtgtaatcaaagatcagaattatgacaattaaaagaatgagtgtgaggaaatcacatcatacacattccttcattttttttttcaatttcctgctggatttttgacacttcggtctgtgtatgatctgggaaaagttgaaacaaggcgactaagtacactgcaaggtgagatgcttttcactgctacgctctcactacaggggtaaagaagcagcagcgactcgtcttcggtcctctagtagtggcacagtctaccaacatggttgctgtgtagttccaggcgagctaggcttggaaggacacagtgataagcaatgcagtttgtgtaccagttaatgcagtcagtgtttatagaaatgcttttaaattaaacagctaaccactaaaataccattttatcaaataatcaccataaataaaatgcatttgactctaagatgacatgtgctcttacaggatgtttcttctgcatgctaaggactattcagaaaattaaagaacacacattttttttgtggataaaaggcaaataaactttccccagcagtaatgtgagaaccatcactgacggtttgacatatcaatatttcaggaagaataaatgactttcatatctatgtttttttaaaatcatatacttactcatttttatattactagaatactttggaaagaatctgtactttatcacctgaaactgcttaaagtatttcaaaatattttaataaagctctttgaattatcaaataatgtaacttttaaacaaattttactattattataaatatttgctcttcatcccttgcccaaaggaaaactat

SEQ ID NO: 38772 - DNA, 1508 bp, Bovine  19866880888619
  misc_feature (1)..(1): n is a, c, g, or t
ntgaaaagaatgcagtacaaacaaacaaaatagttataccatcattaaaaagaaactctgacagtgcaggtgacagcacaggcaggataaatcaccataatgttccaaatgctgagctgtcagcatgctaatgctgtgatcagacaccctgggaatctcagcactacagttgtcagaaacaggtatcataaatcacctctctctactgtactgctcattatcacagctatggtatacatgcttttcagcatacttcggtataaatttgaaggcaacacttataggtctgcttactcttgcacacactgtagacaattcttgcctaataaatggatgctttattttgcaataattagagaatgtgagaacataacagacctctgtttttgattcataaaccatctgaatgaacagactgcaaaaccagcacattttcccaaggtgtacatgtacaatatatttaatagtagcaatgagctagataaattaacatcattccacttaaaggagtattgtttgaaagccattcctggatctaaaatacaaaagcatgagagacaaatcagaatcacttcaaatgcctagcgacattgaaggaagccatctacaaaatgcaaaggcaacatacagaatgggagaaaatatttccaaatcatatatctgatgaggggttaatatgcaatatacataaagaatttagacaaatcagtagaaaataaaatgaaaaatggcagaggatctaaatagacatttttcctatatgaagacataaaagtgctcaacaggtacaggaaaaggtactcaacatcactaatcaacaggcaagcgcaaactaaaactacactgaggtatcacttcatacttgttagaattactattatcaataagactagaaacaagcagccgtggtgaggatgcgggaaaaagctgcactgcggtgttcgttgtgcactatgtggaaacgtaaactggcgcagccagcgtggaaagcagtacagaggttcctcaaaaatcaggaacagcaccaccgcgtgacccagaaacccaggtatctctctgaaggaaaaaaactactatatatgttcactgtagcattattcacaatagctaagacatggaatggggaaggcaatggcaccccactccagtactcttgcctggaaaatcccatggatggaggagcctggtaggctgcagtccatggcgtcgctaagagtcagacatgactgagcgacttcacttttcactttcatgcactggagaaggaaatggcaacccactccagtgttcttgcctggagaatcccagggacgggggagcctggtgggctgccgtctatgcggtcacacagagtcggacactactgaagcgacttagcagcagtagcagcagcaagacatagaaacaagctaaatgttcatacacatgaatggataaagaaaatgtggtatatacacacagtgaaatattcagtcataaagagaatgaaattttgccatttgcagcaa

SEQ ID NO: 38773 - DNA, 889 bp, Bovine  19866880913193
  misc_feature (1)..(1): n is a, c, g, or t
nacaccgctggcctatgtagcagccattcccccaccacttcccttccgtcctagggatgtctctaacaacaaaagtttgaaatagcagatattttcttagattcccttgcatatatagttctcaccaatgaaatgtaagaagaagtctctaaggaacaccttgataataagaaacagatataggagaagaagccttgtgcttcctgctgtggatattaccccgtgaagatgtgaagctggagctgccacagccattttggaaccatgaagtcacaaagaccctgatgctaggaaagactgaaggcaaaggagaagggggaggcagggaatgaggtggttagatagcatcactgactcaatggacatgaatttgagcaaattcagggagacggtggaggacagaggagcctggtgtgctgcagtccatgggggtcacaactcagtgactgaacaacaacaaaagataaaaaccaacaggctaaagatggcagagctgaaggatagaaagatgctggcttcttgatgacaaagttgaactgtaaaccaagatcctgggatgttggtgcttgagctggagtagagctcccatctccagacttgctgctataccctgctgcctccacaaaccaaaactaatgttaactgagcatttactaagtaccagacattcttctgaagcacttcacatgtgttacatctaaatcttacagcaatcctatgagatagatcctaactaaccccattctccagaagaggaaattgaggcttagaggttttaagcatcttgcctaaaaccacacagccagtgtgtgactgagccaggatttaaactccagagctcaaacctgtaccactttgctttactgtctcaccctcctattccttctct

SEQ ID NO: 38774 - DNA, 1028 bp, Bovine  19866880918483
  misc_feature (1)..(1): n is a, c, g, or t
ntcaggattcaccgaatcctggtgtacaggaactacgggagatagtcttagaaagttagtctgaagccaaatggaaggaattctttttacagcagataacctgagccagattcatggtttctcagtttagactatgcacttgcacagagttctgtggttataaaggcctctgcttggttcagtgtgctgctgctgaagactttaaattcttaatcatttatgaacaagtgcacaccacattttcattttgtactgggcccagtggatgatgtatgcggtcttgcaataacatgaagaagttattaattctaagaattgttgaagttcacattatcaatagggtaaaataagtttggataaattcatgaattaatgtagaattcttaatgaggtctgtttttaagaagctgaagactatcttttgggttttctcaaacctttgaggatgatgtaataagggcagctaccaacagagggcctaacagaaaatgaaatttcctttctcattacgatctatctgaaactcagagacatgcatgcaactgctataaatctgagtaaacaatgaattacaatagaaatgttgatcaactacttttcaaaggaagaaaaacttgaaataatgattaaaaaccaaacagaattatgaatgaaatgtgacacttccctctctctcagcatttaaaaaagtaagtttctttgatggctctctatgacccttattctcactccagtttccccggcagcttccttgtcctaatcacttaaacaatcttacatcttccccaattagacagaaaccagaatttacgactggaaaacatatcaaagcaggaaaaggatacccaagtattaaaactaactgtgaagggctgccccaggacagagtcatttcaatcctgtgtctgttagaaaaagctatttagaatctggaattattgaaatttaaccttagaaaattaaaaagtacattaaaaagttactagatatgtttgctaaatttgccgtatatgccacatataatgaat

SEQ ID NO: 38775 - DNA, 1452 bp, Bovine  19866880963776
  misc_feature (1)..(1): n is a, c, g, or t
ntgaagacagagggcacaattcacctgccaaactgtgacctgtatcaggcggacccagcagggtggtaaggtgaagaggaatgggttttaaagactcctagagcaggcagttactagttgtatgaccttaggcaagttgttttacctctctgggcagcagcttactcatctgtatagtgaatacaatattacctaattaattcattcaatatatacttattgagcacttactatatgttagtaactgggaaaaaagtagtgatcaacacagtcaaggaggaagcttacaacaaataggaaataaggacaaacaatactattaacatctctgatctagttttagtatgcagagtgcttctaagaatgaaatgaatgaagaacacatatgaaaatacttatgactgcatcgtgtacagagtccacgtctatgctcagtacattcgtaagtggcagcgctggaacttaaattcaagttcagtattccctccattatgccactttgtcaagattcctttgagagacttgttaaaatgcagatttcaggctgaagatcacagtttgtgagtacaacatagccatctgcaagtaattcaaaaccttcaagtactgctatgagatgagataaaagaatgttaagacaaactgtaataaaaaaagacaagacttcagtttctgtccatgaaggattaactgctatgagaattttttccttctgccataaacaactagaaaacaggacaaaatatatgaaacaacatttttcaattactgcacaagaagcagtataggactattaaaccagagaggagggagacaaatgaggtaatacctacacaactgctcaagcctattgcccaaagcagcttccaggctgctggccaggaaaggggaacccaaacaaagccaagtggtctcagtgagttgaatctggggaggctgaggcagctggaacttctgcgactgagtatcagagagtgggaactatgtgagaagagagctctgaagatctgtagaggagttctctccagtctttgaacaatgtaacagagacacataacacgtgtaattggagttccagaaggagagacagagagagaggtagactgtaattatttgaatgcaaactgattacatcatttgatggtgtagattataaaccttagagtaccactaaaaattaagaagtatggctaataagctcataggggatatagaatggagtcataaaaaacatttaattaatccaaactaaaagaagggaggaaaaagagacaaagcaagaaaaaacaaatagcagtattgtagatttaaactcaaatatactgggtagttatattacatgttaatggctgaaacactttattaataggaggcagagatagtcagatttcgtataaaaatgtgacccaactatatgctatatgttaggcaaatatgtccatatcctaatcc

SEQ ID NO: 38776 - DNA, 773 bp, Bovine  19866881003555
  misc_feature (1)..(1): n is a, c, g, or t
ntgtgggctggggcggcctgaggggggcgcggcagggccgcctagccggggtgcgtggggcggatccgccgggaccgcttggtcaccgtggtgtacttgaagggcttctgcagttcggcctgtcccttggggtagcgtttcatgaagtgcacatcctgctggttctcgcgggtcttggggcccttccgcggccgccccttcttggtgaagcccacgtaccagccggagtacttggccgacatcagggctgtgtagttgttctccaggaccttctcaatgaacacacactctttgctggtgccatcaggctgcaggaagagagggaaggagcaggtgagagaggaagggcagatgcaaggggcagagctgtgttgagaaggcagggacgggggccaaggcttgagacggcaaagtagaaagggcctggccccaggcattggcctcagcagtttcactccccggatccctagagtggacttgacttggcggcccctgcatccttccctgctcaccaattaggtaccagcctcccattaccattcagggatccctttcttttccactcccacgatggagccaggggcttccacctcagctctactagaacaaaagattcagatctgaccaatcaaaatataatttcctgtgattggtgcagagcacagcacgtggcctgagtcatccaatcagcagccctcaagatcctgttataaataatccccccaaacataggccagtttaaacttgggaaaataggtaaggctgaagcaaag

SEQ ID NO: 38777 - DNA, 976 bp, Bovine  19866881012792
  misc_feature (1)..(1): n is a, c, g, or t
nattggccaatggagttgggttaattggcctgttgttttggcatcgggtacagacacagttacagtcaaatcatgggccaattcagtggggaaaacatctgtcaagcttgttgttcctctagctgatctggaagccccatggagacacaactgtagtgaagatcagacgagaaatgtacgcccaaggaatggtggttagatgcactgtttccctttttacacgctgtgtcgtgtttgtggcctgacacccactcttcctgcatgacgcctcagttttgctaatccattccggatgactaactggttggttacgtggttgataggagaggccttgctaagggttgggaagtgctctagaatcagagggatgttggcttgtaccttggctcctctgctcattacttgtgtgacctttgccagccgatttccctttctgagcctcagttgcctcatctgtaacatgggagcaatacctgccctggaggtcattgtcacgaggtgtgaggaccacctaaccctcctgggttgtccatgaatgaaggagttcctgagatgtagggcttttagtttttttattaaaaaatgttttttggctgtgctgggtcttcgttgcattgtgggggctttctctagttgctgtgagcaggggctacttgttgctgctgtgtgtgggcttcttactgcagggacgtctcttgttgcggagcttgggctctaggcacgcaggctttagtagttgcggctcctgggctctggcggatgggctcagtggctgtggcccatagccttagttgccctgtggcatgtgggatcttcctggatcaaacccgtgttccctgcactggcaggcaaatttttaactgctggatcactagggaactaccaggactttcagttttaaacctgggacattcttggcaaaaccatgagctggtcacctaaggtggtgaggactaaatgggacagggcctgcagg

SEQ ID NO: 38778 - DNA, 773 bp, Bovine  19866881035857
  misc_feature (1)..(1): n is a, c, g, or t
nttgaagattattgtattgttcagaagataattttattgtttactaggaaagcaaagctattaactttctctcttatttggttcaatataatgtgttaaaacttctggagcaaccaataagaaagttaaaaacaaatttctaaataactcattgatttaacaaccagtagtacattaaaacatttaaattgaacaatacagctaccactgagttttttcaggaaatatatagggtcaaatgtttacattttaaaaagaatagaagctcaacattagtaacataagtgttcaatgacacaatcccccacacacaaaataagagaagggatagtataataagtaaagaaattatttaaaaacagaagatcagcaaggtcaaaagttttctttttgaaaaaataacgatataggcaaatttctagttgcattagtcaataaaaaaagaaagaaaagaatggctgatattagtaagataagttgtgagaatctttgccaatatatctgaaaacctagattaaggggcaaattcctcagatacatgactcattaaaagtgactcaagaaaaaaatagaaaatttaagtaatctaatgaccatagcataaattaaatcagtagtttaaaatcttcctacaatgaaatcacaggaccaaaatcctttacatcttcataagtatgctatcatcagataattcaatcttaaacttttttcatagacttttttataagcctaaacttttcttgattagaaagtcaggaaatgatggcacaatg

SEQ ID NO: 38779 - DNA, 1000 bp, Bovine  19866881047931
  misc_feature (1)..(1): n is a, c, g, or t
naacagggatgcagaagcacatccttgagagccttgttgggagtagtaactgaagacatgagtaaagcctactcttgctggtcaatgccccatagatatgagctgtcatgggtgactgtggcttgcctggggctggcgtctaacaggttgctgctgctccccaagtgtcatttcacctgtccacgttcagatgcttgggtgggagcctctggggaatgctttttggaggtttgtggtggtgatggacatcggcctggtgcaagcgtgtgtgtgcatgagtgcatatgtgtgtgagagtgtacgtatttgcgtggagaggtatgtgcgtgtgtgctctgtgggctcaagtttgctctcttatgaaacatggatgctcataccacctggggctgcccttgacctgcctttgaccctggaacgacccagctcccctgaggtgttcagaaaccgtcacctgccccaggctgcctctgcagggggccggaaggagtgaagcacccccactcccttccgtccacaggcccctagcccgcagagatcctcagccgtgagggaggcacccaagactcctcccacccggcccctgagcgagtgccgaccgcgccctcaccgcttcctaccttcccgggcccgggttctggaaggtgtcccaggtcccagccacgggcccgggggctgtgggcggccgcgcctgccagcctgggctgttctgagacgaggctctgcctgcccgccggtccctgcccattgcagtcaagacaggacaacaagacaaataatttcttggatctctttatcttggacaccatttattctccctgtgccccggggcaggactgacctcatggtgggcccgagtctggcagctgcgctgtcactgggggctgggctggccggccgggctgggccgtgctgggctccggctcctccaggccagctgcctcctccctctcctgccccatcgctcgttactgcctcgtctccctcctctctcttcccc

SEQ ID NO: 38780 - DNA, 1518 bp, Bovine  19866881166023
  misc_feature (1)..(1): n is a, c, g, or t
natatgtgaaaacttaagattatttgaagagtagcctgtaacctgtaataaaaatagaacccaaaaaggccactttgataggaagactgcaaagagaattagaatagagttgctcaaagaagacttcttagaagacatattttgttctggaagctgcaagaaacatggaaagctgagaaagagaagaaaggttccaggtgatgaaaatgggttccataagaggcaaagtatgttttgttttgtttttaaagtagcaatcatatgagacagctacagagagactagccgattatagaaaaataagtactggtaagcttatgaaaggaaaaggaataagttatttaaagaagcagaaacaaacattcagggtttacagattcagaaattcagattaccatcattctataaactgttacgcagtatagaaactgaatattcctattaaaaaaacttccaagttatattgagtcaccttttaggtatggggcatgggagggcagggaatcaaaaattacagatctttgtgacagataaactatttctgattttgaaattttttagccattaaatgatggtcaggatttaatggcttccagatccttaatgctaatttaaatgccctcctgtagagattttcatttattaccaaagtatgagggaaaagaaaatctgactaaaaaaaagttcagagaccattttctagcagagtatttccactgaaaacagtatcttcagaagtcacagttacatatctcagttatcacacccccttgttttgcagttatgtttatttgtactctttgttctgacattctagcatctgttcatgggttttctttctctctgcccaaccatcatcctaatgacagcttaattaagagtccagagtaaaatcaaatctcttttgtttaagagtcaaatttttgttttgttttctctaaagctaaatatttatggaacacttatgtatgtatcagtctcttgttaggcatttttatataaatttattcctgactctacttctgtaagaaagacattattagccccttttaaagatgagaaaactgagactgataaattgccttgctttaaagtcttacagttaagaagtaaagctgggtttaaatgcaagtcttctgatattgaagaactcttttccttgcttggggaatgtgagttccattctgggtatgtcacagtaccagtaggtcatctggccagttttatgttgtccgaagttactgagagtattccttagggatctttaaatgccagtgtgctttcaggttagactccatactgcatagtgggacggatttcttacaagccactgtggttaagaattgtttttataatgtctggatcctttacatttctgttttgtggaattatcagtcctctttttttttctaatttggcattattcaggaaaaaatatgttaatctaaatgtttctatgccactggaattatgacttagctcaatttataagaagcagagttggtcagcagatctgat

SEQ ID NO: 38781 - DNA, 1803 bp, Bovine  19866881199599
  misc_feature (1)..(1): n is a, c, g, or t
natgcttctagaggagaaccaggaaagggtcttggcaagaccagttgctctaaggtattcagagactaaactggcttcgggaaaactcttatctcttaagctcggtgaacaaccaccatttacctgctgcaggacctctggattttgctgcataaaatgtaatagtctctgaccagcctgggtagcctctcggcatcgaagtgatttcttgccctcttttgctatgtgcttgaagaggtaggtgacgatgtagtctaaactggtacagcagctggaggagacgactgtatctgtgtgaacaaccaatgagaattcacttggtgactaacgtgtttgtttcatctcactctaatgcctaaattaaaaaaaaaaaaaaacaatttctggtttcaaagcacttttatcaaactataaattctttgaggatttttgctttgcttatctctttaaaccaaatatcaactacaggacttcacagagagacacattagtaagtaaatgattcctggattgcattggacagaattttccatatgtgaccttaatgaccttctgttcaatttaagtgtctttattaaatatctacatggcgcaaagtgctctgcttcaggggaaactgtaaacttggcacaaagtactttgcttcagggaaaccctcgcccttgtgtcaaagagaccatgattagacataagcactggagcacagtgctgtgtagaaatgaggagcacactgctgtgaatattttgagagagatattgcgtttggatgaggatcaaggagggtttggtggaggcagcacctgagatggactggggaaagttatttcagttaaacataaggaaggacatttttcagatggagagattagcacagtatacataatatggtgagaaggtatggattttcaagacagaatttcaacctagtttcaaattccatcttttccagctacttgctgtgtgttattgtgaaggagccaattaagctttctcatcatttgtaaaatatgttgcagagctgaatgaggagaaaaataactagaaattctcacagtaaaaataactgatatttattgagagcttactatgtttaattaacaacatgagtacctagagggtattatgctaagtgaaataagtcagacagagaaagctaaataccatgagttcacttatatgtgaaacctaaagggaaagaaaccaaatgaacaaacatgacgaaagagatacagagagccagcaggcggctgccagaggagagggcgcgggaggaacgagagaaacaggcgagggagagtaaggggcacaaactttgagtaaaaaaatgaggctcgggtacaaactgtacagtgtggggaacacagccaataatatctgggtagactgacagatggtaactagactcctcagcattttaccaccatgtaatgtttagaaatattgaatgactatgttgggcaccagacactctttacaaacaaaaacaaactcacagaagaagaaatcagatctgtggttctcagaggtggctgggcagcaggagggggaactggatgaaggtggtcaagcggtataaatgacactgctgtgtattatatataaaagttagagtatatcctatgaatacccatcacaaggatgagcattcttatatttttaactatatgtgatgataaatgtgataaatgatagatgataaatatcaaacttattcgtggtaatcattttgggatgtatataagtcaaatcattatgttatacaccttaaatgtgtacagtgtcaactatatctcaaaaaaactg

SEQ ID NO: 38782 - DNA, 924 bp, Bovine  19866881224768
  misc_feature (1)..(1): n is a, c, g, or t
natgctgttcggaataacaaatggatgcttgtctgattctgaaagccttttctaagtgtgctcccgtgctgtattattgagctgatggagactgcttttgtcatctggagtaagtcgtcttggcagtctgaccgttagtttacctgtcttttgaatgagcgtaagaattatttcttggtgggaaactgatgctgagcagatgtttacaaagccccttaggatcgcgggatagggccctcagtagaattgaggttgctgttatgtaataatttttccttctagttttgattaaaaaatgatacatgtgtatcatgtacacaagtgtgtcaggtgctaatgggacacgcaaacccaggttcccttcacactgatcagaatgcagggggctgtcccccagccaggctccctcatagcaccaggtttcacagaaaaaatgggaacaaaaatctcttaaaaaataaaaaaaaattttttttttcttaactagatttctcaccttcaggatggtgagacaggctgacttggccttgtggtagactctggtgccctctgctgtcgttcgggaaacgaaggtttcttcagggagccatctgtgcctaccacaaggaaggaagaccagctgctcttgcctggtcaaaagtttcctcctgaatttgactctaagagttgtttgcgttggaggcgaggccccccatggagcccggggtgtcttattccgtcagcctcgggtgttcactccaaagctggaactcggaaagcaaaattggacctgaaaagcaaactgaccaaacacaaggattcccagggagtaaaacagagagctaaagagttttggagggatcagtaaggggccaatatgcaccggatgacgcggccccaggctggtgtgttctgaggggttgtttattcatttaaaagttccct

SEQ ID NO: 38783 - DNA, 978 bp, Bovine  19866881390709
  misc_feature (1)..(1): n is a, c, g, or t
nggaaaaatagtgttttgtgcattcccaatcttgttcggaagacattgtggtttaagtataatgcttctgatatatagtatttaagtattagtctgactacatattaattatgtgtgtttttgatgtgagctgttttaatgtatgatgaaaattaaatatcatgctgtttgggcctggaaggataaacacatgactagcaaaatgtcgtctttgtgctgaaattaggctgtttccgatgattaggggctgctgttagtgtgagagcgtgtgtgtaaaagcccacagtcgtcagcggagagaaaagggctgtgcggttctttgtggccaggcgtgacgggtttttcttggtggcagacagctctcccagaactaagtgagcgcctgaggtgcccttcctcagccgaacagacccgccctgacccaggagtacagaagcttgggtgcacagagcctgaggcggtttgagaggcagctcactgaagccttggggggcggagaagcaggagacaggacgcggggcctggcctcagctacccaggtgctccctggctaagttctttcctcaccctaagaggccgttcctctttcagcctttctgagtgttgagaagaggaaggcctttatgtgcttgatcccccacccaggaggcgaggactccatcagcctaaattgttctgtaacaataaaacaattatagcaagagattttatgagaggggataatacagtttatagtcaggagcatctctattgctctggttttctctcgaggcttaatgttcacagtggacccagaccaaagcccgtttgagagttaggagccctgagcccttcagagctggtctggcccctcccccacagctttcttcaggcccagtttggagccagacctctgacacttgttctgtctcccaacagtatttcggtgaactgagggcaggtctgataaacagccagcctctccccaagcaggaggtc

SEQ ID NO: 38784 - DNA, 1630 bp, Bovine  19866881472071
  misc_feature (1)..(1): n is a, c, g, or t
nattcttgccggaaaaatcccatggacagaggagcctggtgggctgcagtccatggggtttcaaaagagactgacatgacttggtgaaaaaaagaaaaaacagagagagaatgagggcaaagggcttaattcgacaactgatggtaaagttgcaacaaaagggagcaattaccataatcgccaaggattgagagtttcagggactcccctggtggtccagagaatcagagttcaccttccagggcagggggcgagcgttcagggatacctggtctgggagctaagatcccacatgcctcagggcccaaaagccaaaacaaaacagaagcaatactgtaacaaattcagtaaaggctttaaaaatggtccacatcagaaaatctttttgaaagaagagttttacagggattatcttatgttcctttcaagaaacctgtgaggcagttatttttgtccccacttgacagatgaggacactgaggtagcgtgtacagcccaaggtctcccagtgcatgaatgacgaaggtaagatctattctcagggccccttggctctacagcctgggaccccaaccacttccccatcacagtttctttaagggaagcccaaggtaagcgtagatcccccttcacaatcacatgtggtcatcatcttatgcaattttttttggccagagcagagctaaacccatcctcctctttccggtatcttcagaagcccctctgtctgccaaaaaccccagttcaaccaggacttccaggaagagcgaagtcacagattttacactgacacccaccagcatcgctggtggcaaaggagatgctcacccttccggccctagaaagaccacttacagggttcggggatgcctctagatcatctctacacctgtccccagggcccttctcatatccagcatcctactgcttctgaaacaaatggcttagctgtcacatcccagaattctatctctcggtccatttttgtggactcaggagcatgcagtctcaggaattcaacacccccaccccagaatttctccctcatcctccaaaccaagtcccaatttaacacacaactaatggaggtgtgccctccacactggggatctgtcccagctctgttccctgcaggtggcagctgaagtcatgtgcagaaggacccaggtgtctgagcagttttcagagcccagtcgttaattcatttgtctgcagacattatctagactccacgtctcccagacaggccacgacagagtgcattacgaggtgagcctgccttagttttccctccagcttcccctccacctttttttttttttcttcttggactcagggcccaacgtcttctggacatatttttcatttttccaaatatcaattgctcttttattccctcttcgaagcagtgagtaataagagttgtgtctggtcctgaaattccgactgaaataaattagcccaatgaccaacaggaggtgcctagaacaataactgcggaatatttggcatattacaaaagagcccctggatgttgaagtacagtaagtctagaagcacattacagagcgaagttgccaaaacgggtatgcaatgagccatccaggcagcagaacgcctcataaattaa

SEQ ID NO: 38785 - DNA, 1985 bp, Bovine  19866881533502
  misc_feature (1)..(1): n is a, c, g, or t
nagagatttaaaaaaaaaacgtctgataacgacacagctcagtggaggagcctggaaatttgaattccagcaagcaccccaggtgattctgatgggcttcaaagtttgaaaactactgacataaatcactaaaactagacagtagggtagaaaagggacctagagatcactttgtttaatttactcgttttagaggtgaggaaattgaagcctggagaaatagagaaggtgatttattcgaggtaaatggccagtgagtggcagagttgagactatataccaggttgctcaacttctagttcagcactctgtccaccatatcagagtgttaagggaaaggaaagccaaacagcatgggaagcagacagagcagaaatgcaggaaggagaagatcctgaagtcatcctgcatttctgccccaggaaacagaccttttctgaattgtgagcacagttgtaagcagttagttgaaattgctaattacactttctgtagacacagaactcggaacactctggatgaccaatttgttagaagatgcagttttcaaagctacacatttaattatataaagacagccactaaagttgttctaattctgtaagctaaattaaatgctgtcctaaaacataaaatgatctagtgctgttctaacttctcgggcttcactgtaacaattctaagcctgtggtggtgtgacttcacatttcatacaaagactcccatgatataggattgcttacgagcaagtcactgtgggacaccgacagcagcattttgacaaaggcttggagtacattgtcaaagtggttgtccccatacaacttgaagacgccaaagctgacataatttccacacaaggcagatttgagagctgaatagcagatggagatgcccttgagtttcattggataaatctgatcttttgagaggctcccaagggacaggatctgagtccctgtttcagggtaaaagcagaatgagaaagtggcataagcagatgtaattcaaagcagttacgaggcacatgatcgacattttcactttattgctattgttcattttcccctactgttgttccaagagtcacaccatcatataatgaaaaatataaatacacaaggcagtttatatgggaagtacaaatggcccagtgaaaatcaatcaaaggtactggagaagtttggtatttttgtctggatggtgattacacgaatatatatgtagatacatgaaaactcattgagttgtactaaagattagtttatatactttaatatttgcattatctcttcttcaataagaagtgaaaaaaagtaggaataaataaccaactaagtcaagaaaagataacttagatacataagttactctaaattgtggggtgaattttcgcattttcacctttttcacatgaacttgatactgagctactttactttttggaggatcacaggtttggtacatgaagtaaatgaaataagacacacaagttcttggcatagtacacaataaatgttacttcccttttctccttagatcctttttcagaagacctaaagaggtggtcatttaaaaactgtacttaaattctatgtttgaccatcaaaaacaaagtaatgtttatataatcaccttacagtttttttctagttagcatttacaaccacaatttctctttctgaaatgtgtgctagtaaggcatattactagacaatatccaagaatgctttgtaaaaaattataaagtcatatatgtttcttagctctgctttttcctgttcaagtaagtaacacttctaaaattgaaactaaattcaatttacaaaatttagaggcatactgttgtggttctgtactgtgtctattgggctaaataagaattaagtttcccagaactcatttccctgtacagttgtggcctagaattgagcaaaagagaaatctatatgagattggaagggaaagtgaggtagcagctagga

SEQ ID NO: 38786 - DNA, 1020 bp, Bovine  19866881657836
  misc_feature (1)..(1): n is a, c, g, or t
nacagggctggtgggttagccctttccccacatggaaggggagaggggcaccctgccagccttcctgcagcccaggagtgtcacctgctctgaggcaaggaggtggatttttaaaatttcctgtggttggcaccgccagggtccagcaagctctgggtagcatgtcagggccacagcattgcctcttccctgccctggagactgtgagggcacagtggggccccagaaggaggtgggaggggacagggaggagactttctgccctcagctggccctgatcagagatgttcttggtgtgggaaagcagggtgcaggcacgtcaggctgacacctgactgggagctacggactcgttatgtgaaggacggtttctcacagcacctaggctgtacctcacaggcagcctgagattaggaattctcagatgaagggagtgaggctcaggggcatgaagtaacctgccctcggttgcatggtaggagagtgaggcagagtgggattcacctctagcttggccactctaggacccaggcttatgaaacagcactttagaggctccgagtctgccaggttcagagagtcgctctgccttgtctttgctgtgtgctcttgggcaagttacttaaccttaacctctctgggtctcagcttttgcgtggataaaatgggaaggaaacaaccagtaaaacagttcctcctccctaaggatgtggagcagggggtagtgcagagcccagggctctgaaatcttacctgcatttcacaactttgctctggaggactccctccaccaccctgtgagtggcgtaagctccacttgcccacgtcactctagctcctggtgactggggagaaggaaggggttgattgttttctttctgagggcaggagttgtgtgatggacatctgtgtgctccctatcttgtgctgggttgcacttgcccctcactcacaggaacccgtggccaagcacttagaggagggtaatgccacgggccctgccagtgaggctgaggagag

SEQ ID NO: 38787 - DNA, 874 bp, Bovine  19866881876708
  misc_feature (1)..(1): n is a, c, g, or t
nattaccattatctgattccagaatatgttcatcaccctagaaagaaaccctgtacctgtaaaatagcatcccctcattatccctggctcctgggagccactcatctactgtctatctctatggatttgcctattctagacatttaatatgagtggagtcatatatgtggcctttgtatctggcttctttcatgtaccgtgatgtttttgaggctcatctatgtttagcatatatagcactttagtcctttttttggctaatattccactgtgcggatataccacattttgtttatccatttatcagttgataagcagtaaggttgtttccaccttttggctattttgataatgctgctctgaacattcatatgttaagttttggtagggacatatgctttcagttctctagggcatatgcctaggaataaaattgctgggtcatataacaactctgtttttaactttttcagtacttaccaaactgttttccacagtcactaaatcatattatatttgcttcaccattttacattcccaccaatctagattttaaattatacaaaataataaatgaaatatcctataaataaaatatctaagagccaacatactaaaatagttactatttgtattttaatgtgacttcgccaaaggaaaaaaaattgaaattcaaaaatgagtaactttccgttgaatcaggtcgttggaaatccagtagagggaatttagctttgggtatctccctaaaacctgaagaatattgtttttatctatgcatgactgagaacttagagtgttatgttaatatttacttttcctgatgccaggaaaatagtagcctataaattgacacttcaacctctcacagtat

SEQ ID NO: 38788 - DNA, 2502 bp, Bovine  19866880152634
  misc_feature (1)..(1): n is a, c, g, or t
ntcacagtaattcaagtctatgccccaaccagtaacgctgaagaagctgaagttgaacggttctatgaagacctacaagaccttttagaactaacaccccaaaaagatgtccttttcattataggggactggaatgcaaaagtagaagtcaagaaacacctggagtaacaggcaaatttggccttggaatatggaatgaagcaggacaaagactgatagagttttgccaagaaaatgcactggtcataacaaacaccctcttccaacaacacaagagaagactctatacatggacatcgccagatggtcaataccgaaatcagattgattatattctttgcaaccaaagatggggaagctctatacagtcagcaaaaacaagaccaggagctgactgtggctcagaccatgaactccttattgccaaattcagacttaaattgaagaaagtagggaaaaccactagaccattcaggtatgacctaaatcaaatcccttatgattatacagaggaagtgaggaagcattaaagcctcgaggcagacctgtgcctgataagaaactgagaattagctaggaggctgcctggttagaggaaggtacaagaaagatggtaggaaatgtggtcagagctggggtggggagggactgcagttttttgtttcatttgtaacaaatgagaagccatttgagctctgagtagaagagtgatgtgagtcaaccttttagcagggtccctatggctgtttaatgggttgaggaagtcaagagaacagagactgctgtaattaatccaacatagtaagagatgatggtggcttggatgacctggtaagcaccattaagggtagaatgtgtggttcctgaatgaatgaataattgtcccctggattttaagagcccaagcccaaatcagacaagtgtgcacgtaattctacaacttctttgacttaaatgcgccttgggtcaatctcactgaaaaactgacaacaatctctaaggtctatttccccgagtttacatttcaagtgcctatttatggatacgtgaactgaaaatctaagtatcttgctactatggagatgcagtattttaaaaccaacgtcagaaacttccaggatgtatttggcccctaagtttaacacccacaattgaagaaccgttctggaaatctgtgacaaccgcctcaaggagggtgagaacccacagatattgtggtttaaaaaaaagagaacttgaaagttctatttctgaggcatttactatggtttcagtttatctatcaagactacagaccctattcttgaattgtgaagggaggaatttactcacaaattaatcagatagctggagcaataataaaatagccagcatttactgagcatgtcctttgtgccaggtgatgtcctaagccctttcacgtgtactaacttatttcttatcaaaaaccttaatgtttggtgctgtaagtaaacacccattttacagataaggaaacagattataaaccagatgtatttttctaaagtaagtttgatataacgttcattaatataagccattaaaaaaaagaaaacatgtaggaaattttacatgtcaaaactaattccctgacgtatcaagagaaaaggtaactttgtgataaagatgaaaaagaacatttggccccaagacccagattcttaatcactggatttctttcagtatggtgggtacactgttctcaaagtggttctgtcacttgcattagagtatcacacccaaccattccctaggaacatgtatttcaacaagctcttcaggaggttaaaaatcactggcatagtataaaaacaatgaatctggaggaaaaaaaccatggcaccaagtcaaggttttaatatcctaagcagccctgagctaatcactttaaaagctttagatttctcatttgtcacatgaagagtctggactagatagtgctatgaaactctctagatccacaacagttaaactgtgaataaagaagaggtgtgaacattaagtttattattagctgaattagatacaaaaccctgaaattcctacttaccctgtgcaccgtggatgcaagtgcttgaagaacagccactttatccctaagaatgagaatcacaagttaaccctcatcagggcttctcatacttacaacgttaacaagtgactctactctcagaatggactggccattaacaaagatcacgtcttaagtaaagccagttctgatctctagaataatatcactagaatagtaagttagaaaatgagaaaactgttcagttatttttaccaaaggtgcttagtacatgttcctactatgctttgctaccctccctggcctggtctctataaccatcaccccaggctagcaatttccatcctcagcctcataaaactttcttaaccctgaatctttcatcctatccattttcctctgcattcttactgcagctttctgtaatattcctgccttattatctaaat

SEQ ID NO: 38789 - DNA, 1573 bp, Bovine  19866880511254
  misc_feature (1)..(1): n is a, c, g, or t
nccagccttggacctccctgtctggtccccaaggggcccccaggggacttgctcacccgattcctctcggactcgccagcattgtctagatcccgctgggtggctttccgcgtgttcacatttctgaaagctgatgctttgctgttcttcttcctgatggcttccatcagaattttaaagaatctaaaattagaagaaagccccgcagccccgttcagtaccagcatctccactcttccttcactgcggggataaggtgctctaaggacttcgcccacttgaggtgatgctggggactgattcaggagacagagaccttgcctctccagtcggctcacttttttcccctcttgctacttttgggctgagggggcacatacggtgcatcagaaaggcagggctgaaagtgtgctccaccattcgcagggggcacagcctggatcaccaccaatggtctcctgggccattcccagggggcatggcctcaatcaccaccgatgatctcctgaactttacttctcttgtctggaaagtgtgggtgtcatgcaatcttgctttagggatcagaaacacccccacgtccaccaaaacctgtcatggggcctggcaggctggctgctcaataagtgacagttgttggtgccgtgcggggccagctaaccagtacagcagggccttcagtaggaggggcacccaggctggggccagggctgcccccagcccacctaccgcatctccaggaagtgcttggggctgacaacttctgtctccttggtgtgggagccctggcaatttgatgagagagctaagatgtggaagagcttatcagagtctccaaggcagtgataacgtactttgtgggagtaaagcacgtcgacagactgtggtggtggttgtttagttgctcagtcctgcccaactcgtttgagaccccatggactgtagtgcaccaggctcctctgtcgatagccaggcaagaatactggagtgggttgccatttccttcaccagaggatcttcccgacccatgggttcgattggcagctaaagtctttaccattgagccagcagggaagcccattgacaggttagaaccaaaggaagttaaaaggactaacgcgaggcagaaagagcccagcaggccttccccggcccctcctcctgggttatctattcgtcgcccaccttgtctcctgtcccctgctcctgtcttcatatatcctcttgctggtcttctgagtcaggctataacagcacaccaaatggactgcttttaattatacaaactatcagttcctcatctgcccagccagccagcctgtgttctctgagcatctgtgaggtgccggccacgtgccagcccagggggcaaagccaggatgaaacgacaggcactcagcaccttaactggcggagtgagacggtcacgtgtttactattttgttcagtaaaagcaacagactgctacttctccctcccaatttccaactccccccccaccgcctcaagtttttaaagctgtacatggttttggctgaggtttctgcctttggaaggctccttacccactgat

SEQ ID NO: 38790 - DNA, 2062 bp, Bovine  19866880522033
  misc_feature (1)..(1): n is a, c, g, or t
nccacctagctctgattttggctcttgaagatctctagcatcagggtcaggaaggcagtgttggcatttggaagagttccccgcaataggagtgtcagatttggggcttaattttctccccaataaatggtggagctgaattccattttcctgttacagcaaacgtttcctgaatcccttttagtgtgctaggtctgcggtgggtataaggatgagtcaggcactcaggaagtttgttgagattgctgacatctttctcagctttaagattctttctagatgcaaataggaaggactgtctcagccttgagtagaccagacaggctcccaggctcccttccctgggtgggaccggcctgtcaccaggtggcgccacagtctgtcagggacacccgtgcttggttactcagcctttttgcttgggtttctttggttttgcttaagttttctgatctgcctgtgtaaatgtgctttaaaaaaaaatgctcaatatattagagatatctgccatctgcaggtcctggtctactttcaaagagatggccataggattgccacctccagtgaccaaagctaaagatttcatgttgatgtctcttgaaagtagggtagcctttgtccaagaaaaaagctaaatcttggcagaaatgagcagcatcctctcagattcctgaggtcattgctgcctgaagtcacagtgccctcttttccatctgatcaatagcaagagttctttcttcccatacttgctccacggcggccctctcatgaatcatgaatgcctgggtgtgaataggcatgcgccattccaggcactgaggatgtgccagtgagactggtctcacccatttcacaagtaggcgtgtggccctacttgtcagctgatgccttcacaagtgagttagtctgacaggggtgctgtcatcacacaggggaccctgggaggctccttcagccagaatagaaaccacacctgtcttctctataactgagaagtcttctgttcctcaggattgaggacaggcccactttatcaccagtgctttccatgacattctcacttactggatcccccttccatcagcgctgaccggtttcttctctcttctaacccactgggtcgagggaccatttgtctctctcctgtgtcatacgtacccagcccaagggggccagtccaggtgaccagacagtcggtcaataggtgatgctctagggcagcttaccgcctcatatgttgtcgatgcacacggacaacatcgatttatgagcacttgggccacaaatctgtcaagttcaaaagacataaaggccaacttcagagttcgtcatttgtcagagctcaagtgaaaaagaaaagtggaaccaggcctgaccttcttgagggctttccatcacgcccgtttttcttggttgtgtcttggcaggaaaaagactcctggatggctatggaccgatcttttttgagtcagcttccaggccagtccctcacagacagactttacaacatttggattcgccttcagagccacgttaatattgtgtttgatagcgagatggacaaattaatgatggaaaagtaccccggcattagacaggtgagcagttggatccctattgctagccgaaggggtgtttgtcttaaggaagaaaatagtaaccatacttgtttttttcccttgacaatgactttttattttaaccaattggcactactgtagttttggtttactttttattttattattttttagtgtaaaatatgaaagatttatttcaactgtataaaatgaaagaggagtaaaagaagatattaataaaagatggtcctcactgaagaagtgattgaaactaaaattgcagaccaaaaaacccaaacgtaataaagatgtgcatagtattgggttggccaaaaagtttgggtttatccatcctttttcgccaacccgttaccattatacaggcttgtgaataatagaagtgtcatctttcatgctcatgctcagtcgctaagttgtgctcacaattaaataaggcatatatatgttctagagcttccctg

SEQ ID NO: 38791 - DNA, 982 bp, Bovine  19866880642749
  misc_feature (1)..(1): n is a, c, g, or t
ncgcctggacagcctgcgcaaggacaaggagcagcagaaagactcgcctgtgttctgccgcttctttcacttcaggaggtgaggcctgtgggggaaacctgaggtactctgagccctttaatgtgcttttctccttcctcttctatcaacagtaagtctaaaactgggaaaagctagagatgatacttccgatctgtagatttaggagtctcgatcttattacatggtatttcctactcatactccttttcagttttttttttaaagcaagaagcttgaaaatacaaacttctgattttagaaataacaaatacagaaaaattctgaaggttctaaaaaaccaccacacaaatgactactgttaacttttcagccatcttagtgtttatgtggttatagaatatattcaagcatacctacttgttgtgtaaatactttgaatcttactttccccaatatgtactttcccagtacgtaataggaaccacttgatcgtgttgacttgttaaaaaaattatttatttttatttttggttctactaggtcttcattgctgcatgcgggctttctctagtcacagcgagcaggagctactctttgttgtggtgcacgggcttctccttgcgctggcctcttgttgcagagcacaggctctaaggcttaagactcagtagttgcagcaagtgggctcagcagttgtgactcatggactttagttgttccgaggcacctggaatcttcccagatgagagatcacacctgcatcccttgcattggcaggcaggttcctatctgctgtgccactagggaaatccggtcatacttttttcagcaaatacttttgaataactatgaaagaacccagaataatgatgtttgaaaatggacttaacctattcccttgttggtattcagattattgggtattttttgccactaaatacagagatgatcatctgttgtccatctctctgattattta

SEQ ID NO: 38792 - DNA, 1094 bp, Bovine  19866880707006
  misc_feature (1)..(1): n is a, c, g, or t
naaatgacagctgtgggtgggcacttgcttagtacagtttgacatgtgtcttgaaggcgcagtgtaactcaccttatttttttaatgtattttatttgcttatttattttcattattgttttttaatattgcatttttatttgtttatttttttcactgcaccatgtggcatgtgggattttggttccctgaccagggatggaacctgcaccccttgcagtgaaagtgcagagtcttaaccactggatcaccaggcaatttccttcattagtttttatgaagacacatgtgatcttactctccctattgtcctatattctgggttttttgtaaaaatttttgtggtcacccttccatgctcttaatgtataggtttaaatgatcttttgatttatttcaaacacagggttctttctgaattacctttttttgggactggaagatgttggcatggagtccaggttcaaccccagtatgttctttctggatttcttggtggtaccaccctcaaggtaataccctttcattggctttatttcacctgaaaaaggtttatggaataattgaataatgacctctgggagagaaaggaagggtcaaaggttctgaaaaatagagcagcagttccactcccaggtggcaggtggtgggactattttcctcttcatttttcctgagtgcaggaggaatgtgggtttcttttggagcttggggcgtgtgaatagggatgggtaagcggctgagggaaatgtgcactgattccacatgtcctcctgcaggtatcgccctgtcaaccgccttggggaccagatgttcaccaacgggcagacggtgaacttgcaggctgtcatgaaggacgtggttctgatccgaaagcttctggcactgatggcccaagaacaggagctgccaagtgaggtggcagcacccactacagaagaggtcaggatctgatgccttagttctagcttcctatgctgtgggtgcagaatgctatgggaatgctatgggtcctgggagatactggttggcaattctgcatggttgtgtgtgagccatgggtttgggaggaccgggcaatgtctgggggaaag

SEQ ID NO: 38793 - DNA, 1217 bp, Bovine  19866880758440
  misc_feature (1)..(1): n is a, c, g, or t
nttctatacatcagtgtctcttttgctgtctcgtatacagggttattgttaccatctttctaaattccatatatatgcgttagtatactatattggtgtttttctttctggctcacttcactctgtataataggctccagtttcatccacctcattagaactgactcaaatgcattctttttaatggctgagtaatactccattgtgtatatgtaccacagctttcatatccattcatctgatgatggacatctaggttgcttccatgtcctggctattataaacagtgctgtgatgaacattggggtacctgtgtctctttcaattctggtttccttggtgtgtatgcccagcagtgggattactgaatcataaggcagttctattcccagttttttaaggaatctccatataatggtttttaaaagttgaatttgttgctaatgttttagtcaggctatttcacatgaaaatgaggacttctggcctatcttgggtaaccaaaagactgggcgatctcagggtcatgttcctggctgattaacaagaagctgcaggccagtggcaacacccgcctcggacagggcattctcgctgcctttgtctctcctgcacgtccctggccctgagccatggcgttgctgttctgtgagtcgtgggatctgagtcagaaggtatgatccttccttttcaaagcttgctagttaatttgagagcaaggggtgtgtgtagcaggtaagcaaagacacgaaatgctgtatgaacacagaggactatgatgtcattttgggagctgaacctaaggaccagcctcagagaaaaaaatcagcagctgtttgaggaggggcggccttgggagaggggacagggctgggggagttcaaaccgaagtcttcattctcctctcctagccagtgatggtgtcaggggtgcaccacaagctgaacactgaactctggaaacccgagtccttcaggagggagtttggaaaccaggaagttgacctcgttaactgcagaaccaatgaaatcatcacaggagcaacagtaggagacttctgggatggctttgaagatgttccgagtacgtattacagaccctttaaggggctgagggtgtgaagtggggttgggggtgcacacatgagcagcaggagccgactgtccttcagtgggagcagcagtattttctgtgagtctggagtttaaaattcctat

SEQ ID NO: 38794 - DNA, 1553 bp, Bovine  19866880809833
  misc_feature (1)..(1): n is a, c, g, or t
naataggaacacacacacacacttgactcatactgtttgcaatagttaggtcaccacacacactgaatttgttaatactgaaccattcttaggggaaagatggggttaggtttcttgaagcctctggtcacaagagacatcaaccaatcacaatacataaccttgtttttatgtgtttctgttggaaaaaaccccacttcacagtttttaatatatataactgcatttatttgcatgcaaagtcgctttagtcatgtccaactttgtgcaaccctatagactgcagcccatcaggctcctctgcctcccattctccaggcaagaatactggagtgagttgccatgccctcctccaggggatcttcctgacccagggatcgaacccaagactcctgaggctcttgcactgcagatggaatctttacccctgagccagcggggaaactgtattactgcattactaactttgaactcacagctaccatacctcatagctgaatgaagcttacataacacatgttctaagactcacgtagaaacagaacagaccacttcagcactaccccagggggccattttaaacattgaattaaccaacaacgtagtactaaacagactttgaaaaggacacttgtttacagtagaagagatgaaacaagaaggcagaatggcaccttaatcaaacctcagctgggaacaggtgtcagacaactcaaaattttcaccactctgcacatgtctgtgaatgaccataaaagcaccaaaatactaattggggggttacaaatatatttcagcaagtaagcaagtccccaaacatagaatccttaaataatgaggactgatatatatgcatacagatacatgtatatatgagtaacagttaatcttttaaaaaccattttcgtatcacctattttaaaaattatttcgtattacacacaaaagccgtcaacagtagtacctttgtccttccaaccccaataaacagtaccgacccaatggctaacattgagcattaatgtctactatctgctcataagatgggtccttttttctgctagatatctgatctggaacaatcaacgtcaatatgttagttctcacattaaaggagtttatacttctatttttagggcttaatattggttctaaagttttacctgtataggctttaaaaggtctttagaaagaaatactctttgttgatctcctaaaaagcgaacagatgttatggaccccaaaccagctttgtccagtagagatttgtacatctgaaacaaaagaaaatgttttggcatcataactgctattagtatcattgtgaaaatggggactggcaatgttccatacaaagattaaaccattcatttgttttacttactactagtatctcaataataactatttatgcgaccaaaacaagagcacacaatttttatccagaatcaatcatataaacccgatacacatttgagagtcatgttaacatataggtctgggtttacagatgtatggcttggcccaaatttatacagaattctgttttaagt

SEQ ID NO: 38795 - DNA, 715 bp, Bovine  19866880827060
  misc_feature (1)..(1): n is a, c, g, or t
ntgaacaacaaaaaaggtgtgtgtacatatacacatgcacacatttttaaaaattgtatacaactgtgaaaagcagtaatggtgagagtgaatggtgttgggggaaatttagttttattgcacacttttgtgtattgtttcttattttccttttaatttttttaacatatgaatgcttctttaccaactccattaattgaagaattttgtttatcttgctcatcattataagaacaatacctgctctgataagggcattcaataaatatttacttgaagaacaactttagaagaagttgacttgaaatgtcccagtgaatatccttgcacctgcttctctgctgataaggtttaagactgtggtcagaccttttccatctctcccttgagactaggcaacttacctggaaaagtcccaattcctggagtacttaccaacaaaggaagatgtcggtgaatgtctctgctgtggtgaatagtgcaaatataatccagtacatcatccatttgacctgttgaaagagaaagcaataaagctagcagaaaaggtcaaggatgaatggttgccagcttcaagagaacaggctccaacagcagatgttgagatgggtccaggcagcctggcctaccactggtcaccccttctcctattcttccccaggttggtcccgttccactccagaccctggggatgcaagcaaataggccatttcca

SEQ ID NO: 38796 - DNA, 1474 bp, Bovine  19866880916831
  misc_feature (1)..(1): n is a, c, g, or t
ncagttgcagcacgtggtttcagtagttgtggcttgcaggctccagagcgtaggtttggtagttgtggcacatgggcttcattgctctgtggcatgtggaatcttcctaggctggggtcgaactcctgtcacgtgcatcaccaggcggattcttaatccctggactaccagggaagcctcatatctggttattttattgtgggttgagaagggaagtaagagagcaggagtgggagcagcatatttcacagatacagatttgaatagactgatcagggtctaatttcaccttaggcgtttttcatgttcttgttaatcaagtctgctttccttcaattctgtttgtctaggtatgtgtggagtttgatggagaatcttggaggaagagaagatggatagacgtctacagcctcctaaggagagctttcttagtggaacataacttggttttggctgaacgaaagtctcctgaaatttctgagcgaattgttcagtggcctgcaatagtaagtaaaacttgggcttattgaacccctgagaagttctttcatccattatgaacaaaacagggaaaatctatatgtaatatctatagttggccttctggaaaataatagtacagagatatgatgttgcagaagattcagaaaaagccccaggatctcctgtcagccctgttaggaggcctgcaattctggacccttgactttcatgggttttcagtttcctcacttgaagagtagggagtgagggtaatatggggaacttctaggtcaaggattggaaaccagccgataaataccgacatacagatctttttagtttgccccttacagtgttttaaaaaaatctaaattagctgtctacctaaaaaaatgtagagaatattcttaaaaatctagattcccagtgcttactgaaagaacagtaagatatggccacactaaagcctgtagcaacaggcttttagcaacagtaggctgaagctgaatagtaggtgttgcctggctcctgtcagggtttccacttttggtctcatgatctttaaggttcccccagctcatatttctttgactttaaagacactagcagtcagtatatgatagtgccatttccgcaccagaagtctggtgcagttaaaggcaaagagtgagctctgtatctggtgaggacagttaatgctgtttgagaggtgaactgggacagatttgggtagttgaaaggccaagaggatgattaaaaggctggccagcttgtgaaggacctgcatggtgtgtgaaccaaattgagattttgcccatggatgagacgagccccggaagggttttgagtgatgtagggttttgtttaaagttgtattttgcttttcgtattttttcctccatctattaagaatttgctaaaaacatggcccatttccccagaaaaataaacttaaaacagaattctgcataaattgggccaagccatacat

SEQ ID NO: 38797 - DNA, 822 bp, Bovine  19866880986778
  misc_feature (1)..(1): n is a, c, g, or t
ncccattaggttaaagtacaccgagcgtaagcgagggattcctccgccagggccattctttccatttgttgcctcacggatgcaaaaaagtcccgagaaatcggttatcaactttaggacccagaggaaaattactgtggtgcacagataagactagatggcgaaccctagggctgtaagtgcctattggattgcttgtcaactgcgtagggtgtcgaccgaagataggttttccacttggcggaagaatctcacaggaaaggggtgagggcggtgcagagtcagcgggggagggaagggactggaacgtgcggtttgaagcgtactcagctagagggaggagcgacagtgttcgagaggctcgtgcgcaggcgcttcgcggagcagaggctggagcttgggctgctgggcgaaatggccgcgggaggcgcaggcgcacgtggtgatgatcatggaacgtctgaagtccgccattttgaaggaaaaatgaagaaaggcatggagtcactgggaaatgatattaattatatctaaagcaaaagaggccattcgtacaatacaagaagggctattttctttattttttttttaatgtaaagggagaatgagaagatattctgagtcttacaaagaaaataaagactagatcaaggtcataatgatacaagatatgaacaggaagtgactttgaaggacaaaggagttgaaaggtgattgtgtctgttccacctgaagatttttggttgaatgaagaaaaaaatgcaatgaaggaattgaagatctgttattttataaaggctggtgcttgatgtggtatcacat

SEQ ID NO: 38798 - DNA, 596 bp, Bovine  19866881014429
  misc_feature (1)..(1): n is a, c, g, or t
nggcagtcccaagtagtgcttgtgtgaattaaacgtttattgtggtaaggatggaccgggttatgctgcagcaataacccttaaatcccagtggctagagacagcaaagatttatttcttgttttatgctgcctgtttgctgtgggttggcagaggcactctgctcatggtcatcaccagaggctcaggctgactgagtattttttgtctccaggtgctattattacaacataaggcaccaggattcgctggagtatggaaagaaaatggagagtcatgtaccagctcttaagtacctctaactagaagtaacatgtgtcatttctgctcacatttcattggccaaagaagatcatatgaccaagcctgaattcaactgggtggagattttcaatctcacgaaatatctgtagtcagccccagtgaccaccatatatgttgaatgaatgaatccttaccagctttgcaaacctctacatggcctttttttgttaaagttggggtgagatgggattttttttcctattgctatcaggacagtgctaacatactcctttacctcttcacagtagaaaaatctttctctctccttctga

SEQ ID NO: 38799 - DNA, 1785 bp, Bovine  19866881032003
  misc_feature (1)..(1): n is a, c, g, or t
natgtgggttcaattcttggattgtgaagatcccctggagaaggaaatggggacccactccagtgttctggcctgagaaattctacggacagagcctggtgggctacagtctttggggttacaaagagttggacatgactttgcgactaaacgacaacgacgacaagtttggtataatcaatcacgggacagcctgacattctgtccgcttgacagaaggtagtgggaagtgcatctcaccatctatacaatgtctgacttaagtctaaccatgaggacaagtctgacaagtccagaacatctatatcacagtcaagagtttccataaagttgatgggatttccaggtggcgctagtggtaaagaacccacctgccaatgaaggaagtataagagatgcgagttcaatccctgggtcaggaaaacccctggagaagggcatggcaacccactccaatattcttgcctggagaatcccatggacagaggagcctggcaggctatagtccacagtgtctcaaagagttggacacgactgaagtgacttaacacgcacacgtgggggggactgttctaggttagtcaaagatgcaatagccagataacacgtgtgagctttaactggatccaaatagaaacaagaaaaaaataaagagtttcttaaaaactgggggttaatttgagtatggaccacatgttgggtgaaaccgtggagagacagttgattttcttaagtatggaaaagattgttgattgtatagaacagtgaatggttctcaagcaggctccacagacttctggcagacccccaaaccctttccaggggtttctgggaccctgtcagagggttcatgaggtcaaaacaattttaatgacaatacgaagacatctgcctttttcactgtgttgaatttgcactgatggtgcaaaaacaatagagggtaaaaccacagcctttgcatgaatcaaggcaatggcactaaaccttggcagtagtgattgtattcctcaccacgacccagtagggaaaaaaaaaaaaagcctgtttcatttaagaatgtcattatgatgaagcagaaatcatcaattttattaaatcttgaccttggagtagagttgttttttatattttgtgatgaaatgggaagtaagcattaagcactgttgcataccaatgtatgatccctgtcatgaggaaaagcccttgggtcattgagttatgtgctgattatccactatttttcagggaacactatcgctacttgattgactaacaaaccatggctattcatctggcaagaatgttttaggaaatgagcccatttcttcaagaaaaacaaataaggtttgttgtcaatggtaaaatttgatatttcaagcaaagactagaatttttgaaaaatttcctctcctaccatgaacttgacagtgtcctaacacttaaaaaacttttctgatgagattgatgatgaaattaatgaaagtgctttttgacactgtgtatttgtcaacatttagaagatctgcatttaacttggtgagtcaatagtttctaaatgattcatgtgtgacattacaaataatgcatggataaaagatccatgaatttaaaatatgtggaagggggcttccctggtggctcagtggcaaagaatctgcctgccaaagcaggagacatgggtgtgatcccacatgtagcagagcaactaagcccatgcaccacaactatcgagcctgtgctctagagctcggaagccacaaacaccgggcccatgcgctgccacta

SEQ ID NO: 38800 - DNA, 720 bp, Bovine  19866881059302
  misc_feature (1)..(1): n is a, c, g, or t
nagagataaaccacccaattttcatgtgatgttttgatacagaccactaattccttagccctaccaaactacagtaaacatagaaaaggaaaccacaatcctggaaacagagactgtaatacaaggcccctcatataaaccctatctggaggttgcagttttcctttttagactagagggtagctgtaactgatatttttgaaatctgtcataagaattcttcccacacaaacaaaagacatccagatattaatggccagttctacatttgaaatacagattaatacgcaacaactttttctatagttaactaaaaatattatataggaatcatgcattaaggttaaaatatatcacacacaaaaatacagtaaatttgacatgaaagtagcattatttctcagtaaattcatattctagatctaggagaaaaagggctcttcagttatgataaagaaatggcagatattcatcagtatggcagaagcaggaaggtgacatttccctagtttcctctgcatctatgtgtggatatacattacctatacattctcaatcatgtactctaagtcacaatgtaaaatgtatttcaaaatggtttgaaagcaactgatctagagaaataaaaatgaataaaaaaagattctaatatccatagaagtaaacaggctgcatcatatattaaactcctttctaccatgtacacctcgctacctacat

SEQ ID NO: 38801 - DNA, 1430 bp, Bovine  19866881116674
  misc_feature (1)..(1): n is a, c, g, or t
ntgaaggaagaaagcatggactcacatccttctttctactttctgttttagtttctctactctcttctactctgactctgttcatctttattgaggggggcagggagtggaggagagtataaacagtaagacaaatacatacctttcctgtagaggaattcaagagatttcggaggaaacccgaactgttgttgcttacaggtgtcaaaattgtgctgttaaaggtgtggaggactgtgctggatttgcacaagggggggaggggtggaaggcatttgatttcattctttaaaattggcatcgctggttgcttttctaaaaaggaaaccaaaaacatccagatggaaaagcattctgaaaggcagagcccttactagtcttctattaacagaattactatggaaccaggaaacttaagaggataaatactaatgatattattgattttggtaaggatttccaactgctatttacatatattatacatagtatatatatataaacattcaatacccaaagtgatactatggtaaactgtactttttatttgttcctggtatggaaaatacaactgatttttgtaaataacattgtaactatcaaccttgatagtatttataaatacagattctcttagaatttcacatgcgtaattagattgtccacaaatatcaacagttttctctctttatttccaatcctaacatctttttgttcacttcactgcaatagccaggacttccagtacaatgtttaatgaaagtctgaagacaggaatcctcgtctcatgcctgaacacagagggaacagcttaaaaattattcaactgattaaaaaattcagtaataatttgacatgtttgctgtcaatttatcgtagaaactcattacattaaggatattcccttctgttcctaagtttttttgttttaaatataagcagattttgaattttactctttttctgtatctcctcacatgacttttccccactttttaaatgttaaaactgcagctgcacttctcaagccctattgggtcaccccgtgttaagtcctttatttactgtactgaattctattcagtgagatgtttaatatctctgcgtgaaagaaactgatctgcaatttttctttcttgtaaaacagccagaaagcagaatcacctaaattctaaatacctgatttccaaacccatgcgctttatactacaatcaagcatcctgagacaacagcatggatgagaaaaataaagttgaagacagagtgttcccatttagacagaacaggaaatatatacaaggtagagatagaaaggcaaaaattactattgaaactaataattctcagcccaccctattcttgccaaacagaagctcaacaatgacttctatcaccagcaaaagttctctctgggcttgcaactgtgtca

SEQ ID NO: 38802 - DNA, 1426 bp, Bovine  19866881150631
  misc_feature (1)..(1): n is a, c, g, or t
ngaggaggcactggactcaacaggggagtcacgctcatactcgtggctaacatttgttacagcaaaaaggtacaagacaaacagccagggagaaaagcacacggggcattgtctagaggaaaccaagagaaagctgcagagagttctctcccagtggagtcacacagggcatacttaattcctctggcatcaaacactaacaagtatgaagtgttgtggcattccccgactcagtggtagagaatccacatgccaatacagaagacacaagttcaatctcagggtcaggaagatcccctggagaaggaagtggcaactcactccagtattcttgcctgggaaatcctgtggacagaggagcctggccagatacagcccatggggtcgcaaagagtcggatacagtgactaaacaacaacagcgtgaagtgtttatctccgagggaagctcgtttggagacatagtcttctggtgtttactgggtactgtcatgtaggcaccctctgtctagcagataccaaaatccagactcccagaagaaaagcagttcagcacaaaccacattttacagtttaggcacagcaagccattcttaaccagttagagtggtaggaaccctcctgaagtccagattcccagatgcccaccagagaccaaccttgcaagccagcctgaggctgctaatgcttagaaagacctgcttgcagggtgggcccttggctggcatctgggaactcgaagttccagagagttcctcccaccctgactggtagggatggctcactgaggcttacaggtggggatatgtaaactgttttctgccatgttcaccgtttcttcatattatccaaaaaagtttgtttttcttctttatgtagaacataaagcaattagacttctcttcttatgaaatttagtaatagaatattgtgagaatgatttggacactttaagtgaattgaataagtgagtttattcacttagacatattttcttaaaaatgccttggcagtattattcaatttagttattacataagtgatttatgtcatagtaaaattttaaaatgtattccaaatgatgcaaaaattaagctagctttcttactgttcatttgaaaaatatcccctctggctgttactgatttttcttcacatctaccttttcatcttctagagggccagtgtgataacttgccatctttgggtttgcttttgtgaatagccagtcttctttctttctttttttataggtcaagatgctgagttatcagggacactttcacttgtcttgacacagtgctgtaagagaataaaggatactgttcagaagttggcctctgaccacaaagacatccacagcagcgtttctcgggttggaaaagccattgataaggtatggagttgtctggagtgtttggtgtgtt

SEQ ID NO: 38803 - DNA, 1249 bp, Bovine  19866881234182
  misc_feature (1)..(1): n is a, c, g, or t
nggggtttgggatcacaagcatttcatttactaaatgcacttgtctaaagttggtcatcgcctcttcactcccaatgcaagggccctggtttcaatccctgctcagtaaactagatcctatatgctgcatctaggagttcatgtgctgcaactaaagaccccatgtgccacaaccaagacccaacagagccaaagaaataaaagtaaataaaaataaagttggtcctcaaggacagagaggtcagagtgtataggacatttgatttggcgtgtggcagcctatggaaatacgccacccatagctactgacagagccttaaaaatacatcaatacggttgctactcagtgactggaagggcactgtgtaccctccacacattttcaggactccactcttacagcaacatatactctctattcgtctcctgatactgccttggcattggacaaccctgttagctcagatggtaaagaatctgcctgcaatgcagaaaacctgggttcgatccctaggtcgggaagatttcctggagaagggaatggctaccccctccagtattcttgcctggagaattctatggacagaccgtggagttgcaaagagttggacatgattgagtgactaacacttcaaacagtgctgtggctgtggctgtaatttatccttcctacacaggcctcaggaagcttgcaccggatcctcccacctgctgagactcacatctgagggggtgggaagaactaagtgagcaggcattctggctctttactcctgccaagcaccgcaagtgtttaacaggattgcactcccttccatatgttcacacagacatttattcacacacatttttaaggttttatatgcactctcctcctgatccctgaaaaatattataaacagatgttctgaaaggtgtctcaatgcccagtgctttaaaatttccctaaatttgaaatgacaaatagaaagtactgtttccttccttcccccagtttgtccttgcttatttcggtaagatttcctaccttagagagcttcctggcttacaactgttcctcatacaccaggtagacagtttgatgaaatgctttgggcaagaaagtcacaatccaattcctaggaggaatgttgacctaataaaaacaagatataccttgttttatacaacagatggactctcaaaattttagctataaactgacctttgggaaactgaattccttcccataccttatataataaatttt

SEQ ID NO: 38804 - DNA, 777 bp, Bovine  19866881303366
  misc_feature (1)..(1): n is a, c, g, or t
ngggctgaagaccccacccggaagaatctaagaccctctgctccaaatgctcctgcttaacagaccatgctgactccaggagctgcctggggccctgacctgaactgccaagttggaagccggtgaagatcatggaacagcctcaaggtcagacctaccttgggaacaaggtactgctgatcggtgcaggccaggacgtaggcctcggcccggcccagttcactctggggaaagtgggcgttcatctcatctccatcgaagtcggcgttgtaggccttgcagttggcatagtggagccgcaggactttctcctcggggaggacgcgggcgcgatgcgcctggatggagggcctgtgcagggtgggctgccggttcaggaggagaatgtccccgttcttcacatgccggcacacctgcgggcagagcagaggacgggctgagcagtggccactctggcatcactgctataatgccaagggctcacctcgccctgggcttctgtctctctcatgttttactcaataaaaggggaactttcagtccagagtgaaaccctagaaatctatgagaaataactactaagcccctcggggactcagagtgtgtgtgcgtgctcagttactatgtcgtgtccaacccttttgtgaccccatagactgcagccctccagactcctctgtccattggattttctaggcaaggatactggagtgggttgcatttccttctgcgggggatcttcccagggaccaaacccaggtctcttggcaatggccg

SEQ ID NO: 38805 - DNA, 1107 bp, Bovine  19866881313827
  misc_feature (1)..(1): n is a, c, g, or t
ngatttgcgcttgaaccttgaatgctctgaactaaggaattatatatcccttagtgttacttcatatcaggaagtttttgctcagatcttttgtctgcagtgttctagatttttttttttctagattattttgatatatatgtgtgctgtaggagagaaagaatactttgttcataagcactgcaattctaaccttaaatgtttttttcatttatattgaagtatagttgaattacaatgttgcgttattctactatacagaaaagtgattcagtttatatatatacacccattctttttcatattctttttcattgtggtttatcataggatattaaatatagttccctgtgctacacagaaggaccttggtatttatcagttctgtatttaccagtttatatctgctaatcccagactcccagttcagctgtctcccacccatctctgccttggcaaccaccagtctctctgtgtctctgattctgtttccacagacaggttcatttgtgtcatatagagatcccacatataagtgattagaaatgcaagcttattttgcaaattcattgtcttcttctaggtttgatgatctgatggccaacattccactgcctgagtacacaaggagagacggcaaactaaacttggcctcacggctgccaaactactttgttaggccagatctgggtcccaagatgtataatgcttatggtaagaaagaaatggttaacttgaaaagattattacagaagtaaaacacattaaaatatttgtaacattggttttgggggagggagagaagatgtctgtaatcctaccctttaacgtagcagtggtcttcattattgcatatttcctttcatcccttggccacgtgtatgtatatttccctttcttaattgcagttgtagggcgtaggccattttttaataaaaattttctcttatacttaatattatacaagaaaagttttacatgttgctcagtggtttttatgatgattgcatcatcatttttgatggttgcatggtacctcatttaatgaaggtcagtttattcattgttttaatgttgctggacatttaggtcagtctgctggaattt

SEQ ID NO: 38806 - DNA, 749 bp, Bovine  19866881815538
  misc_feature (1)..(1): n is a, c, g, or t
ntcaaaaacaaaagccccattcccatatcccactcaacacctaaatgagggccaagaagacacatgagaatattccttcccagggtgagggaagactccttcgtggggacagaccccctcacctttgaccatgggtacaaatacattaaacaattcatttacccacaattttaaaagaaggattctaaatataggtacctgttgttgaagctgaagtatctcccttttgtttttgaggttgtgaggcaggctgcttagattctttcattacctctgatacactagagattttcagtggaccagactgaatcttggaaatgaaaaacatttaacgtttcagacataaatagtgttttttaaaaaggcagcatacagtaacttgtattatttaaaaagtagtaaaaagcttgggagttatcaataattcataacaatgtattttattaaccacagtaagagaacccatcatactaggaaaatgcagtccaaaagtagtccatattttaatagtaacaaaaacttctcctaaggtaactaatgtacttgatatatgaccttccttttaaataaccattacttttatgtgtacaacactgagaaggctatttccattcactttctaaatccaattatggtgtcttctaaatacattcagttagaaacaaacattttttaaaaagctctcagtaaaaataaaaattcatttttcctttctttaatctccaagattcacgcacctgcacttccaa

SEQ ID NO: 38807 - DNA, 2429 bp, Bovine  19866880099397
  misc_feature (1)..(1): n is a, c, g, or t
nattttatttttaaactttacataattgtattagttttgccaatatcaaaatgaatccgccacaggtatacatgtgttccccgtcccgaaccctcctccctcctccctccccataccatccctctgggccgtcccagtgcaccagccccaagcatccagcatcgtgcatcaaacctggactggcaactcgtttcctacatgatattttacatgtttcattgccattctcccaaatcttcccaccctctccctctcccacagagtccataagactgttccatacatcagcgtcacttttgctgtctcatacacagggttattgttaccatctttctaaattccatatatatgcgttagtatactgtatttatgtttttccttctggcttacttcactctgtataataggctccagtttcatccacctcattagaactgattcaaatgtattctttttaatggctgagtaatactccattgtgtatatgtaccacagctttcttatccattcatctgctgatgaatttgtcttttttattttaattaacccttagtactggagtctggacaaatattaaccagtattcctagctgtggtattatagacaatatatccttgtgctttaatgagaactctaagcattagtaagaaattatgtaataaaaatctgttaaatgtttattgtatatgcaacagatatataaaatgaattggcataatgaaaatttttcttgttgacatgagacacattgctgtaaataatcatctttgtcttggattgcaatacagaaatacacacacacacacacacatatataggacctatctgtgcttaggtgtgctttctctattttgttttcctggccttcttgtcaagatgtcattgattacatcacaccactgagaatataactgactttagcagttctttccctgattctaatctgctctgaagcagaagcagagtattagtttggctgagattcagagccaaactgagtattgtattaagtgagggtcaaaagtctttgaaaatgggctagaggccttatttacggagaaaagaataaaagccttaatttcatcaattttctatacttttatacttaccactgtagtttagactcttcaagtttggtagttagataaaatactactacagaccagacttacaggcttccctggtagctcagctggtaaagaatctgcctgcaatgcaggagacctgggttcgattcttgggtcaggaagatcccttagagaagggataggctacccactccagtattcttgggcttccttggtgactcagctggtaaagaatctgcccacaatgtaggagacctgggtttgatccctgggttgggaagatccactggagaagaaaatggctatccactccaatatactggcctggagtggagtcgcaaagagtcagacatgactgagcgacttttcacaaacttaaacatgtagcccagatctctgtgttccacactaatggaaggaactgtattttatttagccttctctttctagctcctagcaaagttcatggcatatgatagggattcattgaatattaacttgaacaaaagtactgattatctattcccttttcatatcccacatgcatttgaaactcaggaggtgcaatggcaccccactccagtactcttgtctggaaaatcccatggatggaggagcctggtaggctgcagtccatggggtcatgaagagtcacacccgactgagcgacttctctttcacttttcactttcatgcattggagaaggaaatggcaacccactccggtgttcttgtctggagaatcccagggatggcagagcctggtgggcttccatctatggggttgcacagagtcagacacgactaaagcgacttagcagcagcagcagcagcagtgagaaatttagtcacacttctcaggtcacacaacttgttgcaacagagcaaggactctcctgtgttcctgacttcagggcccaggaggggtgacctggagccaaacctgtgtccatcatttacctgggtggatctgtggcatttggctggtgcaagagtgttccctctctcgcgtttcttgtgcatgttgagttctggttggagagacaggagttccttctgcagtgagggtatagacaggtgggggcttcccaggtggcactcgtggtggagaacctacctgctgatgcaggagaggtaagagatgcaggttctatccctgggtcaggaagatcccctggaagaggccatggaaacccgctcgagaatcccatggaccgaggagcctggtgggctatagttcaaagggtcacaaagagtaggacaacactgaagcaacttagcatgaacgcacataaacagatggagttccttgatgtccccttcaagttgactcccaaggg

SEQ ID NO: 38808 - DNA, 1148 bp, Bovine  19866880339597
  misc_feature (1)..(1): n is a, c, g, or t
nctgcaaaataataataaaaaatcccatatgaattgaaatgggatacaagagctcaacagatgtagctgtatctctcatatgaaaataaacggaatgttttccttaatcaatcagaatgaataatgttgatgggcctggcagtgactaaatcagggctgccagctcccgctacccagcgtgattttgtctttccaaccagactaaaaaatgctctccctccttcatactggacgacttcatttccactcattcaatttaacaaaactcacccggaattctgaaagcttcgcctgtctcataaaatgtttaccagatatctcttacagggtggcagatgtgctaccatgtttcataagaagaagaactcaagtggccaagtccactggactgaggagcataaacaatcacactggtgggaggttgtttattgttggtcatgctacaaggtcacgtttttcagcacttttgtttaaaactccatctaaacaactgcctgctgtagaacattgtggacaactggaaggctgccttttgtttaaatcagctttgagagtatgattgagttggtgacaccccttaactttctatttttagcaggagttcaaatacatttgttttttcgttttgatgtatatttctacaattattaccataacaacccagtgtaagcacattaccaaaaaaggaggcactgaccttctttaccaatcttcctgtttgccacatagttaacttggtaaaaccttcagagaataagaggtaagtgaataataaatctaatttgttaagcatttgtttgtgtctttgttattatatggatttaaatatattctagtttgaaataatttacatatattagattatttattactctagtggtattctatgaacaataacattatgaattatatattttatataattgttattatataaatatctattattattcacaattccattttcaagatgaagaaaactaaggcacagagatttcacttccttaaccaaagtcacactgcttgtaagtggtggagagagattccatcctcacccaaacctgtttacaggactcatgtacctgatctctaccctagttttgtgcagattcactttttccttgatcttcttaagtattcttttctcc

SEQ ID NO: 38809 - DNA, 1358 bp, Bovine  19866880410026
  misc_feature (1)..(1): n is a, c, g, or t
nacctccagcaaaagcaaatgaattgattccactaatttgtgccctctatttttacttaagatggaaactttgattaagaaagatttccatttctcatattcccacctggatggataagaggggatctgaataatatgtcttattcagaatttgataatagctaattgcttgggatattaagttcctgcttatatattatttaaaagaacatatatctttgataggttttattttgtttaatctctgaaacactgctgacttttaactgtctttgccccaatagacagtaaagaacacaaagaatgttgctgatggatactatatcatatttaaagtctatatataagaccattacttgctgacaaaggtccgtctagtcaaagctatggtttttccagtagtcatgtatggatatgagagttggactataaagaaagctgagcgcctaagaattgatgcttttgaactgtggtgttggagaagactcttgagagtcccttggactgcaaggagatccatccagtgaatcctaaaggaaatcagtcctgaatattaatgggaaggactgatgctgaagctgaagctccaatactttggccacctgatgcgaagaactgactcatttgaaaagaccctgatgctgggaaagattgaaggcaggaggaaaaggggatgacagaggaatgttggatggcatcactgactcaatggacatgagtgagtaaactctgggagttgatgttggacagggaagcctggcatgctacagtccatggggttgcaaagagtcagacatgactgagcaactgaactgataagaccattgttagtttttcccttcactctggaagaattcaattcataaatacaagaacccattttggactttacagtttatccagacactgtttcgtttttctgaaatatctgtatattgtcatggtgttgggtacatggggttagcttgagaatgatctatttgaatttataatttgggttctcaattttttattcttaaaatttttattttatattggagcatagtggattaacaatgttgtattagtttcaggtataacagcaaagtgattcatttatatatatatatacatgtatctattctttttcaaatgcttttcctatttaggttaatacagaatattgagcacagtttcctgtgctacacactaggtccttgttggttatctattttaaatacagtactgtgactatgtcatccccaaactccaaatttatctccgtttcccacctttcccctttggtaaccatacatttattttctaacgctgtgaatctatttctgtttttttttttttaagttttttttaaattttat

SEQ ID NO: 38810 - DNA, 1251 bp, Bovine  19866880498708
  misc_feature (1)..(1): n is a, c, g, or t
ngatatggatgacttggtcatcccctctttgggccaggaaaagaactccactgacttccagccatgattctagtaataatcctagtatctctttgccctgtacccccactccttcacatggaaaaagaacagattgccctgatcactaagttgggatgaagaaccaaaatgtttaacttttaaatttctcatcctcttttgaattgagaaatgtgagaatgcatattaccctgctgttcaccatgagttgaaactaactctttctgcagaaaggacctatgattttctagctatgcttctgacctgaaagtaattcttggataaaataataagtatcatatgtcagtacattctctagtccagtttttaacagtaaaatagctgatatttttatttttatctgtctgacgtgtagtacttatatttcaattggttctaacctcagaagaaggagtataacttactacaccagacccaaatacaagctttcacaagtggtctaataaatgaataaatatagctagctagcaaaattagatagcctaatgtagttaatgactagtggatatactatgtaaatattgttttaaagtatacctaagacgttaacaaaagggatcacatagcagggcacaaagcaaataacaaggaattttaaacaaaaaatttgaaatttttggtaacacaataaaattaaatgtcaatactaaaggaaaaccatgatccctacagcaaaccttatctaaggacataaaacaagacctaaataaacagatgtatcaagttcatagatgagaaaatttgtttatattgtgtctctttcactatattctgacattccattatgatgtcctttggtgtgggtctattggatattggatgcactgtgttgggctgtcagtgaaacctacaaactcatgtccatcttgggaaatgtttttgaattctttattgatgatttcctgtttaccatattctcaatgtctgggtgtcccattatttaagtgttggatttctggaaagtgtcctctggttttctcttctagtttctatcattttactcttctaggggattacttaagcttaattttttttcttgaggttttcattcttgtattcagagtttagatttactaaacttgatatttttcctctatatctcccctttgtttttgtttgagacttctcagactttattaagacactaattacagtattttttcaaagtacctgtagtctctaatacaaatt

SEQ ID NO: 38811 - DNA, 1710 bp, Bovine  19866880517698
  misc_feature (1)..(1): n is a, c, g, or t
ntactgtcatttaacacagtacaattaaactgaggtcctctgacatatttttagatatatcacttttgaagttttaagtgatctataaaataacgtaaacataccgtgtgccccagcctcctgtctaaagactgcaagattatttcatttgtgtgtttatcattcattgcaagttattttagtgaactgatgagagaagaatccaggtggacttaagaggtaaatgacggaagcacgtggagggcatgaatgttttggaacattctgaatgtagagacgtttgggaggattacatcacctcacaatacagggcattatttatagtcctgccataatactgtgttccacgagatgatgtaacctacccaacacttttcttagggttgtcagtttacaaaatgtagcaattattccaatattcgtgtagtgggtggattttttattttcattcatcataatcacttgaattatattagcttcatgattttgttagtattagttgactatttgatttcatagttacagagggtctgtgaggaggaggctttatacacgggctaataacagtactaatttacattacactataatgaaaatctcttaggtcaaccttggtgatctatagggtgtgcttgcttttaaaatggattcttgcattcttaaagaaggagaaagagtgatttaaattgttctgcagaagacttggctaatgccatcagaggtttagggagtttatagtagatggattacagctgggagagggtggaccaggcaggcatgttagatcatcagagcagccagggctccggtgatgagaatatgaattatgagcagcagagggaagacagtgggaagggtgccgaaggactcccactggtcagtttcgggaactggtaaataacagaaatgaaggagtggctaggggaaaatgggggaaatattttgttttataaaataaggtaaatcaagcaagaggaacaataaaaacatccttcttccacccagaaaatttaagtgaaattagtattgtgcaaagaaaacagttcaaagataaaactgaattacataaattttgcaaaggagcacagaacagattagaggacaaaatgacataaatggaaatccaaacaatatataacagccaccagaggaaagggaattaatgaaccctcaaaaattaggctcgtgaagtgtggagtaaagtagatgaaaattataaattttcttaaagcaaagccattcatcatgatggactcctaggcaagttttaaattctacatggtatcaataatcagtaaaatatgcaaaacctacagttcatttttaatttacattttagatcagccattatatctatactttgaattctatgtgagaaaactgcaattatgttagataacaagagaaacatcattttgttattttttttggctaatgcattttgttaacattaatccatctggaagggaaggtttcacgtattctctagggagatgaatgacctggatttataaattgcggaccccagattgtggctggtttctttatatattacttaagaatatatctagtaagtggcaataattttgagcaaaaagacaccacagaagactatgattgcataaatttctgtcctatggtgatataagtcatggttgtgtttacctttggggttggtattgcttggctacagtgtggacaatattcgct

SEQ ID NO: 38812 - DNA, 1320 bp, Bovine  19866880559956
  misc_feature (1)..(1): n is a, c, g, or t
ncttcagttctagttgttatgcacttgtgaaacactagaaaccaaatataaatcaaatgttataaagcagctccaagctccatgacagcacaagaagctacagaaaaaaacggcagggaagttctgcttctcctcccctcaaacataagcaagcatttctttgcttactacttgttatgcttatcgtgttaaagctataagtttaggaaaggaaatatgtgactataaatactaggcacattgtaaagcctcaataggtatttttattagatatattgtatcttacattttatgtaatatttgatcatatgctgttttccttttcaagtgtattcacaattgcatttgattgactagagggattttccatttaattgctgttttcctcttccaaattccccaactgaatcactgacttgactgtatcctataaaaagggtgacacaagtactgctttgactgccatactcttttcatcttctttcaccaatgactaagttttctaattacattttctattttgattaaaaggagacatatagaaagcaaccatagaaagaaaacttccagttgaagtaataaggaacccatttcccaatttgggaggaaataaaacttttttaaatttaagaaatcaagtagaaatacagaaaatattataaagtattataatcatttctcaaaattccataaattctcttatggtttattcattcacttattagcaatcattgatttatatcatccattcatttaaaattacttttcatagtttttcacatttcctaatcatttggaattggtagttttatactttcactaagttgtataaagttcccttttgctcttttacaaaaatttactaaaacagtaagttaaatagcttcagaaagaagccaacatttgagcaatttatacactcaaaaatgcaggattagaaaagcttgaagtttttcctctggaaaccatttagtcttataaaactgtgggtgtgctaagttccgaagcatctttctgcacaatgatttgatacatattagaaatgcatattcactaatgcaaaggcacaggacatagtcttaagttcaaataattttcttttacttgctaaatcaaattaatacccaagttttgtttttcaaaaatgcttggggctagagcactgggatgacccagagggatggtatggggagggaggagggaggtgggttcaggatggggaacacatgtatacctgtggcggattcattttgatatttggcaaaactaatacaattatgtaaagtttaaaaataaaataaaatttaaaaaaaaagagca

SEQ ID NO: 38813 - DNA, 1598 bp, Bovine  19866880581892
  misc_feature (1)..(1): n is a, c, g, or t
ntggatacttcccgtgtactcccatcaggacacacaatgccagcctttcctaatttagactcactactttaataataacctaatttgttattttttccatcccttgtgacaacaatacaaatgacaattgtacctacttgatggaattgttgtgaagatctgaaacatctaagtgcttagaacattggcaaatagaatatgcgagaactgtgggataattcccatgggcagaataccatgagtgaccattgctctgaacgtaagagtggctgttctttgaccattgcaaccatttggccacgagatggggtgttatcacctctgtttgtacttattttcaggaatattacacattatattgatcttatttctcttttctataatttgagtaatgattttctctttacctataacaattaataagccaaaaatacaatgagaataaattgttcaattttatgtggaaaggattcaagacttaaaatttacatcattacaatggataaagtaatttcactctcccatttccaagcaaaagccatacaaaatttaatttaacatgtcatgaccaaggccacacactttgtggaatttaattgcaaaaatcactctctaatgctgacaaaatgaccaagctcttcccttagatttttttcagagatttttttttcccccagacttctttatagcatttattttggggataataaaggacattgagaataagaagccatgggcaggttgctgattttgttgacatcagtatggagcagtctcattagattaataagctgccatgtaaaactcaccgcataggtattttccccatagtcttcttattgattctgagccagacgcatgttgcttacagcctgatgaatttaagaatagatctaatgactgcttaatgtagccttgcaaacagctttcaaaagtcattaggcctgcaaaccaatagggtttgcacccttgagacatcattccacagacaaatagttttcagtttgacttttctctcttaattcattgctgatctgtatgtaattcattaggcctgtacaagtttggttctgatgaaaggaactctaaacttgagactgaaatctctatttgccatatggttctgccaccttagagctctgacctggacgggtgatttaatttcttgggcctcagtttcctctagtatagaaactgatctaaatcagttgttttcaacacgtaatgtcagggctcacagcatcagtaccacctgggaacttgttagaaattcagattcttggtccccataccagacacagtggatcagtactctgggaatgtgaccaggatagctgtgatttaacaggcactccaactgattctgattcataataaagtttgagaaccacaattgtaggtcagggatcagcaaatattttctctacaggtttagatggtaatattttaagctctgtgggaagcaaaatcaaggatattattcaggtatctattttaaaagagaaaaaataaatttttcttgacgtaatttaaaacagtaatagtaatagctaagacaattttttgttgtatgtgtctactaagaaaataatagaacc

SEQ ID NO: 38814 - DNA, 2035 bp, Bovine  19866880662447
  misc_feature (1)..(1): n is a, c, g, or t
ntttggggagatctttcagaggccagagttctcttcaattctagagacttctggaggcaggaggccttgcagtagctctgcagggcttgaaacaatgctggtaagatttggttgaaaagaatatgctccactttatgtcccatttctccatgatccttggagagggcaaattaaaccttcctcgccttcttcacatggatttacagttctagtgacagtgtgttaggaggagcactgggttagtagagaggcagtggttgtgagttttcaggatgttaaaccctaagaagaagctggggtgtatattcatgatagggctagttcctgcactctaggagagtgaggtatttacttgtgtcatactttgggtgaaggtggtattcacatcaccagtagagagactatctcagcattagcacacacaaagccccatagatcctgctccactagcataaaaatatcttaattttccctctccctcctgcctgatcccaaacacagaaggcatcagtagctgagggaggagggtagagagaccactttcctctcctctactgcaagcaataagaagcacagctcaagaggaataagatgtacaattggaattaagttcatatagaagtctttaacattaacaggattttgtcttaaatttagaacagaaaatgtactctaaaccaaattatcaatggaaatttatggaagttggcaaagatgtcatcgagattcctactacaaagagtgaaaaggatgcatgacaatgtacaaatgaaagggaggattaatgaaaaatatcaagtgaattcatgttcatatacaacatttggaaacttctcactaaattggttccattatatttgtggttaattacttgcaatttagcaataaagacatgaaaactatgtcaatcagtcaatcaaaattttccaacaaaatagtcttatgatacatcacttaggagaatagttgaaacagtactacctgtgtttagtttgatactgaatatattttggcttgaaatgaatcaatccaaaatcattttgttctacacaatgaagtcttcaccagaaaacaatatttttatgtataatgtgttcttatagagcatctctctagaaaatgatccaagagttcagccaacagaaatttgaccccgtacctttgactggactggaggaaatatgtcaataaaggtcacagatctggggactaggggtaaatcagaaatgatcctgaattaatagaaaggaacttaatgaagaaaggtgtgtgagaactattaagagagtttgagctttagtagcaggtcaaaaataaggcttcatcccaattcatccatccttttcagagaggtatctaagcaccaaaatgccttagaaaatccttcctgaagtgcaaactatccagaccatcccaagacaggagaataagagttaagatgatgatcaactagtgggatcttctggcattttttgagaaatacaagttaatccttacctttgagttctttttgtaaacaatgtttataaatgataaaccatgctggcagggtagggataaatttcaggatgctagtccagaaaccacttttagtaattgtccaatagtgccaaagaatcaaatgactatttcttgattataggatagtatacatgtatcaatgaaataaaatgacagaatctaacattattatacaccacctgtgggtcaaaaagtctatgtgcctaatctgaaatgtcaagagaaacatgaatttgatagtactgaattcattcttctttaaggagactaaagtttagcattgacattgaatagcacttaatgctatttcacttagagtgggacattagaagcgggattcaatctgaaatgcttattctagtgattcacctctttgcagtgtataaagtattttagcaaggagtcactgtttcagagagagtgatgtgttatgaaaagaagaaaaagtcacttattactgccaaaataagcaataacaatgcttaagagaatacagcttggtcttgcatgtggt

SEQ ID NO: 38815 - DNA, 1628 bp, Bovine  19866880706787
  misc_feature (1)..(1): n is a, c, g, or t
ncaaataagagtaaataagtgatgtaagacactatggaaagtgacttataagaagcacgggtatacctgtggcggattcatttcgatgttgggtaaaactaatacaatattgtaaagtttaaaaataaaataaaattaaaaaaaataaaaaataaaatcaatacacctaaaaaaaaataaaaaaaagaaacagcatatgtcagagggagaaataacaatatagttgtttctcttggtctttgaaaaaaagtttatataaggcatagatatttcgtgttgccatcttgactgactagttacataagtgaatataaagttatatagataaattctgtgaagaattcccttgccagaaagcctgactccatacagtacttgagtctttgtgtcttgtgggacacaggagttgaccaagttagagtagaattttgtagtttgttttttcttttttttttttttcgctttctcaaagagccctggtttggatcattgatttttagtacttttttgttatctgcatttctcctaagtgttcttacccaaacgtagcttcactcaagtaacttatagttacatcccctgaatgtttgtttgccacctgcagacctttgtgcttttctgactgcatgtcagacccacttggtaattgtgtttcaggtaagggtgaggtgaggaaggaggaagctcttctgtgtccacagtcatacattccagtgacaggaaaagagaccctgaagagaaagtgataaaaccatttgactacagttacagaagtctgttgataataccataaaatatattttaaatacttgatgaggttaatggatattcccatatttctaaaaaatgtggacatttgtcaaatactcattagacactaaccagtgatgtaaactgtacatcacatgaagatgtgaaatatctttggtattatacattgattttcttattgagcaaatctcgcatgaaaattctgaactcagttctttaaatattctgagcaaatcacaaaactaaattcctttaaaaatgtacataatatatattttctaaaatgttaacatttgtgtagctaacattcctggacctgtattatgcatacttgtaattcatagtcttgtgttctttatttgatttaagaaagagctattttagctccattggcttatgggtcatttgtacatattactgctgcatgtttaaatgtaccgccttcaaaagtgtttatgtttgctgtggtctccccagggaacttgggagctgacctctcattttgatgtacactgtagtttccagggcacccatagaaactatttagaacccaattccctggagccccaggactttgagacaaatgcttgacccctgctttgtctgtgaacaatattgaagcccctttctgtacagtgaaatgccagggtgactgcatctaccgtggttcaccaaaagtgacattttggagagaaataaaacatgttgtgcgggcatgtttggcttcacatttaaaccaagtttagaatgggagcaacttgtcactttgagcaaaaatattttcccagggatcatgatagatggacagtctgtttctaaccttactcttttatgattgtaccttacttgttacctcc

SEQ ID NO: 38816 - DNA, 1985 bp, Bovine  19866880716098
  misc_feature (1)..(1): n is a, c, g, or t
natttttatggtttatgtaaataaagctagattgagggaatttcattgcaaaggtgaaaaccagaatgacatttatgaagatataactctcataaccatctggcatacacaagggtgtcatactaaatgggatcagaatgagctccttttggaagtaaacctttaataactgtggaaactttaggggaatctatcctagaatgttttaatggagtacttgagaatgagttgtgcacagctggccaatgaagagactctagattggttaccaaagccaggttttaaatggatttgcaatcctccacagttctttgaaaaaggcaatgaaaatggtgatgaattaacaaacaaaaatcttttctaatcagaaagccctttcattagcaatgcattatgattgacattgtcctttttccttccttcctttcctttcttttttattttgtgttgtctttctatgacatcagtcttatgcagataaatgattaaaggacaatgattaaaacacaaaacatttgaatgctacaagccttgtaggcctgccagaaacgcactgaagctatataaaaaaaaatggtagggaaaaatctaagctaatgatgcaaattgctaattttttgtatatcatataaaaatgacccggtcttcctgtcagagcagataactaaggcactggtacttacagttcttttccttatgattgaaccaggtgagggaacattttggtagaataaggggggaaaaaacactcacttgctgaccctgtaaaatgaatccctatctatatcattaactagaaagtgcctgtaaaactaccttatgatatggtagagtgtggtgagcagaagccagatttaccagatgatattgatttgtcttgaatttatctaaatcagtccatctatgcttgggaatgctttcacttattttccccagaagcagtagatattcagttttggtctgtccttgattttggaagttcagttgctgggctctggaatgtcaagaagatgatatgggataactaggcaactagctaagcatgttctcaacagtaaatcacttgcacctttacttgccgtgaacctctacatggaagaggcagttttctgaagtaattcaggacacaagtaactgcacatttggggcaaatttgcttatatgtctgggcttctttggtagctcagtaggtaaataacctgcctcagtacagaacataggagaccctatgttcgatccctgggtctggaagatcccctggaaaaggaaatggcaacccacttcagtattcttgcctggaaaatcccatggacagaggagcctggagggctacagtccgtgggattgcaaaagtcggacacaacttagctactaaaccaccaccaccactgtattactttggtgaatatataaatactccccatgcatataaagacctagttaaagggatgcaggcttccaacctacaaagaaaatgacttcacaatgataaaccataccactaacaatataaatttattctgaacctcatgaatataaaataatacaattatttatctgataattcttatttagaatgcatttaatgcattcatagatgaacctgaatcagccagaaactgagatgatattttctgtcctataatattggtgggtgacaatatgtccatgtgacttgtgtgtgcatatgtgtgttggtgaacatgcagtgattaaggaaattaataaattagctttgaagtaagaggtggcatcaagaaagtaatttccatatgtttaaaaatttttagtagttgccgtacattatgtctccacaatgaaatgtttgacttgagaattttgcatttgcacatctagttattccattggaacgtgttatgggcttttaatctacttataacctccaattctcttctccctttcttctcctgcttcagggtccttttatgttactcacccttcaagtatgcttggttcttctccta

SEQ ID NO: 38817 - DNA, 1463 bp, Bovine  19866880746460
  misc_feature (1)..(1): n is a, c, g, or t
nttaaattgcctaagatgattttaaaatgatgggagcaatgaaagttaattataatttaagtgaccctaaattctaaggatagaaaagaacttcctgctgtttttatttagaatcaatcaactttgaaaacaaaaatgatgaattatattattattactgttaaggaaaggatgctgaacctgcacaggatgctgaagctgaaagtccaatactctggccatctgatgcgaactgactcactgcaaaagaccctgaggctgggcaagacttgcaggcaggaggagaaggggacgagagaggatgagatggtcagagggcatctctgacttgatggacatgagtttgagcaagctccaggagttggtgatagacagggaagcctggcgtgctgcagtccgtagggtcacaaagagtcagacatgactgactgcctgagctgaactgaaggagggaaggagcaagggcttcttggtgggtcactgttgaccaaggagtgtaacagcagttctccccgaaggctcggctgtgtctcacccccaaattaggagctgtgtcttctatacaagaatggccaaggataccctttcctaggagacatggtctctcttcctctggcttcttctctgggaaaatagggaatatatctaacaaatagaattactttaaaataaaaagttaaatacttggttactgaaatcaaacattttagagggagtttaaatgaaaagtccttcaccttctgatttctactctctctgggccaggaaaacaacactaaaaatattttagtgtttctgataattttcataaaaatgaactcacacacatctttttaaaaatttgcatacaaaggattaaaatatacacggaaactgcttgtttgatggatgaatgaactgaatagtgaatgaagagtcagtcttctgcaaaaaattatttcacttctgacttacatcaggacctggtgtttgtatatcctcagtaagaattgagtttcaggaacttggagagatacatggagctaattcctccatccctggcagtctcctttagtcaacaaggaaaggagacataactgggacaaaagttactgtgaaatttcccttggagcaggaacttgcaccatctcagcatacccacccattgcattgctcaacacatctcttatttccaaatggtgatttatgtttttgctgagctgctaagtactcaatcagccttccaacaactccattagttttccatctgactaattaggaaaaattggcttgaggcatggatgtgtgagaaaaaggaaagagctttttttctacaacttaatagtctcataactggttctcttttgtaaatagggaaattaataacatcaaagcctcttctactccagaacaattattcaggaggcaatttgtctagctggagtgaaggcccctcactgaggcatctccacaatttatatcct

SEQ ID NO: 38818 - DNA, 2798 bp, Bovine  19866880816815
  misc_feature (1)..(1): n is a, c, g, or t
ntgtttttcctctttttcttaattctctaatttctttctttgcctcaaatcacattacttgcttattattttgttaaaagtgaaatgggaataataaccatcgtacaattgcatcgtgtattaatttgttaattttgctgagcaattgagggaccaaagcactaactgttatggttgtctgccgaatgaagttgtctccaacaaagcatagagaaggagatgccgagttacagtaaattcaacatgatgctgctattagcttaaatgccttagctaaatggtagcaactgagatcattaactttgctttcatagctattttcttaatgttacttagcaacttcactttgaaaatacccatttcacatccctgtagcctaaggagtatcattagtagtgaaattgcatgtttgattgcatagccagagaagagttaatggtatatcctgaagatctatcaccagctacactgagacagctcagacagcatgcatcgaatgcataggccccagaaacagagcccaataaaaggataaaatttatccaccatgaattcagaatatgaaaggaatcatttctatgtgtattatgttgcagaataccaatatccatgtattattgtataatgaatccatatatcaacaagttttgtataagatcaagatgatctgaaatatgaaaatctaaaatgtaccaaatattcctgctctgaaaaaaatgtatgaatatttcttactataacctagggataatgttgcctttaacaaatgtaaatgcatttggtaatatgaatacttgtctagggtgatgacttcttaagaaatcagcacaatataacaactatagaaatgcaaaagtaatcaaaaggttacagttaaaccaattatttattctttcttccaattttatgtattttttcaattgtttataattagtatgtatagttttttttttttttgagagataagcaatcatattttctcccagaaaagtattttaatccaattagtactcagtagctacagacaagcactcaatatgacaagcactaataattattcaattacaaagacagagttttaactagccttatcatctataaatatgatgcttttatattttgaggtacaaaggcattttctgttcaatctctcttaccagagtcattcgtttttcctaagagaagtaaaaaagcaaaactacttaactactgttaataagttaactcttcttccatgacttcatccagtaatctctggttttctgttaattgtgtggcacctctcccactggtctccttttttgctcacttttctttaaatatagatattctctaagatttacttcctgtcttttgcttacacactatttgctttcactgtcacatttgtatagctgatacttaaatcagtattcatcttttcacccacccatccatctatccaaatatttattcattcaacatgtattgagtgctactgtgtgtcagataagtaaagcaagtggtgggaattcaaaatgatgaagaaacagcccctgatttgagggataaacgaatgttggaaatttttatctgtatgtagactgacatccggcaaagttcaacatctaaaattaagcctttgcttgctgctgctgctgctgctaagtcgcttcagtgtgtccgactctgtgcgaccccatagacagcagcccaccaggctcccccggtcctggaattctccaggcaagaacactggagtgggttgccatttccttctccattgcatgaaagtgaaaagtgaaagtgaagtcgctcagtcgtgtctgactcttagcgcttaacccaaactgtatctccagccaccattatctgtttctgttcatgattattttcagtttctggtctcctgaccctgtcctccccatgatgcccaccaaaatcaatctccactgctgcctacagttctctgttacttcacatcaggggcactttggtttgctaaatatccttatttgtgaaagattttaaaactttattttggtaaaatcacgatgagacaaacatttaaatatatacagtgtcttctatatctaatgcacacctctcaagtaatagtattagctggcatttctgaaatttaatggtgagtttctatatgtcacgcactagactaagagctgttcattcttatttccaaaacaaaaacacaatagccttatgacaaggattctctttttatcacctgtttagaggcaagaaaacagttgattaaggtcataaagctaaggaatagctgctgctgctgctaaatcgctcagttgtgtctgactctgtgcgaccccatagatggcagctcaccaggctcccctgtccctgggattctccaggcaagaacactggaatgggtaaggaatagctatccaggtttaaaaacaggaggttagatttcaaagtctattttcttaacttatctcctatagtccctataagactaaattatctttgtttttcttctgttagttatgcccctgattctaaaaaatatacttttcttttttttaaactgtagacaatggctattggctcctctgtaggaaagaagacagttcaactcattttccttaaattccagtatttttcctttccaaatagatatttttagataatttgtattttatttagatctttattttagtttctcaaaaaaagcatattattcagtaatattctatacattgccttttcacctgaaaaacatcttgctaacatactacgtctgcacatttcatttcagttcagtgctcagtcatgtccag

SEQ ID NO: 38819 - DNA, 1472 bp, Bovine  19866880936591
  misc_feature (1)..(1): n is a, c, g, or t
naagatttccaatcacccttactcatgcttctctctgggcctattagataccattatcagttgattatacagggtttttcattagctacactagactagtgaacattttgatctcatataggagggcatgaatattgatttagtaaaatgttcattgatgttgggaagaaatgtcctataggagaccttccctgttctgatctctgatggtcagtcacaatgatgtgagaatcactaaactgaaaatcctgtattttttaattcttcagattaaatagagggactttttaaatagcctagattggattgttcaagctccaagagctaaaccagttgtagagagaggtaccacaagtgaggagttggatgacttaatgacaccttcccaacaaaagagcaaaatctatcaatattttctggtgccatttagcaaagaagttaggaaggctaggccaaagacaataataaaactgggagattttctcaaacctcgggctgctttattttgtgtttgattttgcccctatgcctagtttcctattggggttaaagttgatgctgtatggcatcttaaaagaaactgagaagaagctggaatattggctcttcaaagaaagaaaagagtgaatgcagaattcagcttagaaagaatgtgtcatacaagaaaataattataagaaagaaaaggtgctagaagcatacttcatttctgcttaaatgtaactggaaaagatcattccttttaggagttaaagccagttttttaaaatatgcttggaataataccaaccaatggtagacgagttatttttaaaacaacagagaatttaggacaaaactaatatcaaattcctcttacctaaaagcaatgcacacgggcatttcatgggaaacatcgactattccgacagcaaagaatcactgacaatttggtttggaatgtttggtccatttaataacagtgagctcccttcactcaaaagaaaaacaagtgtgttggtttacatttaaagacagagctaatgtcaccataattttgagtgaattaatttgctctgctatagttataattaatgggtatgtcctgcttgtgtattttaagtgagtatctattatatgggggtaaagtttataaagaaagttgttctgccacaagagtggtgtttagccatgatgaaaagtctcaaagagagcatgactaattattaaattcatagatgcgagaagagtcactgcattcacaagtgtcatcttttcataatattaatgaatgggttgatagtaccagtctatctaaaaggtcactccagctgtgacattcctttggtaatccttccatcaatattaagacaagagtaaatgtcatgcttgtgtgtggtttacttttaaaaccatttagcaaaggccaagccattgtaattcttctagccactcaatgtagaaggaagccagggattatttttatctccctt

SEQ ID NO: 38820 - DNA, 1949 bp, Bovine  19866880993525
  misc_feature (1)..(1): n is a, c, g, or t
naatttgaatctgagacatagagagactaagtcaactatctgtggaagctggacttgtaaattcacatatttcagggatttaggtacttggtgaagtcaggtcagattttgtctcattagagaagaataacgactgggcttccctggcagcccagttggtaaagaatcctcctgcaatgtggaagaccctggttggattcctgggttgggaagatcccatggagaagggataagatatccactccagtattcttggacttccctggtggctcagatggtaatgaatctgccaggagacctggcttggatccctgggttggggagatcctctagaggagggcatggcaattacttcagtattcttgcctggaaaatccccatggacagaggagcctggcgggcggcagttcacggggtcacggagtccaacagggctgagcaactgagcacacgtgcacacaaagactaacagccttccatttcctgtttctctcaggagacctggaagcacttcctgcccttgagctttgcaagataccctgaccctttcaacacattctctttctgctcaagctagttgcagagagtttctggtttttgaaatcaaaccattcctaagttatagaactataaatttaagtgaaaagcaacccggaagaaagaaagccagtactacgcagaacagctgcaaaagatttagtggtccttactgatgacacaggtcaagttcaatgtagctaaatcttctttcccaaactagtagctttcctgccagagaaccagtgaatctctaaatcttaatgttagttttactcttttctctattcctcctgttcagtcaacaagctttattattttaatttatagttggtgaaatatatatgccaagggagggaagtcatgtagctcacagccatgggtctagtttccaggacatgcagggttagatggcttaggtccaggacctgccctatagcccttcctatcacctcttcatttctatgtctataatcctatagcagaataaaacagaatgaaaaattctgtataacagacacattgagaaaatctgtccttaaatagtagcagtttggatacatttcagggttcagtctttggccttttctgtaaacatgcattaactacttgacctgatccagtcatattggctttaaatatcttctatatgctcatgactctcaaattatatttctagctctcatctttcacttggactctagagttttatttcccactgtttatttgacatttccccctggatgtttattagttatctcaaacttgacaggtaaacagccaaacctaaaaagagtttattttctcttaaactattctttcctgatgttcccatttctgaaatatggcacctccattcatcagttattcagactccaaacctgggaattatccttaactttcacattccacattcagactacaggcacagcatgtcagttctaccttcaaagtatcctctgaacctgaccactgtcccccactcggtcacttccgctgcagtccaagccactgcctctggcttctactgcccttgtattgtccatgagcaagactttgacaaaatatgtttctatactcacgaatatgatgcctgtgactttcctccatacagtatcccagtggttgccaatcacacatggaaaacaatcccgaagtctacaggccttcataatgaagctctgattacttctctgccctgatttcttgtcccaaatcatctctgattccttgcccatccacatgagcctctttgctcttcctctaacataataaaattttcttttccttgggcttttgtattgggggattcttctgcctgaatggctctcctctgtgttcaaatgtcccatctccagatagcctttgatctcctttcctaacatagtagtcccatgcccttcatctgatct

SEQ ID NO: 38821 - DNA, 2959 bp, Bovine  19866881016233
  misc_feature (1)..(1): n is a, c, g, or t
nggaagccctatcctaatggttgagcacagacaataaacacaaaacataagtttaaaaagataatgacttcatgaataaaataacataattctctacagaaacataaatatttagtagttatcagtataacatatcttaaattttggactagactagaaaagaatgtcaagaattataattttgagaaatgtcctatgtcaaacaagtcaggtggcagttgaagaataaatcaaaggataatgttttaagatgggtaatactaagacatgtttgtatgctgatgataatgaaccacatagtgggaagaatgtatgatgcaggagaaaaataggatattcacaaaagtggagatactcaaggtgataaattgcagatatgaaggccaccagattgatgactttggtggataaaatgagaggatgttttatatgattacatggattttctctaagaattagggggtacgattgtcatctgagagtggaacagaaagtagtgttagttgatggcaagttttcatgagatagtagagctggatgaataggaatactttaataagtgcaaattcaacaatgggaaatacttgactgagggtggaatgcttgagatcatgatggcagagttagttacattttggaggatgacatttcatgaatgatgatgtatggagaagaaagcagtggaagctgacaggatcaagaactaggagatcaagatgctagatggattctctctatgaatgttgatgtcttcaataattaatacagagttaaagtggaaaaacagaagctatcaattaatggattataaataaataaatgagagtttaatagatggcatcaaaaaggaaaaaatgcctgagatcaaatatttttagaggagcagggagtttggaaagggtaaaggaaatgaatggtttagaatcagcaaagaatgacaaccgcctctaggtagtaataaacataagctgtgtctcccaaaataagccacccatggacagaattctcaaagatcagctaagtagacttttgagaagagaggtgaaattataaagtacacatcttagaaaattagaaagtaaaaatgaaaatggatactagtctctagctgtgagaggaacagttttgaaaattgtgatttaaaaaattaaaatgagtagtccctgcagttgtgagattttgtccagggatcttcaagaactgggatgatgatgttgaataagatattttaaatgcgtcttgtgattaccttcaactgaccggcggtggtggtttagtcgctaagtcgtgtttgactccttgcatccccatggacttcagcccaccaggctcctctgtccatgagatttcccaggcaagaatactggagtgagtagccattcctttctctagggagtcttcccgactcagagattgaactgggtctcctgcattgccggtggattctttactgctgagccaccagggaagccctcaactgacaatatattgtctaaatactggctagatagtaagcactgtacatgagtgactaaatgtatacctaaaacacacactcttcatctttcaaacactcatgcatgcttaaataagaaatatagtagaagttgttattttctcaaacagtagcatactgtatcatacaatattatcaataaaaatcagattgatccaattcttacatctttggttaggcttatagcatgtcttgataaatgttctaggaattatcctggcaaagcagaagacaagttcctttaacagtggctggtgatgttgaaagaagaaagaaatgagattgtttctgtgactaccctagctggtaaaggggatattaacttgaggtgacaaaagcaataactctgagttacatacaaatgaatataccagtcttttaatcttaaattgctatataacatttttagacctcagttttcttatctggaaaattaggatttttggtatctactttgcagcatttttgtaagcattaaaaacagtaagagatagtatcttaatcacatttctacagtgttgcaagtcctaataaataatgcctgttgatggctttctgttgttttctgatacaggcaggagttacgtcagtgaacatttgaatgccaaagctaaaatctctatttttatcatgagtgatcagtctgtttatttcactcttctaacctatcttaatgatattagcaggttgtattctacttctaaaataaatcctgctgactcttaaaactctattttatctactgttattctttagtatttcagcagagaaagaaaacattttgtattttgctgattcatttctactcttcaagatcatagagacattgttaatattttttattcctctcaatgaaccatgaattttcaactcacagaggagaagaaaagaaacataaatgggacaggagagcagtgggatagagaggctcacttggactaacacaaagataaagagaaattggttctgtcatctcaagtagagagacttgggagactttagggacagaaatttcaagataaggcacaaagaaaaataccaggggcataatataataaccttaaagtatttttttccctgcgagttttgagggacagtggcattttaaatggattttaagtagacaaagttaaggaaagtatgaaggaatctttactgtgtattgctgatgttggcagataacaggattaagttttaaaaaatcaaatcaatatactattatcaatacattatgagttttgaagaattaatttatctaaaaaagtgttttaatgaatataatttgtatttcagtgaataggcagaaaagcattaatcatgttgaaaagtgatcagtataacttcacctttctttaacatgagaaagctgttgattattaatcctctggagtagagggaccacagttttatattccacttggtagccaaaggagaaagaaaaat

SEQ ID NO: 38822 - DNA, 1193 bp, Bovine  19866881071889
  misc_feature (1)..(1): n is a, c, g, or t
nattcttttccaatgagtcaactctttgcatgaggtggccaaagtactggagtttcagctttagcatcattccttccaaagaacacccagggctgatctcctttagaatggtgtataggttaattttatttaaacgtcagagttagaattgaatttaggttgtggtaattttgcttcaaaatatagagacataattttaaaatcatataagaaattaatgtctgcttaactttcgctggtgtacttttctggcttttttatttcctctctataagcaagattagtgacctgcttgtattgcttgagaagcatcacaaatttcatttagaaagatctcctcattaatagaattcttgatgtatttattaaacacagggaacagatcatgttttatattaatgtcattaattctccaatccatatttttagttgctatttttgcaactgtaaacattaatttgcaggtacaagggctacatcactgttctattagttttgaatttttagcagaaatgagatacgattgtccattaagatacagtccaactgtgaacacaaattattctattgtgtttaataaactaccatgatgaatttttcacagtgatttgttatttgtttaaaatgccagataattaaaaaatttttcatctgaaggaaacatagctttgtatatgtcatttgctcagaatcttagatgcagaataaaattgtgtctatattactgaatgctttatatgcttattgaggacttgcatactttgttatgatcttcaagtataacagaatactccaaaggctctattttattgttgaaatgttgcaatatagatccattcatttgctactggaatgataatatccatcttttgtgttactactctttccatgagtaatacgtattctaatttttaccttaatctctgatactgtatttatcatgattttttaaattttattttatttttaaactttacataattagttttgccaaatatcaaactgaatctgatactgtatttatcatgatttttgtaaagactttcactgtgaatactggccagttttcttcaggctaccttatttaagaaaccaaatcctttaggctgtcatgatatacaatccaaggcatatggactatgactttcggaaggtcatgtctagcaagatgtaggtcctattcctcaagctaa

SEQ ID NO: 38823 - DNA, 1177 bp, Bovine  19866881077308
  misc_feature (1)..(1): n is a, c, g, or t
nttgaatataaattaatttggtttcttatcaagaggagaaaagatgtatttaatagaattcccaaagtctctttgttacttgataacacacaaaaagaaatatatgtatccaaatagtttgctcacgtggctaggaaggagttgtctaggatggcagatttatacagatctagtgtgaatcatggagaaggcaatggcaccccactccagtactcttgcctggagaatcccatggacggaggagcctggtgggctgcaatccatggggtcgaggggagtcagacatgactgagcgacttcactttcacttttcacttttcactttcatgcattggagaaggaaatggcaacccactccagtgttcttgcctggagaatcccagggcggtggagcctagtgggctgccgtctgtggggtcacacagagtcggactcaactgaagcaacttagcagcagtagcagcagcagtgtgaatcatggagaagacaatggcaccccactccagtacttttgcctggaaaatcccatggacagaggagcctagtaggctgcagtccatggggtcgcatagagttggacatgactgaatcgacttagcagcagtgtgaatcaacagaaggcacagcacatcagctcataaaaagcaatgagtaattacatacaacgcatgtcaatttgccattgtcaatttttaaaaatgaattacatttgagaacagaaattattaaagaaagcagaaaaactattatatcattgtctccatagagtctaaattatcaccaaccctacttaattattcagtatgttttaaaaatctttaaaaggaagtcaatcatgtttagctcattcactgtaattatttgtaagcagtagaaacaaagcacagactctcagttaattctgtttaaattctaagacattgttcagacctactgcaaagcataaaagacatatcagtttctcagggcttggactagggtgaaattgtataggcccctctctgtaaccacgctactcttcagataatgcatagtgctttcatcaatagaaaatggcagacccatggctttgggaatgtgatttctcttggaaatggatgataaatcacaattatgtaaactaaggaaagacataacctacctatagccttcataataatgatcatggcaagaggaa

SEQ ID NO: 38824 - DNA, 982 bp, Bovine  19866881206226
  misc_feature (1)..(1): n is a, c, g, or t
ntgtagtacaaggatgtttataaatgggcttgctttcatcctaaaatttctacttttaacctttggcttgatatcttgatttctcaattccctaatatcttatcatgaattattttagaattttctggaaactctcatcacctctaattgtttgattcttaaaagctctgacctcttacctttgcagcttcttgctcaactctgccctcttcaattgccatgttgtccattgcttgtaactctaattttctatttttattttatattctgtagcttggtgttcccacccatgtttaattaatcatcagttcctattgattgctcatcagtaactgattctcccctggaacattgcaatagcctcctaactagtttctctgtacccactattggtaaatattactaataacgatgccaaatgatgccttacctatgtgagtatactgctgaagactctgccatttcttctcattgcttttatgtgaaatttctaagtcctaacaaatggaaagtttgtcaccactttgttactccagcttagttaagtattcagacatcatcttcagggaatttttttaagccaatgagtgggtttttgttatcatattgctttacacacattttttgtacttcactttcatatattacaacaattagtatatcattttctcattccatctagaacacaatatttatatattgaatattttaattaaaaatttaatagctaatatatgaaagagtatcatgttgagatatgaagttcacaacagctatttgttttctgtttcgtttaacaaggagccagtatttgtctgatttcttagttatgagataggtctgggtgggtgtctgtttctcagattgtcagaaagtagtgggggtgttgaaacaccacttagacacttactgcaaagtgatactttaccatcagttagatcaatatggtctgtgcctacatcccaggagccaaggagagcag

SEQ ID NO: 38825 - DNA, 1568 bp, Bovine  19866881232862
  misc_feature (1)..(1): n is a, c, g, or t
ngaattatagccagatagacttagaaactcccacttaagtttggatttcttttctctgtcttcctttttgttttgtttactttggttatctgaataaagctgccaacaattgtgggaagacagcaccctagatccatgtgaagtttcacccttgactgagctcttccatcttcagtatccatttaaacaaaatagtactctctctaggtgtttatcattcccattgtataaatgaagaaggagggccttgggaaaatgaagtgatatatataaagttactccagttgtaattgacagaggcatctcttaaatgtgaattttctttccataccccatataacaatgtttccctaaaaagaccttagtcaagcaacataataaaatgagttggtcaaacaacataataaaaagacttggtcaagcaacacaataattccattccttccactgttgaatgctcaaatattatgtctatgcattccataataaaaaaataaaatgaagaactattctcaaaagagttgcatggagttaccagggcatgttgctgggaaataaaagatctgtcttttcaatgacagtatgtgcagcatgtttcttgttcaaatgtgaccctggaagtatagattgtgagattggaaaactcttatattttgagcatttcttaataagcaattcctcaaggctatttatgtatcagggtttgctatttcttccttttgctgcttgagctctaaattcaggaaacatatagcttaaaggaggcttaggaagggataagcaattcgaaatgattaactaaacaagataatttaatcagtatgtctctggtctcctgatagcaaataatacagagaattaacaattaacaagaaaatatagtgacctcattcatgatcagtaataatgctatctggaccacatgaggtccttgacttgactgtttacagttgctttggaattttgtctctcataaatttttttcaactctggagaatttcatttaactcttattatactgtactaagaattaaccactgtaaacggtaacgaaattacagacatcttgaaccattgctgaccctggagttgacataggaaacaagaagcaaagaataagattacagaaaacttatgttacagtgaagggcagggatttgcaaaatagataccagttctatcaagatatcagttcctcagctataattggatcttgcatatgtgtgtacatacgtagaatgcttaaatcattagttattctagtgagtgaggattctgatccaacagatgttatgcaaaatgtgactcttttagcaggtatctcacttgaaaatgtttttctaaaattcaccacacacttctgcttgtagagttttcctcctttgtcattgtaaaagataaggggtataagatgtgagggtataagggtataagatgtaatgactgaagacttcgcctttggccagtgaattcaatgaatatgccaagagcaaatcattccatccctgtctggaaacccgttgtctaaagctttattcctcatatcatctgtcactgataataaaagt

SEQ ID NO: 38826 - DNA, 2063 bp, Bovine  19866881263380
  misc_feature (1)..(1): n is a, c, g, or t
ntgaggtttttctcctgtcttggatattatatataatattggtatgaacatgggggtgaagatatctccttaacacggagtttttacttcccagaaatagaatgactggatcatatgatagttttatttttaatttcttgaggaatctccatacatttttccatagcggcttcaccaatttacaaacccatacatgggtttccttttctccatacccttgccagtatttagcaatttttgcctttcagataatagccattactaacaggtgtgagatgatagttcatggtggttttgattctttatttctctagtatttagtgagtatgtttgagtatgttttcatgtacctgtgagagtaatttgaaaatatagtttaaaaaaaaataaaactggaagtctttggtttgacacttcccaaactattagaaatggaatatttttttgcccccaaacaaaacaaaattaaaactacaagaatgatggttagttttaacattagtcagcatagagaataattttttcagtgtcgaattataacaaatatcattctagcttgttctgtttaaattatatttgtgttaacaggatatttagctcattatcatatccttaagtttctaaatttttaaaatatttatatgacaattttaaagttctaccaaaaatactccattttttagataaatatatactaatgataaacttacacttgtgtgtttatggctatgtcatttagttagcaaacagtaagtgctggccatgtaataagtgctttacaaacagttcatttaatcctcacaacaaatctatgaatgaggtattattttgttaatcccatgttataattgaagaattcaaagaacagagtggttagatcatttgcccaaggtcccacagcaagtaatggagccagaatttggactcagaatatgtgtactcctaactgttctgctctaaatcacgaatattctatgaatctcatttgcttttttgtgtcaatggctcctcataatgtcttcctttaggtgctactattaaccccatttgcatatatcgcaaggaattaagacttaaaaaggcttacatgatttgctctaatctctgccctgcaatatttttaatttaaccaagtgagccttctatcttatgagacagtagaatctacttttactggctgtatagttagtatgtaatatagttatacaagtaagagatcatgaccaaccccgatcttgagtcatcttagaaggttttgtttgcactacagaaaaatgcctgccactacttttgggagcttgagaaccacaggaagttttacaaacatctaaacacctagctagaatgggcagaagacaggctaaaatcattatctgcccctgcacttccaacaaagcaaaactgaattctgtttggcaagtctagtacaccatggttctagacgtcaagaaagagaatgttaatgccattgacatctgcaagaaattggactctcctaaaatataaaaaaaaaaaaaaaaaatcaaacacattagtgttttaaaagtggatttatattgcttactgagattatgaactgataaaacagaactatcagaagcctggctctttttaaaatacagcctgtttcactgtgttctttccttcctataatctctttatgatcaaatgtagaatatttcagcctgcaatttccaatttaattcttgtcctgatttgagctattaaattggactccatttcagcaacaactgagcccctcactgtatctttggttaccaacgactgtggatagccatctgcttggatgattttcaccatatgtgtttaaagtaagacagtgttttatacatgcttgatgtaggtaatacttgaaaatcataaaagaagaggaagatcagagtaagctgtaaaattgtaagcaaaattgaaattataaaaacatatttgaaatcccaagactgagtagagtttacagcatgtattttctatcattcccaagaaaagtcaggtacaatcgaaaatagttcccaaacggaaaaaatttaatcctttatcaatta

SEQ ID NO: 38827 - DNA, 743 bp, Bovine  19866881366686
  misc_feature (1)..(1): n is a, c, g, or t
ngttgacttatttgtggtgaaaattaagctgcggaattgtgccacttggcttttcttcaacaccgagtacttacttattggtcactattttatgcttcttttgccatttacctgtttgttacttgaggaaaattacactttatgcttttttactctcttctgtgaaatgccattatttcctgaaatggcttagttccacttaatagtgaagcttaataaagagctctgttttctttgtttcaaactgtcttatataaaacacaacagctgcaggacaagaacataaatgaatggtattactcagttcacagccttcaaatactgtgactcgttaaaaagcctgatgggtaaattgcctggtatctcattttcagtataaatggaagacaaaggaggtatatggcaatgtcctttcagcctagacaaaacttccacgtcacataaataagttatttttgtctttgtcaatgccgacgaggggcaactttattttaaattattatttttattatatttgaacctcccatatcaatataaattctgcctaactgaagataaggattctcctttaaaagaaatgattcaaaatttttcattatcaaattaacaaattttaagtcttttaccttaggaaaagcaaaaatgttctgatggtaatcagatctttcattatgtctctcttttgtagtctcaaacttgtaaacattgggccaaattcaagaataaaatagattaagagaagg

SEQ ID NO: 38828 - DNA, 1623 bp, Bovine  19866881424134
  misc_feature (1)..(1): n is a, c, g, or t
natcaaggtgcaggtgtattcagtgtctgaggacctatttcctagacagtcatctttttactgtgacctgacatggcataagggggaagattgtgctttgagaactctttttataaaaaccctaatctcattcatggggggtcaactctcatatgtattttcactttcagggttaggatttcataatttgaattttaggggaacacaaacattcaaaccatagctgaatcaaatgaaaagattgacctaaagtactgaccatttgcctgtaaaagaaaaactgtcaaaaagagacacctgtgatgtttctaacaattacagagtagatcagagcagcatttcccatgtagattccatggattgttgtctggaaagcatatagcacatgacttcttcaggtgtctggatctttaccatggctgaaccttttaagatattttcataagtgtctgttttcagttattaccagtgtctcagtattattcaaatgtagacatgatgttactggcaaatgaccataagtaagagacagacttttaagttttgtgtttcaagagtgatggttgtaatgctgtatttacattttcttaccctatgtctctccaactttgtgatttatatctttggcagaggtacacatcatcccagccacaaaacagactagtattaaacctgtgtctctggactaatggcctggtgctgaatgagctttccaaagcaaatgacctgccgcagtattattacatgttctcttaaacaaattagaggatcttatttcaaataggaaatggctgatttattttaaacgaaaatattttataatactttcaaatttcaaacatgatattaggtaaatgaaagtgaatatttcagtattacaatatagcagggggaaagtgattatgtaaattatgtacatactgataggatagaaatctgcatattggaatatctacttcccttgtattttttatagtatcatcataatacaataaaattagtgccctattgcattaaaagcacatacttattagtgaaatggccagaaaaaaataatctctcactcagggaagtattagcatgagatattttgtctaagtgtgtatatcacttgaacttcctttgaactctctgcacttcttgctatttatgacaaagaaagtcattgctcacaaactattgggtttgcctttgaagcagcaccaggagatcagtgacaaaaggcagagctgagattagatgccgagggttattgtcttgctttggtcccaaagctatgtgaaatgtcagctaattgaaaatggtaattatcctacacaacaacctaaatggtttcattctaagctatgtgttgcctttaaattaatagtcattgatcttctggtttttcacaattctttcctgtccttttgtcaaattatccagctatcagtccttggaacaaaacctatctcaccatttttattgaccatggtttaatgagtgacctgaccttcctgtttggatagactgtaataggtccatccatctgaggatctgtcagccagtgccgtgtaaccttttactgtatatttggtttcttggtagaaaggttttaaaatgaaaacttcaaataattgtttt

SEQ ID NO: 38829 - DNA, 756 bp, Bovine  19866881426582
  misc_feature (1)..(1): n is a, c, g, or t
nttattttcatgaataatattggtatttttatcagggatgatagcactggctgctgctgctgctaagtggcttcagtcgtgtccgactgtgtgcgaccccatgacggcagcccaccaggctcccccatccctgggattctccaggcaagaacactggagtgggttgccatttccttctccaatgcatgaaagtgaaaagtgaaagtgaagtcgctcagtcgtgtccgaccctcagcgaccccatggactgcagcctgccaggctcctccatccatgggattttccaggcaagagtactggagtggggtgccatgccttctccaataacactggctagttccctataattttgttgagctgtcccttgggctaatagaatttcttcttaaaaaataacgtacaaaacatttaaagtttgaaatactaaattaaatatattaatttataaaaatacacatgatgactcagatatgcaagccaagctaatccattcccatttaataaacataataagttttacagtctctcttgcacaacattctcagatattctgacaatattttaggctctaaacattagctacttaatattcttcagttactgaagtaaaacaggcaaattttgtctgaagttaattttcacatttcattgggagaaaaactacctccttctccgtgttcacattttatttgatgcagctaatttttagcaaatactagtaaggaacggagaaggcaatggcaccccactccagta

SEQ ID NO: 38830 - DNA, 1509 bp, Bovine  19866881518698
  misc_feature (1)..(1): n is a, c, g, or t
nccctttcaactttcatatcctgtgattaggtaatattgtaatgtgctgtgccatgcaataacagcattaaaaatggtataaaagtttagggaggacagaaatcttatgataacctatttgaatgtttaaatgatgtaataaacattttttttaacaaaactagcaacatctgttcacagagactacaaatatatgttgccaagttctgtacagcttggcctgtatcacacactggaaaatcaagaatgagtaaagaaacagttaaataaacagtgtgaaggcagagtgttgattcatgtaatagagacaggacgctatgaacacatttctgaaccacaaggtgaagtcactgaaactggctctctgggggaagtgagctgaatcaaacactgaaggaacagcaaggcgggtgaaggcagcaggtggcttttccgggtagacagggcatggatacaggatggtactctggtttccagggcactgtgaggagttcggaatgtctggagcacgactgcaaagacggtgaaggcgctcagccaattctgctgtatcgttccattaaaccacaaacaggctgtttgtgtgtctcatgaatcctttgtatggacagacatcgtataagaaatccaactaatcacccttcctgtaaaagtacggaaggctttattttgtaaacaaacatactttccaaataattatgtttatcaccaattccagtttattgacagccctgtctctgctcagaattgaggaggtccccagctcatgtctctttgctgtgtttcagatcagatattctgcttgcctaatacagattagcagaaattgaaaaaggccagtggctctctctctccccaacctaacaaggctctttagatctgcatttcaaacacccaacactctgtcctaaagtgagacagaccttttgtatatccccatgcacttatcatagatctttatttaaacatttctcttgtgaagttgtaatttgctatatgcaggtttgtttcccttgaagggaagcaatagctctgtattctcaagtttatagtgcctggaatcttgtttagatgaatccataactgaagcaaccaatttatttcctacccctccacctggcagtacattatttctgccttgaaaacctggatttcacaatattgtctctgaaacacttaaactctttttattttaataacctatagagacaaaaaagttagagaattaagctagtaacattagttttaatttatgacagaagaataaacactgagctctcaagcccatgagtttatttcttcgtatttttactggatgcctcatattccaacatatgtgtgcctctcaccaacatactttaaggctgtttaaatattctgcttctgagagctgttcaaattgcatatactttcttcattgaagaaatatattttggagagagatttagtgtctagaattttctatatgttttcaaaactaagtctgtgtgcatgctaagtcactttaat

SEQ ID NO: 38831 - DNA, 1854 bp, Bovine  19866880817583
  misc_feature (1)..(1): n is a, c, g, or t
nacaactaactataacttctggttcaaatttccctttgatgtttctatatacacacctacaaaaataaaaagctaaataaattccaagaatgtttctaattctaaaaatgtttgattcaatagcaataaatatttataccccactgtatcgccccttgtactaattgttgaagatagtgtagatactgattactctcagtaaattcagtttactggaggaatcagtaagcgaatcattttaatacaatatgttttctgcaactatagacatcagtgcccggtgctttaggaacacaaaggaaacaatgattattctggggtgcaaaggactcttgttagttattttcccattatccactgcctcttttccactttccagaatgtctcattacaaattttccttgatttatgatggggttacatactaatatacccactgtaaaaagaaaaatatcttgaattgaaaatgcatttaataaacctaagctaccaaacataactttgcctagcctaatgttaaacatgccaagaaaatttacattagcctgcttttgggaaaaaacacctaacacaaagtctgtttataataaagtggtgaatgtctcatttaacttattgaatgctctactgaaatgaaaattgggatggttgtgagtgtatcagttgtttgcccttgtgaacacttggctgactgggatctgaagctctctcctactgcccaggagtattatgagaaagtattatagcacatatttatagcctgggagaagataaaaattcagaattcaaagtatggtttcttctgaatgtaaattgcttctgcaccatcataaagatgaaaaatcataagttgaaccattgttaaattgggaatcatttctatacccagatagccttgtcattctagagaggttgattccatgacacttccaaaatacagcctgagtttgtccagtcaaaaatctcagaatttgtgttgagaattttgaaatacacacgtaatgaataaaggataggaatcatgttatttacattctaattttctctctgaacaatactctaccaataatgcagacatatcctatatacatctccatggttaatttctttcaatatttatcatgaaacatttgattctgatcctcatttttcttaactggatagcatattcatcttaaactgtacacagttctctcactggctctgatggagtccttagcccactaacatcaccttcctgggatgggccccttctacttgactatatgaagtgaaaatgaaaatgagatggtccttaattagactggaataccattaacaacagttggacatgtgcggcttacaagcaatagatgtcaattatatagactaaaatgagttaccaaatctaacacctgaagattgtgcctgttacctgagattgtgcctagtacatatattgaacttaattttagagtctcttttaaaaacaaataacttgtaaatgatgaagttattttattcatggatttgaagaaagaattagaagattaaataaaaatataatgttctcagagaaaagaaaatattaagagtgttaagtttggggaatttcctcatcggggagtggttagaactcaatggtttcacttctggggcctggatttaatccctgattgaggaactaagatcccacaagctgtgcatcttggcaaaaaaaaaaaaaagtaaatttgtgtaactcacagagttaattatttgatcccttactctctaaaggaatatttattttctacaactgatctcatgaggaataaagtatcactttctagtagttcaaggaaattcttattaaagctttcttatttccattta

SEQ ID NO: 38832 - DNA, 1140 bp, Bovine  19866881395289
  misc_feature (1)..(1): n is a, c, g, or t
ncccaaacacgaggagatggtgcaaaacacagaagcctggcatactgtagtccatggggttgcaaagagtcaaacataacttgcagactgaacaacagtaattattgtatatagtagtactctgctgctgctgctgctgctgctgctgctaagtcgcttcagtcgtgtctgactctgtgcgaccccatagacagcagccgaccaggctcccccgtccctgggattctccaggcaagcacactggagtgggttgccatttccttctccaatgcatgaaagtgaaaaaataaagtgaagtcgctcagtcgtgtccgactctcagcgaccccatggactgcagcccaccaccaggtcccttcgtccatgggattttccaggcaagagtactggagtgggttgccattgccttctactctactgtatgctatattctatatactgtaatatataatgctatgtataagacagtatactattgtgtatatagatatatgtatgtgtttatagatataggtatgaagtatagatacactgcaatgccatgtatcagtgacagattaatttcagctctttttttgtccaaatttatatattattaattagcatgattcaaatcatttctggtattataattttggtatctattgcatattataaaactggtccacctattcagaattttagtattttaaatgcattacatgtattcccattatttaatagcccaaaaaggggggaaaataaatgaactattagagtcatttagtcatttttattcatggagcaatgctgttaatgttcaaatcagaaataaatttcatatgtttttcttccaaaggatatgcctcaaattttagtatgcaaattgcccccaagtacagctttctagctgtttgcttttcaaaagcatattgtataaatagttaaaatatactggcatttataattaaattatttttctattgatcatttttattgctctgtttcacattttattctattatttataggacacagtaatgaacttccattgctttattgcattatttggtaaacaatgtaacaaactcgagaaagagagcaataaaattaaggtatttagcaataaagcaattcccggattttaattaaattagggac

SEQ ID NO: 38833 - DNA, 926 bp, Bovine  19866881717502
  misc_feature (1)..(1): n is a, c, g, or t
nataatctgcaaatgctaatttaaacctggagttgcttctgagcaagctgcatgtaattatgaacaagcagcagattatcctcagaagggcaatatgctgtaccacaaatcacaagttgcatttcctcctctttttttctttttttgagtgcaaaatgtgattccaaaaagatgttattaagctataacaccttagtcattttcaagctcttggcacttaaagtgctgaaatttagattactttttttatattctgcctgtgcctagtttccttactgtatgtaaagttattaaagctgtctgttccaatttcttctctacttaggaagatatgacaaaaagatgaaagagactacctttaatctcaaaaggctaaactcaacacagaaatgaaaacagtagaatacataaagacaataagaggacttttccaaagatagtttacattcttcgagtggtcagtaaaaaggcactaaactagaagtatgtgacgacataatagttctgaggctcaatttcctctctagatagttgatactgttttttattatgctacataattgaaatgccacttgccatgtaatgatttgctttacctggggtggcgggggtgaagacatttgttctgtaaattgcattaaggaaaggaaaaaaaaaacacatattaaagcacaagtggcaattagactcagcaatacattttcagaaagtaccctcaaagtctttctcaaaaccaaaagggaatgttgtggtatgatttttctctattataaaagttaaaatagaaatggggctcagggatctaatggagtgactatcttcctaggttccttgacattctgatagcgggcatagactttcattaaatttatggggtgttttgttgcatttataattctcaagatttataactattagattttgtt

SEQ ID NO: 38834 - DNA, 2053 bp, Bovine  19866880342972
  misc_feature (1)..(1): n is a, c, g, or t
ncctgggtgttcattggaaggactgatgctaaagctaaaactccaatactatggccacctcatgcgtagagttgactcactggaaaagaccctgaggctgggagggattgggggtgggaggagaagggcatgacagaggatgagatggctggatgacatcactgactcaatggacatgagtttgagtaaactctggaagttggtgatggacagggaggcctggtgtgctgcaattcatggggtcataaagagtcagacacgactgagcactggactgaactgaactgaagtagcttagcatgcacacacgcatctatgaatatatatgttatgtaattttaaaggtatgcatatataacaaaggtttaatgtatcaatctgtctgcacaggatcatctaaaactttattttttcattaatttatggttgtcaaattaacttattgcttgaatgtatcattagaaactctggtacttcattctatatttcaaaacgtatcatagagtaaatgctgtaacttgaacctggttcctgacttgtgaaaacatcatgtgtctctgctaccaaagccaagagaactgtgccaattacatgcctgaacctgtttcagtttaattacatggattactgaagcagaaacaacctttgtgcttaattgacccttataattgtcttagttctctgctttgcccttcttgggggtataattccatgtcctactattattaggaagaaaaattcacttccttttttggtaactccaaaaaaaagaaagattaaaatatactttagtgctcagagaattaacattttatcagcctctgtagctagagagtaatatactgagcaaaggggaaagagatgacccagagtcacctcattatcctcatgtgagagttgagttacctcttacacttgtttttttttttatttttatttttcacaaccaacctcagtaactcggttctatcaatagtgacctttgagcatctcccaatttaagatatccaaagcccacatagattcttgaactctgcatatatttgaatctgtgttgtaaaggttaggtctctagtcaattcatgcacctgcagggaaactcaaaatggattagtcaacaggaaaagaatgcttactcttcagtctctcaaccacaaattcaacttttccatatagcagtccaaaacctaagaacttcaactaaatggagacattaaaagcacagacgtcattatatccctaatatttcactcataatacctactcagtaattttttcaaccagttaatggaaaagccagaatggtaatgtcatgcatgaataaattatgattctctcaaattacctttttggattatcttttatgaaagaggtagacaaaatttatgtaatgccactcctttttctcctggacacagtctgtgagaatgtgtgttaagcttttagtaatcaattttaactacgttaaatatatagaatatacaaatataatatacatacaaaaaatatacaaatataagttgagagttttaaaactcagaaatatttcacagtttcacagtcccaattcataaagccccgcatcatttattttcatccattccagtgtttgtccatttgtggatttttgtcagggagtattgagcacatgctctctaccagcactgtattaggctttgcagactcacaggtataaattagattgtctgtcctcagacaggtgcacacagatgcaggagcacagacgacagcttttagccataatctgtcctgaaatcctctggtatggattcccagtcttcttaggcagcctgaaaagatggatcagggagttccagctaccttaaacaaatactgatgacaggaaaagcacacttgagaaatgaagaatgtgatgttgagaatgctgagggtaagtgggggaggagcaggagaagtagacatgtgccaaactggacatgttaatgattttgaattaaattctgaagatgataaaaaacaaatgaataaatgcaagaatggacatgagtttaccagacttactttttagagt

SEQ ID NO: 38835 - DNA, 1659 bp, Bovine  19866880442925
  misc_feature (1)..(1): n is a, c, g, or t
ntctatgagagttactgtgtttatctctgcagacctttccactcccttcccagaaactttcggacatacacttttcctcttttcacaatgggtttctgactgacttacaggggaaagggtgacagggtggagcatcttgacgattccagaaaggcatctctttcttccctattaatttctgcacaatgcagtttgaagtggagagacactgggctgagcaaaattgccagctcgccagcgggggaggtgctcctggaatgtgttgaatgtgcattctttagatgcttgggaggggtgactgcccccttattggcatctacccatcttcactggtttggctgcttcagtaggaaacaggtattattttgaaacagtgaattctctagctcttaatcactgacagtagactgctcttaggtttctgaaattaggcttttaatgcaaagtgacattttctgtacattttctttggtctcttcaatttttgtttattctgttttaaagaatgaagttgaaagtgtcatctcatcttggtagaagattttcagtcatgagtaagacaccatacatagcaaaggaaacagatagattagtaaggccaggcccttttcctccagattagtaagcattgcaaatagactcatgctatttattgacaattacctatttttcattcctttagcaagatattttgtcattattaaatgtcaccattttccatggttgtttcctttttctgaagaataatttaaaaactatgaaaggaaaaataaatatttttctccactcaactagtttttctttaaaagatttttttaaaacagcagatgaacttctgatcaaaactcaggcacacagctgccttctagaacagtcttgcaagttcctgactcacgctaagccatcgtcatgccatactgcactcctaccccagttcttcactcacctattattgttaatgtgcttgtgataactgtctcttgaggattctcttaggatcccaagttacataaatgacagtgagagtgattttactaagcaagccgtttaaaactatcatgggtgaggctttatatagacttttgtttgatattcaaattcatgtgtaatatgaacaataatgaaaactaattagtttagaaatagtattgcaatatttaaacttccattaatttgcataggcttctgcctacctttttctgaaagagtggttatgtactaaacattcagacataaaagggtaataaaagaacattaaaaataaaatgaaatagagcgaatgaacatgcacactttttattccttctttggaaatgccacagcacaagagcacattgttccgtcaaaacccttatcacattgtattataattactgtttatagtctagttctctgactaggcagagagcttcaagagatcttaacctattaatctttggatcccaggttctgacataatgtctggcaagtacaggatgctcagcataaatccataaatgaaacagaggagaaaatgtgtgagatttcctcaatctgccattaacggtacacgaccacctagctcttagcccccgtgaatctcaccttcttaatttgtactgtgggtgaaataaggagttgtgaagagcctcagaagagatcctgtgtaaattctaaaga

SEQ ID NO: 38836 - DNA, 2864 bp, Bovine  19866880499038
  misc_feature (1)..(1): n is a, c, g, or t
ncaggctcctctgtccatggggttctccaggcaagaagactggagtgggttgccatgccctcctccaggggatcttctcaacccagggactgaaactgtctcctgaagctcctgcactgacagctggatactttaccaatgtgccaccattgtactaaatattgggcattaaatcaagattgtgtgtgtgtgtgaatcataattgcacaaagttctttatagtgccatccaaagacctagttctttatatctcttgtcccctggagttttgtgcaagatcttctctggtggctcagatggtaaagaatctgtctgcaatgcaggagactcaggtttgacctctggatcaggaaggtcctctggagaagggaatagccacccaccccattattcttgccaggagaattccatggacagaggaacctatgggctacagcccaggggatcacaaacagttggacacagctgagtgcctcactctttttcacacttgcttctctgtggctaagcacacatcccttctgccaatctcccttggcatatggtagtgatctccctttacgatatcttaaagatggattaagtgaggctggatttgtggattctgcctttagtcctgtcagagaccagtgctctctctctctcctttgggaacctacagtgaggaaaagccctgagccatcctgcttccttgaccccatatcatattcctgagtgatcagaatatggggtttcaattatatattgtcttatcattccaaggagagataaaatccctgtttctcaattcccaaacctcttacttctgtataatatttatatgattatggacttggaaagagccaattttgtaatgctatcatacgtgatagtaggcttttgcttttaattttgacagtctgaaagcttattctgagagctgcttccagagaaatctaattattcttggttaggaatgttcttctggtgataccaccagcctcctgggtactaagcatgtctgatgataggtgattcataagccctctgtgacatttcccaatgagctgttttgtcacaggtgatccattttgtcagatgtgttatttcagcctgagctttaatgtgactatcatgttgctgggcaagcagctgagagtgttgcatagcttgtcacacgctatacacccctttgaatcagaatacataattttcaaatcccagcatgtgaaatttaaatgagaatcccgccaagtcacagctaatttcttcccttccttacttgatacccgggggtccaaagtgcaagcattaaactatcataatcagtccttgaaaataagttaaatcagtgcaagggcatagattctcactggggcaggttcttttacctcttcttgcattagattactgatgggtgagtttaagaaagcagtctgttcagatgacaagctgcttgaatcaactatgacaaatgcaggagactctgcacgtgtgtgtgtgcacatgcgcaattctaatgctcatgtctccagtcttactttctttatgttcccaccttgcaagttagtatatctattaaaatgtgaatttgtaatttcagtacagctcattttaatacagtaacttatttgcatgagttctgtaaattcagaggagttgaagattagtgaccaagttccagcatcaatacagtataagtattcagatcattcttaaaaatggctcacttccctaactaatttttaaataagcattggaaattaaacttagaattgcctcatcagtgtgaaagtgaagttgctcagtcgtgtccaactctttgcaactccatggactgtagcctaccacgctcctctgtccatgggattttccaggcaagagtactggagtggggtgccattgccttctccagaggatcttcatcagtgtagaattccctttaattagattattatgaaattagctaaagggcatttatagaatttgaatccatttaaagaacaattttatacattcccttgtgttagtattttgacttttcttttaaaagtattttcttttagtcatcttacttgttttaatttttaattaaacttacttttaacttttaattcttaaaaatgattatgtatttatatttttatagataggtaacaatgtgtgtgtgcaaactcaaaccatcctgacaataaaatcaagccaattcatgtttgaattaaagtaaagaatgcagaaagcaaagaccacaggggaaaaataatggtaagcttcacatctatttaagtataaagctaaaacttagcaactaaaagtaatattttatcagaaatgacaaaagtctagagaaggtgaattgaagcatattcacatttaaaaatttggaagtaagagatgatattggtacatttgaaactattaatatcattatatatcactggaaaagtcatgctgaataatgtatttttaaatcattgaacatgtagttttaaaaaagataatgaccttcttataatgtcttaagctaaaaggaaatttaaagatataatgtcttttttgatatctaaatattccaaatttatcactgtcttcagcttcattcttttgttatattctactgaagttaaatttaataacttaaaatattatttgtaatgattcaatattcataaagatatcatttttcactcatctatccatccatatatgtactttgaaagatgcctgaagtaaagctctcctgataccaattctagttattactgcttaaggattttgggtgttttaacatgtttctctgtaccttttatttctttacaaataaatttttgagttcacagtggacatgaaccctataaatataataaaacaattttatttaaaag

SEQ ID NO: 38837 - DNA, 3115 bp, Bovine  19866880503583
  misc_feature (1)..(1): n is a, c, g, or t
ncctggagaatcccatgaacagaggaacctggcaggctatagtccatagtgtcacaaaagaatagactgaagtgacttagcatacacgtagtgatttatacttagaaactatgacacagatctaagtcaaaggcaatatttgggctgcaataaattaatgttaatatgaagattccaataaatccagacccataacactgaccattgtccgtagtacatgaactatgcattgatatgacagaacactgtgaaggagcccaagaccctggagaaaaggagcaggatttaaacatttttcctgaaaaagtagttgtaagattaaatactcaacagagatcatgataaactatagaagctctttttattatgagcaggtatgattctaaaatattgttgctaattctattcattatgtctaaattaacagtgtaagactgactttagcacacagctaggaatgcttgtcaaaccactgaaaatagaaacttgtcagactccagcagaggaaaaaaagcacaagtaccaaatgatagagactgactatacgtaacttgggaagagaaggcataattgcttgatgtcatcaaatttgcatgttagatatcagttaaaccagaggttggtaaattatgatttacaaacatagccttaagcctgtttttagtaaatgaaattttattgggacaaagctatggccatttatttacatgttctttacagttcctgttgctatatgatggcacagttgagtaaatgtgccacaaagcccaaaacattcactgacctttttcaaaaaaagtttacgatcccctgagctacattaaagcatcatcatacacatacaaataatagtcatcaccaccaccatttacagagtgccagtacatcaagctttatcatgaatcttcatcataatctgaaagtcaaagcaattgtgtgtatgtgtgtgtgtgtgtattcctcacaataccatatgagttggatattatttcctcactttccattgtggaaactgagccaccaagagttaactaatttgccaaaggtaacacagaaaaatggcagagccaagcttcaaactaggcaacacagattcagagtttgtgcttttgatctctatcctatattgaatattatgctccttttatgcaaagggaaaatgcagttcagggaaattaaatatgttcagtatcacatgggaaccaaatattaaagctagattccagacccaaagccaatatgctttccatttttccacatatttccactgtatatccctaaggagataaagaattgcaaaaattagtaggaaattataatcatattaaggttagaaaaatatgcctatgagaagatatcatttggtcccagggaaaaaaatgatgtggtttcttaaaatgaaagtgaagagtggcacggcctcaatagccaaaaatagcaatgcatagaatacagttatttaaaaaacgtaagcttcagtttttaacataaggcaaatatacaatctaatgactatctctgagacacttgataggttcatgcctagaacacaatagtgactaggtaaaaccttaatcagcatcacaaaaacaaaccaaaaattagattttatagaagtaatgcagaaggaaggattggaattaagattcaactctgaaacagagaagcagaatggtaagatttttagtaaatgatgagaacataagtgataattgtttgagcaaattacaatctacacagtgatagaacttatatggtgctctcctaatagagaaaaccaaaatctcccagaagcaatatatagtaatgatggaagcttttaaacacttgaatacctactgaagtcctaattagactacaagggaactcatttttatctgcctttctttagtacttatacaacaaacaaacattcagtatgctgcactacttttctttgagatgcctagagaagtacacaccgtagccactgggaaaaatacttcaaaaaggccaaagaaaagaggtgattctctgacaaaattcttgcacagattattaaataactgaattagtagtttaaattaaaaaaaaaaaaatgctgctccgttggagtgaaataaccttagcccacagtcttggctcaagtcactcctaccctgtgggaaatgaatgtcagaacttgtaggctaccacattcaacactgctacatctactgtaactaatggtggtggtggtttagtcactcagtcatgtccgactctttgagatgccatggactgtcgtttgtcagactcctctgtccatgggatcctcccaggcaagaatgctggagtgtgttgccatttccttctccaggggatcttcccaaccaagggactgaacctgggtctcctgcattgcagtcagattctttaccgactgagccaccaaggaagcccactactactaatcgaaagagtaatattggcgagactgtgaacttcctaggaagagccttatttgctgtgtaaccttgggtaagctgaagctccaatactttggccaccttatgccaagaatcaactcattggaaaagaccctgacactggagaaggttgaaggcaaaagagtggcagagcatgagatgactggatagtatcatcaaatcaatggacatgaacctgggcaaactcaaggagatagtgagggacagggaagcctggtgtgctgcagtccacagggtggcaaaatatcagacacggacttagcaactgaacaaccaccatcaccaccttgaataaacttcttaacatctccaagcctgttttttcacctatgattgggatgataaagggtcctgaataaaaagatagtaccacacaatactgtttatttaacttatatgcagagtacatcatgagaaacgctggactggaagaaacacaagctggaatcaagatttccgggagaaacatcaataacctcagatatgcagatgacaccacccttatggcagaaagtgaagaggaactcaaaagcctcttgatgaaagtgaaagtggggagtggaaaaagttggcttaaagctcaacattcagaaatgaagatcatggcatccagtcccatcacttcatgggaaatagatgaagaaaca

SEQ ID NO: 38838 - DNA, 919 bp, Bovine  19866880510463
  misc_feature (1)..(1): n is a, c, g, or t
natttgaatgtgacatggtcatttgtataactgtatttcttatctccctaacaagattatttaaattttaaaaacaaggactatagatgttagcatatattattttatgctgcatagtgctatagtaagtatttgacaaatagttgaagaatgaatgagaaatctaattgattgttactcttattggtaagttgatgggcaagttatcagaaagtgttataaactgattaatagctaattattcactctacataagaatgaactattttgttgccaatgtaatctatctaaaaatgaaaaatagattttttccctagatgtaatgaatatatatcttttcaccaagaaatatacatttggttcattaatatatcacacaggaaattttattaaatgaaattaagcttttattaaaatttctgcatggattgaatggttgacaatataaatatagctgagccctctgcaaaaaattttcaattggagaaaacatgatttcttcttattaaatacatctatgatttatttttctcatatcagcatattataactccttcaataccccaagcaatcaaataactatggataaattacaaatgtctgccaaagcatggcacaatgctttgcatatctaaatgctttaacactcaaaccctacaactgtaaagcagtatagtcaacataagctgattcatctttattttattctctaaaagggttaatgctcaaagaatcctttgttttatggcaagtgtaatgtgaggaccctccagtcctgatttatcattgctccttttttttctctctctttctttccttgggttattttttaagtgcttgcgatccacattggataaaaaagacatttgaggctgagagctctgaaggctcaaggtgggaagggagagggctattttga

SEQ ID NO: 38839 - DNA, 701 bp, Bovine  19866880525083
  misc_feature (1)..(1): n is a, c, g, or t
naatattaatattccttatatgaccattgcttccagcatttcattttccaaatgcactttttacaaacatgtaatattatggtccattaccaaccactaatggagaattttatgactaacttttgcaccaaaaacaattatttgctgtgtgaggatagatttgcaaaacaagatttggtagcatttaaatggacacttatttttagaggaagactgccctgaccgtgtcctaacacttagattgccgtctcatggcatcattatctccaggcccagacgggcttctcttgcacttaaggagcataaggaagccaatttgattacataggctgtttcttatcactaggaaatttggggatggaaaaataataacttgtaataaatactatagggtttgaagtcatgtctatcttccaagataattaacaatttcagttgcttcaggaaccaggaaggcacaaaacttttctactgtatgctctttttaggaagaatagtgggtataattcttgataagtcaaaatgaacaaagtgaactgttgcactagggtgtgaatatgattagaattattcgatcagcccataaaatgttctcttaagcatatagactttttaaacatacaggcttccctggtgactcagatggtaaagagtctgcctgcaatgagggagagccaagtttgatccttggggtagggaag

SEQ ID NO: 38840 - DNA, 1361 bp, Bovine  19866880569829
  misc_feature (1)..(1): n is a, c, g, or t
naatatatttatggaaaagtaaatactaggcttcccaggtggctcaatggtaaagaatctgcctgccaatgcaggagacacaagagatgtgggttcgatccctgggttgagaagattccctgaaggaggaaatggcaacccactccagtattcttgcctggagaatttcatggacagacgagcatggtgggccacagtccatggagtcacaaagaatcagacatgactgaacaacagaacacaagaaggatgatcttgctcggagacgagtaaacaacaacaatacctcaaaaaagctaaattaggtatatcttggattaatctgtgaactagaaaattaacagaaactatgaatagttttataaaaataaatttaaaggcttgaaagaaaatgccacaatgtcataatgtcaaggtattaccttcaaaaggcaaaaatcctcataggcttggccatgatttctctatatttggtgtcatttttgataaaaagatggagtgtaggtaggcatatgaaaatatccagacaaaaaggacaaaacatggaaaaacagaatcaacttgccaagaaaaacacacctgccaagaagggctgtctactgtatgatttaatctatggattaatggaatatagatgatgacacataagatgctaaacatttagaaaattaataagtagcttataaactacatgtttttcctagtagtttctatttccttagttgttccataaaataaaaacagtatttctaccagggtccagcatattagttaaagaaaaaccaaatgccaactcaataggtgttcacttaatggttttaatttcttaatagttttatgacttgtcttcatgatttcataacttggacagtgaatttacaattctatataacacacaaacacataaaaaatgaggaagtcagctaaattaaaaatttggaattctgaacatcaagttaatataaaagaaagctgttaatataaaaatataaaacctgttaatataaaaaataacctgaaatacatttctcagtcactctacaacctcaggattgatctcgaactgcatgtggttatctagttcttctctcctgaaggaaacggttccttttgtcattggaatagacattatgcttcatcacttaaattagtagtccccaacttttttggcaccagggacctttttcatggaacacaactttcccatggactggggtagggggatggtttcaggatgattacagtacgttacattcactgtacactttattcctattattattatatcacctctatctaagatcatcaggtattagatcccagagttggggccccctatttaaaccactctcgttagacct

SEQ ID NO: 38841 - DNA, 2342 bp, Bovine  19866880575235
  misc_feature (1)..(1): n is a, c, g, or t
ntgcaaataacagaagtttaaaaataaaaataaagttaaaaaaagaaaaagaaaactgcaggtgctgttggatataaaatgtcaagtttaggagtgacagagaacaccatcaaggagatggtttagatagtggaaacacatcagtgggcaattaaggatttatggaaattatgcaacattagtaagggcattattcatatctctggagcctaggaggagtggccagcaatttgcagggggaaggaaatgagatttatgtttggtgaggacttttatattcctctagtagaattttatgaggggcttactttctggcctggaatcaaccttctccagtagaaatacttccagccttattttcagcacccacccttgttaaataccctcacccacccaattgctcaagcccaaaacccagaagtcaccctgtgcttctctttttataattccctaagtctgattcatcaaggagtgctattacttctgcctcataaatgtgtctttaaaccatctcattctgttcatctcaactgctaccaccccagaatgtggctctgtcctctcataccagaactattgcaatagcaccccgactgttcttggaatttatccttatccctctctaacctcttctccataatcaagctggatttgtatttttaaatcataaatctcattatgtcactctttccttaagattttcaaagtctttccattgcacacagattgaaagacctaaaacacatccagaaatggaatactattcaatgctaaaatgaaacgagctatcaagtcatgaaaagatatggaggaaccttaaatgtatattactaagtgaaagaagcgaatctacaaacgttatatgctgtatgatttccacttcatggtgttctggagaatattaagataaagaaacaggaaaaaaaaaaaaaaaaaaaaggttgccagaggctaggtgtaaacagatggagcacagaggattttgtagtagtaaaacttctgtattttgatattatggtatatataataatatgttgttgttttttagtcactaagccgtgtccaattcttttgtgaccccatggaatgtaacccagcagtgtcctctgtccataatatttcacaggcaagaatactggagtgggttggcattttcttctccaggggattttctcaactcaaggatcaaacccacatctcttgcattggcaggtggattctttactactgaaccacctttatgttacatattgtagtatcacacagtgtcaggccttctctggtggctcagtccgtaaagaatctgcctgcagtgtgggagactgggatcgaactctggattgggaagatcccctggagaagggaatgacaacccactccagtattcttgcctggagaatccccatggacagagaagcttggtgggctacagtccatggggtcacagagatttggacatggctaagcgactaagcacagcacagtattacacatatactatatatgatatatatatcatatatcatataatttcagtggtggataaatattgttatatgtttgtacgaagccacagaatgctcaacacaaagagtgaattttaacgaacttccagtataataatctgtcaatgtaggtccatcagttgtaaaaagtgtaccactctggtgagtgaggttgataatgagggaagtatgactgtgggggcagacatattgagaaacctctgtaccctccactcaagtttgctgtgaatctataactgctctagtagtaactattttttttttaatgtcctaaaggcattgcatcaattgtctgctgcctatccatctaaactcatccctccttttgcccagaagagatctgctgtaagtaagatgtccatggcccaggaagcaaaagggagaaccttctcttcttccccacctagggcttacattgctccttcagcatctttctaaaggcagtttctaaaagacagtggcggattcatttcgatatttggcaaaactaatacaatattgcaaagtttaaaaataaaataaaattaaaaaataataaataaaagacagtaacaaagttgcagtcgggaaaaaagcaagtatcagaaagttctcatttgactgctattgtcttaaagtgacttcctactctctaagatgggtggttgtcttaagctcttagggtgcttttagttgcacatagaggtctccactgtggccattcaattgcacttcctgtgcatggactaatatatttttctctcttagctgtgccaatatcagcttgcattttggggggatcttttccacacaaactgtatcagggcttccaacatc

SEQ ID NO: 38842 - DNA, 914 bp, Bovine  19866880631706
  misc_feature (1)..(1): n is a, c, g, or t
ncctgagaacaggctcccttgaaaagcaaggttctcatagttggcctgtaaccatggaagcagatgccgttttcttcttacccctgcttacctctttgcagcctcgagctgctccctattgttaaaaggggtacgccttgatttttcttcatcatgaccgaacttgcctcttcttcaaagggcatgatgctgcaggtcattggtctagactgtttgcacggtccagagaacagccttgatgtaacccttgctccgtctgagccacaccaccagccgtgcatctgtagactgtagggggacattggagatctgtatttgaaaagaagtctgtctgattttgccattgtgccttttcactcatcgatcgaatgaatatcgaaccttctgtcgttgcatgtgtgaaatagatagcttagcaagcacttttgtgcccaacctgtgcagtgggccaaaaaaggttttccttttagtctcaagaattttttttttcagactatgaatttcgtgttagcttaaattgtgtgtttttatttcatccagctgttaggatgactgaattacttcatcagcagtgactttcttttgaaggaatattttttgtcaactatattttggtttttggtttttgtcttttgtagctttttatgatctagtttaactcatttgtaactagaagtggtataattgtatcctgttaaaccagaaagttgaggtttcttaagaagatggttagatgatgtctatcatttaacagatttaatttcagaaaggtgaacttgaactgcctcaaggtaatttcagtgatttgtaagagtaagtaagtcaaataatcatattgattttgagttaaacaaaatgtttgataaactatgtgaagggaaaattttttctttgtttttccccttttaaaaaat

SEQ ID NO: 38843 - DNA, 1586 bp, Bovine  19866880669475
  misc_feature (1)..(1): n is a, c, g, or t
ntagaaaatccacctggaatgcaagtgatgtgggttcagtctgtggatcagaaagatctcccagaaaaggaaatggcaaccccctccagaattcttgcctgggaaatcacatggactgaggagcctggttggctacagtacattgggtcacaaaagagttggatacaacatagcaactaaacaacaacaactgtaatatatactagcacttaatttttgtgatatctgtcataaaacgccccttaaaaactagtactagtaaataagggttattaacttgattatactatcaataatcaagtatgtgactatgggccaccctcttgtcatctcttctttaaaatgaagggaacaagtctccccaggcttcctctgatgggtctattctacaatttgatttttttttttttttttttttgaatgaagtgattcactaattcagtatgctgctgttgctaagtcatgtcagtcttgtccgaccctgtgcgaccccatagacggcagcccaccaagttccagtccctgggattctccaggcaagaacactggagtgggttgccatttcctctccattgcatgaaagtgaaaagtgaaagtggagtcgctcagtcatgtccgactcttcgagactccttggactgtagcctactgaatgtcatattaagggagtctacagggaatgggagcattaactggtaaagcagaagcattgctaatggacctgagacagtagccacagtcagagactgggctgcctatatcaagggaacctaaccaataatcattttatatttactaaacattctgtatgtctctgtatcattttaatttatagaactgtagtttcaggctgaacttgagctcatgttttgtatgttatttggggttctttgtttacatttctaaagtcagcaagataaaacaactacacagaaaagtgttaatagttacataatatcttattggtaggaggtatgaaaataaaggcatgagaaaggtgctttagtagtctaaaaattcagtcttttatgtttaaactatgtcatcctattttgcaaatgcctgctctaagcataacactgaactcatccctaaatatgaaacagtagttaagaaattatttgcaaaacagatctcaaggtctttattttgttcttccatgtggaatctatttactcatttgcacatgtggaacttctcatctctgcagcatgcttgaaagcttcacactgagtctgaaagttgagacagatttggatcagtaagcaaattaaagattcgcttcaaaacattcaatagaaaaaaaatgtgttcctttcagtttttgaggatttatctttgcacaaaatatctatctacacatcagagacatttagatgtttagctaagtattttgtgggctgaaaaaggaatattcattggaaagcaagcttgcctcacaatagaattgtattctaaaatcttgtttgtatttacattctgtattttatatggatggaataatttcacaaaggcatgtcctttacctgtcttgttcatatccagtgctccattcagttcctggtatatatcagagtcttaataaa

SEQ ID NO: 38844 - DNA, 3688 bp, Bovine  19866880675838
  misc_feature (1)..(1): n is a, c, g, or t
nttcttgcctggagaatcccagggcacaggggagcctggtgggctgccatctatggggtcgcacagagtcagacatgactgaagtgacttagcagcagcagcagtttcttataataagagatgatagaatcagagtgggaaaaatcccattacaggtcataaatcagactttactaaatatgtgtgtgtgctcagttgtgcctgactctttatgatcctatgaactgtagctggccagattcctctgtccatagaattcctcaggcaagaatactggaatgggttgccatttccttctccaagggattttcctgacccagagatcaaatccatgtctcttgcattgcaggtgtattctttaccactgagcgacttgggaagtccttactagctataggatacttgctatttcactgtttagggttgctgggaagtgtgatatttctcccccccccacctgagttaatgtgtgtattatgtgtaagggctttgtaaactgcattttaatgtactacattgatgttatttattatatttaaagcagttgcttattagtgtgtaaatattactaaatggcattcctatattatttaccaaaatagccaaatatagtcagtgttgtgtgaggtactcaacagaagctagtaaataactcaatagataagtgggataataacatctaaacaaaaatttaatcttatttcattcttcaataaagaacttttcaattttttatgtgatgtttgtgttttccaagtagagtaaatcatcttaatttgaatatagaagcacaggtatggaggaaaaacaataataaaaataacagaaaatgataccaaaaatctctataaaactattcccattactttcaaacaaatatttattcatattgtcaaaatactggattttattttgttcatatatgaaatgaagagattaaatacatgcagaatcattccaaataattctttgtcaaagataatagctcagtttatgttgctttacacgataaaatttcagccatccataaggacttgaaataactgacaactaagtttaaaaagatgcatatgtggagttagctataattatagttacatgtatatatgcacaagatcaccttacctacctcctaagaaacctgtatgcagggcaagaagtaacagaactggatgtggaaaacggactggttcaaaatgagtaaaggagtatgccaaggctgcatattgtcaccctgcttattcaacttacatgcaaagtacatcatgtgacatgcccagctggatgaagctcaagctggaatcaagattgccagatgaaatatcaataacctcagatatgcagatgacaccaccttaaatgcagaaagtgaagaggaactaaggagcctcttgatgaaggtgaaagaggagagtgaaaagctggcttaaaactcaacattcagaaaaggaagatcatggcatccagtcccatcacttcatggcatgtagatgagaaatagtggaaacagtgacagactttattttcttgggctccaaaattagtgtggacactgactgcagtcatgaaattaaaagatgcttgctccttggaagaaaagctataacaaacctagacagcgtattaaaaatcagagccatcactttactgacaaaggtccatctagtcaaaccgttggtttttctagtagtcatgtacagacgtgagggttgaaacataaagaaggctgagagccaaagaattgctgcttttgaactgtagtgctagagaagactcttgagagtcccttggacagcgaggaaatcaaaccagtcaatccaaaaagaaatcaacgctgaatattcattggaaggactgatgttgaagctgaaactccaatactttggccaactgatgcgaagagccagctcattggaaatgatcctgatgctgggaaaggctgaatgcaggaggacaaggggatgacagaggatgaaatggttggatggcatcactgattcaatgaacatgagtttgagcaaactccaggagacagtgaagtacagggaagcctggtgtgctgcagtgcatggggtctcaaagagtctcaaagagtttgacacgactgagcaactgaacaacaacaaatatgtaataagcaataaaaacaaatggatactgattaaaactttaagtattttaggaatacttagcatctacttgaaataatacatagtaattctcattttcagaaaacatttccattaatataagtgatgttgcgtcctggtttcatgtggttcaaacagcgcaagtccattatataaagagaacactgacttaaacggtttaattaaagtgactctatttcctattttatctactagaaagaagaactgccttctacatttttaacaccagatctacattttaaaaatcatgtaaaaacaactggaaacaaccaatacgtatataattaataaattaattgtaatatagtcacataaaaatactataacataataaaaagaacctatgatatgtacaaggggagaaatcacatggacagaatgatgagtaacacaagccagacaaaaatgtatatgtgctttgtgattcgatttatatgaaataaaaaactggtaaacctaatcaatggtatttgtttaatagtgatagacaccaataaggcatgagataatcttctagggtgctggaaatttctatgtcctgatctgagacattcatatatatgcatgtgattatgtatatttacacatatgtaaaacactcacccacctgtatagttagggagcacatatgttaaatatctccattaaaaaaaatcttatagtttcataaagaaacaaaaaagtcaaaggaccatcttcaatttttcagaaagcatgctaaatggacatttcaacaaaactcatgaaaggatcaaaatgcccgaggatacaaatcaaagatgaaattataaactagaaacttttaataatgtgacttttacagaaacaataattcatggtcaagtttatgttcaatatatatatttttattagcccttttcatgttgaggaatgaagctaaatacctcttctattttgtttccatatcactagtattttaaaaagagaaaaacagaacatttggtaactggatataaatgactttacagcattaagaggcccttgtgaggagaaaggaatacaaaacttgaaggaagatttatattcaaagccaactttccaggcagtggtattattaacatgagcagaaagatcatttttttccctctctatattaccattttattctacaatgaggaagttaaaggaagagcattgattatgatcacagctcaaaaagtgaatgaatcaaatatcttagagttggaaaagtgattttgggacaatttttttaatgttcatcaagagagtttgaaaaatcatatccaacaattttataaaatgcattttttgcccatatcctcatttcttttaagttttagtcttaacagaagttagaaatctaatttttaaacatttatcaacaattgctccgtaatatagttcaagtttctttctacacagcctgtgatatggacaaactgaattttgaaaagacaccatcatctagagggaacactgacttcagagccgcaaaaccctgggaaagagttctgaacctcgcttccaggcaatgc

SEQ ID NO: 38845 - DNA, 765 bp, Bovine  19866880823093
  misc_feature (1)..(1): n is a, c, g, or t
nattcctaggtcaggaagatcccctggagaagggatagggctacccactccagtattcttgggcttcctctgtggctcagctggtaaaagaaactgcctgcaatgcgggagacctgagttcgagcactgggttgggaagatcccctggagaagggaaaggctacccactccagtattctggtctggagaatttcatggactgtatagtccatagggtcacaaagagtctgacacgactgagcgactttcacttcatttcactctttaccactagcgccacctgggcagccctaacactgaccaaagggggaagcctggataataggtaacataccaaaaccaggaaaacctcattaccttaaataggatgagattgtgaaaggaggaacaagctgaataaaacagcttgtttggtaggacctttttagactgcgttacctttcctctggaaagatgttgcaggtaaataaaatcaggtcttactggataataagtgtaatatatgcaatttattttcattacaaagggtttttattgtatctgaagaattccacagagggccattaaaaatccattatagtgtttttagttagtgatctgctctgcttcccaaaacatggtcattttatgcagtattagacttatgtgcatttctgcttcttgcctggtcctcattctgaatacttacaagtaattacttgagagggtttttcttgccttgttggccatttcttaaaggtacaatataatttattgagcaaaata

SEQ ID NO: 38846 - DNA, 2182 bp, Bovine  19866880828454
  misc_feature (1)..(1): n is a, c, g, or t
ngaaggggaaattaagggagacaaactgaactgtgaggctcagggactctgttggttctgcctgtcactgttttaagctggctcaaagcctccggggagtctggctgttccagccttcctcagccagccagacggtaacggcccactgcttttattcattaccctgagtgtaatgcactaaatttaacaagtaacacactcagcgggaatttattggccttttgcagtatgattgcaaggtaggatatggatatggattccaattactgttgacacccagataagaagaacaaagcctgtatatgattattaatcaaagttaatattttaggaaaaggacaataaataaataatttctatactatttgaagcagatgttcccaggttgaaagaactcttctcagttacacaattacataaaaggagcattccagtgaaagagaatagcaataatacaatagcaacatcgaggcaaagtgatcctagacagcaacaattttcatataaaaatagctaggtggagcagatgtacaggtgagagaagactaacgaattccaaatatagactcctgtgtgttatagaaagcaatggccaaataaacggtcatctttaaataaggatttagtattttaaggagaaaaaataacaaaaaaattgttatttcagatggtaactatgatctattaaaatgtggcaggaggagtgatggtaaaaaacatactgtatcacattttcacatcaacaaccctggagttacctgatgatgaaaattcaatattgttcacatatagatatttattatgtcaaagtctttgggctgcaatataaaatggaagaagctagaagttttactaactttgggcaagggcttattgttatttttttatattatttatagaggcaatgggaacacaataaatacaaaggcatagaagagagagaacctgcttttattttaccagactatatgtgaatgaaatatgttgaaacatataaggcaaatgaaaacaaagggagcatcaccttttccatgatttactcaaatgactaacttaaattattgaaataagaagcagcatgcatcactggtgaaggcttgaaccttcacattacacagaatcatatcctagctttcataataacactctgactttgaaccacgaatttaatctctcttagactgtgtccccaagtgtaaaatagaatgattatagtaactacctctgtatttatactgcaatactgtattatatgcttcaaagctgctaagaagctagatcttcaatgttcttaccacaaaacattgaaatggtgattatgggacacattggcaagtgttaaccaatgatatggtggaaagcacactgcaatgtataaatgtatgaaatgaaagtgttgcacaccttaaactttaacaccataggggaaaagtgaataaagggaacacaagattcctctgtattgcttcttacaactgcagacttatttcaaaataaaaatgttaatttaaagaaaagagacatatgattttattttatttaaccgaaaatgttttatttatccaacatactttcatcttagtctattaaatgagataaaaattagtgagatacattacttttttttcatactgtccatttgaactggccgcattccaagttctcagtagtgatgtgatagatgctactgtactggacaacacagatgtagggagtacaaagacaagaagtcaagacaaggcttaagaggtagtcatgggccaaattgggcttcccaggtagagctagtggtgaagaatccacctgccaatgcaggagatgcagagatgcaagtttgatccctggattgggaagatcccctggagggagaaatggcaacccactctagtactcttgcctggagaattccatggaccaaggagtctgatggactagagtccatgcggttgcaaaaagttggatatgactgagggactaaacagcaacaagtcagatcatgaatgtaatgcttgtaataaaatccagactctgcaatggctgacagagcccaatgtcatagccacctctgcttctttctgtcgttctcatgctcagtcacactggattccttgctattcctgggaaattccacatgtgctccagacttggaaacctcactcttgctgttttctctgtctggaat

SEQ ID NO: 38847 - DNA, 3125 bp, Bovine  19866880835157
  misc_feature (1)..(1): n is a, c, g, or t
ntgaaagatttagtttctttaccaactagggctaaatgttcacttttcttgacagcaaaaagtaatactgtacacaaaaagcacagataacatataaatgcttttccaaaacttctatgtctaacaaaaattaaaacaggtaccgtctttttcatagagatttctctagttttgctaaagtttctattctactcaggattagagcaagagagcaaaaggaaaaagttaataagaataaagtgggagatgagttataaaagagtaaactgaaagtgcaaggatccccttttatataacagtagacttaaaaagaaacaacaaaaaaaagttatacctgatacgaaaggtgcgatttcaccaagtgcaataaattgcttattatgccatatttttgcaataatacaaatacagaaggctcatttgcttatgctgccttacaaagctgctttacaaagcgcgatgtctctgtagttaaatacaagccaatgtttgccttttttttagtttgttttggtttggatttttgtttgtttgtttttgtttttgagcaggagcatctctctctctctctctttttttttttttcagcactgttgtatggagtaggacaaactcagattttttcttcatgcctcctgatatttcttgggaaaaaaagaggaccagggtgcttgtcttctttttcttccttctcggtattgcaagcacaaagcactgcgcagaagctgcaccaatccttgccgtccctggcagcagaatggtagaaggtgggagagaccaggaatccttccaggctctgctgactttagaaatgaggattgcacacgtttgtctcctgaaccaaaagggtgagaaggcagggtgccagtttgctacactgctgcaatgatctcacgctcactgctgctgccgtcctgtttgcccagttcaaatgcctgttcagtacaaatcaaaaaaaaaaaaaaactacttggatttttcagcaagcaaaacgggtattaacattaaaaaaaaaaaaaaaaagaatcagcagtaagaaaaggcaaaaaacaaaaagcacatacaattttaggattcacttgttatgcctcaatattctgtttatatgttctttctttctcccccccccccacccccatttagagataagcagcagaatttatcaggcgtgaaagggacagcctcctggtggcctgccaaaaacccagaataaaggcgaagttgtgcttcaaagctcagtcgcttgctgagtctggctaaagtcaagtattaagatccaccattttctgagccatgctaaaaaagaagaaaaaagtcaggacggttcctgctttccaagtctccgttggcaccatcacaaaatctcagtcgtaaggtcacatgatcctctgccaaatgtagagtgcattcccatcaaccattctgctgatactgcgaaggcagctattgtctcgtttagacccaaagttcagcccactcttcattgaattagctgaaaaacgcatcacctttgggggctgggagtcatggaaacgtctacctggcaagctgcccactttttctgcccatcaaccagagatggaattgtgctgcctaatgcaatgatgacttggaatgtgaagagtcgtccaaagtgaatctgattcttgcaacgcctgctccagtttgcacggaaaactctggcttcttgtagttaggagggagggggggaatctttcctactaaatgtagcaaataaaggtctgaacatgcctactctgcaactttatttcacaacacacccaagtggttctcaaatgaaaagactgaagtctctgcaagtttttcgagttaaaggcatcccttcctcaggctcctttttccttaagagtgcatgcaacaagcccaggacattcgtttcagtccctcacgtgaagacttacaatctctgagtttcgtcttgctttttattactttctgattttatctggcaccagttttatactacatggtcacaaaatccactagcaacagtgggaatgcattattgccgcagtctccatcaaagtggtcccctgagggagccagttgtctcttcgaccacacagaccactgcaactgggtcctgtgataatccttcacagcacctagcacagctgctgtgcaagtttgccgagtctgactcatgtaaggagtgctctttctgttccttcaccagctacagttttcctgtatggtatgaaagatgcctttgaaagatgcaggaaatatatcaacagctcttaggcaataaaatgaaatggttccctctccctggtgaatttccaatctagcgggcgacgaaagttcccgtggacaaacatttccatactttctaacaaaagtacagtgaattaaatctttctccatttccttaagcagaatcttaaagccaaacaaagcaagtcttattagtatttaaaccaaacatactcagtagtactgaaaagaatcatgttctacccgcatttaaaagtgtttcaatttttcaattaatgagaggatctttagaactctgttaccaacattttcaaattatattcagtgccttacaaaactacagaccaatgttatgcctcctccatgtaggcacccctaccccgatgcacacacacacttcacaatacctgaaaaatattttaaaaaattatcaaaccacgacttgcctaataaaagaaaatcatccaaaaaaaaaaaaaagcacaagtgatctaggaaataccctgaaaaaggtatgcatttttttgagtcatggtctttgggtcaccttcttaaggaatcgtagcaatgaatatgtacacacacatgcatgggaaccattctggtgtcctcctcatttgtaattcagaacacaaacaattgtaaaccataaaacaaaagcttacacatgctgaatttaaaaatgctttttttctagattgcaaaattctggacaaattttgctaatgtcctaagtacatgctttagagtgccggatggagaattgagcatggcagacacatgtgccccatgcttcagcatagtaagaagaaagtagacaagccctcatagaaagaaaacagttaaattttgagttctcattcatttattcaatagatattattaag

SEQ ID NO: 38848 - DNA, 1773 bp, Bovine  19866880864855
  misc_feature (1)..(1): n is a, c, g, or t
naattattggcctcattttaatgatgataaatctaggcttagagaagttaacaaacttgcttagaaatagcaagtcaccatttcagagctggaatttgaattcacctttgttcactctaaattaacagtctttttaccacatgactgtaactcttaaaaccatatataaaactatcataagaatgaacatgattactttgcattcatagttttagttggcacttattggtcaacagaaatactcccattagctattttaaagacagcttttataaaacagataatgattaccacttaataaacccagcagtataaagttattagatatatcacactcttcccacatgatgggaaggtgcaggaggctctgaaatgagtgctgtattgttttttctgttactgttgggttgctcttttaaagagaaattctctgtaattaaatagcaatcaggcacttaaaagacaggctgatctcagtactgtatttaagtaaagcagacaaagattgcattttccattctgtggtctggacacctggtgcacaagctcagccttgagcagggtcagcctaattgaaaccatccttcatgtgcctgtcacataaacaagactctgcgttctgaaaactccatataacaaaaatatacaggatttctttttttttaattttcatcactgttatgagtgccaacatttctgtccttagttcaactgatcttgtagatatttccatcctttttaaacatcaattttcacttaatgaaagtaccctgcattagcaagacttaattatattatgcaaaagccacagggataattataatttatccaggcactcttaatctgtattaggggaaatgtgttacagacctgatgagaaaactcacataccattatccaatctcaacagctgcttagctaaatcttgctatagtaaaatctcagttatcatcccatcatttctagcctgccatgtttttttttaatttctacaaatttaaaagaaacattttaagttgtcatttctagaactttgtaatgtgactaaatctgtttcactaaaccaaacatgttcttatcctaacatgatttaagattgcactagctacatatttacaattctatttaactaatcacatgcatttgctgaacatctcctatgtcctcagtgtttctggaacaaaggacctctaggtattctgctacattgtcataagcaactaaatcctagcagggagaaaatactttactgtatatgtccaattcccataccttgatttgcccaacttataactgacagcaaaatgtcaaagtttcagcttggaaatctactcattagataagtataagtgccaagagaggcattccttcttagagcaatattaaattcttactaattgtaattcagtcctttgtccagcagaattttcacttatccaaagtccttgtatgccagtacttccaccatttccgttggaaatttcctccataactgcacaaatttgaccactagattgtatttcctgcctttcagttcatctcctttctcatacttattaagctgcagacaggtaccttagatctgtaagacctaaaattaattttgctttgttttagcagtctgggggaatgaacagtcatttgtaaatttcccctgaataatgcacttgttcttaaaagcttgtgaattgtcaacattattgtagccactgaatgatggcaatattactgcttttgacaagcaaggtaaaaattacaagaattgctaaaatt

SEQ ID NO: 38849 - DNA, 1754 bp, Bovine  19866881057684
  misc_feature (1)..(1): n is a, c, g, or t
nctgagaaagggccctacactgcactagtacctaaatactagcagaagctgcctgggaagacagccaatggaaggactttgtttgacccagctgccaatctcccctgaagccgtgcgccagactaaacactcacactattttaactgaaatcaggctacagcagctgtttgctttccggctctgagctctgcacccaccatggcctgtgcagttcacccagcgagttctgctagctgcgtggctaaaaatctgttctgggttgggatctgtcattggagagcaaaatttaaccctattcctcgtggtaaatctgaactgtgtgttgctcagcctttgcatctggtaattcggaataattttacgatctatttaaagaagagtgacattttctttcacagaagaaaagatttgaaggttacaaagattcatatattctttgaaattctaacctaaattcttcagatgttttcaaataatactaagataacacttgtgcatggcaagaacaagacccctaccaagctcttctaagaacaaagatggtacctattcaacccgacccaaacttcttcagccctaccaagatggaaagttggtagaatgggtacagagactcaaatcattctgaaagttagttcttactacttaagactcctccagaagcagtgtccgagcacaaaagtaatttgtgttccttatatgaaaaagtaccaagtgatcccatttatctttcctaaatttctaaccttatttagctattaggctgaatgtgaaaattaattatgaattgtaaaagattaaaatatgcccatggtagcctaaagtgaaaaggaaactaaagagaagttagtcaggagaagcacagtttaaataataagaagaattatctgatgtaacaggaagaaaagatctgataaccaagagttattgcacacaagatggcagccaaacattacatatacacagaaaataagtcaggaagtcattcaacatgtggaagagagaaagacgttgacaggagtctgataacatggactataatcaagttattcttattcctgaccaaattcctaattatggaaagccatggtgagagaggacagcatcttttcatttagggatcttagcttctgttgttgctccggggtagaagaatgtctgtttacaggcaaatagccagtaaaacttttatttttttaaggtaactaattcggttcacagtgtagtcagaagatgaccaaaaaagaaacatttctgatatactgcaaaagtactaccaaggatagttttgcaaagttgttctcatactttaatagaaagtatactttgttgctatttctgaccacaaattaatatttctgttttattttagaaatgagagattgaagttacaaaaagtagtgaagatggttctagagagggtgaactattaggtttgatgagtacaggttacctgaaagacccaattcattaaaaatgcatgttgagataatattgcataacaaatgagttactatctcattctgaaaggactacatgcattaacctggaagatttgctttggatctagcttcctacatagcggagtaaaattggttgctcagaattctcatggaatcagataaaatgtaggaaaatgtttgtgtgtgtgtgcctctctttcaatccacaaaaatattcatgtttctctgaatggtctattacaatctaccaagaaaatatcatacaaattacacaactatatgttcttctg

SEQ ID NO: 38850 - DNA, 662 bp, Bovine  19866881211640
  misc_feature (1)..(1): n is a, c, g, or t
ntggcaagtttctaagaatatgggaaaatattaataataaatattgcctccagtttttatatcctcattaactggaaggtgtgccagccttagctcccatttatttttgtttttttcttttgaaacatttcaaagaactgtaagcatgttaattaaaccagaataaaacttcaaagtatccactttccttctcatagtctaggctcacataagaaaatgcaattaagttgaaaaaaagttttatttgccccaggtttacattgggaagtgatgaaatatgcattctcaactcttatttctttctggaatcaattgtcactttctcttggccttcttttctaaagtaactggttattttggttactgtcaaaggctaaatggtgtttgcagccatcttttttctccttctgatgctaattctattgtttaataaactaagggaaaggaataccagaagaaatgaaacctggacttttaagttttggaaaagaaatcagtatattgcttaattgttgtcttttatgtacaggtttaaatatataaatttggactaaccttgagcttaattcatctatttagatatgaaatatagttccaagtcaagctagccaatttttctttaaaatgtattgatatcagtttatcttgccctgcttaaaaat

SEQ ID NO: 38851 - DNA, 820 bp, Bovine  19866881222337
  misc_feature (1)..(1): n is a, c, g, or t
nactgataaaatctgacaaattgatctgtttaatatatggaatttaaggcatagctttttaatttttttctttttaaaacagttaaaggatgtatttgttggaaaattgcaattttatatgaaaagtaacagtttataaaacatgtgcataaaacactttcctttgggaatttatatatttcgtgagtcagaatattcaaggttatggcgcagtaataaagcatcccacatttcactggtttactgcaacaaagatttactcttttacttatactacagaactcaaataacttttaacatcagtccaggctcatggagggaccaccttgattgttataactgagaaaaggatataagcgaatggcatgctaactcttgaagttttatatctgctcacactcattgactgacacaggttataaagtcatagctaagtcaaaaagatatgaaaatacattcctactaaatgaacatgagaggaaaattggagtatttgtaaccaagttctagtgagtatcacaatcattttctgctggatgacataattttagggatagcttttttatgattgtggatgactggatatctttacttctcaatataagtctatattgttaaggaaggtagaatattattgttgctccttctcagagaagctgagaatcagaaggcctggatagtgttactatacacccacagttagtgagaaggagactggggcttattttatctttataaagtaattgcttttccatatggttcattaatgaaaatcctgtactgtgttcttctactttatattctatgggccttttgtgta

SEQ ID NO: 38852 - DNA, 1079 bp, Bovine  19866881224996
  misc_feature (1)..(1): n is a, c, g, or t
nagcagagtcatcagaaatgaccaaaggagattgtagattgggcaagacctgagtctccagtgccatctcacctgagttcaggtcttcctttgaatgtatgagttactacagtaactctccccaactcaggggtccagtaactcacctttctttaacttaagctactttaaatgagatttctctcacaaaagatgaaagagttctgattggtatatcaaataattgcaattcagaatcttaaggctgattgatactaaataacaaccaggcttccttgttggctcagcagtaaagaatccacatgccagttcaggagacacaggtttgatccacgggccgggaagattccctagagaaggaaatggaaacccactccagtattcttgcctggagaatcccatgaacagaggaacttggtaggctacagtccatgggctcacagtcagtcaggactgagtgactaaacaacagcaagcaacaatcaacagttatttattggtgtccaacaaaataatacaacaaatccaaaacacttttcaggtgcttagttatttaatcatcacaacaaccctgcaaagaaaatgcttatattaaagcacttttaaataattaaagtgagacagacagagattttgtaattccccaagagcccataactagtaaaaggaaaattctgaatctgaactcagagcttctgattgcagtgtccagactcttaaacttgactgactctctcttgacatgaattgagttctgattcagtcatctaaaattaagtgctttcatctctctgaaacttaatttttttcatctctaaaagagggatactatttcctactgcagacatttttgtagaaattgaaagatattaagcttacgaaagcattttggaaaatgcctagcactagaaaactgtcagttcatattataaaattataaactacattaaaactttatcagctatgaattgtgtaattgaattactacaaaatttaatgaacatgttatagtcaataatgtctcagaaaaatagatacaagagtcaattcatatgtcaggaagcagtttttaatctaaa

SEQ ID NO: 38853 - DNA, 1534 bp, Bovine  19866881268105
  misc_feature (1)..(1): n is a, c, g, or t
nctggaattttgccaaatctaaatatgattatatttctttctgggttcatggggtcagtatctttctgagtataaaagtccttaacactttagtgtgccagtaaagctgcagtagaggtgcagagattaagctacattgataatgtctagaagaggtataggtgtctcaggggaattataatgcaggttaattagtaatgaaattacaagtggtatatactgccttgaattccttaaactcaaatggacatactagtacatgtgcccagatttagtctaattcacctgatgaatatttaaaaggttttgcaagttgttatgtttggatgagtttcgagcaaagcagtacataaagggttagctaatgcccaaatattcttgccatttacacacgcagtgcagcctacatttcggtaggcagcaagtgcaggcatcattttgattacttggattcttttgtttaatttctcactagacatttaacttagcacagaaatcccactgatcccttagtgactgtatttagaaaaggaaaacaaagttcctaatatagagaagttttcaaaaatcctgaacatttgtaagcttttgaaaaataggctttttactacaacgctgcaaatacatagtatgtggaaacttaggtgctaacattatctgtcatctccatatttagtttcttatctctaagtgaccaactacactctgagacattatatgcatgtatattaatacacattagcatatgtacttaatacacactttaatatatacattaatatgtgttaatatacatatttatatattcaaagatatcttaatttttttaatctttggtaaaaatagtatgaaaatggagaatttttcatataattatccacaatatttcttcaatgtgttagctttgattttcattgaatgttgcttttttcccagctttatcagatagagtgcattactagccaataatattaagttgtatgtaatgtcttacttgtagcagtttgaaagcaggtggaacttgaaggtaattgagattaagtgaatttaagatgaaatagttttatataatcagctaatgccatgcatattttataaagaatttcaaagtgaaaatttttcatatggtgaaataaatttttcattgtatctgatgtaagaaatatggttttaagtgtgttaccttcataattattcctaaacaaaactagagtgcaaaataatcttggactatatctgttaggtcaactaaatgagagtaataattcctagatttcatcttggccttttgggtttctggggcattttaggtctttgatgtaaagtggacttaaccatttcacttttctaagaaatttcttcctctctcctggtaggtatctgatgatttgtgaaccctagatgactattctgtggagtcatctttccttgcctttgaattaactttccctaggccctgagtcaacatcaatattttatacatccaaattggagggtctttcttgaaattctcctatgtgtttttctggacata

SEQ ID NO: 38854 - DNA, 1721 bp, Bovine  19866881289184
  misc_feature (1)..(1): n is a, c, g, or t
naaaatgctgaaactcttcttcctacttagctacaataacaaactaggtctaaaataaatatacaactcccaaagctatggttttttttttttaatttttttcccctctgttacgattcagctgacttcaccgggtttatccccctccttccctttcacatccctgagtctgtgggtgagtagggaatagagggcagagacactagaatgaccagaactattcacagtaggtatatgatggacagtctcattcaaaaaccattccagctttcccccaaactttcactgaatttcttatttaaatatgtaaaatgcaaaaataatatcctatatatttagtatcactctaggtaatagcccttaaagtataaattctgcataatatttctcaagaactgttttaaaaatgtgtatcagcactgtagatgctggggaggtgcttagtaaagctggctttggtgggatacaattgtttcaaacacttgcctcttacttcattctttaatgaacatctctggaataagtaattactgtgggaacacaactttagagccattctcaaagagcaaaattggcagaggttggttttataaagttcacaaaatgaatggtgccttattgccataaacaaagggatttttaacaaccagatttaaaatacccagcgaattactgataagtgaatcagtgaataaagataagtctttaattgacaagaaaatgaaggattaggctaatagcgtactacagcaatatgccttgaattcaaatttaggccttcttccctgtttggattaagtaattactaacagctttttcttttttaacagaaagtctatttcttgtgcaacatttctgcttaacatcttctaaaatgtgtgctactggtattaagttttatcatgaatccttcaagtgacttatcatatcctcttaactgtgtatttgaagtgacatatgattattttctaatttgaaatctgaaatttccttataaaatatatttgtctggtaaatacaatggagtaaaaatagttgtaattttaactagaaataaattgtatgattctttaaacttttaatgtcaagattaaaatatttaacaagaaaaattgtaagacaagataagaaaaatccaggtaccaataccaaaattatgaataaataaaacgaattcctagagaaccaatggaataccacattcaacttcggaagtgagcatatattttttttttttcttagagaataatcgaattgaactaatccataaactctgattatgatttgagagttgaccattcttatttagtaatgtaattaagtactatttcttattaccacagaaaaacaataacgtttttcaaagctttgagttttcatatgtattttctatctcctggtctgtcaaagatctgatatatcttccaacaaaattctcatttgaaaatatatgtctctggtaaagagctaagatgtccccaggaaacagatggagtgatggatgcttttcttaaagaggaaagacttcagaatacaaaaccccaaaggaacggtccataagtttaaacagtgtggggaatttccagtgacaggtgggcaactggatgttgtgaggctaatggggaacttgctgttatataccagcctggatggcctaggaggggagtcagggggggaatggacacatgtatatgtatggctgagtcctttcactcttccca

SEQ ID NO: 38855 - DNA, 798 bp, Bovine  19866881291919
  misc_feature (1)..(1): n is a, c, g, or t
nactctatatatactgaaacaagctgaacaaaatctttacttataagccatagattgtgctgtgaagtaagctaacagaagaaggtgggggggagggagtggaatgtaaggacaggatccagtaacaaaaagtgagttttttcccaacacttcagctgtttaaatccctaaaccggccctggtggtactcaccaccattaatttgggaaaatgtccccatcctcttgctaagagcgagtgctggggagatttctgttattccattgcactgttgccaagccaacctgaaagtgtgtgggttctcagagaaacatctcagtatgcagtgttaagtttcatagcattcttgacacagtattctacatttggtatacaatgtgattggtgagctggccttggaactgaaactccgactgtaatatgattcccaccgttttggaacacaacctgttcatgaaatagaaattgcatttattttcaggaaagaaaagtacggaggtttctctaatccagaacagtttaagtataggaaatgttccagaggatagcaatcaaaatgatgaatgagctagattgttttattcatgtggaaatataaatgaagcataaattacgcaagagaaatttgctgagggaaaaaaaataattggggaaaattgtgtgatggtctacagaatgtgaaaggcacagacctcaaagctagagaaataacttgtagtcacaataatagaatgtccacagagtaaagcagaagctgccttcactaccaaaaaagtagatgggaaactacagtgattt

SEQ ID NO: 38856 - DNA, 1012 bp, Bovine  19866881381913
  misc_feature (1)..(1): n is a, c, g, or t
nctgtgaggtgtctgggactctttcagttcaaaagtgcctaaacattcatacaggttatgaagctttagttcagactcttatttttctttcccatcaagctattcattgagacttccctgagctttttattttatgcctttctttgaatattttcaagaagacactactactttctaggtaattagattgtaccacatatgaatataaattacacttatctccccaagcaataattgaatttcatgcacacaagtacctgctttttctgaaatctttcctctgactactgaatggcaggtaggctcagaacctaccagtggtaaaaaagagtaataaaaaattcagtggatgctacaatcttagaatttctgattttcagtatattcaatttctttatatttcaacacctgtagttcttcagttcttccattattattagaactttgtcccatagttagaggcaggagaatcctcaaaataaagtcatcctaggttgcatcttattttttttttttaattttttttagaaaaagaactcagatatcctagctgagtatgttatcttcacaatatagatattaaaggcttaatactacaactgaatttcacaaacattttattaacctttattgcttgtattgtactttaacataataattcacacctatccagagcatagaatattttctatttcttggagtcaagaatatcacagatttactacacacttagaaaaatgtttctttcttttattaactctatttccttcaaacagaagagtgacatctaagttcaacattgtaagacttaacttttactcagtccatattctccaagtatttagctgtatttttcaagtgtactcacattttccaataaagttatctaaaattttcatccttaaatataaataagctcatcatttattcatggtgaatgcctttctaggaacatgcctaacttggttcactttttcctgagctatcaatttaggaacgtcagagtcaagga

SEQ ID NO: 38857 - DNA, 1329 bp, Bovine  19866881519955
  misc_feature (1)..(1): n is a, c, g, or t
nccactttaagtttttccctaaaacaacccccaaaaggagaaatgtcagacaactgctgtttaggagaagcatctgggtgtatggtgggaatgaaggtagtcgatcgagaagaaaacacaataccaaaatgggcaaaaccttttaaagttttttttttttttaaaggcttggaagactcatggagccccacccaaggctactcatatgacatataatgtggtttcatagtttgcatttatgcattcattttggttggtgttgttttcacagtaacagttttgaaagtgaaaggaggcatggctgttaaagaagcgactaggttttgcacaatgaactagtgaaagctgaaaagagatttggatttggcatggagcttaataagataattaagagtgtagagattaatggctcctaaaaataacatttaaaataatgtttttcaactaaaggatcttgaaacatgaaaacaggtttataaatgttaattaagcctgtgaaagttgatgtttcattagctgaggcagcataaaggaacaagagctattttttaaataattagtgaacaataaccaataaacttaataaaacattttatttgaatgttatcactatatagggtatttgtaatttcccacaattctttgtataatgacaaaacagaaggtagaattcatcacctctgtagtatttttcattgtttaccctatatatttctattataataaaatacgattttaaaagcacaacagtttgcttgaagtttattcttttcacggaaaatattatagcatcaattcttcacgtgcaaattatagtctttataaacgctctatatttcaaaagcattcttttttttaacaatttaaaaacatgtttagaaacagttttaataaaacttaaaaataggtgcaatacatcgggctaatcctttcccactgaattaggcaaaactaggtttttgttacaaaatgcttaaattgctcagcaatttactaatacaaacacacaaaataattagaatgcaatgcattatatgctgagccaatacattgctttaaacgtaaaacaagtttgtgtgtactttttccgctaaagtacctaattgatatttctaacagctctaagacaaatgcttcttttaaatatattttaaaggtcagtattattgtggaacaagctctttttctacttagcaactgagaacatgatcttttcatccttatttttgtcacatgaaatcttggtaagtaaattaaatataacttccctcaaactaaatttcacttattagagaattttaacacacattctaatacaaccctgtttta

SEQ ID NO: 38858 - DNA, 716 bp, Bovine  19866881896539
  misc_feature (1)..(1): n is a, c, g, or t
ntttaactatttcttacttgctattgggttctatacatcatgcaacttttgatgctacttaaagctaagctaatactctgaatctgttggtaaatgcatttatttctgaaaagtgattgatcattgagtaaaatcacattagcagcattaatgttacaattcagagatgataagttgttatagaactatggtgaggatatatgttacgtaatgctatacaattgtggaaatgtacttatactgagtaggcacagttttagtcattttggtccatttttagcagcttcaatttaaagaatcatacctcattttttttcttatatcatcttataatcatgtcattttctagagtttcacttggagtaagtaacttcaatgttatataatgtagaaatatggatataaagtagaataaaattttatatttttgtttaactttatatacatttcacatataacatagtttcttagttaaatgagaatagagggctatatttaaattaatagcaagggctggccacactgataaaatctttactgtgacctctaagtgttgctcagttgtatctgactctatgagactgcatggactgcggccctccaggctcctctgtccatgggattctccaagcaagaatactggagtgggtagccattctcttttccgggggatttcagagcaatgtatagtaatagaaatgacagaaatagggcta

SEQ ID NO: 38859 - DNA, 4638 bp, Bovine  19866880450872
  misc_feature (1)..(1): n is a, c, g, or t
ngggtttatgtagcatcgtggcattggagggtacataatcttgccctctgtataaatcccccctagctttcatgagctactaaccatgacagagaccaccacttatctacagaattgatgtttttgaactgtggtgttggagaagattcttgagagtcccttggactgccaggagatccaaccagtccatcctaaaggagatcagtcctgaatattcattggaaagactgatactgaagctgaaactccagtactttggccacctgatgtgaagaactgactctttgaaaagaccctgatgctgggaaagattgagggcaggaggagaaggggacgacagaggatgagatggttggatggcatcactgactcgatggacatgagtttgagtaagctccgggagttggtgatggacagggaggcctggtgtgctgcagtccatggggttgcaaagagttggacatgattgagtaactgaaatgaactgaacctggctcacataggtctctgtgtgctgctaacatgcaaatgcttccttacctgctatattatgagaagctctgtttctcggcttgtcttacatttatgcattcattctactgcggcaacaccactttgtggctttgggaactcagcgggactctgaggggaccatgagctaagacatagcgtgcagcttttccacctactcctatacgtgctgaacacagctctcaggtttcatctgcagaaggggcagagtcttctgctctagaattcttaagcaaagttaggcattttatttgtcctccttctgacctcaagcagtgggctcagattaggatgggagtagatcagacttgggctttccaggtggtgctggtggtaaagaacccccctgccaatgtgggaaacgtaagagacacaggttcgatccctagcttgggaagatcctctggaggagggcatggtaacccactccagtatgcttgtctgggaaatcccatagacatggtgagctacaatccatagagttgcaaagagttgggcaccattgaagctacgtgacacacacacaggatcagatgcagggctcatctcaggggcacactagtgtcttggtttttctttcaaatctccatactcttccccatcagacaaatctttttgagaactggcaacacaggaggctttgtcctaacatgtcaggtttcttaagcttataaaattttctggattctgctgtgtcattctctgagacaatgaaggcagaacatctcatgaaatggagaatggtgataattacaatagtgtagatggatgaaagtatctgttaatatttcagaatttcatctgtcattttgctggcagtcaatattgccaaatacttgtcttttaggagtttcttcagtccataaataagagttatttgtcatcatgctgtgaaaagttcattggctcaagatttagaaggtttatgttctaagtcctagttttttccatttctttggaagcataacttctatgtcaacagtaagtgcaattccaactgtttgtctagtttatctgtggactttgattctgttgattgtgtagcattgggaaattgacctagatagacttcatgttccagtttttactatatattcccatagcactttgtacctcagatacagggacttatgtggtttaataataatagttaatatttaagtagcatttctaatcaccaagtattatttctagtgctttgcatgtactagttcatttgttatttatttatgagatagatactgagaaacaatccaaaatagagtaaatttaaacctacacagtctagttccaaggggtagtgctcttaattactgtggtgcccagtctcttaaaatagagagtaatttgaaggaaagaaatgggaaatgtattattgtgttcattactggagtactttccctagtttgatttataagcaccagtctttcaaaagtaaactatgattccattctgcctaaattctgcatatattatccaaaatttcaggtatgctgaggaagagctgaatgaatgctaatattaccattattagtattattaagctattatttttctaaggtgaataataaatacatttatttaaactcctcctttcaaaaatgggtttaggccagaaatcaacacaagtaactcttttcattcccacttggaaataataattcaaaaatagaactaactggataataattaagaaataatttccctttttttgggttctgcacattaaaagtttaccctggttgaacagtgtaattgcagtataacggcatgataagaccttattgccatctagtgtcaggaaggagcactgcagcaatgatgccttttcattcctcttccgctggcagctttcttcattgatggatctacatcgctattaacctgcactcccaggtggcactgtttgattgatggtaaagaccatcagccattgattctgtggcctattttaataatttgatttcagagtaactcatttcatttcttacttccaaagcatggtttattttatgaggatgctctccggggaccgtaagaattttcatccaagttagtaactgtgtctaaatagtttgaatgtgctcagccctaaaagatttctttactttagcttcaagatgctaaacatgggaaaaatcttcatgacttatatttaaattgttatgaaatgtttcagacactcagaaggacataaagaatacaaatttacgaacccagtgtattaaaaggtctattgctatgtaacaagttgcctcaaaatgcagcagcttaaacagcaaacatctgttttcttacagagtttatgtgggtcgggagtcagggactggcttaactggatagctcaggctcagggtctcttagaagtacaggtaagctgtgtgctggggttgcagtaatctcaaaccacttgagatttccaggctcacttggggctggaaaatctgcttcaagatcactcactcacgttggcggtttctgtttctggctggctgtttgctagagtctcagttctacaactagaactttttttttttactgcccacgggcttagttgctctgagacatatgggatcttcccagactagagatcaaacccgtgtctcctgcattagtaggcagattctttaccactgagcccaccaggaatgccctacaagtggaaccctcataggacttgcttctcctggactcagaagtgggatggtggcagggaggggatgggagggtgggagtgagggaagagtgagggaagccacagtcttcctaatctcagaagtaactttaacttgtaccagatgttactggccacacaatccagcctcagttcccagtggcaggggactccaagaaggtgtgaataatgggaggtagtcaccagtgatcactggagtcatcttgattgatggctgcttactagacccgtcatcaagcttttttagtttttctaattagagtataattgctttacattattgcgttagtttctgctgtacaatgaagtcaatcacttatatgtgtacatatatccccttcctcttggaccccaaaccctacccctttaggtcatcacagagcaccagagttgagctctgcctacctaaatggtaatcatcattatgaagtttatgtttttcaacaccataggtgtttaatacttgtcttagtccattcaggatgctattaatataacaaaatactacagactgtgtgactttttaaaacagaaatttgttactggaagctggaagactgagatcaaagtgccaagcatggtcaagtgaaggctggcttcagggtcgcagacttcttatcttcatatagcagaaagggacaaaggagctctcttgtccccttttacaaggctaagctcattcatgagggctctgccttcatgatcgaatcacctctcaaaggccccacctcttaatagcattgcattgaccgttaagatttcaacatttattaccatatatgtatgaatccataaaggatatacagtaggtattttttcaagctttgtagaagtggtattttaacataaacatcattctgtcacactgctcaacatgttttctgagatttatccatgttgatacctgaaattctaattttccctttaacccctttacaatatttcttgcatgcatataatatattttattttaaaattccctttactggacatttaagtgattttctttccttttgttattcctgcaattataatctttctacttgcctcctatatactataattgtttgttgtttagtcacagagtcatgtcctactcttttgcgaccccatggactgtagcccgccaggctcctctgtctatggaatttctcaggcaacactcctggagtgagctgccatttgcttctgcaggggatcttcctgacccagggatcgaccctgtgtctcctgcttggcaggcagatcctttaccacctgggagccacctgggaagcccgaatactatagtatttatacttaaaagtagtatacaggtcttgccagcttgaagcatgtgcaccatttacctagttactggatgctgccagatttctcactcctgggttttttcttctgcttctcttaaatta

SEQ ID NO: 38860 - DNA, 603 bp, Bovine  19866880481239
  misc_feature (1)..(1): n is a, c, g, or t
ncgcagaaggagcacaaccccaccacttcctcctccggcgccgcgtcgcgggcccgcctcctacgccacggccacgcacgcgtcaagacgtcacacgcagctggttcaaggtgggagtgaggacagggagtgggtggggctcaaggaaggcggggcacggacagactttctcgcggtccgtctttactctcgcgagaagcatagcttctgctgcttgaagcctcaaacgtcacctgcagaggtacagccgtgtaggattttaagtggcccacttctgctatcggtctctcctacgtccttccagcgtaacttctcacaaatttattcagtattgccagatcctcccttgctctcaggctccgggctttgttgttgcacctgatttttttccccccacagaaatgagatttgagcaatggtggctcagcggtaaagtatttgcctgcactgcaggagccaccagaccagggacagaacacgggtttgatccctgggtcgtgaagatctcctggagaaaggcatgcaacccactccagtattcttgcctggaaagtcccatggacagaggagccctgtgggctacagtccatggggtcgcaagag

SEQ ID NO: 38861 - DNA, 1648 bp, Bovine  19866880504863
  misc_feature (1)..(1): n is a, c, g, or t
ntgttaactcggtatttgaaaaatgatgtcccattatagctttctcttgcaggagaacctttttaaaaagccagcaagttgtatgttatcttcacagacagctaagactggagaaaaagtgaaaagcaatctacacaacatattataactgcatgtttactctttcttcatgatttagcagagtagaaaacagtgctgtgtccaaataaagcagtcaacaagaacctgttatctgactttattgagccaaaaattacaaaggttctatttattattagattatattataaaatattctgattttttactgagactttttctgatatcaacaaaacactttcagagggaagagctaggatacctctgagaagccactttctcttataactgataaaacaatacattcttatggcataaattttactctatcttgaattatagtaattaccgtgcttgtcaggtttcccttctggctcagctggtaaagaatccgcctgctatgtgggagacctggtttcgatcccagggttaggaagatcccctggggaagggaaaggctacccaatccagtattctggcctggagaatcccatgaaccatgtacagtccatggggtcaccaagagtcggacacgactgagcgactttcactttctttcagtgtgcttgtcagagcaagaaatttgcctttctcatctttgtattcctagcagcgtctgttagaatagccttcatatgaaagtgaaagtcagtcagtcgtgtccgactctttgcaaccccatgaactattcagttattatcaggaatgcaatcaaaataactcatattggatatccgaaggagttcataacagaagtttgggcataaggctgtctcttttcagacacaggcatccccagattgctgggctacctctgagggaatgaggacttaggattcagagccaggaatttaaaacacaaaaacaaccacccagctgcctgttaaacttcaaaaggaaaagtactcaagtataaataaaagtatcatgctttacgcgaacatccatgttaacaagtaaactctttttaggttggcaggaataattctaagattgttttgtctacactgcaaaagcaacatttattattggtagcatctgccataagaataccaactatgataaagtctgtatagtaaaaacactgagccctagactgggttaaattagaaaaactcagatcacagacatcagttcttttattcacttttcatctgtataaaaggttgattggcagaggctcttcaaacagacttgacagtgtactccattgtgaaatatatataataggtaaatagaaataacattttattttcaaattgatgtcttttaagacttaaaaaaaatttaccttttggttgcaacacagggcacatggcatcttaattcccagaccagggatggaaccctattccctacacttggaggcacagtatcttaatcactggaccaccagggaagcccccttttaaaacatttttatattgacctatggagaaggcaatggcaccccactccagtactcttgcccaggagcctggtaggctgcagtccatggggtcgctaagagtcggacacgactgaggacttcactttcacttttcatttt

SEQ ID NO: 38862 - DNA, 3955 bp, Bovine  19866880566306
  misc_feature (1)..(1): n is a, c, g, or t
ntggtgaaccctcctggggaactcagatgtacttcgtcattttctgacatctgctctgggggggccttctccgattctgccggagtcctcttggcctgcatgcaattgcctagaaatgcaggggagtcattgttttctctcactcaaggggcactgggaacagccatccctccttcaggaggacggctttggagacatcctctatgattgaaccagaccctgtttctcacattggtgacctgaatagcttatccttgaactatcttttcttccttccatctcacccttgcattctttcactctcgattccaggaacacctccaagataaatcacctgcacccaaatccttgcctcaggctctgcttctgggggaacatccccccctccccccgcacccgcccaagatgacctgctatgcgtactgttcagcagaacattgtcagcttggttgcctcccaccagccttgactgagggaagagactgtggtgcccagcagaaacagcagggtgcctaatggatggagtaacacccagccaagagggtagaggatcaggaggtgacagtggaaattaagatagaaattaagatagaaactatgggctgggtgtgtctgtgaacatgtgagtcaccctggggaactccaaaagtacttggtgacacttttgctggaggcttcaaatatgcattttcaggaatgggtaagagccagtgggacactggttatgggaagatttggaacttcacaatgtgtgtgattctagagtcggcaaccaatgatgatgagtgacattttctgggagcaatgcagtatttctcaacttttggtgcacatcagaatcacacgaggaacttaaaaaacacagttgtccctaaaggagaatctgtaggggtctggccgtatttagttttgaaaattctcctgttgatgctatgtccaagaaagtttgaggacctctgtttagaagtgggacaaaacaaacataaaaaaaaacagggacagaagtcagaggatgcattaacacataagacgcaggcagagaaagatgagccctgaaaggaaggtaagaagcagcagtcagaaagttaggggaggaagtctcacgcaggtgtataggcccgttaagggaaggttgaacaagaacatggggtgggggcactggtaggatcagtttcagggaaataatgggggtgggtgtcaggacacagtggataaaagtgtggattgaagaggaagaagcacagagtgcattctgtcactttcaaatggctcacatatcaaaccctgcctccctccacatcatacccaccatgggagagcatctgtgatggtaagcctctatataacgctgggtttagcacagcccttcagcaccagggagactgtggctgagcctcccttagagaaggatctgtgagaatctctggtagaaaaatctccaagaaactaagaggggaaaaaaacttggaaaaagaaaaaaaaaaaaaaaaaaaacccaagcatttcaaaacagtggatgcaaagattgggatggtattttgctttttaaagtgaaagttgtctacataatacctctttcctccttggatggctcacaggcttcctgccccatgggaggctgtggtgtcctagagggaaaaacccttcagaacatctcctgggtcacactcgtcttgcactgtgacgctgtgtcctctagatggcaataaacctccacctttgagttcccctcctggcttcaggtcctttgaaaattgctttctggtagaaaaaaaatgagaggcatttcttcagaattgactggaagctgctgagaaagctcttccttgcctcttagttcttaaaaggcctttgcaacactggcaagagtccagtgtttggaatattgatatcttagcgaggaaggagctgctgcatttatgactaccctggagctaggatttgttgttagggaataaagagctcccagggcagcaaccttgctccttgggaaaccgtctttccccttgtgccccgtgcctgaatagctcttacccttcgtaacagggtcatggcattcattccacctcatgagccaacctttctgttttcggcacttacctgccatatgccatcaaattcaagtgttttagaagtctcattcaactctcccagctaggttctgttattctgttatttaaatagtgaactacttgaccagtatcagtcagattagagcttgaattattttttaaattaattttttattggagtatagttgatttacaatgtcgtgttattttcggctgtaccagaaagtgattcagttatatgtatacatataccactctgttttatttatttttttcttattatttttttttccactctgttttagattcctttcccatataggccattacaaagtattgagccgagttccctgtattatgcaataggtctttattagttatctatttaatatatggtagtgtatatgcgtcaatcccaatctcccaatttatccctttctccctgggtaaccgtaagtttgttttcaacatctgtgactttatttctattacgtaaataagttcgttcgtaccattttttaagattccacacgtaagcaatatcatatgatatttgtatttctctgtctgacttacttcactcagtgtgacaatctccaggtccatccatgtcatcgcaaatgacattatttcattctttttatggctgagtaatattccattgtataaatgtaccatatcttctttatccattcctctgtcagtggacatttaggttgcttccatgtcctagctattgtaaatagtcttactatgaagtgcagagcttgaatttttaatattgcctcaaggactaggttgaaaaacacctgcaaaactctctggtaggagccctgaggtgggtcagagaatctgtgtctctggggagtgttgctaaggccatgagccttaggctgtctgaagggtttctaaggctctccagctgtcctggagagggtcaaaaagttctgaagagaatcaaggtgtgtgtgggaagcaagcacagtggcccctgactactgctattaggggccagctccacctgtgacttgggactcggtttaacagtgggtatatgacaccatggagaaggcaatggcaccccactccagtactcttgcctggaaaatcccatggatggaggagcctggtaggctgcagtccatggcgtcgctgagagtcggacacgactgagcgatttccctttcacttttcactttcatgcattggaggaggaaatggcaacccactccagtgttcttgcctggagaatcccagggacgggggagcctggtgggctgctgtctatggggttgcacagagttagacacgactaaaggacttagcagcagcagcagcagcagcatatgacaccatcagggttcccaggtggcactagtggtaaagaaccaacctctcaatgcaggagataaaggagacatagatttgattcctgggttgggaagatcccttggaggagggcaaggacacccagcccagtattctagcctggagaatccgtggacaaaggagcctggcgggctgtggtccatggagtcagcaaagagttggacacggcagaagtgacttagcacgcatgcatacacgtacctatgacaccactgcatgcattcagacttttttgtttaatagtaactttcttggaaagcagtcaacctagtggtctgttcaaagcagtaagcacatgcagatcggctctagggatagaattggcaattgctggcctattgtgtctttgagtgagggcagctttggtttccagctgacgtcagaggaaggtcatacatgacacatgagctgggagaccttggagtcaggcttggtggagatgtctctactgtgaatttcttacagggagtcaccagggtgaaggctcaagtttt

SEQ ID NO: 38863 - DNA, 787 bp, Bovine  19866880591967
  misc_feature (1)..(1): n is a, c, g, or t
nctctattttaaaagtgcatttaggtaagattcccccagtgaattttactggggaattcctattaaactcctattttaagaaaatgatattagaaaagatgcagaaattgtggtattactctcccacaacaaaacaccatccttaattttttccctagggaagatcataagctctacttgctgctaatagatacttttaatttcaaaaaatatgaagtgatattcagaaagttaaagagttctttttctttgcttgactgtgaacaaacatttgtgaccaacattgacctaatcaaactaatctctggctaatggattttagtctcagggataagaagcattcaacctaaatctaggtttatctcaaaagagagaaaactagtaaaccaggcaataccagatgcaaatcaaaattatacaaaatgggaataacaggactgtttgaattagtttcagttattctgagcgctttctattctttatttttctatatcagtttctgaattatattttgacagaattgagcatgttctccattaggccataagtttgtgtatgcatttcccttttccatttcactttgccttcatattatcatttggttgaaatttagaggtgcctgacattgttgccataatgtcagtaaaatgagaactgtgagattgtaggatatacagtgtgccgagactataaaaaatacagggtcatagccataactgtggactgattgcgggtgtaataatggcttggtagaatcagcatctgtgggcaggcgttggcctggggg

SEQ ID NO: 38864 - DNA, 818 bp, Bovine  19866880626042
  misc_feature (1)..(1): n is a, c, g, or t
naatttatgattttaaatgtatgaattctgtgaggagaaaggggatagactttgctacaagttattaattacaaagctaaggttctgtttctcttcttatgtaaaatagtgttctttgtttagcttcttacagtgctaggagaattgcgtagttctattgattggttccatgcattagaaatctgacctttaacagatgtttgagaaattgccagcacagacagcattagccaactagacatgttccccttgttacttgacaggcctttagtggtttagtaacgtaccaaagaaatttaaacattttttttaataataccaaaatctttctaaaatattaaaagcactttggaaaatattgataaaatgagatatgtcatttttcccaaatcaaggattacagttaaggtagttttaaaatgtgattgtttattttataaaacaacaataaaacaagaaaatcctgtatgttgaatgaatagtattttactttattgaaaaatttgcttatgaaattgtcattcaggattaaagcgtgttttttattgccttggtcttttttttctcttgtgcagtgtaaacaattttagtgttcttatttgattgtaaatactgttcaaaagtatagaatttttacatagagattatgtatcactgaacactaaccatatctggaactcataactaggagcaggatgctgcataaatgtatgttaaagcttgttttctgaaggacagtctctctttagaggatgtaagagattcagctgtgtagttgagggtgttcagcatgaacactctaagctctgtttccttta

SEQ ID NO: 38865 - DNA, 1156 bp, Bovine  19866880628257
  misc_feature (1)..(1): n is a, c, g, or t
nactaactggaaatatgaaatgcatttccaagttgaatttcttgaagcacgacagacaatgctgtaataaaatccagatattcccgccactgcattcctttcctctaatacttctgtaactcaatctgaaaagaccagctttggaaagattacttctttataagccactaatgttgcttattgcttagctgcagatattttctaggtactcagattgtcaaaatcatcaaaccattgaaaactaaactaaggatattttacaatttttgtttccttgttctaaaatggcaatggtattccagtagctcaattctgtgtttcctgacactatttctcaaaaaaaatcacaattaggttttctatctcataacctctactataatggtttttgaacctggctgcacattccaatcacttagggagctttaagaaaataaggatatccaaccccaccccagatccattattacagtgtttgtgactgggctctgggaaaggtgttttaaaactactatagtgcttggtgagctcttattttaactgaggaatctaaatcatctctatgaaaacagatactcagtttatcatgtgttcagttacagtgaaaataaatttttaaatattttagttttaatgaagtatagttgatttaaaatgttgttagtttcaggtgcacagcaaagtgattcacttatacatatattcatcttctatgtcaacaggttcttttctcatatcttattacatcatatctcatatcatttgacagaatattgggtagggttccctgtgctacacagtatgtccttgttggttatctgtcttacatatagtagtatgcgtgtattagcgaaaatcattttattaagattttaaaaggtgagttatcactatcaaccatgtttctcaattttaatgatgtcatcaattctcaacatttgtaaatctgttgagttgcttttccggttcaaagctgtaattttaaaataccccatcatgcaaaactcctttttaaagagtgagtcatgttaggaaattttgtccctttattgaaggattaaatgctagcaaaacttaagactctgactaacaaaataataatagaacaagagtctggttaggagtaaaggaataaatgggcacttaccttacgagc

SEQ ID NO: 38866 - DNA, 2208 bp, Bovine  19866880644172
  misc_feature (1)..(1): n is a, c, g, or t
naaattgagatatagttgttattgatggagtcttatcaattaatgtcagtctggatggaagtcaagtttttctagaaaggatttgagtttgtctttgctagtcatatgggtcgatacaaaactgagaccactttaaattctctccttgaaatttttgacccatattggtagagtaaatttagaccacaaatcaaaataagaacctgtttgtggttcccattttcaggggaaatttagttttcctccttccacccagcaccaggtttaaatatttaaggtttctgcctgatctcttcttgcatgcctacgtgctcagtcactccatcatgtccgactctttgtgaccccatggactatagcccaccaagttcctctgtccatggaatttcccaggcaagaatactggagtgggttgccatacccttctccaggggatcttcccaacccagggatcaaacccatgtctcctttgtctcctgcattggcaggcagatcctttatccctgagccacctaggaagcccttttccatgagaatgtagccttttggattttctgacttttgctcctgaaggggctgaactccttcccttacagattctccatcttgggttttttctctttcttgagagtacataaatcagtgcctttcacaacagaggggattccctggtaataaaacagggcacttactctgttctccattttatccagtgctgccttatgctgtgtacattacattaccaacctgtaacttacctgtcccaaccactagcctctaagcctgtgaaggtgaaaatgaaactgaaaacatctgactcggctctgtacacccagattctagcaatgttcttagaacaaactggcaacttaaaatgtgcactgaagaaatgaatcagtatatgaataacacatagatcaatcctctccataagtcttcaatgcaactgagaaaatgctgctatttttaaatctatagatattaaaatttgcatttaaaaatgtgttttataaacatactttgttgatatattaaatattcacaatgtacttctagatcaaaacagtagatattatattactttaaaatgatttctatataaataatatatcaaaatattaatagttaattgtaaaacagatttctagatacgtttcatcttctactttcccagacgttctaaaattccttcagtgactatgtaataacacacattacacgtaatacatgttcgttttctaaaaaaataagtctgaaaatttgagataggaattgtgtgttgtttccaacctctaaaaggaaaattgttactttccttaatacaatagaacttggatcccccaacactggcaatggaaagagaccctcaatgtgggaagaaacagctagactgtgttcccagatagtcattctcaagtaagaagaagcgaaaatgtgtctgaatctccagactggggagtataatttgaaagtttatttcatatcatagtgtaatattatattaagcaggggagggcagtgtgggagaacacacaatctgttttcataatagaaacaacagaaaataaagatcaaccacatcttatctgatggagctataattttatttattttatttttttgagctataattttaaaaggttaagaaagacaacactagtttcccaagattcaccttccccttggagttgttgttgttcagttgctaagtcatgtccaacttgttgtgaccccatggactgtagcccgccagggctcctctgtccatgggatttcccaggcaagaattctggagtaggttgccatttccttctccaggggaccttcctggatcagggatcaaacccgtgtcttttgcattggcaggaagatactgtaccaatgagccaccagggaagtccactccccttggatatcttcagtaattattgcagttactaccaacctgtcctgagctactccttaaacactttagcccaaacatggacgcatgtcactttcgtgagtatcaacaagcctggcccactgaaacaaaactttactaatgacgaaagggtgaaaaaatggaattctccatggagcttaattaaagctttatagtcagcttataaaataagctttactttctataaatcacagatcccatctcatcctcatgagagtagaaagagagtagatgttttattcagaagtatagccgtgcctcaa

SEQ ID NO: 38867 - DNA, 1483 bp, Bovine  19866880665868
  misc_feature (1)..(1): n is a, c, g, or t
ncaggtgagctaacagttaagtaggacacaaagaactccagggccctctctcctgctctgggcctgtttctgcccatctcaactcaagggcagaggctcattcttgaaggcggggatgtgagtgcacgccactcccttatcctaatagctgtttcttacgaatatctatttctcaataaaaagttcagttatcactataaaaacaataacaaaactcccactattttctatcataaaaataaaacaatagtttgctaggcagtttctgaaagtctgtttttttttttttttttcttttagtaaaattatgagggagcagtaatttgacaccagaaagaataaatctgagaggaattctgggactaggaataaagcgtgtactaggtcaaattctcatttcctctacaggaatgttagtttaaaaatgctctgaagtaatatatttatacaacaaattgaaatgagagtaaagaaaagtgtgaaaagttaagacttttctccacccaccaaagcaatattaacaataaatttctgtttacttccttctctaaactattagcaatatcatcatagtaccctgggaaataaatctgcatataagtcaaattagcaccaccaagattttcaaagttgtcagtggctcacttatgtcaaatacttaacaaaatataacatttggttggtgacaaccaaagaactagcttattgttcccctaggctgtctggaggctaaatttcacttccctcaaattcatctcaattccaaataacaaaaatattaagaaggaaaaatacatgtgtctggtacactccactctttaaactactggtaacttgtcctgggcaatcattcaagctatttttagtaaaccagatgtgttgagcaacaactaacttagggacattctgaaactgtggacaatgaatttatatatcaataacggaaaaattgtggttcaaaacagactgtgacgaaaaataactttctcactgaaggactacagtaatgataaacagagctgacacagttcagacactttcattaacagaatattttaaaactttgctcaagtctttaatcaatctttagtctaagaacgaagaaaatacttaggtttgctccacgcattcccttcaaccagcaattcacagcccaatagtaccatatcaaatacttaataaagtgttcaatgcctgtgttttgtgataatagaaaataaagtattaggagtcttatctctgaacttttagcagattagaatgaccaagtacttcaaataggattattccttcaggtctaggatgattctactttattctagggaaaatacctcattactacaatgaattttaatatataaagatagacgtaggggttaattaaaagcaagcacattctgcttcaaatcttgaatgccctttgtattattattcctttattgcaggtgtgtgcatggccagaagctaaaatccaggacaagat

SEQ ID NO: 38868 - DNA, 1647 bp, Bovine  19866880721538
  misc_feature (1)..(1): n is a, c, g, or t
ntcatattaagcacctattatgtagtaataaatctgaagaaaagtggctttacgattggctaagcagcttcacagtgttagagtaccagttggcatctctgattctgtttacattaagaccctcaaggtcttaaattggcttcaggcataccttcacagaatatttccaaaagctgaaagcaagggataggagtgaaacaagagggctttcctcaagttgcaatcttttttgatcagggagaaaagtcattcccagaaacaccctagcagacttccttttatgttgctttggccagaactgggtccagttatgaaggagactgagaaagcaagcatctggcaaagcgaaacagggttccctcaatccctgggattgaacacatgcataccctttaaaaaaagaggggagtttatcttggcaacaaataagagaaaaaaagtggtttcagagacagcaatcaaaattgatttccacgaaaacagacatggagcttgcattttaattaaggagaaattttaaacataaatataaaaacaaggtaatttcatatgctataaatgctacaaaatcaggcgatgtgataaaaagtaatgtgcatattttgatggtaaagctgatagaatttgctagtggaactgaacatgacagcatgttaaaaagatgatttcaactgtgagtctcttctcgtagcagaagcacagagtactaatcacaatgggggctgctcaaggcatcacagggatttagaaagtttcttcctctctttggccaattttagttgaaataagcacaactgaaactgtaaccaaaggaggcattatgcttccagaaaaacctcaaggaaaagtatttcaagcaatagtagtagctgttggatggggctctaaagaaaaccagctcctgtgaaagttggagataaagttaagagttaattcttcctctagaatatggaggcattaaagtggttctagacagtaagaattatttcttattagagatgatgacattcttggaaaataagtaaacggaaataaattactattgagatggcaccacgtgaagctgccaatcccagggaagttttgaaatctttcatgtaaataatttctatgctttccttttataataaactaatgatatccaaattaatgacatccagtgtctctaaaattcagtttcattgcactgatttaaacatttccaaaacaaacagacaacaactccaaacaaaaaatgactccaaaggtaatactcatttccattcataaatgaagcttgagaaagataataatgagtgtaaagtcataccactattaactgatagtcagaattgaaattagtactatctgaaatcaaagtcaattttctctcccctatacatctatctgtggggggaaaaaatacacaaaatgccatatataaatttataacattgtaacacaaagaataaaaagtcaagtgtttgaaaatagttgatgcttagaaacttgtttctatttattatttttgtctttcattataggattggtaaaatgaacaaaatactttgtaaagttttgtgtctaaaccaaatatggaactatcaaaaatgttactgacttaaaaaaacaaaaaaacacccattaccgactgttagaaagtagcaa

SEQ ID NO: 38869 - DNA, 1835 bp, Bovine  19866880779802
  misc_feature (1)..(1): n is a, c, g, or t
ntggtaacagtggactcatctccagcagagagagagagtggaatttagataacagagcaggcagacaataagttaccagctgtcaccccaagaccaaccacagtgatagccggaggttgttgcacagacctccctttctcagtcccttaggacctggtgagctaccctagcttctcctcttccccattcagcagctggattcttaaagcaattcatgctacttgcctacttaaaatcatccaagtttcacgtcgatcacaaaataaaaatccagacttcttccccttcatctgaccaggcacacctcccaccgatgttatccagaagcagccacacagatctcctttttgtttttcaaatgcaccagcctctttcctgcctcaagaccttgccctttcccattccttcagcctaaaaaagcactctagttctcttagaatctttttttcaaatgtcagctctcctgagaactctttactggccaatccatctgaagaagcaccctttccaatggacctgccccatcatatccctcaaatagagcaacgattagcacagtctcattacttgccttgtttactgtgttattatctctctccctgagtagaacataacccccacagggacagggtcttgactgttcactgttatctccctgacactctgaacgcaaagtaaaggcaaaagttgttcatataatgaatgactgaataaaatggtacctaacccacgcacacctctgccaaattcatccccaccatttactttcatcgtaataatattaatgtattttgacggctccttacagtttttaaatagtatattcttgtttgctatttatagcttttacatacattgttcatttattttgatcttaagaattaaccctgtgaggaaagtagggcagaaatgacccccagatgaaggattaaaaaaaaaaattaaagctgaggggcttcctcagtggtccagggcttaaggctcagccttccaatgcagggggcatgggttcaatccctggttggggaactaaggtcccacatgccatgggcacagccaaaaatttaaaaacataataaagttaaaaaataaatgtttgaaaaatttgaagctgagagaagcaaccaacctggaaagtgccaaaatctaaatctaaaatcgggttttgggaaatgcaatgatgtccgacaccaactgccagtgttaggccaccgaacttcacaggttatggacgcggtcctccacaaggctgccctcacttcagacacgagcctcaaaggcaggggtcctgctactccgtcaagtttgagagtttgctcgaactactcaaaggactcaggaacacacggtacacactattaaagtattatcactacaaacggacacaaatctgaagcagccgagggaagagacagatggggtgaaatgtcagggagctccaaacatgaagtttctggtcatctcctgtggagttctggatgatatcacctcctcccggatccaatgtgtgccagctctcaagagcactgccaagcagagacactcacccaagtctcccgtgtccagagtttttactgaggctcagtcacacactgcccacatctctgacctgtagtctactgctcctctggaagccagaactgatatggatggcatgttttgaagcccccatcataaatcacattgttagactggccagtagccaaaccccccaggcagacaaagacactcctatcaggtaggacatctgaagggcctagatattacctcccagcagctgagggcaaaggccagacatctcttttgggtaaagataattcttcattatactgggg

SEQ ID NO: 38870 - DNA, 1146 bp, Bovine  19866880818626
  misc_feature (1)..(1): n is a, c, g, or t
ncccctgcaatggaagcatagataaccactgggaccaccagggaatcccctggaccaaaccgttttaatgctgattaactttcatcatcatatgaaaaaatccatataactatggtagttgtctcaatatttctcataaaatatatttactgaaagtcacatacttcatgaatatactataaaggcctactgtgatattgtgtttagctttttctagtaactgaaggattttttttttttaatagaattctcccagtccttggttacatcagcctacccctgtgacctcagcagatggtattggattacttagtcacattcctgtcagaccttccagtgcagaacctcatcggcctcttaaaatcgcagcacattccagtccgccactgacaaaatgtttagtagatcaccataaagagtaagttaccagtgcttaaaacatatcttttatagtttttcttaattgtttataaataggtatttttaacgaatgtcttaaaactaggcttaataattattattattctggttttatatcccttctaattttcttaatattacagcacttgcaaagtcatgtttcactcttacgatacaatagtaatgcatagaagctatacttgtatcatacaagaaaaagtgtttacagaaaccttcatgtattttctttacagagaattggagaggaaagctttcattgaaccactgcgttctgttgcatccacatcagccaaaaatgacctggatctaaacaggtcacagactggaaaagatggtcacttgcataggcattttgtggatcctgtattgaatcaattacagagaccaccccaggaaactggagagagattaaacaaatataaggaggaacaccgtcgaattcttcaagaaagtattgatgttgctccctttacgactaaaatcaagggtcttgagtgtgatagagataattattccagagtagcatcgtcatcttctagccctaagagccatgtcatcaaacaagacaaggatatagaaacagatctttataaaatgaagcactcagtgcctcacagtttgcctcaaagtaactatttcactacattgtctaatagtgtagtcaatgaaccaccaaggtcatacccatccaaagagatttcaaat

SEQ ID NO: 38871 - DNA, 1184 bp, Bovine  19866880835400
  misc_feature (1)..(1): n is a, c, g, or t
nttttcttgtaatcccatccaaatttgttttttatctggtagtttcttaataaaagtaactttcttaaaatttccctgttatattcttaatagccttttatactatctgtactatattttttgtatatatttgtgtttatttcccccaccagataagctccaaagagagttttgttgttttgttaattgctatatttctatacctagaacagtacatgttacatagtaggtactcaatattttttaatgagtaaagaaggaagaagagttgacttctaagtatataacaaatattaaatggtacttacaagaacatgtccctttcttcagtggatgggtctagtttctcagctttgattctgcttgttaaggagtacacagaccagtctgacttatccctaagtccagttattctgtgatgtttggttaatacctaaattctactgatatctacttcaaaattattctcagaaagcaaacatttttggttaatttacttcttcccaccctaactgctaccattgtctttaagcctgcaaacattgtagattgcacctgatcaaacagatgctgtattcaaatcaaaacaaatggaaagtgctgtgtattttggcaaccttcctttcttcctttgcctatttttaaaacggagctttcctaggatataatttcctgcatagtgtggcagctatggcctacttaaagtcttgcagtcttgcagtaattgaaatgtaaacttactgaagaattagtatggttttgcaattttttttaagcctagaccgtctcacgacttgaaaatagagtgtttacttccaagttgtgtataattgctgtagcttttctaggaaaccagtgttcttattctaagaatgttggggaaagtggcaatgaaaagactgggtagcagtagttagaaatcacagacatttggtcctgagatttactgtgagcaagaacaaagaacagggaagactctgggagattactttctgaaaggccctccaaaaccttgttgacttagtttttgaaagtgacctaatttttgactgaatatttgggtgatatgaagctgaacaaatatgccacatgcttgtcatttggtaaaatcttaaattgtctactagttttgtctgttagaaatttgtctaccagttataaaggggaaaaatgtaataaagaaa

SEQ ID NO: 38872 - DNA, 1591 bp, Bovine  19866880951316
  misc_feature (1)..(1): n is a, c, g, or t
naacttaccccagaagaaaacataggaaattgcttttcagtacatattaacttattttcctgataaaagaaaatcaaaataaaaatttagcccattccaattaaaaatacaaattactaatatttaagatagtgttgtattatttttaataacacaaaagttcaagcattccagagtacaaactgtgttattccaaaaaaaagagaaaaactctttatctaaccaatgtttacagaaatttggaatatttacataccttataacactgtagaaatctttggtggtgacatatggattaagttccctgaaaacactttaataattttattccatcaatctgtatagtcaagtatttaaaactggtaatgctggcaacatcattttctatccaaatccacatacatatagtgaagtgtgtggagggaatcttatgcagggattatgtgggtttatataattacttagcaataaggcttatttctggctcatttttacaccagaaaaaaaaaatatagtaaactaaagaacagatcaattcttccttctaaacaaaccctggaaatagttaatattcatgaacaagttgaatgacaataaactgagacaccaggtacagtttctggataaacttttatagctaccaaaatagtgccctaaaggcttgtgcagcatctaatgcccatttaccaaatggtggtggtggggtgcaaggcactgtggtctagggataaacacacctcttttataagcattagatttaaaagcagagaaacaaaaaaatgacctgttccaccttaaaagaaaaaaaaagtacaagtttattatacaaaattcaaatgaaagcatgctaaaacacacagaagagaaaagaagcaaaatataagaaatgaaaggacagaaaggaaatgacagaacagtgaaacgacattgactgtatgtaaggttataacaaacgtatgagaggaagccttgagatatgattaaatagaaggatttgcatcatctctttgaaactagtgttgctcttggttaaacgttttgactctagaagtgtagagggataaataattcctccaatttaggacagtatttgtgagtttacgataattaaagcataggtgtaatactgcaaagtgaaagtgaaagtgaagtcgcttagttgtgtctgacgccgtggactgtatcccaccaggctcctccgtccatgggattttccaggcaagagtactggagtgggttgccattcccttctccaggggatcttcccaacccagggatcgaacccgggtctcctgcactgcagacagactgaaattagacttaaataaaataaagtggtgcaaatcggcccccaaaagtaatgtttttgatacaaagtcacttacatgaccttgttaggcaatttgagatgacactgccctagtgtaggaaaggtaagcaaggcacacgtagcatttatattgggaagtcaagtgttctaggcaatctacgttaaactctcttccagagtttataaccagaattcataggaattttgaattagtcaaggttaaaatagatgaagatactcagaattaaactttgggggaaa

SEQ ID NO: 38873 - DNA, 2768 bp, Bovine  19866880964990
  misc_feature (1)..(1): n is a, c, g, or t
natgcttgagaaagaacaacaagatgagaaaaatggcattcaacatatctcatagtcactccttccaaagaagacattttaatactcaaactccacagaaaacgtcaagtagaacagaacaatcactcagtgtttgaaagaaacacaccccgaatgtttctcctttacccccacaatactaccaaacacaacacttctgaccccacaggtgtgggttttccacacatcaagcaattccataacatcagctgggtaccctacaattcaattctgaccttaatcagggttagcacagacccgcatgtcaaggactcagtctcataagattgtcctccacatcaaatacggatcacaagtactaagtctcaaggccacccacaacttctatctggcttggcttcaaatcagaagctcccatgacctccctgcttggatctgatcatttgctggaataactcacaaaaatcaaggtaacacttacgtttaccaatttactatgtaataaaggatgtcataaaaaataaacagctgggtaagaggtacatggtggctcagtaataaagaacctgcctgccaacaccagagataagagagacacagattcaattgctgggttgggaaaattccctggaggaagaaatggcaacccaatccagtattcttgctgagaaaatcccatggacagaggagccttgcagactacagtctgtgggtcacaaagagttggacacgactgagcacacacatacgcgagaggtatataggctgaggactgaaagggtactgagcacaggagcttcttcctttgtgaagttgaggtgccccacattcccagttcatgaaagtgttccacaacctgaaagctagccaaaccccatactattgggatattttttttttggtcatgccacacagcattcaggatcttagttcccccatcaggcatcaaacccatgcctcctacagtggaagcccagagtcttaccaccagggaagtccaccactggaatttttatagaggattcatcacattaggcatgatcaattattagctccacttccagccacactcccctttcttgcaaattgaggttgggtcaaagattcagagcttctaatcatggcttcatctttctggtaaccagtccccatacaggagccaacaagagtgagttcattagaacaaaagacactactatctcctaggaaatttcaagggattttggagctccgtgtcagtaactaaggtcaaagactaaatgttagaataaaagagtctcctagcacctctatttgcaagggttttaggaggtctgtcagtcctaaaggaaatcaatcctgaagctgaggctgaagttcccatactttggccacctgatgcgaagagccaactcactgggaaagaccctgatgctgggaaggattgagggcaagaggagaagtgggtgagagaagatgagatgtttggatggcatcaccaactcaatgaacatgagtgccagcaagctccaggagatggtaaaggacagggaagcctggcatgctgcagtccaaggggccacaaagagtcagatactactgagcgactgaacaactaggaggtctgtgtcagaaatttggaaatacatatatttcttatgattgcatacatgtgcaattataaaccattttaaaggatgctgttattttggttttcccttacttctcccccctgaaaagaaggagctacacttttcaaaagagggttctgtggagagaacattcaccttctctgtgtccagtcctgggaaaggagagagattctaactactaatccatccacccccatttactcaaaatgttgggagagggagaagagaatataacatagaaatgaaaactctacccacccccaagcatcaccaacaatgcctcaggcacatatgaatctactgagtagtacatatctgatgacaagatttgtaggaggcatttatctttgaaatagatttgaagagatttgttttttaatctactttaaaattcctactgggtaaatcttaagtggcaaaatttcagagtagaaagagaggtcatttacattcaaagagaaagatttggtttattagaactaaaaaattatagctctactgggtacgaattttaatttggccttctgtctagggcattgttattctatacaattacggaatgaacctgaataaaggaagtcatcatccatggagggttttcctgtaggttgaaagtccgttatgaaaaatcttccttttcaccctgtgactgtcttaacagcaaaacaagttaaagagaaaggtttttttggtacttaggaagcatcatgtgagtttggcaatggtgaaatccacagtaattgggtaaaatagttggatctgccagtagagggagtgcaagtcaaattagcaatagaaatcttcagaaataggaggttatgggaggattctaggaagttgcttgctaattagggctataacaaaacacagagttaaggcagatttttcatgataaggcttctgctggtgcaaatgcctgggcccaaatgcctggaataaaacattagtagcctatgggagtggcttagaagccaatgggagtggcaattgactgtggggcacaacagatttcatgtgtaacataatttatttaaccctatatttgcatctcctccccacttcttgtttagttttctgtacatatggttgtttgttttgttagcacacattatgccaggatgtctgtccaaaataagg

SEQ ID NO: 38874 - DNA, 1140 bp, Bovine  19866881087352
  misc_feature (1)..(1): n is a, c, g, or t
nttaagggaaatgttgaatatgtaacagatgggacatagaaacttaagtgagcttcatctgaagtacaaagactaataaactctgtttagttttctgcctcttgcagatgccttgcaagaaaagagctgggctacagtgagagatggaccaagatttaggggaacgtatgcagagctgagcctgattttgaatgtgtttagtttcctgcaacttgttttgctaactccatgcctcaagttgactgatagagctcattgcataaagtttcatagatgtctttttttttctgcagcagaatgtcctcaaggaagttcaactcaattgcctttctctgaaaaagacgctgaactacgtgattgttcgatggtcctggaaagaaatatctgtttcatttgaagtttccattttacccttgaaacctaggtttgatggtgtgagaaatgcttgccttcctttctttctccctggttgagttacagagaatcattaggtactcattagactaatgtgaaggcagataacaccggttatggagcccatgactcatttttaaattttaccagttctctttcacttactgcctaaattgcaggctttcttgtgacaggtagctctgaaatagtagatatcaaaatttatgacttaaaaaagttaaggtgcttatctttagaaaattcctggtatgagccaattaccaacctctttactttcgtgtgtgtttgtgtgtgtgctcagcctcttagttgtgtctgactctttgtgaccccatgaactgtagcgtgccaggttcctctgtccatggaattttccaggctaggatactggagcgggttgccctttccttcttgagggggtcttttgaacccatggatcgaactcatgtcttttgcatctcctgcattggcaggtggcttcttatcactttgccacctgggaattttgttttttgtgtgttaattgctcagttgtgtccgcctttttgtgtccccatggacttcggctgcaaggctcctccgtccgtgggattctccaggcaagaatactggagtgggttgccatttccttctcaagaattttgtcttggggcatgccatatgccagctgacttactgaatccttgcttttaaaaaaaatttttt

SEQ ID NO: 38875 - DNA, 1461 bp, Bovine  19866881161180
  misc_feature (1)..(1): n is a, c, g, or t
naaatactgaaaatagtatgaaatataaatttaccaaatacaggaagtatctaccttctcatgtaaattaaaaattattgataaaggagaggtgaatttaaggaaagaatcaggacttttataatcaggtcctcaactgacatatgtgaatgcaggttgagtttgagtcttgaagaatttacaggaaatccatacgcaatgattatgaaaggttagatgttctcagcattggacattcctccagcatcattgtgtttgtcctctttccttctttcagccagagctatttttggctttactttctctggcttgcttctatagccagtactgggcttcctcttcctttggctgccgtcttggcatgcacattattgatatttcttctaaagaagtaagtagttcttgctttgaccacacgcaatgtaagctcactctctctgtcttgctttcacacacacacacacacacacacacacaatgacgaaagccaaccctacagttagtggcttaggagtgaaatttaatacaagggttaaagaggtggtaaacatgacgaggtgaacaaaaatgttccagagacttccaataagttatttgtttcataaagaaagggatgactaagaccaaaacttttttcttattctgtatcttatctctattctcatagcctaaatttaagtatttaagttaattcttgtagctcagctggtaaagactccacccgtaatgtgagagacctaggttccgtccctggcttgggaagatcccctggagaagggaaaggctacccactccagtattctggcctggagacttccatggaccgtatagtccatgggattgcttacttgatatgtttcctctttataatgtactgagaagtttaattggtatctatttgctattcccagagtggggaaagccttggaaggggataaataaattagcccttgagtttggggtctactttaggatgcagtggggagaaatttctaaaggaaaaaagtggaagtctaaggctagtgaaagaggaaaggtcctggctgcatttttacctcagtgaattctttctgaataagactgtagagtttgttcacatctatcacaccaagcacagtatttttagtaacagtaatacagagcagcagcttgtcacttggaggctgaactaataagcatactgttcctcttacacacgacaagccacgcatcttatttccactcatccttacagacgctcttaagctttccgtgtttctttacggagatggcaaggagtactggttaataagctcttagggttattcagaatccctcttcagtgctccttttctgaagttggaaacactcatgcatgtgcacacatgctcactaacctttgtcagaggtgaagcacttccaaacgccactgaatggattaaaagaatcctgggcttgatagaactcataccaagagccagg

SEQ ID NO: 38876 - DNA, 876 bp, Bovine  19866881212230
  misc_feature (1)..(1): n is a, c, g, or t
nacctgtgttccttgcattggcaaacagattcctaaccactgaacccagggaagtcctagaaaatgtttttaaaggaagctagaggcaaatttctcctagaaaacttaaggaaaaacaatctttgaacttctgcctatgacttcattcatttctttcctaccactcagtttctaagtcttatcaacatttatttaaaaagtaatcaaactccatcttctaatagctcacgattcttttgactctttctcagtatgtggctattctgtttgaaacaaaatccagatagaccaggattttgcatctgagcatcaaagcaagggggtagagctggaaatttgaggtctctgtaattggagatggtgaatataatgtctcaagagctttgattatagaggccttggtgttctgacaaatctgagaataaaatatatatgaaaactgtttcttttgtgtctgacccagcacagatcaacaggtgaattattttttacagatagaattaaggcagtcctactggtgtaccagcagatgcatggttcaaggacattgggcattctggagaattctcttctgctcccttatttgagaaacgtctaatgcagaactggttaaatcattgcttttctgcctttattcgacagacttttccctagtatcagcttactggtaagaaacctgcactgaaattctactttctttggccttccctctgtcaaactttgttgaatagaatgcctgactcctgcctaacttggctctcttcatcttggctcaggctgaagcaactggacagcttggctcagagtccagggggttagaaactgcaatctcgtggccaccctgcctctccctcacatgggctattcctgcccagt

SEQ ID NO: 38877 - DNA, 1950 bp, Bovine  19866881277289
  misc_feature (1)..(1): n is a, c, g, or t
nacagtttttgtgggtttcaaaaaaaatttttatttacttgtgtccgtgctgggtcttcgttgctgcataggcttttctctggttgtggagactagggccgactctctagtttcagtgcatgggcttctcatttcagtggcttctcttgtcatgaacgtgggctctagggtgtgcgggctttggtagctgtggcttccaggctctagagcacaggctcagtagctgtggcacacaggctagttgctgtgcggcacgtgggatcttcccggatcagggatagaacatgtgtctcctgcattggcaggtagattcctcactaccgagccaccagggaagccctgtgtttgttgtttttgaagggggttgttgggagatggaaggcatctcttgcttcatattatgttggaagatactagaaactaaagttgttttcaaggttgaaaacaactcatttaattcatcataagtcaaattaatattgactgagtgcagtggaaagaaaaacctcactggaaagcactctataacctcttaattaatatcagctcattaactaatagtctgaggtgaattccagttccaaagaccataacctcaatcagtcccttgaaatttttttcttctttaatatattgctgttttttttatattattccttaaaattgagaacaaattcaatattccctttcttaaattgtctctaccttttgcatacatctaatttatttatctttccatgtgcttagtcactcagtcgtgctcaactctttgcaaccccatggactgtagccagccaaggttcctctgaccatgggattctccaggcaagaatactggagtgggttgccatgccctcctctgggaatattcccaacccagggatcgaacccaggtcttctgcattgtgggtggattctttaccagctgagctaccagggaagccctattttcccatagaccatcgaaatacctagaaactttgaatgtttgagcatttggaatatttgagttcaaagtacattcttcagactgcctcattcatcactctgaaattgcacaaaaattatttgtctgactatgtgttctagtttttcacttgggaattatgatcctgtagctaaatttgccattctatagaacttgaacaattctaacctccaccaagctctgacttgtcacttcagccagttttggggacagaactggagtcactagttaatgctggttttaaaacaccttttagttacatggcccttgaacagctctggtgcagacagacttatcagagaggtttacatgatcattttccttgccacccctttcttctttttattttctaactcccagcttccttacatgtatctagagagctttccaacttctcaggatactctgcactggagaacttctccctatacactgccttttactctgcaaacattctggcccccaccttggacaaaacatttctattctatgtcaagaatgactgaaaatatcttgaatattataatgctagaaaaccaatacacttttaacaaggaactttagagtattaaaggaatgacttgtgatgggaatttctgatgacagaatagccaacgcaatggacaaagtaatggacttgtccctcgggtctgtgaccctctctttccctgtgaactgacctttctcccaaacgtcccgccctgtgtcctgggaatgggcctggctgctgagctctgctggatttgtctgcttccttggttacacagattatactaggtgagcaactgagttcagctggtccaaccaagttttctctccagaaatttggagccggaatcaagagaaagtttgcaatgttataatgtgaacttgaagatggaaattcagccatatttgccttgtgaccaacagataagacagccagcctgaagatagatgatgcagtgccgggcagaataagg

SEQ ID NO: 38878 - DNA, 1072 bp, Bovine  19866881532387
  misc_feature (1)..(1): n is a, c, g, or t
ntggcttgaaaaaataaactttctcggtgaagttctggtcagatgagttggagtagaactgaatttgatggtgtttagatcaagacagtggttgtcttgtcaaataatgacttgtttgaacctaatgttttaggtatagtggggagaggacaactcatctatgtatgtatgtattgcttcccaaaatactcagtttgatttgtttgctaccaaccttagatgacctgaacctatttggtttgtatattgcttctaacagtgaaacccttaaaaaggtgacttatataaggcttacagttagagaacacattagtacgtttcaaatttttccttaagacattcttgtcaaagatcaaatcttaccatggatttatttcttaggctctgttgttatgttactgctaatgaactataacttatgaatttgcatttttgcatacatttagataaaggaattttcttcagtccttagaacacataggagggaaggttggtaacattaatgttaggacagcgtaacatggacctttctcttaatctataattctaggacgacatagacagcctaaacccagttctcagggacaacccgcaacttcaggaagaagtgaaagtctgggtaaaggaacaaaaggttcaggagatttttatgcaaggtaactgttttgagttatgcattaatttttttgttttttgaactgggcaatttcttgtttgcttttggttgtttagttacatgcagtataaatagaagacccagtctaatattttcaattatatacaggccccagaaaataatagcaaaatcagaataatttcaataggaagttgataactttgctagtttactaatttgagctaaatgcctggaataaaattctgaccacacaggtgttttgttgataggaaaatttccgtattacggacgctgtaggtgtgtccttcctggagaaggaagcattgttttctgtggaggattgcccagagccacagttgatttcctttgaagaatgctgttggtatctgataaaaatggcttatttcagtttgccttcctcagcaatgaccacaa

SEQ ID NO: 38879 - DNA, 1990 bp, Bovine  19866881604032
  misc_feature (1)..(1): n is a, c, g, or t
natgttcattgtgatgcaaagtaacatacatggggagatgagaggttaagaacaaaaataaccacgtgtcaaaggaaatatatggcatatagtacatagtacaaagggatgatcgatatgctgctcagatagcataagatggcttccacaaattacattcccactttcaaaatgctgccaatccccttagaagcctgagataagaatctctgaactctctgcactagcatctcaaagcagctgccaaagcaataccaatgcttatacacccagaatgcaccaagcactgactccagcattttacatgaactataccatttaatctctcaaaagtcccatggggtaggtactctgcattcctgcttttccagataaggagttgagacacaccaaggtcaggtgacttgtctggggtcacacagcaagtaagcgacagagcgggaaatccaactcaagcgtgcatcctcttcctgtgccagtgtcatgcctcccacactccttgctctgagccaaattcacatcacaacgtctttcagttctgcacatacactcccacccacatccaacttccatgtgtcttacactcatttgtttgatacttcttgaccccacaagccctttcattccctctgccagcttctgcctttccatatcctgtcacagtcaagcaagcccagtcaggaatattttccctcctgcctggatcaaattgttatcattatgaagatgactgtttactcattgacatcatcacactaatgcttattaaactcatattactgctgaaaggcaagtgtgacttgatcttcacagtgagtcattaagtgcaaccaacactcaaagaaatggtaaattgatggttgtgataagcctcctaatcatcagattctttttgatgacctccttgttatcagcaagtatgctgataggaccttaatagtccctttaccggcaagtcaccactagcctccttgagaatccaaaatgcaccatgtatgtgaatgtgtatacgcaagtgggtttacatgtatacacataattatttacgttattgacatcctgccttgtttccgattatggtcacgtaaattacaagatgccacaaaataaaagcaggtaaaaaaatagaaaaacaaagaggatcataaagtggggacaggagtaaagctaaaaatgcatagcacttatcctccccagtgaccacagatttggccctgaaaccttcaaggaacctgaagtgaaaagaaaatcttgatccatttctttgtcacagagcacttatcctccccaatgaccatagatttggccctgaaaccttcaaggaacctaaagtgaaaagaaaatcttgatccatttctttgtcacagagtctatgaaaaatcaaaatgactgctataggaattacaactaatatcaataagcccacaagagaattttagctgaggaatcctcaaagtagggatattatagaatataaataagcaatggtgtcaacagtatccttacaacactcataagtttcaactattttcacctaccttcattgtgattgatagtaacatagccaagcacaactcagaaaaggtaattcttggaggcaggtgggtaggaagtaagatgcacaaaggatcaaatgtatattaatatatgtaagtacatcatatatatatatatatatatatatatatatatagtatgtgtgttaatatattattcttaaatttcttaccaaaatatgctgatcaaaaaaaaaaaaaaaactatattcagtatctgcaaatgtagtgaaaatcctagtcagcgaccaggagtcctgcaactggtatatacatcacaactgataagtctgttttctgactctgttaaaattatggttaatgtaaaatcactactagtaataacctaaaatcattatcagctgcagtgtgtatgcactgactcttatctccctagagctcacaattttcactggaatagacagtggggatta

SEQ ID NO: 38880 - DNA, 2845 bp, Bovine  19866880426676
  misc_feature (1)..(1): n is a, c, g, or t
ntctgggtccctctccccgcctcggtttcctcatctgcatggggatgaggttccagctctggctgttgagggtacttagatccactagggggcacccgagtcctgatggtgctgaggctgcgggagcaggaaggtgccaagtgaaccctgcctggtccaggaggaggagctctggccttagcccttggatggaccagactctgggcctggggccggtggcgtgcccgatgctctgcccagggggcaagggactccagtgcctccccactttgatttcacagcgtgcggtctccacccttccctgctgaccccccagcccctagtctgaccttcagacaagtctagaatggaacagtgagtgactcaagggtggtctgttcagttgccctaactggtttacaggctgaggaaaggccaggcggggtgaggtggctggggcaagttaggtcactgaggagctggcagcaaagctgacaagttaggaccaggggtgtgttccctcttggtcggatgcccagtgtggcacggttgcccctggggaaagcctcagtactccctgacctgaacagagagaagggtcggggtggggcggggaacaaaaggattcctctcgcttgtcctctgcaccggctcgagggagggcgctgctcggggcctaagcagcccccaggtgattctgtgtggcccaagcccccagggcctgctgggcacacaccctggctccccgtgtcactcctgccctgatccccttctgggaaaaggacaagaggcccctgctgccttctctactaggtcctggagaggaagctgtgaccgcaggcatcctagaggcccaggccctatgtggccaggaaggagacctcagtgggggtgacagaggccagagggaaggcaggggcagcgtcagccccgaggacccggtacagcagctcctccttctcctgctggagctgccgccgtgattgcgactccttctccagggcctcacgggcaagaagcaggtcctccgagagctgcctgtggacacaaagccggcgctgcctgaggggaccacctctcagggcctccagcaactgcaaagaccagcccattcctccagaaagcctgcccggtggccccacttgaaaaggcaactccagctgttgaccaaggtggccctcagctttgggttcagatctgctccacctctaagaagtgtaattctgccccaggtattcactctgggcaaacttgcaaaatgggaatgctaacaggaccggctctcagagtcagtataatgatcaggattagatgagataatatgttgtcaacaaattacatctgacacatgatctcagctgtcattgaccgaccccttaccactgattcagtcattcttttggcctcttgaaccctaagcttcctgttccttcttcctgaactgggctttcccatggagcccactcagctgggatggggataaacagatattaatcagtcctgctacttctgtttccgggcagagctggtcccttgggactcctgacccccaagcaaagaggagccaacctcctcccccagacaggcttgggcctcctgcagactctcccaactggaaattcacaaaaaataagcggtggggtgggaggagcagggcatgggagcagctaccttgacacaaccatctggttgcgtcctctggcgtggaggtcctcgttctcctgctgtagggtggtgatcttctcctccaacagcagatttttttctttctataacaaatcagagtgagctcagaaagcccccggcacaacgtgtactatcacctccctcttatccgtggccaccaaaaacactgattcactttagaccaaatgttacatttcacgaggcactaagattacttggaacaatgcaactaaggcgtgaacgcaggactgccaacttttcacttcgccagatgagtattaaaaaaagaagacagccactaccatctaaaatctccatcagttcccaagagaaaaaaaaatagtttggttctccaaaagacagaaataaataatgtatataaatgtaagtgtatctgttatgctaatccacaaaaaatggttgaacaaaatggataagggtccactgaaatggtctaactttatgttgtgcggcacacaagaggccagggaacttcttccaggacaatgtaacataatctgtttggattcaatcctaaatcccccaaggccttccttctggagacaaagccaccgtgtccctgacgcccaccactgcccaggcccgtccttgctgactctgatttcccatatctgtctgattttttttttttttccggcattgactccttcctcaacccttgccagacctgtgacatcttccaggccctcctggttagccaggctacttgctctggtgtcacccaagtgatagcgtcgcgcatagtcaaaaagtacaagaccaggatgagaaggagccactgctgggcccagaccagccccagggactcaagggccagcatgggcggcaagtcaaagctggtgtggaccaggctgggccttcctcagagtataatcagtacctaccctctgcacacatgacagaggaaatacccagaaagtggaagcgtaaggctgccttcccctagcccccttccccatccctcatcccagctgctgccagccacggaccactgtctccatgaggatcagccgcttgtccagctcatggattcgctcattcttcatctcgatgacaaagtgtaagctctccagctcctgctcccagaactggctgaggctcccgtgctcctagacaggaacacagagtaaccttagaccagccagcatggggaggggag

SEQ ID NO: 38881 - DNA, 882 bp, Bovine  19866880474264
  misc_feature (1)..(1): n is a, c, g, or t
ncagctccctcctaatgacgtggtgccagatttcaaacccagcacccagtgtgctggcgggcaaccccaggagccagccgtggaggtgagatccagcacgctcctaattgataaggtatcagctccacctaccgccaccagcaccttctctagagaagttactcccatctccagctccaggcccctgggcccagatttcatgtccagctccctgctcattgatgtccagcttggagccccagtggtgtccacagagcaagagatgtccgggcggacaactgccaccacgcccaccaaactgtacagcgaggtccacctcacgctggccaagcctccatccgtggtcaataggacggccaggccctttgggatccaggcgccgggcagcactggtcagatggagcgaagccccatggtagagagacgacatcgtggggagaagacccccgtcccccagccccccagtgtggcagacaggagcccccggccacagagacacgtaatatcccacagccccatgctggagaggaggcccgtggcacagcgaagccccgccttggagagacgccccctgggaaacttcacccccacccacccacctatgctgagaccttgtccacagcccctctgacttccggggttaggtctcccccatcttattctgccctgtaccccagctccgactccaagccttctcatctaaagggccaggcagtccctgccagcaagacgggcattttggaggagtcgatggcccgcaggggcagccggaaatccatgttcaccttcgtggagaagcccaaggtgaccccgaatccagacctgctggacctggtacagacggctgatgagaagcgcaggcagagggaccagggggaggca

SEQ ID NO: 38882 - DNA, 766 bp, Bovine  19866880538761
  misc_feature (1)..(1): n is a, c, g, or t
ngccccagctggacccttgtccttgttgtcgggaggacagagacgatgtggcagctaatactgagtggacgccctacaggggcacggagtgatggatggagagagagcacggtgggtagacacagtgagggccagagaacagagtcttgtagactccttcctaccagcctgtggtcctccaccaacaggaagtggcctctccatgaaagactgtaagcggaatggacctcaggtggcaagggaggtccgagaggccaccgactgcatgctggatgctctgaggcacgtgggcacctgcttgggctctcctcctggctggcccgggccacggcggagtattgcttgtgagtgcttggccagccgggccccactccccactctgcaggtcagtctggctcagcgtatggcgggatgtccctgccgtcacattcagtccggcggtgggggccgcagctacctggtgttctgcagctcctcccggagccaggtcggcagtgtctggcccatcttgtacagcagcttggaaagctcgacgttgtggtcccggtaatagtccttcaggaaggcgcgggactgcaacaggaagggaagctcagacgttggtcatgtgctggttcgagtgacccccgcccccgcctctggaaaaccagcaccccgctgccattatcccccactcccattatttattcacagccttcttcaaaatggtaaccttcaaaagaaaacatatagtagaagcagcaaactatagtgcacaaggtcgaaa

SEQ ID NO: 38883 - DNA, 1924 bp, Bovine  19866880592289
  misc_feature (1)..(1): n is a, c, g, or t
ntctgtgtgtcagggaccatgctgagcaataggaatatatgacctttcctctcacagagtttaagactgatgggaaaacaaaatcagttaatccccaggtaaaggaaaaactcaaagtaatgtgaaggagagagaagctgtgcgtgtgagcatttattgtagggaatttgaattagataagtctacatctgaggattgcactaggatctgaggacaacaggcagagaagggaaagaatttagggtggaggaacacccaaggcaaagagcttgtaagtggaaggagcaagttgtagaccagtgggcaagtgtgccatagtggagcgttgcggtaggtgaatagagaaaaggatttggagtcaaactgtgcagaactatgtggaccaagttaaggcatttgagaagcctttaaagcagaagagctgacaggatcagataagtgtttctaaaagataattactgttgacttgatagaacaagagtgggtatcaggagaccatttaagtgctctcagaggaaatggttaaatacctttaggacacctgtaccatttaataagatgcaacctttaaaaagaatgaggtgaatctattaatatatgtactgagtggaaaattcacacataaagtaaaaaagttttaaaagagcaagtttttttccccttatatgaaaaatataaagatctatatttattttgcacatataaaaattctatgtctatgcctgcattttttaatgtatacagaatatatcatacctgtgcctgtgtgtaagaaagatttctaacctgtagtagtggatacctgtggtgaggagaagaatgaacatgggcatgagacataaaagagaaattttcttttctattctttatatttctatactgcttgaacttttcacagttgtatgtcttttatgattaaactatatttttgaaatgaaaatatatgttggagtcgagaaaatagagtatgaaatgtcacacttggaaatagatggtcccgtggccatgccaggaaaataggattggttgtgaggggaattaagcagtgaagtaaaagagcagtgaaaagagaacatggaattttcaagccttttcattgctcatttcttctgttgttgaacttgaaagttccatttcaattctgaaaatagatcatgtaaggaagaccgattcttttctgggaggagacacttgcccactttaatgtgtcttttctattcattatatctctagtcagtttacttgatgtatttcctaagcttcttgttagctgtttcaaatactttgatttcttacagatgaacaaactgattgaatattaccagcagcttgctcagaaggagaaggttgagcgagatcgcaagaaactggcacggcgtagaaactatatgcctttggctttttcggtgagaacttggtataaagaggagtttccaattcactgatcaagaccagtatggcataagagtggtgaacatttaagaaagtggccattgtccctggattcctgaatgatggctagcaaaaaaaggtcccttaggtgataggtgtctaagtccaacgggtatgcttttgccatatcattaggtctgtgagttctttgagttttaagtacatttgtgtttctttctccatcactcccctctatatcttcttatttcctaaagaggttactattagttttgtaggcacccacatttacagcttttgcatattacagaaagtcagaagaatatgaacaaatggtagattttactcatgttacacatgtagtccacccacctctggcatcctggtagtagtgatttctggacttcagttatcataattttttggcaccttccagtatttttccaatgtgaaaaatactgacttttatactgagcttttttatggttaaataagtagtaatatatacaggtgt

SEQ ID NO: 38884 - DNA, 1984 bp, Bovine  19866880598786
  misc_feature (1)..(1): n is a, c, g, or t
ntctgcccagaacgtgggggcatgtgtgggggagtatgagtgagctcagctccttcatgccaagcccctcccaggacagagtgaaggccgtgctccggacccctgctcccttcgacccccgagggccagcaatggaagagcccaccctccatcctgcagttccttcggccaggctgtctgagctctgccctcaactttgttctctctcctgttctcaatacactctgcctcaaatctgtctcgcttcttcttttcttccatgctcactggctggtggtctgggccctctccctcctccccgattctggcctgggaagtggggtgggactgtccagttactgtgtgtgagcctgtggtgagagtccgcatgctgcctgcatctgctgagtgtctggatctgctgtgggtacagatgtgtgctggcttggaagtaagggctcccttctctcttccccaggtcaagcactcagggaaccaaaaatcccttggaagacatgttctgtttcctccttcctttggagtttggccaaaaagtctgtagatgggaaaaaccccacactccttatggtccagatttatttgaaatctttataagtgcctttagccagagcatgtacacttttttttccccccttagtttccctcagcatcccactctcccattatctaaatctgggagcttcccagtcatcactgcatacaataagtttcttccccttatggagccaaacaaactgccatcgagagccagaaaaaatgggttccagcctcatatctgcacctgactccttgtgtgaccttagacaacccctaggccccagtctccccttccacgcaaagagaggattacagaagctgtgggctagctggctgtctttggtctctgatattcctctttgctctattcatggccacctcacacacatgccctgctttggggctggtgctgggttaagtgggtgctcatttctgaattttcacccatgtgcatttccaggaagctctgaggtagatgatgaattgagatctttttcagaaagtgagtaattctgattgcctgcagcatttttgtattatgtactccccccacccaggtgcacatgcacacggacacacacacagtcagtacccagccagggcagtcctgatgaggtcaggccttgacccaaaaccaaaagctgaggccttgctcgccactgcccccaacttccaacccacacattctgagaagtaagttctgttactccttccacttactggccctagccttcccttgaagccaccaaaggcaaaggcagtccttagagatgtcagacagttatcatagctcctcctgcctcagcctgctcttttcctggctgaaagccctggttcctctgccttagtgcttgttgataggcttggatcatgaactcttggccccacttcccacagcccagctgattgaaagattcctgagatggctcacagacagcagctcgcactgtctctggctcatatacacaactgtgaccctggaataaaaggggtggagcccatgctgagctttaactttcctacttgatgattggagccttggatgtccccaggaggtccctaatattaccaatcccatgaaaactctttagactgtgatacattcctctttaggttaaaagtctccatttctgagtctgggcccatctagtagctgctgccttgtttggagaagacaaataatttaccgtttctttttaattgagagaaatgagattctgactagctgagaggttgactggttaggctgtgaaagtttactgattggatgagagaatggagcttatgagtggttctagattttgactgggtaggagacactgaacagaccagctagttctggactcagagatgactgctggttaatttggattggattgcagactgattggactgacttttgctggaatctgattggctaaacagatggatggtttagtatagtagt

SEQ ID NO: 38885 - DNA, 1890 bp, Bovine  19866880631664
  misc_feature (1)..(1): n is a, c, g, or t
ncctttgagagacttccctgacccccagatctgagggggacctccccattttatgtctcttgttactgtttactatctttgtggctttctcccgatgtggagttatcccatttactggtttggtaccttgtttaatattcatcctcttttatgaccatgagcaccaagaaggtggggctgggtctcattcctttgggtgtgcccagcacccaggacagcacctggcatatctgggtgctcaatcagcgtcccatgaacaccaggtgtgctgtgcctcgaccgcgccagtccaccttctggttcctaaatactcccttggacagtggcttcccagcctggaatcccctggagagcttcagacattcctcatgcctggatcccacatcccaagggtgtaatttaattagtctgggctgtgacttgggtttttggaaatgatccccaggtaattctaatttggacgtggttctaaacccgcagcatcagcatcattaggagattgttaggaatgcaaattcataattccagatgtaagggatcagaatctgcattttgacaagacaccggtaatttgtatggactttaaactttggagtgtctgctctgaagctatgttcttgcccttagcatgtggttagggtggtgatggtggtgactacagttggggaagattgtcttcaaagatctccactctgaacagtgggtctgagctgccttagggacccccaggatatgggggggcattctggtgggtgaggcaggtacaggagggggctgtgcagccatggcttgcgcagcgtggaagggggttggcagagtgtccaggtgtttgtctggcatagcggcaactgtctgggccagggcccagcaggtgtgggtttcacagaggccggtacaggatgttcacattggccctcacgggcctcccagcaggctccgtgttgcaccgtgcgctgctgcctttcatgtctctggctcagcgttgctgggagcccagcactttctagttactgaactcccccgtagacagatcaacatcctgcagggaaaagaggctggggtggcggcggtcctccgaagaccggggcccaccatggcacacagcccgtgtgaatgttcgtgcggaagggagagccctgccgaaggtccagggccagagcctggggcaggaagtcagggcaggcaacaaggccagcagggccactgcctcacacgcagatgctggggctcgcccggccgtggctgtgtgactagtggctgtccggtgccctctctgtgctttatatcacagttggtcaagggagatgtcccaatccctgagatacagcaggggcagggcttgagccatggcttggggtgacaggttgggttgccaccccctgcagtgagggagaatcaggaaccagggtcctccctggatgctgaggaatcttgggcctgttcaccacagtctcagagcctcatccacacacgcacgagacagaaagaaacacgtataggggaatggaaggagcatcgcctcttttcgggaaggtaactaaggctttgggggagtgtagactctggtctgtgcagtaactgccaagccccctctctggtgacttaagaaagctctgacctcctgggaggaaggtgcccaggcctaggtgagtgtgaggggctagggggagggtctcagaaccttcccaaagaagtctgccaactgcgatgcttttctcccagcttcctttagcacgtttctttgttcattcctcctggggcctgtggtggggagcgttttaatgctggatgtttggcaacacacgccaagcttctcctgctggcactcctgggtgactctggcagttcccagcaggggccatgcccccccggggtgtcctccatccccct

SEQ ID NO: 38886 - DNA, 1309 bp, Bovine  19866880666538
  misc_feature (1)..(1): n is a, c, g, or t
ngcccgggatgagactgcccaggaaaaaaccggttaaggtgggaactcacatcagaccaacttattacccgacccttccaaactgcggtgtgctgccggttaaggtagttgtggtcgtggcgcggggcctacgccttcaaggctagatccgaactcaccccacacttaacaggttttttcctaaaccaagaccgccgcctcccgagacagggcgcgaaacagagtctgggtcagcccgccgtgctcctctcgcccggcactaggtttgtctcccgcagaaagacctcagccccaagccctaggccccgatgagcccccgggccgcaggatgccagccgattttccttgtccagggatcctacctgcgcgtcttctccagactccgccaccggaaagagagggtggaagggggcggggcgacgggtcacgctcttgtcccggaagtgcacgtctgaggtcacggggcgaggacagctcccggaagacgccgattttagcgtttccaaggacattaaaacgcctggagaacacggcttactgaagggagcgcctgaggaggtaagggcctgggtatcttgacgagcggtctgcttctaagactgaaggaagcagccacacgccgtgggtgtggaaggcctgtgttctaagatggcggtgaccgcggctagaccaacttccaccacgctgaccccggagcctgcttagcctgagggcggcagctcccctcgcggtgcggaggtaaatgacaatttgtcattcgtctgtcgtctctgactctgcaatcccttcgactgtagccctccaggtttctctgtccatggaatcctccaggcacggatactggagtgggttgcctgccattctcttctccaggggatcttcctgatccagggatcgaacgtttgtctcctgcattgcaggcagattctttacagtctgagccaccaggaaagcccttctaactactgaatacttggcaaaataagaataaattattcaatatttgtcattttatgccagcctatattcatatgcattgcttcatttgatcctcaccacaataacagatcagatcagatcacatcagtcgctcagtcgtgtccaactctttgcgacccccatgaattgcagcacaccaggcctccctgtccatcaccaacttctggagttcactgagactcacgtccatcgagtcagtgatgccatccagccatctcatcctctgtcgtccccttctcctcttgcccccaatccctcccagcatcagagtcttttccaatgagtcaactcttcgcatgaagggccaaag

SEQ ID NO: 38887 - DNA, 1658 bp, Bovine  19866880718648
  misc_feature (1)..(1): n is a, c, g, or t
naattgagctcgcctcaggaaatggaaactctcccagcgggtagggagcccacatctaccccgaggttcaaccaggagccagctctgggtttccctaggccagggggacagtgtgggcaaatgtgagggagcaccaaggtcagcagaggaaagggaccacaggaggggcaggaagtcacctgcatctccagcttcaaagcattttcctttggccttgttgctggaaactttagcagctggcggcagcccaggcccatctggatggctcagaggaggggcctccaagtcttggggaaaatgctctgggttttgagagcagtttgtgtgtgcctctagcgagcgcatgtcttgtgtatacatagaaagcaaacatcgtccagaactgcatgttctgagtgcagttcaagggagctgagcttcgacagcccctcctctgagggctgggggaagctctggagctaatcacagaggcgccatggaggctttacaaggggctctgatcccttccagggtgacccagaccacacttctcaagttgcctgaataaatgttttacatccagtgtttcagaatcccagatctaacaacccactgcttcaagtccctcactttctagacaaagataaacgcatgtcaggcccagacaatggcccacctctccgcctcccatattcaggtcatcacaagcctccacatagcagtgagccctcgctgtaataggacgtgaggaagaggccaaaggaaaagacccaggttcggttcccagcctgcccctctgttcagacaagctcagacaagccaggttgcctctctcaacctcagtttcttcatcagcaaaatgcggacaatgttgctccatctttgggaaaaccggaagtgtgggtgtgagagatttttgcagataccatccagggattctcacagcagaatctcagaacatcagtcctaggagagttctcccccaaggccacaggactcctctctatccccatcctaccctcaatatgcaagtttcatcatcttggttgaaatagcttatcaagactggcaggtatggccactctacactggtgcctctctcctcccagaagctctgaatctcttcaaacatggatttccaggaaggttcatcaggacagatcattccagaaacccattcaaggcagagtggcctcctggctttgtgcttctgtgactacctcctgccttagtccttcaggctgccagcaaacaggactgactccaggaggaacactccggggtacaaaataccagggctggctcgaccaccaatgcccaactatagcattgcagaaaccgagaaccagacagaaagtctcgtccaagtcctgcaataggcatgggcttggaggtcagactcagtcacagctttaccccctagcaatttataactttgtaagttacctaaacatgaatctcaatttccacatctacaaaataaaatcccaaacatttacaaaggacacagcatggcattttgtaattaagactgcaggcttttgcagtcacagcctacattcaaattctaactgctcatggccatggggtgaattgcatcatttctctcttactcagtttcttcgtctctaaatgataatctcataaagggttttggggaatattcaataaagtaaggg

SEQ ID NO: 38888 - DNA, 1217 bp, Bovine  19866880749612
  misc_feature (1)..(1): n is a, c, g, or t
naagagagcagctgcccccttccctcaacaaacacccaccagggcaggcaggggagctgggccaggccccacccacacccctcgcccatcccccatgctcaccgatgttggggtgcttcagcaggcggcagatgcgggcttcacgctccagcttctggtggtctgaaacacacagatgcccagatgagtccaggggagggaggcatctccacccaccccatctctccctcctcatagcctctaatgacctctccctcccagggcctgggcaagctcagctggcagagcctctgggttctccaagaaggcagtgggatgcagcggaagagagacccaggctgcaatgaggcagaagtcccttccccgctctgggtctcggttttcagggttcttaaccgaggggcatctcctgcctgtatcagagccaaagtccaggcagcctgggaacacccccacccccacatcaggctccgactgccctcccccagccctgcccctcccactgcatctcctcctgtggaactgctgaacctcagctctccaggcacgccctgccctgcccagccctctcactctgggaccttcgcacacgcggttctctcagcttggaaagctccctctcagcctcccacctgctcttcactggccatcactcactcttaggcatccttggatgtcactctctctggcagcccaccctgattaccagctgctgggggctcctcctctgcattcccagggcccctagacagcacatgccactctgtctcagggatgtcgctgtccctgagggcgaggacttggtctctgttgtacccctggcatctacctaaatccctggcctatggaaggtgctcaagaaataaatgaaggcttccctggtggctcagtggtaaagaatccgcctgcccatgcatgaggcacgggttcgatccctgaagcaggaagatcccacatgcctcagagcaactaagcccctgcgccacaactattgagcctgtgctctggagcctgggagccacaaccagtgaagcccaagcgccctaagcccatgctccatgacaagaaaagccactgcaatgagaagccctcacaccacaattagagaacagcccccgctttctgaagctagagaaagcccatgcagcgatgaagacccagcacagccaaaagtaagtaaataaatacaattttttaaatacataaataaaaagata

SEQ ID NO: 38889 - DNA, 1577 bp, Bovine  19866880755815
  misc_feature (1)..(1): n is a, c, g, or t
ncctgtctggctggccccagagctggagtttcttgcaccacattgcattgcccctactatcttcatcatctgttcacctctgtgtaagagctggaacaagaatgcagagcattcccttgtttaaactcagctgggaatgtgtgcatggggcaactcaaaatttttggtactctggggcatgtctgcctatgactgaaaaaacactgaatttgatttttgaggttacaaatacattttagcaagtaggtgaatttgtagatacagaatctgtgaataataaagatcaactgtatatgtgtttaccttaaaaagcaaatgatggaaaaataaatcaccaaataaaatataatctacaaaaggtattattagttatcttttgaaatagagcaacttaccccaaaacttaatggttttaaacaacacacatctattgtttcaaagcttctgtgggtcaggaatctggacatggattatctgaatcgtctgctttgaggtcttctacaaatctataatcaaggtattgatccaggctggggtctctcatctgaagactcaaatgactcatttccaagctcaattacatgattgttggtagaatttaatgcctcaaagattgctggactaagggcattcacgtccttgctgattgttgtgaggaagccaccctcagtatcttgccatacaggactctccaacttgcaacttgcttatctagggagtcaagagaggagtctgtaagcaagatggaagtcacaatcttttataaccttattatatatgtgacatcccctcaatgttgccatatgccgttggttagaagctacttacttatgcggagtattttatcaggaggtgggactcattggtggctatcttagatacttcctaccacgagaggaaggaaataagatagaagggacacagattggatcttatattctttgaatataccatagttctgttgatttgactatgtaaccataaaaaaaatttacatatttatataaaacaaaattaaatttgataaaccaattccaaattcctgcttctgaccaaagtgaagtaatatggaatgggtggcaacatccacctgaaccaatggaaaaaccagacaaatgcatgaaataatgattttaaaggtattagacatcaggctgcgaaggacagtgatccttgagagatgggaaacaaattgaggtgacccttctgattgcccagtttactgccttgagaacatttccaggtatgacatgaaaagtgagtccaggcaggggccaatagacttccagagtggtagagaaagaactaacagtacagagagaccaaggcagctatagtcacagagcagagatcaaagaggagaaagctgcacataatgagagctccagagatttgcagagggtccacttcaagtattcaggagagtactggtcagtgcatgtatataaggaaaattagtgtctgggaaaagagacactggagaggaaggaggaaacagtaacctggagttcaagattaagccaagattaatgcctgttcccatcagccagactggaaaatttcacaattcactggga

SEQ ID NO: 38890 - DNA, 2024 bp, Bovine  19866880775361
  misc_feature (1)..(1): n is a, c, g, or t
ntacctgctaaaaaccaaaaatggcaccagtaacaatgagcatatctactactcagatcttgatttttaataccaatctctagtaaaaggcacaagggctccttggagaaatggctctgggacagaaaaatataggtaagcctggggtaagtaggaaatttctcaaacaactgaataacgcttcactccccctcaatgccataaaatgatgggggtacgccaaagggagacagaagtctactaaaagagggttataatggccaaagctggaacaacctgagttaaaaaaaaacagtagtattggagtataacctgaagtatacaaaaatattcacaagtccacactgctttaagtaaatgattaaataaataaaaaagaaaaaagagaaaaatcttccatgtaaaagaattccaaataattcatggagatagctcttatggaagggaagcatagctcgctactagttaaatgtgggctgtattagtacatttccttcccgagtatggtatggaaaacgaaaaggggatttaaaaaaaggtaactttacatcagaataatctgacaaacaatagctcaagccaagtaatcaaggttaacatctacagtgaaaagtcatattggtggtatacacccctgatatgatgtggtgagagatacactttacctatgtgatcctcgtccccataacacattctctcagatgatgacaaaagcatcagacaacttccaatcaagggacattctacaaaatatcttaccagtactcctcaaaaccaaggaaagtctaacagaacttcacagcaagaggggcctaaagagatatgactattaaatacaatgtgggtatcctgaataggatcctagaacaaaaaaatgagattaggagaaaaattgaggaaatctaaatttaataataatgctaccaataatattcatcaattgagacaaataataccatactaatatatgacatttacaacaggggagacacggtgaggattaaagggaattctctgtatcatcttcacaatactcttaagtccaaaactgttataaaatacaatttacttttttttaaatgcaagagtcacctttggcaaaaaaaatgatgctgaaaaaagaaaaacagctaatttcatgtgttttcttaccagctattaaaacatagctgtggaaaataggaaaaatggatcccagtcttacctgttcttttttagtttggcttcagccgatggcatattttctaaacaactgggacaataatgggagtccacctagaatgaaacaagaaatcaaaaaatcatcttggcttgtgtatatacctgtaacaaatagtgaaatttaaaataaattattctgcagcagcaggtagagaccatcgttgtggcaaagaacttggactgtttccagcatagggtttattcttataaaaatcacctgtttttttcttaacctctgaatttcctgaaatccttttatttttcttttctgaattttcctattccctttcaccagggttttatgtattagacatgttaaactatgtttatgttaaagaagactctatgataatctaaatagattaacacataatccaatttatgaagctgtgatcaaatatccttttatctaatctagctttatgggactgcaataactggactgcactttaatagttaagagagattttaaaagttctctagttactgatatatttattacatgttcactgaagaaaagcataaactaacagttacaaagtcacctatagccaaccaactagagatttttaaatggcaaattaaactactacgttaacaagatagtcttattgtatttagctcgaaaacatagtataaaaattaaattcactgatgaagttgctgctcaaatagtcaccaggaacacaaatacagtactgttaacttatatttgcacttacttatcataaaaggcaaaatgtaattcatttctttttggtcctttctgaattatgctcctcccttcaagtgcagctccaatt

SEQ ID NO: 38891 - DNA, 5317 bp, Bovine  19866880783243
  misc_feature (1)..(1): n is a, c, g, or t
ntctcacattatacccaggttttggataaatgaccccaaatcactgagtcttagatatgtagactaagaggcttttacaattctgggcttttgtatagcaagagtgaagagcttttgcactataagctttggagggacctcagagatcccaggtcaccttttggccctcccacaaaatgcaagaaggcctctgtgagcatcctcaacagcatttggggctggaggctctcaacactgtttagttcaatgcatccatttagtagatctggaaactgaggtccagagaagcaactggacttgtccaaagctgggccagtctctgaaagaaatgcagtagaacctaaagaagtcagtctccaggtgggactgaattaggacaatctagaacgatccccaaagagatagaatttagcaccgttgagggcactgggccttactgctgtctgccagggttggggtcctgagagtcatttgtaaagcaatggtcaccctaacgtggcatctcttgaatggatcctaggctcccaacatctaccctcatggatagcatgggagaaagggccaggtcctccagcaggaaaaagcaggcaggagggtgagacttgcaccggggcaggcagttaccttgtgtcttgctcttttcaatcctttgatgtgatcaggtgttcaagcccagagtccagggagccagtgttatgatgggactcactgccagagtttaggccaagggcttacacagccttccgcatctcctcctccttttgcatccctgagtcttaaaagccagctcagcctgatctctgctctgtggggattgtggtgttcattgtggggaaccagcacccccccagaggacagaccagtagagaggtgcccctggtgatcagctggggagctccggggtgagcgggactgactgtggggtccagccacctctcttcacactctacctctgttgctagccttggaaaagcagagtctgatttgtcaaagaaaatgtaacttccttctttccttcttcacagctttttggggatgctcttaagcccttgtactctgcaagattccatcagtctgtgtgcagacaggagaggagcgcccagctctggtgcccaggtgaggggatagcacggggaagggaggaggcgctggaggcagtcgggaccgggttctgtcaccaacattctgggtcctttggacaagtcgcttcctctctctgaacctcagtttcccctctgtacaatgaagagttggactagagccaacttcagttgcttaagtactacctttatttttaccatctacctatacttactttatggcaccccactctagtattcttgcctggagaatcccataaacagaggggcctggtgggcttcagtccgaggggtcgcggagagtcggacacgactgaagcgacttagcgtgtgcacatacttactttatgaaatatttccttaaatcaattcactttattaatgtagatacagttattttaagatgactttctaaaacaatcattaatgaataaccagtcttacagaatacacttttaataagcccaatggaaatgaaatcaaattatataatcctagctccacgctctttcctgcaaggcacctgggcctgagaccgctctcttttcgataaagaggtgagttagaaagtcggtagagagactgacattacactgagcctttcctcttggcagagccagatgtgttgaaagagaatttagaaagggaccaacttgcccactgtgtgaaccagtgctgtttcagtgggtgcccacaagcacagggaatcccagagcgttgcctcagtgcctcccctctgggggaccttggccgtgcctcttctcagggcctccctctgggtcctaagctgcacgagtctaacctgcgagtgcattggtttatccctgtctgacccctggccaaggcgagacagacgcaggcagaaagcgccctaggtcaggcccagcctcagccccctgacagccctggggtgcaaagctgccagggtctctcctgcaaagagaggcccgggaaggacagacatgcggacagagacctagacagacaggcaggcacagcagtgtgagcttggtccccttttctcccccaagagtacatttccatgcccactcattggggcacctgcaggacagcaacctacatgccagtttgcaaccagctggtcagctggggtggccgcaggcattcaggtgactgtaacttggggggtgtgcccctggggggctcccttatctgtagaaagggaataaaggtcttccccaggctctcccagggtcatgggcaggcgagggctgggagggcttgtcacactgatccaaggtccccatccgcagccacagcagttggacggaccaggcttaggagagagaaccaaggcggtaccaagccctgtccacacgggcccttcctcttcactggctccggagccgccccgggagccctgcccgtcaccctgctgtgccatctggcaggacaccgaacagagcagacaacaggcagcccagagggaagggattgctcacggttttcaaaatagaatcgatggaagtccaggccctcgaccaggttccccagggcctcgggttcgaaggccgtcatcccagggtcacacattttcctggggggaaggaagtcagaggaaagatgggctggggcggcctctcaggtgccccctctaattccaggggcctggaccccaggaaggtgagcctgtgaaatcaaaagtgactgcacccacctcataggatcagtgaggctgcggaggggacagggctgggacagggacagtgtggacgctgctgactggcaggtgctactgggtccaaaccatggctctgccgcttacatgtcatgagaccaccatgcccccctgccccccagcagtggctttacgtctctgagcaagagggccataccaagatgccagcgggggtaactcagtctgtacacaactctccaaattacatcacaccccccacctcaggcagcagatctgtccagagggggctttcctaatctgtcttccttgggcagggggaccttttccttcactttgaattggcttctgttaaccagcagttgtggccccggaggggtgtgttttgctgcattaaacggaggtgtcctattgtaggcagcagcgtcctctgggagccgcagctccctcttctgtgagatgaggaaggtagcagcccaagaaccggcgcctgggaggaaggagcccgggcgtggctgagcaggtcctctgctgtgtatttttagctcagtgctcccactcaggtctgcattctgggagcccctaatagccagatggaggaaggaaaaaactgtctcccccatccctaggtctctgagatcttctatgacacaacggggacccctgtggcaatgacagtgaagccagggacaggaagtaccccaggacaaacaaagaccccaacctggggaggggctgaagacaatggcggagggcccagcctcgtgtgagctggagctgtggtgagtgcagggcgccctgcccttgttccgccctaaccgctctgtctgtgtgactccagacaactcgcttctcctctcagaacctcaggttctcctgacggattggccagcagggttgttctcagatcacgtgggattcccaggatccttccagatccagagtcctttaagccggggctctgaggcctgaccatctggaagactaagcaccacctcgctctctccaaggaacccttctgcaggaggtctctgggcctctgaagggactcagaaaccatctgctccggttccattgtacatgtagggaaacaggctcagtgagacgaaggggcttatccagggtgacacagggtcagactcagcaccacaggccccagaggtcatagcaaggggtcaaaacctaggctacagaagaagtgatatcgcagaggtggaagacttggggggtttggggtcaacaggagatacctctccttccctccctccctatagctgtgtccccagagccgctctcaggctctctcatcactgacttaattctttccagggccagatgcaaaatctgttcaagagagcatttccatgtttttatgcaaccctcaggggcacacatgcacacacacccatgcacaccccttatgcacgcagtcacaaacgtgcacgttacgtgtgcataggtacatcacactcacgtgtacatgcggcctccgtctcacacctgcaccttccaaggtccttgtttctccagaaataatcagcagattgccggggctttgtcacccgctgctgctgaaaccctcccatgatcaggatgcacctggcctgcccagcctttgagaaacaaacttcaactcctgggcatatagcaggaaccaggatcaagctgcccaagaagcaaagcccacccaggtcattcctacttcacctaacagacaagggtcattcttcccttagttgatagatagcttttgtccaccaaaaagcataggttgggtcttcagacccgggccttgtcagccctggccaagacgttgaggcctcagcccagaatcctggctcttctgggggcccactgaggtccgctcctggcctagaccagcaaggctgaagatggccaccagggggcgctccagcccagtctttgtacactggtcgcttctccaagggctggcctaggtgtgtagggaatgtctcataccacttgtttccgatcatgccatttttgtgcactctgccttatccctggatggctcagaattgctttttgcggttctttttctcccgcttgttcactgaagtttggtttcctgcctgctcctgcccatctgaggtcagaggaagtccagtgtagcccaggcctacatggtcggactgaggaagggcctgcctccctcccctccttcccagcttatctcctgaggaggctcgtgttgcagtggaagccaccccctctttccttggggaaggaaaagagttttgttggagttcttcctagacaacaaaataggagcaggaagaggagcaggactgagatatagacaagtactgtgagcaaaaagcttaatgagaccacaaagtctgaaggcacaccagactgaatgagttcagcctgattcacggcacatgcagtgtgagtgaatgagggtcagagacaaagaccccccaacgttagccatcagcgccccctgattcaggcaggacatgcaggatgcacccagccaactcacgtgtaggactcaaaatctccattgcttaggcttcaatcagctgctccgtca

SEQ ID NO: 38892 - DNA, 1572 bp, Bovine  19866880801833
  misc_feature (1)..(1): n is a, c, g, or t
nactaattgcaccattaccaccttcagaaaaaggaaaaaccactcagttttgtttctgtgcacaatatgcttcccgctttgccgccaacgttgcaattcagaggcagagaagagaggcctttgctcaggggctgcacagctggtgggtagcgggcagggcacagaacatacatctaaaggctagaatcgatcgcaggtgagctgaagaaaggctgcaccaccacccctgtatcccagacctgctagcctgtccccaggaggagactgcttccacacgtgaaagcactggaaccatccttagcgaccaccgagggcacctgagtcattgcccagaggagaggagaggcagcgttgggcagtggttagagtgactccatgacctacaggctgtgactggggatgagtagcctagcttctctgtgccttgatttcttaatctgcaaaatagagctaacattccccagctccaaggctgttctaaggattaaatgagatgagcacagtgtctgacatgctgtaaatgctcaaaagatgggaaatgattcttaggaagaaattcaaaagtcactccctcttcatactgctccctctgaatcatggaagaacacatcacatatcactccaggtgccattctctgagttcccactggagctgagctcaggtttggacatcaccttgcctgtcctggtttgcagcattcctgcagaacaaaggactggggcaggagaacaggcccagcatgtcaggtactaactaacaatgctgctttagaaattaacaaacaggacaaaagggaattgtgccctgaggttgtattaatgagggtctaatgttctgaataaaggaggtgatagtccagcttggcttcgagctgacctgagcctctcccttctcctcactccttccttgctccccttgagcccttccttctcaggtatccctgtctttcctcttcctttttatcccttttccaagtttctgtctcccttcctctctttctgtcagtttcattcggtttcttcctccctgtgctggcctggaccctgtgcacacggtcctaggggatgggcaggacccaggctgtagggtcctgatgctgcagagatgactggagaggatggagagggaggaagaaaatggagaagaggaaaaggtctccttggcaactccttgttatacacacacacacaaacacacctccgaactttcaaaggcctcgaacatgggtgtgggcactgcctcagacaggcaacccccatcttgactgtaacaaccaccctgctgaggaggcacgactgctaattcactgcttcccctgtgcccgagaggctggtagccgtgcccagtggtggcggacagcgaggagccagccctgcctgcgtggtgctgagcgcacaagattgattgcatcagggggactgtttctgccagactccccattccccagagaagcggcaggcaggagagcccgcatgtgcgcccccccagctgcaacttgcatgcagtacacaagagcaggcctgcttgccacagcctggtggccaggggtggatgctctggagggtgctgag

SEQ ID NO: 38893 - DNA, 1160 bp, Bovine  19866880835431
  misc_feature (1)..(1): n is a, c, g, or t
nctctatagtcttgataagcctttttttttttttttttttgctatattaatacatctggctggcctgtggcttctatattttatttatgagggcttccttttaagtcctagtgacatcctgggtagggtaagagttacaaactttaaacagtcacttagataatgtatatttctcagaatttctggatcgagtaactggccctttttatggaatctgattcatttcctcagtgaaatagcaactctagagagtatatagtctagtgtataagtaatataggagttgatgagcatttaagaatgcagtgatgcagaggtacaggtggggtgctcaagagtgatggtgggaggcgggggcacacggggtgatgattttgtggtataatcatgagagaaggtggacctaggtggcagcaggggagcatgtttgaaagatacctttccttttccccaggagagccaggtcctcctgactctcacgaatccagtggagaaccttacccacgtgactcttttggagtgcgaggagggggaccctgataatatcaacagcactgctaaggtaggagtgttttgcttcattctgagtgactctgacttccctagagtggcctcatttgacctgctttaaaggattccacactcattattttcacatccagtcttcaggttcccttgatttcacctctagggttttctacttcatccgcaggcacactgccactgccctttttgagggtttcatcatttctcacatggactaggacagtaactttctaactcccttttttagttcacccccacttccactccagcccatcttctctcttgctattaggatgatctttctaagatttagctttgatcatggcaggctgcttgtttggtgtctctctgacattggaataaactaaattccttggcaaagcttgctgctgctgctgctaagttgcttcagtcgtgtctgactctgtgcgaccccatagacagcagcccaccgggtcccgccgtccctgggattctccaggcaagaacactggagtgggttgccatttccttctccaatgcatgaaagtgaaaagtgaaagtgaagtcgctcagttgtgtccgactcttagcgaccccatggactgcagcctaccaggctcctccatccatgg

SEQ ID NO: 38894 - DNA, 1183 bp, Bovine  19866880866292
  misc_feature (1)..(1): n is a, c, g, or t
ngtaacagactgactctacccccaacaccacacagtccaaaacacccccatccaccccttcttccaagctcccaacctccaagctgaagctgacagagctttgtgacagccccgcaggcagaagaaagtaccttggctggtgagccctgagactgggagactctactttaacctctaatgaggggaaggaggcagatacccctggccccctcaacacacatcccaccccatccattcctcactttcaaaccaacccctaactgagtcagcctgattcatgattcagccttatttcctcatatttgaggaaagacagactgaacccatttcacagactgagaaaggaaggcagaaggttccaggtctatgtgaaaccacaggccctggcaattcaggctttggtggctgatctagatagaaatcctgaggggcctccgaaagggcagctgggctgagggtttccatggggcaaaggctctcccaggcagagcgccgcagaggaacttctagaaacgcacagaaggggcagttctgaaaagcaatgagaaaaatgaagtggaagtgggtcaagcacaccctaaacgctgagattctcgggtgaaaagggaactgagagaagtcacccaggcctgaccggcctggcacatgctttctgcaccctctccagattctctgcgtgctgtcagcaacgggaccttgctgtcttcccaggcagtttatgcccgttagtgtcactgtcaccctcggtgctgtctctgcctttgagagccacacaggacaagattatgccctctgcccagagacagccctgtagggaattgaaagcagtgacacggccacttatgggtccttccccaaaccttaggccacctgtgatgacgccatccccaaggcacctacaaagtcctgtagcctccccctccttccctctcagtccatcctgtggcctgagtcagactccggtcaactttctgttggaccacaattagcatcatctctgagctggtctcaaccctgccagtcttgccaccatctccagccaaatgacccccaagagaagcagcacaagagggcagaaacagttcaaacctgggctcaatcacaggtctgcaagtgactcaacccctctgagcctccatttcctcatctgaagatggggtggggttgggggtagcagcaagca

SEQ ID NO: 38895 - DNA, 1058 bp, Bovine  19866880866777
  misc_feature (1)..(1): n is a, c, g, or t
ntggcacacaggtacaggagatcacttccctggaacccagcacatccctgcccgtcccacctttccctggcagcagttaatgcacctctgacacaatctttatcttcagcagaaacctctcctgagcggtgtccccatgcctactggtgactctggtgcccagacacctcaaaccaatttcattccaaacttaactaagtatctgccccccaaccaccgttgttttccttgaacgactcaagccagaagtggaagtggctctttcctcatctcctgcagccagtctatcaccacgacctgataattccccgaacccctcaagcccctctcctcctctccatgccctctgtcaccgccctggtccagctacccactggctctcgcttgaccacagtgaaatcctcctgcctccagtctcgctcccgccaacccactttccacagggcagccagagatatctttggaaaatgccatctgactgctccattccactgctttaaactccaacagccctttataaaactttgcttttgaaaagcctgctgtgatctagcccctgcccacctgtctggcctcatctctcagcaccaccccagcccccagtcctagctggcccctaatatccttatacatgatgcagcctcggcctgcaattacccgtgcccctctctgccccgtgaactcccactcatgcctcgaggcccagctcaaatgtctccttctctgggaggccttccccacccccaggctgagcgagtggcaccctcccctggggccctcccagagcatttcccatgatgcgctgcagaagctgtttacggggctgacacgggcctggctgagctccttgaggacagagccctgccttatttattttcagtccatagagagaagctcagagaatgtgagaaggtagagggagagagagaagaagggaagaaggcagcagaaggaagaaaggaaggcaggaaagaaggaaaggaaagaacgagtcaagcaaagacattgggggataattcattcaatcacctacccacccattccatcactcattcaac

SEQ ID NO: 38896 - DNA, 790 bp, Bovine  19866880886633
  misc_feature (1)..(1): n is a, c, g, or t
ngagcccagctgagggcgagcgcaaagatgacacaggataaatgtttgctgatgtttattagtggctgagtggtagacacagcctgtgccactgcccaggggccccacccagctcacctggtaccaggagtaggctcggtccgctgggttgatgaggatggtcaggaccttcgccttgggtaacagggcagctgcccgccggggagccacttccgaatcaaagtagttggcgcttttctcaaagtagaagtcggaggtggtgttggaggggatagggaagaattccatgtacctgcaggaagcccacagaagagggctcacaggcaagattcaggaggggcctgaggaatgcagccaggagggccgggctcactgggcgtggaacgtgagaaagcaagcaggcacactgctctcagtctgacaaggacttacttgccaggatccgagacagagtggccacttggcagactccatcttatgaatcagctcctttttcggggagacttgggatcaagaggatctgaagatgtatgtggcgggtggggcgggggtgggggtggggggcaggtgtgtacgcatgggaaggggttgtgtcttctcttcttaaatgggatgctcccggagtgaaactgacagggccctaacccttactgccactagggggcgagcggggacgcttctgacccgggaaccccagcactgaggggaagaacgccctctgctgcctccaggctgcagggtttccttcctgacctgatagtactttctaagctgttactgtagaccagca

SEQ ID NO: 38897 - DNA, 877 bp, Bovine  19866880889807
  misc_feature (1)..(1): n is a, c, g, or t
nttaattttctgtttagttgatctatccatagtgtgagtggggtattaaagtctcccaccattattgtgttattgttaatttctcctttcatacttgttagcatttgtcttacatattgcggtgcttccgtattgggtgcatatatatttataattgttatatcttcttcttggattgatcctttgatcattatgtagagaccatctttgtctcttttcacagcctttgttttaaagtctattttatctgataaaaactcttaagaagggcgcacgctcggcccgggggacccaggcgtccggcggttcgccgggagcgccccctccccctgggtggcgccctagccgaggcaggttctcgggagcaaggacacccccgctttgaacgctgccctttaacaacctgggacgagccttggccccgggggccccactgagcgagcggtatgtggcccccccaggcctgcccagcattaaaaaaaaaaaaaaaaaactcttaagaaagcaggaatagaaggaacatacctcaacataataaaagctatgtatgacaaacccacagcaaacattatcctcaatggtgaaaaattgaaagcatttcctctaaagtcaggaacaagacaagggtgcccactttcaccattactattcaacatagttttggaagttttggccacagcaatcagagcagaaaaaaaaataaaaggaatccaaattggaaaagaagaagtaaaactctcactatttgcagatgacatgatcctctacatagaaaaccctaaagactccaccagaaaattactagaactaatcaatgattatagtaaagttgcaggatataaaatcaacacacagaaatcccttgtattcctataca

SEQ ID NO: 38898 - DNA, 1430 bp, Bovine  19866881020992
  misc_feature (1)..(1): n is a, c, g, or t
ntgattttgaagcatgcccattgggaactgctgaactttgtgactttgaggccatttgcagtaaggttttgtgtgcgatggccctttgtaaactgaagtgctggccacaaatcttggctccaggtgttattcgaactctgagatgagggaagtgaaggtgctggagctacagctcctcagactctgggaggttgcggacccagccctgggccactctgttgaagctgggcctgaggcgaaggagttccaaaccactggtgagctccggaacgaagggagtgcctgccctcggaagggtttctcccaccaggggtcctccaaagggcatcggggtcctggggagagaagagcggcaggagaggctgagtgggagcggggtggcagaacagacatgggggtcaccgcgtgtggccccctccccgcctctctgggcctccgtttctctgttactcagcaaaagattttatactatctttaacaggtttctccagctttgcccagtcccaaatctgcccctagtcaggatggctcgttgtttgtaaatattaataagaatgatgttttcagagtgaaaattggcctgtcctagcaaaactctcagctccccttaagtaaagtccagaagggggaaaaattggaatctggtttttccttccttttgacatctccccttacaaaaatatatcacaaactggagagagaaaggagagttagaaagaacattcagaatcagagaatgcagattacaaccaggacatgccatttctcacccacaatactgacaagaataagtgatttggtaacgggccaaagttagtgaatggtggagagattctcactcatatactgctggctggagggtgaactggtgcagctaccttgcagggcaatttggcaggatcctttaaacctgagaatgtgcaaattctgtcaaccagcaactctacctgtaagcatatggcttaggaagtgcatgcacatatgcacaaggaagcagatatgagcagtgattagtgacaaaccagagacaagccatatgcccactggcagaacaatggataagatcgatatattcatggcagagtactatgtaacagcttaaaaggaatgaacagagctatagatactaagagatttcaaaagcataatgttgagtgaaaaaagcaagttataggatgagattcaaaatatcaaaagacacacatacacatgcaaaccaaacaacgctacatccccataggtatgtagatgctctgagaacacacacgacctgacaacagtgctacttttgggaagagactcgggattggaggatggggaacaaagggccctactttcatttgtagttgcctagggttgtacgtgagaaggcgatggcaccccactccagtactcttgcctggaaaatcccatggacggaggagcctggt

SEQ ID NO: 38899 - DNA, 979 bp, Bovine  19866881032116
  misc_feature (1)..(1): n is a, c, g, or t
naacttctcacagccttcactgtagtttgttcactatgaggccccaggagggatgtagaatatgccgtgtctatcaaacatacatttgtttggttttggcatttcccagtgtttttgctcagtccattttatggactatttaacataggagggctgggctagggttatctggtggcaggggtgtgctggggccagctcacactggcttgggaagcatctcttcttctttttctaatttttaaaaacatgtatttatttggctgcaccaggtctggctgcagcactccaggtctttgctgtggtgtgtgggatctttagttgaggcgtgtaggatctagttccctgaccagggacagaacccaggccccctgcattggaagtgcagagtcttagccactggactaccaatgaagtcccaaaagcatcttttcttaattccacgtgtagcgaagtcatactggtagcttggaattgtccattagaggaaattagcaaacactacaaatcaggactttttctctttttcccaaagagccagttggtaagtgcttaccatcacaccgctatttggtctcagtcacctccagacaggctgagagtgagggctgctgtaaatacatggtcagcctgtccctgtttggggctatgcaggacctccccttcttgtctgagaggatcccagggctgggtgagaggtgacctttccctctgtctttctccccagaacgatacctctggcgaatacaagaagactctgctgaagctgtgtgggggagatgatgagtaagtggcctcctggccccaggctggagggtgtgacctcgggtgtggctggtcaggattctcttggcctcttcataatggatggatggatagatggatggattagatggacttgggaattccttgaaggtcagaacactgcacaggtgaaagtctgagcgtcccatgtacacgcaaatgagtgtggtctcccata

SEQ ID NO: 38900 - DNA, 1629 bp, Bovine  19866881037200
  misc_feature (1)..(1): n is a, c, g, or t
nctgctttagttcccctggctgacccccaggagcagaactgctgggtcatttggtaattctatgcttaactttttgagaatccaccaaactgttttccatagtagctgtaccatttttcagttccaacagcaatgcacaagagttccagttgtaccacatccttgccaatgctcgtcattgttgtccttcttattattgccatcctagtgagtgcaaagtggtatctcactgtggttttgacttgtatttccctaatgactaattttgctgagcatcttctcatgtgcatgttgattatttgtatagcttctttggggaaggttatctagatttttgatgctattgaaatttacctcaaaaaagtgataccaattttttttcatcatcagtatttttatgactttcccccagaattttttatcttttaaaaacacagttaagattatttttatatgtaaaatgtatataccgttctttttatttaacattgtgacaaacatctttgcaagtacttcgtctgctgctaaaatgtgtgtaaagtctagaccactgcacacatggttttccttatttcctgtgagtctagacataaagattttaactactgtttaagtaatactgcactaaatgtgttttgcctaaagatgtgcccatattttacattatatccttagatttccagaaatggaataactagaacagaggtctgaacaattttaggaatcttgaaacatattgcaacattagcataaaacgttttgaaatagaactgaagcctttgccctgggaatttgaagggtactaatgtaccctgtgaaactgggcctgtcagttgaccctcagttcactttctacagtatctctgaaacttactttgaatctcatttcagtatctatatctctaaagtccttccctccttctcaaagctattatgggaaaacagctttcttctccaagcagagcattgacttgatactagttttagtgttataaagatattaataagacaattttcctattgtaaaaacccagaggggaagggactgcctgtcttgtgttcttcccaacagtcagaattctttcatagttatttttcagttgcttggcacctgttaggtgctgcttaaggcctgcctggtggctcagtggtagagaattcacctgccaatgcaggagatgcggttcgatccctgggttagaaggattcccctggagaaggaaatggcaacccactctaatattcttgcctgggaaatcccgcagacacaggagcctggtgggctatagtccatggggttacaaaagagtcagacacaacttagtgactaaatgacaacaacaaagtgaaaattaaataaatgactagaaatataccatgggggaagtgtaactgggaaaggctagtggtggtttttttaacacttgatgacactttattgtcttttattttctatttttgttttttaattattatacattcaaatggactttctgatgtagtttcataaactttaacacatatatagattaatgcagccaccaccataatccaatataaaacagtcccatcacccccaaaatactctcaggctgcccatttgtattcacatcctctcccaccctaacc

SEQ ID NO: 38901 - DNA, 1952 bp, Bovine  19866881057748
  misc_feature (1)..(1): n is a, c, g, or t
nttcccctgccttgtctggcccaaagggatcaacacagttttcctccaattttaagtacttggtacatctcagagtggggctgcacctttggaggaactggaacatgggaatccaggtctgccacccctgggttcctgggccatgctcagcagctctggaggcagggacatgagtgagtggcattcctggttctggcaggagaggagggagcacgcacaccacagtggccaaaagcggcccattcagcgtgacggcagacttgggagagcatctgatggttccaagggaaatatttgttggggaaagaaaggggcacacaggccgggtgactttcagtcacatgtgaccacatgacgcccacacaaacgggtctcttgaggccagagcagacaggttacccctgttacctccatcctgggtacagcaccccgtgggggtgggatcaagctgggagtgggtgggcagagccctctcaggtcagcagcctcttggatgaggccacagagctgtagtctgttaacaaggccagaagatgcctatttattcatcctacttactgaccccgaagcactaccactgacaccattaccaccatggacggaggtttcagcctgctcagatgaccagagcactggggtggcagtcgggaacactttttacactgaaactgatttctggagtaagcagtacatactcatgcaaaattgtaaagatgcaaaaaggatgcagagaaaagtaagtctcccagcttcccacccctcccttagattcctaggaggaagcaacattactgctgagtatatccatatatgtatttatgtgacattgatagtggcacattatacacacagtggtaaaccttctttttgttttcctaccttatcttgtctctccaaaattcaggacctggaatataacaggcaggagtgaacattcaaagaatggtggattagtgaatggggggtggtgggatgagtgaatgacatccatccaggtttaggcctctcgtactcggtattttgagacatatccctaacctcgggaggtttcctcttcccttggcatgttgcttcaggtggaaaattcaggccttcttgaccctggcacagagccatagtgggggaactaagtgaacaaggctgctgaacagcttaattgtcatttccaccagcggatggttaccagggagactcaaagaatgctagaactgggagggctttttcagagacatggaggcagcctgacaaaatctcagaattggggtgggtcattccaccagttctgtatgactttttaaatgttcattccagtgataatccaaaagaattaaaatttatatttttggaccatctgattgtctgtccagtaatgttgcatggccatgtgactatacccgtgttggtgtttgtgtttatgattatatgagcactgggagaatcaaggatttcacagcccactgaataaaacaaggatttcatgtagatcaaactgagcaggttcttatattctgtgtctgcagagccccacagtcaagatcccttgacatagtcttaggatctttaaaggcatctggacgttactctagtaccagaaacttggtgaagaaaagaggacgccaggcaagggttgggagcctggatgtgagtcttgtctctgcctctgattgaccgggtcacctggactctcctgtctcttctgttttcatttctccatcaataaaacagggatcaaaacgccttcctcacaggatattacgaaggcaaaatgagagagtaaatgtgaaatttcagtatttatgaatgtgttcagccctctcatttcatgaaggagggagatgaggcgggaggaggtgaaatgactttttcaacatcaattactggcggagctaggccgggaacccaggctcctaacctcacctggttctcctccactgccccgggcaccgaggcca

SEQ ID NO: 38902 - DNA, 1028 bp, Bovine  19866881074527
  misc_feature (1)..(1): n is a, c, g, or t
ncagggcgggcagcgtgggcaggtagagcagggcgtaggcttctgctgcagagctgcttttaatatcccagacgctattgtttgcctcagtgggttcgctgcctctcttcgtccccgacaatctgttcctctgtcttctcacatatatatagatcccccccctccctcaactgaaagccttctcccacttccatccttctctctttcatcacgtgggaaggaagtctctggaagtggcagatcagagcggctgtgggggaggctgtttggcaggggtaggcagggcccgggcccggcagagcttccccctcgggcgggcccctttctgctccattttgtgttgcctttcccgcagcaccctggaggacgcgaaagtcaggcccagtggggtgggcagagacctgggttccagaccatggccatgggcagctcccttctgttcttctgcactctgtctccctgtggggtcagggggtgggggcagaactcagaccaggtcagctttctggggagtggaacatagggctccctgggtgtccttctatgtggtgggcatgttcactggagctgtggttcccagacgtccgccaagagtccacagggagtgttacttttttctcttttttttcagtgtcttactggaaaatgcagagcatgccccaagctagaacagtgtagagtcgccagtcaccatcccagctttggtagttctggacttgtgaccagtcttggttcatccacatcttcactctcttccccaacaccactagattcctcctttttttctttctttaaagcacagtcattaaaaagttggcccacctagtcagcgtccccatttccccagttgcctcatgacgttttctgtatctggtcaaataggaatctagacaagggccaccggctacattggtccctttggtcttagttggttttccctgagcagtttacttgttgaagatcctgggcccgtgtagtttgggccacattcctgtgtcctgggaggaggcggcatcagagtcttgggc

SEQ ID NO: 38903 - DNA, 2242 bp, Bovine  19866881077041
  misc_feature (1)..(1): n is a, c, g, or t
nggggtctgcttcttccaggagagagaggatcgttgctcaccggtctcagttgtgcttcctctctgctaacgaacgcccccttgcccaccatgttcttgtcccctcagaaagagggtagctccaaaactgccacaagcaagaccctggccccagcgtccctggagaagaaagcagaggagtcctcaaccagcagtgatgaggacctgccatccagccaggtaggccgggcctgtccctaagggcacttaggctaagagctgagcagatgcgcctgggagatggcgggggctggggcacggggagggcaggtctatcccacttacagcacttccccatttcctgagctctctttttttttaacactttcatctccacaataaccctgggaggcaggtagcagagcctgccaatggagggtcagagttggctcccacagccccgaggcgcaggtacacagcatgccgcctgacagggagagccttttactgcgggaggcacgtgctgtgtcaggaatcgaggcccaacaagctgggagtgatctcccaaactcctatgacccgtaagaagcccaggaagaggcaggcactggtccctggttccatgtgtaccccacttcctgttaggacccaggagccttctctgcagggtctgtcagagccccgggggcctggtcccagacctcgctcaggaagctacggcccatcttcacacgctgccagccatcctcccctggctccacccctgagggcggaaccaagtcccccatctccccagctccagaggcttgctggcgttcacctggcaggaatctgggtttctgtgtgagccccaggcctttcccacagccggcactgccctctgtcctcccctagccccaaggtactagaagctgccgccaggtccttcagagatgccggagttcccaaccgccagatgagtggggtctccctatccagctccccttaaatgtcatatcacacactgatgagtccatcagcagggtcaggtgtcatgcacacccgtggtgctggggtgttcactgtctttctctccttaatagcccagattagaagagtaactgtgaacaactccatctaccgttggccccttcctgagggccaaggacagtgctggtccccatattttcatttttctgtttaatccccagaccagccctatgaggacaggtgcttcttttatgaccattttgaggaggaaggaacaagtccagagaggttggacaagctgccctggcatcacattgctgtcataagggcacagacctggtgtcagaacccaggctgtccgtatttgctcgctccctggccctgccctgacattcccctccctgtggcagcggggctcgggccctgccctcgggctctccgtggagcctttcagagcctgccttctctgtgcagaatctaaacagctgggagggagggggccgcttctcccttctctgcgggggcggactaacacaattaaaatgaacatcatgcttaaactgaaccatttaattggtacgttagtcctcaaggttttggagtccctgttagaaaagaaaaaggaaaaaaattcagcgctttgagcattccccagaaggattcagggaagccggcacagcccaggggagctgcagcctcctcccaactttggggggtttttagctccttaatccccagctctctaattatgattattatcgttattatgcatttatcaagtacttctctactggtgagtttcactgtttttattattagcccatcactgagagtaagaaattgataccagggtggtgggcagagccccaggctgggaggcagagaggggctgtgggtccattcccaggtcccctcactgccttagtctcccccgctgcaggggttgggcttatgtctttgctctgaaagacagatcaggggatggtccctgcatggcttagccctgttgtgtaggcattaatcccaggccagagtctgtgccagggcctagggtaggtaccaaattttaacagacaaggccttgcctttagagttccagggtgagttggaaagaaagaagagacctctaagaagctgaaattaaggtgttaaatcaaagatctaaagtctagcatggttggtcctaggagttcctgtctggtgcttggaggaccagcttccagccctggctctgacaccagtttgctggttgccctgggtgaggccactggccctctcaacccctggggtgaga

SEQ ID NO: 38904 - DNA, 4251 bp, Bovine  19866881085280
  misc_feature (1)..(1): n is a, c, g, or t
nggggaaggctatccccttcccttgtccacttgccccccaacttcccatccttagccgctggcccctgaacatcacctggccccctaccctggctaccattgccacaggctcttcctgcggccttgggcaaactgcgtctctctgggcattggctccaccactgatgctgtgaggagacaatgtccatggtcctcccagctctggtgttcgggaagcctgaaatttcccacaggtgcctttcacagaggctaaagagggtagcaactctaaccgtgctttccagcatctgcagaagtgctctgatccccaattcacagatggtaaagctgaggcacaccagggacaagggatctggcacagtcaattagaggcagaatcatgatgggaggatacgtgacggttcagagttccctcacccgcaagggcacacccttcttccctgcaagtgttccccaggcagggcaccacgaggggcaccccttattagtcttctctccatatgcgcggtgctggggacctacacgcaagcctgagtgctgccaccagtcccctgagccaggtcatttcaccttctcagacctcagtctgctcatctgtaagatgggtgagtaagtcctttccctccctcagagatgagctagtgggtggagaagtgccacactggccccaaagcgctataaaggtgacaggttgtcagaagcaaaataaaagcacagtcctgtctttgcgggggatagtgcctcatggcacaggtattttctcttctccggtattacacctaggatcctcctaacagccctgccaggaagagagtgggattgagaaacgcaacctgcaggcgtcagagcttgtgtccaagagcgaaggaacctaagcacccaggaccctgggcttccccacctccaccccaccccagaacagggagctgcttctggtctccagtgtcccccactgatcaagcccagcctgagccttgttcatgatacaaagccatgggggctccagagccagctcttccctctccttcgggcaatcttgctggcccctgcaaccctttccccagctccaacaccacccttgagtcaatttcagatccttttctaaagagaaaagactgggttgtgtgttctctccagcctccctcctttctccctccccctctcaagtaaaatctccttcccaggctctctctgtacagcccagtgattacacaggctgcagggtaattctgcctccctaactaacctctcctgggactgggattcaaagcccggagaatgtcaagggctagaggaggcatcctccttctctatctcctggaattcaccccttcctctccccgctgccccacccaccccgggtcctggtcttccagaaggttgggtctgcagggagctctgaccctagcgcccaggcccactctgaccctggagctgggggtgctgcaacctgcctcctgcctccaaacaagcctctgtgctcctaaggtctgtgcttctgtttgcctctcccatgggaggaaggaggactggatgggtcaaggaaggaggaagtgagctagtctctgggttcccagagacagccccaccccaaccctctagggaaactggaatcaagttcctggcttatgtgaatcatatactgcagtgggacctccatccaggagcatcaagaggccctagagcattaattctgaccccaacccctcaaccccctcagctggctgccccctaggcggggcaggagcccctcctctgacatcctcagccagccctaccctagggtcctcgaaggcctgcagtcaggaccctgggcagggcgccaggaatccctcaagaggctcgtgtcctcctcctgtccttctctgcagctgggaggccagggccctgcaaaaggaggtcaaaggcccccatggccccttggagggccagcctagctgcctctggcagtcatcatgctggtgatctgaagtgggttcctagaaatgggagctcagcttccaggtggtaacagcagtgtcctggctggccagggccttgggtcaccccttgaaggatggtccctgtaggcatctgcgctgctcatcctgacagaagaggagcctgtcccatcccagccagcccggtgggttaggggcagggctcagtcaaccccttctgccaagctgggcaaactcctgtcaaaaagcaaagccctggcaggtgccagcccccatttgagggcagtggtgatctcagggtgccacaggcatcactgtgtcttcatgagaaccatctcactccatcctcccagtccctctttatctccaggttacaggttgtgggaaacaggtgccatggccagcccagtgtcatagcactatgggtggtaaggtccgggccttgtgccctgtgctgggtgctgccactacctggtcatttggattggagcttcgagtgaatcaggaaagccctgcctccccagtgatgcagcctggccttttaaacccaggcatcagaggggtagcacctcatctcctttttttccaatacaagcatcctcaggccccatccttaggcttcctgacatctggcgagtcctgaccttgcccgcattgtttcgtaggttcaagcatttttctagggaagatagactttcatcagattcctggaggaatatgtgaccttaaaaaggttaagagcactggtaattgtggaaggaaattgatcagattaggcctggccatgcctgccaccctcagtctttctgccatggtcacaaaagggctccagaaattctgcccatgccctgatccctgcaagagccctggcagactgtggagccaagaaggctcaagaaggcgctccctgccaagtcaccaccagaccacccagtcttatgatatccatctcctcttagggcaaaacagcagttttataagcgcctgagtcacatctcaactccatttcactgcactctgtgacgcagtcctcccagaactgagccttggtcgcaccctgaaaggcagcgcccagctgatcagggaatccttggctcccgtggatgccggaacccagctgagaaggggtccctgcacaagtgcggcagacagcctgggtcctccagagcagctccaaacatttcattcctgctgtccacaccccacccccaggacaaaaacacactcagaaagacaggaagtctgcagacaggagtgagtacacgtctgcacatgggtatgtttctgtacaagggtctggtgtatgcctataggtatcaggatagcctggtgtgcaagtgtgtgtgtgcatgtgtgtgtgcgggcagccttcttgtacacagtcatgggcccacctcccacacatatgcagacaccagcctgagctcgcacatgccttcagcagccacactcccacccgagcccatgggcccaggcctcaaacacacacacataaaccttcccatgggtatggaccccggtccacacagatgtccatatccagacctcacagggacatcagccagcccaagtcccacctgcgcatccttacacagacatatttacatacagctgatgtgcacacagctccaaccatgtgtacataagtgacgcatgtatgcaccttcgttctcatgcaaatcagccaacggacctccttgtgccgcttgcatccatccacccctgcagggcacacttgcattttcaggacttccacataaagcacacagcagtaccttcccccagggcacatacacatgaacacttgcacacattttcagtgcacgcaagtgtaccacagagtcagtgcttacacaacaacacacatcaaaatgcacctttgcgtgtgcatactcagaccttacagcagcacacacctgcttacagggtgcctctcccctgcactcctgctactatgtcaggggccacccagggcactggagctgcattgcccatagggcaaactctgcctccgaactgtacccctactatggatctatctccagttgcttcacaaacctagcttgcggcacctgggagtgctccctggacactccacaatccatggggctatcccaaggggctctcctctccctcccccacctcctcccatctttctctccacaccagtcatcaaaggcaggaaatgagctctgaggctggacaactttgccgagggacaagagctggtgcaccctcacatcactagcccctgccttagcagaatcccccctcccacagctcactgactgtctctcccctcctcccaaca

SEQ ID NO: 38905 - DNA, 800 bp, Bovine  19866881109869
  misc_feature (1)..(1): n is a, c, g, or t
nttcttccttctgccgatgtttacttcccaacatgagctgcccattccacccatccatccggcctggagaattccagcttcatcatatccgaaggggagaatctgattgctttttgagggcaaaagaaaacaaccgttaggtatcgcttctacttggaccgcatgcctttttatagccaaacttctgtgtgtttcgtaagtggattttgcgttaatggatatttatgtaataactagacctctcaaattattatgagaaggtttgggttgggaagggaggtgggaagaggggtgaggggtagtttttttttttttcctgttctaggtcttttttttttttggtcatctctgagatggactttgtcacttgtgggttatctggggctgaggtggactcagcctgacagggaaggatctctgacatttcagtccccaggttcccttggggactggagaagcatcggatgttagtgctgatgaagaaatagcaaatctgggcagagagagtgggggaggttgtcaggctggcagtatctggactttatcttgcttgcctcccaaactgagatcctttctgccatgctgcccaggatttcattacatctgtgcaccaccctcagcgcgcccccatccatctctggggggttcacgagcatgtgtcttcatgcgggtccaaaaagaacactgggagttctcctcttcacacctcctcctgcggctgtggtttgcatctctcttttcctttctctttccctcttcccttgggattgactctgatgtggaatgccttggcacatcca

SEQ ID NO: 38906 - DNA, 1661 bp, Bovine  19866881116196
  misc_feature (1)..(1): n is a, c, g, or t
nttggtacatttctaagatggatcgtttctcgttatccttcagtaagtacccaacaacaccttgtattgttttgtcactaagtcatgtctgactctttttcgaccctatggactgtagcctgccaggctcctgtccatgggatttcccaggcaagaatactggagtggcttggcatttccttctccagagaaaaacaacagctacccttgaccaaataatacctgttctagaagtttatttgcagatacttgtatacatgaaaagtcaaagtgaagtcattcagtcatgtccaactctttgcaactccatggactggagcctaccactctcctccgtccatgggattttccaggcaagagtattggagtgggttgccatttccttctccagaggatcttcccaacccagggatggaacctgggtctcctgcattataagcagatggtttaccatctgagccgccagggaagtcgtgggaaatgtaattctaaggcacacatatgaggttaggcattgcagaactgtctgtcacagctgtagactggagctatagactgggactaacctgattgcctgtcgataggggactggctaggtaaattataggacagcccacatgattaggtgaaaactctttatgtgataatataggaggatctctaaaaaaatttctgaagaagagggtacagagcagcatgcagtgtccagtatttgcatgggggaggggggagctatctatggacagatgctctggtaacactggccacctctgggcaggggaccttggagtctgggatatagggatgggaaggagtcactttaactatccacacttttgtatcttttgaactttgaaccatgtcactgtgttaactacccaaagaagaaaaaactgaaaacttccagggacctactgctgctgctgctgctaagtcgcttcagtcgtgtccgactctgtgcgaccccatagacagcagcctaccaggctcctccgtctctgggattctccaggcaagaacactggagtgggttcaccttccagggacctagattctgtgattctaacattgcatgattttagtgctttagaatttgtcaagcctaacttaatatgactggacaaagctcatctctcacgaggccaatttcctaacaatttactaccagtggttcccatgggtctccaggcctgctctgtctccgaggtgcgccactagcatcccctacgagctcgagcagccctgagggaaggctccctcccagcacagagcagctgcatgaactgtggtgtctcctgggaacatagcccttgggcccccgctcaccctctttgcctcctttgtcctaggggagccttctcagtggtgcgcaggtgtgtgaaggtgctggccggccaggaatatgctgccaagattatcaacacaaagaagctctcggccagaggtaggtgctggatccatgcctggcccgccctcctcccttcatccttccctctatcccttgggttagaaccgggacctgggtctctccttctgggtgatgctgcggtcagaggtgggggctcttcttcctgcgggtactatgagaatagactcctccatatttcttccttagggggtctagactggatgccatagcctctcacaggccaggctctctg

SEQ ID NO: 38907 - DNA, 1299 bp, Bovine  19866881124429
  misc_feature (1)..(1): n is a, c, g, or t
naatgaaaaggagagctctatggtacggaggtggaaaggagaaaacccagaatgtcagtttgccagccagacgttccaagagtcactgtgtctgagcctggggtaggttgcatgagtgtgtttcttgggaacgagttaaggcccagcactcatcctcttgcccagagctgtcccccaccagccctatctcaggtaatcaggttgtggccccgctcggcagcaagatccagaggctgggccagtaatgttctatcatagcagactctaaagaaccaccttgcctagccccacctcaggtcctccccaccccagcccagttccttcaaacaccaaaggaccagaaaggtgaagggggtctttgcactcccgacattacagcaggcccatgttgtgatttctctgtcccctgggataaaagtggtgggcctggggtcctcagggatttcagacgatcaggaagcaggattcttctcagatttgaacttggtggctcccaaggaatggaaataaagaaggggtcagaccgccccatcacccttccaaggcagccaaaataactacctcttccttcctcttctcagtgaagtgtatccggagcaccgcagagtattttgctgagaggctattcaaggccatgaaggtgcgtggtggggttgatgcgcccgaggttggggagaggggctctttgcacccccaaaagattgtcaggactctggcaaatccttgggagtccattggccaaagagagcattcaaggcattggccataaaaccaagtgatggcacttggtcccaggtcatacaccttcccacccagatacctaccctattctcatgattgttcagggggtgcatcatgcccccagtccagccagccaactgggttggaagcccatgctttatttctaaacgctaattaactagaatgtttatatataatgtacataggaagtgaaagacattttggcattgcctgccaagacttgtgatgttcatcccagggactcggggattctgctcctggcgagtactgagaacagattttcccaggactttacacacacaacacagaaggtggtgatgtcttcatagtgcaccagggtgaatgaacacggtcatttgttgtcagaggccacaggcccaaagttcctgcaagtggcccattctctgtcttccagcgccagactggacccagctgggtccagagaccagcatttttatgatgtgttcataaaaacattcatagcagtatggtccatgtcatgaaaaaactagaaacagcccagtgccgtcaggagta

SEQ ID NO: 38908 - DNA, 1276 bp, Bovine  19866881125904
  misc_feature (1)..(1): n is a, c, g, or t
nacagtaggcgtggtctccaccatcatggaacttacattctaatggagaaaagtgacatcataagtaggcaaacataataaataagaaagtgatagatatggttgagggtgatttagggaggccacttagatggagtgagcaggggcgacctctctaagcgggtgatgtttacttggatgagagggttgaactgtgaggggccagctttctcaagaggcaggagggagagtgcttccgccagggcgaaggcaagggtaagccccagcagccggggaaggtctgctggggcaggaagggtgaggaggtggatgaggcttccagcgtggcagtacctttcacgttgtattaaaacatgttcttttctttctaaacgcaattcgatgactgtgggctagggttccagggcaagactcccaaatgcctgaatcagaactcagctgggagggcttcaccattttccccaggggacagcctgtcctgtcctgtccaggatgctgtgaccctcagccctcccagcaccagccggggcctccctggagcagggagaccacagcaaagctgcccagcgctggctatttctggcaggggagggggccgcctgggccctgcagctgcattcctggagcagatctgcccgaatggttgggcctgaggaatgcagaaccacccctaccccagacacaaggagccttttctcgcacaggcccctggaatgaggctttccgggggctggaggtcactggatttctgctgtttatggttaagacctttgctgagcagagaaaacacagctgtcagccagaggcccagcacaacacctgcagggagggagccaggctagagaagggagggggctgccagactcacctactgagttgagccccactgacatctatgtgactgtcctcagcagggatgacagcctgccatagacaatcccctgaacccactttagagacagggaagctgaggccactcagctggatcataattgctcatgtcgagaacttattatgggcccgcattgtgataagagcttgatgaacatttcccaacagtcctgtgacgtgtctcctattgctgacattttacagatggggaaaccgaggcttagagggatcccattacatgcctgatgtcaaggaactgttaagtgaaggaatctggatctgaatctaggccttctgactctaaagctccctctgggattttttttttctttttttcctggtcttgttttatttacttatctttttttctccaaggaaacgtctt

SEQ ID NO: 38909 - DNA, 678 bp, Bovine  19866881131132
  misc_feature (1)..(1): n is a, c, g, or t
ntttggagatagagacagagagaggcgggggcctgccaaaggtagctagcaagtgagcaatggagtccaaggttccaaatatttttgtaggggccaagtgctacctcggggctggtttgccctgaggacttctgtgaaactttttatttttgccctgtgtagaccctgggtctgaggatgctcaggacaaccaagaatcctctagtacacccctggatgcccatctgttctcagcttccatgcctccaaaacccaactattggacccaggatgggacaggcccctccaaagaaccaaccaagtctccatcagcaagatctgtacgtagttagtgggccagaaggctccccagcgtgttagaggtgaatgcaggagtcagatgccaacaccagagtgcccgcccaccaatccatcactgcagaaaacaggaagcttcaagacgtgagactcagtgtctctggttggccaccagggggcagctgggtgccaaccagagcagcaggaaggtgcgagcagaagagtggaagctgtggtcaagaggtcaagcaggaggtgggggagggtctgacctctactcgggccactgcactaagttcccacatctgataggccacctgcgctgcctccgggaagaactggccagcagcactggaatggaagggtgttagggagaggaca

SEQ ID NO: 38910 - DNA, 1104 bp, Bovine  19866881135358
  misc_feature (1)..(1): n is a, c, g, or t
nattctatatgttgagaatagaggtggctaatgaggtgcccataaggcgtatctgactacacatgtttcatatagtctgcatgatgttttaaatttgaaagcaataattaaaactgaggcattgacatagaaatccagatttctagattctcttgaaaagtgaggtatggcaacacaagtcccacttacatagcaaacgccaaggaagctgcgcacagggcgcctcctcagaagggacatggcgcactgttcaccactcactactccctgttgtcccctcacccagagacacagggtccgcagtcatcagcatctcgtacccagttcagccccctcgtgtactctcctggcctctctggggatctgggttgagactctggtctaagctcacctgacactacattcacctgtatgtctgagataccgtgattctcaaattccattcccctgcgtttgaagaattcaccttgtcgtgaagtccactgtacctccgctggggtctgatctagtcatctacgagctgtgccctgactcccaggtagctgagccctgtcgcagagacccactgctctggaaatgaggcaggcagaggtgctctgctgaggcggttgctgagaagcggggaagggaaggaagtgagacgaggcccccaggtgcaactcctccgcccctcccgtccccacctgcagtgtggtcccggaacagcaagcctgtgcacaccaccatcctgaacccccacatccacctgatgggtgacgagtcggcctgcatcgcctacatccgcatcacgcagtacctggacgccggcggcatcccccgcacggcccagtcggaagagacccgcgtctggcaccgccgggatggcaaatggcagatcgtccacttccacagatccggggcgccttccgtcctgccgcagtaagagcccctccttccgacgatctaaaagaacggggtggtgtcggtctggagttggtacacgctggacgggccctgagccaggggtgggaagaccactgggagaacaggcctgtgggtcccagggggtggggggaggagacgcaggtgggacccactggaggcaacttaactccatccaaggag

SEQ ID NO: 38911 - DNA, 1893 bp, Bovine  19866881137810
  misc_feature (1)..(1): n is a, c, g, or t
nattctcttccttgtgtactgccgctatgacccaggccccttgcatccctgggctttcggctgtattacactttcctgttctctgtcctgtttcccatcccacccagtgactggtcatttccctcttgtcttctttcaattgagacaaggttggaattttccgaaaggaactttgtagaggaggcaggatgcaagatcttcccaggatctcatttgtttccctttccatgagcttctattaaatatctgctatagttctagttcagccccaagcccatgagatagaaagatgaatacaagcactctcagactcgtgacccctatggtcccaaggggtcacctgggctctctggccctgtggggtgaagtgtcagggctctgagctcactgcgtctccttttcctccagtcctccaggcctcctatgagcaggacaaggaagcccttacccactccttccaggaggccaaggcggccctgcaggtgagaagggttgggccatgtgagtctctgtgatgtggccaccctgctgtcagctcaggaggtcttggtctgagatgagggttggcctctttttcagggatggttgggagcatcttggagacgtcgtgggcctggggccacggtatgattagagccgagggtggctgctcagtgagctgtggaagaatgaaggaaggcctctgacccagattgactggtcagggattttctagagagggtgaggtctaagctggaatctgagggtgggttggaatttttcagatgagaaagggtaggaagagtgccttagcagaaaacaaacatacaaaaaacacgtgtttaaacacatggaggaaaggggaaaaagtacagagtagctgtggaactgaaacaagtccaggagacctgggtatagagcatgagggggaaacagtggaggccagagaggaaggcagggaccaaacgatgggagtctgtgagccccagtaagggggtgccctatcctagaggcgacggacaaagtttaggtggaggaaaatccttgacaggggagcagtatggaggcaggcatgtacctggcagctgcaagagtgatgtgatgttggctgcaggagaaggcatgtagagggagcagtgagagaagagacagagcaaggatgctgagcctggcttgcatgtacttttgaatgccagtctgccaccagccgtgaataccgacatcatccccaagggtatggagagctggggctgtatgttttgagcagtggttgaagtagcttaagcctgcagtgctgggtagagcaaagacagactgaagaggccaacactgacccctccccaaggggtggggaagtccacctccagccttatgagccaggcttgcctcatctcctgtctgctccccctccaggagaccattgacagactgaccgcacagatagaggccttccaggccaagatgaagagggcagaggagtccatcctgagccgagactacaagaagcacatccaggtaggaggcagtccccacagcctgtcctccttcagtctccagaaaggtccaggtctgggcaacaggaaaggccagtccctcttccaggttggggctagaactgatgctgttaccttaatgagggtctggaagaaacagtgtccccatgtcactaagggggaacgtaaagatcagagagaagcacgtgggtggtcaagtgctcatgctctggactcagaatgaagtgccaagagcagacctaccacgtagcagaagcaacttaacctctgtgaaccacggtttcctcgtccgtgatggtgcgggcgcagcaggcactgttggaatagagtaagatacagcacgttaagcacttgccacaggccaagaagggggaggtgacttgtcaaacaccgttggggg

SEQ ID NO: 38912 - DNA, 1327 bp, Bovine  19866881185281
  misc_feature (1)..(1): n is a, c, g, or t
ncatcttgttaaaaggtagattctagttgagtgggtccgggtggggcctgagggtctgcattcctaacacactgtgaagtgatgccaaagctgctggctcaccagtcacacttaagcggcaagatctaggtgctctgtaaggaacattctaactctgacagctaccacgccttctcccttaggagggaagcatctctctgtgtccagggccccaacagttaactcctctgcagaagagtagcatctccatctgctatttatacccataaggcacctccccttccccgtgcctggggaaaggaacagagctgcacagacagcagctggaggcttggggctagagtcagagaaggggcagcaaggaggctggcggggagccaccctggttggcccctgacctgcttatgaccatgggcagttcctgcccaatctgggccggcctccagctccccaacagtacaatggagggagtcatgagtggtctttgattgtagaattccacggttcttagaaagcccattaatcctggaagagggagatggggtgtgtgtatgcacgcgcgtgccactgcacagttgcagttgtctccggtcaacacttcctcatccttcagtcgctcattcccagctctagcagggagcagtaagttatgggctctggggctgacattctacagtcagattctggatttgctgcttaattgctgtgtaacccaggacatgttgcttaactgctctgaagttccgttttctcatctggaaaatgggaatgatagataccttgtaggcttatgatgatcaaacaaatcatagcacaatgacaggccctggggaagggctatggatcatttagctgctccatcctttctcaatctacaccctccaatagaacaaccttaccgaaagacttaccttttgcctgaatcttcgtgtgattctcattcctccgagccatcaagattttgagtcattggtttggggcactatatataatattctggttaagaaaatggaattttcagtcagacacacctgggttcaaatccaaattctacctttcatttcgtatctgagcttgggcaggctacaaacttctcagacttagtaccttcctctgtgaaataaggataatcatggtacccactttctagagctgttgtgagggttaagtgagatgttgcaagtaaagtacttagcacaagcctggcaggtggtagaatctcagaaatggcagccatagtcttcattatcatcatcacttgagttatgactccttcattcattgacctgatgtcaaggacatccgagaccccaccatgtgccaaggc

SEQ ID NO: 38913 - DNA, 1809 bp, Bovine  19866881229870
  misc_feature (1)..(1): n is a, c, g, or t
ntcccatcctggggtccacgttaatgggagtgcaatatttgcatagacatgagacctcacaccggggaaattcccctggtgaccaggcttcctttctgaggtcaggccacatcatcagaccccgctccttcctctctggctctccccagcctcctgatggctttggtcccttctatctggctgctgtagatccaggctcacagatttagtcccatcctttcattctgggtggtgtccaagagggtgtgagggcagagggtgggctgggtatctggaatgaaaacaagttacaagggatacaggaaaaggcaaaaggcaggaggtattctggaaacctggactgtaatgctaacgtgactttgggcataagccttcccctatctggggcttagtttctccttctctccggccagggggttggtctgaataatctcaaagcttcgttccagagctgataggctaagaagccacttcctttagcagcacagtcttgcaacatttgtccttggatcttcctcctttgacttgaatcttgcaacactctgccctgtatctgtttccttgggaaacacaattttgcaaaacacacccctacattccatttttcagacatttacagaattctatgcacctccttcccccgacttggcttgagttttaatgtttcctttcacattcaccatgtatgatgtcctgagacccacaaaagtggaatagagcttccagatccgtcctccttgtggtctctccccctggcactgaaaagacaccttccctgatacatgaaaggggaatagtgaggtcctgcgaccacctgcatcagaaccaaccattagaaaagaactttgagggacttccctgggggtcctgtggctaagactccatgctcccaatgcagggggccttgggtttgatccctggtgaagggaactagatctcacatgctgcaacaaagatggaagatcctgcctgctgcagctaagacctggtgcagccaaataaatgaatgtttaaaaaaacacagccacagccaaataaatgaatattaaaaaaaaaaaaaaaaaaagacccttgaaagcagtgggcaagcttgtgactttgattaacctggggagctattaaaataccaatcccaggccataccctgccccctgagattctattattactgtagagtggggcctggacatctgtattccacaaagctcctaaggtgattctgatgtactgcctggattgagagtcactgatctgaagcccccatccaagaccaaatgggccaaataattctgacggacactcaagttgacgaacccctgacctatgatattctttatgaaatcctcctaatggacaccccttctatacacacagctcttcccagggttacaggtggacaaagagaattgattccttttcccagatgaggaaggtgagagacagagagaggaaatgtctgctgcagtcacacagcgagtcagcagcagcaatgggctcagtacctagtgggtgcctagcgcccctggcatactaggcccatgccgagcacccctggactcaaagtatttttgcagaagtcatggatttgacatctgggtgacccagagaagtgctcccacactcggtacctcccactagtttgtgacagtgagttctccttggctgcctgtatttgagcaggcaattctcatttcagagttggaagatccagtttagggaacttgggcttctcaaactccactaagttccaagatcacccctgaaagcttatttaaagtgccatctctagggccctagcccccagagagg

SEQ ID NO: 38914 - DNA, 1196 bp, Bovine  19866881239766
  misc_feature (1)..(1): n is a, c, g, or t
nagcacagactcggcagttgtagcacatgagctcagttgctcctcggcatgtgggatcttcccagatcagggatcaaacctgtgtctcctacactggcaggcagattctttaccactgagccaccagggaagcccctatgattcactttttagtgacgagaaaaccaaggctcagagataatgcccaaggtcacagagccggaaagcaggggcgggctgggctcacccctggctctcaggactctagggagcaccaggctttccagccagcagtttccacagtgccaagctcctagacagggcctcagtgtgtgtataattcagaccttccaaagcctctgtgcttctgttttgtttttctcttcgcttctctgtttcagtcctatcccaaggctggttctcagggtcacagggctagaaaatgctccagtgtcagagcatgaagggccctcagggagaagctggcctgggaggctttagagagggagagggtcagagagaaggccatgggccaggacctggtctgctgacctccagccagcctggaacccttccccccgctactgttcccagaccagaggaacccagcagaaaaggccagggggtgagacagccctgcctccgagggagctcccgtacccccatccaagcccgcagtgactccatggaaaaggaatttggcaggaggcttggaccaggcccagccagcaatccagacgacttttgccaccctgcacaaacaaagctgagagaatggggggctgggccaactacaggcacctcaggtccccccactgcagggcatcaggggcggcagctccaccccaaattccccagactagggaactgccacccctggtgatgccccagccagctgggttcaagattgtggtccccagtgtcagagacacaagagatggctgtggcccacagcgggtagtccccttgttgagcccccagtcttcttgcacccgtaaaagccgtaacacccccctcttctcccagcctcttcagtggtgatccttgaaagaccgacccttctggagatgcagggatgagggcagagctgccccagggtcaggagacctgggtctgacagggttgaatccctaagtggggaaggggaataagaagccctgagtacacccctagagtaagctcgcagggctgctgcaagactagccctcagcagccca

SEQ ID NO: 38915 - DNA, 1139 bp, Bovine  19866881251055
  misc_feature (1)..(1): n is a, c, g, or t
ntatttacataggtacctatgatgccttgcccaagctcagtggcctcactatcctcccagccttacctatttcctcctgtggcccggagtttgatgtggagggcagtgatgcccagctccttgcatctctgggctacatcctgggcagccaacatggcagcatatggagaggactcatctcggtcagccttcaccttcatcccaccagttacacggcagatggtttccctgggaacaaaagcacaggatcctttctttcttacccatcaaggattcagagtgcatatcacaccctaaagataaagagcactactgcccaggaagggcagaggatgaaggtcaatctgaacaaacatcctgatcccacaagaccgccctaggttctgcagtgatggtgttcacagatcccagcttaacactgcatcaacactttactcttagctttaatcttattacttgagtaataggagtaattcctcctcattttacataagaagtccacagactgtaaaggcaaaaaatgtagctccttttctcttaaaaccccagcacctagattacagtatctgtgcactaatcaaccaagcacatatccttatctgaacatctttaataaaaattatttctagagatccccttaaagtgctactcagttccctggtcatttctaaccccagcccttgctatctgggtcctgtgcctccccacgggggttaactcacttgccagaaagatcggtgacgtgcacaaaagtgtcattgaaggacgcaaagatgtggcagacaccaaatacattttctccttcagccacctgagggccgaggctgatgacctgttcttccttcttttccttccccttgcgaggtgccatttcttaaggagaagaaaaaaaattccaaccttaacaacaaaaccccaggtgtttacaactctgggaatacttcttccccgagaaaggtgagcaggacactgaagagctctggctctcccactccaggccgccaggagcaggaatcagggctcccaggtgactcccaacccaccctgccaagagcagagtgctcctcatctctggcttcagggcacaggcgcgtgataggtgttcagcaaacaacgatgtgcaatccctagcctcattt

SEQ ID NO: 38916 - DNA, 1138 bp, Bovine  19866881288976
  misc_feature (1)..(1): n is a, c, g, or t
naaagctgaaactccatactttgacccctgaatggaagagctgactcattggaaaagactctgaggctgggagggattgggggcaggaggagaaggggacaacagaggatgagatggctggatggtatcactgactcgatacacatgaatttgggtgaactccaggagttggtgatggacagggaggcctggcgtgctgcagttcatggggtcacaaagagtcagacacgactaagcaactgaactgaactaaactgaagcatagagctgtcgtcattgtggggaagaaacatgggtatttaaatattctcctatttgtctaggttttccaactttcctataatgaatacagattgtttcttaaaatggaaaggaaaaacacctctcaactaaggtaaaacaaagcatggggtcaaatactgtaagcctgaaaggacaagtcttaggactctgcagactccagtcctgaagtgacaattgcttagggaccagaggtgggtgggaggggaaaatgggagtcccacgtgagctcggcaggtggaacagaaggagtctggtccacagccttccaagtgcatcttgtccttacctcgcagggcctccgcatgctctccctctaggacttttcgctgttcattcagtttctctccaagttctagctccctctccttctccacctggaggcagagggtcccgagcagaatgagattcagtaggttcagggcagcctgacttatccacttaccacccctggagccttttggagattggtgatcagagtccccccagccccagtgatctgagtgatggaaataatgcgtacattcctatgagggcgcagagagggcgcaaggcctccaagacatagctgatgtgactgacttctccctctttagggcttaagagggggcttccagagatttaccatgtggaaagagattttggagtcttctaatcctgatgccattgaaggcagaaggacctttgctatgttggggggttccccacttttattgcatagaataaataaaacaaattatatgcccacagttacaaatattttgttcaacagatataggactcttttctgggcaaaaggagtaagagataccttgcaacaatgataaaaccaaaagtt

SEQ ID NO: 38917 - DNA, 1048 bp, Bovine  19866881300117
  misc_feature (1)..(1): n is a, c, g, or t
nctccccgctgaggggttccctggccagatgaaatcctgtctgagaaccccttccccacagagcgggtgctgccttgggactgtgaggaagaaagcctaagggaactgggcgtagtgcaggggctggcacaaccggaattcctatcctgcctttggaaggattaccataagcatctctcctcacactcacctccgaccttcatcctcactgttatctcatttcttccagaggcgccaaagaccagatcagcctcccaaaccagagcctcaggaactgggtcccctcaatggtgacacaggtgagtagtcagccctataaatgtcctctctgacatctgtgaggcttcctactttataatcaacaaacacgatatggctatttaattatctcctgggattttacttcggttgctttaataggagtatcatttctaagatcagggaggtgatagttcttccctgatcctggctattgctaccacacctggagtgctgagtttatttctgaaaagtacattttcagaaaaatctggaaaaggagagactacagtgaagaagaatcaggttgatgaggaatctggaaaccatgtcctttaaggaacaggtaaagaaacagaagatgttgcgataaaacacaacagttctctccaagtgactcacagagaagaaagatgagccttgttcagtgtgacccagaggtcagtaccacggcccgaatgtagccaaacacactggcagaattcagttcagtctcaaaggaattttttttgtctggttgatggtttaaagtcatcagagctactgatagaatgcgctctccatctctgaaagtgtttaattaccacctggagactatcaggatattgcagatgaagttaaagtaccagataagcaactgggtcagaatttagatgttctccaatctgactatacataagaattacctggagtggattttcaaaaataccaattctgaggccccaccacagaccaactaaattaggatctctaggagtggggctgaagactctgcattgttagttagctg

SEQ ID NO: 38918 - DNA, 1412 bp, Bovine  19866881323235
  misc_feature (1)..(1): n is a, c, g, or t
ntttcccatgttactcacttacagacagactagtgactcttagctggcccacccactttatcaagcagggttctatggtgtccagcctctgcgaaaaagaggcctgctaccactcggggcccttgggtacttcttgtatcaaatctaatcgttcattagcttaacccagggtctgcagaggccacatcactgatagattttgagtgtgagacctgggctcaaagctcagcgctcctgcttgccagccgtcttgaacttgggcctgttgctgcactcttgggagcctcagttttatcatcagtggaatggaggtaataacagtcttcactgtaggttacttaggcaaagtaagtgaaatagtgtgtgcagcctatagtgttaaaaatggcagtagtagctaataatagctgacaaccaaaacagctttacgataaggaaaccaaaacagaaaaatgcaccccagtgaccagcttaaaggtatcaggaatttaggtcatgactggcttaacttggatgcctgggagtgagaaaaaggtgtggggttctaatacacttgtgaagttccaggcttctcacttagtctggggcttgtaagcttgagtgaaggcgacactctaagcagataacatggacaccttgaccacagaagaagaaatgggatagaaatgaataaatggggaatgaagagttctgctcaccgtttgctcctgcctcagggtgttagcctgtgagtgacctggatctcagggccacataaacttgcaggcaggcacctgagaactggtctcataacatttgggagctggaaggtttttacatgtgtcccattccaaccagctcactcctcacatgagctaactggggcctccatgggggaaagaagtggcggcctaatttaccagaaaagggtctgtgtttggggactctgattgactttatgttcaaatcctggctctgctcctgaccactgagtgaacttaaacgaagtcttcccttcctctgaaccttaatttctttttaagttgagatgaataaactagaaaatgatttgagtccctctggttctaaaatcctttgagtgtcattcttcattcatccatttcataagtaattaagtgtccttgaaacatctccagagcactaggaatacaaagaggaataaggggcagtctcattaaatatcactgggcccaagaacatgtatgtacagccaagtagaatcctatggctaagctgaaccagtgaaggtttgtacttaatgctgtaagaacccaacagcaaaagtggcccattctttgagtgagaatgtttatagtgatggtaacatttgggctggacttttaagagtgaataggagttttcttaggagagtaggagttgctctagaccccataacaagttagggggcttaa

SEQ ID NO: 38919 - DNA, 1091 bp, Bovine  19866881366370
  misc_feature (1)..(1): n is a, c, g, or t
nactatttaaacaagtcacaagaccagtttaaattcaagaggaggggactaaatgaggcaaactttaggagttgttcattagtggctatcagtgtaagagacaaccacagccaaccagtctttctctttcaaaattggaaatgttcactgtggctggtctgtctctgttctttcattgaatgctggatttgggaggcaggtaagttgtaatttttagttcacaggtctctgaattaagagaaggtatatctgaaacttacatagaaactatgatgaaatcttgaaccttcagccttaggccaaaatgatggaaattttggttgcctccttttgggaaggggtgaggatattttgcatgctaagttaaaggaggtaatacttgtggccatacaagtggaccaggcaaatttaattatttttcaaaaatattttctatcttatcagagcctttgaacattgctatgactattattacattaaaaattacccaaaactcatgattaaaaaaaaatacaggtttgctatttcatagattttgtagctcagaagtccaggaacaatttaactggatcctttgcttcagtgtttctcatagattgtaatgaagttgtcagtcaaggctggggttcattgaatgttcaattagacaaggatgtacttccaagcttacttgtacttccaattcattttttcaccagttttcttccttgttggctgtcaggtagaccctcactcagttccctgtcatgtggcacactctccacagtgcagctctcaacatgagcagagtacttcatcaaaattaacaaggaagaacttctactagtacgagattttcatctttgttacataataacagcagcgacaccctgtcacctttgccatggtctctgttagaggcaagtcacagatcctgtgaccacactccagggaattgcacaaaggatgaccgtataggtgttggtataaacggggacggtcttcaagtctgtctgccacacgaagtccctcactgagggataattagagttttgtaccatttaagacctgaacatatgcttatttcagctaatggatgtgaattatgtgct

SEQ ID NO: 38920 - DNA, 1205 bp, Bovine  19866881685151
  misc_feature (1)..(1): n is a, c, g, or t
naggccagagcaaggaaatacatgtactgatcacacatgcacacgtgtttttacttgtatattttttaataaaacattttaaaaataaacactttataaagtatttttaaaaatagttaactcttgccttcagaggacttttggctgatgcgtggaggaggggagggcagctggcagtgccatagagatagagcctgaacagggaaagaagtgtctatggggaggagggtgggggtaaaaagggcctcggagccactgaggattggggaaggggaataatggtctgtgtggatgtaagaggctcagttatggttgggactggtgggtgagagggtagaggggcaggagacaggaggctgggtctcaggggtgagtagccttggaggcgcactgagtgggcgagagaattgctgtgtgaggctctgctgtaggcccctctgtgttcctcctcaggctggtgtgacgacaagtaaaatcccagaggtggggtccctgggtgcggctgagaagaaggtgaggatgctggagcagcagcgcacagaggtaagtggctggagggggtggtgggggtcagggaagatcctttcccccttccggggccagcaggacaaaggcccttcctggcccctggctctgactggtctctgtgatgagctgtcatggtgaccactgaaccatctgcccaaggatgagacatgctgccttgctctgggctcttgtctcgtaatcagtccccctgcccataggagtcgctctgagcacatggcattcagggcatggcctatcattgttgaagggggcttagtttagaaaggctcccatggtgaaccttgagtggtggcgagaggttgtgataggaggcaagtgcagcatcaggaatggggagcctgtcacctgtcaccatgcagctggttcaggaagggtctgtcacagaaggagagaccccttacctgcttgtagcactgctcccaatcagccgagagtctccagaaatggaggctcttccttgtgtctcatgcgtgttccgccctgatgtctctggaccagaggtgggagcctgatcttctccgttgactgagcctctcctttccacgcagttcaggcccttgtctcaatccctgggcctctctgccctcccttgtcctccagcacattgaaagttaggctccactggtcttttgtttaggcgcaattcatttagtttt

SEQ ID NO: 38921 - DNA, 735 bp, Bovine  19866881985192
  misc_feature (1)..(1): n is a, c, g, or t
ncagctagtcagtggcagaaatgaaatctgaacccaaaccccatgaaatggtgatggctccagagcctataggggaatcttggcagggacaggggagagcatgaggggacctcagctaccaagccctcaaccaagcctccaactgtgctctttcagccctaggcccagctttccctgccaaggtgctggggataatgaatgagatgctctggttgtcatggagatgccatggcaacgctgcactttcgggaaataccacggtaactgtggccactgctctgttgaaagtcactcatgaccccaccccccactccaaaatgctcaggtgcccccagaatcctctctaggacgcaaagagaaaagaggcagaagctacaaggaacttctcagaaaccaagttgtctagagaggaggactggggaggaggttgagctctgccctggatggacaggtgggctctgaagtgagaccaagagccccctgagcctttgacggtgaagtgcacctaacaacccagctcccgtgcacttgctgcctccatgtgcagcagcctaccatgaagagctgcatgcatcatgctgtgtcatcccaaacatctgcggggcagtgatgcagtagctgctagcatccttgttaaaggtctttgtgcaaatctctccacctctctgagtctcagtttccccagcgtaaaatggggtttatactacttatctatcttgcagggctattgccaag

SEQ ID NO: 38922 - DNA, 1543 bp, Bovine  19866880371264
  misc_feature (1)..(1): n is a, c, g, or t
ncgtgtgtatgggcatttagatttctaggaatatgttgatttcaaggtatctaagaacatctcttttggcttctcctttaaaattttttggttagcccactgtttttgttaacttattcatcacccaagagagctgtgacgttaaaattcttgcctgtaacagttttagacaaacacttccgagggatgctcccctgttagtgatgggcatattccgagtcaggtcaaaaaaaggcaatactttctattggtagcttgtaggggagcatcaaagatggcaaataatgacaacagttctttggcatgagggtcttaaagagctccaggtccattctactccctctgatactgacaatgcagggctgatatttctcaaggttaccgttgagctggagagcaggagatgagagtagggcaaggtgaaaccacaaagtttgctcttcttacagagatttggccatttttctcgactaggtaagtctttggttagtttctagagttctggaaaagctgtaataatttttccagttttcatggaagggtacattttcaaaggtccttactccaccattttcactgtcatctgggcatttgtttctaagaaaaacctcttaagtacttataagatttactttccaaaccttttactgtgagaattaatttttactacaattgattttatctcttctcactttaattcaattagcatgatgaaatataaatatttcctacagggattattgagaaataaaagataatacatagctatatctacatggacatatgggttatagctattacccgcagaaaaactgtttcaaaataagccattataaacttagagacaagcctgattgttataatttgggtgctatagccatgctattaagaacaaaatcctattaaaatcaatttgtgaaactcataatcctttaatctgttctgcaataatatgatagtcaaatcctgggaagtacctcattaccaaaaagcacattttaaaaacaataatctcattgaggaaagaggatttctggtcagtcaagttaaagcctaaaaattctctagatttagtgataagaaaattactgccatttactacctacatatttaaatttcttgaatcggtgggtttacagttttaatcaaatttgaaaaaaatttagcttttatttcctcagatacttctctgaactgaaacatccctaccatgcccccatccccaatatacactccttctgggactccaattacacatatattagggtcactgaagttgtcttatgtttcacagatgctattttcattaaaaatttttcttttcctctgagtttcattttggatcatattcattgccatagtctttaaatacactaatcctgcaagtttaatctgctattaatccaatccagtgcattcttcttttcagacactgtagtgttcatttccagaagtttgacttggatcttttttatgtcttcaatgcttctacttaccttttgaacatatagaatacatttagaatccgcctgcaatgcaggag

SEQ ID NO: 38923 - DNA, 2172 bp, Bovine  19866880483659
  misc_feature (1)..(1): n is a, c, g, or t
ngggtttgcaaagagctggacacaactgagtgactgagcacacacatactttagtgcgcttcctcttagtgtttttcagggcatgcagtttattcgtgagtttgtagacagaaagatgcattttcattttggatctgagaatttttcatccttaaaaccatataatgatttcctttgttttttctcctgtaaattcattgagcatttgaattgctttgcagggtctttgctgtaaattttactcaccacataaaatttaagtcaagcaggagaaatgtaatggtataacagttaccttttggtaagtttatggagaatgtagggtagtatactaattttgcttccaagggacccacattttcatctgaaaaaaattatgaaactgagtcccatttgtagaagtttctggaaactcaaattaagctgcctctatacttctgtaagaaacaagtctttggtgggcttttgtatagtttattgcattgtatgtagatggattgagctagttacaatagtctcttataaatcacagagaggaccatcactctagttacaagtcctacatacgagtcaaatcttatcaaaacatcgaacatcatagaaaccttgaaaaaagcctgacattttgttaaaacaactggcaaatagatttttccttcctctcttctgcattcctttccttatccacaacagtatgcaatttgtataatactatatccagtcttcctcatttttccttacccaagtaccatctatgcaacccaaaattaatttttcaggcatgaaactgggcactttgctgcccaatgcagaaagcctttacaaatccagctggaatagagtggaagggcataccagattgatgtcaaggcctgctcacatggaagtaaaattaaacttatggactggagaggcaagcttaatttttatgtgcctcctccctaaaagccaactaaaatctaggaagatggaaactatctgagctggtttgagtggaccaaacccatttcatttttaagtgctacttttggttcattccttatgaagtgaaggcagagactagttcctgtgggattaagaacaaccaagagagcctctaatactagactattattgtattagcattttttagttccttgcccagatagcctagcctgtgtctttctaaaaaaaatattttttaaaagaaagagataaaatacattttctgttcacccaaattttaattctctgaatttcattcactgctaagcacttgcaattcctggaaaactcattagattttttcccctagcttcctccacgacaaagctatgcttccccagtggaccacctcatctttgagtttctagtccttggaatttcacttctcagttccaaagctaaggagccagcaggcattccttccttgtctcaaagtccttttccttattttgaatgccccagtttgtctaaatttaccaagggggaaaaggaatgtatcacttgggcctgaaaaatttcttgctgagtccatattccatgaaaataacataatgatagttggaagaagttgccaatcccaatttaaaaaccaaaaacctaaacagaccagataatttcagagagaatcttcctgtgattgttcttgctcatacagtgattgaaacaattcaggcttaactatacagttagttttacagaaggtagagctagtgatcatgttgaactgaattttccccatcctaatctatttcagataatagagtctgtgtagaggatgagttcttagacagtgtttttcaactgctagccaaggtgtgtttttttatctgaatacctgagaaatcacagtttcctctttaatccatataggtttggccacagtttttatgtatattctgtgattggagtctatgccatagtcattgaattttggaattaggagcaaccttagagatatctagttaagtgccctcctccacattctacaagtgagacaatgcagtttgtatgagatctcacagctgaatacatttgagatatttttagtttaacttccctcccaaggaatcagtgtttaattctttttatatccaaataatatttcattgaatggatatgccatactttgtttattcatttgatttatttccacctgttggctattatatataatgctgctatgaacat

SEQ ID NO: 38924 - DNA, 2287 bp, Bovine  19866880547495
  misc_feature (1)..(1): n is a, c, g, or t
natatgatgaagggttttatttataggctcaaaagtgattttatttaattcttaatttctggttttgtttatatgtataatatagtttgttttggtaaaatagtgttagaattttagaagctgtccctctggcacgttcactatagaagcgtttatacctaagctattttaatcaaagctgtaatgaaagtgaaactgatgttcaaaatcattttctaaatatttcatctctgtgtgtatgtgtatttttttgaaattgttttcccgtgcatgtacctgggtaggggtagggatagatgtgggtctatttgtatttatctatctaacgctgcatgtctgtctcaatggctcgtgtatgtgtgtgtgtgtgtcagtgtaagtgtaaactgcagagaattctgaagagagtcatttttagggaattcttttcaaagtagttcgaattttctcagaaaaagttcccctcatatgtgttatggagtcagttcaaagtagactatttataggtgttatttaaatttgaaggttttctgcttaatgaatttgtaagttgggttgctttcaggaagacttaaagatggcttcggaagctaagatttgtcagtgcttggtaagataggagtgtccgaagctgtggtgttgcaaaattgaatactaacactggccgacacttgtcatttgcacagttctctcttttggaaatgtttttttgtcaattgggccttttttctttttttctttttctaatggctctcttaacggaccaagaccttgaataatgcatcattagtaaaaccagatataactgagttgttataagctgccagacctccagggtttgactcggggctccgttcttcccgcctctctatcctgtttcttcatccgcagaatggggttaatagtggtgcttatctcaggattttgtgccgattaagtgccttgaacttagtgagtgcttaatacaggtttcctattattgtggcagtattctcatctgacccctatatttggtcactggagagtgtggaacagctttcctgctttgaaggggctgagccagtgcagataactgagcagtagtatgtgcctagcaattgcatagtggctcagactgttgcaagagtctgcctgcagtacaggagacccgggttcaatccctgggtcaggaagatcccctggagaagggaatggcaacccactccagtattcttgcctggagaattccatggacagaggagcgtggcaggttacagtccatggggttgaagagtcagacacaactgagcaactcacatttattatgtgcccagcaattgcataggtaagttatattattcatatctttttgttatatactcttattttgtaaaatattttggtctaaggacattaaaacttagatcaagttgatctatcttgttgataacaagaagggagaagaaaacatgttattttacagttagatttacagaattttccctctcctctgattgtgctttatccaggctttcaccatgccaactcccaagcaaatgcttttgtcaaatattttattgtcaagaagtagttgcgtgtgtgcaagacactgctgtgtgccccttcttactcttcctccaagatcagaaacttctgggattccctgtgaaccatttgacctattctgggcctgaggccttttgtgatctgaccttgtccatggccttgctcgttcctccaggacactcgtctgccccttggctagccaggcccaacacgggtctgttgaatggaaccatgaattctgttgccttgccgtttatccaagaccagtccttcctgacccctaccttggcattggcactgtctacatttctcttacctctttgagttctttgagggtatggatttgttttctttctcttgtgtatgccttgttgccctaattgggtttcccttaagagagtttgggcgtctacgcttggtggccccattgtggggcattcaggggttcttcctgctgaaagaggagcagtggtcagtgtcttttctagttccctgtttaggaggttagtctttctcaaagatggccgatggactatcttagacattgagttcttattattaataatcacatttctattagttctaggcacaagaagggcaatctagaatttattaatttagtctcttcagcctttgctggggtgagaagcctcactcctaagggtctgagccttgaacatggctgctgaggaggagcagctgttacctggtccagaagcgtgttggtttgggatggggtggg

SEQ ID NO: 38925 - DNA, 928 bp, Bovine  19866880636022
  misc_feature (1)..(1): n is a, c, g, or t
ngatgcaaatttggcatcataaaaatttaaaacatgctcattcaagggcactataactgaaaagaccagaagaaaatattcacaaaacataccagacaaaagaacagtaccccagaaatacaacccccgcaaaaaaagatgaactgacagatggataaaggaatggatagatgaatatatatgataaagcaagtagagtataaaatgttaatggtggaatctagagtgggcatacaggtattcactgtgaaattctttcatcttcaattataaaatgctggaaaaagtaacttcatctcagtacacttaagatttagtaaattcaagaaaatactaagtcactggtcctattaatagattgtgaaacaaaattttgcacacctgggatcaactatttaaagaaagttctgtagagtctcagagaacatgcaataacttactaactttaggccttttatgcattaaaaaaatcaattaattaaacctatttgcaaataccttagattctctggaaaaagaacatgaatgcattgagacatctgcctacatgtggtcatcaaggaatagccccagacataccaactgccccactggtgttgctgtgtaaagaaataggcttgcaaagaactagcctcagaactgaagtgtggtcatttaagagaacaaagaaaatggtcccaagtaaatattggttctcccctacattacagagataataaagaaaagaacacaatggttctaactttcaaaatcaaaactatgaataaagataccactgaagacacacagttataatactaaattaacttctaattaagcacttatgacctgggcatcataatgtttcacagatgatttcccatttaatccctataccaactctgtgaagcaggtacaagttattattagccttttgcttcttcagtca

SEQ ID NO: 38926 - DNA, 1585 bp, Bovine  19866880684061
  misc_feature (1)..(1): n is a, c, g, or t
nagaagcctttgctctctccttgttactttcaatttttttaattgcctgtgattttggagaaaaataaaagaatggaggaggattgactatcaaagacaatcgatgagctctagaaagctaacttttctttttccttattaattatatatttattaaaatatatcattattgaatggttatatatgtatatatatatataatatttcacactgcagtatggtctaggcatgcactggtggataaaaatgtgcatggccatgatcctcacagagcttgttgcctaccaactgggacagattttgaacaagtaaagagacaagacaaaatactaatgggtgggttatatgatctttgaattatatctccataagactgtcaccaaaaaagtaaagactatggagaagggtctttgtcagtagagtgtcaggaccatgtctccactctgtgttgctgggggagggtctcatgtaccatcccatcctctgtgggccctcagtgatagctggcccatgctgggtgctgctcacaacatctgtgcaatgatgatgtttgcagagccagaatcaaacctttcctctcaaagactatggagactgagacaaaacgttcagtggccacctcctatcaccagagttctggccacattccagacttggcaaatcggatcggctattcctgaggtcactcctctccccctctcctggagggtaacttccatctctaactgcttccacagcttcattttccactttggtgagccaccaggcagacaatggagaatgtgtcatttcggtcctcatctgtgcagataatctgataccatacacaatcctttagcatatttcttctgtatttgtatcttggcaaaggcaagctacattgtttgcagttctattccagctttttctggaaaaatcacagaaaagatgagaatacctcaagccacaagcacttggctccctggtgtagggttttgcacattcccctgccctcctctttggtttccagctcactctctactccctttctgtctctctctgtctctctttcagctgatactcttgacaacaacctctatagactcttctggggctcccaggtgtactctggagctgcctgagaacacactaatccctttcctctttcacaccgtgaaaatcaaacattccagaagaactcttcttccaggtgaaacagactggcttcatctctgacaggttttctacttgtcctgacatgagaggcaacgaaaaattaggtgttctccaataggctctctaagaatacaatgaaaggaagcccctcatctaaaacagcccagaattccagtgttttggacatgtcctaccatctacaaatcattagagctagctcctctaataacagcagggacttgttggacttccgaaagataaattactgtttgctccagcaccacatttagggacgctttccctacagggccaagccacggttacaggcatgagagtgttcatttggtgaaccagagttgcatattggaagttatttaccaaccttcatcactaacaatattaaaatataagccttggcttgtgagtcaaa

SEQ ID NO: 38927 - DNA, 1787 bp, Bovine  19866880835442
  misc_feature (1)..(1): n is a, c, g, or t
nttgagtagtggccaggcgaagcaggccgttatacgttgctgatgagatggcagcatgtttggcaatgtgtattaggtaccttgaaaactcttctaggaattgactcttaaggaaaatagtaaaaaaaaaaaaaaaattcatgcacaaaaatcaggtatcagttttctgttgttgctttaaaaagttcccacaaacttagtggcttaaaagaatacgaatgtatcatatgacagctttgtaggtcagaaatccaacacaagttctgctgggccaaaatcaaggtgttggcaaggcggaattcctttaggaattaccacctagagcaaggtgatgctctggggaagaatctgctcctttctcgacttccccagcttttagaagcagcttacatttcttggcttgcggcccccgtctgccgtcttcaaatccagcaacatggcctccctctgactctgataccgttgtcacatctttttttttttctgaccacagttgggaaaggttctcttctttcaaagacccgtgtgattagattgggcccacccagagaatctccccatctcaaggttcctaactgaatcatgccttcagagtcacacgttttcgccgtgcagtcacacgttcagagcctccagagttaggacgcgggcatctctgggacaggggcattgttctgcctctgatgtgttagtatattcgtcccagtgttcagaacagtgctgagctacaaacgctctacaacaggaatatgtttaaattacagtacatacagatgttggagtatgaggaagcctctaaaaatcattggaagaggatgacacgggcagtgaaaggcaggatgcagtttctgagcagcaggagcccatctggacttgggggaggagggggcgcaccatctggtgggcggcattgtgagtggttttcattttcttttctttttttggtatttcctattataagtatgtataactattattcccccttctctaaaaacttttaattaaatcttaagggaatgtatgttttatttaacaatggtgaaagtaagtatgctaaaaacaaacgctaaagtcaataaaatttacattatgctgtaaaagaacataatttaaaggcaaaggcaaagtgaaactttcactaagcattccctaataaaaaccctataaaatgaggcatgtagtaattacttgggctaggattaaaggcacataagaatgtctttaaacattctatagccaacatacaaaatgtaatgcagtctaattataattagttaaaatacaacttaaaatatatatatgtttatgcaaactcaaattaacatttcaaaataattatttctgtgtgacccatacatttgcataatttaatactcacactggagtgcagagaagatgtcagtaaaacaatgtatttattatttgtgtatgcataatattggagaaggaatggcaactcactgcagtactcttgcttggaaagtcccatggacagaggagcctggtgggctgcagtccatggggtctcgaagagtcggacacgactgagcgacttccctttcacttttcactttcatgcattggagaaggaaatggcaacccactccagtgttcttgcctggagaatcccagggacgggggagcctggtgggctgccatctctggggtcgcacagagttggacacgactgaagcgacttagcagcagcatgcataatatatgtagtaattcaaaggaaaactcttaatttagaagctaaaacaaaacttcacccagtgtcatctcat

SEQ ID NO: 38928 - DNA, 1167 bp, Bovine  19866880897092
  misc_feature (1)..(1): n is a, c, g, or t
ngaccgctgcgctccagtcatgtccgccttcggcttcccgtggcccgacatgctcgactgcgaccgcttcccccaggacaacgacctttgcatccccctcgctagcagcgaccacctcctgccggctaccgaggaaggtaggccctcctccttattacacccccaccaccagctccacgaagaccccgcatcccgttgcgttgacagggggccagtcccaggcggggcagacgctctccttgccctgatttgtcagcgtgacaaaactgagataatcacccctacacacacaccaaaaaaaaatatatatacacacacccaagtctctcattcccttcccctgttataccaattgctctttcataggaacagttgaaaagggaggcgccgggcggggtgggggtgcggagaaaatgtagaactgaaagaggtcttttctttgtagacacatgcaccattctttcaaaagatgctagcacgggggccgcaattgagatagttggaagtggccctccgcggaggagttggcgggtgagcacgctgggcagagcaccctggcctgaatctcacgcagcacgtttttaccactgggcaggattctagacgcagggacattccctacagccacgatcgccaaaatgtgcaaacagatagtcttttaaggcactctctgtttgccattcaggctttgaaaataaaaagtaggactggctcatgtgtgctgaaaattcagctttggttgtaagtgcccaggtgtccaagaaagaagcacaaagggaatctccagaactcatttttctatcactaatcagcttttatcttaggagtggttttaattaactggagaaaatcgtgcaaaagagaatttcccaagtttttttagaaaacagagggggagttcctgcgcagaaaccatcaaagcaatgaaaacctcatgggctcttgatattcttcctgaaaggaaaacatatacaatgtgtctgagctgatttaggtcccccgggacagaaagggggcttcctaatccctttcagggctccagcagcatctccctttcaatctctaattgttttcctacagccatcgttagttaaagaaaatgcaaagttgcttagcaatctttcctggcaggcaccatgagtctgcaatcatcttatggttagattt

SEQ ID NO: 38929 - DNA, 1079 bp, Bovine  19866880900773
  misc_feature (1)..(1): n is a, c, g, or t
nccatctattcatggcaaatagatgcagaaccaatggaaacactgacagactttattttgaggggctccaaaatcactgcagatggtgactgcagtcatgaaattaaaagacacttgctccttggaagaaaagttatgaccaacctagacagcatattaaaaagcagagacattactttgccaagaaagttctgtctagtcaaagctatggtttttccagtgggtatgcatggatgtgagagttggactataaagaaagctgagtgctagagaattgatgcttttgaactgtggtgttggagaagactcttgagagtcccttggacagcaaagagatccaacccagtccatcctaaaggaaatcagtcctgaatattcattgcaaggactgatgctgaagctgaaactccaatattttggccacccaatgcgaagaactgactcatttaaaaagacactgatgctgggaaagattgaaggtgggaagaaaaggggatgacagaggataagatggttggatggcatcaccaactcaatggacatgggtttgagtaggctccgggaattggtgatggacaggtaagcccggcatgctgcagtccatggggttgcaaagagtggaatgtgactgagtgactgaactgatcttaggttattgcgtacaaattattgacgtaagttgttgaaaagtaatgggtcccaacagtttttaatataaattagccagtattatatctgcttcatgatgagatgctttcaagagtatactcacaattttaacacatagaaaagaaatcataaagatttactggagctttaaataaagcttccttattctaggaagaaatccaacatggaagtatttaatacagattatttcacttctttcaaatccagtgactcatcaagcctcttccaggttgctatacgaggtctacagaaattggaaatcaggaaattagtctaaaaaattactctttgctgtcacatattatgttgtatattaaaaaacagattgaccctggtgcttccctggtggctcagtggtaaagaattctgcctgccaatgcaggagacat

SEQ ID NO: 38930 - DNA, 708 bp, Bovine  19866880939231
  misc_feature (1)..(1): n is a, c, g, or t
natttaagaggacaaactgttgatccctatcccgacaggagtttttctcctaggactggtcttatgcagcaccctggccttcagcgaagggtcaggaaatttttcctctaaaaaaattacctctccaccttgaagctgttattcattagcactgtattaaaacgaatattccaaatatctagcagcgctctgaaatgtaaaactgcacagcgtcaccaatttccagctacacatcctgttttctaaacagccacaagagacaacatagaattaagtgctaccaccaatggaggaagtaatgaacatcctcaaaactatggcacacaaactgactattccctgaggattcaaagcactcccccacgtacccaaaacatgcatctcccatgctgtgcatgcatactgtcgctgctcaaagacactcaacaatatcacatttaagtatgtacatctgcagtcaatgaaaatttctcctgaagttaaaaaaccttaaacacaaaggctttgctgtactctatggcagtggtaaatcctggatgatgccaaatgtccaaccaatctttaccaacgacttttccacgtgccatcattatatcgcatggggtgggagtgggggccttaaattcgagttcttaacaagaggctgtattttaacacaaattaaagggactggaaaagatccaagatcaccatcctttaaagtcccat

SEQ ID NO: 38931 - DNA, 1085 bp, Bovine  19866880994039
  misc_feature (1)..(1): n is a, c, g, or t
natttgcacaaatatgctggaggcagttggagttctggaagttgattagccatttaaatcactatatctttgtgggaaatgtttttcaggtttcagaacgtctgctgtttgagcaatgtcttttttggtttcagttgttctaaaccaaagtatctagagaggcataaaatctggccgacctgcttgtccccctctaggctcaggactggcgttttagaactttcattgccgaccttcaaggatgctggttttaaggaccaggaaacaaacaacacgggaaggctctcgggttaagactcctgaaaagagagatctgacagaagaccaaaaatgtgaaagattacacccagttttgttttagaatgttctgtccaatcaggtaggagaaaggaaagctgttttttcaagccccatctgtcaaccaacaggatttgttgaacaaatattatgtttcaaaccccactgctttatgatctaaggggtacaatagtgtaaaaggcggagcaggagccttgaaggaattttcaagctttggtggtgccattagacgtcaatgatcatccttctcccacctgttcactgatttccttacctgggtaaccaggtctagggctgggctaggagccccctctataattcagctcagatgcctgcgagttgattcctttggcagcaaaagttgtgttcttggcccttcaacacgacctggataaagtgacactttctgtcgatccccactccggtacatggctccattcctgtgatattccttccccagccatcaaacagttcattaatatcaaaataacccataataggggcatagcaatccttgagacttgccttaatttagaggacaggatcaggtctctttcatcttgaaaacagcctctcagactaaacaaagacagaatgttctcttttactgaccacatgcaatttatttaaattagtgttaaacattcgaccatggtgtgaagactatattataaacccatctgaaagaatgagttttctgggccttcactgagggattaaaaaaaaaaaggcattagccacattgcaggggatttgcatcttgttag

SEQ ID NO: 38932 - DNA, 1766 bp, Bovine  19866881033834
  misc_feature (1)..(1): n is a, c, g, or t
nctccattttgaaagaaaatattttgacacattccagaaaacaaaaaatgaagcttgcatggaaagcctcaggagcaatttgagtggaagaatccaaggtccttcttcacaagatcggagatagcaaatatttgcccaaagtgattactctcaactgcactacttaccagctcaatctctgtcccaacggtgccattaaatccttgccgtcaatggaaagcagtgccatgacctcaagtcctgcacttgtcaccccataagacattcagcttctatttcctctcttgccatgtaggagggcattccatctgctcctgggacatggatgccttgccttgttctaatcatgtaccctctgtagatatactctgtgaccgtcccagaatcagcatcacctgcaaatttattagaaatgcaaaatctcagctcaactcaggtctactgaatctgaatttgtatttttatttaacaaaattatatttttatttagcagaattacctggtgattcccatgcaccttaaaagctgagaggaaatgttctaaagcagtggtttccaaactttagtgtgcaccagaatcctctaagtgggcaacaaaaattgtgggctcctttcccagggtttctgattcagtgggtcttgagtagagcttgagaatttgccttaaaaagtttccaggtgatgttggttctgttgatctgggaaccctactttgagaaacacttccctagaggtctcccacaccaccaatgactagacctgtagaggaggctttagaatctaaaaggatatgatctgcagctgattataaacagctcataatatgagtggcactgcttccttgtttttctctgctttgccacattctcctgccacctgctggaaatctgttggtctggttttcctctaccatctcccagtttgcatcaccccatcctgccctccctcacctccatgctgtaacacagcaggggtctgccaagttctgtctgacctgatgttgatgggagagacttctttcctgaccttccttgggtcacctcccaatgaatgagccccaagactgtgcactgctgccctcctgtcctggctctgccatttgccactttcctccatgtggagttattttaaaatcctgaggaggaagtcagctcaggctctgcagccatggacctctaaacttcatgcacctcactccccatttttctctttagcatagtcagttgtactattttcaagagatttctatctctggcactgggaaagctctaacacaattttggcaattacgagtttgacagaaaggacccacagctaaagttggacattactgggaatgctgactggcatggctttagactctgggatagagtagggctggagagccagtgtggtctgttccctacaggcaaggagatttggaaagtgtgcctgtttccctgaggaagaacctaacacctcaaatccattggaaaagtggtcttgtcatgtgcatgctttcgggccaatttttcaagccacagcttaaatccatcaaaaatgttttagctaaaaaacgttcaaagtgtggtttataggagtcccatttcagccttgttcagcaatggactaagactgcgatagtctagagggcacttccaaatctattttttagagcaatttcttcttccaaggcaaggaagactattttctttatataaaagcaatacacctttacccttgcccccaaaagcagtttcatgtaaagctctcccatttgcctgaat

SEQ ID NO: 38933 - DNA, 2514 bp, Bovine  19866881037377
  misc_feature (1)..(1): n is a, c, g, or t
ncctcccacccccatcactttccctttcactcaggaaatttcaaggttaagagatggtcctgcctcaagaaccaggaacaaagactaaaatacatatttcttattatatcacaagatcacattggtataaaaggggtgatgggagatgaaacagtggaggaaacaggtgtccaaatataaaaggaccttattaaagttacatgtatccagcagtcattagggaaatactgaaatattcaaagggagtgatatagtcatatttgcattttccagagatccctctaggaacagtgtggacagtggatggagacatgcgagactgacagccaacaccagtgagtactgggatagagctatggcgatgccattgaagaggcataggcagatggtagagacagaacaaaggtcgattttgtgggacttcactggatacctgatgagaggagtaaaggggaagaagaaattaaggatcactcttagatttcaagcttaggtgaccaggtggacagtgacccaagtagccaagtacccagtagagatgaagaagaactggctttcaggcagatgtcagtgagaactcttttggatttgctgacatcccagggaatcattctagtagatatgctaaggaggaaactagaaagacataaatggagctcagaagaaataccttacaggagataaagatttgggagttataggcctgtggttagccatggaaatagcaaggctaaggtaaaaagatatgacacagcctctttagagcaagcgtgcatggagacccctcttcacccataagaaggaagcctaattggagggtacatgcctaagggggctccccactcttgacagagctctctggctaggagggcaggagcctggatctgccttaaggagctcttcggcaacatggctcttaggaagcaggtgcgctcaaagaaaggcttctaacgtaaaggcttcctgtgtaatggccaccatcataactgcaccaccagtgtagagtcaaaactgctccatgtgaaacctgaattatagtatgtagtgacatatgcgagtttttgtatacagtcagtcctcatcactccagattctttatttgcaaattcacttactcaaatttataacctcaaagtcaacactcacaatgtttttgcggtcatttgtggacatgcctgaagtgtcaaaaactcgagtccctgacgtacacaatgccaactgaggttgaacagctgatagtctcccttcttgtttctagtctcatgctgtaaatgagtgtccttttcaaggcagttggtatcatatattttacacttttgcacttctggctggtaatttagctgtttaaaaatgctcccagcatagtggtgaagtgtggtctactattctaaacacaaggctataatgtgccttatgaagaaaatataggtgttagataagcttcgttcaggtatgagctatatagtgctgttggctatgagtccaatgttaatgaatcaataatgtatattaaataaattgtctttaaatagaaatatacacaaaacaaggtcatgtattgaccaaactatgaaagtgtgcccagaggcttgcaggaacccaaccctgtattttccctaggattatgtatgctcagttactcagtcatgtccaactctctgtggtcccacaggctgtagcccaccaggctcctctctccactgaattttccaggcaagaatactgaagcaggttgccatttcctcctccaagggacctttttgacccaggagctaaacccgcatctttgattggcaggcaaattctttaccactgcgccaccagcagtggtttgctattcattaatccagtgttcacagtgactgtataggatataattactgcaagtaacaaggattaaccatatttgcagaagtctagaatgagccaagagccacatcagtgctaaacgaagctcctaatttatttaaaacagctcattatacactcacctaaggttcagagtaaggtattgtttttgagtttttatttgggcttctgaggatggggcagggttgagggggagatttactctttgaatcacctgaccagtgattgctgtcatgtgaactgaagaagtaaagcacatcatggagtccagggtcccatcctgccacgtatttactctgtgatcacagacaagggtgtgctctctctgaattttcatgcctcgcccatgaaaccaggcaatgacacctcagatccctatcagttctgacagttcatgatgctgtagccagtcccaaagcaagagacactgccatccactgtgactctaggacggcataaggcttgggaagaaggatttactgcagtgcctttcctatattccccagagcaacctgaggacagactcattagattattgacttaaagattctgcaactcttgtctaattttaacttttatgacagtaataaacccaaaggaaaactgtaaaacaaagcaaaatactctcaattatgttaaacttaa

SEQ ID NO: 38934 - DNA, 1707 bp, Bovine  19866881039103
  misc_feature (1)..(1): n is a, c, g, or t
naattttgggattaacatgtacctactactatatacaaaatagataatcaacaaggatctaatgcagcacagggaatgctactcaatattctgtaataaactaaatgggaaaagaatctgaaaaagaaaagatgtgtatgtataaaagatgtatgtatatgtataactgaataaccttgctgtacacctagacactcatacaatgttgtaaatccaatgttgttgtggtttagccactaagtcacgtccgaactttgtgaccccaccgggctcctctgtccgtgggaccccatggactacagcccaccgggctcctctgtccgtgggatttcccaggcaagattattggagtgggatttcctttttcaggggatcttcctgacccagggatcaaacctgtgtctttggctgggcagggggattctttaccattgggtcctatactccaatacaaaataaaaatgaaaaaaaagaaaagctatacaaataatcattttgtttgcttatctctctaagtcagcatgttttccttgacataattcaaacagtttacatgcttctgctccattctgaaattatgaaggctaatttaatcttgttttgcaatgaggaaaatgtatatcgtgaaggtagctaaagaactaattagcccacttgttacccttgacctatagttcaggtttttatgtttatcaacagagaagtgacttaaatcaagaattcttgttaactgcccacgttatataaagaaaaaaagcccaactatttcataaaagctacatggcaacaactgtcaaagagaagagaaaaataaaaatgactgggttttttccctctaaatgagagaaaagttgagtttaaataactgcctctacagtactgaaaaacctgaaatgttttcacaattttaatgactttaaatttctcatattttctatttttcccacctaaaatgtcatttaattatttataacttattcagatgaaagcatactaagaggcagaagtatgagctgaaatcatttttatagttttcttttttgataaatttttactgtaagtttttatcattttgatgacagtccttttctgatttcaaaattctgttcatctcaataccacctccacttggaagtcttccctgatagtcttaatcatggaaatcttctcttttttttctggatatttagagaactttacgtgtagctattctacctgtctgttttggccgtgcatctcttttggccgttcagtcccgaccagggattgaactcacgcccctgcactggaagcggagtcctaaccactggaccaccaggggagtccctatacgtacccattcttaaaaaaggcatttgttgctctctgccttgcattttggctacttacatatgttttctttcttcctacaatgttaggactggtaaataggaatcctcccactcaccgaggccagctggctcacacagttgcctcgagcaaagggaaaggagaggctctgagccccagctgtgctcagtggaaaagggcagcctggccactgtcacgtcttctgctgggcgtggtggcacctaggccaggcctcgctggccctggcaccactgagacgtatacgggtttccttcttgttcaatgcacaagggttaaatgaagggccgctctataaacagagtggagaggagggagtgtcatgatggcccatgggtc

SEQ ID NO: 38935 - DNA, 1528 bp, Bovine  19866881149416
  misc_feature (1)..(1): n is a, c, g, or t
nctggggtagttcatgccttctgcaaagagcggagacatcagcagagcagaacacggttcaggagagaatggaattctcaccctcaggcaataagctttcaaggacttactgtgttgacaagttaaagacagacataaaataattactccatgaaacacagcacctggtaagccctcagtgaggaagttcttcctctgggcttcattttctgtgtgtgataatctgggggaactctgtaatatacagagtacgctgtaatagtgctatgctttatagtagtaaatactactgtacacttaagagtgtcatggttctttctagtccttaaacttttcttttattgcctgtcatgccaacgttggccatctgcacatacaccacatgcactgataaaggcaggaggagaccaggcatttctcagacggcagtaagaaggcataaacacagcctcacgcacaggaagacagcgaccacagcacccccttgtggttgccatggagcactgcatgtatcagaacccagataggcacaagcatctgcacatcaacacacttgagcacaagcatctgcgattcatcagtttcccctccgtgcgctttcccttccttctgcagcgctatccaggggtgtaagagtcagaacatgctgaggaacaagcacgtgaatcattctacctctcttgggacttgtctgcctgaaaagagtaactaacagggaaagacccagccccccaacagatagtgcccatttcaggttcacgtaggtccaaaaggccctgttccaccgaatctgaaggactaaacagagcagggttatttgtacatgtcccaggacccctgggtctagcaggctttttgaggccatataacattacaaaggcaagcgtgcggcacccaccatgaaggctcggcggacagctggaagatgactcgcaaaggcactttctctgcagctagcgccttaagttggagaaggcaacggcacccccactccagtactcctgcctggaaaatcccatggatggaggagcctggtaggctgcaatccatggggtcgctgaggctcggacacgactgagcgacttcactttcacttttcactttcatacactggagaaggaaatggcaacccactccagtgttcttgcctggagaatcccagggacgggggagcctggtgggctgccgtctatggggtcacacagagtcagacacgactgaagtgacttagcagcagcagcagcagcgccctaagtacacacaccctttcggctttgactttctgagaataaaaggatgtcactgggactgtccaagcagctttaccttctggaaaggcattgtagtcgttcagttccagggggcagtacacactgggaaactggccttcacacgtggcgttccaatcaatgaaactgctacagaaaacaaggggtctagtttcagaaacaggatgtcgacagaccaaggaaagaaagaggaaaaggatcttactgtccagcatcctcatcactgcgagttcttcagt

SEQ ID NO: 38936 - DNA, 1579 bp, Bovine  19866881154266
  misc_feature (1)..(1): n is a, c, g, or t
natttctgtcctgtggctggaagtggaaaattgtgtgtcagggaatggtagcaacactgatcacatgtatgtacacattccgtgtctaatttcatgctttgtactgtgcttaagcctctgttgttgaccagcaaatgtcatggaatgagtactagtaaggtttataaattgatatctgtaaagttggggtgctgcagtccatggggttgcaaagagttggacactactgggcgactgaacaacaacaaaagttggggttagtgaaaaaattgacaattggaaaatgttacatgaacttttttctgcgttatgctttgatatgatttagagcagaatctacatgactgcaagttaggttatcatctgagtactttgcatttgtaactgtcattgttaacttacatgaagaaataaaaataggccactattaggaaggctagggaaatataaacctgctccctgggattgagaggcctgagttgatgggtgctacatttactacatttctaactggcaattttaatgaactcctatgacttccctcggagaaggaaatggcaacccactccagtgctcttgcctggagaatcccagggacgggggagcctagtgggctgccgtctatggggtcgcacagagtcggacacgactgaagcgacttagcaacagcagcatgccatttttctagattccacatatatgtgttaagaaatctgccttaataatatgcttccattatgtagcttagagaatgctttttctgagagaatgtaaccttaaaacattaaaactcttttaaagaaataaaatggcttcctgaattgatttcttttaataaaacaaaatccttgaacaaatcgaaatgtgtcaggactatagccaggaatacataggatgcattttgcatagcgtgcattactggtcttcatgaagtagattcttttggtaacattttgaggtgatccggctaaaacatgttcaatgaaatgtaaattgccaggaaattagataaagatggcagattgagggaagacagagaaaggaaccctccgagctattttgatgctcttgttttccagggactgaggaatgccaaaaagaagaataggctttgagactccccaggggaggggagtaagcgtctttcctgtcacagagagggaatgaggattgcagatgttttcttagagactctagcaacagggttgcaacccaagaaagcaaatcctgaggcttaatttgagctatccgtttggtactgggagagagcaacttctcccagggtgattcctggggcaggctaatggtcaaaaatggagactgcattcaaatctaacctcactgttttctagctgagaggtcctgggcaggttacctgaaagctccgtgcctcagtttcatgggatactaatgctcatttgtatcaacgtgcaccagttgaatgggatactaacgctcctggtgaaaggaataaagcacttagccatgcaattaagtactttacgtaagtcctatttattatttttgttctacttggtagtcattagtgcatgatgtcagccagctctagccacagagg

SEQ ID NO: 38937 - DNA, 1023 bp, Bovine  19866881187951
  misc_feature (1)..(1): n is a, c, g, or t
ngggaagctcagatgcagccttaccacactagccacctcgcccagcccagacttgaaactccctcaagatgactccatccccccgccccctcccagaagcagcttggctgaagagccagcagaggccaggctgcactggtggcctgcagctgagaaagatgatcttttggccatccttggtggttgctagttttccaaaatccttcaagggtcttttagtgctttctcctcagagaggccttggggctaactttttcagagactgtgtttgtcccaggagtgggaggaagagcgaaaaactacagcctgtctcagttacctgcagccgcgccccgacaccccaccactgggaatactgtacacagtatgtaggcatttttgcctgtcaaaaaaaaagggaggcatgggacactttcttaggcatgagtggtccctctttataaatgagacagagttaggggtcttacaggacaattgttcctcttgcctgaagaagcccctaccagtgagttgtttacaaatgccatctgctgtttcctttcaagcaaagttactaatttttcacgtttctagctccaaaggtatgtgaagcctgcaaaactaaaaacgaagatgacaacgacataatggaaacactttgtaaaaatgattttggtaagtaaacaccaccagcaaaagttttattttccagaacagcttaaagataacaattcattaagatgttactattactagataaagtaaaagtgaaagtcactcagtcgtgtctgactctttgcaacccaatggactatacagtccctgtaattctctaggccagaatactggagtgggtagcctttcgcttctccaggggatcttcccaacccagggatagaaaccagatatcctgcattgcaggaggattttttaccagctgagccacaagggaagccctttactagataaagtttgggtaaaatagcatcacagctcatctttccttgagctaatcatctaacaggttatcttagtttcctctct

SEQ ID NO: 38938 - DNA, 893 bp, Bovine  19866881273406
  misc_feature (1)..(1): n is a, c, g, or t
ntgtgtgactgctgtgttgcggttagaggctcattctcgcccttacggttgtctggatacacgggactgatgtcatgactgtcctgtgttcacaggtattttcgaatggacccttctgcaacccagtttcacatagagaatcacgagaatacttcagggctttggtcattgtggtacctcaaccattttgaccatggtgttgtattaaatgatgtgtttgtttccaaggagaccaagcacgttttaaaggtacatacggtatttttatttaagttttagcctattttaagctttgtttaaggtcaaatactatgaaattaattatttataaaatctttcacttacaaattttaaagcaagtatgtttctttaaaaattttcagaattacttttaggctctctttattttttcaaactattgttcaaggagctcaaagggaccagggtatatcccattagagatatttattactaccattatttaaaaatattgtaaattacaatttatcctaagaagattacatttagtaaaaataagcctcgttcatgataaaatagtaggttttggtaaaatactggctatgaacatatcaagattattttgtgaaatttaaaaacaagtgcatgttaaatattaaatgaaacctattatttatagaaaaatatgtcagtatttgacttggaaataattaagtaacattttatttctcaaagtatagaagaactttagtatcacacagtatgatgattttaatcataattagcattagttaggaaagtaatttctcttacttcttttctttttagattctgaatttcactggccctttatttctacctccaggctgttggaaaatattttcttgaaacttgctgttaaagacattgccata

SEQ ID NO: 38939 - DNA, 1415 bp, Bovine  19866881294575
  misc_feature (1)..(1): n is a, c, g, or t
ncatctggtatgcacacagctgttaaatatattcccaaagaacagaaacattatccatttccataatttttgaattatagaaatatttagtaaaactgaaaatacagcaagcttttataggctgttagagtgattgaaaggccctgacaacttctcatagttcacagtcatgggaaacatatgtgcagatctccttatgggagcaaagatgtgagaacttcgtggggatcagaggaagagtctatgagattttggaagacttgagacccagaaaggaccacagagaccgagtgggtagactctcagcttaagccgaatcaccactaggccactgcatggggtaggcagtactgacaagacattctaggtaaactacaacaaatgggccattctaacaggcaaacaaaatgtcttccctgctcaggactggagtgggcagtcttccgggattcacattcaggaatatacttgtttttttcagcagctttctgaattgtgtcaaatttatgaaaagaaacactgctccatcccatgtgtttttcttgtgaaatggaaaggtagaatgacaaagagacagaccacgtggcagagtcaggagccggaagatgtgtttgagaatgaggcccgccactgactggctgtgttgatcttgggcacgttgtcccctagttcttctgagtcttggatcctcgagcacctcacagaattagttagacaaatttaaaaaatgccccatgtaatgtaaagcgatagtcaattatgaggtgttattcataaatgcgaactgggacgtgacatggagcataatttctactagaattcgcgttaagaaaataagcgtgcatagaacatacagtagatcaatatattgatccaaaatcccaaagtaggaaatatggggcatttctaatgaagatggtgggctgggtgtacatttagccttattacctcgtaaaactaataaaaataacgttaaaaggatttgttatgggtgtaaacaccaaaggaaggatgagcaaagaggagacaagagcaatcaaacttaggatgctggaaagcaatcaaacgagtggtaaagatataaagaaaagtgaaagacaatatattaaatggaaatgtctactgcagagttttccagaatcctaggaggcaatggcacctggtcctcctggaactgagggtgtaatgcacctaaaattaggaggactgcttggaagggtgtttaaagagcagttgactcatgagtcctttctcccagtccactcaacctggagaactctcttcctctgcccaaccattaactggtttcctggatcaagtaaattggagagtgtctggcacaagttgaggattaaatgaatgaatgtataatagatagcaagggcccagaaaccttcctccagtgggctcccaaa

SEQ ID NO: 38940 - DNA, 3552 bp, Bovine  19866881325585
  misc_feature (1)..(1): n is a, c, g, or t
nagctgggaatttacagtgcacactcctacatggcctccatactgccaacaggagcatctttcttaaataaggctctgatcatttcacttccctactcaaaatccgtcagcttcatacacagagcccttcattatcaggcttccttggtgggtcagtggtaaagaatctgccaatgtaggaggcgcaaatttgatccctaggtcaggaagatcccctggaaaaggaaatagccaacccactccagtattcttgcttgggaaatcacaaggacagtggatcccagcgagcttaagtccatggggtcgcaagagttggacatgacttagcggctgaacaataacaacattcacccctcacattcaactgagcagtacaaaacaactcaagattttctcatatattatgcagttctatacatatctatccagtcctggcatataataacaagttaaagcacttactatggattagtcattgttgtacgcagttatacacaacacatttaattgtcacaagcaacctgtgaagtaggaaatattaggaccacttaacagagaaaacagagacacaagatgtttctagtaaatggaagaagtaggagttgagtctggggtctgggtctagagtccactcttgtaagccactgtgctccactactttaacatacgggtctctgtacccagcatgtccttcaccctcaactcccttctggactcacacatctttccagaacaaacctaaacgtctccttccttaactgtaaagcctttcctcagcagaatgttcaccctctaccatcctcccccatgctgtacactattccaccatgtggcagggggtctgttgaccggggtctctcctcaccaggctggtgaggtcctggaggaccggagctacctcattcaccattacccctctcagtcacaatgcctgccacagcaagcattcagtatacatttactgaactgaacgaatttcaataaaggtaaacgcctatttttattcaaaaccatttcaagttgtccacacagcttgagtggacctattctttaccagctcagttttagcaataaatgatttttatgtactgatggttcccaacttatgacggtttgactgaatgattttacaactttatgatggtgcaaaagcagtccacattcagtagaaaccatatttggaacttggagttcagttctcgtcctggtctagtgacaggcagcacacactccccatgacgctgcacgctggacacaggcagtgagccgcagctcccgctcagctgcgtcaccgccacggtgcgcaaccaacacaccgacaaccactctgtacccagacaacacctccggtttcactttcagtattcaataaactatataagatattcaacactttattatacaagtctttgtgacagatgattttgtccaactgtaggctaatgtttaaatgttctgagcccttataagataggcttggctacactatgatgcttggtgggttaggtgtattaaatgcatttttttgacttaaaacagttttaacttcccatggggttgacagcataaccccactgtaagaagtagaggacgatctgtattcatttctaaaaactggtaaaattaaaaaaaaaaaaaattattctgagaatctcttagtgtctccccaaacccataccctgggtctgaaatccaatttagtgtggatttcaaaatgaaatgctggtgataaatcaaaaacctgacccccaaacgaccttccactagtaataaatgggttgcaaatcagaacttggatgaagaactgaggaaggtctcagcagagcaagaaaacaaaagaaagagcatgatttccacagttctgaccctttaaacaaggaaacatccgtttaaaccccacacagagttgcagcagcaccagggaaactgcggccagcgggctgctctcattcaaacaaccttcacaccttcgtttcttctacctttcattcacttccaagcctctggaactatgagaaacaagtttctgttgtttataagctaccaaatctgtggtattttgttacagcagcctgaatggactaagacaaactcttaaaactccctggctgactgctcagtaaagtctggctatcatcatcaagagcatcagtggctcccgctgtccccctcagtaatctcctccatccatctacactgaggcaactttcagctcaaaaaaccatttctaagaagtctcccttaactatatagacttctttttcataaaagttaattaacaatgtcttttcattacaagttaattaactgtgtatttatcttgccttaccaagtaaatataaattatctcaacacgaaacacacattttatcattttttatatcgctcaaagaactcagtactgcacataaacagaggaggcagacagtttctgttgaagcagttaatgcaatccacacgcagttgatagcttctttgctatcttagaaaatgttaaagagaaacataaattataaccatgaggcttttttagactgtctttaacagtgatcaacatatacaacctaaaggcaagagagaaaaatgtttcctgattttcagacttgcaaaaaaaagcccattctcaagagacaagtacattcctgtacttaattggaatcactggcggaaccaaagcagaacagaatgatgggggtgatggggggaaacaaagagctccctctctctaatctggaagtaattaacaagaaactcaaaagaagttaacattttactatggcaatatgttgaacaaactgatctttcagtgcaaccttgaatttggaatctgcttcaattcaacattaacagtggcttctatatataaatcccatgacctcttgcaacacttttaatctctatcgctcgttcggcagtcagccacttactacttctcctctccaattcactctttcacttgtatgtatcttatcttcagcacaggttacaggttctttcttagtaaagcatgtaaagataccgatttctgcttttttgaattacctccagtgtctggtaaaatgttctgcacacagtagaccctcaaatattttttttgattgaacaaataaacttaatgagtatatactcctggatgagcactaatttagtcaaacctccaaccaccttacacagtgcctatgcacactggcacttgacatagactacttaatccacacaaccctttgaagtaagtataatcttttttttttttttttaacaaatttaggaaactttaaggctttaaaagcttaagaaacttttccaagatccttacaactagcaaaaagttaaaactgtgatttcaatccatcttcgatttctaactacttctcttcccattaagctttactgtttctctaaaatgataagctctcttcagaaccatagttgaggggcatagtatgatactggcattccttctcaaatttcagtgaaaaaataaagtaggtttaagtcagtgaaatggtactgagtgttgtttcttaaaaaaatgatttactgcaaatgcca

SEQ ID NO: 38941 - DNA, 1058 bp, Bovine  19866881346631
  misc_feature (1)..(1): n is a, c, g, or t
nttaaatatgtgtgtgcattaaaaatccagtgataagcataagtatgtctacacgtgtttgtatttctttaggagatgcttcatcttttaattaacctcaagcacagaatgctgtgctgtgctgctcagttgctcagtcatgtccgactctttgggaccccaaggactgtagcccgccaggctcctctgtccatggggattctccaggcaggaatagtggagtgggttgttttgcccttctccaggggatcttccagacctgggatcaaaccagggtctcctgcattgcaggtggattctttaccagctgagctaccagggaaaccccaagcacagaatacccgtaagtaaaatactcggctacagcagggacccacagaaggaatgagtgaaaactcagtttctagtcaagcgacgtcctcgccacgtgacatgcttattactccctctccagagtacttatgcaagacttcatgagggcccagaggtgcaagaatttcagagaaatccttttatataggtaaggtcaatatcacagaaattgggttatctgctaaaaacatgaagccagcttagtaagacttaaaaaaaaaaaaaaaaaagtgtttgcttttactttatcttaccccaaaaagaattgatggggctgaggaattttaagagaattataaattctggggtctcaagttttacagttttctacagaggtctgattcaattgttatttcttcactcacatgaacctaaataattaaattaaaatgatttacaggctcacatgaaccccaggctcctgctgcattagttaactagaaaaagctgctatgtatacttaactgctagaatagaaaaatagagagccacatatattacgaaaagacacttgaaacataaatcagtgaggcccatatgctatgagtctaatttgtcagcattcttttttctgtttaaagatgacatcctaccaggtaagggcaagctttggtaagctggaattcactggttgggagattaatcatttgcatatcggtgccaaacctataaagaaaaaaaaaaaa

SEQ ID NO: 38942 - DNA, 1392 bp, Bovine  19866881549502
  misc_feature (1)..(1): n is a, c, g, or t
naagggaaagaggtttaccacctgctaactaagagcagtacattattcatcagggatcagagagagtctcaataagaaaatggacaggagcataaaggcttggggtttggtgaagggagctaagcaaggcagaaggaagtggggagaaggaggagacaaaggaggaggggggtgacgggacagtcttccctgatattccatctcccggcttgaggaaggccatatggcctcccgtgaaaaggatacacatgcttgcatgaaagctggtaggtgttttcaatgagcccttcctcatcaagttccacaatgatcttctgcccacacacggcgcagatgtcgtccgacagactcctggtgggcatcccactgccgctgtagaactgtgggggacaggcccagagcacacatcattctgtgagcacagggaagccactggcagctggaagacagagaggcttcaccgtttctctgctgctttagaacttgaaacgtgtttcccatagaacaacgctactgtggggtgaaggtttcccaggcaaaaccccactgagccccaaagcacatcgctaattgtaaccacctaacttctccactgaggaatcctttaagaggaacagttttatcgagggctgtagttcagaatgacatgggaagctttttaaattcacccagaacctgacccttctccttattctcctgagactctgattcccagatctcaagtaatcccagacatctatgtatcttttaattaactttaatataattaaaattttaatcaatttaaataaaatcccatctgactatagggagtatgaagactaatcccattagaaagcagcgcatttagaattctaacttgggacattgcatctccccagggctgtggatgaggagcgattcctaacattggcagcacattagaatgtctaagaagcttttttaaaaataaaagatttattttataattgttttagatacaaaagatacaaagatagaatagagtttccacaccaagtttcccctgtgattaacattttacatttagggtggtacatttgttacaattaatgaaccaacactgatgcattattatgaaatcaagtctatactttgttcagattgcttggtttttctcaaatgtccttattttgttctagaatcccatccaggataccattaattgtcttatctctttaggcttctctctttttttaattttttaggcttctcttggctttggcagtttctcagactttttttccctatgattgacagtttgggggtgggggcggtgcttatagaatgtccttcacttggagtttagctaatgtgtttttctcttgattatgctgagcttatgagttttagggaaaaagagaacagagggaa

SEQ ID NO: 38943 - DNA, 678 bp, Bovine  19866882113240
  misc_feature (1)..(1): n is a, c, g, or t
nttttctgtttagtatcacttcttttcctcagtctgtgaaaggaggttgaatggagaattttttccaggtttgcagctttccactgtttaagtctggagaaatactccatgtatttggaagtgtgctgctaggggaataacagttttaagactgcagacttgtccatcgtttatcatcattatatggtgtctgtcaacagaaaaccatttcccagaattccataaggagttgctccatgtagaagcatggagtcttgtgacaaggaaaagcattgcagtgaagagtaataggaaaaggggtgggggataaacagaagcttttagagctaattcatggctggcgtcatctccattagcattgggactgtttgacgttgagttcagagaacatgaccagggctggtttccatctgtcatggtgattaatgggagtattgttaggtaataatagtttaataacatggctggagccaaagaggcacacaaaatgtgtacatgtaattataaaaccaagagcactgtggataaaaccacaagagccagcagattgaggtcctggtctcagctctaccactaagcaagggcagctgggagaaactcttcttaaagttgaggagggttaaaatagtctgctgttggggtgaagagaccagccttagttctgaggcaggagagcgt

SEQ ID NO: 38944 - DNA, 754 bp, Bovine  19866882239218
  misc_feature (1)..(1): n is a, c, g, or t
ntcacactaactcttaaaggtaggccagcccagcaaagaagaaggtctctgctcccgtccatctggcttgttcttatgagaaagagccctggtactttctgctggtcagcggccagtggacatgagtcctcactggtcagctgctcgccttcagacccagtagccttcttggaaagataagaagaaaaaggattccttttggcacctttccagagtcaacatttcccctttgaggaaagccatcctctctagatgtgagaatgggggccctcacttcatgtcctccactgaatggacctgctctaaacactgactcatccagctttctccctcagcagttagcagcatgtctgggctgggtgccaggaaaccacagagcaaccagaggtgaggggagcaggggcaggagagtaggagcagccagaccatagcagagggggtgtatgcatgggtcaggtcaggcctggcaagtcgagggcaccctgtatctggtgcggtaggagtcagcttggtgccaggtggaaccatccagggcaagacggccaatgccaggggcatccccactcttcctcgataatgtctttcctcttcctgcctctcttctccccctgttctcctgccctctccccactgcccacccacttcctttactccactagcttttaatttccctctactatgtcctgggtgctgcgcctggggtccacattcagtcaccatccttaagggacttgtgcacttttatgtgatgcaa

SEQ ID NO: 38945 - DNA, 1111 bp, Bovine  19866880340606
  misc_feature (1)..(1): n is a, c, g, or t
ntatctgtttttgttccctgtctctgtttttattactgtagctttgtagtatatctgaagtcaggaagcatgattcctccagctctttagcagatattttatcagtgtcattcctcaatatcagacataacaaattaaacattaaatgccataatcactagctctgtattataagcaacttgaggacagacaatatgacttataattcttggcttccactgcctattttagatgcacgtgtaattttctttgctttgcaattaattcgcttattgaaaattaaatttgtggctcttctgggaaagagtgagtcgtaaggtgattttaagaagattagaacttgttcttacatggcttggtgtccactcccatgactgctgcgtttcctgcttccaaagacagtctagacaagaatatcatctaagtgtctgaggtaatgcagtttctgaaatggtcagacttgttttcactcccacagagaagacaaagagtcagtttaaaagtatatttttaatatacatatcttctgggtccaaggtggcataatattatatttgaaagacacatttatgcatttcattagtatttttttcagaagtcagtattctccaggaagtgtatattttctgaaatttcaagaaaaatgttaaaataagctaagaattaatttcttctgatactgtccagtatgtcttaatctattcaataatatgaccaatgaaaaagattctcatgtgtcaacacatttgagatggttcagttgaaaaaaattgagacagcttactgaattcctggaagaaaaaaaacctctttttaaatgtaggtataagcatgttacatttaaatgtttttacttgagatgaaaatttcttggggtgagagtatcagtaacaaatcattcttttgtctctttggatatttggaacatttgggtctatacatcctcacagattaaatgattatctgtttgttaatgctaggagagcttatttcttacaacatttcttaagtttcatctgaagggaaaggcacgtgagttcatctattgtgctaactctagtctattactaagagcagctgccacctccgttaggaaggtcctgggtctcat

SEQ ID NO: 38946 - DNA, 1604 bp, Bovine  19866880514113
  misc_feature (1)..(1): n is a, c, g, or t
nacttagtatttcactacagtcctcttctccataaccaagattgcttgcaacttttttgccttagtgacttcagggggtaaaaaacagcatccttccagttctttaaagtcatagagataaatttagtgattaggtaacttatgataacataataatatggaagcttgggaagaccctcctaatatttgtcatcttctacctcttccattttcctgcagttccacttcctatttaggtagctcagagaaagcaattttaatacagacactcctctcctatataaaaaaataggctacacacttttcaaatctattctgcttttccttttgaagtaaagatgacgaggcatggacccaagtaatggttccctgcctcttgtctcttgttgacaacctctacttaagagtttctattactttttgttcagaaaggaatttgcttaagttttcagaaaaataacaatctattagaaaaccatttcagagtaggaaacagacaaatttaaataaacttatatttgttattatttagtctaaaaataaagattcccagtaggtattcataaacagtaattagcaaggcttctttttctaagtgaccacagatctaatccttcctagactttacattgtaataatcctataaatactttgatttttataatgacttgatttggggggacaggcattacataagcctttattacttcaaaaaaggcttggcaaaatttttgtttttctcttttgtctcattctgatgggatttgcagcatttcagctgcttaagtggggacaaagataacccctttgcttccagctgttgaaattctttatcaccttagaaaaaccaggattaagagggtaagatagatttttataggtgtgtttttataggtccttgcagacttgagccaaagtcaagtcaaagagcctatggccaacctcatggaagctcctgtgcttttgaacttagtttatttcttataattttgcatctactcttatcttcatcacccttttatggtgatgagttgccttttctatgagtatttggaaggagtgctcaaacaccaaaataaaacattttaaagactacacatagcatgcttccaaattctattagagagagccccagatacttcaccttagaacatactttttataggtgcaaagttataggatatatgggagaaaacattcatcagaatcttccagagaatatggtcaggaatcttaggcaggcccagtgctgaaacgcttgtccacttagtcacacactatgtggtagatatggaaaaggaatgagatgtccagactctgacaaaggcttttcattatgtcaaaacccgaagcctgggtaaaggttgatgtatagtgtccagtgatttaatatatttgtggttaaggaaagggacaaggaagatgttctaattccgtatcataagaaggtagttgcccatttgcaagttccagttatgagtgtaaaacagaaatataaagtaccaaacctattaggaaataaaaacaaacaaaaaaagtggatttaactttaattactgtgtacttgaagtggctttggtaggattttctaaaaagtgatgttt

SEQ ID NO: 38947 - DNA, 786 bp, Bovine  19866880558096
  misc_feature (1)..(1): n is a, c, g, or t
naattgactgcaactggaaatatggcaacttttcaatccttgcatcatgttactaagataatttttaaatgagtatacatggaacaaaaaatgaaactttattcctttatttattttatgctttttcatcttaatttgaatttgagtcataaactatatatttcaaaattttaattcaacattagcataaaagttcaattttaacttggaaatatcatgaacatatcaaaatatgtataaaaataatttctggaattgtgattattatttctttaagaatctatttcctaaccagtcatttcaataaattaatccttaggcatatttaagttttcttgtctttattatattttttttaatgaaattggtctctttattgttaacttaaatttatctttgatgttaaaaagagctgtggaaaattaaaattgaatagaattctttgaattgaataccaaaggatatcaaaaagtagagggaaaagatagggtgagcctatgcggcatatgtccttagaaagtcttggtttatacctgttacctaaattaaacaattatacaagtataattcctttcactctagaaagtacccaacatcagatgttaaattttatagtcatcctagacaaaagaaaaaaaaaaacaaccctcaaatgtggtatctgaatcacagctctacagtgtggtagctaagtggtgctgtgtaagttagtctctaagagattccatttctacatttataaacagtcaatttaaggtgtttttttgaagttttaatgtgaaaagt

SEQ ID NO: 38948 - DNA, 1418 bp, Bovine  19866880658813
  misc_feature (1)..(1): n is a, c, g, or t
nattacaatgatttatgtcatgactttatccccttattcaactaatacagaatactctgtcttatttatcttcatagctccaggacttaactagcttctaagttcctggcacatgatagatgataaaatttttttggaaagagaaaagataaccaagtaaaatatcaattgaattctggcatcatgaattcaatttggaaataattatatggagaaagaatcacccttaacataatttactgtcccactaaatgtagcttggtcagtaatgctgtttgttgtggaaaatcatctgaaatcaaagcttcctgttcaagcaaccatgcttggttgctcctctttgaaatgacctgttgtgaatagttccctatgatttttaaattggttgcagccacttcaaagtggcttagaagtttcaccacagtgtgaactctgatttacctcttcaagcatttcccatctctaaactcctggctttcattagtacttacacttaattcattgcttatacctcacaactcagcaccttgtaatgtgttgttttgtcttttcccctaatctgatgtgaaatttcataaacattagagccattcttaaatgacttcactttcactcccaatctgtggagtgaaagccaatctatcgtttggcttatgtatttattaggcaccaaataaataataattaactgattaatatatttattaattgctacagggctcatggtgttttaactaggactttggcatcattttaaatgtgtcttttagtatttaggaaatcttgactaaaattagatttttccaggatatagcctgctttcattttgagtctagtttatttattattactgttcatatctttaacataggtctcttttattttggaagccataacttcccatttgaaatagatatacaaaatgggttgaaattctggaccccatttcattttaaagtttcctaaggtctaaaaacagttatagattttgatttattttacttgggtttttttttgtattcattaatgttacctgtctgtggttagtataggacaacttagagaaagcaagtagaggattattttaaagcttgaagtttcagacatgttgatgcaactaacttacctgttgagtttcatgttcccttggtctcatccatgggaaggaggaatgtggtgggagaagaccattcatccacaaagaattaaatgatttcccaaagccaaatcttgaatactaaagacatggaggaaaaaaattgtataattatatttcagtgttgtcttggttttcattttctaaaaagatcactgaaagtgcagaaatagaaaaagtaagagagatattcattaatgtggataaagtcttccaatagatttgctttctattctgagccagtctgcaatatttccataaa

SEQ ID NO: 38949 - DNA, 1587 bp, Bovine  19866880698645
  misc_feature (1)..(1): n is a, c, g, or t
nccacgctctctgtccatgggattttccaggcaagaatactggagtggcttgccagtcccttctccaggggatcttccccaactcagggatcaaaagtgcatctcctgctttgcaggtgaattctttaccgtctgaatcaccagggaagcccttgtatgttaatacattcagaatatgttaggctttcacaccttccttttcattacagaaagagtatactgtgcttttgctcaaacttttccaagagttgttaaccactgggaaaattcaagttcctaagggcaagcaccattcctggcctttgagctaatggcccacacttgtaccatctgcatttgtagttgaattttggcagtcttttaaagtgaagattgagataccattaatgttaatcgagatacatgaaatgcacagataccaccacattttatgaataactctattattcaaatgggcataacagattcttattatctatattatgaaaattaaaacttgaagtttctttaaattgctaatctatgcctcaacatgtggttttaagacagaatttgtgtattgaactattctatcttgtctctgtcccacgccatgcagggaattattttgacacacacttgtaaataaggaaagtgaaagtgttagtcattcagtcgtgtccaactctttgtgaccccatggactgcagcctgccagcttcctctgtccatgggtttctccaggcaagaatactggagtgggttgccattctcttctccaggggatctcccaacccagggatggaacctgggtcctgcattgcaggcatattctttaccacctgtactacgagccttcttttcagccttattccccagaggtctgccacaaaactttgctattatcccctgaattgctctttcttttttcaatagttctccaatttcctgttgactgtcaaagcacatggtctctgcggtcccttagtaaattcaagaccgaatgtatgcctccatatgcggttttaagacagaatttgtttattgaactattctgtctcgcctctgtcctatgcaacgcagggaattatttgacacacacttgtaaataaggtacagctcatttgcaagaaaatcatacttcctcattttctcacttcaacaatctgtaatttgtcttgacttgttttccctactgcaattaaggttacttccctctttctcttatcatatagacaggtccagtctgtcatcacttatcgtaaaactagtttttattctagtgtctactgtaccgctgctctttcattttcctctacatcttgctcaacatggcttttaattttgtttcttctaaagtcatcatcatgacaagtaggtacaaacatctgacttcttcattttggcttgttctgtagtcatactcaagcattatatattgaaatgcacactgcttattatatttttccttctcctttaaattatagtaaggatattatatgtatgaatacttaatgtaattcagtttttaaactatgtgttcatgaaggttacagaaagaatttaatttcaggaaatgaaacatttatttaagaagagggcttcagg

SEQ ID NO: 38950 - DNA, 3079 bp, Bovine  19866880741510
  misc_feature (1)..(1): n is a, c, g, or t
ngtttttctggcgaagaagatcgtctagacataagaatctaatgacctgaggcttgatgacaatgatcataagtatctatcagaggaaaattccttttatgtcggagaagaaaagagtcccacaacaaaaatacctgccctcatccaaaggctctataaatttggatctcatgctcctttccccatacatgtcactgagagtctatcaaatgaaaattctgtagaactcaaagctaaaaaatatcaactgttgacctccagaaaaggaaaccctgattctgacaaagttggctcctttctcaaagatcataccatcaatttcaaaagtaagttacccagaaccatgactcactccctaacagatggaaatagaattttttttcaagaatccccagatgatttatccctggaaagaggcatccagagtgaaaatgacatcattatcaatctttcagaagacaaacagattgagcctatcaatactccagatgcagaatcagtggaaattgtggaagaaagcagggccttctcagatgtagtcactgatcccaccagcagcacaaatccaataatgagcagactggcttcacaagagacacacagtcccatacactgtgctgtatgaccagagggtacccagtatgtcactcaagttgaaatataatgaagacacagctttcaagccagagagttaccattcacaggatgccactgatccttcagttagtgtcaaccctgatattgaactttcctttgttgttgaaacttctgagaataaaaaaaacagggtttcagcttatttttcacctatgaagacacctcacactatggctgataccactgctatttcccttgagaatagttatgaaggaggtgagtctatacaaactaatgaaaataacgttagatctaaagaattcccaactctacaaacaacagaaagtgtcattctcatgcctcaagtcctaactgaggattctgctctaataagtgatgggtctttgactgactcttcaaagacagtatcattagtaccagagagagtgactaaatacccttgatctcattcatggaactgatatttcagaaaatcaggtaattaaaatccaaacagaccttcagccccattccttggactcagttattccctctgctaattcagtaacttttaccaggaattccatagatggtgggcctgatttgccatccactgtggagagaaagactgttaacatttataaaatgaagacagatgttcaacctttggatacaacaatgaaagtccgttcacctacacaaataagttctttcccttctgaaataaggaaaatggccgcactctctgttgaggaagacaccaaatgctcaatttgatttaagtaatcttacaaatgcaacagttctcattccaactttggagaaaagacttctctcagcccccaagcccagcactctctccaggagcaatagcaacaaggaggaggcgctcattgtttccaaagcagggaatttcatcttaggagactcaagaacattgagagagagccctttcgttggtagatttaatatttctgctagacctcaagctcctcccagtttaaaaagaacactttcagctgattccaccttgtctcatgaaaagactttaaagcctaaggagaaaagttcggctctgtctgatgaagatgcaggtcctataggtttgtttcataatgttcccactggatcctatgagcaactgtggaaatcaactccttttccttttgattttacaactgctgtgagttcatcaagatattctgaacttgatccagttttcaaaatgaaaaaagatactacaacaaaaactaataataatactccatttcaggaaagaaattctccatctaacaaagacatcatttcccctagtaccaatacttcaacaaaagacatgttaaaccttatttttactaacagatctgtgcaaagaaattttgtagggaaagacataaacactgaaaatgaagtagctcttattacagaaaacatctcaaacattacctcagagggtgaaaatgttccagatgatgaggatgtaataagtactgtgtttgatgccacagtttttgaggatgttataaagaaatatgtccttgaaccacgggaggagaataacaatccagttcctaaagaacctactctcatttatgaccccaaaatagttgggtctcacccactctactccagtgctgatgcatacaaacatttatttcaaggagccccaacagaaacaaaaactaaggaaatgctgcaaaatttgatatctagagaagaaaacttcagttctggcctgaataatagtctcaattccactgacaatttgaattataaagttcccagatctatgacttacccaccaactcacacaagtgagaatcttcacaaatttctaggtaaaatacctttaaaaggaggcactttaaaagaagatgacaccagcattatcttccctgaagacaaaagaatggactatacccttgcttcaaatccagaaataacagtaaatatggtgaatgggaggaagttcctagatggacacactgattccttggtgatcacctctccattagaaaataagaatcaattctacagtaaagtcattccatctgctacttataacactgattcccaaggtaaggcagaaaatatttcattaaccaatgttaaagaaaaaactaatatggcagagacgccacactcatgggaaagcattattccttcagctgatttcagtgtcatcgctgatggcaaactttcttctatcaatgaagagatcaaaattttaaacagtgaggcatcaatctcttcctcacctacaaatacaggccacactatgaatgataccactactctctccattgaaaatactgatgacagaggtgattccatgtctccagaggaaaatattaggtctaaagaattcctaactctacaaattccagaaaagcccattttcagttctaatgcctcaactaaaaatcttgaaacctttgacccagtgataaataacacttggctacttcaactgcaggtcaaa

SEQ ID NO: 38951 - DNA, 843 bp, Bovine  19866880781337
  misc_feature (1)..(1): n is a, c, g, or t
nttgcctggaaaatccccatggacggagggcccggtgggctgtagtcatgtccgactctttgagaccccatggactgtagccggccaggctcctctgtccatggaattctccaggcaagaatattggagtggattgccattccctttctcccaggggatcttcctgacccaggaattgaacccaggtcttctgctttgcaggcagactctttatcatctgagccaccaaggaagccctggtatataatataaagccctggtatataatataatatatattatatctattgtgcataatttatgcatgcatttatttatacatatatgtgtgttagttgcacttacataattatgcttatattattatatataaataatgcagaaagcttctgagtagccagtaaattatttagtgaagtattgctctctgagaggtcttaaaatcataatttaacaaaataaatatggatttgaataatctgttatcactacacaattaggtattgattgtctttattattatttcttgctagggtccataaagaaaacatgaatgctcttatcttatctatgattatcttgaaccttactacattcttcttggtaagttttcaatactggtcaacaggtaattttcttttcatttagaaaaatataaagatgttcatatcaattatatgccacaaaaacatctcagagtgagacatcaatgttcttgcaaccaggataattcatactgtattgcctttaaaaaatgtaccatgaactttattatatttctttctatatattcatacaatgaggatatatatatatatatatatatatattacacatacacat

SEQ ID NO: 38952 - DNA, 1587 bp, Bovine  19866880785911
  misc_feature (1)..(1): n is a, c, g, or t
naaaatgtatttatataactctgtaatgggaaatgtctgtaatgggaggtttgctgtgttatagcaaatatgaattgcttattctctttctaccatttaaagatgtttccaatagcccatttgatatctcggggaccaatgccacaaaataaaccatctcaggtaagtttttttaacaccatttctctgtttgtaatttatttaaaaacttctctcttgggaatgcattatgtgatgattattgtatttatatttagctttacccaggaatattttacgtgacctatggagcaaatcaactggtaagtctttatcctattttaattaaatgttaccttaggagataatattataaaatccaggtctccaacaacagatcccatgttttctgactgccgaagttcgcaaccgaaatggcaaggaggcacaattcctatatggatgattctggccaggcatacaaacacacacacacacacaatggcattaaagaaaaggtaaataaattttctatcggaattatccaaattggctacatttattcaataatgattcatctctccactttactccacctctggacacagcattaatattaaggtttgaggaaagaccaattgacttttttcttgagtatctacaaagataataggagtcagctggttcataatatgattcagcgtttctttttgaacagaacgctcctgccagacttggcatcatgagctcagaagaaatgggggtgagtaatgtcttcaaactcttcttaaaacagtggccaagggagaacagtcacagatgactggctgcaagaggcattggccatgagtgtagctgaatatacaacatgggactcaggttgttccactccaaaaccaaaagctggattctgaagcagcatgcaaagaatcatctcatttcccatataactgtttctgagtgatgagcattcttgcacataggattttgccccatttcttaaatgcacaggagcaatatctcttgaaaagccatcactattgaacagcaaatgcttcaaaccaaaaaagaaacacacggttcatgaagttccccttacttctcagaccatttaacccctcaaaacaacaaactcaacaaaataacaaatcgtttagaactcaaaattgagagatcaaaaattaaaaaattaaccaaatttaaattttgattattgtaaaattccaagtacattaatgacttaggtcaagtatattcttactctgttatcattatccatgcatattgcaactttaaaattttgagatcaacagactcacaattggactttttctctcagaaatttctatgttatatctgttagaacacaaaacaaaaccatactaaagtaacaaatcattatcaaatcacatcaaattaataaatacagatcatatcaaattaataaatacacattagcatgctatcactaaaagaaaattcaaatctcaaattattgaatgccttctgtgagtgagacatgtaaaaagaccctctggagataagttaaataaaataaggtttcgatctcaaggagtttacagactaatcagggggaaaatagatacc

SEQ ID NO: 38953 - DNA, 1374 bp, Bovine  19866880835445
  misc_feature (1)..(1): n is a, c, g, or t
ncttgaattgctaacccaaagcataagaagagtgcagtatcaatgcttaagacctgaaaaaaattaacaaaaattcaggaaagagattttaaagaaaaaaaataaattaattcatatgtttacatacaatattgtttttgacagatgtatacatttgtgaaatatcattttgccttagtctgcatccagcatgagccaggaaccctgtaatatttcttatatttcttacatgtggatgctaaacaattactaaatagccttattttttctatgagtgtgggtttcaaatatatttttcagtagagaatcattggttgcatactaaaaaagatatctgtttagaataagcatttaaggtcttttaatactacaattgtttttgagatatgttgttaatttgattctctttgtctctaactcacattaaaatatgctattgaggattaactaaaatgatgtatatgattagacgcagtggggagtgagtttgctttattgctctctcttaatatccctgaaggctgggattaaagatcttatattaaaataagtaattattggataactcaattaaactttgtgatagtaggggaactcttgtattactgactttttaaagtttcccaaaatatattctgctgcatgaccactatttttaaacccatgcattttctaaattttgtacttgccttaaatgctcacattctttcgtttattaagatttattgcttgctggacaaacttcttagatgttaaaactagctgcctaggctactgcacaatactttgtggcatttctgttgttgctttcaaatcagaaactcatctggttcttctttcagtagtttaaagacaccagtttcagttgtgaaattgtcttctttatggctgaatgcatctagatcaggagtagttcctgacaattcgtcagtattcttagttacagattccattctattattttcaggcaaatcttcttctgtaagcaaatcttctgtgaggttcatagttactgatgcagggatgacgaagtcatatctggattctacggcagtaagcagaacagaatgactctcttcttcatttgccatatccctttccatccaaacactgacttcatctgtagactcttcatcagttagcagagcatcttctgggttatctttgtctctttcagcagtggtagtgagctcaaacacagtgatgaacttttcctcatcagaatcagttagtttaggcacaacattggggtcattttctggaagaattaagtcaatttctgttattttctcttctgtaagggcagttatgtctggaatagtggtgaggtttctttcagtagttggaggatttcagcctcagggacagaggagt

SEQ ID NO: 38954 - DNA, 2025 bp, Bovine  19866880876958
  misc_feature (1)..(1): n is a, c, g, or t
naatttcttaatatcacaattagctccaggccagatttccagatttccagtcattcatttctgggctcaaattgtatccatctgtgccaaaagtatttttatctgaaagtacatctaatctttaaatctaaatcagttctctgaagcacctatgaaatatacagaactaggaattttttctaccatccaacataaagaaattctatatttcctgacaattttttttcaaaattctacttagaatagagatatcacatgtttattctagctttcagtgatttcctagatctagactttgtgtgaaggccctgaacaaatgtaagttgcttgtttcaataagcctgcttcacttcactaggcaaatacttaacatgactgctcagtgaatattaactcccagagaaaccaggatgagtaattactgaagaaggagtgtccaggtaattagtctttctgtccttgcaagcagaagctatgctgcctcaaaattattttccacaagtcgtttcattcacactggtttttaggagagtcatttcaacccagactaacacttattcaaagtccaggcttagacaggtaacccatcctcagacattttgcacattattacataatgtttattcatggactgctttagtcttcttatagagattagttgacacttttataaatgtttcttggtaacaccttttcaccctttcataccttcaggtttaaaatttattttgtagcatttttaaagtttatttatttttaattggaagataattgctttacaatattgtgttggtttctgccatatatcaacatgaatcagccataggtatacatatggcccctccctcttgagcctacccctcacctcccactccatgccaaccatttttaatgaaaatgtcttaaagacactattttttcatctttgcctagtaagtgacagtctaagaaactgatatttttcaccataatgtaaaataggcatcaccacagaaagtgaagtcgctcagttgtgtctgactctttgtgacccatggactgtagctaccaggctcctctgcccatgggattttccaggcaagagtactggaatgggttgccatttccttctccaggggatcttcccaaccctggaattgaacccgggtctcctgcattgcaagcagactcgttaccatctgagccaccagggaagtctccacagcagaaaggaacatattaataaataatcaatgaaggttgtgtgtgtgtgtgtgtgtgtgtgctcagtcatgtccaactctttgtgatcccatcaatgaaggttaaatttcttcaactcctactcatgcatggatacaaaagaagaaaaatgcatttgtggaaatgtagattcataaccatcagacccacgacaaaacactattcaattcactaagtgagatttttttaaatgtgtaggtatatgaaactgtaaacattaagattctggaataagtctttaataaactatgtgctttagtgtagtacagttgttaagaagagtatttgggagctatatagatctcagttcagatttggccctggaactcatcaatcacatacccttgggaagatttcagaatctcaatgatcaatattttatccaactttaaaatgagactatcaatatctacagctcaagactgtaggatgattaatacaattgagttgatgtatgtaaataatgtatatgcatacgcactatgtatcagaccagatcagatcagatcagtcgctcagtcatgtccgactctttgcgaccccgtgaatcacagcacgccaggcctccctgtccgtcaccgactcccggagttcactgagactcacgtccatcgagtcaaacaccgcacaatttacctgttagtaatatttttgttctaattaacatcatcattcagaaataggggctgactgtgatgctttacagaagtttgcaaataaatgtttgcctgcatgatatacttttatatatggaaaaagaggagatataagaggaagcatatg

SEQ ID NO: 38955 - DNA, 1698 bp, Bovine  19866880889859
  misc_feature (1)..(1): n is a, c, g, or t
nctcaaacaaaaggaaatttatgtagcaatccaaacccacttcatattatgtctataaaatattggaggatagtggaatacacgtttgaatactaggttctctttttgttaagcctgttatatgtgaacttattttgtgatgaaatgttctaagtaaaaaatattatttgccttctaatatcctcttgttattgcacaatttggtagactttttagagtttttataatttagatgttttgtgtttccaattagaaaactcagaaaatgtagtttacatctttaatcatgaaaaaataattagttggcaagaaaatcttaacttctttttggaagtaaaataattagccatttgagcagacataatccaccgcgtccctttttctcttaatttctgccctattgctctgtcaaaaataatcaaaattctaccatgataaagtggatacaatgtaagtacgttggaatatacattaatacttcattagcttatcatctttcagcttgggaaataaaaacaggaaactaagggaatgggtcacaaacagagaagttttggcagagagggagagagaggtctaccgttagagatgcagttaaggctgggtggtgcataaaataaacagggtgtacttaccggtaatgacagcgttgatcctagaagacaaaacagtagaatcgcagccttcatgttcaaattgctacctgaatcaacaaagcaatgttattctttcactccgtttttttcttttttgagacaaagtggtacgtgaaaaaaatgagtggtctctttgaaacgtggtcagttctgttacctttctcttcactaggcaaaatgtacaggtgaggtgatttctctagtctgtatgctgaaaatttttacctttaggtgagctatgagtgtgtaggaagaatttaaatttgactccaggaggctggcaactgaggagccaatcaggacttagcctgtctgtgaagtcatttggtttctttcatttcccaacacttcattaggtgcgttattagctgcagacatcatattacccaatgtctgccatttgaatagagggtattttcaggaagacatgccttgtataattaaaagtgcagacaataaaaagttacagtctttcttcacttccatctccttcccaaatgacttcccagagtacctgttttatcatgtgtacatgggcacataaatcaaacatcaaaatatagctgcctatgttaaaaaatgagaactattatgtatatttctctgcaatttactttgttttgctttataaataatcagcaacctatttgtcagtaggtgtagatttatttcatttatttaatggctgtattatattccatttccttttggtgcacagttaatccattttcattttagtttgtaattataaaagtggcacagtcagcatccttataaatttttttcacacaagtgggagtattttttgtaaatatttttcttataagtactgtactaaaggatatgtatgtttaaaatttcaataatgggggaaatggccagattgcctccagaagcattgaatggtgtactttattttaaatgggggaaaagctacagtaatctaggcaaaatgcaggggtccactgaggtttctttcacaaacagaacaatgaaatgctcaccataggctttcagggccctgggctttactgggagtttt

SEQ ID NO: 38956 - DNA, 1789 bp, Bovine  19866880913760
  misc_feature (1)..(1): n is a, c, g, or t
naccctgatttcacttgactctctgatttcacctgtgaagaaagtgggttaatgagaaatccttcagtgagcattttactcattagtcttcatatgaccccaatttcttaaccaaaaccaaatggaagattttctttctctctcttcactgaattatgttttaaaaagaggaggataattcatcatgaataacaattataactggattatggactcaaagatttgttttccttctttccaggatgaactccaggataaaatccacccctttgcccagacacagtctctagtctatcccttccctgggcccatccctaacagcctcccacaaaacatccctcctcttactcaaacccctgtggtggtgccgcctttccttcagcctgaagtaatgggagtctccaaagtgaaggaggctatggctcctaagcacaaagaaatgcccttccctaaatatccagttgagccctttactgaaagccagagcctgactctcactgatgttgaaaatctgcaccttcctctgcctctgctccagtcttggatgcaccagcctcaccagcctcttcctccaactgtcatgtttcctcctcagtccgtgctgtccctttctcagtccaaagtcctgcctgttccccagaaagcagtgccctatccccagagagatatgcccattcaggcctttctgctgtaccaggagcctgtactcggtcctgtccggggacccttccctattattgtaagtctaaatttactaactgtgctgtttaacttctgatgtttgtatgatattcgagtaattaagagtcctataaaaaaatgaataatgaatggttccaaaataagcatagctgagattaatgattgtcagcattagttataaatagaataagctggagaactttcacctccccctcaccaccagatctcaatgtctaggcttacccgtggagattctgatgtaattgttctttctatgtagaagaaacttattgggaagaaataatataatggactatgatttaattggtctgttgagaccaattaaattagatgaaggcgattaaggtacaataaagccagaattgaatttgataatctcatttggctaagaataacaaacctaagaaggtttgctattttctacaattttgaagttctccttatgcacaattatttcaccacatgactcatttcacatcttgtttttgatatatgagcatatgagggaaaaatactgagatgcttatttcaatcctcagggaaaattttcttgccaaaaggcaagaattgtataaatcattcacttattttattttattattttttttatttttaaggtctaagaggatttcaaagtgaatgccccctcctcacttttggtaagctttaggatattggaggcagacatgatcatttttatagttaatatcttttacatttcattttcctggataagccccaatagtagcaatttccatcagtgtaccagcttaaagattaattataaatttattttcaatgattgactgttatttactggcctgaaattatgtatctgttatatttcaaataatgcaaaactgtatatatatggtgtttacagatttgattggttttctttcaatagcctatatccttattattgattgtcatcatttatagaaaaaactgaaaataatttcttatacttttatgtaaacctgttagagcttattttaaaggtcaactgcattcacatttctaatctagtcattatgagcttcaatagttttatctcacttaaaat

SEQ ID NO: 38957 - DNA, 817 bp, Bovine  19866880939202
  misc_feature (1)..(1): n is a, c, g, or t
ngtctctaacagccaaagcagcagcagaagtctctgaaactgattttggcttggccttcatggattttgcttttaaattcagttctttctttccagcaccatctttaagtgtgagcatataacgaatttcagaggacagcttctgatccacaaccgacaacttgttgatcaaatttcggtaggtaacaagtctttcaatgacaggatgtccatgtgcagggactctcctagctttcaggatcagataaaaactaatgttggagcagtagttcaaatagagattgtatttggtcctcaggtattggcttccttttccaggggggatgatcttttgctccactaactgtagcaatggctccagctcatccttcatctctgtcaacttaactttcaagtcgtctatcagctccaagagctctggagattcctttcgcagcattttcagcttctctttcacggaaactttcgccaaatccttcacgacacgtgtctcagcctcatttacctgaggtactggttttgcaaaagcctccacccaggtaactccaaaatcgtcctcttgcagggcttgggctaagcgccgctgaatgagctgtgcctccgcctcctcctctctttcctcttcctctacttcttgttgactctgccggcctcgggacttggagccatagtccgtgtcgtagtaaagttttttcctctgaccccacgacaaactgggatccacagaagcctcagtctcactctgcacggagctcccaccatcattcatcgtcaccctcctcactctctccatcttcatcgtcctcatcggcaacat

SEQ ID NO: 38958 - DNA, 1127 bp, Bovine  19866880987935
  misc_feature (1)..(1): n is a, c, g, or t
nttacgctacaataacataagctactgagtaggctttcagtcaaggtaattccagggctagagaattctggttacctccactccagactttccttggaatagttatcatcaggaagtgtatattaaattaatctgttaaaacttattttgcattcctactggcaatgcagatttagaaaatgggaaaccatgatcttatatgcttcttcaatcacatttatttttctttgattaacaggaatattgattcttcaaggaagtggctcatgttcaattttgcagtgacctgaaataaatcacagatataaagttattaaactcagtgagtcatgtgcttgtgaatgtgtaagactttttgctttttaattacaaatattggctcaaaagtatatctagttcaagggctgggaaactttctgctcaagacagagtagatgaaagaaagaaagcagagacttttagtggttggaattagataaaagatctaccccctcgccccccaccagctgggtcctaatgtaatctttagtcccatttacattgcctcaattcattggtaattaacaaactatcaatttgtttttgagatgatgagataaaagggacctttatttcaggtggagcattcagtctttagaatgttatttcattgtgataaataaaagttaaatgagttttgatactaattagaacaatggatgattttctaaggaataggctgaagtctactttagaccctagatccacaagttcatcaattatgatctttactttgattaaaactttaccttctttgggtgctctgattcagcccttaaatgcaccattgttgatgatagtagaaaatgttaaaaatatttttcaaaaatattttcataagaaagattatttctattgcatcacagcaagtgagggattcaaactgccgtgtaggttggatcatacaagagcacacatatgtacctgtgagttgtgtttagtcactaagttgtgtgtgtctttttggctaccccatggactgtagcctgcaaggctcctgtgtccatgggatttcccaggcatgaatactggagtgggttgccatttcctttaccaggagatcttcgacccaggaatcaaaaccgcgt

SEQ ID NO: 38959 - DNA, 962 bp, Bovine  19866881071060
  misc_feature (1)..(1): n is a, c, g, or t
nagctggatgcaagaaggttatatggtcaactgaaagctccaggcatttaggataagtagattcatgtctattagataattacaatgtgagaaaagctctgagtctttttttaaactcaaaaattaactgaactaatttagagaaaaccaagcttttttactttgaatactaaacctataccatataattctgcatctgtaaaatcgttttatgccattatagatgacttgaaaatgtaataaaacccacacttctcagctaacaaaaataaaacaagcttccagagtcatggagatgccatcttgctctaccttccccaaatagaagttcaaaacttcagaactattattcaaagctattgagattggatatcttactgccacacacatttataatgtcttgggcattggcttggaaaggcaatcctctcatatggacaaaatgtagtgaagacgtagttccaaaatcaacagcctctggtatcttttctgacatctccttaggcaattctgagaagtggaacaaaaagcactgtcaggaacatcaaagcttcagagttattcgcagactgcaattatgaatgattttaatttcttttttttttttgattttaatttcaaaatcctcaattcctcttcaaatagtaaggaagagggcttccatttaaaagccaatcatctgaaatttcccccacctaacagatatcacctgaacacttataaggatttagtgtctcaaaccattaccagattataaagaatgtatctttttctaacaacaaagagaaggaaaaacaattatgaatgaaaaataaaggcaagaaatttcctgggttacaatcacttaaaaaaaattaatatggtaatgggatatttctagggcacaaacttagaacgtatttatcaaactttcaagattctaaacactgttttaggattaagaatcaaagggaataattaaa

SEQ ID NO: 38960 - DNA, 969 bp, Bovine  19866881419926
  misc_feature (1)..(1): n is a, c, g, or t
ntgatcagacataacacaatgcacgattctcatcaattccccttgctgtaggataaaagggctgggaaacaggaggacaattaatactgggtaacgctgcacagcaaaaatggtaaaagaggtagttggattaatttaacaagcacataattcacttcttttatccttatatacttagctatcaaaattctttgctctgctaaaggtggtgttttaagaaaaactaaagcaaatttttgatttaaatacactttcaggcattcataatttccttctccaaaatacaaagacttaatttttcagattggacaaaagtgcaggaaaaaataaaacaacctagaagttaaatccttcctgatttatggcagtccctccttcacttctgacactgctgtattcaccaagtttctacattagcttgtttctaataagaggataaaactacgctacatcttaaaatttctcccaccctggaatatcctaagtgcacattatcatattctctctattttgcatattttatttttctatcttttggccacaccacaaggcatgtagggtcttatttccctgatcagggattgatcctgtgccccatgcactgggagtgtggagttctaaccactggaccactagggaagtcctatcatattatcttaaaccaatcaaccagtttacccctctacatatctatattatccaatgaggcctttgtgctttggaagtgaaaactcaggtacttgttttctgagctacaaaaataacaaagagataagggatgacagagattttctttgaaaatgctttggatagttgcaaacaattttttttttcttttgctgaagggtctggttttaaagaggaacataaaacttcaagaaatatgtcccaagatgatttattctattttaggatttcttatgattattctgttctaggatttcttatgagagggatatctaacaactg

SEQ ID NO: 38961 - DNA, 1002 bp, Bovine  19866881551826
  misc_feature (1)..(1): n is a, c, g, or t
nctatggctgtaactgatactactgctgctgccattgatgaaaccatttctggcattgaaaccactactgctaaaactggcacaactattcaagaaactgctgtaactgtgactggccccacaatccctatagtgagcaccaagagtgcaagtgaccaaccctgcaaccactgcagaggttcttaaaaccacaacagctgctccagaagcggacactgctaccctcggcactactctgcctgttatcattctcactcctgctctccccagtgccatcaccaccaccagtacaactttgcctgaaaaggatgtcaccactcctgaagagtatttttattacactgaagatgagattgaagcctctgactatgcatatggctcagagtctgctgaagattccactgcaattccagaaactaatgccatgggccctgtaactccttcaactccaggggccaccccctcctgaacctataattgataacactactcagaaacttgaggtaatagctactacacatagcccttgaatattgatcaagtaccccaaccaataatcaaaactatgtgataaaatactgaaaatcctagccatgaaaatatagcaattatttaagcatactgtattttagtttttagtctttcttctttatctatcacgaacacatcaggccacatatttgaagcaccataagaaaaactgtcactgcactttattatgattaatttcacttgacatagaaatggaatttgtccttctcacttcactctaaaaagtccttaatgtcctaagagtaagattcctgaaatcctcttaattccttaagtactgaaggataactaaaaggataaaaagataacattttttagtgtattttattcttatgagaggaaataaacactggaaggtgtttacctatggaataataagaatattttatataagatagattatttctggaaaactgtgaaaactagaagcagagatattattcacagaat

SEQ ID NO: 38962 - DNA, 1306 bp, Bovine  19866881572667
  misc_feature (1)..(1): n is a, c, g, or t
ncaattactcagggtcctgggtttcttatttggaaaagatgagcaataatgctagagatggaaggtaggagcagaccttttcaggtagacacaccaagaatgcagcggggttggggtcattatcagacctcttgccctttgaggtgggaaaacatggtcagcatccccactgctgagcatccatgaggaatagacgttgttcatcacggctttctggatgtggccagggaagaaagaaggaaggatgagtctagctctgtgcagtctccagctcacagtgtaccaggaccaatttcctgtcttctgaaactctttttccttccttcgcaacccagcgaaggcaggggattcaagtccagatttcacagaccaatatctaaattctctggtgggatgaacttggtgctgatgggagtggtgtgctatgtggatgatccaggaaggtctgggaaacaccctttagtgcttgtccaggggagcattgccggtgagactttagccctggcccgggggcaggcagtgaaaggatccctgggggtcattgatcactatctaccaggccctgtggttactcctgggtttggtcttccctgctgcactatgatctcctagatgtctggagagctgtgtttgcacttcgtatctccactagttccccggaaatagtgagggtcctttgagttgtgggttttttgttttgttttgttggtcctaccacagcacgggggtttcccagagccatcagccaaaaagaacctgcctgccaatgcaggagacaccggagacacaggttcgattcctggatcgggaagatcccctggagaaggaaatggcaacccactccagttttcttgcctaggaaatcccatggacagatgggagctgggtgggctacagtcccggggtcacaaagaatcggacacaactgagcgactgaacacaacaaaagagcggttgtgcacagcggggctctcaggagatccatgaaacccctgaagttggtggatacacattgtgttcatgggcatctgtgcatttttcctgaggagacagtgtccataaatcaaagaaacgtacactaaagccaataagaaataccaagaaatgtctagaactacagggctaggtgttgcctgtagttcacaaaatactgtgatgaatcctgatagcctaagccatttaagaaaaataaattacctctctgtttttgctgatgtctctcagttttcaaaagatttaagaattttccccttttatattacatatttcttgactcccacctccataattatattattgcaagtat

SEQ ID NO: 38963 - DNA, 731 bp, Bovine  19866881813587
  misc_feature (1)..(1): n is a, c, g, or t
nttttgttatatatgtgaaaactggcttttgacacagaatctacaaaaaaataagtaaagtttttaaaaacctgtatcttcggcctgtacagtcaacccttcataccctggaaactctggatacagagggctgactatcagacttgagcattcatggattctggcatctatgacgagtcctggacccaatcccctgtgaatactgagggaagactgtgtattcacagtacacactatactcaaagacatgttaaatatttacctcaataccctttatcctatactattacaatgtcatacaacatggtcataaaaagtttttttttaaacaaatatcaaaacatacaacgcagacccaatgaatttcaataagaggcaagtccttacctatttccttctcactttcaaaagctgtcatgggtcggatatcctcatttacttcatgctcttcaaagaccatttctggctcagttatatatttagcagtgggagaagatgctattttttttcccttatgagaaccaacatgtgttcgaacttcattccttctgcttggaaatatctctatatatctatgtcaaaacaaaagtgaatatgtgcaaatggtacaaattaacttcacagtgaactcttttaaaataaaatatgcatatatatttccaaaggtcaacaaacatgggtgtccaaagataacaggtggggagaaaagtaagaaggacatagacatcagc

SEQ ID NO: 38964 - DNA, 1202 bp, Bovine  19866881824708
  misc_feature (1)..(1): n is a, c, g, or t
ntgcattggtaggcagattctttaccactgagcacctggtaagcctctatagagtattcatatcaaaatgttaacctgaataaatccaagattttaacatctagttaccaggaaataacacaggatacaaaggagtaagttaaaggacaccatgaggaagcaaaaatataaatacagaatgtgagacactatacagaaccactgattcaatttcttcaaaagccaactggatattaaaagcggggggcggtgaattccctggtggtcaagtggctaggactcagtgttttattgctgtaggcgtgggttcaatccctaattggggactgtagatcccacaagctacgtggcatggcctaatgggggaaaaaaataataaaaaggagaagggaataaaaagggaaaggggatttgctcaaacttaacagaactgcaagcataataatcaaatgtaacatgtggaccatgtctagattttggtggggaaaaagaaggcaactagaaaaggtataaataggtataacctattggcttatacctttgggtataaacaggaaaatgtgattatggactggcattagataataaatattgagatgttaaaaaaaaagacataaactgaaaaaacagatgcagcagatgtaacaaatgttaacaatttattcatctaagtgatggacatctgacaactcatgtctgtactgaaataatttaacagtcatgttacactgtgtttatgaaaatgacccaatgtttgatctttctacatcattactatctgcttcactcaccggttgccaatttcttccctgtgtttcaaaagggcttggctggccatttctggttcttcaaactgcacataggcttctcctgtttttcttctccctctataatccatgacaaaagtaatgtctactatattcagtcctaggtgtccaaaaattattacaaattagtgctgctaacaagagctgttttagtcttacaacttaatacattcaatcacattctaaaaatttcttttttattagtaaaactgtgcagctagtttgccagtctcaaagcctatacccacctaatgggaagaaaattattatgcagtaaaaagccaataacactcacctattcccaggatgtttagggtccaagcagtccatctaaaacacacaactctctctgttttttgccattaattacacatt

SEQ ID NO: 38965 - DNA, 902 bp, Bovine  19866880584152
  misc_feature (1)..(1): n is a, c, g, or t
natattgtaaattctataaaatgtggtgattatatggaaatggaaaccaagtaaaacccaccggttagagagactcctacattatgcttctccagatgaataagggaaggaattggtaagggaaagaattttttttctatatttaacagtatttattttgcctaattacaaatgtaatgtgttttcactgcagaatatttgtaaccggtgtgcagcaaaacaatctggcacactccttatgcagttttagtatattcatccttcacgatctataaatgtgtgtgtgtggctcacacaagttcattagtgggagtgttcaatggagcacactcatttttggctggggagggcaaggtggaaggtagcctgagtatccacaccttgaatcaataaatgaaatatgcatacaatgaatgtttagcctacaagtaaaaacagaatattgtgtttcttttttttttagtatgcctcatattgtgtcctggtattctttattcttatcacaaaactgaccagatatgactgaactgtctgatccattcttttcattcatgtggagtcaccgtgttctgaaatctcattactacagagcttccttgccatttgatgttgggcgtagcatggatgtaatttgtctggaagcttccgtgactactatagtgggtcctggcctcacactcacactctttttttaaaaataaccccaacagttcacaggcaacaatctgcctttttctctgtgcccatcggttgtctggttctcataaacttaccctgacactcacaaagcaaatgtccttcgagtttttactgcacggtgaggtgacccaccagatgtggtattctggtcagtctgaaggaagcacacaatgtttacattaaccttttcaggcccttttcca

SEQ ID NO: 38966 - DNA, 1218 bp, Bovine  19866880681893
  misc_feature (1)..(1): n is a, c, g, or t
ntattttgaaaatgtgtaaatattattatgaacatgataattaaatgaaataattgctataaactaacttgcacatagtaagtgttcaattaatgtgagctttcaacaatttttttttaatattctagtactgaaactgtggatcactgtgtctgtatgaatttttatggaaatatattttgaagtgtacatacaacaacagtgatacctataattaaattacacgcttcaattttatggggcagttctaatacatgaatttgtatttgtcaaaggcaattacttaaaagcttaagtagcagaatttaatttgtaaaactgcaaaaattatttcagaataataaattgcacataaaaggaaaaaataacttattttgtctaatgatctggtcatcaattcagagaatagtttcactgaatcatatgcaatagtactgataatcaacgaaatgaattgtatgttgataagataaggctagagagtggccacgatggggaagtagaaagaccctgagctcacactctcccacgactccaccaaaatcacaactatctgcagagcaaccgctgatgaaaaagacaaagaaaccagaaaagatctcagacaatgaaaaccacaaagaaggaaccacaacaaggtgggtaggaggagccaagaaatggagctaacctgtcacatacacaaaaataaaaagagcaacttagataaaatgaagtagcaaaggaatgtgttccggacaaagaaaaagttaaaatcccagaagaactaagtgaagtggagatagggttcacagttatgattaaaatgatgatcaaagaactgaggaggtgaatggatgctcagagtgagatgactgagatgtgaagttgtgttttttttttttttttttaataagagttagaaaatataaggagctgccaaacataggtgaataataaaataagtgaaatgaaaaatacactagaaggaatcaatagtagactaaatgatacagaagactggatcagtgaagtggaaggcagagtagcggaaatccctgccattgaatagagaccagcaaaaaaaaaaaaaaagaatgaaaagaagaaacaagagacctctggtagaacaagtgcatcactaatattcatgttatagaggtctcaaaagacccttataagagggagataaagggccagagaaaatatatgaagagataaggcttcaaactttcctaa

SEQ ID NO: 38967 - DNA, 2705 bp, Bovine  19866880683395
  misc_feature (1)..(1): n is a, c, g, or t
ntagatattttcctaattttgtgtctctctttttttccccaaaatattgtaaagtaaggtgaaggtgagtagagaactggttgatctacttctccaaggattacctaatttattaataaccacactctgttttgttctctgtttgagctggggaaccctgtctgagcaaagaaacctgaacctcacaggaatggattcacactcaatcaatgcttctgaggccttggatagtgatttaggacccctaacgatagccttgaccgttacatgtgcattagaaaaggagatgcctgtcagcaaagtagatattaaagaaggatgctttttaaaatttatttatcatgctttggtatgtcttttctaacttagtgatggataaacagaatctaaacaaacatagtccaaggtgggttattgaaataagtaaagattaataatgaaaaattgagctatggaagttaggattctaggttgaaaatgccctaataaatttcacaagtatctaatggttgttgttcaatcgctaagccatgtccgactctgcaaccccatgaactgcagcacaccaggcttccctgtccttcaccaactcctagagttctaatggatcacgatgcaaatattcctgattattgaacatcccattagatgtgcggttgccttttccaaagagcttacagacagggctggcagctctccttcctttctggcaggccatatttttactgggccaagtccacacaaacctctttgcatactcattaacaatcctaggaaatactgaattggttttaacttctttatttaataggcagcctagttggttgaataaacaggcaagagaatgtgttttatgttggatttttcttttactatttctgaaaacattctacattttagttgattttgtgtctccaattagtgaaggtgctagatatctgacttcccagtaaagtcagtgggtattaactttattgcctctttaggtcctgattatgctaaattcattttagagtatggaattcaacatgattacaatataatcgcgtggttaattgcaagtaaaacctcctctaaaattaatatttaaagtggaattgcagtcaaacgcagaatgagtgaggatgtattgtttaatagagtgccctgagggaggttagtgcatttcagagaaatgtgggttgtgaatcagaaaataatccttaataaatctccagagaaggccacctctacttctagaaactgtattgctggtgggttagatactctttcttttgttttatttcctttgcatttggctggataatctctattaaagagagagaagaagaaaaatgagtcttctttcaagttcttcctttttcttttttacgggctccccgtaacaactttttcttctaccgtgaacattttatgtctaacaagacatctttccacatgtttgctagatgcaagagctaagctctatccttttcttattcctttacagtattattaatagtaagtattttagttactcttctacctcagaggataattgaatatgtagaaacataaatgacagtttttgtgtctgtatcttttgtaccttattgtacttgttgatttaatgcaacctaaattagaatcaacctaggataggattttatgtaggtgaagaaatgatgttttactgtacttgacttttgaatattttaagcattctttttgtactaacctgcaatcacttgatttctaatgctgtttagactgcatataattttaacataaaattaaacttataaaactttgagtgtagagatgactttttggaaatatttatttcactttctctcttataaaagaggatacataaagccataactataaaagctttgctttacaatctataagaagtataccgaaaggattcaaaataaaaaggcactcatgaactagtttcaatatgattttacatttcagaaactcaaatgtcttattttcataaggggtgattttatatacacacttttcaatgggcatttgtcacaaaacatgtcctcgcatagcattcatttgcactcaatatcataaagttctttcaatggtttccccttataaatataaaaccatattttaccatataaaatgggtttcctttgtagctattttgacttttcattggctgatgatagagacttaccaattttcttctttatgttcttatttctgaaaattgctgaataaaatagatgataaaagatgatgtattattaccatatatattagccaatggaaatttgctgtatcactcaaggtaatcaaatctgagctttgcaacaacctagaggggtaggaagggatgggaggtgggagggaggttcaagagggaggggatgtatgtatacctatggctgattcatgttgacatatagcagaaaataaaacaatattgtaaagcaattatctttaaattaaaatttaacagattaaaaaaagatgtatttatgctgtatacacaaaactagaagctcacttgttctctcttatactcagattggagaaggcaatggcaccccactccagcactcttgcctggaaaatcccatggacgcaggagtttggtgggctgcagtccatggggtcgctaagagtcggacacgactgagtgacttcctttcacttttcactttcatgcatggagaaggaaaaggcaacccacttca

SEQ ID NO: 38968 - DNA, 1476 bp, Bovine  19866880762426
  misc_feature (1)..(1): n is a, c, g, or t
naactgaatatgcattttgagtgaaagagaaacagatatgcaagaactaaatataatataaattaaaaatatgagttaagtagatattcagactatagatgggaaggaacttgattaaaatttgaaaaaaaaaaatggcttcaaagaataggcactgggactactcattaaacacttaaaggcattgcaaaattgaatccaaatagggctcagcaaactgcatcaacaaaagtgtggacatgctcaaatggtgagattaggaaaaagcaaggattatgatttgattgaggttatttcatggattatataagaaagttcctggtctgtttgttctttatggatacttcttacacttctactacctgtgaaacaaataatatgacttgttgtcaatatttttaaaatatggacttttttcaaattttcagtatttggtttagggattccaacagtcataatctatgttttccataacttctggagcagccttctttatagtgtatctaaaacaaggagcagtctggaagacaagagttgagacatgttgaaagaattctgtactataaaatgtataaggttatctgtccatgaaatgataaacatcagtattgaaatatactttagtgttagaaccagaatttaactcactgaagaaactggaaggcagtattttacccacaattacactgatagttctatttattttttaagcgattgtttccctagaattctcctgttttaaaattgtaaaacccaagagtctcattttataaacaaacacattgcacatacacatttttctttttcttctttttttggagcccaggtcactgaattgcatcaatcatgttttgttatttatagcttactcaaattttaatccacacatgactctctgattatatttgtttacatatttattagtaataaaattaacacatctaaagtatcgtgcatatcaacaactcaaatatttctaaaaatgcatatttgcctaggcatcttcccccacatcttatctttgacttctcacccggaagtatcatatatcctgaagttcatgcttcttatccccttgtttttctttaatattttctattaccaaaacataaaaatgcttagcaaatacgttgcacagttttattttttaacgtattaaagggggtataattttatatgaacatcttaatgcaggattattttgtcagatacttaagtataatttgaaaagaggagacaggagcctgagggaataataataaaagcccattcagtaaacatttgtgggacagttgacatcttcagacactggggatacaaatataaataaaattaattccttctttgaggaactcgtgatttgtaagaaaaggatattggtagataattacaataaaatgtaaaaagtattatatgaaagatgtttgcaaactgatttgtgtttatggaagagatggtatttccctcaagtcttta

SEQ ID NO: 38969 - DNA, 912 bp, Bovine  19866880763982
  misc_feature (1)..(1): n is a, c, g, or t
nttcttgtttaaatacctgttggtcagattttgtgggtttttttttttttttttattcctgcttttggttcattttagaccttgacaaattgaacacttttactttttcctctcagacattctatgcctgatgcttcttttactgcaccaacaggaaggatggattaatgattttactaggaagacagagacatccatttacaaagtcctcacgggcatcacaggcctgtatagtgctctagataattacaagaacaaatgctcaaagaaaactccataaaatgtcagaatgggaggaaggaaatagaatcagattgtattattttaaacaaaatatttttgtaactcataagatatatgtgtttacaaagcatttcagcaaaaaaaaggaaagaaatgaaattagtcagacaattcaaacaaacaaaaaaccccggtcttttcttttcttttctttttcatttttgattctttgcttctaagtgcttcatttactaaactttcagcacacagtaaacctctcccgcccatgctcagtcgctgcactcctcgccaactctttgagacccccatggactatagcccgccaggctcctctgtccatgggattttcccaggcgaaaatactggcatggattgccatgctcccctccaggggatcttcccaacccagggattgaagctgcatctcctgcatctcctgcatctcctgcactgcaggctgcttctttaccacgtagccactggagaagcccagtaaatgtgtaagtcttcctaaactgcagtgaattaaagccttccttccttgctacttttaaactctgaaaatttgaagtatattataagttatctttactgtaatgaccacctatcagaatagagtaggtactcaaccagtattttttaaaataa

SEQ ID NO: 38970 - DNA, 2064 bp, Bovine  19866880836016
  misc_feature (1)..(1): n is a, c, g, or t
nggttgccatttccttctccaacgcatgaaagtgaaaagtgaaactgaagtcgctcatttgtgtccaaccctcagcgaccccatggactgcagccttctaggctcctccatccatgggattttacacacacacgtacagatacatgtagatacatacatacattggaattgatattttatttgttcattcatgtattgatatttagtcattctaagtcatatgttgtatatttttgaataatgaagccatcaaagacaacgcaaaatgactcaacatctccaaagtttaacatatatgaattatatatgaatatatatgcaaatatatgtatgtatgggtgctaaatcacttcatttgtgtctgactttttgcgacccagtggactatagacctccaggctcctctgtccatgggattctctaggtaagaacactggagtgggttgccatgccctcctccaggggatcttcccaaggcaggaaatgaacctatgcctcttatatctttagtattgaaaggtgggttctttatcactagcaccacctgggcaaccctcagcccctccccccaaataataccggaatattaatactgaatattgtgtgtatcagataaaatgtaaaatgaaacttgtaaactattttgctagattagggtagtgtgacctgattggatagggatagggtagaattagggggaaagaaataagcaaaaacgtaatgcagatatttaataaaataatgatgtattacagcagcagtaatgcaagtatacaacttttcttttaagtgccccaaatagttccattaccactgtgaataaaccattcgcattgtggttagaaaagtttgttttagcaatttccatgcttaagggctttcactaaacaataattctatggtggtgacttttgggtgtgtctaattgtctacaaagtaagcttgaaactggcatttcatgtcattaagaattaagaattcaaaatataataataataaaataaaagatttacaaggctggtcattcaagaaaaataggaactttaaaatgtcaaagagctttatatacatacacacacacattaaaataacatgattaaaaatacaaaaaaataaataaaaataccataaaacatattgatttaaaattacctttgctgttatagagttcttttttagcaatcagttttcatcaagtttattattttaacattcctaacgcaaatggcactagcaaatatttgggaagtgaaagtgaggtctctcagtcgtgtctgagtctctgcgcccatggactatagcccaccaggctcctccatccgccggattttcgaggcaagaatgctggagtgggttgccatttccttctccaagggatcttcccgatccagggatcgaagccagctctcccgtattgtaggcagaccctttaccgtttgggccaccagcaattgtttagaatttgtctaatattttgtaaagtatttacatatttgttctcattgccaagaaatttccctctatacatatgttatagatgtgcaacattatcaatgaactctggctttgaaaacctatttatatgtttgtgaggcagaaaggaaagattcccgttgtaagcccatctggaaactagtgcaaccctcaggatagcctgagttttagctggcctctgagaatatttacaaaaactgatgagatttcatcattacagctctcagtgattgaagccaacatatccaataaacagctattgaactttgtgctgaggttatgagcatgatgcagagataatttggaatagagtaggcgtattttgttttggtcataatgagtttttggtcaaaagaatgtgtgcttttaaaataatggaactgatttttctttctagtctcataaaacttataaagctgcttataaaattaagaaaaaaatgttccagtattttaaggatactcaacctgatgaggtaaacatgcatctattggttgacgtctttgaagggggtgatatgtaattggtttttgatatacgaattggaaaattagctttaataatgtataa

SEQ ID NO: 38971 - DNA, 1410 bp, Bovine  19866880875304
  misc_feature (1)..(1): n is a, c, g, or t
naaaatgtaattttctattttcagctaaatgcttctacaaaaaaggattttttaaatcaggaactatattatgtttaatcaattgttttattttaagaataatgaggtttgttattagtcttctctggggaaataagcttactttgtaggatttcaagcaaataagagaattatctgtaaaagtgtcattgacaaaaaagctatatctctgcacataagtaatgaagaaataaaaataaaattgataaagatctcatgtaagattcttttaaaagtctgtgcttggtcattgtttattccgacacccttatagtgcaatcacaaatactaaaattgtcatttaattaatattttcacatttatttgatgatgttgttagctctatctacccactaaacaataagactgttttttacaaaacagctgcaggacacccaaatcttcttcaaccttcagtagtaccaagtaatctacatttggcattcataatatttgttagagaaaatcatttacatgtccaactttctaagtcagatgcatctttcttattccaaatttcaagcatatttcatattgcttattctaacatcttttcctcacttcctgtcataggcatgactcttagtaatctagctaatcagtgttgtttatgatcccaatcccaattgtcccaaatcttatcagggtccataatgttttaaagtaaatttctcatttatatctgataaactacttgttcagtgttttcaaataattttatcagcacctaactggagaagcgtattggtgaaagaaagcaaatcagcactttgacaacagaaagcaaagagaaaaagtctttgaaatgcctcgaactcaaaggcataagagaattctaaagaatgtatttaaagaaacataaagagtcaaaggaagtgagttaatattttctgtttacttggaaatgttaacagagagaaaagtaaaaatactgtttaagattcaggaattgggagtggaatataatagggtataaacaggtaacaaagttcttgatgggtaagattaaaataagaataaaaagccaaaaagaaaaactccacacacatggtagaaaaagaataagggtttcagtaacttatgatgatggtgacatgagggtgatgcattctaacatggatagctctctaccacaaaatagaaaataaaacaactaatgtttattgaacttatttaagacatagttctgagggtttttctttcactaattcacttagtagtcataaaaaatctgtgaggtaaaagataatagtgttctattttatagacaataaaactgataacatttccaaggtcaacaaatcagttagtgacagacccagaaccaaaaatgacatgcatcattatgcagccctgtttcccttcaattga

SEQ ID NO: 38972 - DNA, 2456 bp, Bovine  19866880903525
  misc_feature (1)..(1): n is a, c, g, or t
nttgcaataattaatcactgaataaaatgtgtcctcagcactttaactagtgcccagacttgtttgtgtttgacatggttcatgtaagaattgaaaattagaggcacagtataccacttaggaaagctgaggagttgcctatctttgagtgcttgaatgaaaaagaaaaaaaaaaattaacaataaattagtaacccaaacctataacctgaattaactataagaaaataccaaatttcataaattatatcttttttattacttagaatttattgaaaatgaaatttgcactgcaagagatgaatgcaaaatttaaaactgttacgaaaaacaggaaaaacataaataaggataaaattaatgaaggacccattgaatgaaaaatattgaaacaatttgaaaaacctgtaagtacatttgaaaattaaagagaaaaagttaaaatgaaagaaacaggattataggcttatatgtaaaacaaaagataactgaagtcaattaatattcttaaaattaaaaacaaagcatctataccatgacagtgtttgttttattgtcagtattatttctccatttttctttcaaatagaaaccctagtttattgttttcaaatattcactattctcctacctggttaaatgcctcagaagatcctgattaagcccaatttctaagaataggtctttctgggtataaggaaaatcatactacaaagctaatgatttagttctggaatgggaatattctacaatttgcctgatgggagattttttttttttttaatttcacttccctaataagaaaaaaatgtttatcttcctcaactgaattatgttgtatgtggatattctaccaataacacattaagatatgttaatgataatacaatataaatatactatcttatatattagtatctattatgtataattttatatataggctaccagtagaagacttccctggtggctcagacagtaaagcgtctgcctacaaagctggagacctgtcttcaatccttgggtccggaagatctcctggagaagggaatggcaactcactccagtattctagcctggagaatcccatggacagaggagtctggcgggctatagtccacggggtcgcaaagagtcggacacgactgagcaacttcagtttcaccagtagaattcaacagtaacaatgtttataacatttgttttattttatatgaccagcttgcctgttttggtttactaattgtttttcattttgctgatgtttgaataccatcaacaaaatgctcatcaaatatgagcagctttatatctgctcatatttattctggaaattatacctttatttaaattgtatttaactttttcataagttgcatatctactgttaaaactgataatttaaaaaagtaaacaagtttataaaaaatgagtacgtttgttatgacaaacttttttctctctgaaatattgaagttagggtattactgaatgtcagtaatatttaataaggcaaactgtctttgaaagtacctttacctttgagaatttgtcctttttcagtctggagtttttgactgatatttagtaatatgttgccatggtagaagataagaggtagaatgtatgtaagacgtggaattcaatattgcatattaaggtactttcattcttatagatcaatttttatttatggtttgatataaaactgtcacatcacatatctttcaaaagaggtaatattttgacaaggctggaaattgcacaccaaaatatattttacctacataaacacttaatacacacactttctctctcttcagaatctgaaaattgatcacttagagaaggatgcataatttcaaatatctctattaggtgccatctaatgaacagaaacataaatataaaatatacattgcatatgggaaatgtaggattgtgaatccacttcctaatgttgttaacactcgcagtagcctgtatcccatggctttctaataattgtaatctactttgccccctatgttagggatataattatgttaacagctttcctacgcaggcaccatacattgctattatgaagctaacttcatttaattagcatcgtgtagtaaattagcagttataaggactgctgggtacaaggggatctccattttctcaccatttacttaatcctcagtcaatgttaagattatttctcactgaatttccatagcaaaatcaccatcaccctcctcagatactgtgattcagcatttgtagggatttggaacaaacagttttctccagatgcccagaagttaggattattgaaagccctgtcctgccccttgttggaaagacacaggaatgcagagagacaaagcccatgtgaatgcattctttttctttcaagcaactatttttttttttttaatgacttgataaaaacagtagtattagctaag

SEQ ID NO: 38973 - DNA, 1472 bp, Bovine  19866880986420
  misc_feature (1)..(1): n is a, c, g, or t
naatatttgaaagattctagcatagatgcatgtaaatcacatatttgtttctcagaaatttgaaaatgctttgctaaattatcaagatgcttatagtatggaaatatatattggaggaaggaataaaccttggtaaaatcttgaaactaagtattcaaatgttagtatttccaagattactacaaaaatggctcatataaatacagtatctgcatcctaccatattccttacagtgtgactgtgaactttatatatatatatatatatatatatatataaaagcataataaaaacagatattactttattgacaaaggtccgtctagtcaaagctatggcttttccagtggtcatgtatggatgtgagagttggactataaagaaagctgagtgcctaagaactgattcttttgaactgtggtgttggagaagactcttgagagtcccttggactgcaaggagatccaaccagtccatcctaaaggaaatcagtcctgaatattcattggaagaactgatgctgaagctgaagctccaatactttggctgctgctgctgctgctgttgctaagtcccgtcagtcgtgtccgactctgtgtgaccccatagacggcagctcaccaggctcccccgtccctgggattctccaggcaagaacactggagtaggttgccatttccttctccaatgcatgaaagttaaaaaataaagtgaagtctctcagtcgtgtccaactcctagcgactcaatggactgcagcccaccaggcccctctgtccatgggattttccaggcaagagtactggagtgggttgccattgccttctccaatgctttggctacctgatgtgaagaactgcctcattggaaaagaccctgatgctgggaaacattgaaggtgggaggagaaggggacaagagaggatgagatgcttggatggcatcactgactcagtggacatgagtttggataaactctgggagttggtgatatacagggaagcctggcatgttgcagtccatggggtagcaaatagagataactgagcgactgaactgaacctgatatatatgtacttctgtatacaatattatgtgtgtattttccctcactccacttcctgatagggaaactgagtctcaataatgatcaataaatgactaaaaaagatgtcaatgacaggcctgagtagacacttctggtctcctggcactcaattaaagctgtttgcatttttttatatcaataaatctgtagacccaggtgagtttcttaatgcagagaagaacctcagggcatgtcagtttcagataggagcaataaattgcacgtgtgcatttgaaatgaggacatgtctaccattttctaaagctgaaagactatccttttaaaattcacattttagcagatgcttcacatacctaattattattggttagaatacttaggtagtaaacaagttcgtcagat

SEQ ID NO: 38974 - DNA, 1544 bp, Bovine  19866881072206
  misc_feature (1)..(1): n is a, c, g, or t
naagaataaaattagagaacccccgttaaaaacataatgaagagaaaatgagcgtaactgaaagggcttaagactagatactatgaagacgtttgaacaaaattcttcatacaattaaaacgagttgacgtgtggtatactttccattgttaaccttcataaaggagagtatacagtaatccttctattcaggcctctttcatttggaattcaagataattccaagacagtggtgcaatgttggaaaaaaaaaaggcttaaattcctaaattaatagtttagacaataataaaggaggaatttgaattgcctgcttatgtgtaccaaaataattgaagaacttagaaagacatacatacagccacacagtcttatattttactctgtttttataagattcatatccttctattacatctcatatagtttagtcagaaataaggcttcctaggtggctttgtggtaaagaatccccctgccaagcaggagacatgagtttgagccctgggttggaaagataccttggagaaagagatgacaacccactccagtaatcttgcctgggaagtcccaggatgagcctggtgggctacaatctatggggtctcaaagagtcagacatgacttagcagctaaacaacagcatctgtttgtatgaccataagattggtttatgaaacacttactagatatcggacactatacttagttcttgatgttcatcattttgtgtaatgtttacagcaatctagtgaaataaatatgctcttgttaactgatagtgttcaaatgtactagtttttctaggattgcactgctagtacaaattggaatttgaactcatcaggctacctccagacaaccattttatacgacttccccatcatcttccgactgtatgatcaactgcatattttactgttttatgcaaaaatgaaaagaaatctgttaaaagtttgtctgtgttgctaatcacagataaaatgatctggtttcacagggctctcatgacaaataacctggatagactccttacctctttagtttgagagactatcaatggcatcccactgcagtagggctaaatcccataaaaaggcaacacagaggcctgttttatgtctcctttaaggattccacgatatgagactatctccatgagagaaatgataaaagtaacgcaatattaccaagtaaactgccaggacacccttcatcacaaaacaaagactaaggctgttccaagctctggaggggaatgaggggcagttcaaagagaggaaattggaaggtgaggaaggaaggtgaggtggaggtagttatttccaggatataactggggtggccgggtgatccgtactattgcttgcaactttttctcccaagcataagtagcacaaacattggtggtgcctacagaaagaaaagccatccatatgtaatttgcatttgctcccttttcaattttcagatattcttaaatatgatagaaattataccatacttgtaacatggacttggaacttagaaatacacatatatac

SEQ ID NO: 38975 - DNA, 982 bp, Bovine  19866881105597
  misc_feature (1)..(1): n is a, c, g, or t
ntattatcccatggaatttcctatttcttagaagttaataggtcttctttaaatactgatttctaattcaaaacataaaaatcaggcctacactgccttagttaaaggcatgtgacgtaacacagttgcctgctgaaatcaagatctgtctttatagctcagttggaaaaaagggcaatttaatgacttttaggaagattcctagacaaaaatggtcaataattgtaaagaaaagaacaatactaaaacattagtatttctctaagaattaaacctaaaaatagtgtattaaagctgaaaaatcaaaactgtataggcaaatatagattcaattattaaatgtatattatataaaaatttcatcagtcaccacttaccttatttcagagtgcctgaatatagagcagatatggaatcttgagtcacttaacaaataacttgaagctgtatatgttttatctgaatatttgtatccagcatgaagcatgctgttgttcagtcactcagtcgtgtctgagtctttgcgaccccatggactacagcacacccgtcttcccagtctttcgccaggattagagcttgctcaaactcattaccattgagtcaaagatatctaatagctgttgaatgaatacgtgtaactaaatgcgaaaatagattgtgatttgttgttgagactacaattcgaagttctgttttcttgagaagcataccggagaagaaaaatgtctttagcctaatgtcgtagtatgtcagttcagttcagttcagtcactcaatcgtgtccaactctttgcgaccccatgaatcgcagcacgccaggcctccctgtccatcaccaactcccggagttcactcagactcatgtccatcgagttggtgatgccatccagccatctcatcctctgtcgtccccttctcctcctgcccccaatccctcccagcatcagagtcttttccaatgagtcaactcttcgcatga

SEQ ID NO: 38976 - DNA, 1188 bp, Bovine  19866881113845
  misc_feature (1)..(1): n is a, c, g, or t
nctaagttgtatctgactctttgtgatcccatggactggggcatgccaggttcttctctcctcgactctctcccagagtatgctcaaattcatgtccatcagggtgatctagcagcttcatttatgatgtttaaaaactgtaaactacccagtttcttatcaactgtagaataaatgaattatctgtgacatattaatagaagtaaatattctagagcaatgaaaatgaaaaatctactgctaaatgcaataagatgcattctcacaaaattcactaacatacttcatataaagtatatataaaaaagaactcctataaaatttatattaagttcaaaactggacaaaacttttatggaaaaaaaattctttatagagcatcagaaatcaggggagtaactaatttgggaagaagtattaaaactgggagatatctcaaggaggaattatggtgtgctagtaatatttaatttgttaaagttttctatatgcatgttctactttcataaaaagtgtttataatacatgataatacatagcacttagtgtaatttcaagaacatagcaagtctaaacaagaattttacttgtatagcagagccacagagatgatgtctctaacctataatagcactaaacataaattgatcttatagcaaactttgtcataaggcactggtatagacatttatattttataaaaaatgttttagatgtaaaggtcattattaggcaatttagataaaattggattttgagattgagggaaaaagatccattacttttgtttcttatatgaagatttgatatctcattcacaacttaaatcattatctcacaaggaattactagactgcctagtggaattaccagttaaagagatataaagaatatgtatgttacattattcttagcatttcatttatgagttttcacagatgtcttgaaatgtacattagggaaaatcactttgccagacatataattaatacttttcaaatcaagaacctattgaaagttatatcatacctgaactattttgagcttttctaattaggtatatgctattatttgttttaaccaattttatttttttccaagaaaactcaaacctaaattttctgggtaaaaatccttgaattttcttcaaggacagaggataagggaatagtaacaatgtattataat

SEQ ID NO: 38977 - DNA, 1739 bp, Bovine  19866881126703
  misc_feature (1)..(1): n is a, c, g, or t
natcacggagcatacgtaacctagtacttaactgcagctgccccctcagcccagccaaaagcagcacagcccccccagtagagtcataaatatgatgaagtaagtacacggttttctatgccactgaggcttcctggttttgagaagcagaagttaactgatagaggatattggtgatttcagaaaaatcattgattacgtgctgatgggttaataaatcaggtattaatggctcaaaggatgagttagaaataacaactaaaatcgatgagaagttgatcattaaagggttgtgaataattaaggtagtaactttatgaatactaaatagtagaaggtaatgaggaaagcttacaaggttaaattcccttattttgaatacataattcaggaactgggactccacatacatgtaggcatttaaattactagtaattaatgggagaagatttccgggaatcttgaatgacggaactgattttggttaggtaagtttttaacagtagtgcttaaatcatgttgtatagaaaaggtaatccttattgtgcaatgggaaattatcagataagtatagatttcctttcaacagaagaaaaacttccagaatcttaccttaggaatagcagctttataaattggaaacagcacctaaatagatgaaacaagatgattcacatgaatgcaggaaagaacaactaaatgttgccaatttggcaaattggcctatatgcaaattagtcatgttttaaataaagaaaacacatcaaagggcatgtctgttcatttattttgacattttataatttagtctaattatttgtgaaactgttacccaataagctgccctttggtatagtttgtgaaaaataatgacattttactcaacgttcttacttttactttctatggtacatgcaggcaagatatttagtggactaattaattaaaaattgaaatgtcaagtcttacccgtatttctgtgcattagccaaagatacatacggactagaaatcagaaaattcaaagtgagtttaatatgaatttccagagataaatctgtgaaattaattctctgagcattgtatgaactacatattctgctgaattatttgctttacatatcaaatatacctcccttcagactaaggtgtctgattttgccattttacaaagtttgagataaactttgtataatcttacatctcagtgttctacatcttttgttgatgacttctggccctggaaagcccaaaaggagatttttattttttaagagggaatttttagctctgtcttagacaagtcttcttttaatatcatactttgcagatgattgttttaagaataagtgattatggttttgtcttaaaattgagctggcttcatttttatataacttgctttataggaaatatataatttctagtttgtcaaggctgtaaacatattttgctcagtgcaaattatcaagaccacagacaagtacaaagcagcattggctccaatttgcttttctaagtaaacaaagcctgcagcacagtgtttcattaatgagggatgaatctgagtcttttcctgataaatcaaggggctgtgcttattaaacaaagatgatgttattgattcaaagggcatgctctttaagtagttttttttctaattgtttgtgctgatccatctacattttatattttacttcccattttagccacacacattttataaaatgcccagccaa

SEQ ID NO: 38978 - DNA, 1603 bp, Bovine  19866881132414
  misc_feature (1)..(1): n is a, c, g, or t
nttggtgttctttggaaggaatgatgctgaagtggaaactccgtaactttggcccctcatgtgaatccttgactctttggaaaagactctgatactgggagggattgggggcgggaggagaggggatgaaagaggatgagatgggtggatggcatcactgacttgatggacgtgagcctcagtgaactccaggagttggtgatggacagggaggcctggcgtgctgcaattcatggggtggcaaagagttggacacgactgagcgactgaactgaactgactgaatctatagtaatcactaaaagaataggaagagaagctatagaaaattaaccggtgaaaaataaaatagctaaagcagcacacatgcacacacatacacacacaaacagattaacccaaaagaaagctttacaagagcaaaaagcaggttagccaaatgttgatagaaaagaagtattagacggcaaatatgaagtaaagtctatctttataaatacatttgataaaaatgaacaaaatacttcaaattaagaataagattgttagattagacatttaaaaacttaacaaatgctactcctaagagaaacatcttaatacgagactatagagtgattgaaatccaaaagactggataccatcaatagataaaccatgcaaatataaagtaaaagaagcaaattatagggctatataaatattatagacaatatatattaaggccagagtattcctggagatacaagagtaaaattacatagtgataaagaaggaaatcatttggaaaatatgaccattctacatttttatgcaatcagtatgcagattcaaaatatgtatgaaattaccattcacaatacttcataagttgataatacctgcagttaaaacatatcagtaaggacaaagaaaatacgaataacacagttaacaaacctgacctaattaacagacctacttgtcatatagtgtgcttgtatataatgaacataattagcaggcctaattgtcacacagtgtgccctacatttaacaatgacagaaactcaaactgttgtcaggcacacgtactgcacttaccaaaatgagaggagatgatctttgtaaagtaaaacgttgccgtcttacctgggcattgcttcatgctcaatctaccaggtatcctagcagaactcctattaacttacgagtatatcttgcataaggaaaatgagcaaaattctatggcacttttctgtcttataacattgctcctgcaattaaagaaagctgcaacctcatgatgaatgtctcaagggctgttgtttttgtcatggaagatcagttatttcttttattaaaaaaaaatattatatgtacagaaagaggaaggaaaaaatgttttcctctaactgaaaaaaaggtttacttccaagtatttatgttgctgatttcttctttcagctgtgcatatataatttatatttcctaaatagaaagtctccttgatgttgacattaggatgaatgtgcctatcaggccattggcccaaattgccgttaataatgtgaaggtcatagggtctactattcattggccagtgagtattgtatcatattat

SEQ ID NO: 38979 - DNA, 1181 bp, Bovine  19866881135064
  misc_feature (1)..(1): n is a, c, g, or t
nttaaaattgaaatgaatgtattgtttatattaccacttagaaacatttttactgtaaaatcatttatcaaaggagtggtccattgagataaattcagatttcacagagaggtgatgctacaactgaagaaaggaaaaaaacaaaaaaagttggggggggggatcaaatatcaatttaggtggatttctatttagaaaattataatgattaacctagtttagctcataactgccatgtattaaaacctaaaatacttggtgctgacaaactaaagtaaaaaaaaaagtgaaattaatttttaaattaatttttaaaaacttaaagcattcggataaagcttattttcaacttctatattaacttctaatgtgaaacttcatacttttgctgtatgttgtttgaattcaagctaattatataattttaaatgtttattgatttcaatatgaaaatatttataggatcaagagaaagtccataacattatttttttaagctggcacaaataattatttttatatattgagagttataatagtatacaatgttaatgaagcatatatgaaagcatctattgttcttttcttcaagaaatagttaaaagggtgtaaatcaaaatatgatttgatttctttcattccctgttatcccctagtctctttaacatattgatctagaaagtctcagattctttttatttacatgtttattgaggacaacatagaaaataacaatctattaaggtatttatgaaatcatctttacgtgtattgaaagactctaatctaaatctatttttatcaaggagccgcatagagattaatattaggctctggtgccagaggctagcatatacattcttccttcaccacgtacaatctgagagaccttaagccaactaactagactctctatgcctgttttctcaactgaaaaatgctgcaaagtgggaatgagcctagaccctatctccttggctttatttttttaacattaaacctggcataattgtgcatatagtgtgttgcgcagtacagacatatagtaaacaccccaaaatagcttataagttgagttccagttctatttttaagagggagtcccctttgaaaatgggcagtctttattttattcatctgcattttaataatagcataatctccattggaagggaaaaaaa

SEQ ID NO: 38980 - DNA, 839 bp, Bovine  19866881297083
  misc_feature (1)..(1): n is a, c, g, or t
nctttaaaaaatatatagtttgaaggaagtgatatgcatttattaagtagattcagtactactcattggcattttaccagactgatttcatataacttaaataaagttttctaagccaagcagatagaaaacaattctcatgtcttaccactttattaagttcttctttttgtcttaagactttgcttaaccatgtatttcactgtgaggttttattcagcatgtatagacaaaatcagttacactcagtatgaacttgaaactctctcttttatttataagttctttgaaaatattttcgatatcctggattccaaaataacgatgatattgacagaagtaccaacaaatagaaaacactgtatcaatatcaactggatttatttgtacccttggagattatgaacactattctcactcatatttttaatatgatttgatacagtgaatggaagaatggaactcaaaagacatcagtttgaattcagatactaacacttacaatcttgggaaattggacaatgcattattactttacacatatttccttatcagtaaaatagaagaatatcctgattcttttagtgtactcacagtgttatttgggggatgatatataccagaatatagtgtacgggcaccatacccaggaatcacttggctcccttctaaacaaatagattctgggaccccagaggtgactaatatcatgacatctacgggtatacaccaagaacctgatttttaactaatccccctgctaaagcttgattgacaatttcaatgtcacttgaattcaatgtcaattcaattcctcctaaggaatactatgctaagaa

SEQ ID NO: 38981 - DNA, 2892 bp, Bovine  19866881325079
  misc_feature (1)..(1): n is a, c, g, or t
nttgtttgctcgatggcaagaaacattgaagaaataaatatataatgattaaaaaaattttcaaatataatcacacgaaaaaatataacagtacattgcagtagtgatcaaaaacgctataagatataaacatttgaatgttatagcaaacataacattctcaaacctatagagactgtatagcaaacagtctctataacaaagagttatagagactgttgaaaagaaggaaaatgactgagaattttagaaaagtaaaccactgtgagggtcttcaaatacaagtatctgatgcaaataatcaactaagtgtaacatatttgaaagaatacaacttaacaaacaaaattcacaactattagcacgtgaatattgatcttatacttttgactttcttttccacctaaaatgaatatgcctctcacattatgctaatgttgaaagaacgactaacatttcaatttctatcacatacagctagacaaaatatcctagaatggggaggcctcttactaatcctaaatcacactgaattgttgaacacctattgggcttctaaaataatctgtaatcacacttcttatattttacagaaaataatatttatgttatgatgtattcctgttttttgaagtggaagtatttactaacccacccttaacaaggaccgattaacagaaatcgctggaaaatataacacattttcattttgttccaactcctcccatgccatgagtgtctttccaaaagggaaaaaatgacaactttcagtaaaaatgtactttgacttgcataagaccactctgtagtccaccacaatgattaaagcgaagttatatggaagggatcaacacagtataagaaagagcaaagtgtgaaaaatgcagttacttactctgctgccacatacatctggatgagaaagtaccaaaacctaaaattctacatgattcttgaaagtatcacagctttcattaggcaagtgattcatgcagagtaaatctttaaaaacaaaattctgaaccagcaataggcaatagtcatgacaaatatggttttggattgaagctctcttttatctacttcatcatttttctgattgctggaggtgaccagaagtttagggagtatttaatcactgacaatgaggaaaggaaacaaccaaataagtacaaagagataactgatacaatgtacgaaatatgccactttcctccatgtggctaattcactaattatgaaagttccttaagattttcaagaccaaagattcaattttttcatttttcaggacatatttaacaaggctgatttgctgtctgttatagggtgtacctcgttatcttttaaatttgcataatcacagaatgcttgattaaggaatggaagctttgagtgtaatggatatgcatgcatgattagctgtaggaggggatctgtaattatgtggtgtataaatatacatctatatactttaaaccttcataataaacacaacaaaatcttgacatttattttaaaattattttagtcataacttagaaaaataatagtaggtttaaaagagccactggaattttcaaccacactcttccagaggaaaaattcacagtatgatataaaattaatatttaaagtatacaatattggtgatttttttgaaaagttagatggaatctttgtttccccaggtatttttgtgctgtgagactaatgcaaatgaatatcccaattcattaggcatgcagagtgaatactgataggatgtgtgtcttaaatttctatagttctcatccatctaactgaatccagaattggtacataatacacttttccgctccatcacttcccaccccccttatacatacagatatccataagtacacaccacaccacgattgttcccaaatatcagtgtgaacttcaaactcaccaattggtaagaaataagttgccaactggcatatgtttatgaaagaagaatgataaactgctactgaatatgtttcattgtagatgtaaacaggcaattaactaaagtcatatttcagccagactctaaatattctaataatcattttataaaatttatctttctgagttgaaatttttttgtgtactatattactgtgtgtgcacacatgctaagtcactttagtcgtgtccgactctttgtgaccccatggactgtagcccgccaggctcctctgtccatggtattctccaggcaagaatactggattgggttgacatgccctcctccaggggctcttcctgatccgggttgaaactgtgcctcggaagtctccttcattggcaggcgtgttctttacccactagcgccccctgggaagctcctaaaggactagtatttatctgtttatctgggtgcggtccataaatatactttatatgtatgaatatttacttcccaacaaaacatgcagtgtagcatttatctctatttttttttctatactatatatccagaacaaaaactgacaactgctaataatgtctttttccccccataattccttgaggcatttcacctgtgagagtttaaaaaatatattttaaacaaattcatcattttaagggggaatgtaaaaatatttcacaaaattatttcttatatttcttttatggatttctttctgaagaaagaaaaatcactctacacatttaattaactcacttgctgccctctctattatcatgctccacatatggcttattttccagcagtccggtgttttactgaagaaaacctaataggaaatcagccttaaatgtcatcttaatttcccacctcactaaagggctcttgtaatttgcaaaagtgatagtgaatttcttgccaggtcgttaacggatttttctggagtgagt

SEQ ID NO: 38982 - DNA, 1214 bp, Bovine  19866881350087
  misc_feature (1)..(1): n is a, c, g, or t
ncctgtcaatgtatggcaaaaccactaccagtactataaagtaattagcctccaattaaaataaataagttaaaaaaaaaagagtatctcacaaactgtactaacattgactaacataaactctactctgaagatgtagaggagtcaccacaatttatagcattacaaaaataaaataataaacatggattaactattggattagatgtttatattgtccgttggaagttggcaaccatggccagactttatcattctacttttttcctcttgaggggcattctacctgatcaccacattgaataccaaattcactttaaaatttgaagtacgtattggtgcactcacatcctaattctgaattgaggcatggtaatttataaatatcctcaaagcaagagaaaatacatcatacggaaatcatatctaagttgggaaaaacaggaaaggaagtaacatttctttttgacatctagaaacaggatttaatcctaacaaaagctgtgctttaagccttttctagctaaacttagcaaataagaaactgttaatgaattatcttactgttctctcacaaaccaatcaatagtaactccttccctctaaagataattaaagttgatctaattagattgctttcacttacaaacatcttgtaaataaagttaatttattatcacagctagttcacctatggggattattgtaccataataatggaattattgctgtaaatcttacaacaaactatgtacagatatctgatattttctcttaaaacttgatttttctttgctatgagatataaatcataaataaatctcattatctgtggcactagggcacttgggcaaagacatccaattaatgttaggcaactatgtatgaatattttagtgtattacttaataatatatacaatgttttatattcatataatgaactgtaaagaattactgtacacataatcttactgttataatcaaagtgaaagataaagaaacttaaaattgaaatatttatgtgtgtttttctttgatgctttcaactatttaataaagactcgatattttatggagaagacaatggcaacccactccagtactcttgcctggaaaatcccctggatggaagagcctggtaggctgcagttcttggggtcgagaagagttggacaagactgagcgacttcactttcacttttcactttcatg

SEQ ID NO: 38983 - DNA, 962 bp, Bovine  19866881387048
  misc_feature (1)..(1): n is a, c, g, or t
nattttcattttaagaggcccatgttctaaaaggaagcttttctcttgtcctcccaattaagcaaaattatttcttgcatcagaattaccatgaattactaatcatcctaaaattgcaaaataaaggtggtgatatttgaactgagggaatataaaaaatggtgctcaaaaatgaaaatgatccatatattagttcattatttacttaaatacacaaaagtggatagaattctgttttggatagttaattttaattccaataatttaaaggagtgaaaattagaagatttatttttgtcgtataagtctattatcttagaatccttaattggcattttattcatttcatttttatcattatgcccaagtcatgcaatgtatttccttcataattattacctgtatcaaaactggtttggaagatctttgaactcctgttttcattttcttttgaactctacttgtctctttgatcagcgtattgctcttgcagcttccgcctgatgtaaagcagtttgtatggctgcataccttgtttctgtggcccaaatataaaaagccaaatgacagaaattaaggaaagaaagtctttggtgcggagtggacagcattcaccgagcatttcgattaatgctagctctgaagcctcctgatgaacaatagaggtttctcaccatgatcttcattagcatatctttgtgacttgcaagaaataatttgcacagtctcagatttaatggtaacccgaagctcccttattctgtaatagctttctaaccacaatcaactcatttgctttttttttctttttgattgacacacagggtgcagaggtgccgcccatttccctcctttcttccgcttccacttgctagacaattaactagaaatagattatagtaacttgactcattctttatatggtactgacaatgtattttcttagatggcttataaccaga

SEQ ID NO: 38984 - DNA, 1458 bp, Bovine  19866881396576
  misc_feature (1)..(1): n is a, c, g, or t
ncttattattggcaccaccggttttggtgacaaaaaatactgcagtttatgacgttcctcccagtagaatgtatgtacatatacacatacatatatatttatttctccccctcaaaataagcccttctagcaatatcacattaatttaagaatgactgttctttgagtatgagccactatcaaatgatcaaataagtttttaaatagtaattgcacataataaaaagaaagacgagtttattcttggacccagctggctagcaggcatttattatctgtgatacttatatatgtcagtgtgagttcatcaaatctaaaagattttttgctttcacctgaaataatcatagaaattttgagttggagctgacctaagacataaccttgcttaaccacccacctaaagtagaaattatcagtgtcagtatctctgacaagtggtcattcattatatgcttcaaagtactacaagtgataagaaaccccgtgctctgtgattcagataattttattgttgaataaaccagttttctaacaatattctcctgtatggtgaggcatctgcatcttcttaatatatatccattgaatatctgtttcgtcttagagctctaagactgtggtagctgttaacatattcctctccctttgtctcaacttctgttactcttaatcctatctttgctctttagacatgtcctccaaagctgttgtgtacactgctcgccatgttttggatacacgctgatttttcaatggacttttagaactttggtttgaaaacgttattggatttttccaaagtagacagacttcaggcttagatactgtctgtcagtctttcaaattctgttattccattgaagaccacgctttgtatgtattattatttaaatcatcttgttttcttaggcctcaagttagactttgggtttatttcattttattcagtgtgaatttagtattcaacagactgccctttaattccagaatcgcccccgcccgagccccatattatttgcagttgacttttttttaaacatgaatgcaacatttcacagtttgcaatgtcagggcatattattgcactaattttaaaattgtcttatgcaatgcagaggtagttattcctttgacatagtataatcttttaaaggttgtattctgagtcttcatccatgtcatctatttaaaaaaaaaaagttctccaacaatgagcccagtgactggtttctgtggcatattttaagaagcctctttccattaatcatcatacataatgtagtatttccttgacttgatatgaagtctttttgttacttgaataaatgtttcctgaaacaacacagaatatcattacaatttctaggcattttctcattatacctgttccaactcaagcatattcatacacgttcagttttcttttaacacacccattttagtttgaaggacatg

SEQ ID NO: 38985 - DNA, 1041 bp, Bovine  19866881430905
  misc_feature (1)..(1): n is a, c, g, or t
ntgatatcagatctcaatcactaacttaaaaactgaaggctactatcagtgcaactggttgtgactgagataaacagaaacttaactatgtttctgacagcttattgctatctcaggggaacataaaaatcaataattcagtatgtattctatagtcctttagaatttttatttgatgaaaaagtgcagatctgagacatgggcaaattaaggtagattcatattctgacatgcaaatataatgctaaaatgcgtgattaatagaccaatgccaacgagaaggaggtctccagggaagaactataggaatttgcaatattttccaatagtgcctgggctcatgacatagaagccactcttttcatatttgtggatgacagatttaggaggattatctaacagtggcagagttcaaaaattttgataggctagaatgatgaactgaaaccaataaagaagaatttgacagaaataaatataagattctccattcagattaaaaacagtttacataaacccatattcagagagttctatcctgaaagcaactcagtaaaaaagactggatttttaaattggtgacagtcaatgtgacacagaaatttagaaaaaataaataaatcccaggctgctttttacaaggctaactggcattagtggtgaagaatacccctgccagtgcaggagacttaagagacatgggttcaatcgctgggtcgggaagatcccatttgcaaatcactccagtattcttgcctgggaaatcctagaggagcctggtgggctaccgtccatggggtcgcaaagaattggatatggctgagcacccacacacacacacacaggctgctttaacagctctgttaaatgtatgaaattccaatatggcaatgtttttcaaagtgggagtcaagatccattattgagtcttaaatcaattaatgggtcctaatgaccctgatcagagaaggtaatggcaccccactctagtactcttgcctggaaaatcccatggacggaggcgcctggtagggctgcagt

SEQ ID NO: 38986 - DNA, 749 bp, Bovine  19866881479668
  misc_feature (1)..(1): n is a, c, g, or t
nttgtccttgagagaaaatatcatttggccttggtaatgcaattaatctatattgaagtaaagatcatttattttttaatggactgcatacataaaacccctttttagcacacatcttttatgtttgtagcttgttcaattgtttactataaacaatggttggaaaatagaatttctttaaaatgaatgtaaagctaaagttattaccactttaaatatgtcagtggtattgcctgctagaatgctatggaatcattttattagtttatggaactattgttagaaacttttcaaatttaggtaagcattttactgacagtacaattgcattaatatataaggatgcattcaaaataaatttcatattgccagttcaaaggcaaactttgaactgtgaaatatatattttgaacatgtgaaatatatatttttatcagacaattatactgtaaagaaatgaagtaaggaataaataaacttagcatctgttagagcttaaacctatcaacattcttttcagtatcctttctatgcattaatgtcatatgaaaagtctttagttaaagagtgaaataggtggattttttggactcatatctagtttaaattttgagaaaaatgtagactattaatgatgaaaacttaaatgctagagtagcttgctagcaaagaatatgtccacaaaggaaacgtacaataactgaatcacacttcgtattatttttaaggaagaacttagatttacttta

SEQ ID NO: 38987 - DNA, 738 bp, Bovine  19866881661452
  misc_feature (1)..(1): n is a, c, g, or t
naaattattttctgtaaagtaaatagataaatttaaaatcataccattaaaataagatgtaaaatatctcataatttatgtttacaggtcaaacagaagtataagtctaattaagtgaactgaatatacagaagattaattggtgaagcagctcaagactacagagtttgttagtaaatgtgataaatattacatattttgagaaaactagtttggtgatggaaataaaaaaggaaatataataactcataacagcatattccataatactgttaattcagtgaagagtggaaaacttgaaagcaactgacaaaggtgacttttaaaaagagggagcatggataaaattggaagaaagtaatgtggagtccagctgctaacacaaaggaggaaacagacttagaaacatttcatacttcttggcatgctcctactataaggttttcagtattttagttgttgatgttccgaatccattagggttttactttttggcaaggtaagaacagaaaagacttcactgtgccactataaacaaagtttaagtaattatacctcaaaagctttccaaaaaggatttctcttctccggactttgaaacagggtgttggagaaggcttcctggtgtggtatttctcagttttcattttcactttggctaaaaggcctatttttgcactgcctttttcttattttgatagatccaagttggtttcatttcttgagtagcagattact

SEQ ID NO: 38988 - DNA, 834 bp, Bovine  19866881915798
  misc_feature (1)..(1): n is a, c, g, or t
nataacacattttttcttggtacgcaaatctagaacacaagcacagctcaccagccttgagggcaaggactttgcatttgatctttaatggcaccacatagtccctgacacagaagagatgccaccagcgtttgtggaatgaattgggcaaagttggccaaggtttcaaagttcacacatctgaattagttttatgaaactaatggagtttgataaaattcttcagtattactacataactgaaagtgatgacaaggacttccctggtggtccattggttaaaactctgcccttcaaatgcagggggcatgggttcaatcccttgtttgggaactaagattccacatgccctgtggtatggccaaaaaaaatgacttaaaaaaattgattacagatccctgtcctggagtaatgtccaactggtaatgtccaatccatcatagattgataatattgtaagtcgaaaaatgcatttactacacctaacctaccaaacatcacagcttagctcagcctaatttaaacatgattagaacacttactttagccaacaggtgggcaaaatcatctaatgtacagcctattttgtaacagggttgattgactatctcatttaatttcctgagtactgtatttaaggtgaaaagcagaatgttgcctagatctagaatggttctaagtatatggctgactgggacctgcccagcatcaagagagagggtcatacgacatgttgctagcccaggaaaagatcaaaaatccaagtatagtttctatggaatgcatacagttaccataccttcataagtacaaaaatcacaagtcaggaaccat

SEQ ID NO: 38989 - DNA, 1118 bp, Bovine  19866882016064
  misc_feature (1)..(1): n is a, c, g, or t
nctgtggttccatgtccctctagaaattcctgataatctcttattctaattaaactataccagcaaagttccttttgacaagtagatgacacatttctcaaattctggaaactatgatgctgataacaaaacccttataggtttttaatatagaatcaaaagctatgtaggtagcattttttcaactttattgtgttaagtataagattatatccatgaaaacagaatgatctgatcatgaaaatagcagagattttaaaagacattgccagtgaaaacacaaactctttatgtataggatatatttgggcatatgcatgtctatgtggcatatatttagccatggataattatttgaacatcacagagcagcacagcatctttctcaagtccttctgtttctatagtcttacctctattgctgccaccctttgaaaaccatagaaactttttgctgttaagtattatttggtagctatagctaactttgttttaatcaggaataagtggtaatggcattagctgcttgtgcttatagtatattgtgatacttaaaaaaaattaaaatattccaacttaatatttccactgtagttattttaagtattaccttaaagtccattttctgaaatacatatgtgatacttcatttgtacaattcttttgtgcaaatgtataccagtgtttcaattaaaataattataagccaacagataaaatatatgtgtacttaaagatggacatttcaatttgtgattctgaaacactgatacatctatactagaaaacagaaattttttgcatctaatttagtgatatgcatgaattatatttattctgggaaatcagacaattttcaaaacttatctgtcttataaaatttcaattaaagtaccctcagttataaattcaaattcctctgaaaaatgaatgaaattaccaccaggaagatgaagcggaaaacctcatcttcttgcaacagtgacccaatacataggaaatgactcttctcgatattttaggcatagggcacatttataagtcacagtatcttgttcattattctgaagtacagctctcgtttcattttgttacatctcctaaacattttcagaact

SEQ ID NO: 38990 - DNA, 1856 bp, Bovine  19866880201760
  misc_feature (1)..(1): n is a, c, g, or t
natacaggaaagtgatgaactggaaagaaactctggtatttcctccagaggtgcctatatctgagaaagccaaggacttaattcttaggttagtagttaaatctcttaaagaggttatggtatcttaaggcctcacagggacctaaaagattaaattgcctatttcagttttgtgggaagaaaaagactatcactgatctatacagtttaagaactcagtaaagaaaaggcattttggttttttttaatgcagattcttaaaaggtaatattcaggggaaaaaaaaagagttaagagggaagaagtcttatattatttcagaggtcactcctgttggattacaatgactttatcccctaaagagaaagggaaaataaattcttagtagcagttcatatcacaaaagtctatgtaagaaaaacaccaatacagtatattaatgcatatatatgaaatttagaaagatggtaatgatgaccctctatgtgagatagcaaaagagacacagatgtaaagaacagactttcggactcagtgggaggaggtgagggtgggatgatttgagaaaatagcattgaaacatgtatattatcatatgtgaaatagatcgccagtccaggttcgatgaatgagacagggtgctcagggctggtgcactgggatgaccctgagggatgtgatggggagggaggtgggagggggcttcaggatggggacacatgtacacccatggctgattcatgtgaatgtatggcaaaagccaccacaatattgtaaagtaattagcccccaattaaaaaaaaagtctatgtatgaaaccttttctaagcaaaagattcattctttttctcaactaagatgaagcatttaggttctattgtggattcctagaaggaatatgaattgggacaatcttataaaaaaaaaaatcttcaaactgtctttgacctttgacccagcaattctacttctaggaattttgcatatgcagataatcagatgtgtgtaaagatttaggatatattatgttatcttgatactgtttttagtgatgaaaggttgaaaatcatctaactggcaatggtgaagtagctaagtaaattgtagtgtttccatgtgtaaactttagaaaacaaatgtatagaaaaatagttaaatgactttgggaaatgttctcagtatattaagtgaaaaaaaaaataatggaaactccttatcaacaccatatttttgaaattatagtaaaagactggaaggaagtagcctccaactgtttgcaatagttatgtctgaatagtgcagttatagatgatttctgtttttcctcacatttctcacaatagagttaacttcagtaaacagaaaaaaagatgaaatgttggaaataatgcagagtacttgagatgtagtctgcatattataatttctgtgttcccattttctaggttttgtattgattctgaaaatagaattgggaatagtggagtagaagaaataaaaagtcatcctttttttgaaggcgtcgactgggggcacatcaggtatgtttacaggctttgagtgggataaggccgtgtgagtgaaaactttctactagatttggtgattaatttacctctgattctgattgattaaatacaagaggtaacattgtggtcatgtgataagttagtgttttctggattatataaatgagtgagactctagtggccatagctaaatgactcattttatgtaacatccactttaagaaacaagcacatactgtgccagtttagattttgatatgcaaagttacatgatgaaggctgttagcacaacaaagatgtattacatttaatactggataactattt

SEQ ID NO: 38991 - DNA, 2550 bp, Bovine  19866880628355
  misc_feature (1)..(1): n is a, c, g, or t
ncaagaatactggagtgggttgccattcccttctccaggggatcttccccactcagggattgaacccaggtctcctgaattgcaggccagattctttaccatttgagccacagggaagcccaatgaagtggtttggttcagttcagttcagtttagtccctcagttgtgttcgactctctgcgaccccatggattgcagcatgccagacttccctgtccatcaccaactcccagaatttactcaaactcatgtccattgagtcagtgatgtcatccaaccatctcatcctctattgtccccttctcccgccttcaatctttcccagcatcagggtcttttcaaatgagtcaggccttcaccatcaggtgatcagagtatcagagtttcagcttcagcatcagtcctttcaacacatattcgggactgatttcctttaggatggactggctggatctccttgctgtccaagggactctcaagagttttcttcagcaccacagttcaaaagcatcacttcttttggcacttagctttctttatagtccaactctcacatccatacacgaatattgaaaaaaccatagctttgactagatggacctttgttagcaaagtaatatctctgctttctaatatgctgtctaggttggtcataacttttcttccaaggagaaagcgtcttttaatttcatggcttcagttaccaactgcagtgattttggaccccccaaaataaagtctctcatgtttccccatctatttgccatgaaatgatgggaccagatgcccatgatcttagtttttggaatgttgagttttaagccaactttttcactctcctgtttcactttcatcaagaggctcttgatgaaatgaagtggtaaattgctgtaaatagacatactaaggagtttagattttatcccacataatgggaaaccactgaaggattttataaagggatatgatataacagatttgatttttagaacaattacttagtagcaatatggaagatagataagacaggaaaatcaataaggctattatagttattctgacaaagacccatacaggacaatagcagtaggaataaagaagagaaaatagttttaacagatgtttaaaagctagaacttaaaagatctggtgacttatcaggggagatagggagggaagaaaaaagtgtcattttcaaggttcatgacttcagccactgaatggaaattttcttaatggcctttaagtatatgataggctcctgagcatcagatataaaatgacgtattgcctgaaggcaaagagatatgagacgtatcactttactgtatcatcatcctactcaagaacagctgcatactgcctaccacattaagtgaaaaaaaaacattctatgtatgtatgatacacaaatccttcttttttcttgcccctttcattttaatgcccatatcacacccccagggctaacactagatacatgtacaaaaactgtctttttttcttgtttaaagatttttttttttaatgtggaccactttaaaaatctctattgagtttgttacaatattgcttctatttcttgttttggttttttggcaacaaggcacctgtgagcttagcttcctgaccagggactgaaccatacctcctccactggaaggcaaagtcttaaccactggaccacctggaagtccccaaaaactgtcttggaagagatatatcaaaccttctaataagtttctttactaacaaaattcagactggggaagttattcccaatcaagagctcagcaacagagcctttagaataaaatacatctgggtgtctcctctggagattttgactctgcaagatctaagttatctgtaacttagaaaagcttgacaggtgagtttgatgaaagccccagctgaaaatcagttatggagacagataaattttcaattaaaagttaagttttaagaactagcagctaaagttcaggtttgatttcatctctttgtttcctaatattttaccatggaagttgaataaaactaagtaatatgataccatgaaaagaatgtgaaactctgaagctgcagttcaagtctgagtttcttgggttcacaaactctgtgaccttgggcaaaatacttgatctctcctttaagtcttaatttctcaggggaatgaagaaagtataaaggttatataatgaagaggttgtaatagataaattttgtagataacttctaaaataatatagaattacaacacattttctttaaatatttggaaaaagaccacatagtcaaatgaaaaacaaacctgatcaacatatagcccaaatcatacatccatgaaaattaagtacctcaaactgtttcaaacacatttcttaaactttgggcataattattgattgttgattattaataatcttattaataatcattaaaaagctataccagtaaaaaattattgctaacatttaacaagtatgctacattttatattactgaaaaatgaatttgtttgtaactctgtcacttacttttttaag

SEQ ID NO: 38992 - DNA, 1529 bp, Bovine  19866880628356
  misc_feature (1)..(1): n is a, c, g, or t
nggactaaactgaactgaactgaaccaaaccacttcattgggcttccctgtggctcaaatggtaaagaatctggcctgcaattcaggagacctgggttcaatccctgagtggggaagatcccctggagaagggaatggcaacccactccagtattcttgcctgaagaattccatggacagaggtgcctagtaggctacagtccttggggttacagagagtcagaaacagactaagcgactaacccaccccccttcattaccagctgctcaggaaatgtaggttatataccctgtaacttaatgaacagaatatgttcttccataactttgcatgcatgtactgttctctttgcttataataccttttcaaattgatcagccttgcaacttcatatgaatcctctaataaacctcacatgtgacctctcttagacatctcctcgcttccttttcccttcctccttccaccaggttaaccttcctctcattgtgtttatggttattgcctgtatgcatgtctgccaagctcgattagactgtgtggtcactgaggacaggacagtgtatttcattcatctttatattcccagcatctaatacagtgtctgtctggcatattagctttcagtacatttttaaaaaactgatctgatttgaattgaattctttgacataactcagttaaaagtttaggtttggtaactaaattggttgtcagtaactctttaatccattacagatatttaacctattcctattttttataatttttgagtaacttggattttttttaatagtaaaactgttttccgttctctagcacaatgccttacttgtaatcatgagaagtggaatattacagtgattcatgtcctaggcaaagggagttataaataagatggtagaaggtgacatatttgtgtgtttagtgaaacagatgcttcattgccttctgttacattggaattcactgaccagtgcatgaagtagctattgtgtttttctttgtattgaattcatgcttacaatgagaagaaacatcatagattgaaataaattattattttgtgggttttttttttaccatgtttctatgttccttgcaacatgttctaccactgagaagcggtatgatttgagacagattatttaattgctctgggtttcaatttcccattctgtaaaacagatatgaatagtactacctcatagggttgctgtggaagttaaatgaaccaatatatgtaaggtgctttctcatccccatgccactttcctcaccttggccttcattccagccctgaacgtactaagcttgttcctgcctccagcctttatggatactctttcctgtgctgggatcacagccttcatctgacagctcccactcagctcaacattccatatactaggctggcagttccaggagagcacagtgcctgggacagtagttgtataacaaatatgtactgagtgagtgaataatagagctgatatgggacaagagaacaggatcacgggaatagaag

SEQ ID NO: 38993 - DNA, 756 bp, Bovine  19866880635620
  misc_feature (1)..(1): n is a, c, g, or t
natcaaaccagtcaatcttaaaggaaatcaactctgaatattcattggaaggtctgacgctgaagctgaagctccagtactctggccatctgatgtgaagaactgacacattggaaaagaccctgatgctgagaaagattgagggcaggaggagaagcaggcaacagagggtgagacggttggatggcatcactgactcaatggacatgggtttgggaaaactcaaggagatagtgatggacaaagaagcctggcgtgctgtagttcatgggctcgcaaagagtcagacacaacttagcaactgaacaacagcaaacaacaatgacatcagaagagaaggcagtgtaatgaaagaccagggctttgggataaggtctagttttgagtccctgttcttccatctgcggcctgagtggacatagacaagttccttaatttttttcagctggaaatcatagtatatttttgagctatagtgagaactggaaacaaactatgaaaactgtctggcaagtgataggcagttaattcctggaagttattcctattattctagtcatgcccagtaatctacataatctcttggatctatttatggttgcttctgacatttctacttttgccttttttatatcggttatgaatgtacttgtaaaaataaacctggtgtcttccaaatgcaaggggggaaaacccaattaagattacattacataaaattgagtacggaattcaagctgtgagataaagtttaaa

SEQ ID NO: 38994 - DNA, 917 bp, Bovine  19866880666549
  misc_feature (1)..(1): n is a, c, g, or t
nttatacaatttaagaaaaaatcagagcatgctttagtccatgcaggaactgtagttattacaacagcagcaaggcactttcctctataaatcaccagtatcaaatcaaaagtgtcacaaagctcaaaggctgaaaatatatgcagaaatataactttccaaactaagtaaaactttctgtgattcagatgcgacattaagaccctgttgtgtaggccctgttattttggaccagcatatatagatttttaataatgtcaaattattcttcagcagaaacttcccagcttagataataatcctctagaaggcaaccaatcaatgtccttctcattatcatgatcgtcactgtcatcatcacagccgatctgaagtgccaggtggtactgtgcgcctcctctcaggtaacctcacgacaaccaggggcggggatactatttctattttcctgcgaaactgaggctcggagagatgaagtcatttgccagaggcctcttaactagtgagtagcagagttggggtttcaaccctgtctgactccagagctattattctgttgttccaaaatcatgtctaccttttatgaccagactcaagcgattaaacaaagctaaagccaaaaaataaatctgtaacttccaaaaggcaactccagagaaggactggccttttcttacatgatcaccttacttattcttgacaaatcttaaattgctgtataatccctagttttaaagaaacttcaaaggatcaactctctcatccttctatcaggaacaaggctgtgctaaccttcctccactgtgctaacctgacctctggtccacatagctatagaagctgtttaaaaagtttcataatcttgctgggaacctttggtgtcctcatttactgtctaaatagggaaaaagtatcag

SEQ ID NO: 38995 - DNA, 1379 bp, Bovine  19866880675201
  misc_feature (1)..(1): n is a, c, g, or t
natggtaaaaactcattcataaataaatgatgaattgaattgttaatctcattaattctttccagattaacataaacctttatgagagcttatagttaaggctctaagataggtgtggtccacattcatcctgtgtgcattagcaggataatttggctttaagatgctttcttccccgtgaccacaaatatgacccagaagcagggactttcaagctggaattctaatgctcttcctgattatggaatgggcttaggtgggggaaaaaatttatagatcctaaataaaggcaaagaactatctggagaaatttagactttgatcagatctttccaattcatttcctttcagctttgcccatcagctggatcttccttactaaaactagtggttgaaaatccctgaggagggaatatcaaaacttcaacaagttcagacagatttaagttcaaacaaaattctctacaccatttgagatttttccctttttctccttaccatccggttccctcatttaaaataaataaatttatattaaaaaaataaaataaaaggtttgggttttcccccttttcttgttcagttcagtttagtcactcaatcatatctgacactttgcgaccccatgaaccgcagcatgccaggcttccttgtccattaccaactcccagagcctactcaaactcacgtccattgagttggtgatgccgtccaaccatctcatcctctgtcgtccccttctcctcccaccttcaatctttcccagcatcagggtcttttcaaatgagtcagctcttcgcactaggtggccaaagcgttgggagtttcagcttcagcatcagtccttccaatgaatattcaggactgatttcctttaagatggactgataggatcttcttgcagtcgaagagactctcaagagtcttctccagcaccacagttcaaaagcatcaattctttggcactcagtttttttatagtccaactttcatatccatacatgaccactggaaaaaccatagctttgacttggtgacctttgttggcaaagtccttttcttgtagaacggtgtatttgctgaatacactgatttctgccctttggtttctattccttgacttccaattcttatctctctattctaaccccaacctcaaggtttgttgttatgtctgagcagtccttagataccatggttacccaaagggtcaaactgactccccaaaactgaacattgctgattcatgggatgccatggggattacactgcagctgaaatagctgtcctaacaaagatcctcagataacagcaactgtgaaaaagaccagctcctgttacaaatcaattagctaccctttatttaaaagatattcagt

SEQ ID NO: 38996 - DNA, 821 bp, Bovine  19866880724317
  misc_feature (1)..(1): n is a, c, g, or t
nctacctctgaatgtcaggccacttctctataccactaagaagcaagacataaaacctaactgatatggctggttcatgctgatatatgatagaaaccaatataatattgtaaaacaattatcattcaattaaaaataaattaaaaaaaaaaaaactaattgatactgacaccttccaatgctttgaaactaggataaggagagagagaggatatctgccatttgcttttctttgtattttgacctaatttagaaacaaccaaagtataattctagaaataaaataatcatttagcaaaaacataccaacagccttgctttacctcaaatgatctaatttataaattcatatacaataaatactgcttttacaaacttctatgctagcactgaaattgtgcttatttacaaaaatgccctgatacattaaatttctacatttaataatcttgattttaaaatataagatttctatactttgattttgcagaaagctatttaagcattaatcactggcaaattatactttgtttccttctaacatcttccctgagttttacatgcacaaatatattaaaaataacaataatttaactcagctacacaagcctctccttgaacacaaagatcacatcaataggaggctagtgtgaggatattaaaaaatgaatgagacagcttctctgaccttaagaggttaatatcaggcctgccaggggacttggaggacaataaagcaacacatgtgatgatacactgaactattctttaccttgtctgtcttgatggtaagcacatctgtgctcttgcagtatcgatct

SEQ ID NO: 38997 - DNA, 1684 bp, Bovine  19866880743247
  misc_feature (1)..(1): n is a, c, g, or t
ntttcagaattttccactgtttattgtgatccacacatagttagcatgttaactagacttattgtggtgatcatttcacaatatatacacagcaaaccactccagatattcttggagaatcacatggacagaggagcctgacaggctaacatgccatacagttacaaagagtcagacacaactgaagtgacttagcactcatgcacacacaaatattaaatcatgttgtccatcgtaaaataatgtcaatttaatgtcaataggacttctctcatggctcatatggtaaagaatctgcttgccatgtcagaattgttgttcatttgctaagttgtgtctctgactctttgtgacctcatggactgcagcacgccaggcttccctgtccttcactgtctctgggagtttgctcaaactcaagtccattgagtcggtgatgcaatatggaagacctggattcagtccctgggttgggaagatcctctggagaagggaatggctacccactccagtactcttgcctggagaattccacggagaggagtctggcgggctacagtccatgggcttgcaaagagttgaacacaactgagcgactaatacacactatgaaaagattaaaaatggtcaacattaagaggtacaaactactatgtataaaataaataatctgaaaggatatattgtacagcacaggcaggatagccaatgttttataacaagtttaagtgcagtataatctataaaaatattgaatcactatattgtatgcctgaaatgatataacattgcaaatcacttatcggttcagttcagtcactcagtcgtgtccaactctttgagaccccatgaatcgcagcaggccagttctccctgtccatcaccaactcccggagttcactcagactcacgtccatcgagtcggtgatgccatccagccatctcatcctctgtcgtccccttccacgtttaaggtcgggaggggcggtggtgaggagatacccctcgtccaaggtaaggagcaaatcaactatacttcaattttaaaaaaaaaagaaagttaaaaaaaggtcaacactgtgtttacagcataaaacctatttgatgtaggttttaaaggctctctcttgctgtaatattttttaatcatttctgacattattgcctagacctcatgtgactgcacattttgagaggagaaaagaaaaataacactttcaatatttgcctacttagcctcccattactggtcatcttcacactcatccaaagtgcttcctcagaaagctcctaaagaaaaaaataaagacttcaataaagtataaaatgtatttaaataaactcttaattttaaaatagttttagatttacagaaaagttgcagacagtacagaggatttccttagattctgtgcctagttgccctgttgttgagatcttatatatgattcctttgtcacaactcatgaacagatgctttaactggattttaagacatttttttaaaagaaatttttccactagaaatagcgtattaaactctgggggaaattatttcacactaacatgtatggatttttacctcaattgttcattttatccaatgcattttactactaatttagaatatctcagggacagtgaaccagaggacagaacacgcatctggagaaatgtgttcatg

SEQ ID NO: 38998 - DNA, 1682 bp, Bovine  19866880801883
  misc_feature (1)..(1): n is a, c, g, or t
ntttagctggtttagtttcagacttggctgttagcaaatgaatgtaaaatatcatttatcttagtgcaagtcatccatatattcatcctgattttccagaaaaagaagctgaacatgcaagggagagtgagaaaaaagtattgactctaaggaagggataagacagacgctcaaataacttctgtttgttgtttcaatgaacatgcaagtggggccttacaagacagagatggctaaagtgaatgtggcctggaagcagcagactgaatttagcaaagcccaaaagtaagttgatcattggggagatgactcagcaaattttaagcctcacagttataacaaagataagaagtgattttggggggggacttctctggtggtccagtggctaagactctgctctccagtgcaggggccccgggttcaatccctgattggagaagtagatcccacatgccacgactgagagtttgcgtgctgcaactacagatcccacatgccatggcaaagatcgaagaccccatgtgctgcaactaagacccggtgtagccaaataaataaacatgtatttcaaaaagtgatttgtttttttcttgctggacttaaaaagacaatgacattgaaagagggtttggtcaatcttgtcagctaatggcccaaaagagaggagttaatgcctgtgggttataaccagctggaacaaagtaccttgccctgctgctgctgctacgtcactttagtcgtgtccgactctgtgcgaccccatagacggcagcccaccaggcttcccgtccctgggattctccaggcaagaacactggagtgggttgccatttccttctccaatgcatgaaagtggaaagtgaaagtgaagtcgctcagtcgtgtccgactctagcaaccccatggactgcagcctaccaggcttctccgtccatgggattttctaggcaaaagtactggagtggggtgccattgccttgccctaggaactaacaaatacctaagcatggtatttgttcttttctgatggtagcctcaacaattccatgataataggatgaagcctgaaaacttctggattaaaaacaaattcaaatgaaatttcaccccaacagttttgtgtttgtatgtttaacatgccccaactcagttcaatggatattttttgagcacctccagttttttattttttactaaccctagtgtgaatatcaatgcttctagaatatttataagaatgaatttattgtgaaacatagcaagctggtcattaatccctttaaagtacaatttaatgcaatgcctcatgacaggaagtgagaaggataataaaaacctttactacctaaaaccacgtttaatatttttatggcctagttggcctgacaaaatattctctgtgagtcatcacttcaaagtgaggtcctggggacttattaaagatacaacagcatgcttcatgtccattgtataaggcccctcaaatttgaactgcttaggcaagagcatttaagttaagagggaccctgcagaatgtctttgtgtaccccatgaactaggagaccgtgggcccaggtgcccttcttttaaatcttaaattcagattccccccaacttagccttgtatcattttacatttacttaacatgggccaatttcaactactagagcagtcatta

SEQ ID NO: 38999 - DNA, 1468 bp, Bovine  19866880809379
  misc_feature (1)..(1): n is a, c, g, or t
naataggatttctaattcttgaggaattaagaatatctcactctgtcatccgaaggaagaagttctccttaagacaatatgcctgttttctagtttctttcacctatagacagccatgatacaacatttcaatgtactgtttatattctacattgactcaagagttatactaaagctcatagggaataaaagaaagagtattgtgaatacagtattactaaatccaacatggtgcagtttgttattattttgtttttattttgtagaatatggggcagtccaacagaggtgttttgcaggtgtctggcgacaagccagtgagctcaaatggaagatggatgggttagtttgcttttcagaccccaaagcaaggtggacttggcaaagagtaggagtcaccattaaaacaatccattttttcagagatgacgcattgtgtcatttgttagtgtcttccagtttggaggaaaatgtaaagaaattctctggaagatgttttgaagcttaattagaaagcagtttgaaaacatgtcccttgtgctttgccctggtaaacgtgcgtgtatcagaacttacacagagatgtgaatgttttcatcctgacgctgtgtagctctagttgggaactgtgtccattaatcttctgacagcacagcagtgggcctctttgtgcacgactgggccctgtgggtaacttctgtgcagtgtattcatgggacaaatacctgatattttcaattctcctcccttcctctgggaggttgctgcatactcaacacaaacccttgcttcttgtactttcaaggctggaaattttcctattaaggcagaagctgaaaaacaaagcacactctggtaaatagttgataacttggagcagttagtcattctctgagcttcttgctattgaaatgagagaatggcgtggcacaggaacctgaaatactcaaaactttgatttgcctcctgcctccagcagacttttttgcttagctctgctttttagtctatttatcctgaaactgaaagaacttttaaattctgttcaaggaatgtttctttagcacctgctgtgtgctaaggcagtgtactaatgtactatatcattgtatactgactaagacaaggttcctgtcctcaagaagttcacaaaatgattagtgaagtaacactggcaactttgaaggaatagtgcttctcttaaaggattgactcaggacacataataatataattcacagaagtaatattttcagcctttggaatcttcatagctactgatgtttaatacctcctctgagttgttcagttgagtccttacaaggaatttagcacgtggtcatgttttgctaactgtataatagaatctttgatagtagtcttactcttaacaccttctgggttattaaataaaaggaagtggccaacatttgtgctggaatgtcttttaaccttgtttaaggaagaa

SEQ ID NO: 39000 - DNA, 1789 bp, Bovine  19866880829873
  misc_feature (1)..(1): n is a, c, g, or t
nttttgcagtcatgaggcccacagtcacatctgggggagacgtttggattaggttactcatctttcaggggagctcccagtccatgtggagagttcacagtgtggtggcagctctgtgcagcctctgtgtagctctgtgtagccccacagtagagctgcccttcagaacactgaacgccagggcagccccggaccacaatggtgcctaccagctctgtccctggagtccatgtctgacactaagtcactgctttctattttaggactacggatctgtggatcaaataactgcctgcttttcagatgaccaaagaatgacattttaaccccaaactttctggaaaccaaagtattgtgactaaaggcttcttgaaggctattagtacctcattacagaagttagtcaaccactaaacaatacaaaggggcttcccaggtggtgtgagtcgaaaagaacccaccgggcggagacataaagagatgcgggtttgatccccaggttgggaagattccctggagaggggcatggcagcccactccagtgttctttcctggaggatccccccatgggcagaggagcctgatgggttacagtccatggagtcacagtctggacacacacacaagcgatacagatttagtttggggctctacctctacctataattatttccttataaaattatgctccaaagtgagtttctctaaaccatatatactgtaatggggtcctgtatgctccttgtccaagataatttagcatgatggcaaacctaagtgcacaaatattcaggtctctggaatttgccataggtattctataacggatgaaacaaggtttctaaaatataacaatgaacgttttttgaagctaaaaatatctttttttttctatttatgaaagaaatatctgtcttgtaaaaaatgtgaaaatatctaaaagtatatagtgtcaatcaaaagtgacctcatcactctaaaatccagttttcactgtagggtaacggactggagtcagactgcctgcattaaattctggttctgctgcttaagaactggaagacctctcagggtggtgttggtgtccttttctataaacagagaccatgaaagcatgtgagaattataactagtgttgattaagtactttacagagtgtaggtattattccaactacttaaaacatattaacgaattttaataaagtagttgattgatacgagttaaagcacttagaatagtgcctgagatttagtcaagggctcattaaatgctaactgttgttatggccttccaaaactttaatgtccatataaacacacacacacacacagtttcaataaaatgcatttatataaaatgttctgtaactggctttttccctgactaatttgcagacatccttcagtgttaattccaacagatccactttatcctttttaagcaacaaatagtaataatatttactaacatataataacatattatactaacatataatgaattgttttgtactagacactgtgctttgtgtatcatctcacttaatcttctgctgctgcttagtcgctcagtcctgtaggactctttgggactccatggactgtagcccaccaggctcctccgtccgtgggatttcccaggcaagaatactagagtgggttgtcctttccttctctaggggatcttcccaactcagggatcaaacctgcatctcctgcttggcagatggattctttaccactgagccaccgagaagccccactaatcctcacaagacccctaaaat

SEQ ID NO: 39001 - DNA, 726 bp, Bovine  19866880836590
  misc_feature (1)..(1): n is a, c, g, or t
ntaaaaaaaaaaaccaccagatagaaatccaacagttcttcaagctactcctacaaatgccaaaactgtgcagcaagcaggtaaggcagtaaacggagaaagcggcctcattttaaacttagggttatgaaaacaataggcttcttgatgtgaaaacaaaaacttctcatgtcccatttatcaaaacgtagtttggaaattcactaatcaaaacattttccatcagaggatttaaactcacacaccaaaattatctctagttaagcaagcaggaagtttaccaggaaccccctaaaaattaataattgtttttacagctttgataaatccatgccagctcatgttagtacacggtgtggcacacacaatctccagtgagtctgtcacttctaaacaggaaagcatgaaatccttagcataaggcaagaatcacagatgttctgaagtgaggcgttttagggtttgccccccacccacaaaagctggtttctcagtctttgagatggttttcttagagtgacagttaattatgccaaactcatcatattcatcatcttgtttcatcttcaggaacctacaaggaagggtgtctcatcctcagccctactgatgtttggggccgggtatttctctgttgctgatgcggggagaagcacccgtgcattgcaaggatgtttagcatcatctctggattttacttactaaaagccagtcttgcctccaccc

SEQ ID NO: 39002 - DNA, 955 bp, Bovine  19866880858325
  misc_feature (1)..(1): n is a, c, g, or t
ntcagatgtctttctctttcattaccctctctctctctttcttgttcatgtgagttgagtgccagtgagagaagccagatggaaactgaagctctctgtttatgactgaaccaggtacaccacaaacagcagtgtaaatgttccagcccgctgcctcccacacacccagactgcccccaagccccacctggaaggaccagtttcaagcagagagatgatggttccatttctatgcttattgagcctggtaatatttgcttaagaacaacatttgaatagagactcctcagaaaactcacatttccatatttactgggggatttttgtttattaccaatgaggttcagaaaccatattctgtatacttgctaagtgaaaatgagcagcctacaaaaaagcaggccaggaaacataatattagtaatcatttgtgagcatttattatacatctggacctgtgctgggcacatcaggtccataaagatgaatggacatgagatgaattcatcgggcccatttcacagatgagagactgaggtgtaaaaaagtggaggaaccgatcccactgaagacgactgcctctggggaggaagatagaggtgaggtggaaggaatcttgtactctttcctactcctagaaattatctaccacttttattatttgatgcattttaagtgacaatccctgggttgggaagatcccctggaggaggcagtggtaacccaactccagtattcttgcctgggaaatcccatggaaagtggatcctggtaggctatagtccatgcggtcgcaaagagtcagacatgactgagtatgctgggtgcaggggcgggggggttaaaaaaaaaaacaacatttgcttaaactcacagagctgggaggctactcaggaaatccagagccagtttatcaggccccctggcacacaggctcttcgtcactctgctggat

SEQ ID NO: 39003 - DNA, 687 bp, Bovine  19866880862394
  misc_feature (1)..(1): n is a, c, g, or t
nctggggggtccctggttcacggtgcttacctttcctgctgccactggtccttaaaatctgaccgtgatgccctctctgtgtgtgcaaatttggggaaccaaaggaaataaagcttgtaaataagcactaaattttactagcccacaatttgtttttgttccccaaaggtacacagatagtaaattttgtaagatcaaaacagtgtttgatattcctccagcataatcatttgtcctgtgcaatatgtaagggacttctttctgaggctgaatgaacaggcagctaaaagtaaacaactccatctctccagaccccaatatgctcaaattcacttgaaaagagaaacagttttcaatattgaatttatgatgaaattgccacccaaacacaggccacttgatgaagaggcagacggccaaggattatgaacccaggcttgtatggggaagtctcagctcccctgctaaacagctctgtgaccttgaacaaggcattgaatctcagctgatgcgagtctcagtttccccacttgtgaaggggggaaaagaaaagcatgttgttaagagttaagaagggtaatctacagaaagagatcactgcctgcatgtccctgcctatgtttcttaacctcaggaggattagtttctcgtcgggcaactgcagccgtcacggctgcaaagtacaaa

SEQ ID NO: 39004 - DNA, 1056 bp, Bovine  19866880876463
  misc_feature (1)..(1): n is a, c, g, or t
nattacttggaaataatttgtattacattttttaaagtttcatatttaggagctacttcccagattttctagcttgagttatcatggaaagatagggcttctttcagattaaaaatttatgttcatacttacagtattacctcaagggataattgggtagttcttttttaatagaaaaatgacctcaatttataattctgttttcttcatttgtttcttctttataaattgccactatttctaaaggaagtggtaaaatacaacaatccaaatagaattcaaagctgaggaattccagcaatcaacaattcaacaacagaatagaaacaatccaaatagaattccaatccaaatagaattccttttaacaataagtgggaaaatatatctgtggaagaccagattgattaaagattactaagaactcatattatgcaagagtgcttaataaatggtagataaatgaataggagaaactggacttttccctcttacttgaattatgaacttacagataaactaaatcacaacttaatcacaattaaaatgttattaaatgatgtcaaacatttatgtcattcataaacagaaaatagcttcttattgaaacactgtattaacagttataatattcaaaagtattatgtaatactaggtaatactttgccccgttgtacaagaaactacaatttaaaaacctgtaggttaagtatatttcactagagcatcctttacctggcctctgtgaggttgaatcattacactttaatatcattgttctgtttgttttttatagcattcttgtgtaattcttttctgttacctgggaatctgtggctcaggaataaatatcttgagaggaacaaaaacacgttaaccattggtggaagcttcataccttgttgttagagaagaggcgtcttcacagactatttgagcccttcttctggatgacttagtattgttttgcattctgatttctttttcctactctctggcctgtggacaaaaatatgtcactattgctcagaatatttagactatgtttacaaacaa

SEQ ID NO: 39005 - DNA, 1125 bp, Bovine  19866880897043
  misc_feature (1)..(1): n is a, c, g, or t
nagtgggacacgactgagcgactaagcacagcacagtacagtaggggctagttaagtaattgtggtacatgcatttatggactgctttacagcccttaaaaagaatgatgtagacctcccctgatggaccaatggtttagaatccacctgccaatgcagaggacatggggtcgatccttggtccaggaagatcctgcctgctgcagggcatcacaacgagagagtagcctccatttgctgcaactagagacagttcaagcacactaatgaagacccagggcagctaaaaataaataaataagaatgatgtgaatctatatcaacacagaaagatgacttcaatgattgaatctttaaggaccgtgccattcagtcatatcaactattatccttccttatcagcagagtttttgataaattactccttattaaattgacacttggttcatagctttgcaaatgactatcatccaaggagacttaaatatctgcatgaataacccatcatccaatgagacttaaatatctgcatgaataacccataccctttccagtctcaggaattcttgaatttctcatttacaataaaatacaatagatgttactgtgtcatcaactggtttcttggccacagatgaggcacaaattgcctcatctctaaaattactaaatcaggcgtacttctctctgaccacatcctcttatcctctcaactagcctgctcaattttcatgataacatttgtttttattttgcttcagatcttctagtccacccctctattcattgaagacttaatgatcaacaatttcaagcattctcttgccaatattttaaattccttcacctcattattcactgtgcacctgttgcaaaatcgcttaccctctgtgattaaattatcttttcttgttgtttttttcataccctggctaccaagcaatactagagtgtcacctcctgaaagacaggtaccactattcactattgttcactaatttcaactgggcccttgcttgagttctgttcccacaaaggtagagcctgaatcacagatctggatgcaaatggtttattttgagatattcccaagtagaggaatgaagagaggagaaagaagaggag

SEQ ID NO: 39006 - DNA, 607 bp, Bovine  19866880943693
  misc_feature (1)..(1): n is a, c, g, or t
ntgatcggtggtcgcatttggcgatcgcggggagtgtagaccgtgaaacacatggcatctctccagcatgtagaaagcaacctctccagtggctcccgcggagctcgcaagcggctccgcgcaggccgagggaagccagtgagctgtccatggtggttaaggcgccttgacgtgcgtcctgggcggtcccggcgaggcgcagacccccgcgccgggggccgccacttctccggccccagcctgccggccacccagccggtgtgagccgggcaccggctgcacgtgttcctttgcaccgctctgggacgcaaacggggcagaattccagatataggcggaaaataaactctcgagtccaaattgtgggtttccttttagctccttcctgaagatgtctttccccctcagccgacacttcttgggcttaaagaaatgtcggtgcagccagcagtttacctcccttccctacactaaggttctgttctcaaaagagcgagaagcagtcactgctcttatgatgcttctcatatttgttaaaagaatctaggaactggccatcgcttttggatccgtgtggtatctctagggtgacgcacgacgcttctat

SEQ ID NO: 39007 - DNA, 784 bp, Bovine  19866880954876
  misc_feature (1)..(1): n is a, c, g, or t
nattataaaatgctatggaaaaatgcacatatttgatgtatgtcgtttcccagttttcagcagtatgataataatttttcattaggaagatatactttttcaaagacttgtccaaaaacatatcaggttgccttttggtgaaataaccaaaaatttattaaacagaaatataaaggcatgtagtactcctgtgcctctgaccaatatatcttactcaggttgggtagagttcagctgtgttgtctaactcaatgaatggacttctttgtgaaaggtcatctgcccaatgcatgcagccatgttaactaaaagcactaaccatcttacttctgtccatttgaagcactctagcatacatagctctaagagtagataagatattccatgctgtaagactctaacaggatagaaacttccttctattcctaactgctttaaaaattctgactttcaaaaaaaaaaaaaaattctgaccttcaaaaaaagaagaaatcctggacaaaagtaaattcaacatcacatcaggcttgaatgttggattcagttcagttcagttcagttcagtcgctcagtcgtgtctgactctttgcgaccccctgaatcgcagcatgccaggcctccctgtccatcaccaactcccgaagttcactcagactcacgtccatcgagtcagtgatgccatccagccatctcatcctctgtcgtccccttctcctcctgcccccaatccctcccagcatcagagtcttttccaatgagtcaactcttcacatgaggtggccaa

SEQ ID NO: 39008 - DNA, 938 bp, Bovine  19866880976513
  misc_feature (1)..(1): n is a, c, g, or t
nggtgcattgggatccttgaacttcttttttgtttcccctttaggaggaatataagttttcatttctctttcataacgggccttgtccgcctttgccatgtcttcaaattttcctttctctttagcagacatggtctgtaaaaaaaaaaaaattgtaaacttaaataagttaacaaaattttaaccaattgtgaagtatggaaatgaataaaatgcagtatcctttgctaaatatttagtaacctgttccgacatcaacacccacatttgcaaattgtaccgaagctttaaaaaaaaaaaaaaaatcgcaatttggaattcagcctttattgcctactcagtaggttttcagccctcttaccttccacctctctgagcacttcttagaaaactctgagaagttgacagaagcatccgggtgcttcttcttgtgctcctcccggcaagtttgcacaaagaatgcatatgatgacattttgcctctcggcttcttaggatctcctttgcccatgtttaattatttttctaaaaaataaaaaaacacaattttaatgttaacaatgacatttatggcaccgaagagcacttgaacttcttggggagtcaatgaacagcatggcactggttattaaacacggccttggcaacaacccctcacaatatcaaagaaaatgtcagggatggacaattcctagaagagtctgcaccaacccaataaatggtccttcagtgggatctcaaagaaagtgtagacacaatggtacactcataccgtatttgtgaattatctccctgcatctgttttgaatgtaatacctaagtggtcattaaaattttttttttcatgtaagaaatcattattaatcaacaaacccaaaggtcagaaaaggaatgctgcagattcatgcagctacgtaaggagtaggtaagagccaaag

SEQ ID NO: 39009 - DNA, 1452 bp, Bovine  19866881092008
  misc_feature (1)..(1): n is a, c, g, or t
ntggctagaaatatcatcagctggatgaccgagtccattggtcgcattttctactttctcctatagctccaggtgacggtgttgttaaactctctgccacttcataacaaggatatcctttcctctagtttccagtgtgattttcctcaatttcctttaaatcctcactatcagtttcctcaaagtccaaaattatataaataatgtattcaaggcactttaaaatttcactaatactctcctcaaaatccttacagcttttacactttctactcattacttggttccaaagctgttttcacattttgagtttttgctacaagtactctacttctaggtaacaaaatctttacaagaattattccagatgaacagattattcctaattccagactgggatatgaaaactcatggttatgactagctcaaggtcacacagccagtatgtggatgaattatgactcaaatttaagaataatcaaagtgtatcagccttcctcacccctcacacacaataccacactctctctagaggaaagaaaggcaagcagaatttataaataatttggaattgctgtagtcttgacaggaacttcaaattatacagttctaggtggccctgttttaactgtattctattgttttttactgttcggtacagagaccctgagtccctagatggtcccattttataagtgaggaacctgagaattatttgaattaagatttaaacaagggccagttgacttcaaaatgccatattttctaagtgtccaaccatgcacatcacgccatactcgttcatgtttgaatgatgttgaaggcgttatgttcacaaaggagggacagaatgggactaactatatgctcctacatctatgtacttggggttcccaaccgcaagaaatgggagatagtgggtttcccataggaatattgccgtgattgaatgaggcaatgcatgtaaagcttagcagtacctggcctactgtaagctttcaatgcctgggtgctcagttgtgtccgacttttttgtgaccccatagactgtagcctgccgggctccagtgtccgtgggattcttcaggcaagagtactgcagtgagtctccatttcctcttccagaagctttacatgagcatcctcatatggtcagtactcaagaggttgtgttctagcccttgtatgcctggtcacctcaacttctcaaggccctgcttcaggtctgcttcaaaacaaaggtagaaatgacccattcaggatgctactacaacttgatgaggaaaaatggaatgaattacatgaccagcactgagatccatagcagaaagttattccagaagtctggccttctgtaccaccatctccaagggtgtgaaagaacctcattctgagtccgtaatgccccgtttggctccagcctggagccggcgcttcattaaaaactgtgag

SEQ ID NO: 39010 - DNA, 1719 bp, Bovine  19866881147997
  misc_feature (1)..(1): n is a, c, g, or t
natgagaactgatgagaacagttttcatcagttggaaataaggaatggtggtgctgggagccaggaaacagagaggaaggtgagatagccagtttttgaataaggtactttacttgaagggggtgcacttgaaaagatttcttggagaattttattaaagaaaggtatatctacccagagaacagttttctgcttaataatttatcagggctctggctcctaatcctgtgaacagctactgtcactttgaaccatgtcagtgtttcataaagtcttattttaaaaaaaaaagaataaatggagaaaaagcaaaactgagatctggccatgttgccagaggtagaaaaatatttgttgatgttgaaagaatatgatgaaacaattgacagaatttatgacgatggaatcctaataatcagaagctccttgtaagtaattctcatttgctattggatgaattaggttttctctagtacttcaaggaaataacagttgtttttaataaatagctattctaataaaaatttaaagacacataagccaaaatgtcatccaagtagatagagaaaaaaggtataaggtatatgatgatcactacatctcggagcagaacagatgagaaaaacctaatattcatgaatctattctatcttgacatcactgtttgcttcagctgatggtctgcatatgtgaccttccccacccaccacacaccctctcaatggttcattgtacctgaaggacttaatttttacttgttgttcaccatcttccattcttcaaaaaagcaagataaagtgtcaaactacaagaaacagatcttcagtaattcttgagaaataaatgtgagattaagttcaatcatcctaattcctattaagtctttagttatacatgctacctgagctcctaattgaaatgattagtattgtctgggtgagctgctcttgtaccaaagctgacaggtacctcatctccatcaggtaacaataactatgtgaagcaacagtgaataataattgctgctctgtttagaaatcatgccatgccaatcttgaaaaggagtgcattcatagaaataacattaaataaaatagcaatttttaaaacaatggatggcttagccaaaaatgttgtaatagctctattacatagactgaaaatttattaaaactataagacctttaattttgtctgaaaattcatctagacaataagaaataattttgaaaactggaaactgattacttgccaatcatattaattttcacattaatatatgccttagcagaaaattctaaatgtatatatgtgtgtatataaatatttgtatatatatacttacatacaggtacatatatggcagtgtatttattcattcagaatgtagtcaccagaccactaccaaagtgatggtgataaaatactttccacattaaaaaatcatgcaggctgagtagtttttattcaaatatgtgttttaaaatatatattcccaagtatattaatttttgaaagggcacttaaaaaattcacggtaaagcttccataatctcatctggaaataattacaatcaacattttagtgggtctcccctacacgtctttcgtagtgatgcatctgtgtgcgtgcttagttgctcagtcgtgtctgattctttgtgaccccatggactgtagcctgccaggttcttctgtccatgagattctccaggcaag

SEQ ID NO: 39011 - DNA, 1794 bp, Bovine  19866881150901
  misc_feature (1)..(1): n is a, c, g, or t
nctgcacatgtgcatttatcatcgactttctggaaagttcagaagaggaatctctagctgtggcttttcattgtgactcacatctgcaaaggatgaataaagaagagttttttgaccaagaggtgcagtcctgctgagagagaaataattgctgtttggagagaaactctcaaagaaccagaagtttaaaaaaaaccagaaaagaggacttccctggtggcacagtggataagaatctgcctgtcagtgcagggacacaggttcaatccctggtccgggagaattccacttaccgaggagcaactaagcctgtgtgccacaactgctaagcccaaactctggggctcatgtgccacaaatactgaagctaatgtacctagagcctgtgctctgcaacaagagaagccaccgcagtgagaagcctgcacaccgcaatgaagagtagcccctgctcgccacaactggagaaagctcacatgtagcaacaaagacccagtgcaaccaaaagtaataataaataaaacttagagaaaagaaaaagctagaggaagcctattgaagaaaggaagaaccagaggtgagctgcagggtgctgcttggagctatgggaaataaatctcgaacaagtgaaatggaaaaagtcaaatgtaaaacattgcctgttagggctggctagagtccagggcagaggcagcaccactgggcttggaaacccactgaaactcattccacacagaactgccccacccacatctactccatctgcctccatccacctggagcaggaggtctgacatgttcctgggaagaatactcttgggttgtttggaaagtgagacctttcggagagtcttgcctccttctgcagccaatgttcataatttcctccagagaaggcgtggtggttaaggacacaggcctggggaccaggcagatttcagtcccttattaagttgtgacttaaacactgggcctcagaaagcaggaatgctgatgaagtcagttatgtttcatagagttattgtgaagagttaagtggagcttaatgaagtaagtgctccaaactgtgtaactgttactactgaaagaattataactggatttggaaaaagcaccttcctgaactctgtccctaccatacgaactttgaacctgcccttggcatctgcagggatttaaacactagcagaggccctgttgtggagctggacagtaatccgaggccctgggcgggttgttgaaagcacctgcatgtccttgcacagggctctgggtgtccatccatggcccctcctgagggctcttgttcttaaagcccctgaccttttctgtaggcagttctggcagggacatccaaacacattagtttggaatgggtctgggtcctatttttaaattttcatggataatgggttgttccattaaatatatgtgaatattgattcacctcctaagcatttcctatgtacaggtcactgaacccataaaggtgcagagcaaaatgtatgtcagggctgcctgttgtatgttaggaggttgcatgattgtgttatttgtgccttactgcaaccctaagagaggaaggtaatatcaatagttttacagagattaaatagtttgcttaagattggagataatgcccgctttcactgcatgtaaggcacatttcagtttcagtgaggttaaaatgaggaaaagtatatctttttaattaatgaaatgtagttaatagcagagtctggatgctaccccattcctgtcgatttcacatccttgggatttccccccgccccc

SEQ ID NO: 39012 - DNA, 648 bp, Bovine  19866881226570
  misc_feature (1)..(1): n is a, c, g, or t
ntttttttttgtcttttcagaaaactgaagagtgggagaaaaagaagactgaagcagatatggaagagtatgtatggaaagatagcgcctcagaaaaaaacattctggaaacccttttccaaattaaagctgctgagaaaaatacagaattaagtaaagaagagctccttagtactaaagaagttgaagattacaaaaattctgttgttagtcttaagaatgagggggacaatgagaataccatttctcagtacaaagaatcagtgaagagactattacatttgacgtgaattatacagaaaaatttccttgatttactaattttatgatacatatgtaatcattaatttgatataaaattgaaaatgttttttttttaaaaagccattgttttactacattagagttaaaattattcctttcattctaagatacaagggcaatgattattcaaaggttttcttatatactagggcagtcagactaatttgattctgatttcttctggtcctaaagtgtttgaattttatttctaccataaccctttagtgtgtatatgtatatatatacacacacacacacacacaatatattgttcttttgtcacctgctctatttctttctctacaaatcagtacttactggttg

SEQ ID NO: 39013 - DNA, 824 bp, Bovine  19866881229545
  misc_feature (1)..(1): n is a, c, g, or t
ntaagacaaacattaggccattctttgataaattaatactcctccgctattactgatgaagccaaaacctcagagagtcatttttaaatgaaaatgttgagctggaaaagactatcgcattcttgggggatttgctgctgacatcacctcccccatcctctaatcacaagccccctggcctgcatttatttccttaattccgtttacagtaaccacagtgatggagctaaacatgaacagtagtgcccttgaatgagctagcctccatcaaagatctgaagacagcattcccgcaggacagtaaaatcccccacagttgcgaacatccactctgttcaggatctttggtacatttggagtataagaaaataatggcacaataatacaagtactatcaaaggaaaatttttcatcaaaacaaataaaagttaaccagccatgatatgtaacaactttctagaaaaccaaagtaaatagctctttgttctctacaagttcatttacatgatcagaagtttgacgtttaaaaaaatagtttcataaaaatacactagtagttctacaagcagccttcatggtcatttcttcaattcaactcaccataatcaaattaaaataatgccatgtcctcttattaaaaaagaagtcctcttgtcacaagaaaagcaactttacattttatatgatacagtacatctccctatgagtatacagaatacatgtataaaggtcatcagtatttctgaatgcaaagtaaatatattagtggagtgcttgagtgaagctgttcaacttcctccttattcaaaactcgttactcccta

SEQ ID NO: 39014 - DNA, 1367 bp, Bovine  19866881281579
  misc_feature (1)..(1): n is a, c, g, or t
ntagctgaagaacaggaaatgttctaaaaattttttaacagtcacttcccatttttctgaagctctcttctctcttgttttgttttgtttgtaattttatgaactagaaaacattttgagagacatgaaagagtgagtaaaacaaaccactcactctcaaagagccctaggtcatacattaactgattcaggaatttcagctaaccactagtgcacatgttcacctcaaaaatacccaaattagagtggctgctactactaaagagtgctgttttcatttccttttgaagggagtgtctacctcataagactagaaccaattttcatttccttagctatataaggacttgatagaaaaaccagagttagagtacataacttttcagttaattccagtgaaatattgaagttgatttgtttttgccaatgttattttaccattctttgactatcacccttcccccacccacttcctttcacagctgcctatgggcctgcctttttaatctggctctgaaactttctgacctagtccagtcacataatttctttctaaaatactcttccttgactccctgacttgaagctgacaatttactcctgaataatttaactcctttctcggaactgcctcccttaagatttctcctcaccttttcttctgaggatgggaagagagtaaacacgttagaggttcgctgtgtaattggctaagaaataacatggacctgacagcaaggacttttcctcagtcagatgtaatataaccttgtttgatctgtattcatcacagtatccacctttagtgtgaactagtgtggtggtttgactaggatactctcctttgatcaggaggtgatggaggtaggaaaagaagagacacaatcgattcatacagtaattctacctagactgctttatagcaataccaactgtacttcaattcagaattccatattttacaagtatatttggcaatactgtactgggagataacttggaaatatgcatcaaactattagaatacctacattaaccaaaagtcttggttgcctaaggacaaaaaagtgaaatgtgcaagtattagttgctcagtcatgtctgactctttgtgatcgcatggactgtagccctccaggctcctctacccatggaattctccaggcaagaatattggagtccatagccattctcttctccaagggatcttcccaattcagggcctgaacctgggtctcctgcattgcaggcagattctttaccatctgagccaccagggaaacaaaccagctccaattattttaagcaaaaaggagaagttattaggtcaaataacgaaaaaggctatagtttttccagtagtcatg

SEQ ID NO: 39015 - DNA, 815 bp, Bovine  19866881305254
  misc_feature (1)..(1): n is a, c, g, or t
ncagcagagagaaatggggcattctttcagtttatcacaagatcttccagatttactgaccatctaatacacatttgtctttcaaatagcagcaacatccttttatgcaagaagtaaaagatcttggcttattgtaatgaacttttgaaatcatctgccttcttgttatcattcctaaatattggtagcaaagagccaaaacattcgtttccttttattttgtcctgttttcgttgctgctttgtttatttgaatacttaaccattttttatggctcttcattttagtgagcacgagagttatttttttctaacacacagtcatgaacatgccctcttttgtgctttgccttacatctctctgtgagaggctattccattttctgagtgtgtgtttgtgtttatgcaggtggttaacataacatgtactttcttatttgatttgtaaatatttggtgagctcttggtgtgcttgaggttatgctagaaaaataaaatatttaagccaattatatcagggtcaagggtgtttgaaaatcctattgtctgaagacatgggtgagaaagtttaaatatttttttatggaaaatctcaaatatatgaaaatgtagataaaatagtatagtgttaccctatatccttatcacccatcttcaacaattatcaaatcatgactaatcttgtgtcatctatatctcgaccctttattcccttctttttattttatttatttattttagttttatcttaatttttggttgtgctgtgcagcatatgggatcttagttccccaacgagggatcaaacccataccc

SEQ ID NO: 39016 - DNA, 1795 bp, Bovine  19866881325101
  misc_feature (1)..(1): n is a, c, g, or t
nctactaaagataaatttttggctcctagatgaaaaaggcatttgaatttaagagaagtactcttcagggtcaatctaacattcccatagaaggccctcaaattccagtttaagaaatacttgtgtgtagtcggtcgctaagtcatgtctgactctttgcgaccccatggactgtagcccaccaggctcctctgtccatgggattttccaggcaagaatactggagtgggttgccatttccttctccataacttcagtttaatttgaagggaatcagaagaaaagcagaatggcaacagttgagaatgggaacagtggggtctggggtgggttgtggactggatgtctctctacatctctttggccattatcatcagccactgcagagttcccaccagtagatactccctgtagcccccacttcctgtctctcttccttctcccacctttaaatgatttaccctttcagtgccttacatttttgtgcaaatcttttcttagcacagataaggctttctctccacttccctgaggctgaatccaattatgctatgggaggttcttcacctctggctcagatctccggcagcatctgtgaatggatgctgttgtgtgtctgcacaatggtctccattcagttacgaaccacttgtgcacatctccttctggaagacggtttgttacccagaatgcatttgtggtggcctactggctttggaactggttaatgaaaaggatattggttaatgaaaattataggaaattatcaggtaagactttttcaaatcttttaatgttaaaagtagttttttttttttttttttttttaagctctaaaaacagcatgagataattatggagaaacacaaaaaggaaacttggcattggccaaaaagttcattctggtttttccattaggtattagggaaaaacatgaataaactttttgaccaaccccattggttttaaaagcaaaactttagggatggaaatcagtcattataggagccaggaaagtagaaatggtatgtgttgtaaggagaccgagggcgttctttggggaacagaaataatctattactgtatcagcattgtccaataaaaatgtgatttgagccacaaatcctagccagttacttttaacttttaattttcttataagtactttaaaaaaggggaaaaaaggtagaattaaactgtactatatttaacccagtatatgaaaaatattataatttcaccatatattaataagatgtatgcatttgcatttttaaaaactgagtctttgaagtcttatattttacatctctgattttgtgccagctgtttcaagggctcactagctacctgtggcaactgtaccgggcaacacagctcaatactgttttggtggtaattacacaactgcatgcatttatcaaaattcattgaattgcaaaaagattcacgcaccccagtgttcatagtagcactatgtacaggagccaaggcatggaaacaacctaaatgtccacggacagatgattggctaaagaagatgtggtatatatgcaatggaatggtatttaaccataaaagagaatgaaaattccatttgcagcaacagaatagacctaaagattatcatatgaagtgaagtaagtcagagaaagacaaataatcatatgatgtcacttatctgtggaatcttaaaaaaaagatacaaaggagcttatttacaaaacagaaatagactcatcaacatagaaaaccaatttacaattaccaaaggggaaagagggtggggggaggg

SEQ ID NO: 39017 - DNA, 1049 bp, Bovine  19866881379846
  misc_feature (1)..(1): n is a, c, g, or t
ntgcggctgtcacctgcccatctcctctttctttcagtaattcagaaggcctctctgggcagttgagtctgtgatccctgacctacatcctttcaattaaaaaaaggagatgatgtcatccctagagagtgaggacactagactgggacttgaaaactgtgaaaagccattgtaatagtcatcgaaggaaatggcttaggaagtcgaacaggagatgaataaccaaagagttgttgtctattggtccgctaaagagagcaggaattcatcatgttgcctggcagtgccctacagcctgaaagcagagacctcaggacagttgtggcagaagacaggaggacaaagggtcctggggtgatgggggacctcagtgagaagacctgcccttgatggagagtccaaaggggttggtgtcctgggagagtgaagaggagacattgtgggaacaaagaggggattaggaggagggaggtgggatggaggagacctggaaggtaagataaaaagagtcttcctggaacttttctggcaggaacttgaaagtatcatctgtataaaaatattagaggacagaccacacatcaaaggttaaggggaaaaactgggagactttgggaggaaagtaaaactagtatgattagtacaaaagggaaaagttagttctgcaaaaatttgttagtacatcttctccctgctattcaactcctagaaaaagtgaaaatataaccaagcttggtaaccaatgataaattaagttcaaagaattatatgtttgtgaaatgagccatgtgaatgtcaaaggcttttcaactacacacttgacttcctttcaaatatgattttggagataaaaatacactcattctttgttcttataagaaaaggactgtatacattatctcaagttttcgagaagaaagatcaaaagtttgaagttcagtaagttctcggtgtcccccacagcacatgcacgtatagaggggagggacccagtgctcacgcctgctggcccagtgcctcagcctgggagtctacatattccctaagta

SEQ ID NO: 39018 - DNA, 1310 bp, Bovine  19866881414456
  misc_feature (1)..(1): n is a, c, g, or t
naaaaaaaagactattccaagtgaacaaaactgtcaaataaaaaaaaattgtgcaaaaacagttacttctctctcttttgatattttacttaattttatttagtctaattggaagattaggcaattaatttgggaacacggttccccccacattccttttgcctagggagagactatcggatccttgtcttggctccttgacaacatctttcaaatagcctcaggaacatgactgttgctattctccttgcagccctttgatgaccacctgggacctaggatatacaagccaagttccctctctaacctgatcagcatacttccccggccgaacctccaagttacttcctgcttcacacctcttattttaataatacagaactgctgtggggctccctggcctgtgtcttgctgtttcttgcttctctgggtaaaagattatgtctataaataaatgcagcccactcctgcttttggtggatctacttttctgagtattcatattgcagtgttaggtcataaatgacatacctctcctcaaatggagtctctggcttagaaggcaattttgctttttcagaagtttccaagcctttagatgctggcaataatgaagggattgaaacttgcaagatgctggtgtggaactgtaatgtaataataaaaaaccccaaatcaatccatcaaacaaacagaacataagccacagagtaacaaagagataaataagacaagtggtctattgctaaaatttcatacacctgtgtttagaactctatccttatattgataaaatggttttaggacataaacatccagacgtggtaaccagaggaaacattcagaagaaggtaatttttgaaggcacatttgaagaagacactgaatattgagaagaaggtataataaataccattaagaaagttaatagtaaatcctaaccacgttaagccctgattgacatcttggccctgacacacttgactaagcgaacttgaccttaggcaagtcacttaactgtgcattcattctctcctctgtaaaatgataaagtcagtgcctaccttacagggttgcaataattgtagatgaaatttggttaaagagttttgtaaacaaagcactattttcactttaattattttatatgtgcacaggttaactaacttcagttaacagaactgatgaaaagtgtcattaaaacaaattataatagattttgtggctacactacttaaaacacaaagcttagtagtaacaatattatagcaaaaacaacaaaaagcataatacattttctcccctaaatg

SEQ ID NO: 39019 - DNA, 1649 bp, Bovine  19866881431814
  misc_feature (1)..(1): n is a, c, g, or t
nttttcttataatcttttaaaaaagaactgaccggaaaatgatgaatcaaggatgcagggtatgaatggtaacagaaagaagcaaatgtgttcagtggacactcaggagataggggagagggatacatgtgtgtgtatgtatgtgtatgtgtaggtattaggtgtgtgtgccataaatatggacagaagaagagaccaataaaatatgagaaagtaagaaactgaaacctgcgaatgagcactagactcagccagcacacagtgcgttaacacagctccaaaagcccaagtgacctagaaaaattaccttgaacctgagagaaattattatataggtaatccatcacagcccatagcactgatatacttagggggcctattaatgccccataccctcatattattttccctaaagcgatagtttcattatgtaactcctcacgcagtaactttcaaaggctccgcattgtcagagattaaaaaccacagtccttaatgcagtattcaaggtgctatggaaccaatcttcccaaataaagagtcaactctcttgtccagaaatgccttccttgttcttatatttatctgtgttcctgttacttaagctgttttcttttccctttctgaaaagaccttccttctttcttcacctatacaaatctaattatcattcaagattgcagttaagacttcctttctttttccccaactcttgccaccctctctcattttagaactgcagtaataaactctagtaccacccatccccctgaatcgcatagaccctcagcgctgtagggttattcagcatgttgccatcacattaaggagaaaaaaattgaattgccagattgtgacttcttggttttcccatgtgtcgacaatgttaaaaattagcttaaataaatgacagcattaataccattcttttcataaacatggaaaggagagagaaaattattcacatgggaagatgatttaaatctatatgcaaaacgtcagtaggtatagatcacacactttaggagatgatggaggcttcctgcctgggctgactttccagttctcccagaaggagtttcccagaagcctcagcaaacatcccttcacattacctttgcatctgaacctaaggatggggtcagtatacaggtgagatgataaaggaacaatatttaggtcctatttggaaagaaaaagagggggatggatgctgagtgagtaactaagaatgtctgaaaaccctccccaccccaccaacatgattgattcttttgaacacagtttgagtttctatagattagaatacaaatccaaaatatatacattattttgggacttccctggtggtccagtggctaacactctgagctcccaatgcagggggcccaggtttgatccctggtcatggaactagatcccacatgcagtaactaggagtcttcacgcacaactaaagatctcacatgccacaatgaagacagaagatcctgaggactgcaactaaaacctggacagccaaataaataaataagatttttaaaaagacattatttccattcaaaagtagtctacgttttaaaacattcttaatgtttaatgaaaggcttacaattttttttaaatcagaatttcaaataaaaatctat

SEQ ID NO: 39020 - DNA, 852 bp, Bovine  19866881527773
  misc_feature (1)..(1): n is a, c, g, or t
ntgtcctgggactctcagcaaggtaggatatgagggaatctactgagattaagggcagagaggaataggaatagattagggagagtttggtaggaattttgagagacagccactatgagaaatgtgatagggcaggaaatagtgatgaataaaggatccttgggtaacattaagtgccctgccgagattagatagcaggcatttgaagtggagccaacctagcctcctctaacagatcagtagaatgaaatcaagacacagctgggcatttcataaggagaaatacatttttaatgctctatcgctgtttggcagaaggcaggacttgaaggtatcctgagattaagacgttcaatacacatgatttaaacagcaaaaatgtaaaaagtatacttttacgtattaaaaaaatagtttaatacttaatcaaatatacaaacactatatattttgtattatgtaaaaatagtatattttgttgaatacatagtaaaaaagtatattttttgtatttataaaagtatattattcctttgctttgtttttaagctcaggcaatcactatgttaagtagaatgccctagtttgggattgcatcttgaaaataagaccagtgctgtagttggctaaggaaagcgtatgtgtctggcaggtgggctcacctaaccaggtgcgtgagatggactttattggaaagcagaggtagcagttggggatggtcactggaatgaaagttcctcagtgcctagaacaatccctggtacatgatggatgaatgaccagtatcctttgaataagtgtatatatgtgtgtatgaatgaatggatggattagccgtgtcattttaaagca

SEQ ID NO: 39021 - DNA, 1094 bp, Bovine  19866881591776
  misc_feature (1)..(1): n is a, c, g, or t
ntaaacgcagataatagctataaaaaggggacttttttttttaattttattttatttttaaactttacataattgtattagttttgccaaatatcaaaatgaatccatcacaggtatacatgttttccccatcctgaacccccctccctcctccctccccacaccatccctctgggtcgtcccagtgcactagccccatgcatccagtatcgtgcattgaacctagactggcatctcgtttcatacatgatattttacatgtttcaatgccattctcccacatcttcctctcataatttgtcatggtgaaaactgtccagaatttgctgtttcttgtttgccccaacttattgaaggagcagaagttattaagccttaacagactgatctacccttgttaaaacccacattgtgaagaaaaagaccttccgagaaagagatgattcttacctggaaggtaatttagcagtttccagaaaatgttatataattctaggaaccaaaggctgtctgtaaatctatacagttttctgtatatattttattttctgtatatattatattttaaaactgttgtaaatctcaacagttttaaaagttttaaaatttttgcctcaaggattgcagtgagtgaaaacgcatttgcaattttgctcccacaagctacaaaaagatcattaactattgtacttagtttttccattttgaggggtgaaccagaaattcagaggctaattctctatcattaagttgtaccttttcttccattatttcataacattttggtctagctgtcatcagaagtgccttccaatccagcataggtttaaactcaggcctgtagatgtagttgagatcaaggtatcaagattccacaagtgggcattaatccagtctcgcatttccccctaaaacaaatctagttccagaaatgcccacaagatatgtagcaaattcctgtgtgaccacagatctcctcactaactcttcttgttaatccttgaaaacccttcggatggccagagatagcacagtatacactcccagctggcaaatagatgacagaattgtgatagcctcttatttcttcctgt

SEQ ID NO: 39022 - DNA, 1741 bp, Bovine  19866881952443
  misc_feature (1)..(1): n is a, c, g, or t
nagagataaatgtaatcatatgaggtttttaaaattatctttttgatagattgtagagagggagaaaatgacagtgggggcagtgatgagagtgttgtaataattcaggtgacaaatgctggtgacacacaaccaccacagtagttcaggagctggagagagtaggatggactaagagacactttaaaaactgtttagggcttgatgccttgatctgcagggaccaagaggatgaagtttctaactgaatagatggatagtggtgccttagactgagttagaaggacaagaagagaaatgggtctttgggagaagagaattgaaggcatgttgagtttgagatgctcttctccaggtggagatgctcattaaacagctagaagcctggaacaagaattcagcagagccatatagacggtagaagcagacttgggagtcactgctgtagtgtttcccaggtggtgctaatggtaaagaacctgcatgctaatgcaggagacataagagacatgggttcaatccctgggccaggaagatcccctggaggagggcatggcaacctactccagtattcttacctgaagaatcccatggacagaggagcctggcgggctatagtccataggattgcactgagttggacacgactgaagcaactgagcatgcacacacgtttgcagtgttagttgaagccaagtaaatagaggagaatcttaagaagagagaaaaaatatgaacttctaaatgaatttgaaaatcctaaattgataagaaccactttttggttacaggcttcccaggtggcacagtggtttaaaaaaaaaaaaaaatccgcctgctgatgcaggagacacaggaaacatgggcttgatccctgggtcaggaagatcccctggagaaggaaagggcaacctactccagtatcccatggacagaggaacctggtgggctacagtccatgtggttgcaaagggttggacacaagtgaacccatgttcatatcctatatccattttggttacgactttgtacatgatgatgtaagtgcccacagggccttatcacgacttttttggcaatcctagctgcctctgaatgcaccccacccacaagcacccgtgcctctgcctcccagtccataacaaggaggcccagaagcggcagagggttactgtctccaagaacagcctcatgaaggatgaccgttggaagacaaacatcccaggttcctcacaccttctgtggagaaagactgggcggcatattccagcccatgtcccagagttacccagcagggctgacccccagctgcccacagatggtaaacgacttgattatgaactgactattgactttgggcccttccctggcctcttcctattccccacgggtacttttttaggatcacctccaaaataaactacttgccttcaaatccctgtctcaggatctgcttctgggagaatctgaacggagacagctttctgttctttctggtcttctgagcaggaaccattacatttgaaccatataagctgcttctttccttcatctgctgccatatttttcattttatcctccatcttcccccagtgctatactcaaaacacagggagctcaacccagtgctctgtgacaacctagcgggatgggatggggtatggaatggggagggagttcaggagggagaggacatatatatacccatggcgattcatgttgatgtaggcagaggccaaca

SEQ ID NO: 39023 - DNA, 928 bp, Bovine  19866880179460
  misc_feature (1)..(1): n is a, c, g, or t
natgttactgaagcctggcttggagaattttgagcattactttactagcgtgtgagatgagtgcaattgtgcggtagtttgagcattctttggcattgcctttctttgggattggaatgcaaactgaccttttccagtcctgtggccactgctgagttttccaaatttgctggcatattgagtgcagcactttcacagcatcatctaaaggatttgaaatagctcaactggaattccatcacctccactagctttgttcgtagtgatgcttcctaaggcccacttgacttcgcattccagatgtctggctctaggtgagtgatcacaccatggtggttatctgggtcatgaaaatcttttctgtacagctcttctgtgtcttcaccatcttatttcctgtttattcttagatcgtcacggactctgcttctgtggagcgtttgctggggaagaccgacgtccagcggccccaggtggtggagtactgtgtggtgtgcggcgacaaagcctcaggtaagcagcggtggtcacgcgggtgcacctcgggggccggcatcacagaccaggtccgggcagcggggtggggggtcagaatgtgactgtacttttctttattgggatgatgatgtccataagcagatcaggttgtcagattataggaatcaaaaggaaaagtcaggaaactgtctgtgatttgtaaatcatggttgactgtgattatttttgtactagtaagaaggtaatcaagacttccctcatggtccagtgattaaaaacatgcttccactgggtttgatctctggtagagaactaagatcccacatacccttatggccaaaaaaaaaaacgtaatcagtcgtgagcgtagtcagcatttgcgcagcgctttgctcttccacaggacgtctgctgcccgtcccgccccggt

SEQ ID NO: 39024 - DNA, 949 bp, Bovine  19866880344828
  misc_feature (1)..(1): n is a, c, g, or t
naaatgagcatttttaagaatattatgaaatgtatgccctattgtatgatctcgtaagacactgtcttcatttatttatattaaataaaaactttgagatgaaattctttttccattacaggtctattatagacaagtattcttacatttatttttgtaaaattactaagacaatagcatatgtctaaataaaattaatattctgcatagtagtttatattgaatattaacgttggtatttcaccatttctttcccttactaaagcataatttatcctcagaataaggatggtgagccagagtacaatccttgtggaaagtatatggtaaaacttcacctcaatggtgtgcccagaaaggtgaataacgtttctctccatattaaccccttctttcttccctacctttgaatcttaagtagagtcattaagaaatgttatttatgtaaacatttaaaaagtcagtttagttgattttgactctgtgatattatacatattactaccaatagcagtcatcaagtaataattaaaaagtaaaaaatcatggcaagcagtaaagtcttttaaaaatgagtttgggaaaatttatagaaagctccaagaagtagcattgagctaatgtttgcttatccttaaaatgaattttaatctggtggtcatttattacctttttgattaaaaagatatcagacacactaagtccattagaacaatttatgtgtgtaaatcgaggtgtaagacacctttaatattgttttcctttgtgaaatatatacatagttttaaattgcaaatctttctcttaaggattccgaacgatgttgtaagggccttgcattgttaggattctctagctcctgtccgctcattaagtccagggatcaacattagtatcgcttgggaatttgctgggcttcccaggtggtgcggggtaaagaactcgcctg

SEQ ID NO: 39025 - DNA, 1091 bp, Bovine  19866880412476
  misc_feature (1)..(1): n is a, c, g, or t
nctaggagtcggacacgactgagcgacttcagtttcacttttcactttcatgcattagagaaggaaatggcaacccactgcagtgttcttgcctggagaatcccagggacgggggagcctggtgggctgccgtctatggggtcgcacagagttgaacacgactaaagtagttagcagccagcagcagattgtaagagtattccccatgattgttcttatggttccttttatttttaaatattgatgtaaaaacataaggacttccttgatagctcagttggtaaagaatccacctgcaatgcaggagaccctggttcaattcctgggtcgggcagatccgttggagaagggaaaggctaccccctccagtattctggcctggagaatttcatgggctgcatagtccatggattcgcaaagagtctaacacgactgagcaactttcatgacgatgataaaaacatcaagtgctcacctggagatgcacagcttctcagatgagtacactgtgtgactgtctcaccaagcaagaccaaggacatttcatttttgtatttatacttctgcttcggtgagttttagggtaatgtgccatgtgaggtaaggatatagatttcttttccttaaatgacaaatcagggatcccagcattcagacagcatgttaatagactcctgtgacctgcttttcctcactccacctttttggggggctgagtcctctcagaatctgatgagagttctgaatttctctttagaagaatacacaggtgcataaagtttaggttagaaactctcatgggtttaatttcttgtgttgcaggaaattcgtgtttttcaacatacctcagatccagtacaagaacccctgggtgcagatcatgctgtttaagaacatgacgccgacccctttcctgcggttctatctgggtgagtgtcccagctgtctggcgcgggttggaaaagaatttccagacatagagcatttcagaagggagtgagtttattaagagcaaagagcagagataatgaagacactgcaaacccagcgggccagcacctggcagaccagggggagcccccgctttcagg

SEQ ID NO: 39026 - DNA, 1058 bp, Bovine  19866880460150
  misc_feature (1)..(1): n is a, c, g, or t
ncacctggggcagcggcagagcagtgtctgtaaccccagcctctcttctgacattcgtttcaaccccgtgtatcaacaccctgtctgtgccaagccttggaagggaccctggagatcagacatgctcagagcacaagcaaaaagccaggcgcagccatgcagctgtggggcccagagcaaaatgaaaatgcagtgcctcctgttcgaaaaccaagtatttcacacggtgaccgtagaacacacaggtttaaaccaagcccgggccctcctggtcgtgggtccctgcatgcctgccaaggccacgtgcccgtgaggctggccccgtgcacgtcacagcttctgcagcagcatctccgagtgcccagcccccagcctggcagggaacagaagccaagtacacacgtactgagcagtaagctcccccagctctgtgacacggacgcaggatcgtgggtttgcagctgggtaaactgaggccggggaaggcttccagcctcgccaggtctcaccagagccgggatctcggcctcctgccttgagtgtaggtccactgttccaggctgaccccagtcccgacctttgttttcctgatcccagaaacaaggagtagtgtttaccgcgggctgaagtctgttttatttttgtgtttcccaataattgattccaacagttcctacagacgtcctgctgagggaaaacatgttttgctcagtcaaccttcgacttcctcgcggcgcctcggtggtgggggcccacggccacaaggaaagcgtggggtgacttttcccttgtttttttttttttttttccatctcactgtcgggggacaacaaaacatgttttcctttttctccaaaggaaatcggaactttcttattgactatttgttgcctaaaattcagcttcctactcttgtgattatcttggactggggggagttatgcgaccaaacttcagaataaaggattatcattttattgaaaggacaaccatcacagccgaaattttcattcatgtggagccatcgacacctctgaaatttgccttggcttcctcat

SEQ ID NO: 39027 - DNA, 1637 bp, Bovine  19866880492357
  misc_feature (1)..(1): n is a, c, g, or t
ngtggcttctaaggacgctgtgtgtctactctgcggacaagcccagcccgagcctgtgcccaggagcacttagcacctaggcccacagccccctcgagcgaggacacccccagcccggcagcaccaccaagcccggcgcccccagcctctgtccaggacctgctgctcctgcagagccgcctgcgggccggccccccggttcccagcgccgcacctccgtctggggcaactcctgtccaggcctccttccggggatgtcagccctgccgccctgccctccataaatctcacacctgtaactctgtctggacacctgtcaaaaacccaaatgttcatcacactgctcagcagtaaaaatgagtgagctacggatacgcacaacgtgagtggctctcaaaaccacgagcgaaaaccagacacagaagaatatatactgtgagactcgagatgaagtcctgaaacaaacaaaatgaggcagtcttggacgtccctggcggtgcagaggagaatccgcctgccagtgccggggacacaggttcagtcctggtctgggaagagcccacagcttattcagagcaaccaagcccgggcgccacaactgccgagcccgcgcacctggagcccgggcccggcaacgagaagccccgctcacctcaactcgagaaaagccagtgcaaagcagtgaagcctcagcgcggccaaaaataaacaagcaaataattagcctacagtgaaagaactgctggcagccggaattccctggcggttggtgcttaggatgcagtgctgtccctgctgagggccagggttcgacccctggtcggggaacgaagcccacaggccacgcagttcagccacatacacacacgaaaggaagaaccgcttgcagtgatcgcctctgctgggagtgggagctgacgggaaagcagtcctgggggactccctggagtaggagagatgttgtcttcactggggaagggtgacacaggccccgcagatctaccggagctcatccctctgtgcacaaaagacctgcgcattatgggtaaattatcccacaataaagtcagtttttaaaaacaacagcacaaacacggaactggcaaaagccccgccacgctcctcggctccaccttgctctgcttttcttttttcccaccgcgctcgtcttctaacaacccacgtcactgagtccccgttcattctgtctcctcccgctggaatgtcatctctacacgactaggcgtctttgaccctgtggctccctgataccccaagcacccagaagagtccatgggtcctagcaggagcctgacacatatttgttgaatgaatgaagaacatcatcgatttgtttcctgatgcatttcccaatctacactgcatttgactctcgtaaccgtgtaaggcagatattttgccctcccctagaaatacggaactaggaacaatacttgatcagaatgactgaggagagagccaggctaaaacgttggctctgacttccagggactgagcccaaatgaagggaatcttcacaatttgtgcctcaagaggacaggagcgcatcgtgaaagtctatgatccagaaggggacacacacacacgcagttcaagagaacgtggccagtgctgag

SEQ ID NO: 39028 - DNA, 1466 bp, Bovine  19866880518152
  misc_feature (1)..(1): n is a, c, g, or t
ncccttctgacattctgctggtctgcagataaagtggctttctacatctatttgctgaccctctggcagctccattcctcagcttcggagactcagaaaaataggttcgtttttgaactgataagtctacaagacaaagagaccactcagaattgtggtcatctgggcaaccagccagagggatctgaccctagcaggcagggcagatctgttttaaagccaggactcaaaggaagagaagatgaatacaatctgtgaaatgttcactggtttgaggaacctcatcccaccccctaccagtccctttcttgtgacattaatttggaagacatgccttacaaacagatgaactctggcttttaaaagttttattgagatacaattcacataccatacaattcactctttttaaagtgcacaatggtttttagtataggcgcagttgtgcaacaatcaccactaattttagaacattttcatcacccccaaaagaaacccattagcactcactccattcattcctcctccccccaggcaaccactaatgtgctgcctgtgtctacatatctgcctgttccggacatttcacatggatggaatcatacactatgcggtcttttgttaacttgctcctttcatttacaatcacgtttctgaggttgatccatgttatggaagtgtcagtccttcaactcatgtacctcattatatggagagacgacaatttgttgatccattcagtgtttgacgacactttcgttgttcccacttctggctgttacgaacactgctcctgtgaacactcaggtacaaattattgtgcagatggagactttcactctcttgggctgggagccaggaatggaactgctggggtcatatggtaactcaatgtttaacattttcaggaactatcaggctgctttccaaagtggctgcaccattctacagttctttttgcaaaactggtattgtatgagggtttcaatttctccatgtccttgtcaacacttgttattatattgttttgattccaccaacatcctagagggtatgaagtgctatcttattgtggttttcatttgtacatccctagatagcagactggttccaaataggaaaaggaggacatcaaggctgtatattgtcaccctgcttatttaacttatatgcagagtatatcatgagaaacactggactggaggaagcccaagctggaatcaagattgccgggagaaatatcaataacctcagatatgcacatgacaccacccttatggcagaaagcgaagaggaactaaaaagcctcttgatgaaagtgagagagagtgaaaaagttggcttaaagctcaacatttagaaaactaagatcatggcatctggtcccatcacttcatgggaaatagatgggaaacagtgcaaacagtgtcagactttattttttggggctccaaaatcattgcaga

SEQ ID NO: 39029 - DNA, 1182 bp, Bovine  19866880518564
  misc_feature (1)..(1): n is a, c, g, or t
ngagcttccctggaggctcagacagtaaagaatctgactgcaatgcaggagatgcaggtttgatccctgggttggaaagatcccctggagaagggaatggcaacccactccagtactgtgcctggaaaattccatggacagaagagtctggcaggctgtagtccatgaggtcgcaaaagagttggacacgaccagcaacccattttcacactattgtcgtgctaataaagtcaggcttcccctccttgacgtcttctcctgctgttaagtctagatctgcactgatacatgacgtaatacgagcgtcacttctcaacatcaggtgtcagacactggcaggcaattattttccagggggtggggactctcatttcttatctttaacaggtggtatttcacacaggcaccaccagagctgccagagggacagatcggccatgaaaaatgcatcactcccaccccgccccatccttcctgcaatcaagctattgatctgcgggcgccgtctcctcggaaaaaggtcacagtgggtgtcttaggcgtgatccagcaagaaaatgccttccccacgggagccccgaggagtgacaagtacccagtgtccacgtcctgctctctgctctggagctcagggcgtttcaccccttcccctctgagatccaaggatggcagtcagaaagaccctgcccgacccctcactgggagaggagactgaggcgcacgcagggcgggggactcagcgagtccagagaagggcctctgcagaatggagtctcttgcttcctggtccagtcccttcaccctttgccatcaagcatttcttctgtgggatccccagtggctcagcggtaaagaatccgcctgccaatgcaggagatgcgggttcaattcccaggtctggaagatcccctggagaagaagatggcaactcactccagtattctttggctggaaaattccatgaacagaggagcctgggtgggcttctcaagtccatggggtcgtgaagagtcagacacaactgaacatctgcacagagcagacttggggctcccagcttctagtgaagcagagaaaggcaaaatgcagagagactgaggccagagaggccagggacagcgaatcaagtgagaaatcccataaggctgagtcagaaggactgagtgaccacaaagtgaatga

SEQ ID NO: 39030 - DNA, 1029 bp, Bovine  19866880559166
  misc_feature (1)..(1): n is a, c, g, or t
ntcagcttgcctgggattaactccccagcaatgccactagccagctgtgttaccttgataagctacttaaggcatctgagccgcagttttcctacctgtcaaggagagtgtctcctttcccaagcactgtgaagattccatgagagacacatggactcactcaccttgaatggacgtggacactgagaaaaccatctatgatcgtttaaatgtcaggaagcattaccttaatatacgcgtcacaagaatctctgtcagattgctctgatttacttgctatgtaggtcacatagcaaggaaatgcctgaaaagtacaatttaatggccacttattaagctcttcttcccttggcctggaatgatgctctggaattgtaaatgagaaggacccttgttccctaccagctggaggagacgcaaataaacaaataattgtatggtgtgaaaagggctctaagaggcatctatggtaggcacttgtgggttttggctgctgggtcccctcttggcctgggggcaccctgaactttccctccagaagttgttcctcccaactctagttcctggacttcacagggtgtcatgtgactccagctaggccaatcagagctgttgatcccctggtcactgggattggtccaaggaccagcacatgacccaggactgaccaatgagactcaatcctgggactttcacaagtttgctgggagaggcagccttggactgaacttcaagctgggaggtgaaagctgagcttggaggggtttctgggggctgcctgaggtagaagcccacacaaaggaaggcagagccagtggatgctggaagcagagtccaggtggctcagtttaaccctttgtctcagctgtgttcaaagcagttctaccacatgggtgtttccactaaataaaccaatggtttaaaaggaaaaaaaaaaaaaaaaaaaaaacactttttttcttaagccatctgctaccaagaatcatgcaaaggagtgtgcaagacacgaaggaggcatagttgaacaag

SEQ ID NO: 39031 - DNA, 947 bp, Bovine  19866880643294
  misc_feature (1)..(1): n is a, c, g, or t
nttagcctaacctcactgatataactgtgcggtcagccccttctctcagatgaagcagctggctctcagagacgggaagccacctgcccaaggccactcagccagggtagacattgggctttctccccaccctggggctagggaagaccactctaccacagtatccccaccctggtattacctggagaagccggtcaaagggccggagaccccccacgctgggctggcccgtcaggccgcacggtgtgcacgtagacgcccttctccaggaggccgtctgagacgctgaaaccgaagtcactccgcacggggtccttgtgcagcgtcacctgggagcagcaggaggaggggccctctggagccctgaccttcccccagcgtcccacagttgcccaagtcccttgggctggcatcggatgcctctcggactcagccccagcccacctggatgcccccccgacctctgaggaccctcagtctgcagcactcggtcaccgcggaagccatgggaacagagttcctttccattttttttcagtcttcccgcttccattccagaaccacgtctccgtagggtggccatgtgcactcaccagcctccgacacttcccattgccctgcccaccaaagagctcagaatctcctgaagactattatggggccagaggtctctttgctcctgtgtatcttattttcctagactatagcctacagttgacaaaaatgctggcctttcctttgaaggtagcgacatgcatgcgtacacacacatgggcttccctggtggcggcagcggtaacaaaatccgcctgccaatgcaggagacgccatccctgggtcgggaagatcccctggaataggaagtggcgacccactccagtactcttgcctggagaatgccacggacagaggagcctggcgggctacagtccacggggtcatagaga

SEQ ID NO: 39032 - DNA, 913 bp, Bovine  19866880645520
  misc_feature (1)..(1): n is a, c, g, or t
ntgcatgggcaagtgtctggggtgagagtaaggatgaacacgcctgggtgctccccaggcttggctctgggactttatgcatccacgtggattatcacatgatgacactttcatgcaggtgctgctattcccatttgacagatgaaaagacagggccacagagaggttaggtagcccacacaaggtcacacaggaggcctgcgtggctggagcccagagagggcagagggaagcggggatgggagaatggagggggcagaagtgccgggcctcgtgagaggacgctgacctgcagcagccaggagccactgaaggaaggaggaagtcagggcatcagccacgcttcaaaggtgccctacggccagggtacggccaaagttgagcaccagtagacggcggacagatacctctcttgttttgcactgatggagcctcagtgcaccatggtctttcctgcagacagcacggtccataccgactcctgacaaggccatcttggacacaaaagcacaaattttaccatgtgatgaacataaggaagtgcttcctggcacgagcctcgaagaccccacttaaacctttgattaatcctctacaaagcgcagttaagccacttccgcggtttctgttgccgtttttgctttactgaggtcgatttcatcaagacggagtctttcttaattaaaacctgtaatgaagatttgactcatcaatcagttcctttgcccacagcacacaccacttgatcacagcatcttctgccgcctcagattccccgttccggccgtgatttctgtccatttcaattctatcgggtcagaattttgcagatcttaatgttggcatggagatttgattcttctgtcaatttttagaatcaataactactttttttttttttttttttactgtg

SEQ ID NO: 39033 - DNA, 1126 bp, Bovine  19866880646725
  misc_feature (1)..(1): n is a, c, g, or t
natgcacagaagtcgttccgggaaggtgttaggctgaagcagggtcagtcctgcttattttgacaacgagcttaggagctggccgtcataggcctcggcactggttttcccacggcatcagcaagttaaaagcgacttctggttaattaacactcacattttgaaaaggaacgagcattgcattatatgaaagtgacagtgaaagtcgctcagtcgtgtctgattctttgcgacccacggactatactgtccatggaatgcgccaggccagaatactggagtgggtagcctttccctttgccaggggatcttcccaacccagggattgaacccaggtcttccgcattgcaggtggattctttaccagcagagccacatggcgggggagtctaaaatgacttgaagagaattaactatccctctctctgtgaggccttaaacctgtagagtccttttacaccacactctccattcagtgccgtgaaacctagatcaaacatctgcattatttctccctagtgctggagagacaacctacagtctggaacatgccggtgaccttcgagtggaagtgcagaaagtgtatgagctaatagacgcattaaggtaaggtctgttaggtgatgttcctacctgttggcttaagtggaggatgtgctgggtttaccgggtggtgggcggccagcagacctagcttacctggtcctggtgatcgggggtgtgtgtgaggaggaggctgagggggctgccagctccggccctcagtgcgtctcggtaacttgcttgaggagtttaccgttcatgattgttaaaggaacaggagccggttggcgtcagctgtgtgtcggtcacgggctgcttccactcagggtggctcttgtgttctgccacagttaccctgtgacgtagagattaacacccccatttcataggtgcaagagtgcaccccagctagcgaaagtgctggaaccaggatggagtccagactctttcttcagtttgaccactgcttttttttttggctgcactgtgtggcttgtgggattttatttccccaaccagggaccagaaccaggcgtgcggtagtgaaagggccgagtcttactaaccaccagggacttcccag

SEQ ID NO: 39034 - DNA, 1170 bp, Bovine  19866880657892
  misc_feature (1)..(1): n is a, c, g, or t
nccaggcctggacgtgccctggtgttccagactgggctgggacgtcattaaggacgtcccttctgtcctgtcctgtgcacattgtagacagggccgggctcagctcagaaccctggcttccttcgggcctccgcccccgacctgctaggagggccagccgggtcaactctcctttctgggtctctggtggctcacatgtcagataaggcagctgaacagttaccccaagtttaagaccctcctggttttaggaggggcacgtgaataatgacattacacgtcacaacattcccctgaaatctttcaagtaatacccgagggagaggcttaagccctcagctttcggctttcctggacgatcctcgccctaaggggtcggctctggtctccacggccttcctgccatcctcgggtaacggcccccaaatgcttcacagaacctgtagtccgggcttgaccggaggccgggtacttaccagaaacaggtgccgggggcgtctgttcttccctgttactttcatcagcgtcccttccttcagaaactcctgtgagcagagaagcagacctcggtgatcaggctgaccccctactccatccagcgggaaaccaattacgatgcctcccggagctcgagtgagcggctcatggcagaagccccctgcccaggagccatgctccacgcctggtggggcagccctggagacgggcatctggcctttggggagcaccctctttgaaccacaccaacccagatagcgggccagccacagagtggtcccaacaatgactcggcccctggtttgctgccacgggcatccgatgagaacagagcctctgagatgccagtttgctacagtggctgaagacctgcaaacagttgctacagccccctcaattctggaggatacaaacagatgtctgatcgtcttcactaagctgaggcctctggccaaaacgccgggtggggttttacacctaagtaccatctctcactcctgttacttgtcctttgaggaccagaacaggtcaggaatacattttttttttttttactactcttgagctgagttttgtgttttccatttggaagctttaaagtgggtaaatctgtcttttaaaaaacgttggggttcctgagagatggtttcccagccactggactaaactgag

SEQ ID NO: 39035 - DNA, 1207 bp, Bovine  19866880737018
  misc_feature (1)..(1): n is a, c, g, or t
naccccatcctgttccaaaccgtaggcaagtctgcgttcccatcttactgtgtacttatggttgccaccatgtctaagtcgatggtgtggtttttgttttttcctggttttatcgagtagcaatgtgacctcttctttgtcttatggaaccttagtaaactaaccactgtcagagactggggacaggtcatgtgcaggggcttgggggcctcggaccccggtgaaaggccacagcgtttcgggatggttggcaaatcgcaacattctggaaatggcccaaaaaaggccccttcttctacgattcccagaccaaattctagaccaaagacacacgcagaccaagtccccaggccccgcctggaaggaaggtcagccactctcccaaaccaggtccggggcacctggccccagcctcgagcctcctgcctgaccgcctagctcttgtgttcccatagaactcagctctgtgagtacctggtgtaatgacgcgtgcctctgacgtctccgcataaaggaaacttgtcatgaggctcacgagtctggttcgcctgtctctgggcagccccccttcacccccagccgtgctctacctgggacggaattctgatgtttgcagccagatctggaagggaggcaagagggaggcttaaaggatgtttctagaggtgcagaaatggggaagggccccaggacagtctcacccggggagatgctccgtggagctgggcctgcctgggccctgttcattgctgtggtccccagtgatggaggggcttcctgggtcccccagtcagcgccctcattggcaaaggggcacgttcgccttgaagaccaaagaccagccttacggcaaagggcatgctccgtccccagagtccggggaccctgtgagcgtcctcaggggccagctggaccccaagctgcagttcagtgggactggcagccccggcctccttggccccccacccagcaggcctctaggagccaggcgttgggagcctgggagatcctgcaggagatggcaggatctagcctgaggccacgtgggacattcatagccatcacagagccttggatagtttctgggccctgggcagctccctctgcaaagcctctggtcccgcattctcaccccaggtccctcagccggtggaggagggcagtgtaaggggagagggggtcttctcagcctgacccagactgcccc

SEQ ID NO: 39036 - DNA, 1730 bp, Bovine  19866880752862
  misc_feature (1)..(1): n is a, c, g, or t
nggaaaccgcagggcctggcccgcctccccacacctgccccttccttctgcagagactcaagtacctgctgaccccgagggaacccaaccgctgggccgtggagcacgagggggccatgccctacagctcccgcatggccgtcaacaacacgctcaggaaacccacgcacatcatcgtggagaccatgatgtgagctctctccgtggacaggctgctctcctgctgtttactaacattagattctcgtaggaccaggtttacagagctttatatttgcactagggttttgtttattttttcaattgtcacagaaaatgttactctgtgtgtgtgtgtgtgtgtgtgtgagcgtgtgcacgtgtgtgtgtgcatgtgcagtgttgggtgtatgggtatttccttttgatttggggatgttttgtacaaaaaaagcaaacccacgggcagctgtccggggcaaggcagaactttcatacggagttagatgtattttatggggacttggtaaaattttctttgtatttttttttatgtagacacatagagattgtcaaacacttttaccacttgaatagatcttgccagcaatagatctcatttttaaaagcagttcttcggtgcttgtgcagctggcagaaagttctgccccccacaccccaccagaacactgggtgggattttaaaggtgtcgtacccacagacctggttcaagtgaaacaaacagctgtctggccagaccccgggggggctggacagaggaaggtgcctagtgacgcttatcgtagccaacaagagaggtgcccaaaccgtaaaccaacccctcaagtaaagggactcagagtccacagaaggggcccagaggcgaacgtctgatgctgagagcgccgggagcccctgcgtcaggagggtcccttttatttcaggattgagggtggacagtcagggcgagagggagaggcatccttccccggggtgtcccctggagcgagtggaggctggccccgcaggaactaggggtctcaaggctccagacctcacacggatgggtctgttgccttagaagggggctcctatcagcttccggctgaccccccagctggcatctctcaaagctgcctgtaggagaagcgtgattggtgaggggtgcggggtgagccagtggaccgaaggatgtgcgcccaggtgcccgggagggggcctggtgtcgggggagggagtgctcctcccctcctctctccaccctcagctcgtcctcgtctcccagaggctcttgttaaagaccccggcctggggccaccctggcgcctagcagggagcaccgggagcaagctgtcatcggggcgaggtgctccccacactctcctgcgagctcaggcacaggtgcagcccacgcggatcacctgtgtgaggaagcgccaacgcagcgctttctcccctcccctgcagaagccggggtcaggcgtgcagtgggtgggaccgcggcagaagctgagtcagggcaggcaccctcaggcgggcagcccactctgaaccaggactaaaggcaccccacctttagaatcccgcccagctcgcatctggacctaagctgtgccatttaaacagacacttccaagcccagagtctaaagtaaaccggaacagcgtcacgcacgagggcagtgatcgcctcgggggccgtggagcgcggtctgggtcagcgttcagagcaggggtctatgagtcctggg

SEQ ID NO: 39037 - DNA, 1336 bp, Bovine  19866880764034
  misc_feature (1)..(1): n is a, c, g, or t
nagatgggcctttccagccgggggtgggagccagggtggggaggggggcaaagagtcgggcgagggctcctacctggtgtccactactggcttcagcgggtccggacaccctttgaaagtgtgggtgacttgggcctatgggtacgtgctttgttccggagcatctagggcactcatcagagtcccagaggcacctgagacctcccaaaggttaacaaaccaggctcaagggcaggacctcctgcaaggcggttctgatgcgggcgggcgggcggcacgcacgtgcccggctctgctggctaccagccggatcatgggccgccacgaggagcagggagggagttctcactgctgagctcctactgaccagcaggcctccgggatgtgctgcccagcctgaactcctcttacatcagaggatgctaattcagggcctccagcaagtaaaaaaaacccaacaaactaaaaccgagagagcagaccaaccaactaaccaactgacgaaacagagaacttactttagaaaataccatcgctaagcgaaagggtcaaaaaggcacaaacttccgattagaagataaattcgtcctgggcgtggcgtgcacagcatggttgcacaccagtcacgacgcactggatggtgtgtttgaaagttgctaaggggcttccctggcagtcccgcggcaaaggctctgtactcacaatgcaaggggcataggtttgatgcctggttggtgaactaagatcccacatgcggtgggggggaaaaaaaaagaagttgctaagtgtcaaactttaccagttctgatcacaagaagaaaaaaatacatgtgactatatgaggtgatggatgtcgacaagactcaccgtgatcatttcacagtaaagacatcaatcatctggtatgccttaaactaaaacaatggtatatgtcaattctaactcaataaaactgaaaaaatgaaaattaaaaacatcctcgttgtgctttttttttttggtcctggatacccgtccattaccgcaaaagacactggttttctatttaacgtgggaaacatgagacttgtctttgaactacaactggtttaagttagaaaagcaaaagcaaagggtaaaaacgttctgaagtcaggcagagcggggaggtacggagctacaaggcttcggaggctcgggcctggccctgtggcggccttcagagaggtaaactggaggaccacagagggtgaggaatccgctcgagctcacacaggaaggctctgatagaccaccatcgggttcccggtcatgctcttctcccgcctctgaggatcgcgggtgggagcggaggcgg

SEQ ID NO: 39038 - DNA, 1699 bp, Bovine  19866880837152
  misc_feature (1)..(1): n is a, c, g, or t
naactggagtctcctgcattgcaggcggattctttaccagctgagctaccagggaagcctcccttgccagctctgcagaggttaaatgagaagaggtacctggaggagcactgggctgggagctggagctctgatctccatggctgcctctgccatgagttgaagggacaccttgggcaagacccctcctgtccttgagcctcagtttccacatctgcagggtgaggagacggcaccgagcagtcagtaagtgccatctgctctggcagacgacagtcttttaaactggcttttctgacggcgttccctgacatccccgacgtgggcccctgcgtccactgcaactgcggttcactgttctccctctggaactctcacaaccgtatgttccaagagtaattatcttccgatttcaccttccaactgcatcttaatttacgtttcattcctggatgcctgctggaatgtccaagtcaagcctgatgatttctaatgaggctgcggtcaggtgagtccagcgacccacgacgggtgtgggacccacgtgggaaaggcatggctcagacagacctgactccaaccccagctctgccacacatcagctgtgtgatctcaggcatgtcactgtgcctcctgagcctcagtttctttctaggtcaaatggaagaaataccctgcttttttcataatgctgttgagaagttcaaggcaaaaaaccacataaggtaccgaacaaagtcaactggcaaacatttcctgtgcacccactatgtgttatgcaccaggtaaataaagcaggctctcaagctggacagtctgtttcaaccctgtctcaactccttattaggccagcaaccacaaaatccctgcagctcagttttcccatctataaaatgagaacggcaacagtcctcacgatgaggttactgtgaaaaccgaactgatccaagtgtaaaacactaaagagcagcgtctgggtcaatatgaaccagtaatttgctggtcacgtatgtgatgggggcttcccaggtggctcagtgctatagaatccccctgcaatgcaggagaattgggttccatccctgggtcaggaagatcccttggaggaggaaatggcaacccaccggggtattcttgcctgggaaatcccatggacagaggaacctggcgggctacatacagtccatggggcctcgaagagtcagccggatacgactccgtaactaaataacaacgtaaggtgacagacactgtgcttggcacctacaagctttgtttaattatgagacctcagcaacaaagatcttatcatccccattttcaagatgaagaaatagacactgagaggttaagtaacctgctccaggtcaaataactaagcctacggtggttatggggttcagtcccacggagtctatgaaccactctgctgcatgatcaagaaattcagagccaggcacatacatatcattacgtgaggtctatgattgctatcacacagaaaaagtaaccagatttacgctagatgcaaattacaggatgctggaacccaagggcggtaagtgctgagatttcctgggaccaagcctgccgctaagcgttttctggctcactccaaaccccggagtctcggagaatggagggcttgcccaagtctcgtgcagggaaacgtgggaaaaccgcacggggctctcaccat

SEQ ID NO: 39039 - DNA, 1806 bp, Bovine  19866880837153
  misc_feature (1)..(1): n is a, c, g, or t
ncatggcagaggcagccatggagatcagagctccagctcccagcccagtgctcctccaggtacctcttctcatttaacctctgcagagctggcaagggaggcttccctggtagctcagctggtaaagaatccgcctgcaatgcaggagactccagttcgattcctgggttgggaagaggagaccccagttcgattcctgggttgggaagatcccctggagaagggatagtctacccactccagtattcttgggcttcccttgtggctcagctggtaaagaatcttccagcaatgcgggagacctgggtttgatccctgggttgggaacatcccctggagaagggaacggctaccagcagcatgaatgtgtgagtggcagatatttaattaaaatagaaaatataaactggtaccaggggcctggctgctatggatgatttctatctccagaggctgtgaaaaatctcttcctcctgtcactgtgactccccacctgccacccccgccctcagttaactcttggcatcttgattgacgaggtattctgcattcgggtcatcctcaggggtagcgcattgccagaaggtcttgggcactggtgcctcagggtggcgagggtgtgcccccaagctgtgtgttttggggagagagagggtccatccgtgcttggttcttgctgtggttgttcagtcgctcagtcgcgtccgactctttgcgaccccgtggactgcaacacaccaggcttccctgtccttcaccatctcctgaaatttgctcggactcgtgtccgttgagttggtgataacatccaaccgggttatactctgtcacccccttctcctcctgccctcaatctttcccagcttcagtcttttccgatgagtcggcttgtcacatcagatggccaaagtgctggagcttcaacttcagcatctgtcctcccaatgaatattcaggactgatttcctttaggatggattggttggatctccttgcagtccacaggactctcaagagtcttctccagcaccacagttcgaaagcatccattctttggccctcagccttgtttatgttccacctctcacatccatacttggctcctgggtcctagagagtcagaaggttacactgaacccagaggaggaagcccctgctctgatttatcctgtttaatccatccctgacatattctacagctcagcaaaaccggactcttggccatacttccaaaggccttgcgtctaactgcctctgggcctttgcacactctgtgcctctgcctggaacacctaacctccttttttttaatttttattttatactggagcagagttgatttacagtgctgtgtaagtttcagatgtacagcaaaatgattctgttttatatatatatatatagggtgggcaaaaaaattcgttcatgttttttcataacatctttgactatatatatggaataggagcttccccatatataaagaatctgcctgagatgtaggagacatggtttgatccctgagttggcaaaatcccatggaggagggcatggcaaggcaacccactccagtattcttgcctggagaatcccatggacagaggagcttggcaggcttcatggggtcgcaaagagtgggacacgatgtaagtgactgcacacgctcgaatatttatatatatgtattatatatatatatatattctttttcagactctcttcccatttaggttattacagaatctttagtagagttccctatgccgtacagtaggtccttgttgattatctttcttatatatagta

SEQ ID NO: 39040 - DNA, 2835 bp, Bovine  19866880867914
  misc_feature (1)..(1): n is a, c, g, or t
nacttgtaaaatattgataatgtatattaattaattattaacagggttatgtggagatgtaatgttttaacctatggaagtccacagaccaggccctgtacaaaaacaccatccacgatggaatgctactcaaaaagaatgaaataatgctatttgcagccatgtggatggatctagcaattatcataccaagtgaagtaagtcagacagaaaaagacaaataccatctgatatcactcttatgtgaaatctaaactatgacacaaaatgaacttatctataaaccagaaccagactcacggacataaaggacagacttctggttgcccactggagaggattgggcaaggggtggattgggagtcggggccttgcagatataaaccagtatacagagaatagataaacaaggtcctattatagcatagggaactaattcaatatcctgtggcaaaccataagtggaaaagaatatgaagatatatatatacatatatgtataactaaatcacttttctgtgcagcaaaaattaacacaacattgtaaatcaatactcaataaaataaattagggaaaaaaaaagattccccaggacaaggctataagtattagttttattaagatagccaaccgggtccctgatgcctaccgagggcttgtggatcaattaaaaagccctctgtcactcaccttgcggaatgcaaacctggtaaagaatttccttctccagattttgcagagactcaaatttttcttcatagtacactttgctctggtcgttggtgatctccaaaagctgagagaattcgacttcacccaccccaatggcaaaaataatgatgtttctgtccctcagggccttggctggtaaagctacgttgtcccgggagaccccatcagtgaccacaatcaaatactgatggacactgggcctccctcctcttgaactcccaaaaaaaggcagaataaagttcagagctttcccagtgtatgtgccaccgttgatttgcttaacgtctgagatggctctgtgaacgtccacctttgaggagtaccggttgagcctgaattcttcctgggggtctgagccgaattgcagaaggccaatctgaatctcatcagcaccaatattagactggttgaccattcgcttcatgaattccttcatcttttcaaagtcttttggagagatggattctgaaccatccatcaggaagataatgtcagctttcctattcttacaggctggaggggaaaaggagaaggacagaacatttactcagagtctgaaacaattaattacaagtccccagggagagtctggggtgacacatatacaacgtgaaaatatttgtaaagggggtggaagtggaagtcagggaaataaatttctgtgacccaccataaatcagtctcaaaataagacacggccatatgatagagatctatcatatgaaccagcttggtttattctagctcatccaatacttttagacctatgaatccacagttccagaatgaagcctattcaaatagattacacatatatactcgaagagagagactgagattgaagaaaaaaattcttactctctaaggaacagatgtcttgtaccacttcttgttggatggtcttcaaggactcaaaatcatgcacgaaaaacattctgtcttcagcaatctcttgaagctcagcaatattagcatctctgactccaactgcataaatggtgactccatggcccctcagcgcctctgcagcatcagccaccgggtccatagattggccgtcagtgacaacaaatgagataccaaggcacgttgctgcgagcagagtctgcaaagacctggatcatgctgcccagggcctcacccatcttggtgccccctcccttctgctggatgctgtcaacggctacctccaagccctgccacactggagtgctggctgagggtaaactggggactgacttcatccgagtactgaacgactccaaactggactctgtccggtccaacgtggaacatctttatcacctcattcatgaacaccttcatcgcgagaaagtcgtcttggtgggtactgccagacccgtcaataaggaagtaaatgtctgccttctcgatgtgcacacagcctaggcaagaagaagcagcagcaagccgtcagaatggcatgggagagggcgtgggacaaggctacaggtcccgatcccctggcactccctcattgctgcctgagactctgcctgtgtgtgttccttggccagaagcatgatcagcccataccctgggcaggcaagggagtgagtgagagtggccagcagcccgtgattggaagtgggtaatggataaatattccagctccctcgccctgtgggtgggaccactcagaggacagctcagcagtctccctgagtctctggcagaaccaagccccaggtgcctccatgcctccagcaatagcctgctcactaactcagcccattgctggtgggctctccttcctctctccatccccactcccctaacagtgtcaccagagctccactcccagataaatcacttgcatccatagctcatatcctcatctcagagtctgcttatgaaggcatgagataaacattgcttgacatttctcaaatggggaaactgagaacaagctaaaagtaaaatatcagcatatacatggcaggaaagctatgacaaaactagacagtgtgttaaaaagcaaagacaccactttgctgacaaagatccatatagtcaaggtgatggtctttccagtagtcatgtaccagatgtgagagctggaccataatgaaggcagagca

SEQ ID NO: 39041 - DNA, 1309 bp, Bovine  19866880926082
  misc_feature (1)..(1): n is a, c, g, or t
nagaggataaaagtgatgctagaacctccccgatctatgggcaaaaaagggaaactggggagagtgctgggcaggagagaacagcagcggtcgccgtgtttatggggctctggtctgtggacccaggaggaagtgtgtttctagacatgggctttaagaaaggaaacctggagtcacgtctgcggcattctcctttcctccaagacagagggaatacattttgctccaccatgcaaaggtgtaagaaatgtcacattcctatttctgtaactccagttaaatctgctctgagtccctgcatgcctgacaggtggggactttggtctcgtcattatcggggcttcttttcctctgtgagtttacataagaactctgggcttgcacgctgttggaaagtcaggcaggacctaggcccctggaggtcaccactgttgcagccacaactgacccataactttcggaggctgtctgccacaagcagattgtcatatggtcattgtaactgaccacagagtcagtcacaagagaccctccctgtagcaggtctccactgcacatggaaattccaaaaagcctcctgttaatctcagcttcctcactttttcacctgaaaacacaaacgctcctcctaatcaccccaaaccttgatggtaagtcggctaaatccccctccagggcctcagacaccaaagctcttcaccttctctctttggggagacaatgcaatggaatctgagatcttcagaagcacaatggtggcctctctctttggtggagggcacgggccaggggtgggaaggggtgacagtggaaactacaatcgcttgttcaagcgctgtgtatcaccagtagatccccagggtctggcacatagtaggggctaaaaagacagcacttagtaggtactgttagagtctgttgaactgaactcttgaggttaaagctatcagcagaaaccaaccaagcaacaaaatggaaaaccaactattaaaaaatatatacaagtaatcatgactttgagctctgaacacactgggcaccagcccaagtttgggcaattttaatacaaccaccattttgcctccaaacaaactggcatcagctccagaagcctctctcggcctcttaaagagagccagtttctcctcctttaagtggcggcattcctccttgggtggcaaaggagcagtgtccacccccactcgcctccagccaaggacagcagccaggcctcaaaggtttgatagctaagcagtatattttagagagaaacacaaaattatgtctcatcaatctgtaagtaccacca

SEQ ID NO: 39042 - DNA, 777 bp, Bovine  19866881013572
  misc_feature (1)..(1): n is a, c, g, or t
ncgggaattggctgctgctttcactcccgttccccaggcactgggcaccttgaacttttgttatctgagggactggggggcaacctgaggctgaggactggtgtttatttttctgatcccacacagagatcagcaggagcctggaggagagaagcgagtgtcctctagaagggtttattgtggcgaagagaagggaatctgttgctgtctatggggccacaaaactcaaggtgatggttcattagaacacaagtttctctctctccgtctcccatcacacacacacacacacaaacacacccctcaaaagcatcatgaagagtcgcagagttccccaattcctgtggccgtgtgtgtttctcttcaagagacatgactactacataaggtgctaagtactgtgcagtgacccagacacacacactgggtaagtgtgtgctgagcacaaccacacttttggccaacctcactgggcaaggctggccgatggatccaagtatccacacagcagacacaatccagactggattcccccaaaccctaggacttccgagcctcaagatgactgctcataatccagaaacccaccctgagtcttgagtgctccactgaccagaacactagatcacttccccaaatctaagcacgcgtgcatgctcactcagctgtgtccgactctttgcaaccccacggactgtagcctgccaggtttctctgtccatgggatttcccaggcaagcatactggagtgggtggccattccttcctccaggggat

SEQ ID NO: 39043 - DNA, 1136 bp, Bovine  19866881035525
  misc_feature (1)..(1): n is a, c, g, or t
naactataagcacttcaaagaataaaattaaacacagagggaagaaaaacaggggaaaaggaatggtaactccagtactctgatataaccataattcccctcaggttgtttttcctaaacacgccataactgtttgtaatcatggtctacttagacctttttccctaaacttgtcttcttctgtgccattttcctccactgatgatgcctccgttgagggcagaggcagagaatctggctaacactgtactgacttgtccctctacagcgccttacaggcccagcacccacggggcaaataaaaactatcactgattttcttatctctgtgctgacaggcaggccttccccgggagctcagctggtaaagaatatgccggcaatgcaggagacaccagtttgatttctgggttaggaagatgctgacatagaaagtcaaatctatttaagtttctccctattctcataattattttaataaacacaaaaaaataccacagagttgtattattacagaaaataaagacgcataaataattatatttacctataaagtctcctttagtcattttttcatataatttggccttttcttccaatttctccctaggagaaaaaaaaaagacaagtataaaaatggtcttatcactgccactcctggtaaaactgccctccccagccttactgctacaacctgcccaaggggcccagcctgctgactagagctgagtctccacccttaggggaccctcagacccagccaggtctgctctgccaactaatcataaagcctggcccatgtttctttcattcaggactgtaccaaagaaccaaaaacaatgcctggtgcatagcagatgttgagtcagtatttgaggaatgaatacatgaaagaatgaagattctaatttaatttaaatgccaaatgcaacaaattaaataccaaaaaaagagaggtatcgaaacaaaaacattttctgttacggatcaccaaattccacagtaactgtctaccactggttttatacaagggtccctggtctccccttggctaattaggtctctctaagggaggtagagaccaacctcttagacgtctgttaaaaatatgataattcctgttttatacagaacat

SEQ ID NO: 39044 - DNA, 863 bp, Bovine  19866881142098
  misc_feature (1)..(1): n is a, c, g, or t
ncgaaccaaatttttttccctttttaaaaaaagctgaagtatagttgatttacaatagtttcaggtgtagaatagactgattcagttatatcaaattcttttccattgttattgtaagatattgagtctagttccctgtgctacacagtaggtctttgtcatttatctatctcatatacagtagtgtgtatatgttaatcccaaacttctaattcatccctctcacaggaactttattttaaattcacagattgtgatgaattcttcctgtaataagttaattttagttacaggagtgtaagatggtcaaaaatgctacctgtaatttaaaaaacaattgccaagtgattcaattaacactgtcaaatttttaacaaggtgttaaaaatccattattaattctactcttcattagcttttttttaaaactgatttttgtattggggtatagccaattaacaatgttgtgacagtttcgtgtgaaagtcatgggactcagccacatatatacatatcccattatcttttaatgaggagtaacttaagttacatgtataataacaggatttttttttttaacgaattgttacataaaattcactagtaaggggagaaatttcttaggacaattccaccaaacttaacttgtaagtattattatacatacggttttcagacagagatctacaagcttctgtatacagttctatagcatcttcaacattccctttttcatcttcgtcaaaagcttgtgtcacgaggaaatgggcacgctctaagtccaactgatgttttgatttcaaaggatccgcactctttgactgaactaggatcagaaaaaagccagatacttatatatacat

SEQ ID NO: 39045 - DNA, 1279 bp, Bovine  19866881142712
  misc_feature (1)..(1): n is a, c, g, or t
nggtggtaaagacaaaataacaccaccccctggaatggatcagagggttgaagaagagaaaaatgaaaggaagttactctgagaccgtcacacaaatctggaaaaggcagcctttcctcaagacactttgccaccacctgctgggaatttttcataataaaggcttcccttgtggctcagctggtaaagaatccacctgcaatgcaggagacctgggttcaatccctgggttgggaagatcctctggagaaaggaaaggctacccactccagtattctggcctggagaattccatggactgtatagtccctggggtggcaaagagtcagacacaactgagcacctgttgggaatttatcataataaaattacaagacaaagtgtacaaattcactgtcactcctcaggagagcccttgtgcagtgtgcaacctgcccaaccatcctcagcaacctggtgtaccacatactctatgtaatgccacctccccacacctggccctgccccaaataccccacatgttggcaaatctctctctcaggcatactggcagcccagaggggagagaagagaccacggcttacatgagctcttgtgttcccttctccgcggccgcctccgccccattgtggtccgggggctcatgggctgggatccacgaggcagagtgctggggttggtgcaagaaaaggtgtggttcacggtcggcgaggagaagggagatgaggataaggctggggagatgagagcagacccatgagcccagcagagccctccaccccaccccagggagacacaggggtgcctcctccacccccgaccatgctcgctgtgtgacctcaggcctgtctctccctctctgggcctcaaagcttacaggcttttcacagacctggtgaaactcagctgccagacaggggcccctcacttctctgagtctcagcttccttccctataaaacaggctccagcacctccccagggacagagaagagtgaccgtggggagggcactttacagcggttctggtcctggccggcaggggcggcccaggtgggcgtcctgcagcggccgggccgggggctgtggcaggagggcacgcaggggtcccagcgatgcggctgctcgctcctctgcaccttcactgtggtggaggaagaggagagacaggcgttaggggctgggcgggtctggactccatgcccctgaagggtgagctccgtctgcccagcaaggggaggagagcgggaacagaaggtcggagtttctgagccaggctg

SEQ ID NO: 39046 - DNA, 764 bp, Bovine  19866881243463
  misc_feature (1)..(1): n is a, c, g, or t
nagtatgccaaatatgggaaggcatcgctggggctgctcaggacacgagctgaagggtgagctagtggcccccgagccccgcccagggtcccagccctggggccacccaggagtgtgacagctgagcgatacctgccgcccaccccgcctccttcccaccaaccagtcgcccccgcaggtcaggggcgccttgagccagggcaggagttctccaacagcacccgcggggcacacgggcgggacatgccccactggtgcaccccggaggccggagcgctggggcaggacagcccagcagactcgggcccccagggccgggtcagacagacagccctgccacctgcccaccagcggggtgtccggcccccgcccaccctccccgcttggggtctggaagtggccgtcccaggcctggcccctctctgggcagcggtttcagaggactccgtgggttcaggccccctcgcccctcctgccgtccgttactcacccgcctctccaggggtctcccggctgaacccacacagcatgactgctattgtctccccggtgccaccaccggctccctccctcgccctccccagggaggggccgtgggaggggagctcctggctcccactggctgggcacgtgtccacccactgcagcgggcggccctctgcttaaaggggacacggctgtcgtcacggctgattcctggatggggctcaacacccctccccacccctcagccccgtgccacccagtccaagtctgggcagggg

SEQ ID NO: 39047 - DNA, 731 bp, Bovine  19866881406245
  misc_feature (1)..(1): n is a, c, g, or t
ncgtttgagattctccggctctgaatggggcaaacttgactctctgctttcttgtccttaggagatctcccccttcccctgtctccagactcccaaacttggagccagcaaacttgaagcaaagtgaaagtgtttgtcgttgagtcgtgtctgagtctttgcgaccccgtggactatagcccgtcaggctcctctgtccatgggattctccaggcaagaagactggagtgggttgccatgccttccttccaggaatcagacccgcatctcttaagtctcctgcattaggcaggcgagttcttttaccatgagcaccccctgggaagcaagcttacctcaggtcttcccggggcagcccaggagagaaggattttccagtgacggaatctaatttgcacggaacaagacattttaattccagaattgcccacattgaaatatcagagacgctcactgtcacgcagttgatagaacccggtctttttaatttgattagctcagaaacgtcttgttgaatctaaatgaagtgcgaatgagggaaccgtaatacgaggcattatacttaatgggggtgttgcctgaatccgtggctgagaatgtgaacacggggcctggggttgcgttgtggtgagcaaagcggctgggggctcactccaggggccctggaaacgactctgggcttaactgcggtttgatttgttacttcccaccttcggcaaagccaaggaagc

SEQ ID NO: 39048 - DNA, 2136 bp, Bovine  19866881527553
  misc_feature (1)..(1): n is a, c, g, or t
nggaaagattgaaggcaggaggaaaaggggatgacagaggatgagatggttggatggcatcccccgactccaatgggcatgaatttgagcaagctcagggagttggtgatggacagggaagcctggtgtccatgaggtcacaaagagtgggacgcgactgagcgactgagctgaactgaggaagaaaaccagttctcagtacttgtttgtgccagcactttatatgcgcattaggaagcaggcactagtaatatccccactttatagataatgcccctgaggctcagaaaatgaagtggatttctccagctcacatagagttcttagtggtagaactgggctcactcagcctggttgactccatggcagttgtctttcccagtatatcagccaattgcctaacctttggcttaatcttggatttactgcagaatgttggggtgcaagggatatgaaggaaatatcccaatatttgagccccttgcccccatctcatactgaaaatcagtactagttaataatgtttgagggcttcccgggtcgcactagtggtaaggaacctgcttgccaatgcaggagacggaagagatggggggttcgacccttggatcgggaagaccccctggaggaggggatgggaacccactccagtactcttgcctggaggatcccatggacagagaagcctggagagctacagtccatggggttgcaaagagtttcacatgactgaagtgacttagcacacacacgtaatgtttgaggattaggaaccaaaaaactataaaattagttattttttcctgatgggttaaaattagtaataataatgtgaatgccatctgggagctgacagtccttttaaaattcaaaagtatagtaggaagatgtgcgactagaaatttgatgtggttaaggcttaaaagaaaaagcttaagttttaaatttgttttttaaaatttagagtattaggttctggggtaaaccagcccttgacgttattaaaatctgtgccaaacttatttttaaatactttcttccaaaatagaaatcactgaatgcagttattttgatttcctttaaaagtaagtctgtagtgcagggctttttaagtattcagtttacaaatgcctttttatataagcagctgtacttcgatctttaaaaaggaaactgccattatacccttttgtgcagagtagatggtgatgatagatccaagccccctgttccttttgccctggcttttcttgttcttaaccacaagctaaacttgtggtttccaaaacttgctgaaacaaaattcattcagtctgttttatttctggctgttgaaatcttgcctgtcctttaaggctcatttcaaagccatctctgatcactctggacaaaaggaaatactcctttatctgaatttttatgccacttaatttcactcttaaagtcacgtattacatctgactggtgttgtaagttacatttcttactagattgtgcgttctttgaggcaggagtatgtctaattcacatttgtattctgctgttcattgttaagtgccagacatatactagggttcagattgttgccaatcaaagacattttcctgtagaaataataaatggttgtgatgtttaagtgaaattaaaaaaatttttttttttacttttactacatgaaaaagccgagtacagtggcagtcagagagaaagtggttaatgatgttagttgaatctgaatctagaagatgcagatttcatttgctttgccttatcatactctcttggcccagagtaaagccttgaagtgttgaaaattaaatatgtttaccacagagctggaatgaaatatgactgggatttattttgtactagactctacatttaaacatttaattttatatccacttttgtccatttataagagcttgtgatcttgttttcagaattgtaaaaacttagaaatccaatcactcattagagttaattgttggtttttttttttttttttgcttatttgctttattctagttggtagaccttaaggctgaactcttccgaaaacaagaagaattcaaacaagaaaaacttctaaaagatgctggagttttgggaaaaccaaaaccaaccaacaaggta

SEQ ID NO: 39049 - DNA, 906 bp, Bovine  19866881583456
  misc_feature (1)..(1): n is a, c, g, or t
natggatgtgagagttggactgtgaagaaagctgagcaccgaagaattgatacttttgaactgtggtgttggagaagactcttgagagtctcttggacagcaaggagatccaaccagtccatcctaaaggagatcagtcctgggtgttctttggaaggaatgatgctaaagctgaaactccagtactctggccaactcatgagtagagctgactcattggaaaagaccctgatgctgggagggattggggacaggaggagaaggggaagacaggatgagatggctggatggcatcactgactcgatggacatgagtttgggtaaactccgggagttggtgatagacagggaggcctggcgtgctgcgattcatggggtcgcaaaacgtcggacatgactgagcaactgaactgaactgaactgactgtggttactctgttgtacatctgaaactaatacagtgttatgtttcaattacaccttaataaaatacacatataaggcataaaaaagttacagcatctttcaacaaaattaaaattctcagcataaggtagagtagtgagaaaaacgtctccgcagtgaacatgtctttgagtaaagcctccagcatgttggggacagggcaaatgctaagaaaataatccccaaatgggctaatattctgccctttactctcagacccagaggagccaagcagtctgagcaaccactattttcaactgccaactttttattatgcaatggatctaaacacacacatggcagtcacgtcagagattaaaagttgggattctgaatccagggtgctagtgcaaacaagggaagagctcttctttacagaagaacgccagctagtaaacagaatgaaaaaataatacacacggaagacagattggaaaaatt

SEQ ID NO: 39050 - DNA, 1681 bp, Bovine  19866881723413
  misc_feature (1)..(1): n is a, c, g, or t
nagagaggaatttcctatattccctagaaaaataatacaggattacacactgtcagagttatttctgtatttaggatggtttatgtagggtggatttcctgaaagtagaatcaccagtccacgggacatgaacaaaatttttgatgagaagatcagacctgttgacctcaacagttgagtctgtagctttttacttccttggagtaatctttccttgaatgtgtcgtttattggctatacttagtgaactgagttttttagaactttagttctttgattctcttttaagagaatcatctttcctcttgattgggtgcctagatttgtgctagaatctgaaaaatggatggcatattctttcaaattagattgttttaagttagtacacatagaaacttggggtgtggaaattctttattcatggcggtgtgaacttagtttttccaaagttccttctttcaatcccatgcccccatcctacataaaagtaaacatccatgtgcttcttcctgcccttgccctaggctttcttgtatttggtttggttttggtgatggaccagcattcactctgcttaaaaccggaggcaagtgctcttagctccccaccccaggagctccctttcctctgtggccttggggagaatggagaggcttagattcgaagccattccacagtcactcacctgctctgactacacctccttcctcaccagaatcggaggcgcttcctgtgcctattacatattgggtggatgtaggaagcctagcccagtgcttgttattcctgtgggtgttttcatatgtaatgcagacggttatgttgctgccttttgctttcagggaaggaggaacttgtaaagaccctgtgtctttacttaatctactgcggtgttgaaaatgctgtgtgcagaccttggtatttccgagttcttcaaggattccctttaccccttatagttttaaaactgagttggttgcaccccatggtaacattctcctgagccccctgttcaggaaaggtgggctggggtgtgggttggaggggtggcatgtagcaaaggcagcaatctaggtgaagggagaactttgaaaagcaaaatgcgtcttccctaaaaacaattaatcatattattagacaaacggcttcagcagctggtgaaacagcaggaacatgtcaattttgcttccttagttacccagagtgatcgtgcacttgaccttcagcagagcagggtcatagagagggcatctttaaacagctctgtctggttttggcaaatggaatctgcactggcagtttgaagcacatgcccatgagttccccccatgaacccctggctcttttggttggactgtctggctggggaagttgctgagaaaaaatgtaaataaagctgcagagagccgttggcatggtaagtgcagtgtcctgcagaaaaacaagagtcatttttgcagccttttcttttcgtctgtttctggagggagccttcttgtgatgcggtgtgtttcacaggcacttgtttttcgagcagttggtgaaatagccgtggagttagatgcctgctgtgtatttgaaggaagctgatttagtgtctgttctgtgcttagcgcctagcaagttacttcttcatgggaactggggtgtgggacgtgctgggtagattcaagtggggcaa

SEQ ID NO: 39051 - DNA, 844 bp, Bovine  19866881874047
  misc_feature (1)..(1): n is a, c, g, or t
ncctgaccaagagcggaaccccaaagagtgatctcttttctccagcacggtggtccagggagcaagcagaaagtcagagtggcatcagggtgtcatgggaggcagctgggctgggcatcaggggacagcccctcatcccgctcatccgcacagccaggcctggccatctgcctgagccgcctttcccctcctctctgcagccaagctcttccctccacctccaggtctccatttagatgccacctcctgtgggaagccctccttgattccgcaggttggaggtgccccctccaacctgaacctttggctgaacccatctgtctgctgcagggggccagacagggtctgtcaaatccccgtagtgtcttcagggtgtagcaaggcgcctggcacacagtaggccctcagtaaccgtatgtggaatgcgtgtggtaacggacgcccaccagaccctctccccagagagcatggactcgtttctgggggtgaggacggcatctctgggcccaggggaacagggcaggaggggtccaggactgcctgtcagggccctctcctgcccgcaggccgagatgtctccccaggcctggcccgttgtgttctgtcctgcccactctgcctgcgattcattctcagcctctggcacaccgggccgacccagaggccacaggcccccgtgctaagtttagtgactgcaaaatgcgcccgtgaaattccaggcagagccgggggctggcggcacattccaccagctgccttaggcctcccgcttagcgccggggcctgaagggaaaccaagtgtccttccagtgagtggcttggaaggactgggtcacccccccgt

SEQ ID NO: 39052 - DNA, 1484 bp, Bovine  19866881927317
  misc_feature (1)..(1): n is a, c, g, or t
nctggccgggggtgtcccccgtctggaccttcgtccaggggagctgggcgagggtggtgcaggccgaggctgtaagctccccccagctcaggctcacctgtcggcagggccgccgggccgcacgtaggtcaggacaagtgggcgggacttgtgcccgtcttcatgggcacctcctggacagaatttgacaagagactgcagtcatccacccatcgctgcctggtgcccggaggccccgacccagaccttaagcaggcttccttcatcccctctgctccaggactctgtccctgctgttccctgcccctcctatgagacatgggctctaaatcccatccagaagtgggacggaaagtagggaataaaaccaaagtcctctcttgattaaacagcttgctttctctcctgcagtctcatccagtttcccttttctccctggttgctagggagctccgaacttaactttctgttacaacttttccctttcacttcctcaatcatgcacacttggttggccaagttttccatctaatacttgatttaatgatcctggttcttaaagttcagaaaaagattatataaatataaatatatttatataaacatataaatataaatgcaaataaatatataaatataaacattattatatatagttatataaatataagctatatttaaaatataaattatagttgataaatataatatagatatatcataaagatatatcaattacatatttgtaaatatatttaaatataaatctaaatataaattatattaatatataattataaaatgtaaatatattaataaatataaatttatttaagtataaatataaatttaagtataaatataaatttaaatataaaatatatgtatttatttaaatataaaaatgaatttattttaataaacttatgtttattttaatataaacatgtttatttatttaaatttaagtttatttaaatttaaatatatatttatttatctaaatttaaatataaatatattataattcatcagagcaaagcaaaacacacagaattggcattagccttcccgtcccttgaccccaaaggtgactcttacactgacctctgaggacaaagccaaagctattgccctccttgaggagggagacatccactgtctttgaaacgatccctgggttgttctcgggggctggggagaaatggagaccctcctgagtccttgggtcgcatcaccgagctggcagccgtccccagagttcgttccaggacaggcgggtcaccagtcgcagatactacaggaaaggccaacccccccaccccaccccatttgacaggcaggacaagtgaggcttagaggcaccctcccccctgaagcccactcagtcctccacttagagaagggacagggccggcccgggctctcacagagacaacagcaggactcaagcctgagtccagggctggcagtcttaggcccga

SEQ ID NO: 39053 - DNA, 867 bp, Bovine  19866882051395
  misc_feature (1)..(1): n is a, c, g, or t
ntaagatgggataggaaagaagaaaagaaaatagtgacgtggttagtagtctttacctgctgaatgtaaggcctgcactctttccagatactcatttattttttcttgaatatgttctaggcttgatcctgccatctcagcataaattaaagcttgtgcagcttcctaaaaataaaaaaagaattcaaaagactctaacagatgaattacaatttgaattttctataccactttctaactcatggttggtttctatgaatgataaaacaagaatgtctttaagatactagaaatttttttcataagataaatgaataatagtcctttactaaacttttttcagttctcaatgctctcaattttctcagactgttgaaactttacaaagtcaaatagaaggggttgattttaaacattttcttagaataactgtgatttacgttgttttccttcttctcagtgcagtaggtcagacgaaactacttactgtgaaaaggtgatctgagtcctgagagcattagaacagacaatactcataaatatcaacaaacgattataaacgttaattgtctcactatggcaagaaaagttttttctccaaagaaaccattgtcaaagggggacacattttaaggcaggtttcagttgaatgaaagaaacttattttaatgaagaacacctagatccattttccggttattccatgacctcctcagccagtcaggctgtgctagtgaggaaaagcctccgttctcgccatcaccatttcaggagggtgaccagcgctaccagagagactccccccagcaccaccaccttccctgcagccatctaaatggatgcatttcaaggaaccctaggtctcat

SEQ ID NO: 39054 - DNA, 804 bp, Bovine  19866882194336
  misc_feature (1)..(1): n is a, c, g, or t
ntggtggcccgctacccttcgattctgcacattgagctttattaaaagatatactggacacaaagaagagctcttcaagcatgggtacttttaaagatcaacataaagcaatcaccaatgcatcccacctcgggtgagaaataaatcctgccccgccccaaggccacacgactctccaaaactgctgttctgacgtatactccctttggggatttgtgtagttttacagaaaaaaaaaagataaagcagtggttttacttgttcggggtccccaagctaggcaggtagtgactttggttgggcttcaggtctgtctgcccagcaaggtggaagccgaagcccagagcccccggagggaggcaggcagcgggccatgcaggggacccagctgacctagtgacgcgcggagtttcctaatcaggattcctcagggcctggggagttacactggtatctttcgctgggggatgtgcaggagtgggttttagggggctgaatgggaggggcctgccaagagacttctgtgctagaggcacctggctggcggcatagctctgggagctggcagcccagctggggaaccccacggaagggggatgcctttcaaacaatcatttttcaactgaatgaacaaattcttcccctctcccatccggcaagggtgattcatcctagggtgaaaaatgaattctcccaggaggcgctgctgcccgagacactggagccatgaatttactgcctgccttctgtccctgatggaactgggtctcaagatttacgtctggaggtttacgggcagctggg

SEQ ID NO: 39055 - DNA, 763 bp, Bovine  19866880410857
  misc_feature (1)..(1): n is a, c, g, or t
nattctgtgaacacacagaatgtaagctctggtatctattcctcttcttacaaggacatcagtcctattggatcagaacttcatttaaccttaattacccacctaaaggtcgtatctccaaatatagtcacacaggaagttagtttcaacaaacaaatttggaggagcataattcagcccatcataagcacttgctatggggcaaactctgtgataggcactaacatgaagtgctgaaagaggcagtcactatcgttcctgagagagcttctagactagctaggtgggaacacaggaaatagataattgcataaataaacatttctatcctagtgagcacatcttgggaaaagaacaggttatatgcaaagccctcaaatagcacttgtccagaagctttggggttaatatcaaggttagcaagaataatgctatgaataagtccctaattcaaagtcttggagcagattatatatagtggacaaagaaagataatgagctgcaaaatggaaatacagcatttttttttttcccccttagaatagcattgtgtttccatcccacatttggaagtgcctcatttaatgtaaaaaatcatgagtgaaggagttcattttataacttttttttttttccccaaagaacagattatggggctttcttcctagttatttcaagccaatcattctgttatccaaattcagtctttgtcatgagaaacaatacaaaaggaaggagcctagtcattttaggctcttaagca

SEQ ID NO: 39056 - DNA, 1259 bp, Bovine  19866880422235
  misc_feature (1)..(1): n is a, c, g, or t
nttcctctggcaactcttgtctctggccagtgttggctgtccttgcctgccctctcttacgagagttgttaaaatgggagcatggctcacagtgattgatggcctgaatgctgatcattccctacctctccgggctcacggtaaatatttactttttgttacacaggaacaatgaggtttcatacaggagatggatgtcgggtgtatatataatattatgcttgtctgactcctttgaacacccaactctcatttcccaggcttactcaggcaagggaagcagacactgcagggtgagctgtttgacttttcagaggacactctgaaagtttgcaagctagatggagtttttggtctttttttttttccttactgaaagactaagaaacatgatctctcttaataatctggtcaggagctactagctatccgtgtatcaagaattctacttgacccaatattgtccgtaatattgattcacatttttaaatgttaattttgttttttattattttattatttttatttttacatttttttggcgtgctgtgtcttcgttgccatgcatgggctttctctagttgcagtgagtggggactactctctagtagctgtgcatgggcttctcattgaggtggcctctcttgtggagcttggcctccagggtgggcaggcttcaatagttttggtgtgtggggttagctgctctgcagcatgtggaatctccctggagcagggatggaacccatgtcccttgcattgacaggcagattcttaaccactggaccaccagggaagtcctttaacatagatacataatttagcttaaccgtaagccatgacgtcccccaaatcatggatgccctgtggttattttcctaatacttattgcaggatgtatgtaagtgtgagaatgcaaaatgctccctcatgtccttgggaccgtgttactaggactagttgacaggtaacttgtatgcagctctcagcgctgccacgtccttgctcagtgaccctaggcaaatcacagctcttttggggaccctttctctccatctgcaaaatgaggcaggctcttaacattccatctttctactcttgtgttttgtctttccagctcaaagtaatgtttataatggagaagagttcatataggtagacaggctaatctaaaatgttttctcacttacataaaggcaatttccaatctttatcttgagattggggagttcttgtcattcatctattattgctactca

SEQ ID NO: 39057 - DNA, 2026 bp, Bovine  19866880466417
  misc_feature (1)..(1): n is a, c, g, or t
nataggtcttttgtttctttaggtagatttattcctaagtattttattctttttatctcagtggtgaatgggattgtttccttaatttctttctgttttctcattgttagtgtataggaatgcaagggatttctgtgtgttaattttatagcctgcaactttactatattcattgattagctctagtaattttctgatggtggatttagggtttgaaagactatttgaaaatatatatatataaaaaatcagaaagaaaggaagaaaacatattggtcagaatggccattatcaaaaagcctacaaacaataaatgctggagagggtatggagaaaaggggactctcctacactgttggtgggaatgtaaattggtacagccactatggaaaacagtatggagatcccttaaaaagctaaaaatagagctgccatatgatcctataatcccactcctgggcatatccaatgaaaaccatactttgaaaggatacatgcaccccaatgttcatagcagcactatttagaatacccaagacatgaaagcaaacataaatgtccatcaacagaggaatggataaagaagtggtacatatatacaatggaatactacccagccataaaaaatgaaataatgccatttgcagcaaaacgggtggacctagagattatcatactatgtgaagtaattcagacaaatacaaatatatatgatatcacttacatgtgcatctgaaaaatgatacaaatgaacttatttacaaaaacagaaacagattcacagacttaaaaaacaaacttatagttaccaaagggaaaagttggaaggagggagggattgggagtttgggcttgacatatatacactactatatttaaaacggattaccaacaaagactcacagtatagtacagggaactctgctcagtattctataataatctaaatggaaaaagaacttgaaaaagaacagatatatgtataactgaatcactttgctgtacatctgaaaactaacacaacattgttaacaactatactccaatataaaataaaaatttaaataaatataaatgacagtgcataagatgtctattactatagtcacagcaatgatttgctagtcatctcactgttcccttaacaatgttctactgaatatatgctttttttcaaataccagtaagctatcctatcttaccttaattttatttcctaattaaagtctctaattgcatgaacacaagtttaacaactgtactataaggtcaagaggaaagaaaaatgctcttttgggcatccctcgatttctcctctagttatcattttcttccctcgagatagatttggaccattctcctggaatgtggcttgactctctgtcctcagcatcactggcaacaattctcaaagctgccaatggcagttgtggacactcattggaaatgacagcagacttcaacatggcattgacttgcatgaagtttttctaatgcttaaggagtttggtcatgtgtcagagctgctcacgttaaatgatccattaggtgtcatgatctccagaaaggtcatctgtcacattgtaggccagaagtgtcacctctgtttaatgtgataggaagccgaactcccaaactaactagagagaaattggcatatgccactgctggctgatcaaaaaactgaggctctcaattcacacccacaattgtgcaaatgaaagttccccactttaaccattgtataagctaaatgtttaatagagtctatgacttaatggccattgaattttaatagttacagtattattagcttaaaatattcttataatgaacataaagtaattcatataatgagttttattatgactaagggtgaaaacctttttttggcagagggtgggggggtggctacaaaatgagaattttggagagtagcaagtgaaagtactaagctgagtttactaaacaagaaagattttttaactgtaaaaaagtccaagaattcattttcaggtaaggactt

SEQ ID NO: 39058 - DNA, 1543 bp, Bovine  19866880499067
  misc_feature (1)..(1): n is a, c, g, or t
natatgcagatgacaccacccttatggcagaaagtgaagaggaactaaaaagcctcctgatgaaagtgaaagtggagagtgaaaaagttggcttaaagctcaacattcagaaaacgaagatcatggcatccggtcccatcacttcatgggaaatagatggggaaacagtggaaacagtgtcagactttatttttcggggctccaaaatgactgcagatggtgactgtagccatgaaattaaaagacgctcactccttggaaggaaagttatgaccaacctagatagcatattcaaaagcagagacattacattgccaacaaaggttcatctagtcaaggctatggtttttccagtggtcatgtatggatgtgagagttggactgtgaagaaggaaactgtggtgttggaggagactcttgagagtcccttggactgcaaggagatccaaccagtccattctgaaggagatcagccctgggtgttctttggaaggaatgatgctaaagctgaaactccagtactttggccacctcatgcgaagagttgactcattggaaaagactctgatgctgggagggattgggggcaggaggagaaggggatgacagaggatgagatggctggatggcatcactgactcgatggacatgagtctgagtgaactccgggagtttgtgatggacagggaggcctggcgtgctgcgattcatggggtcacaaagagacttgactgagcgattgaactgaactgaactgagactctcagagttcttagctctaaacaatttaagaactctctcccctaaaaattgctaatctaagaggcttccatctagaattgcactggcatttactgtttccccaaccttgttttccaccagtgaggactttcagtggcagaggtctgacaagtttaatatagaaaagaaaggagtgaaaagtggtggaatataagacagtgtatcatttggagggttaaaaaggggatagtctggggtgaggcctgttaagtaaatagttgacatagttgactccagtagagcaggcagacagagttgacagacatggctgactccagtagagaaattgggtctgtagtattatatatgtttccttccatctccagggaggtcttcaggaagttgctgatcagctggatttgcagagaattggaaggcagcaccaggcaggctcagactcactgctgacgggaatggcattcttcaggatgaaagaggtaaggcaaaaggctttttggaaatctatagtttctcttggaagttgatggccaccttgaaagcaggggttttttgtgtgtgtgtttgttgtgcatatgttaaacacactatgatttgagaggcaaagaaacattctgaaatggaggttactcagcatactcaagtctagaagtgtactttgtgttccttgcagtgctcatccttgcaattatttgcttttcttctgatttctgtaatatgaacacatttgttaaaccacccactcattttatgctgagttctattatcaaatgtcccaatctga

SEQ ID NO: 39059 - DNA, 3376 bp, Bovine  19866880541732
  misc_feature (1)..(1): n is a, c, g, or t
nctgttgtaataatgaagatgaaagataaaggtggcccccactgatacagttccatggtgatacaaagagtagttcagcatgatcagccactgattaggtgaaggtggagagtgaatgtcaagggtgattgtgaggcttctggcttggacaaaaatttgaatgggagtaccacttaccacaaatggggggattagagtagaagcagtgtagaacgagttgcacgtgaaatacctgtgagtgtttcaaggcatgatgtccaattagttatagttaggtaaataggtctaagttgaagaaaattaaatggacttaagttttcaatttgggtatcatcaccaatagattaatggtaactgaggcactgtaaagagattaaatcaacccagaaaaaatatatagcaagaggcagggaaagcccatgatgaatacaaataattaaaagatacacaggatacgcagggaaaaggtgtcagagagaagacatggaagaagcctaagacgtagaaggaacactcagagttcaagaaaagcctgctgagaagtcaagtaaaacaagggcagacaatcagatcctttggatttaagcacaaagaggtcacagataaccatggagaaggtgtttttcatggattggtggcatcagatcccagttatgctataatgacacctatgatacacatctcagcataagtcagtctgtgggcctgctaacactccttcaagacctcagctctgacctagaagctataggatctccatctgtgaccttatacagcacttcatatgcaacaaggctttcaataaaaacttgtaaataataaaatgctcattggtgtttccactttttaaaacctcatttggaagcacagtgaagtgacttatgaagagatgaaaagatgttcacagctgctcactgaccttgggtggcactggtctgtctccccctcatttccaggcattaaattaatcatgccctctcttcccacctctactcctgggtcaatgactaaggtatttctggtctaattagactcctaaatgagctctagaggctaaaggcagggcctggaccaaggaattcactgtgtcctcccatcttctattaataactagctgtatttcgttgatgctgcaggagaggggtatgggggtggggcagcaggggaactaggggttattttgcttccaattatttctacctggcctcttttgtgacctctgtcagagggtgaccgctcatcactcagaggacacagaggagagccacatcaggaacaggccaagtagccaccagttattaagcactttccacaagccaagtatggtgctgaccttctgtcagaatttcttcaaccacatcacaattccacccaaaatcctcattggctccacattgtccaaagaataaacttaatttgcttctcctttccatttaatgcctttaattcattccaaacaatgcaaaacagaagcccatacaaaaagatgcattaggttaaaaggctattatcagattacaaaaatatttgtgagctggagcatcctattgtttgtacctctaacaaagaccatcctaaaggaatgttctaactaagtaatacagccaacaagttctctttttctggtgtaataagtttattattgtggcactacccatattttgttactatgggggctcattctagtgagggattacacagtctacaatacctattagctcataaagagaagtaattataagcttaaacacaaaagggaaaagcaagtatttagtagggagtgctaagcattagttactaccgtggattactcaaggagacctcatcccagggtgtttttattgcatttcatttgcaaaatcactcctcattacccattctgtgaaaactaagttggagcctttgtgttcatttcctagttggcatgttgtcacactttgtcagcagagggagctgacgagacatttgagcaggaagggggttttctgcttggcatgctcactgggcaggcttctgcagctggggtggcttccccgtgctcagctcctgctccagcctctgacttgcacagcatgcacagattctcccatctccagctgactgccgagcatcagcttccccagctcctgcagtacaggcagcttcctgaattctagccaactgtagcccacagtggtcagcagcacttgagaagtcctgcagcagagtgcctccagggagataccttgctgtgacagctctctccagctccaggaaggggacactgcctacccatgccagaggctgatttctagcaagttttgccagcacagcaccacagcaacacctcgccattcactgagtcacagccgtgtcctcaccagcaggtctggctctgtcaggaggtgcaggggggctcttactcaaacaccagctcagccccagggtagcggttgttcctcgtatctaatgttcctaccttcttcagggttccctttactcctactaagcaatctctcattcccctgaaagtgaaaatgaaagtgaaagtcactcagtcatgtctgactctttgcgaccccagtccatggaattctccaggccagaatactggagaaggtacctttcccttctccaggggatcttcccaaaccagggatcgaatccaggtctcccacatttgcaggcagattctttaccagctgagccacaagggaagccccttaacctcccacaatagctggtaattcctcatgataaactttctttgttcaaattaccatgggaatgctgtcttctgaatcaatatttgactgatacagcactaaataaccacgcacatgcacacaatggttcttaagttgtgaaagtgggtttaaggttctccagaaaaaaaaaaaatcaacaacaaaaaacttttgctaggctagggatgactacatttttatcctcacaatagccccataagacgaatgctctgtccccatcttatagatggggaattgacctgcagaatggtaaaaagccatacacaatgctatcaataattaataatagcatcaagaagacagctgtgacaaaactgggtgagttatttgccaaaattaagattactctttttttccctctgagcttctatcataaaaggcaggagttaaacccatttaaacacatggacatcaccagatgttcagtactgaaacaagtttgattatattctttgcagctgaagatggagaagctctatacagtcagcaaaaacaagaccggaagctgactatggctcagatcatcagctcctcattgcaaaattcaggctcaaattgaagaaagtagggaaaaccactaggcctttcagttagacctaaatcccttagataatacagcagaggtaata

SEQ ID NO: 39060 - DNA, 1052 bp, Bovine  19866880553956
  misc_feature (1)..(1): n is a, c, g, or t
ntgatgccatccaaccatctcatcctctgtcgtccccttctcctcctgccttcaatctttcccagcatgaagggtcttttccaatgagtcagttctttgcatcaggtggccaaaatattactttatagcaagtcaggcttgctcttctgaagttacagaaggacagatctttggcctagcgtaagaagcagaaggggtagcatgggtcagtatggcaaagcagtgagcctcgccttagttctattacaggattggtggtactcctttagttagaaaagtccatcatgcctttcctcagagtcagtaaaaagttcatatgtttagtttccaggacatagttagcttaaatgctttgtcctaatgtgtgtctaaagagatgagggtattttaggatgtgtctatctcatagcaactgaggatgaactataccaccatgaagtaggaaattttgtctttcgcatctgttaatttgattcaggaggaaaaatgctgttatctaggtaatttagcttctttatgtaagtttactgatttgcagacctctaccagagaaatgaaacaaaattgttttagttatagcctgtgaggtggcacagtggtaaagatagacaggagatacaagagacgcaggatcaatccctgagtcgggaagatcccctagagtaggaaagggcaacccactccagtattctttctagcctgggaaattctatggacagaggagtttggcaggctacagtccatggggttgcaaagagtcagacagaattgaatgacggagtatgcatacacgccccaatacattctcttgcagtgaaaacctaaaaagataatgggtaattgcaaaggacgttgggatgttgtgtccttcttgccagtctctgtgtgggaaagagaaaattgggagtctatcttgggagcccctgctctcagcctttaggaggattttccaagctggctctgtaacctgacttctgaaattggcatttggaaaaccccagactagtatctaactagttaaactgtattcatttgaattttgctcgctctcc

SEQ ID NO: 39061 - DNA, 1606 bp, Bovine  19866880644031
  misc_feature (1)..(1): n is a, c, g, or t
natgttccatgaggcattttacatcctcatcattattttccctttcctacttaaattagctccaattggaatcactcatttattcagtcctcagccatttgttgaacacctgagctaagccaggtgctgtccttggtgctggagaaatggtggtgaacagtacagacccattcttgatcccatggagcaatcggttctgttactcaccacccagaacacctaggatagaccctacacctaccacaatatagagaaatgcactcacagaaggaaaagttatagagaaatatacgcagtttatccaacatctactatgtgctaggcaccctgttaggtgctttatatgcaccttctctgacaacagccctaggaggcaggaattatcatcatcccctggctcaaggacacagaggattcacacctgagcagtctgaatcttcacagctgctaagagaaaagatagaaagtgacagaacataagtagacactggagaaagacacatactcacaaactcatttacattcacatgtacactcaaacacacacacacacaaatccagaattcaggccacctatagcagcacagacctaggcatatcttgttctttgttaggtgctggcctctctgcttcatctctatcctataaggagacaaaaatcaactcctccctcttcagaaacactcttgaagaggaagcaagcttggtaatactttaattggacaaaagccttccaaatgtggcctcctgagcacagcagggatccatttccacctgccttttagaaaatgtgccctccctggattgcacatgaatgctcttaggcaaatgccagagaatcactctaaaaactttctcccagcaggtcagcacttacccactggacgcctcctcaggagccccactcagctccatcccttggctgctccctgccaggcccaggagagcagggagcagcctctgatccaggtggacacagatgtgactagtccctgccaagagcccttccccccaacctcagctcagggtgggcaagcaaaacacttaaaggctggctgaggcttcaagcctgcagagtccaggaagaatacaataactaagaggcagggtacattccagcaagagaggatggggaaacagggtaagagacaccccttgttagcttccacatctggaaagctggagttctcacatctgccttaacctcaaaacagataccatttattgagcacaggcactgtgccaaccacatttgcatgttattttaaagaactctagtagctagagaggactgtctccaatatacaactgacaaaactgaggttgcagaagataaagctggttcacataactaatcctggttcacataactagtaaataggagaaccatcactttccaaagtccatgctgtcagccactagctttacttgtgtttgagaggatgaaccaacagtgagcagaaaaggacaaagccaccagtatgtcttcataatttgccagtagtcagcctgatctagcggcaactttgattcctcccctccccacctccatccccaagcctgaattattcttctagcccagctgcagacttcttaggacaatttt

SEQ ID NO: 39062 - DNA, 935 bp, Bovine  19866880656493
  misc_feature (1)..(1): n is a, c, g, or t
ntaggatataaatgccaagtgtgtaaaagtataagctagtaacccaattttaaataattccagagtttagttcctcctaaacacaccaaaaataatgttatccacaactcaaagatatttaaattatattccataagaatagatgcaaaaaaacatctttcattcttgattgggttattttttaagtaagtagaagctttcatttcaattttaaaaacatacttggccttcttaatccattttggcaatttccatgattattaaaaaacaactcaaaaaattcatataatcttacaaatgctaaataattttatgtccaaagtaccttcattgcctgaagccatttttcacttgaatatggaattgaagagggattaattaatatttctttaggacatgagaaatttcttcttgcccaaatatatatgttttccccactccactctcatcaatattatgtttctcttatcttctgcccagtgcccaaatcatttgcctcattgcactatcacaattagaaatcacagattcatttgtgtatttcttaatctgactctcatgaaacagtaagctccacgaggaaagaaattatgtctaattttatcctagcacagtattctctgtaacaagcccaatgactaccatttaataggtaattaataaatatttgctgaataaattaatgaatgttagaggaataattaaagttttatgcttttcactgaactccaagacaaggtaacctttgggttcattttaacatctaaaaccaatccacctaagtcagctacttccaaagggcatttgaaattatttgcacaccctcagaattctacagagaaggcaatggcaccccactccagtactcttgccggaaaatcccatgggcagaggagcctggtaggctgaagcccatggggtcacgaagagtcgga

SEQ ID NO: 39063 - DNA, 1823 bp, Bovine  19866880658241
  misc_feature (1)..(1): n is a, c, g, or t
nctgaggtccagttgcagtgggctgagttgaatggggcgtttgtgtgtgtgtaatgggaacttgatcccagaactgttgccagggtgtcctaaccctgtcctgagtagggtatgagagaggctttaggggacaggaagggacaaagcagcatctggttccctcatcccctggtgccaggagcaaggatggctgcaggctcacagctccctgccaccttgtcattctgtattctgccagggccaccaagggatcatgtggggtgcctgtccccttccattggagaggaccattggactccccaggaaccctctccagtagcttcttccctctggctggcctgcattctgggaagatgtattttttccttccttctgtgaatgcttggacccattgtggataacaggagcagttgggggagccctagtctctgtggctctgcttttccaggaagctgatcttcccctgcccttgtagggtcatcatcagagtgtgtggctgaaggagcaagatgttagatgtgagtaggagtcctcgggcatagcagaggactgtctgctgaggggatgaccagtgtggaactacagctgtttcttagtccatcatcttcggaggatcagggatgctctcagagactggggtgaagcccagcaggatcatgtgtctcttgtaggccttgatctgcttaaacacagtgtcagtcccatggaggtagtccagcatccccagagccgcatagcactggttgaccctggagaagacgagagggtgctgaaggctggtgtgctcatgtccattccacctgtgcccacctgagccttcctgccccacacctgtccccaccgtgcccaccacctgcttctgagttacctgagtgggtgtgcacagattgctgggcccctccagagtgaaaatcgatgcttttcctttgaaaagttctctctctgatttgatgcatacaagtcagaacctccagcagagcctgcttgttgaggtaggttctggaatcccatcagattcccctggaacacttactaaatgcagttgccaggccctgtttccccagaggctttgattctgtgtatctgaagtggaaccccagagcctgcatttgaaaaaagcatctcaggtgatttctgatgcaggagggtcctggaccacactgctgagactggaggctttcagaaagcgcacagctccccttgaattacctgcaggaattgtatgcctacatgcatttttctggtagtgcccatagcttacgccatacactcaaggggtccaggtgtaaatggagcttaaacagtgccaaggaagatccagtgtcagaaccaaaatggcaagatgatctgggtcccacgatggtggttattgtgctgaccccagacgcctctccctccactagacccacatttacactgagacaccagtgtctgctgtcaggagctccagaaataaaggtgagtgttaactgcccagagacccaaagtggggagaggtgccttacttttgatggtggtagtcatggaattcaggtgaaggcaagaaagtaggtggtagccacagtgggagatcatggtgaagatgaaggccaaggaaatccacatggtgatggaggacaagtgggagcccattactattggacccagtattgccagcagcatattgatctgcaaggagagagctgtctgaaggggggcctgaggggaggaagggaaccaaggtagatgtccccttccccccgagtggtaccaggaagacttcctgactcagatctggggaagatgaatgaatttctggaccctaatttactgtagtccttcag

SEQ ID NO: 39064 - DNA, 1522 bp, Bovine  19866880683509
  misc_feature (1)..(1): n is a, c, g, or t
naacacattttgacatcttcctacaatgaactggtgctgcttgaataagctgaaaagatctccccttcaaaagaagttaaaagactcaacacataatagtatttcccatcccttttgataacccagagcctgagagcttcccaatgcccacagagagtggtccccacccctcccactggctgggaggccatgcccagaaaccacaaggtcagcagggctctttccagcaggctgcacgtggcctgacagagctgaagaggaacatctcttgaaggaagaggtgccagggctccccagcagaatcagaagttccagggcctggctcatacccactgagggtggccagggcgggcaaagctgggacctccaggctgggccaccagggcctgcagagattcctgctctctgaagatctgtgtgggtcctctctctcccagaaagtttttttcaggtgaagtacgtatatttctgtggtccaggagaatgcaaacccagatggtaagtaaggcagaagtctggattcagtctgccatgggctggaatcccaccaactacaaagcagccttgagcaaattcctgaacctctctgaaccatggttttctggtctgtaaaacaggatcgggactgtaggaagatcccaagggaatgtgaatattaaccaagatcatgaattagatgtgtgtgaggtctttgttcatcaggagagaagtggaagctctggacaatctggcctggttccctggggcatgtgtcttcaacaaggcaagctacccctgaggtaggtttgaggacccccggctaagcccaagggcaagataaaggcacatcagcaaaggatggacaatgcattcatgagcatgggatccaatccctccatacaagttgttagagttgaaggtccagccaagagaaatgtgagagccaggctgaaatcagaacagggatctctcaactttcagctctgtcagttcactctgaccccaccctgaagttcttacctgaaataaaaaagccactctagtttccgacaagtcaggaacagaaaacagtgacaaagagagaccacatcgagctcattccccatctccaggccttaccatgcctgagcccatgcgactcccccctccccctcaaggatggggcctgggacagggcagggaagttggaaaacactcacactcctcctggctctggggccaagagactcctggacagtatgagaaaagaggaggaagtaagaaatagcaatcagaaaacttcctcttaaactgacctagtctggaggaggcaaggacaggacattaagttagtcaaatggcccaaggcactatgccatcatctcttcctttccatctcttttctggataactgccgcagttcctcccggggtttccctgcttctaacttggcctttctgccccaaccccaatccactctccacagaatggaaaaatcagctcctgccacctccttctttgctttcggaacagcacccaaacttcttaagcggcctccaaaagc

SEQ ID NO: 39065 - DNA, 972 bp, Bovine  19866880706290
  misc_feature (1)..(1): n is a, c, g, or t
ncctatcggactgcaaaaactgtgttctttcccatcactgagaaaacagggactggaactgtttcaccaactgaactggatctcacaggactcaacccagcttctttctagtcttctttccactgactgcaagacctctccatccttatttgctgaatgagtgatatgtcagagcctggggaaagctatgcggaatatctttattggtattaccccttcggaatgaaatggaccagtgatgggacaatgtagggctgtgtgtccagtgagaggacccagaaatgggttgttctttgattaggaagggggggtaatgggaatggaagggcgagtgggaagtgatgaccagataaagagaggaggaaagtatagaaaaataacatgaggtcaagagtgggaaactagtatcttgaaacgtgcaggctggttactaacagtgagtcagcatgaattaaggaataagattcagggtgagagaggctaggtcaaacaagtgatttctttcgtggtttcattgggggctaaaataaaaacctcatcattaactaaacacaacactaacatgaaggggtgaaataatttatccttaaataacaggctgacctattcagaattgtaattttaatgtaagactaacctttgaaaatagatcaagtgatataaattattaaggataagacattcatcagatagatggtgtctattagcaattttatgcatgaagagttatctcctggagtacagttggggctgcttctgcgaagaaaaaaatgaagaacccagttaccctttcgtgacatgtgcagctgattttaatctgtatttctcctgtcaagtgaaatgaaaagactgaaatatgatctcttctgtggatgtgcattcgctgcctcccacctccttcctggcagctctaccggcatggagaagatggagatacacttttcaagcagtttttttttttttttttccagt

SEQ ID NO: 39066 - DNA, 853 bp, Bovine  19866880717426
  misc_feature (1)..(1): n is a, c, g, or t
ntgaaaagtgaaagtgaagtcacttagtcgtgtctgaccctcagcgacccccatggactgcagccctctaggctcctccatccacaggatctccaggcaagagtactggagtgggttgccattgccttctccgaataaccctctgaagtaggtattattatggagcccattctacatatgagaaaacagaggctaagtggctggtgcaaattcattgataaatgttggagctacactcccgactcacagcagtctgatttcaaagcctgtgttattgacagcctgactgttctgctaggcccgcaggatgtgcttatctgtcgtccagtttataagtgcctttgtcagccacaaacatataatttctgtgttacttaaattgtttaaacaatacctttcccaatggttgtaggatatttctttcgaagataaagcaaaggtcaagctccctacagaaatcctaagcatgtaacattccagctgagtccagacagagtaatgaatgagccagactctggtctggaactctggtatcgtactcaggacattccccttcttcacctataaactgactccactgcccactacgaccaatcaagatacacgctcacttcctgggaccaacttcaaccagaggggagggcactgtgtggacaggaaaggcggccaaatatgatttatctcaaaagaatgattacaattatataattaacaccttgtacccagacattttcatctctaaggatctctgagagtcttacagattatttaaatatatatcacatacattgctggagacaaagtctatagtttcagaagataattaaaattccttccccttggaattaagaga

SEQ ID NO: 39067 - DNA, 3324 bp, Bovine  19866880792018
  misc_feature (1)..(1): n is a, c, g, or t
nccaactttttcactctcctcttttactttcatcaagagactctttagttctttgctttctgccataagggtggtgtcatctgcatatcggaggttattgatatttctccctgcaattttgattccagcttatgcttcatccagcccagcatttctcacgatgcactctgcatataagttaaataagcatggtgacaatatacagccttgacgtactccttttcccatttggaatcagtctggctttcagtcttattcttagagtagccttaacacttctccatccatacagcacagatgataaaacatcgatgttaatggtgaaaaaaattatccacagtgagggacacccagagaggctctcagagttacatggagaagagaagaaggaagagggagatagaggtgaccaagaggagaagaggaggagtcaaaggagagagagcaatctagccagtaatcatttccctatgtgctctccagagtctggaacacccagagagattcacagagttacatagagaagagaagagggaggagggagatagaggtgaccaggaggagaagagggggagtcacaaggagagagacaggtctagccagcaatcagttccttaagtgttctcaacagcccagaacacccagagagattcaccgagttaagtagagaagagaacggggagggaggagatagaagtgacctggggaagaaaagggaaagtcaaaaggtgagagagcaatcaagccagtaatcacacccgtatgtgaaaatggatactgaagatgagattcttaaaggtgcaaaattgataacaaatactgaaaagcaaagattaaaaatctagagtagaggttagactctcaaaaatacaatgttataaatacaaaacaaaatcaaccacaaaaattattaaaaaaatatatatgaaatttgctttaaaaatagggtcttttttggcaatgtaatagtagattataaaaataaaaattaaaggagtaatataaagaacttaaaaattaaaaaatggtaatagtaaaaatatatctaggaatttctctggagttgttgagggcagtgtggagtcagttcagtttcagatagttccttgttccagcttgtacttcttctcaagaatgtaggccccctccaatgcttagtcaatgttaactagagggttttaatctgttgcacctgtcacttccagggtggttccctcttctttattttggcttcctgtttgcaagtctcttcagtgtctaatttccaccctgacacaagggggtgaagatggtcacttatttaggctcacttgttcagttgtgttgtggggagggaggaacactgcaaacaaatatcactggcgtgtgtggggagtgcttgcagtgtatggaccacactgggtttgccccagctcacggcgcgtgtgcttcccggtctacactgctcaggctccatgttgctctgcaggggaactgtccaaagtgggctccaagtttcatgcacttcccaggtctaagctgctcaggttcaggttctcaggtattccacaagggcacagacttggttgggcttgcgttttgtgcccttcccaggtctgaacagctcaggtgaccaggtgcttggcaagtgcactgtccctggtgggccacggtctttttctccaccccgtccgggcacttggttttccgggtgtgccacgagagcactgtctcaggtgtgctgtgggtctcctctggggaactgatctcaggctgcgaccctcctggcagatgtcaaccgtccaggatcccacgaagacgtggttagcaactgggagcctgctcacagtttggtggaggatgcccgtctctggggccgagattgccccttgccttccatatctgactgtagcacgcctgcctctctgcctccggttgggtgcgggaggggcctgtatgcagcaggctagctctcctttggtgttcgttcaatcctttgttctgtgagccggccaggatgtgtgttaggttagagcctttcatggaaaagttctctctctttttttcctctctggctatcctacaatttgggttgctatatcatgtaagcaccctcagattgtcctcagggcattcaggcccagcccttaccctaagcatgcagcgcgtgcctccctgtctagcccccgcttgcgagtggccaacccgagcgtttgggctacttctctgctgggagttgcgttagcttaggcaagtcctctgtgggtttttttttttttcccctcctgcttatgttgccctctaagattccaaaacttcccacagacccgctggtgagagggtttcctgctgtttagaaacttctcctccttcacaactccctccccaggacaggtctccatccttaattcttttgtctctctttttgtcttttacattttgtcctacctcctttcaaagagaacgggctgcctttctgggtgcctggtgtactctgctagtgttcagaagttgttttgtggaagttgttaagcattcaaatgatcttttgatgaatttgtggtagagaaaggggtctccccattctattcctccaccatcttgggactgccccctggaagtgcatcttatccccaggcttagggcatttaagtagctacatatggctagacatacagtcctgtagcatctgaatggtaaggaggcaccaggtttaaaagcccaatttcctgtgtatgtttatgagggtgtgtgtgtgtgtgtgtctgtgtgtgtgtgtgtgtgatacacatgacaggtgttgatctgctggtttgtgtaaactctttgcaaacagtctaactcctgaggaactaattgggaagttcccagggtagaagaagatccaccacaaaccgcagctttgcagtagtaggtagcaggtttgcttgttttctcttggcagtaattgcttccttgcctaaagaaggtgtaggggagacagcggcacttgctagaagctctgggcccacggtttctaagtggtctcaggcagggcctgaggcttccagccaagtagctggttgtcactgaaagccaaacatttagttttgagttcagctcccatttggaattcatttcccagacctcgaagtatgagacgatgcagttgttatttatttattttcctttattcttaggcttgtttgctttctggcaaggagtcaaggttgtttctgtgaaggctggagtccttaggtatttgtaagatgaggaaaatgtcacggatggtgtgtgaaggggatgtacagaaattggacaggagggaattgagccaactctgcctaattatgtggttttctcctg

SEQ ID NO: 39068 - DNA, 2867 bp, Bovine  19866880837502
  misc_feature (1)..(1): n is a, c, g, or t
nacatgatcggctgaaggaacttcttgggtgcacggggatgaactggaagaagaagtcaggggagggaccaactgaacgaggctggacagtatgggagctgttaatgatgtctgtgcttaaaaataatgattattccataaagtcaaaaaaactaaagttgaaaaactttctttgccctctaccttaaaatgaagaaacagatggccagctgtagctgtatatttcttgttgttgcaagtaaatgcagccacaggagcttattttatgctaaaagcctccatctgctagatgtaatcttttcgtacctgtggaaaaaatgaataaaataagaaggacccactcgcttttgaccttgactctccgcagattatgcacctaagatagtttcttttgttccttgacaggtcttaattccaaaatgatagtgctgtagtattttgacagtttcatccttttacctaaatggggatgaatttggcttcctaatattcctggttggcatatgttttgctgcaacagagggagaggattttcctttaatgagcaataccctgtgtcccttcacagcgtcttttcttgttgtaaaaatgctcaagcatcctttgcctctctagtctatttgctacacggaattgagaaatcattataaataaaagaggtattaaaacatcctcactgtgtcatggatctgtttatactttggaaagaaggggaagggggcgggtaaacagaatgaattgctgtgaatgtgctgatccattgggccccatcttttccaacccagccccgcagggcttcctacctctcttcccacctgctcgccgtcatcgctgcaacgttattctcccggatgctatgtttctttcccagtggttgtgtgtaatgggagtgctatttaaacagaattcattgtcattcgggctcactttgctttcaggcacgttgctttcactttgactcaactctttagaaagttggagttttaacagggacctaagaggttatgctcttcattcaagaagttaaaaaataacctgaggccagaagactgacactccaaggcagaactaatgctggacacgggctcttgtctctgacacacagactgtgagagtcacatggagaagcaacctgagtctcaaggtttgtatggaaaactgggatgcctgacttcaaaaaagaggctttccacgaactttttgtattgaccttgggtaaagtagagtgcacgagagtgcttattaaatataagagtgaaaaactaaggagcatttaagaatgacttcaagatagtttagtgtagaggcacagcccttctctatttttcaatgtgattactccctaacaccacacgttactctagtgatggacaagcatccagtggttataaacgaaaaacaaacaaattaaagggggaataaaagggagaggaagaataacagtgaccatatgcttgacttctggctgtgtcagtaactggtggtgtgatgctgggcaagtcacttcattttgcttggcctcagtttctccacctttaaacaaagaacttggtctagatctggaagccatggccctggatcagcattattatcttcacctgggagcaccttagacatgaggattctcaaacctcactcagaccccccagtcagaagctgtaggggtgggacccagcaatttgtgttttaacaagctctccaggcaattctggtcacactcaagtttgagaacaagccactgtagaagcttggcggtcagctgccagagctatgctgcagaagagttggaacagctctcctcttggtcctgagaggtcccttcctaacggtgagtctgtgatttcaaggctttgtacattgctccatccatttctatatcaatttcttgtactttccacccatagaaatcaagtatctgtttacctttctgaacgcctttctgaatgcaagggtgtcatgttaaaaatctttctggtattaacaacatgagggacccattaacaacattagacccagaaaagcaagtgtttgtggtcatgagtattcataagtgagtgtctttgctgaaaaatgaatgcttatgttgactgtcaactctgccaagtagtcgtgggtttttctggtctcataatgggggcagtgcatcctgagggtagctgcaggggctctggcttcccgtggcctatgttcaacttgagctctgccacttgcaacctttggtaagttattttctgcctcagtttcagtttctctgtctgtacttagaaaaacatgcaatatctgttttacagtgttttgtaaggattcaaaagatatggttcatgtaaatatgcttaacacactagattgcattcattaagaacttgataaatgtgaagcatctttagtccatttctcagtgttctgtagctttcgaataagaacggtgatgttttcttgtaatagataacatgtgaataatatataaatgaagcaaaatgtaaaatatttggaagattatctgagaaattatcttttgcttggggagtatcctatattgcaaaagtggtccagtggctaatgatctcagagaaaggagtcagataccgtgacaatttcaaaaagagagggtgaagcgattagcacagctcgtcctctgtggaaggacgtctaaatatacctcttaccatcatcaatcctgagtcggttgtttggggtcacttccagagttcactgagctctaactaacaggctttgaagattaggtgggacccctcttatatgctcaagctaccctccttccccctgacttcccttctgtagcatttgttactcttgaaatagtttatctttagttggctataagttccaggagggccagaactatg

SEQ ID NO: 39069 - DNA, 2058 bp, Bovine  19866880837567
  misc_feature (1)..(1): n is a, c, g, or t
nggaagtccatataaatatcagtcattcagttgtgtttgactctttgcaaccctataaactagcccaccatgcttctctgtccaaatactatagtgggtagccattccgttctccaggggatcttcccaattcagggatcaaacctgggtctcctgcattgcaagcagattcgttaccatctgagccaccagggaagcccctatgtataacttaacattcttggatgcctgaaaacttttgtaaaaaaaatgttgagggaaaacaaaagcaaatgttttccgaaaaaaaaaaaaaaacaaaaaaaccaaaaaaaaaacttcagtagtattcacaggtcagatgggctgaaccatcactatcacctgaaaaaatgttttaaaaataaaattctgagttctaagccccagtctcagagtcagaatcttaaagatgcttcccagtcttactatgataaacatctgggtctatgaattcaaaatgaactcactaacattttggtcaatgggttaaataaagatcatctatttcttacttgttggagtaggtgtcgtacaatcccacttttccatcatcagttccaaaagctaagcagccttccttggtcgggtgccagcacagctataaagaaatatgaagaaaggggcactgttaagggattcattaggttatactttatcgttcaactgaaaaaaatttcttgctcttggtgtcttctaattttaaaagtaacaaattctcattatttaaaagagaaatagtattaaaaataaagtcacttgtaatttcactatccaaaacaccccactgtgagctctgtatctttctagaaattttttgtgagtaaacttcatatataattaaaaaacaaaaataggatcaaatgtttaaatgatgtgcgtgatagattgttgggtggggagtaaaagattccagaacaatttagaaaatatggttctattattaattaacaaagcttggaaagatatatcaacagtggttctttggattatggacgcgggagaatagactcaagggtggaaaagaaaacatttttgctttcctcacttctgtactgtgggtttttttagaatcacaaacattattattccccatgtggttatattataatttaatgtacctcctatgaatgcacacacatccaggttattttaaatttcttactattagaaaacaaggtgacttaattttataaaacaaagctaaatttctgaattaggaggtaatgcgtttggttagggagggtccctgtgctttcccagtttcaaattgcatcaaaaatactcttgaagtataaattccctatagagttcatttgtgtgaataggtattctctaagagagaattagttatttgaaaacagtgtatggcaagttcaaagaacgcatccttaccgctgtaaccttggacttgacaccttgccaaaaatgtttcacatcatagttgttctttatggagagtgtattccatacgcggatcatgccatccccgacgcctatcgctaagcagcctgtgtccacaggagagaaagccagactgtaggcaaacccaccgagggaaggcaggctccagcagcactccagagtggccatgtcccaacattttacctgaaaaggttaagggttagggtcttaatgaagatcagagaaacaggaaaacaatcatttcagacagaatgggctcaatgagtgcagcaggagaatgtaacttaactattccagtagaaattagaaaaaaaaaaaaagcagtaaactgtagagctcaaagggatcttggaatacatttattccctaagatgccaagtgaattgaaggcacacaataaactagaactcagccttcctgtttcccagagtccagtggcctttccacagtattatagcatcgataatctcatttggtaaactcaaaaaaaaaaaaaaaaaagaaagaaaaaagatgacgatggtctcaggacagtggaagaatcacagtttatctcaaaaagcaaaatacgttatcatatccattggaagaggagtgctaagtttttaatcttca

SEQ ID NO: 39070 - DNA, 2391 bp, Bovine  19866880859455
  misc_feature (1)..(1): n is a, c, g, or t
nggattctccaggcaagaacactggagtgggttgccatttccttctccaatgcatgtgaaaagcgataagtgaagttgctcagtcgtgtctgactcttcgagaccccatggactgcagcctaccaggctcttccatccatgggattttccaggcaagaatactggagtggggtgccatggccagtacctaagctagtacagctgaaagttggtttttcagctgattgaggattagactgacaaaatttcctctcagatttcacctggctctttttctctctacatgtagcaactcagatcccacagcatcaagaagggtagtttgtccatctttttctaagaaacaggggatcgtatgccacatctgcacataaacaagtggccaagattttcaacgtattattaataggttgctgctgctgctgctaagtcacttcagtcgtgtccgactctgtgcaaccccatagacggcagcccaccaggctcccccgtccctgggattctccaggcaagaacactggagtgggttgccatttccttctctaatattaataggttaacatttgcaaaaagaacagtcgagggggaccttctctgtcactgctcaaagtaagaaactgacctcctggggtatcttaactcagctgtaaaaatagggctttattcaatgtccaaatgctgaaggaaaattgtttatatttggaaaattaaattgccaaaacaaacagaagtatcttctcaatgcacacatggcagttagaaaataattcctctttgcatttttttcatccacaagtaaattatctttgctattagatgatagtggtgatctccttggaagaagagagggagagtaggctagatgacctcccaaactgccttgtattacttgaaacacctgtctaaaaaaataaatcttgatgacttctgatttttcatgcagaagtcagatgaactgtctatcccagcttgttagctgtagaggagcagcattccaaagaaggatttggatttgataaatcctgtattctgatttccagagaaaaaagggaaaaaaagtgtttttgaaaagttttaatatgcattatactgtttgggctacacaaatctcgaattcaataacaacaaaaaaaagtaaggcacactgaaaggaatgacagaaattcctaattttgtggttctcccatgggttctctttaacataaaggtttctcttggtcattcagccatcctacatggactctcatcacttatagcttccacgaagggaaactgaagcgtgtcaaggtgaaggtcttactcagcttgagttacagagcctaacatggaaactaagaggtatggctccttcttgggatgttcttactagcagggaggttaaaacagatttatcaaactaatagattcctgggtcaaaaagcagaggtaagaataactatttcagaatcaacttgataacttagaaaagtggtcacactatcttccattttgtatttagaagtagtttgaaggaaaatcatggaagcataaccccatacctatggtaactcttcattttatacaaaaaaagaaaatccttgggggacttccctggcagtctagtggttaggactccacgcttccactgcaaggggcacaggtttgattcgtagtcagggaattaagatcccacatgtcatgtggtgtggccaaaaaataaggaaataaaattaaaaaataataacccttggtatttttcttgagatttatatttttgaagcaattaacacctaggacatatttgttgttatgtttagttgctaagtaatgtctgactcttcgcaaccccatggactgcagcccgccaggctcctctatctatgggattttccaggcaagaatactggagtgggttgccatttccttctcgaagagatcttcccaaccaagagatcaaacctgtgtctcctgcactggcaggcagattctttaccactgagccaccagggaagccccagaacatatttacctatataataagttataaggttggcagagtatgtaataagatgcccagttttagaagccacgtaaaattatttgttatactaatgagacactgttttgatactatttttccaattctaaaaatagtaattggctaatttgaagagttcagaaacttattatcaagaaaagaaggaacattttggtgcattttccttttctgtggctgtttcatgctgctacaggtgcatatgtgtgtgtgcataaatttttaaccaaattgaggttttactttatattgagatgtttctttcttgcctttattccatattaaaatttgaacagaatcctaggaagatagattaagcaaacatatctctattcctctccataattacaactaaa

SEQ ID NO: 39071 - DNA, 1434 bp, Bovine  19866880876466
  misc_feature (1)..(1): n is a, c, g, or t
nggatctgtaggcttcaccagattgccagaggaatccatggaatcggtaaggttaagaacccctgtcctaggacttctcttccagaacagagggggctggggagctcattgtcaaaagagggcatgtaggacctgtgatcccaggagacaacgtgcactctctgagccagaggaaaatgagacaggaaactggggcaggagcaaggggactctgagaagtggagcagaagccaacaggtcatcaggcagggcccagtctagtggggcagaactgaattccttagccccaaccccagccagacttcttgggggagccgggactccacggtcctcagcttgcttctgtcatcttcccttcctctcatgtttcttctctgagctaatatagtggaagcaacggtggcttccaggccaagaaagatcctgcttctggacctgagtcttgtcttgctgagtgattttgggcaagtcatctccccttcctgggtttccctgttggctcagatggtaaagaatctgcttgcaatgcaagagactgggttcaatccctgggtcgggaagatcccccagagaagcgaatagcaacccatccagtattcttgcctggaaaatctcatggacagaggagcctgggtgggctaccgtccatggtgtcacaaagagtcggatatgactgaatgactaacactttcacactttgatctcctgttcccaacccagttttcatatctgtatgatttttggcataagtactgctacagcccctcaccatgcccacagtagatactgctgacagatctcagtgtatgatcattccatgctcatatgtagcttcagaagccttttcaagtgctctactgattgataggaatttgcaatgaagtaaaatatatttgctattactgggctagatgatctgcacatttccatctctactattccatagctctaaagatctgagctcagaaatccaaacaaggaacgtccctagtggtccagtggcgaagactccacactcccaatgcagggggcccatgttcgatccttggtcagggaactatatcccacatgccacagctaagagttctcatgctgcaactaagacctggtatagccaaatgaatgaatgaatatttttaaaaagataaatctgaacaagacactagatagatgcgaagacctacaaagcatagctatttttgacccttacgtgactgtttgtgtgttgtaacagaaaaagagaatacattctcacttgggctatagatgttctcttgcatatcctatagcaaaaatagggtcagaaaaagatattcagactttgaaatctcaatctggcttcttaaaacagagaaacaggcacatggaagtcagaccctttgatcaaagtattaggaatgggcatcacactggggttggtgccaccaggcccta

SEQ ID NO: 39072 - DNA, 1234 bp, Bovine  19866880897194
  misc_feature (1)..(1): n is a, c, g, or t
nttggtgggaaactccgtgttatcattaagtatgatgatacttgaggcagatacaacaaattcacttagtcaatagctgctcaaatttcctttcagccagtatttgaaaaagaaaagaacagtccctggcattcagaagctggctaggcacttgacacagttattctcctgttgaacagaaaccatctctcagaataccaactcagacaaggtcattctgggaacacgattaaatgaaataaaacaagcacacaacataatttcatctaagcatagacaaaaacaaggttgcgggtgctatccacaaaataccaaacaccttttctttgctaaaataagtgactgttaattcttatcaattatttacacctatttcctcacccaagtttgccctccctatatgtaaaatttattgagataatcaatcatagaattccccccacccacattgtctgatgacatcaaattcagagcaaaccctagcaagtcaaccaaccaaagcccaaatcctataaaatcactccaccaaagcccaaatcctaacatcctcttgctgaggattccccatggtcaccatggtgtgttctcccttgctgcaaaaagtaataaacccaacttgttcaactctgtgttcatgggtggtctctggctgcagaacactgacatgttttaagaggccagaaaattagaaagtacttttctagactactttatagctaaggttcagtcttatgacacttctgccagtcactgatacccactcctgattcagaaaatgaagaaagtacctgcagaccagggggaaacatattatatagtctggggcccacttagaaattctttgagctggctaagatccttaataattcccttctgcttagtctaacaagatgttgaaatgggacacctgctgccctagtgtggtgtcttacactgaggcactactgtgataggtatcgagttgccaaaatgattgtgagagcatcacttctaactcccaattattactcaagttcatttttgatcaattctaatccagaaccatacagagaaatagtatatatagtgtatatatatatatacactatacatacatatatatgtatagaatatatatatacacatatatatatattcttgtatatatactagtgtgtgtatatatatactatatacacatatacatatatatacatatatatactatgaccaacctagatagcacattgaaaag

SEQ ID NO: 39073 - DNA, 1517 bp, Bovine  19866880902335
  misc_feature (1)..(1): n is a, c, g, or t
naacacagcctttggggagatttattggcaacaaattagcttaaatttattgcagattattgatttctacattcaaaggttaatgaggtttgtgccttcattcaacacttctgctctggggaggataatgagattgcctgaagacacaaaccattcaatcaaaataaacagaagactgtaatgtgcatcctggctatatcctgatacttttcccacttgtcttttctttctcaactgtatttctaaggtgattttcatttttgcatgtcagcagatgataaagatgatcccaggcagcactctaccaatcatagatggttccctcatggacccttacgtggagaaggagaactgatctgtacaatctatcaaggtttctttcctctgatatgcctacacccattttggtgtctcagtggtagaaattcaaattgattgatgctcaattagaaacctcagactgacagggagatccaactatcaggctggcaacaagttcattcagtttttccacaagatgttataggaaaacctgaatgagctttttggtcaagccagtacattatttgaagcatgaggtattgtgcccctagatactggctaacagccttttaaccaatacaatgctgggcttaagtaatttcaaagtattgtttctctgaccattacagattttctggcttaatagtttatctgtaagtagttttggttccatctttatctgcatgctagcacacatgttttacaaatcactaacttagttcatttatttaactctagatgagactgtaaactttgcagagagctcagggtctgtattcttttcaagggcttttgtgaagcaggccacagcctgagttaactaggaagaacttctctattgtctgtatctgacccaaagccttaatgaaatgaaaacctggctcccctggagagacacttatgaagaacacaggaaattgttctctcagcagtaactttatgtctatccaaagacgaattacatctttgcatgtgtattcctttgatagtttctctttgatttagttctctgggggcacagacggaaggcaagttactagacctagttcacttttaagtcatgaagtgtaagggctgagaggaagcctaaagttcatttgaatcctttccctcatttgtcactggggaaataaagcccagaagggagcattcaagtccaaggttgtgcaaagccagctctctgattcttcttaaccaccagaaaatccaggcattccggtctcatcctgataagaatggacctcaaaaccctgaggctgtcttcacacctagattgatttcttggggacataagggacataggataccctgtagctccttcttctgtcagtcagacacagttcttgttgtgaaaccactcagaatacattttgattacaaagccatgcactgatttattgacaaaggtcagcttaaacattcttctttaaagtataagtcatgaggaaactaaaatttgtaaaatgttaaagaac

SEQ ID NO: 39074 - DNA, 899 bp, Bovine  19866880945733
  misc_feature (1)..(1): n is a, c, g, or t
ncatcacaggaagacctgtggagttgggattttgtccctgactcacccacaagtacagttgggccatcacttccaccgtgtgtgacctgtggcacatcattgtctcaagtggctcccttctcctccctgcctggctgccagcaccgggagaccacgtggatgaaggaaggcacttaagaaatatgaagtgctgtacaattttcaggtggtatcattatttgaaaacacgttacccacggttaagggatttggactttggaggcagcagctaccttgttgatcagattttctgaggagagctgcagtcacccccttagggctccaaatgctgtgtcaggtttttcaaagccaattgataacaattaagtagatgccatgttctgcaagctgtcttttgtgggagttgaattctagctttctttccttgtgagcctctgtacataagacttgctatgggcagtcaccttgttggagcttttgaatgcctctgaaactatactggggtcaagtcatttgatgtgtgtgggtgttatctgcattgcaagagaatattctagaaaagtgccttttgctcatgtattttaagcattcccctaccaccagaattgatgtgattcaatcctatacacttgagttgtgaaactggacccaagacagataggaatgacatagtaacagaatgttctttaaagaagagctgattacttcaagcttttggtagtaaagtgtttcctttgaacttattccccggtttctcaccccttccctgtgaaccatgtccccacaattcctacccccaacctcatctgctttatgcttaaacttccatgacttaagcatccttgggtgtgcatggacttcttattactgctcactctgaaggctgccaatgccaaggt

SEQ ID NO: 39075 - DNA, 3082 bp, Bovine  19866880972199
  misc_feature (1)..(1): n is a, c, g, or t
ncttactgttagtttgaaggttgagtgggttactatgtaagtcactagcatagcatatggcacatgataggtgctcagtaaacagtagcacctactaatcttatcaaaatagtgataatgttgatgctgtctgtcactcagacacctctgccttagtttaggcatttatttccttctgtccagatgattgcagcagcctcctaagtgtctctatggtcttgctgactttcgctgactcatttctatcagaatgttctttctaaaacacagctctacttatatgagtctactgtttaggaccctcaaatgtcttctcattgcctaaaggataaaggccaaacttagtttcaagtgtccccacagcactgacttataggggtgctcaataaataccttttgaacactaagttgcttttttacctgtaacccactgtgcctcattagcataggagcacgtacagctctccggtaagggtctgagcaggactggacactgcacacctccagggggcacttttcatttatattctatgtgagcagcacttctggaacacagtgatgttccctggattgggacagtgccatggcctggaagcggcctggattcttgtgtggcctccacgcttaggcagataagcggtaagtcatgagccttagctgtaaagtgggatagcagggcctttcctaccttcctatacagttgtcggagccttctgaatctgaaaggtcttataaactgggaagtgctatctcccagaaattgccctgctcttattgtcattgatactgactgtgaacagtaaagactaaaaagaacctaatcgcctgcagtcaatttataagataaaagccccattatgggcagtgactgtgtgataagctcaaggatattatttatttataatttaactaccttgtttttcttacttcaatggcagtactcataatagcataaaataatagtctagctaaaaagagaaaataaaaagacctataatctcacccacacagaagcaagcattattaattccttgatatattttcttctagaatatttcccagacatatacagtgtacataccatttgataacctgctccccccaccccatttaatgtaccacaagcttcttttcatattaatgagcacaccttcactgtataattattaatggatacatagttgtctggtgtgaggacctactttaatttatttaaacaacactcttgctgccatttaggttaattcttccttttccgtgtttcaaatagactgcaagggacatccttgtagctaaatctgtgtgcatatccatgcttatttcctcaggttaaatcacagaagtggaattacagggtcaaagagtaggcatattttttttaaaggcttttgcaaagaactgtcaattgcctctagtaagattgtatgctcaattggattttgaaggtcatttctgtctaatagtggagcgtgcaaaataaataaactttgaactttcaaatggaattagtctctgctgggctgtaatatgggtttagtcagaaatgtggagaatggagctcagtgatggagtagtagaaaaagccatattaataggctttaggctactttcttctctttggaacttcttaaatttaaaaattgggatataatttttatagaatataatcttatcttaactgatttcgatggagacaaccattaatagagctcacatctggttttcctctccttccaggcatatgaaagatgatattctccaattttttttgcagtaggtggggctggtaacttggtctagacaatgtgctgtgagcagaatgatatggtcccttgtggagtgaaggacttagttgtcagtatgagacgccccccacgttgcctctcccccatgaagtctctgctgcgtgttgaccgaggggccctgtgttacagatggtacactgcaagatggtgaagtctctgaatttcttctgaggacagttgccttgaacagtcacctgtactgcgtggactttgtgtgagcgagactcagacctgcactaagtcactaagatttggtggttattttttaaaactgagaagtgaaagtgaaagccactcagttgtgtccagctctttgggaccccatggactatacagtccatggacttctccaggccagaatactggagtgggtagtcttttccttctccagggaatcttcccaactcagggattgaacccaggtctcctgtattgcagacagattctttaccagcggagccacaagggaagcccaagatataagtagggatggtaagaacaagcaaaaccagcaaaaaccactcaacacccagttcacccatgctctctgtcaagactgtctgcagagacgcctgaagctggccccatcccacacccagcagtggctgaacaggtcttgtctcatatcctattttttcttcatggattacactgtccagtgctttgcaatgaggtcctatactattttcatgccctcattccaaaacaaaaatactacttaaaatcctgcatcttgaactggacctcccagaagagttgcatcagatctttttcttgaagcagtggtgcttaaacttcagggggcattagaagagatgtggctagaatcacaggtgagcatggaccctgccccccgagacccccacatacacagagaatcacaggtgagcacggaccctgccccccgagacacccacatacacagagaatcacaggtgagcacggaccctgccccctgagacacccacatacacagagaatcacaggtgagcacggaccgtgccccccgagacccccccagacacaggtatgatgtggtacacatttgcgggaggttcacaagtcctttgaaatctgtggatccatattaaaaaaaaaagattcttgacctattagaatattacaagttgtcttcgaaagcacaggctatatttctagaaagaatccagtaaaatgtaaataatgtaggtgcacaagtttcccataaaatagttttctagtaggatgactgttgctgataaataaaccccaatgttcaattttaatggaaagaatca

SEQ ID NO: 39076 - DNA, 1774 bp, Bovine  19866881025189
  misc_feature (1)..(1): n is a, c, g, or t
nctgtgcgaccccatagacggcagcccaccaggctcccctgtccctgggattctccaggcaagaacactggagtgggttgccatttccttctccagtgcatgaaagtgaaaagtgaagttgctcagtcgtgtccgactcctagcgaccccatggactgcagcccaccagtctcctccgcccatgggattttccaggcaagagtactggagtggggtgccattgcctacctactttagtgttcactatatactctcctacacacagctagagagagaaatagcagtgtactcacaagttataaagaatggagaaaacattccttgagctacacaattggtcactgacctaaaacattatggtttttcagaacacagtggcatcttagccccagagcctacaatgggactaatgaaatacttctttctgtcatgctttacatggcttgaagcaatgaggacactgtcttaggccagaagctctggcaggcttttggtggaaagcatgtggtcccacagatcactgccgttctttttcttgggatctgactggcctcttgggtgacaggaaacacgtgggcaggaaatcagatttctggcagacaaagaaataaacaaccctaaatccttttcttctcttgtaggctgtgaccatctaagagacaaactgggtgatcatcagtctcccaccacaccagctttcaaaagtctgaaggccttttttatttacggatgtctatatgaattctggtggtctctctctgggccttgcccggagtccagtgtctggctaagagctgctcacagaagtaaaacctctactgaacagagccaagaggttgacagtgtcagccctgaagaaactgaccccaaaccttcccagccagagccaagcaggactccagaactagacgtgagactttcagaagaaggtgagcaaatgcagaacgcttgtaaggagcttttgtcagaaaagcatgctggtctccaaagtgcacagagaactgttgctgaagtccaagagaccttggcagaaatgatccgccaacaccagaagagtcaactgtgtaaatccacagcaaatggccctgataagaatgaacctgaacaggaaggacagtccctctctcatcctcagaaccagtggtaagtactgattcagtacaatgtggaactgaaatcccctgctggactctcacatggaacttggtgaggctgatcacgtcacttggaagccccacagtgcagtcattaaggcacaggctttggggtcagatgtggggttccagtcctggtcctgctcagtgacctcaggagtcttaatgtctcttgagctttagttcccttatccataagtggagtaccaaccctatccttgcttgttttgacaaacaaaatcacaaatattgttaataaaatagtacaatgaaacccttttgtgcaagattcccaaaaaatcagtcatgtaaaatagggagttgcaatattacatcattaatgaaaaccagtttttcttcttttggccaccctccctggcttgtggaattttagttccctgaccagggattcagtctacgccctcagcagtgaaaacacagagtcctaaacactggactgccagggaactcccaaaaaccattgttttttaatttttcagtactatcccaaaaaaacacacaaaaagggtagtgtacagaattacgcaccaaactaaaaaatcccaaatgatcagattgctgcagcgtcctaatgacggctattgaaaataagggccagg

SEQ ID NO: 39077 - DNA, 1311 bp, Bovine  19866881051825
  misc_feature (1)..(1): n is a, c, g, or t
ngtttaacagaagaggaggtggacgcacagtagagggcccctggtttgcttgggctcacaaagcaaggagattgtggagctgagactgtgcccaggcttcctggctcagagccctagcccttggcacctgtgctatattgcctcctgtttcacggtgctgctgaggaaaaagctttctaaacagagctgttcattgacaagatgcacagctctgagagcagtgaggcccctattctgggcacttccagtggaatcaaggtgatggtgattattactgagcagtgtttacggcaggtagggttgaggcggaggactgctgggttgtcctggaaggtcccttcctaccagagagtgtaggatttgatgaaatctctcacagatcccagtctttcagttcatgacattgacaagtcctcctggctctcgagctcttggattgaacatcctctcccagcctgtcctgcctgccaaccatcccctcctcgtgggcactgggatcagtgagctgtgagaacaggtggctatgcgtggatcatcctggaaatttgacagcatggtcttcagctaaaggactagggaggagggacagcagaacagtaaattacagggttgtccaccgcctgattaaatcagtgcctgtgtctagcactatggagatgctgcatgccaggctccctcctgggcccaaggcccagatgttagtcacagaaccacagtcagagtgccaagcgctctctgcagtccctcatccagcccttgcatttcacatgtggggatactgaagcccagagaggggaagcaacttgccagagaccacacagcattccttcaacaaaatactaagggtctactgtgccacagactgtgcttgggaacactaaggatgaacaaaatagccaccagctccaggctcacagagtttacacattagtggaggaaatgggaaaaagcaggtacagacataaaatcagagattgtgatctgtgtcatgaagaacacgaagtactgcagtcaagctgatcaaaggcagtctctctgggagagggccatttcagctgaggcttgaagtgtaagcgcatgctgtttgtgtgtctgtgcggcggggatgtgttcccggcagtgcccctgggcagtgatgagctccccgtgttggaggtgctggcacagggcaagggcaggggagaggagcagaaaggggaagtctgaggtggatggagtctggagcacatggtgtcttgtgggccgagatgagaggccaggagttcgttttcatcgcactatgaagccatggagagcttatgcatacacgct

SEQ ID NO: 39078 - DNA, 1204 bp, Bovine  19866881090353
  misc_feature (1)..(1): n is a, c, g, or t
nccccaaaggaggaagtccggactaggatggaagagaacggacctatctttttgtcaggacacctgagcagtgctgccactatctcactgactggccatgggctcctgatcatccactgctatagtgatgacaacaagaaccctgcctgcttcactttataaaggtttaaaaaggtcaaagcagtgtctgacacacaataaagtcaaaatttttaagtatgtgaagactattacttacttctgtttgcccttttgctaaaaggtttcaagggagtaagacgactggcatatccctactacattataaacactttgaaggaaaaagttttacttatctctggaatccctgatacactcaggacagaagaggaaccagtagtcgtaactttgactcaccactggatgtcactgttgagtcactgtgccaaggagtgggaggagcagggaagaactagacatactttatcaagttctggggttggaactgacctctcccagaaagaataagaacatttacctagggtactcatcctgatcacctctaaatatggtatagcagcaaagagggatggagataagacagaaagggcattatgatggtttagccacatccactatggaaaagggggtgagaagtgatcgcaaaccctcccatgagccttcactgcccacttctcacaccttctgtttaagaaacttaaggcccaaaagggacaagaaggatccctttgctagtggcccagctgggatcaaaacccaggtatccagatctctggttcagttttctttctaagacaatcagggtgggaaagatgagagacatccactcacatccactcggaagtcttcgagacgtcggaatttgccgaggtattcttgaagtttggggtcaatgtccaaatttttggctttggaatatttcaagaaggcccagaacttttctagcccatacagctgacctgcaggggaagacaggtagaaagaagcttggctgctgagaagttaatagagaggctcgggagaagggtatatgatgtgatacagacaagcccaggggccgagaagacagatgaccagggctcacagagtcccaactctgactcttacctgcttcgtagtccttcacggtttcctcctgaaagtccttaaatatgtccagccggaacttcttttccaggccataactgtagtatcgaaaaaggca

SEQ ID NO: 39079 - DNA, 879 bp, Bovine  19866881107398
  misc_feature (1)..(1): n is a, c, g, or t
nggatgtctaagttcttttttttaagttccttaaacatccactcaagattgcccacaaatttagtactctttgggattaccactgtctttaggtcctctttccttagagtaataaactgagaggtctcagagtagagaacaaaacaaacagaattaagctataacccgtactcaaaccctaagggctggtgtctgggaatcttacctagaatgtagaggagccactccttcccttcaaatgtagacagcagcctctcccactgggcttgccaaaagtagcaggaagcaccccaaaatctctgaagataccttgaaagaaaactcattcatgtttctgcgtgaagactggtgggtggacagctcctgaatccatgctctgcccgcagacctccaccgcaaggcccccagatcctgaattagagccggccgagcagactcaccctatgacgcagttccagtggaccattaacaaggggaggctggagcccaggatgaaagccgtcctcctcatggagccccagatgtgtccctcctaggggacgacaagaaaatgtcaggccctaaccagactcctgccttcccaggcggctcactgctgaagcctggcaggagtgacgggccatcaagttctcagtcatgccagcatggcatatctgctgacctttcccagcttccacaggagactcttccttgtcaagagctctcaggcttgtgtggggaggtgagcatgaaagttagagcttaagggttgagggaaggaagagtgcacacctgccccagagaatctagcaggcagttttgtcacctagacaatgacagatgaaccttccaagagccatgggatttcatgaccagtcctcatgttgaacagagatgcag

SEQ ID NO: 39080 - DNA, 2920 bp, Bovine  19866881136978
  misc_feature (1)..(1): n is a, c, g, or t
ntgtccgaccctctacttggtgcttaattaatatttgttgatcagtgaatggctgttggaatgagttgcctccagaagcaatggctgtctgaccatggagctgctgggactaagatttgctggtcatgtggtggtgattcaaccatcacagggcaagggaagacagagtaaacttgaaaatccttttccaccctggaagtctataattccctggcatttctgaaacaaagccctaagttcattttgttctgctgcaaacagattgaacaacctcctcttgtccttcagttctgcagagttctttctttccatttaaaatcctcctccctcagggctgcctctcagggctgtgctgtgttctgttgacaaattagaaaccctattgagtttccagcttgatactgccctgttggccgtttgaaagaactaccaggtaataattcctgtagttttaatgaagctgggtttactcaatcctcttctctcccccacccccttgcaatctccttaacacagccagttgactatgaaaggacactgcatagtaagtataaatctctggacagaggccaataaagcatccaaagtttcatttggagaaatgcgcagcaaaacggcaaagagagctaaggtgtgttgtagacttcgtctccacttgctgctcagatgctgatttatggtggaatttcagggatgtgatttaacctctctggttgcctcatctataaattgaagataacactaatggggtttgcatcataacacagggatagcaacacactatgagggcttacaagcattattctaatgtgaaatgttttattagaatctaatgatacagatttcttatcatcacctgaaagccctgtaaatcctggttcctgactctcccttctccagctaggtatgtattagttccttaaacacacaactcctctcctgacctgggacctctctcgtccaggagtattttccttcccaacatttaccatttgcagatgcgtctttccccttagttctcagttgagcccttgctttcgaagagaaacttttctttttttctcaatcctgcctacaatggatgccgcttccccactcactcactattaagctcactctcatcgctatctgatttatctatagcattggcattggccacctgacatgaagagctaagctgactcattggtaaagaccctgatgctgggaaagaccaggcaaaagaagggggaggcataagatgagatggttagatatgaattggagcaaactctgggagatagtggaggacagaggggcttggcatgctacagtccatggagcacgacttagcaattgaacaatgttttattcacactagtcacttgcttgtctgtttcaccagatcaaagggccatgcctccctcattcacgaaccccactactcaagtggttcaataaatatctgttgagcgcatgaacagattcatttctaacagtggacaactgaaaacaacacaggaagggtgaggctaaggaactccaggtatgtgcatgagttagaaagaacctagtcttcctcctgagtctctcctttactctcacaacacttgtgacaccagatgtgtggagttttccccacctagccattgtcgatgacaccagctggatgaccctacaattgaacacgattcagacactgtcttcctgaagatggcatcagatcccacaggttaaaggctcagcaccatgagactacccctacttcagatgccaatggcaagaagcaagtccccaggctacccacaacttctgtctggctacaaatcagagattctcatgacctcttcccctttggattcattatttgctaaagcagatctcagaactgagggaaacactcactcacatttaccagcttattaagtaaaaaggatatgataaatgatacagatgaacagccagatgaagagatacacagggagaggtctgcaggaatttctagcacaggagcttctgtttccatggaggtggcatgcatcaccctcaaagtatgtagatgcattcacccacctggaaattctctgaatcccatcctattggaagtttgtgaaggctgtctcacataggcatgatcaattattagagaggtagtgtatgtggctgaaaattctaagcttctaatcatgggcttggtctttctggtgaccagcccccatccatgagccatctaggagtccattcagagttgcctcattagagcaaaagacactgctaacacccgaaatgccaagggatttaggaatcctgagtcaggtaagtgaaagtgttagttgcttagttgtatccgactctttgtgaccatatggacagtagtcagccaggcatctctgtccatgggattcttcaggccagaatactggagtgggttgccataccctcctccagggaatcgtcctgaccctgggatctaacctgatcaactgccagaacaaaagatactcctagtgctcttagcacttgggaatttagaagggtttcggaagttctgcatcaggagtggaggacaaagaccaatgtatatattttctattgtctcacaatacacttaacaaaactctgtagagccattcaaaatcatcaccgagaagattatgtagcgctgtttgttcagcgattacagtttgttttagatcacaaaactaggcacactgttggatggtccgcagacggaaggcaaatatttgctcacggtgtatgtggaattaacttctttttcatacatttctagagtcagccgggccatggtgaagtggggagagggatgtggcacaactttctgagcccctataaactcacctgtggagttaagcataaggagtggggctgcaccccacatacctgcgaggaggtgatgccccagagagcaggggaaagtcag

SEQ ID NO: 39081 - DNA, 786 bp, Bovine  19866881157226
  misc_feature (1)..(1): n is a, c, g, or t
nttgaagtgacttagcgtgcactgtcggatagcacagacacatgttttcctaagaacctgtagaaatcatcctgaatcttacccttgggatcctgaaatggaaaaaacataggtttcacttatcaaaattatcaaggaaggtcgaaccagatgatacaatttaagcccacttaaaatataaaacactgtcttaaataatgagataatttgaatttttggacatatcttgagaaagttctgaaaattttgacagttgtattcagttgaaagtttcttgaatattttgacttgactattaaaacaaatagaaaataaactttagtgctaactcctgtgatattttaagtttacagctctgtttcaaatgcttttggcaatgagtcactgaacaggttgttcttaggacatttctaacatcctttaattaaaattcacaagagtttgtatgataaaataccaagggaaccagttattcccaggtattcttttgccaaaaaaggtacattgtagacatacagtcctgtcctgagtaccatctgccttccttcccatttgaaatgttatctatctgttactaacactgaagtttggccacctgatgagaagtgctgactcattggtaaagaccctgatgctgggaaagattgagggcaggaggagaaggaggccacagaggatgagatggttggatggcatcactgactcaatgaacatcagtttgagcagactctgggagatagtgaaggacaaggaagcctgttgtgctgcagtccatgggggtcacaa

SEQ ID NO: 39082 - DNA, 2029 bp, Bovine  19866881163969
  misc_feature (1)..(1): n is a, c, g, or t
nttgacaagcttcctttgggctctgagtcagaaactgattctctttccagcgatgtcacttactaccctgggtatgtcaccaactcattcaatttatttaagcttcattttccttgtttataaaatgaagaaactaatccctgccctgcattcattctaaagttgttatgagaatccaaattagataggggacctaattagattaaggtagcattcctctttgggctcctactaacataggaactgcaaggctgcatagcattttgaagagacaggatgtataattagacactgctagctttgcaaagcgctcaaaatgatgacagctatacctacccctggagttgtggtgaggtttaaatgagatgatgccaggaaagtcctgggctcataggaagaccttaatggcttttctcccctgcattcatattttgttgaaatactaaatcttttttcatcatattaccagagggttgtttgcatatacaagacattgactaagatcagcacttctgtttttttcattgtaatcactgatttttaccaaaaactgaaaaatttttgtttaaaaaaatcaaagagtgcacaaaaagtttcatggattttagaaaacaaagcaaagaagctaaatacagaactcttgatcttgaaagtgtctgttttactgtcttccccaaagcacatcagaagatgcatgaagagggcatgtaagttagaaaaaatttatctccaaaaatccttggtagcagggagggatatttctctcctcatttttctaattcatgccttttatgaaattaatgtttaaatttttatcaaagtagtattcggtatggtttagaaagtaaaacatactacaaggcttatacataaaaagagctgtctcaagttctacccttctctcctccagttccagctcctaacaagtagccactttcaaatacccaagatgtttcttatgttatttacttccttatttatgaggaacatgcttgtactgccattcttgatttatttcccatttttactgttatttattgatttcctaaaagagaagacaatgatttcattctctgagatcctctttcatcccataccaatttcccttcctgccatccacctcttagctaagctaagctaagtcacttcagtcgtgtccgactctgtgcgaccccatagacggcagcccactaggcttccccgtccctgggattctccaggcaagaacactggagtgggttgccatttccttctccaatgcatgtaagtgaaaagtgaaagtgaagtcgcccagtcatgtccgactcttagcgaccccatggacagcagcctaccaggctcctctgcccatgggattttccaggcaagagtactggagtggggtgccattgccttctctattagtagcatataatacctcttaggctcatcaatagcagtgttcacaccactatgattctggttatttcttaacagttgtaccacacagattttgtagttacaattcttctctgatccaaaattagtgtttctaagagttaataattgctgctgtgtcttctcagctttccacatattcccccaaatttctgatcttccatagagtcaaacataacaatttatccaattcattgtttctttctcttggagagaaatcctccattcctcagttttccctcagccagtcactctccaaccttgccctagagatgttgcactgatatttctttctctgtcacctgggaattcctgttttgttggatcctccgctttgttttgtctttttccttgatttactgtgtcatttgaggagcacattctccaacaacttcctgacaaatgacgcttggtatacacatttttgagaccttgcttcactaaaaatattgttagtttacactcacttgcagtctcattgtatatgcaattctaggttttcagctactatcgatgatttaaaaagtatcatccactgtcatctaacttccagtttcatgggtgagcaacttcaacccaaatcattcccgat

SEQ ID NO: 39083 - DNA, 2663 bp, Bovine  19866881210366
  misc_feature (1)..(1): n is a, c, g, or t
nattatataaaaaggttaaaattatatatttatatattatgtaaaaaccaagttgtatttatttgaagaatgtcaagttgtgttaaagattagtgattaatcctccattaattttagtagatgcaggaaaatgcgtttggtagaagttcagcatccatatataattaaacttttaccaaataaaaattaaggatatttttaatttaataaagtatttctataaaagacttaaagaaaacattatatataatggtgaaatattgaaactttccctttgatattggattctcttatgagagtgtctactataaacacttaatagaactgtgatatagtccagctatcatacttctggatatatattcaaagaaatgaaaacagggtattgaagcaatatctgcaccccatgttcattgcagcattattcacaatatggtaaagctgaggtatggaaacaacttaaatgtccactaacagatgattggataaaaagatgttctgtatctatatctgtacttatatctaccaacagaaacagacagaaatatatgtagataccaatggagggtgttaatccacatggaacttgtagcgggccctccatatctgctgctcttctatagccacagatttaaccacctatgaaccatgtagcactatagtatttactcttgaaaaatatttgcagataaatgcaactgtgtagttcaaaccaatgtagttcaactgttaaatctgtgtgtggtgtgtgtgtgtacacacaatggaatttattcagctctgagaaagaagaaaaccctgtgattcacaatagattgagagcattatgctaagtacaataagccagacaaaaacaaatactgtatgatctccctgaagtatggaatcttgaaaacaaagaagaacttaaggaaaaaggagagtggaaaagtgattggtggggactgagaagaggggacatagagattttaaaagggtacaggctctgagctgtaggatggaaaaggtttgaggatctaatgtgtaacatggtgactgtagttgataacattataattgaaatctgctaatagtgtagaatttaaatgtcctcactaaaaaaaaaaaaaaagaaagaaaagaaaaatatgtggggtgataggataattaactaaattgaggaactcattcacaatgtataaatatcaaaatcatcatgatgtacacttcgaacattttgtttgtcaagtaattttatctaaatagagctgaaagaaaagatagatcacatttcattatttacctcaaaagccagttttgtgtattgatgtctccttgtcaccatagtactgagaactgatactcaaaacacattaagctaaatgtatacatttaagggaaaaaaagtgtatttcctgaagtcttcttttcctaagccatcatttaatgcacactaattatataatttgtttatggtacctgtcatcattggtttattcaaaaatagaacatgttttttctcttttttgtttttaataaaaatggtctttggcctactggtaatatattgtaaatgtatgactttaaagaaaaatataagtaatataagagtgaaaaaagtataaggaaaggagaaaacaaaattttattacttataggtagcatagaaaaattttaaagaatctatagaaaactattagaggcaataaatttagcaagattgttggtaataaaatcagtatgcttcaatatcccatcataatgttatgtgtgatcgaaaaattcactcagtaaaacatgagttcatttttggtgaggttaatatagagcaaaatattttagctcgtctgtgctgacacacaaaatgaaaatgatgaaacttactctctactcaattgactatatactgacccaaggaaatcccacacgaccaggaagctgaagcagtcacttcctaattatgtccctcctgccccacgaaaaacacaaacttcaggccacatacctatgagaatggaggccagtcaaagaatgcaataccaatttctttatatccaaatttgcattattattgagccttttattgcagggttttcctgtagaaatctagttatagtttcataaaccagaaacaaacagaaaaaggaatctaaaaactagatttcattataggagcaggcataaaaccaagtctctaggagtaaatctaatgagaaatgtgcaaaatctctatggggatgactgtactgttgggtttaggggcaaggttctgaataatgagcttaaggcaagtctgctaattaagagggttggatgtgcaggaccacacagagacagctgtaataggggtgcttttacagtctgccaaaatactagtacccaggatgtgtccagcctggaggacagatgtgagctaaaaggccgcatttggtcaatgaaacccagccagaaggaaagatcgggatgtcagccaggctctgacacctacagatgcttaatcagatggcacccacaccggaggacccagccagtgcctggctccagatctttacaggctggagtcaaggagagagccaggtcagaactctcggccatgcacttgcttctgagaagagtttttgaagcattaccctgaggctaagactgtgggaggaaataactgatactcagtcccagctatattg

SEQ ID NO: 39084 - DNA, 1060 bp, Bovine  19866881239738
  misc_feature (1)..(1): n is a, c, g, or t
nattttcacagtgccatgcactataagacactttacgtattaagtctcttaattctcacaacccatccttgaagttaaatattatcctcattctttgatatgaggaaaaactgaaactgaatctcagagaagttaagcaaatgacccgaggctatagcacttgtgcctgacagaacctgatatccagttctatcgcctgaagtccagtgtttctcaaatctgtcacaatgctcatcattcttccaccaaattgctgattcatagtatttccaacttgattttcttgtggagaattttaacatatgtacaccttagtaattagtgccttcaaacttttacaccggctcttctatttttaaaacaccaaaccatactcttcactctttaaattttaacgtcacctcttccagaaggactcccctgataaaccccttaaggggctcatcactcttgtccctcccatgtgtgatacagcactattttaagccagagaattttttgtttagatcctagatttgccatgtaaccttcagtaagtcacaaaatttcccaaatgcacgcatcactaaaatgggagacttaaaatttaaaggctggaaattgtccatctgctaccaaatataacctatagaaaagtatttgatgagcaacatttttaaatccagttcagagtctttacaggaggaaatgcactcaactgactgccacaagccctaccactctttacaaccccgtctctatagttcatttctattgtctgtctggcatctggtatgcaatggggtttccaaccactggattattatcagttataccttttctatttcattttcatgtggtcatttccccactataaagtccaaaatgcagattcctaaattatggacttcaaaactagaaagagatgaggtggcaaaatccaaccttcctgtatcacacagatgaaaagactgaagccaaagtgctttagttacttgctcaatttaaatcaaccagaataaacaaaacattcactttgtgcaagaccctaccctggagctacaaagtaaaacaagaatcg

SEQ ID NO: 39085 - DNA, 902 bp, Bovine  19866881283440
  misc_feature (1)..(1): n is a, c, g, or t
nggtgacaaaactcctgaaataggagtaactgctgcatgaactccaacctatgcaccattttattggggtggggtggggaagagctttgcaagaaacactgatctctttctagaaaaagatcagtatgaagttatgctaccaaaaaatcctttacatttgtacagtacaccatgccttccaaaacattttcacttacattaaatagatgtgagacaagcctacaaaaccagagctaatgctttaggatgttaagaacaaagaggaaccaacacatctgggtcactaagtcttcaaaggtcccctggcttttataattcaacagatgattttccattctggtactaggagggctaacttacaggatacctctatggacgaggcacctggcatggcacattatctataaagactttctaagtccactgtgatcctttatatctctctttcgggttgacaaagaattcattttttaaaaaatcagctacattcttattatgagtaaaggaccactctacgtatcatcttgatattcattatttaataactatcagcaatagatttcatgatctcagtctcattagagaacaagtaaaaataaagcagttaggaccattacaacagacttaacattagcatgctgaagactgaaaaataaactatcaccagcaatttccaatggtaaacatagtccaaagtattttagataccaaagactgttattagataaagaatttggcatcactacttggaagatattttccaaagttaagaatattaaagatcttacctatatataaattggatctgaattccacgtttgtggtctcttactgccatatcttgtgcttctaagagaaccttaaacaaggaaaagaaaggcattcatatggctgaccttaaa

SEQ ID NO: 39086 - DNA, 939 bp, Bovine  19866881302351
  misc_feature (1)..(1): n is a, c, g, or t
naacattaataaaactgagtaccctaaatctgtataatataaactctgcacttaaatgaggtaattctggatttaggcaaagcttactaacatctgcaagacaactatgtgctctttccccaccagtcttagttcacctctttaattatctgggctccttttttgtcactgaattccaattgagccagagcctggtcaattgacattcctcgtatctggaattaaaggataacagacaaagagaaaataaataaattggtttacaaagtcagcattgccacttcagtgaaaagtaaaagccttacataatccaaataacttctaaaaatagctaacaagttacatgttaattaaatctcagtaaaattagggaaaatttttttcattaaaaataaaaatagctaataaatgcaaaggagaaaaatacacatttgagaaggtacaccaccactctctttaagttaaaatcaaacttaaaaatgtcaaccactaacctggattttaatagttttaataataaaagagagcagacatgacaaagaaagatgacaggctggcaaggaccctagtaggcataaaaggcacctcattctccaacggaagtaaagtgtattattatacatgtatttgctgcctttgctttctctcatatataaattttgttttctgggtaaaaaacttaaaaggcaccagttttgaaacaggttgaatcagcttttacagatatgtaagtttgcttcctagattctctgttcttgatgcctttgttctaaatatctatgaatccaacatgattgagattctgaggagggaaaaactgaacaaaatcagtttttgttcagagattttgttcaaatctctgagctatcatttttggattacctaccaaatgtctgaaaatgtaattatattcctcactttttggagaaaacagggaaa

SEQ ID NO: 39087 - DNA, 1504 bp, Bovine  19866881411333
  misc_feature (1)..(1): n is a, c, g, or t
natttgttttgcttttctagtacaattgcctgtacacacagtagtatcagctggaaagcagatggcaaaatcatggctcttggcaatgaagatgggtatgtgtttgtttctttaaaaaaaaaaactttgtaattgcacatatatttgatcacaagctagtgccatctgtaatgttagttgggaaagcctagctgtatttgatattcttacttatccctgatatccttaaataactcaggagctctctgcattattgagaactgcaaaataaataaaatatttatagctcaaagagaatgtttgcctactcttgttttggctgtagtatgcttcaaagaatgcttatctccagaattaagttccctaaatctcccttcattctttttaaagggaaaaaaaaaaaagcagaaatgctttttaggtcttactatatcctttccaatgttttgttttggtttggttttttagggtgttttgctttgttttgccctttccaatgttgatcacagtaacatggttactatttcagccattggcttattaattcttcttttagtttttccctggtaccatttattatttttagagcatgataaatacaactttccagaggttattgagatttattaaagctgctgaaagaactgccttttgtacctgattttttgtaagagagtaacctctgcagtttagatagggttatcctattctatttcacctttctttgactgatggaatgagggcgatacctgcttgcactgaactgtaatttgagcatcctttcttatcttggtgtgtttcttattccagatcaatagaaatattcaagcttcctaacttgaaactgatctgcagcatccagcagcatcataagcttgtgaataccattagctggcatcatgagcatggcagccagccagaactgagctatctgatggcctctggatccaacaatgcagtcatttatgtgcacaacctgcagactgtcataggtgactttggtttctttccatactgggggtggtatatgtgttcagctactttttgttccagtctttgtacattttccgtttttttttttggtattaaacactactcttactatttttctgctttcaaaactaatgtattcaccttatttaagacacaacaaaaatttcaaacatgacaatacatgttaacttagaaagtgaagtacctccccttattcccatccctcattaataaacatcgctgtttcctccaaattttctaaagtatagttattgccaagtcactctccaaaagatggcgccaatttatattctcgtccttcagtgtttgagtatgacacgaacaacacacatcccatcccatgcatgactgcatctaattcttacaatcctgagactagattttgttatcttattttcctaattgaggctcagaggggttagctcacttccatgcgtcccacagctcatatatgatagagcccagattcagtcccacactaattgcagca

SEQ ID NO: 39088 - DNA, 966 bp, Bovine  19866881722547
  misc_feature (1)..(1): n is a, c, g, or t
naaactgctgtctcaggattccaagatccaaccattgaaagaggtactagaacccatccatatacatataattttaatccaaatcagccagggttggcttggcagctagtgaaaatgaaggtggaggtgggaggaggagcgtgatgtgggaagagagatgcaaagacttggagtgaatcactgtctttatcaactaccacatgtatcaaagggaaagtctcgtgtacagagcagattacatttgctgctaacttcaggcagggcttctgacaagccgaggaaaggattactcttttttatggaaattcaatctagtttgatgctggaagttatggattcatctaaaatagcaagtgacaggcacagcaacacatcagacaccgctcaggcaaacagtggagtctagagcccacccatttctgcaggagcccttgatggtcagtgctcttgctgttgccatggaagtggtggggaatcattaataattttacagatacttcagggtaggggccaggaaacagcctcttcaaactgtgtgttgtagactcttcatggttaattcagaccagcatacacagcaatagattcgcaggatctttgcacagagcctggggaatggaagggttttctcacacctatggccttgggaatgcagttctccattcttttgcaagtctggggagcccagaggagaaagcatgcacagaagtcagggtaccccacttggtgtctttactgtgacatccctgtgacttttaatcttggaaaagacactcccctctccagaaaacatacaggacagatgtggtgggctgtgacagctattgctattttgtctctcccagaatgtcctctgaccctcttttgttttgataacattctcccctttggtggggactgaatgggaggaaaactgcatcccttttccatgggccccagaggtcatctatacacacacagcaggtc

SEQ ID NO: 39089 - DNA, 803 bp, Bovine  19866881942027
  misc_feature (1)..(1): n is a, c, g, or t
nctcttgaactaggatgatacagtgggacccctacattcatggatgcagaacccacagatagggaacctaccgatatggaaggccaattgtatcatggacgtcttgagcatgctcagattttattgtccataggaggtcctggaaccaattcccctacatataccgaggggccactattcaaaaaggcacagaggagaattctacggcagatatgaaaatgagatcaggagtctgctttgctcagcttttcccttaaggccagcaataagaagggaaggcatattttcacaaactttttcctggtgcctttcctctatcatcctgacccaactctctcgttccttcctccaggctcactaaacaccacagcagtctgagtgagctcctactccatgccagcagccacagagccaagtgctgaatactcagcagggataggacatacgtagcccctgctttcaggaaagcagattggtaaaatgaacaaaaattttgcactaattaatgaacctggtaacatgccgaggaggaagacaggaagaaggaggtcagcgtgtgtttgacacagcctgactcttagccagagagaaaactgctgaaatctctccccaagtcagctgctgatatatatcctgtatcaacatggggtgttatttatgtctccatgaatttaattaaccaatgacttccactggttcacttcctttgttttccagttgagcaacttaacagactattaggatcttccacagcttgcaaggaaaggggactggcctttccttttagttgagcctaagggttt

SEQ ID NO: 39090 - DNA, 3767 bp, Bovine  19866880137271
  misc_feature (1)..(1): n is a, c, g, or t
nccttgactagatgaacctttgttggcaaagtaatgtctctgcttttgaatatgctatctaggttggacataactttccttccaaggagtaagcgtcttttaatttcatggctgcagtcaccatctgcagtgattttggagcccaaaaaaataaagtttgacactgtttccccatctatttcccatgaagtgatgggaccggatgccatgatcttcgttttctgaatgttgagctttaagccaactttttcactctccactttcactttcatcaagaggctttttagttcctcttcactttctgccataagggtggtgtcatctgcatacctgaggttattgatatttctctcggaaaaagtgcaaaagagtatatacatagtataataccttctgtatatgaaatgaaacagaaatataaatttatctatcaatcatctatatatatctattctttttactaaaagaaacaccagaagaaagcatcaaaaaataatgaaaacagtacctatagagataagtgagaatatagtaaaaggggtaaggatgagaaggggagctctctgagtctatcaacttacacaggtttgattttggggggaaatattctaaaacaaaatgagccctgactcttcaaaaatgccaagaaagacaaaaaagaaaaaaagacaggaatttttatagattaaaggaaaataaagagacatgatgactaaatgcaatgcatgattttttgtaggaccctgtgtcatatatatctatgaatttacataaatcatatttatgtatatatatagctcatctatcaaacaaacagcacaatgtgaacattcaatatacacagttgtaacattgcaaaactcctaagtaatcatagtttaaaactgcaattgttgtaaagatttaatttaaaattttctttttaaaaacaaggttggacatgttaagagccatttgtatttcctttcctattcatattatttgcctatatttatctggggcattattggtctttactgattaataggagagtttcatatattaatatggagaaggcaatggcaccccactccagtactcttgcctggaaaatcccatggatggaggaacctggaaggctgcagtccatggggtcgctgagggtcggacacgactgagcgacttcactttcacttttcactttcatgcattggagaaggaaatggcaacccactccagtgttcttgcctggagaatcccagggacaggggagcctggtgggctgccatctatgggatcacacagagttggacacgaccaggttgatatttcattttaatttattatagtcaacagatatcaatcttttcctttcattatgatgtttgcattatgctaaggagacctgccttattcaaggtggtacctgtgctttcttctagtattttatagtttcatttttgtacatatataaaattaaacattttaatatataattaaatacttaaatcatctgaaatttatgtatgtttaagtgaagtagcaataaggtttaatttttctcaagatgattattcaattgtttcagcaacatgtgttaaataatttatttttccctattgttaaattcttatatttactcaggtaaatctcctatatattatctcccttaatccttaaaaggtcttgcaagataggtattattatagatgaagctactcagggcagagaaaacttgtatctcagagttagaaaaacacaacagcaatagaatatgaatgaatatgatgacttggagaaaatttaagaccatggcaaatgcatttgtgttagataaaagcttcataaattaataaatttcactgtatttattatagcactagccaaaagaaataataaatgcagtaaatgccttgttaaaaatatcatgttattggctaaattattagtgagcagtgaccttaattaacaaggtaataagcttgctgacttgctgatgatgcagttttttagaagtcatctgtgccaggtaagtcttcctagcaggataagaaaatatattactatgtagaaggatagaaaaaagtatttggctttgacaactgatgggggttcagaatggtgtgtgttccatctcctaggccaccttggagcctacctacctcccacccccatttgagaagacagtataaaaagatctgccctcattggctacgatcatatatgttatgtttctgagggagaattgatcttgggattctctgctgcttattctcttctgcttcttcttcacttcaggctgtagctctcagccacccagaagattgctgattgtccacatttctccataagacaacagtgttaacaacagtgtggccacagcattttggagttgaatttcctcaagcagcggcaagtcagagactttatttagccttacataattactgaaagcctcaatggtccatcgagtgttctcctgattttcattttcctgagtttgtgttaggaaaaagaggtcagggaaggtcaattccatccacactgctgatcccacattgaacattgatctgaacaggtgaggccagaagatttagacctgatgtaaatgtgaataaagaggcaactgatatggtctttggcattagtaataaaaagcaaataaaaagcaaatgagagcccttttacttatatttttgatacagtagtggtgtggggaaagtaatacataaattcacatctgaatctaaaaaagtcctacttctgagagtcttctttgctgacaagcaattattaatattaattcagaaaagaatctcctctgctcccccaaaaatttaattgagaggtatgttctaacaagtctgatgtaggctcagattcaaatcagttcatcaatccatgagtcaatacttatcagagactccaacaaaataaaatatcgactcagatgagatccccttcagagaataatttgatgttctcaatttctcctggctcaataatttaggaaaacgtgaggtgtgactataaagtaatgatactgattgcacttgtcacacgtgaaaatcagccttgtcatttatatcattctagtcacatataatttaggaccttgtcacatataaattaggacactttgagggaaaaaaaagaaaattttgttacagttatatctcaagatatcactgaggttaattgaacttgccattcctttaagttagtagattgggtttgattttagttttagaattttatgggtataagtgcttgaaatctatcaagactctcccatgggcaaggtggtgtgatgtggcacggccatgtacatgcacctgtgtgtgtgtgtgtgtgtgtgtgtattggtttgataaaagtggggctatacgaagatacaaaaaagacagaaaaaaactcctaaaagatcttacaatctaactgaacatgcaataataactaatggtcccaccattcccaacttgaccttgggcactttctttagcttctctctgcctgtttcttcatccataaaattaagatagtaatagcagcaacctcatatgcttagtgtgagaattaaaatggaactgtatgtgtaaagtgctaatgaacagtcaatgttgaatctactatgatgatggtggcactacaataccattgcagagggaagtcttttgaaacaattgtgatccatgaaagtgatctgagttggcttatgttagtgaaggagagaagcccagaaaaaaaaaaaaaagtctcttaactccaccacatctgcctaattattg

SEQ ID NO: 39091 - DNA, 1730 bp, Bovine  19866880357394
  misc_feature (1)..(1): n is a, c, g, or t
naagaactaaagagcctcttgatgaaagtgaaagaggagagtgaaaaagttggcttaaagctcaacattcagaaaactaagatcatggcatccggtcccatcacttcatggcaaatagatggggaaacgggaaacagtggctgactttattttttggagctccaaaatcactgcagatggtgattgaatccataaaattaagacacttactacttggaaggaaagttatgatcaacctagatagcatattaaaaagcagagacattactttgtcaacaaaggtccatctagtcaaggctatggtttttccagtagtcacgtatggatgtgagagttggataaagaaagctgagcaccaaagaattgatgcttttgaactgtggtgttggagaagactcttgagagtcccttagactgcaaggagatccaaccagcccatcctaaaggagatcagtcctggatgttcattggaaggactgacgttgaagctgaaacttcaatactttggccacctgatgcgaagagctgactcatttgaaaagaccctgatgccgggaaagattgagggcaggaggagaaggggacaacagaggatgagatggttggatggcatcactgactcaatggacatgggtttgggtggactctgggagttggtgatggacagggaggcctgacgtgctgcgactcatgggatcgcagagagtcggacatgactgagtgactgaactgaactgaaacaattgttataaaaaataaaataaaaactatcatgtcccagatattaggtgaaaacaaaaaaattaataataaaattttagttttatttggatgtgcatgaagttaaacatgtgtataagaaaggccttgttaccaagcagcctcttatgaccctttaaaaaatatctggtagggataatcgtacatggactgaaagcttaggcaggaaatttcaacttatgataaaacaactatttccagagtattatgaacttcataatatgtaaaaaattacaaataacataatttatgtcattatttgtatttattgccatgaataccatatgaagatacagagaactagttgtacattcaggatgtcactatcaaaacccagttcagaaaaatggatgagaatattagctggatatattttttaataatttcacgctttaaggtcaaatgaataaagctagtcttaatacatttttttagcaacttaggggaaatattctgtgagaatagatgcttttattttatgaaaatttatgaaaattttatgaaaattgcttcatgttacatttttgcatttgttgctctcttaagggccagtttcgatataagtcattggtacagaagtagtgcccctgttgggattcctttaaatgggtccagttggtactctcagtcagtaaacgatatgatcacaactttcaaaaagaaagtttttattatctttgttttctttcttgttataagccattaacccttttagttaactcaaaatctgaatttctacaaacttcatttttttaacccttcaaggtatcatcaaaaatgggatataaacagagaatattcctgatgtcagacagtgacttggttaccaagcttctgtaaaggggtaacatttaccatcacattttaaccagcaaatatgctcaataacagaacatccaaatccattaaagtgacttttcatcccaggagattcaggcctctttcagtaa

SEQ ID NO: 39092 - DNA, 1588 bp, Bovine  19866880359908
  misc_feature (1)..(1): n is a, c, g, or t
ntgattagaacttacttttgacttattcatggattaatgttgcttgctgaagaaaataaagcagagtcctaaccatccaagatgcttgaggtgcaatacttgcagctttcaacattgtactggttacacaagtagaccatgatacaaaatcattcaatctttccaccttgctgccagacttgtcctgcatgcacagatacacataccttccagccccctccatcctgccacttgctgatgctatttgccaggaagtgaagatgtctgtgagctctgaaaattggatcacagggacagctccacagtggccccagtcatgctgacggcaagactgatcaatcaataccctgtgtgacactttcagaattcattggaaatgatgcccttttcaaatgacacctacattttatcagggcagctctagtgggggaaaaaacaccacatcaatatatttggttccagtaaactttgttggttaggaccaataagtctgtattcaacctccctgctcctattccagagattttgaacaaaggggagatacaatgttaaggcaacattgcaagctgatattttttctgagctcctaaatctcatgtatagcatggaagatggccatattttcttccaatgcaatagatctttaaaattatagacttgttgtggacttccatcacaccaggctcataatgagaacatggaaattatctttcagaatgaaagtttcagaatgaaaatcgccaggctgtcgttctaaatactactttgagagggtttgccctttacctcttccttaagatgctggagtggggacagggaggaatggggagcaaaaaggcagtagtttgctttctttatagtaagtgttcagctaactagaaggttagcagtgctgcctaaccataccagatgggaagctctgatttacctgctgagttctaatgaggtgacagattgtgttcgtgcacatcctaacatcaagcagcccattcaggccctcaggaggagaagtttcaaagggccttgaagggctaagaatgagggaagtgactcttgtgacattggaggacttggaaggaaagggtaagagaagataacatatagacataaaattcccagctgccaccatttgaataaacctccagatagtaggagttaatagcagttattctcaacttgagcatgctccaagatgatttggagggcttcttcaaacataagttgccagggcccctctacagagtttttgatttagtagatttggggtggggcctctgccttcacattttaacaagcttccatgtgccactgctgctgctgcttctctgaggaccacatttcaaggactattggtttagagcacctttaagttacccataaaccaaacaaacccagctgtgaaaataacacttgaactttttttattttattgtgtttatcagggtacatattataaagcatctctttaatggaaccaatttctcaaaatgttgtgggggggtttgtttggtttgcttttattttagtttcttgttttgttctttctactcaattctaggaaagaacaaaggtggactggaattttctt

SEQ ID NO: 39093 - DNA, 2686 bp, Bovine  19866880416817
  misc_feature (1)..(1): n is a, c, g, or t
ntgtagtatttttttttttataataaagtttgtttatgattgtctgactctaggagttcaactgctatatagcaaaagtgatgttgcaaaattgtattaatgaatttgaaaaggtgttcatatcattaagtttaaaaaaacaggtgatgtaatgatgtgtttggttatgatcccatttaaaaaatatataacaaaaatatactataatataaatatataaccttaaaattcttcttatgtatgaagtatatgtcatgtataagacatattatgtacacaatatatgttatactccatatatcatgcatataccagattattcagggtcctttagttcctaatagaaacttggttatttccctgagagcagcatggagccattgtaagattttaaagcagtgtaacaataagatctgcttgtaatgattgctgtgtagaatatttcagagttgagcaagagaagcagctatagcacagtgaccaaaaacttgaactccagagcaagacagtctatagttaaatccaagcaacaccacttaaaagctgtgtaacctcagacaaggtatttaatctctctggactccagactgactcttctataaaatggtgatgacagtagtacttacctcccaggaaagttatgaggattaaataatgcaatataaagtattcagaggaggacctaacacagtctgaactctgtatgttattataattcccttttgaaaaataaggaggcttactgaggttagttagtaaggttagcaactaactaaccttgagggttagcaactcaaagttagttgcttgaggccatccatacaactacagtcttgtagctgtggtatagcttcagttgacgatggactggaatgaccacacattccctatcttatagtatggagcaacatattaccaatcaagatccccaaaagacaacaactctactgaagatacaataataaatcatgatgatacttgtatatacgtacttgattccaagtacagtaaaacatgagtgaagttctattagttttttgggacaactgcacattttctatatttttcatcaagataaaaactaagtacaaactgagtcttataccctagagggttttacctcatctgtctgattagctcctttcagtgcaatgcttctgctcccaaagtgggaggaaggtgaatggatttaaaatgtgggacaggaacatagcgatgtataccgttttctaggatccaaacctacatctgcccaactacaaagtttatgcttagtccattgatttacaggctttcacttctattaaaatatattgctgtggttgatttagggctcttgaaagaacattaatgagaagttcaaatctccttggtactacagagtgacattgccagaaatgctgtattaacagacctggctgttgacaaacttgtcaagtggaagaagttggtatggccttactctttgggatatttcagccagttaatttatcctggtcctcccttcaacttgtcatctccctgagagcacacttgtttctagctttcctcatgtgaaatcccatttcatcagagagggccttgtgatccagtttatcttagtaaccagtgctgggaggcaaatgaggctgatgaagtgaagtgaagtgaagtgaaagtcgctcacttgtgtccgactctttgtgaccccatagactatacagtccatggaattctccaggccagaatactgcagtgggtagcctttcccttctccaggagatcttcccaacccaggaatcaaacccaggtctcctgcattgcaggcaaattctttgccagctgaaccaccagagaactccatctttgggggcctttaatttctaatttaggggtttttttttttttttcatttataataatccctttcatttgcaggtaatttaaaaactgataaagtcttcccacatcctcatgattgcttttattctttacaacattgttaggaaattttttcctctaattcagagattaaaaataatatctatggctccaacggacatgaatttgagtaaactctgggagatggtgaaggacggggaagctgggcatgctgcatttcatggggtcacaaagagccggacctgacttagcgactgaacaacaggctccaaacatttattagtagctcaagtggcagagtttgaattcaataagccatgccttcagctcccctgcaacctgcccgtggtgctgtgtgccttctccaaacacaccctccccttcccagctcccgaaatttctgcatgtgctcgcctctgcttgccaagacccagcgtgaacaccagctttcttcaatcctgacagtgaattaatcctactctctgccatgtcctgagttttgcaaactgcagtggaaagaacacagaagggatcggaattcccacctctgccagttgttagttgggtgactttgggcaagtttcttaacctctctgaacctctttcctcatctctaaagtatactattgagagatcattttcagaaaaggcaaaaccatgaattcatacaggcatgaaaaagaacactcggtaaagattttattttactcatcacgagggaaccaggaaaatgttacggctggttcaaaagagaatctgagaaacagacacctttatggatcaagaatattgaaatgaatcaaat

SEQ ID NO: 39094 - DNA, 1155 bp, Bovine  19866880420245
  misc_feature (1)..(1): n is a, c, g, or t
ntggctttcatcattaaaaaattcaaccaactagaatacaacatcctttgacctagtagataaaaggtcagaaagcaattttgaataataaatgagacctgttgacctcatgacccagatctggcagggtcagtgtttcccctttcaccagatgctgatggcagacagacacacacagacagctcagctaatgagctgcctcagcgcaggctgtaggtgctacagtattttcatgttatgtagcatgagagggagaaaaggtttctaaagctgctgtgttatggaaagagatatttatagaaatatttctattgtctttcttggtttttatggcttctatgtaggtgtaaaatttagtagaaacctaagcaatggctaatttttttctcctaattctgattttatttgttattttagtactaggaaaaaaaagttgcttttgctctatttatttgtattacagtaaggtgatttcaaaagaagtttctgaatataggagtgagcctactcatctctaaagatgtgacttttgtccttcattttactgcaaagagtcctcatttttggataaaggattgagatgtgcacagtattaagctatatagatattattgatatagtaattagttaaaatgtttaagcttactcgaatggacatagtgatctaatctagaaattttaaagtttcaacacaaataaaaacagaaaatatggctttaaactaaactatctgtcctatgactttaatgtttaaattgtttcagcactgcttttgggaaaaatcagttcttatagtcagcttggtaaatgcttgcattattctagtaaatatcctttaatatgtccttgttttgacctctttaagaacattcatagtgcatttaatttgtgttcacttcatattcttttaaacaaaaaaatgtcaggggtctggtcaggttccagtttagctaattacatttttcttactagctcccctttcagctttcaactgaaaatgatattcttcttcactcttcatattaaactcttgccaatttgtgaattgcagaagggccacttagtaaaataacattatctcccctcacagtaacacaacaccggtgagtaggaagtgtttaagccatttttgttatttactataaattagggaga

SEQ ID NO: 39095 - DNA, 4082 bp, Bovine  19866880537979
  misc_feature (1)..(1): n is a, c, g, or t
ntgaagtgtggtgttggagaagactcttgagagttctttggactgcaaggaggtccaaccagtccattctaaaagagatcagtcctgggtgttctttggaaggactgatgctgaagctgaaactccagtactttggccacctcatgcaaagaattgactcattgaccctgatgctgtgagggattgggggcaggaggagaaggggacgacagaggatgagatggctggatggcatcactgactcgatgcacatgggtttgggtggactctgggagttggtgatggacagggaggctggcgtgctgcagttcatggggtcgcaaagagttggacacgactgagtgactgaacaagttaccctttgtcctgtaggggcaagattcaagggaaaagtaagagaagatgctctttccttctggtcctatgattagccatagaaaattttaaggaaagctctcatgtggaaaatctcacagtcatactaatcaatatcttattcatgtaactaaattttcacaatatcctcacagtgaatttccaaaacataaagctgacccaattttcttcttgtttgctcagtgattctccttgtttcttccacccctaccaatttgatttccattcccaccccatatttctaaccatgaatgtctcaaaatgagcaactattagcattttgagtggaataatatctttgttgtgaaggggctgttattacacaatggaacgcttacagcaccctggcccctgcccactagatgccaatagcatctcccttcctattgctctaacccaggcagaagacttgctcctaagaagagcatgaaataattattcccactgaagatgaagtatagactgatccccacaaagagcaccctgtattataacataactgcagtggcagttactagctatgcccttgccctatgacactgcaacctgataggcagccaccaccaggcattttcattcatgtttaaacttaggtacctaccatactgcctaagttacaatagacacccagtaaatgcacggtgagtaaattccagaaacatatgtcaaaagatacagatgctaggattccaaatctcttaaacttatagcaaccaacatattataaaaactactacttcagccaggaaaccctacacttcaacattaataagagtagcaagaatagtgtaagtcatttaggattgtgagtttaagttgtaagagataataaatgcaagggccaatttcaaagtccagctgctgtaataatgcccagtccttctttcaggaatgttcataaacattgagctgagctggtctgcttgcagttcttggcagtcctatagtgtaactgctcagtgatgggagatgttaattaattacactataaaatagaattacaattaattgttaatttaggttttaaagtgacaaactttaaaggctaaaaatagtctttgatctttaaaaggcttcttaatgagggcagtatactttaagtacatcattagtttaagtgtgcaaattgggtctagaggctactagagctaagcaaatatctattccaatatgttaaatgtttatgagttgggacagggacaattaattgctaatcaatgggccaaatcctaggtgaggtcaggttctgaaataggacgacaacaatagtaaattggatttagagctttccaatgtgacctgtaaaaacaccagcaagcagagactaaaagaatagcaaaaaggccaaactgacagaaacacccagataattaagatattactcatttagttaatagtaattttcaagggtgccgtttgtttggattaatgagccataatttgtagaattatacttacatgtctgtagttcagttacttaaacatataattcaggatataaaatagtaaaactcagcatagcttaaaggatgataacacttaactggtagctaggattagcaatattcataatataatttccaatatgatctcgacccaccatataatacttcatttttccaaattcagaagtaaaacccatgtattactttggtaagtacctttttaacaatcatgcaaaacttccactgtcattgctggtataagcagcaagctatgtttatcttataaatctatctgcctcaatattaattggtttcactaacctttagttcagatgagagattccagagacagagttgaccctcttgacttcccgtgacaatcatttgctggtcatcggtgatcatgatggcagtgatgctgtgtggaggggccttctttccccagagtgccacagcctgcagggaggacctcatggtgaaggaatcctggacacacagaaatggtaaaaagtgtgcacaattatcattcattaattttggaaaatgtgttgttgtgttgtttcactcagtcatgtctgactcacttgcaaccccatgggctgtagtccatgaagttcctttatccatgggatttctgtggcaagaatactggaatgggttaacatttccttctccagaagacttcccaactcagggatcaagcccgtgtcaccttcattgcacctgtgtctcctgcattataggtggattcttttacagctgaaccattggggaagtcatctcacaaatgtgtttgataacatagacttgaacaatgcgttctctcagagctatgaagaagggtgctttcccatcaaatagagaagaatgtaatcagacattgaaattagcctatccaccccagctctgactgtgggtgacctggactgctccagagcccctctaggcctctcaagaagaatagagttgtctagacattggaatttgaagacaactttgcagaccctctctccccagaaatgtcacctcatctaagtaacaaatatctaaacttcactattaaaaagcaaatattttctgtaagaacaccatatcctattcttcaaagcttcttgtatggctgttaaaattgctgtaatattcatgttccacctacacaacttttaatagtaatttttacttgaacggtttctgtatttgatattttcctaaatgacaattttaatgaaatcactatctccatgtgttagttacagggttaaagtacaattataaaaaaatacctttcaaacacaactttccaaacctatggaacacagcaaaagcagttctaagagataagtttatagcaagacaagtctacttcaggaaataagaaaaatctcaatctaatcttacacctcaaggaactaggaaaagaacaaataatccaaagttagttaaggaaagaaatcatacagatcagagcagaaataaatgaaacagagacttaaaaaccatagaaaagatcagtcaaattaagagctagttctttgaaaaggcaaaattgataaacatatagtcagactcatcaagaaaagagagggcccagataaatataatcagaaatgaaaagggagatgttaccctgaagaaatacagaggatcctaagagaccactgcaaacagttatatgacaataaaaaggacaacctagaaggataggataaattcctagaaatgaataatctccccagactgaatctgaaagaaaaagacaaaaggaacagattaataaccagtaatgaatttgaattagtaataaaatatcttccaacaaacaaaagtagaggaccaaatggcttcacagatgaagaggaagggagttagaggctaagaaagtaagaagataataatttccaaggaaaatagggaatcagagcaaagaaaaagaaaacccccaacctcccacaacactctgctatgagagctgcaaaacctggcagtcttagggaacttagtgtaaaattaagtcggcccccaatctccatcactcctgatggctccaaggtattccagcccagaacaatcactgcttattatgggtaaataaaagatgatgagatgtcaaacgcactctgcttaagaagtcagaagcagaaagtagtagcagttttaccaagttctaaggatacagttaaatagtaagtttcatttatcaggaaaattcaattttggggaatatctcatttccagagatac

SEQ ID NO: 39096 - DNA, 643 bp, Bovine  19866880551482
  misc_feature (1)..(1): n is a, c, g, or t
natttgatgacattattttatcatctggaaatcctgcagatgttgtgaccttctgctttacccctacaaaagcagaaaacaagtcaggtcctccactgctccagaacttctaggacattttattgatttttaaaaatatgtgtgtaacaggttatattatccattaatttcatttcaggctagtaaaggatggacagggaggcctggcatgctgcaattcatggggtcgcaaagagtcagacacgactgagcgactgaactgaactgaaaggatggtgctacaaaatatttgtcatacaacggagatttggaccttgtaggtttgagaaccacaggcttcacaaacaaataattatactaatatctaatcaattacattgtgataaatattatacagaaaatcacagagtaacctgagcttacagtctagctagggattcatgacatgaaccctgaagtaacaatctcagtaagtaccccagtcagctacttgccgtgtgactagcatcatatcaaagagtttgtcacttgtataaaaagtgttggtgatgaaagaatgtggcatcaattttggagtactacgtaggcatctggctgtagcatttaaagtcaagatgagtacggcactgttgtgtgtgcaaga

SEQ ID NO: 39097 - DNA, 1321 bp, Bovine  19866880574917
  misc_feature (1)..(1): n is a, c, g, or t
natttataaataactcaggactctctgggcttccatcgagaggagtgagtttgtcccccagaaaagcactggaaggactgatcaggaataaaagaggtgttctaagggcacaccttatctctgcaactgttgcctccacatttcatcccctccctagtcctccatctctgcactctcccatgcctttttcttttttcaggcttgatcactttgtaaagtctctctcttttcttccctctcatgcctgcttctttaattctctaataaaaaatttatgcagtctgagctgagcgtgctcactggttgtagccaggttgtttttgtaagggggtagctacaacagtatctctctatagtgtttctattgtttaatgagagtaattcaccagatcagcaaacatatcatctggaaacctcttgccttatgacagaacagatcagttcacactgaacggtttactggaatgtattgctagatggcctagcttggctgcagagaaagcctcttctgttcccactggtgctgaccagttcatctcagtggcttgcttttagacaccagcatgtatcctgaaaatagaataaaaattggagttggtctatgctgtgttgacttgtagcgaaccgtgactctgtgagtggacagtttgctttagggaaataatttgcccaagcagaatttggacattggacattttttttttggttgaatcaaagacagtgctacataatgacaaagccacaataaacttttttggctgtagttcctataagtaagatcaaattaatgccactattcatttgttttttgacgggtcattcttgttaaattatggttaaaaaccaagctgtttaattcctgcaatcccaaatttccatggaaatggatgaaagaatctgaaaatggcaatatatgtcagtaccggcatcagaagtaagggaaaggatggaaactttagggagtttcttcaaaccaggctgggattactagattcagggaaaagagaattaacctgtgactggcctgggaaacaactggaaggaaccttccagtaggtgccactataacatgtatctcagagtcctaggggaaggcgggccttgaagcagttattaggggtcttgatcataaaaacaccttggggaaaggtatgatgtgctggggtccaaacaaagtgaagtactgtggactgaactatgtgattcagttctaactggctctgctggagtggaaagggagcagtggcaatgcttgagggtgccaatgagggcagacataccagtggagagttgggatcctatattaccaaccttctaactg

SEQ ID NO: 39098 - DNA, 1677 bp, Bovine  19866880636741
  misc_feature (1)..(1): n is a, c, g, or t
natttaagtagatgtttctctgtttagaagacttactgctgctgctgctgctgctaagtcacttcagtcgtatccgactctgtgggacccccatagagggcagccctccaggctcccctgtccctgggattctccaggcaagaacactggagtgggttgccatttccttctccaatgcataaaagtgaaaagtgaaagtgaagtcgctctgtcgtgtccgactcttagcaaccccatggactgcagcctaccaggctgctccgcccatgggattttcaaggcaagagtactggagtggggtgccattgccttctccaatgaagacatatggatgatcaaaaggtacaagattctgcacattgctaattattagaaatgaaaatcaaaactgcaatgaggtttcacctcacactagccagaatggccatcatcaaaaagtctacaaataataaattctgcagaggatgtggaggaaagggaactctcctacactgcctgtgggaatgtaaattggtgcagtcactatggagaacagaatgacggttccttagataactaaaaatagagttactatatgatccatcaatccctctcttttatacagaaaagatgaaagccctaatctgagaagatacatgcaccccaatgtttacaatagctaagacttggaagcaacctaagtgtccaatggcagatgaataggtatacaattcaatgaaaagaatgaaataatgccatttgcagtgacatggacctagagattatcatactaagtgaagtaaatcagacagagaaagacaaataccatatatcacttgtatttggaatctaaagcagtgatacaaattaacttatttacaaaacagaaacagactcaggcatagaaagcaaacttagttaccaaaggagaagagagtggaagggataaactaggaatttgggattaaaagatagacactaccatatagataagcaccgatgtcttactgtatagcacagggaactgtattaaatatcttgtaataactgataatggaaaagaatctgaaaaagaatatatatagatgtataactgaatcactttgctgtacaccagaaaataacacagcatttgtaaatcaactgaactttaatttttaaaagtggttcaagttcagagacatttctactaatattgggttttaattaatttccacaaattcttttataaataaagggcacagtttatttataaagggtgcagtttagttataaataaaaggcacagtatgatcaagaatcagccttcccatggaagcagaaaaggaagaaatagaagagtttaccttctggggccatgactgtatacatgaaactaaagtggaagccagatgatttcaggagaggctcaatagaagagtaaagcgtgtttccttttgccctctccgcaagaataacagtactgtggaatgttacatggagggaagggttgccacttagtactcctgagattgttgtgtgtctttagtagatgaagtgatcccaggatactccacagagcacttcaggattcttacagataaaaggtgctatatacgtgtcaaatattattatacagcacttacaaaaaatgtttccacttattggtgtagactcactgttgagcagcttagaaatgatagctattgtttataatag

SEQ ID NO: 39099 - DNA, 1443 bp, Bovine  19866880648702
  misc_feature (1)..(1): n is a, c, g, or t
natgcttactccttggaaggaaagttatgaccaacctagatagcatattcaaaagcagagacattactttgccaacaaaggtccatttggtcaaggctatggtttttcctgtggtcatgtatggatgtgagagttggactgtgaagaaggctgagtgccgaagaattgatgcttttgaactgtggtgttggagaagactcttgagagtcccttggactgcaaggagattcaaccagtccattctgaaggagatcagccctgggatttctttggaaggaatgatgctaaagctgaaactccactactttggccacctcatgtgaagagttgactcattggaaaagactctgatgctgggagggattgggggcaagaggagaaggggacgacagaggatgagatggctggatggcatcactgactcgatggatgtgagtctaagtgaactccaggagttggtgatggacagggaggcctggcgtgctgtgattcatggggtcgcaaagagtcggacacgactgagcgactgatctgatctgatactgccatgctttgggttgcccatttgtttacttcgttttcacacaataaccagaggagttagaacaatgtgctcattcttttaaaaattccctttaagtagttactatggtagttgttgaagcactagagattgaaatgagtgagtaattatgttgttgaaagtgttcaaaatggccagggaagtatgatgactacttgaattagctaagaaaacatgccaaatcactgccaaaagatctgtcacaaaaatccattctctgcagttgagaagttaccagcactatgaaaaaccaaaatgaccctttgtaactttgactagataatctgtgattccatcatttgcaagtaaaactgagtgtacacgtgaatcccaaaattttcagaatgaggagacatgaagaactcagtgattcattggccattacaacattcaaaatattccatttccaagggggctgatatttcctcactgaaattgatttatctagttccttttctcttccttataaacctcaaagcttatttcaaattaataaagtaatattaataataataaagatgctaacatttattgtacaagatactttgctaagtgctttgtatttatcaattcatttaattctcatcaaaatcttatcagttagctactattattctccccattttaaagatgaggactgagattaagtaatttgcccaaaagcatgaagctagtaagctatatagccagggttcatttacttactcatcatcaaccaggcacaggggcaggccctcttgaagagccaaaatgaacaaggaagacacaactctatccttgtgaagtttacaaattaaacccaaccccagttcagacttcaaagtccaagctattaatcaccacaccaacccatcagcaag

SEQ ID NO: 39100 - DNA, 2109 bp, Bovine  19866880664320
  misc_feature (1)..(1): n is a, c, g, or t
ncctggaaaatcccagggatgggggagcctggtaggctgcagtccatggcgtctcgaagagttggacacgactgaacgacttcactttcacttttcactttcatgcattggagaaggaaatcgcaacccactccagtgttcttgcctggagaatcccagggatgggggagcctggtgggctgcagtctatggggtcgcacagagtcggacacgactgaagcgacttagcagcagcagcagcaagtcaactattaaaattatgaattgatgactatcaccctgcatttagaagaattaatgcatgcccttgtactttactctgttaagagaagtatggtggggatttctaggtaatatgtcagactgacacttgccatcagttcagattgactgctaaaaaagggaaacagcctttggataagctggcattttcagcacaactattcttgaaacatagaaccacttgtatataatttttgaagcaaagttcatctgaagcttataggatgtcaatatttagacttgtgtgtctagatatctaatggcagaagtcttaattttgttctgttgtgggttgagaaagaccttatagagtcatggaagatcagagacctagggctttattttgacctataatgggaaagttttttacattatatctaaacttagtcaattaataatgactgccaggagcagtatcaaatgaaggattccaaggcctcagctaggatcagcaggaaaaagtcacggttgattagcaatgtctgttacaagttttgcatagatgagggtggtgtatgtgctatatagagtctcctgatctagttcaacccttttgttttacagttaataaaacgaagaggaaaactgaatcagtcacacgcatgatctgtgaataaatcaagactcaaacttaggttatccaattaaattcccttctttccccatctccttcttaaataagtcacagaacatttttgtttgcttatagttatctgtgctttacattttggtgcataagagaagattcagcatctcagggtaatcctttccttcaggatatttccctccagcttaaaacacatcttttctaggctactcaatcagaaatacagcataatgggagcctttgctgaatatgaagcagattcctagaaaacaagtgggcattgatttatttttattgatgtgcttttactaactgacaggaagtgttctttgaacacctctctcccaaccattccactccaataacccactgagtttgatcatttccaacacatggtccatcctgctgtctggagagctgagagttttaccagccacagtgctaagtgcgccaacaggcacctaagtctagcccattagaagctgtgttttcctgatgcaggacttgcatactgaccccaagataacccactcattgtgggacgtgcgaatgggaaatggattgagatatggatacattggctgactcttggcctttggaaaaaaaaaaggtttagctagaaacaaacttgcagatgaactattcacataacccctgtataaacgcagttttggggaataagatacaaaataagtgggaaaaaaatatcagctattttttatttttttcccttagagtacagatgttatctacttacaaatcattgaacaccaggcattgcctataatctccacattctatgtcactttctctgcaaaaatcagtagcatagaggcttacaatatttggaagactgagctgggaagcatggggagtattgctgttaggagaagagtgaaatgacctctgggctagaaacagcccattcagtccttttattcccattttccatttaaacactggacaaatgtagtattaacaaattctaataattctgaaaaaagtatcttttttaaaaataatgttcctgcccaccagacagagtttctcagagtttatttctgcttagtttgctttgtattttactgatataatatccaaatcactatcaattagaaaagaagggaaaacatatttcacccataacgtcaccatccagcaaactaaagtacttttttggtacattctcctgagcatgtatgtctgcatagctatacctt

SEQ ID NO: 39101 - DNA, 1692 bp, Bovine  19866880719940
  misc_feature (1)..(1): n is a, c, g, or t
nacaaaggatttaaataatggatggtctttgctctttctcagtaggcaacagaatcaagtgaaaatagcacacacttagaaacaaagcaaatctggtcacttttaacccaactccaccatgtactagttctgggacattgagtaaattatttaacctttctgagtcttagatttctcaaatatgtaattatacctaatatgtacctaaaagtgttttaagaataaaattaaataatataaatagctatcacaatcatattgtctgacatgtaagagctagtcaataaatttccttccttcccttcagtttcttgattgtaaagtaactagataataaaaatattttgcctcaaaggaacttttgagaaaatattcttgagatatctaaaatatagtaaatattcaacaatgataaaaatgataatgctagcagctatcagtggcagcccactccagtactcttgcctggaaaatcccatggacagaagagcctggtagactgcagtccatggggtcgctaagagtcggacacaactgagtgacttcactttcacttttcactttcacgcattggagaaggaaatggcaacccactccagtgttcttgcctggagaatcccagggacaggggagcctggtgggctgccgtctatggggtcgcacagagttggacacgactgaagcaacttagcagcagcagcagcagcagctatgtttacttcatcatcaccaccacaaccactacccttgtctaagtgtgcctaggatggtagagatacctcattccataatcctgcactcaaatatgacttcccctcctagacatggggacagaatgttgaaatgtgaaacattctggggctgaaggcatatactcagcacacatcactcctctctactcccatgactagaacagactttgctagttgatcatggtattcagatgtggtctcctcattcctgacacactacgcagacccaccaacagattacaatcggcccaggagatgaaatatatctacccactgtgaccaccatgccactggaggaaatgggcttaaagcacaagaagtttttgggctgctatcccttaaaggtacagctgaatggattcctgattaactagtaggacttcagctcagggtccaaggttttgagagcaaattcaagttcactcaaaatgtgtgagaaacacagtaaggtatcctgaattgagccccaggacattaatggaaaaactggtgaaatctgaataccatctacagtttacttaagaacaatgttccttagttttgacaaatctgaagttatcaaaaaatttaaattttacttaaaaattagtatgattgacacaggaatagccaggacctgaaacccagccagctgcttcaccaggaagatagagtgaccaaagcttcaatccttagagctaatctggaataaccagatcatgtagccatgatgaccataagtgcctcacttccagggtcttcccaatttccaacattctgatatgatatggcctaacattgataggtaaaaacctttctgcataattttgttttctcttcatgtaactttcttttcaaaacaagcaatttatttgactgtcttttaagattctttttcttataaattcatacacctgataaaaaatattttttcagtcagtatgtctcaatttttcttttt

SEQ ID NO: 39102 - DNA, 1956 bp, Bovine  19866880721316
  misc_feature (1)..(1): n is a, c, g, or t
ncatctgtgatgtttgttgcccatctgcgaatccgccctggattgtccttctttctctttaactcttctgttatgctgctgctgctaagtcgcttcagttgtgtctgactctgtgcaaccccatgggctgtagctcgccaggctcctctgtccatggaatcctccaggcaagaatcctggagtgggttgccatgtcctcctctggaggattttcccaacccagggattgaatcctggtctcctgcattgcagtcaaattctttaccactgagccacgagggaagccctcttttgttgtgtatacccccaattatgagcttgcttggggcacaattacgcctaaggcaaagttggcaaaattatgcctttatggctcattttttgatgagccatgaaaaagtggcttccttacaaccattctgcattgttaattttgcgtcaccagaaaagctagataaaaagcaaaaagacccagtcaaatatgctgtctggcatagtgtagggggagaaaacctactctatttaatttactgaatttgttccttcaaagacaatccccggattcaggcaatccagtttgtgtagacccagcgagacagggatcaatatctggtttctgagagatgagactgtacgtactgcagattcaaaactaaaaatccatacagtcggctttgattcaaggcagccactgcagggctgtaggtcacaaaaaagaaggaacattctacctgcaccagtgtcctgattctttgttggaatgtaaaatggaggagaaggtgacttacttctgtattctcttgtaaatgggaaattgaggaaaagggatgttacccacaaaacaggttttattaatctcagcttgaacaggaagctagtttattcattcaaagtcttcctgaacacctgttctgtgtgtcacactgttaaaacaagatagtgaagatgacttctgatccagcagggagatgacacaggccataaggaacagctcattaataggcaaaaacagggagccagtcagatcctgagggtggggccatagaccccagtgggagacagaggtgaaggaagttctagtccgggggtgaaggtgaaggatcgctgtggtacggtggtttggagttggtccttaaaggatgatgacatcaggtagagagtaaaggttcgtcctaagaggagaggtctgtgaataaacgcttagaagggtggaagggtaggtcatataaatgggaactacttttccctttggaaaaagaaagtgttgggtccatggctgttttagtcacagttgatctggattcctgtccaggctgacaataggttctgtttctacgttctcccttgaaggatcaggcacatgcagccatgtgaaataatggtaataatggtttgtagttcaggcctctttgcttgccttttcagtcctttttactgactcaaaccccagaagcctacctgttagtatggaaagtgcatctgtctttttccttctgtaaagatactctgttctcctgccctttaggagagtttattccagaaaaggaatcatgagaatttggcagtgggagaagggaagggatccttgaagggaagagacttttccagcagctggggtatcagagaattagtagtaataagagtgtaatttgaaaacttactatatgcaggcaggagatgaatgatataatttagtcatctgatcaccctgtaggttagaactattatcctccctgttccaaggaggaaactgagatagagagggtgacaagtgttacctggaatcacagaactgaaaagggcagaactaggtaggctttgacaccaggtttgcttgatgccaaagccatgcacccaacacaaagctctactgttttgggagtgcctctccccctcctttttatttttctaccagtttcttaactttatatttttaaaataagatatgctcatttt

SEQ ID NO: 39103 - DNA, 1777 bp, Bovine  19866880768695
  misc_feature (1)..(1): n is a, c, g, or t
nattcgtgtttgtaatttgatgtgaggcactcagggtgataagtttagactaaaaaagaatcaattcatctagtaagtgaaatcaataactgtacaaattatttgctatatgtcacaactttattaattttaaatattcagatttttaaataacatcaaaatattataaagactatatagggttcttctttattttatctagttttactgtgttcattagctactttgatgaatgcatggtgactagtattatttttctgtgagtagtacatgctcatttacagcattcaagtgaggaaaaaaaaattaaagctaataattttcagtacttaaatttagcagacaaactattaaacatcattacccacatatatttctaaatagaacttcttaatacttcagtctcaaataaaatgtatttatggcataaaattatactttggatcatgcaactatgactgatttctgctgggtacttaccccaacctatgaatcaattctttaaaagattaaaataaatcatgactatgaactctatgcatacttacttgtaaaatttaagaggcagtatgttagccattaggccacagaccaaaaaacaagcattatttttctgagcttgttttcaaatttcattatgaagaaaaaaaatgagataatgtacaatacacaactgtgagttatttttatcactgaaagttataaattttcatatcatgtcacaaagctaaagtaaaatcaagcatagtttaatttataatattcctaagcaaatcattcaaaatgcatgccaaagtcttataatatattacattgttaccttctgttctcactgtgtgtaaatatgctttaaaacatagttgcaattgatagaatactagataacacattgccttatttctctctaatcaccaatattatagatgtacatatcaaaaataaaaaaattaaaatgacatacaacattcatatgagcataaaaataccatttctgcaagagctaatttagaagccccaaaataatgtgtcattttcttatactgtgttccaaattaagaaagcagcatgttaagtataaatcttaatttatgaactgcctttgggaatgaaataaattctgggtgactaagttactttaaaaataactttgaatttattattttaagaaatattgaagaaaactttcataccggctcaacaccctgtactttcagcctgataatgcaagtgtcatccaaaaaaaagtcaaaaaatagatttactttatcatataacatttatattaaatcatttcattttcacataattttcctactagtcttctgccaaaatatgagaaagaaataggatcttttctctaagtaatttttccccagcagactgccactgccagcataagtagattaataatagatgctcagtgactcttggagtcttactggttttaggcagcacaaagcctggggttaacaccaaggtccttggggtttttctgctcaaatgacttacaaaaatattttactagatctcccttccaagaaacaaaaaaatatattgtcttagatttatgaaaattcctgggaatgtatgtttgcaaatctgacttcaagctttttctcccaatattaaatcagtttagagaagcccttccatctcctgcatggttgtttttcacgttgcctggtgccagtccaaatagggaaaccaatagtcatccctcatttctacaaaattcattcactcagttttttgtgtatctagcaaattctgctaaaca

SEQ ID NO: 39104 - DNA, 1859 bp, Bovine  19866880781497
  misc_feature (1)..(1): n is a, c, g, or t
ntgtgtgtgtgtgtgtgtgtgtgtgtgtgtgtcagggtaagactgattatgctggacagaatcaaggaaaggaagagtttggcttctttagccattcaagactggctgtgtccagcagtggacaataggaatccagtcagccacttgcaggggccagggccatgagcactccatttccctttcctctccccctctctccacccacatttgactttgctgtgagggggacagagagctcacaggtcacctagtttggttcaattaatttcatacagcctttagccacagagagcaaatgtggagctcacagatggctctctgtcccctcactggtgcccattcttcttcactcccacccaacattgacattgacttgcacatgctaatattgtgccttgaggtcaatgtgccaaactaagtgaaacatttgccaaacttaaaggatgcatgccccagctcatgtaattactggggaactgttctctccctcttggaactggcattaacttaaattctccatctcaagaacaagaatgtttacaggatgctcccttcactgtcaagtaaacagctctcctatggctgcaaggtcttcctttagaaaatgctatcaactcagtcctgcaacagaaggcctgggatctgctcagggttttacctaaagtctccccttgtagtacgcacaaaaattatttacatccaaattcgaactagctagcatatatttggtccacctggttcacaataatttctacttagagaaaaggaagtagcagaatatctgggaaccagaagaaccccatgcatgcatgcatgcatgtagtggctgcagaggtgtgctgcctctgcaaaaaaaaaaaacaagttctctgcatcttcccaaataagagctcagaggttcctggggactggcggtatggtctcctgaagcacaaagagaggaaatctaacaagaagcagcaagccctagaaatcttttcacactcagaaagaaacttctgcttcatcagaactcagcacccaacaaacatgaacctcacctgagcttaaagggaagggaaatgttagcttcaatgttcaaatctacctcctttttactttctctgaggaccctaatggctaatcagaacatgctgattactcctagttctgtttctctgaatcactatttgttacagccgacccttcactagagagtcaagaaaatggatgagaagatcagaatgcacttttaatactgctagttaagtacttagcatgtgtactttagagcaaaatacattcttcagcacccatgtatttgcttagctcattatcattaacctggttttagatatggttagagacagaaacctgaactggaattttatggagataagtagctgccaaaatctgtgtgtgccaaatctgatagatagatacctaattttatctgtaataggctatattctcctgattgctctccagctaagactttcttgttctccaactctcttccacctgccggcaccatatgagtctgtgttttaaggactataggcccaacattctttttttattgagaagctgcagaactctaaccggtagttcaataaattgtattacatccccctcacactgaatgccctacacactttggctttccatgtgtaattgcaagctgttattagccctgagctgtgtccgttactggccacactcttgctgagcggtcaattttttcccctgccatttcctttgctcacaccatgctgaccacgttggccagaggcggcccgaggtttatagtgcagcattgatttttcttttctctcaatactgacagaatcatagatccaaggcaaataaagaaatgcatt

SEQ ID NO: 39105 - DNA, 1232 bp, Bovine  19866880827569
  misc_feature (1)..(1): n is a, c, g, or t
nttatatggttggtgatatttggtagtcctctcccttaatattcagtatagaaatttatttttattatatattcttcacagccattcgtgttttgtagtggttcattactttgagtaactatcctacaactcaaacagtccatatttttaaaatttagattgtttcctctttttatgctatttttacgtattcctgctatgaacctcttcaagcatacatagttttcattatttaaagttgtttctttagatcaaaaggatgttttcattctaaagactattgatataagctgttgaattattttttaaaatggttttaccaaccattttacataatacctacctccataatacctacctacataatatttatttaccatatttcaccagtcttaggaattattattaaagttttttttgctagttggaaggtaaaaaatggtaacttgttttgatttgcattttttatttatttttgtctttccttactttgattatcactggactattgagttcaattaaattaaaagaaagattaaatacaagtaattaaaattttgtaatgcacctatatgattaagtaagcaaatggaaacataggaaactagcttatattggtcatgggaggtctcttggacaattggtagctgtaaatgaaatggggagatttttggggggaggagaattaaaattgggctactggcatctgaaatcactcaatatacgttcagaatatttctagaattctcaggctggttaacaggcatttaaaggagcctcaccctccaatgtgtatatttgagcaattttgcttttgtaataaaaatttatttcaagcaaaacaaattattgttttttgagaaaatatatttgtgaataaatgtgacctgcttatccagtgtccagatcaataaaatattttacttataagatgccatagtcatctttgcatctaattactctcatgagataaatgattcctttcactggaagctccaaaggcagtgcagtactgtgggatctggaggtatgatttgtagatcccatctgagatggcttggaagtaattactgctaagcatagccatgtgctctgcttataagacacacctttgttccaatgatttcttttgttgcactttatgcttggtagatgtgtggtgtttataaggattttgtgctttctgtctctcccttgaataaatttgcttcataggcactttcttaacctta

SEQ ID NO: 39106 - DNA, 2634 bp, Bovine  19866880837569
  misc_feature (1)..(1): n is a, c, g, or t
ncattatgtgagttcgaggattggcaaatcactagttccaaagctcagttattcccatgatagtccgaacctaaaagttatagatcttcaaggctggccctggggccgccatcactgcaaacaaggtttccaggatgaatctcatggctcaaggactcagggtgaaaacctgaaagcttgtctattttcatcaactgcactatactctccttttttaagacatcaaagacacctctcttggcactagcttttgtttgtttgctaaacacttattttaggcaaattatttatctcttagatttttattaattcttggaaagtgttgttttgtaacattttttgatctctggagtggaaaaaaatgatcctgatcaaaaagctaaataaaattatactgtctaaggggtaggagatccaaccagtccatcctaaaggagatcagtcctgggtgttcattgggaggactgatgttgaagctgaaactccaatactttggccacctgatgcaaagagctgactcatttgaaaagaccctgatgctggggaagattgagggcaggaggagaaggggacgacataagatgagatggttggatggcatcaccacctcaatggacaggggtttgggtggactccaggagttggtgatggacagggaagcctgatatgctgcggttcatgcggtcgcgaagagtaggacacgactgagcaactgaactgaactgaatgggtagtatcataaacatttctgctttcctctttaccagattcagtaaacacatttttaggagataactggaatctttcttcctttagcagagctttactggccacgcagcatctgtgtcctacattcagggaacacgtggatgagcagaatccagcccgggccctcctgaggctcacaggccactgagcctaaggcaacatggagaggaccagaggtggttatcaacgcctgtgtggtcccagacagcatgaagggcgacctgtagtccaggccaggagagagccaagtggggaaggagggtaagccaacccttagtgaagagacatttttacccttcacgtagtgaatccttctgaggctgctttttaaaaatgaaaaaaaaaaaagggaagagtctcttaggattcaagtgatgagcaaattccatttcagaaatataaggaacaagcaggcttccttcttaaaatttagctattgttacaatggagtaaaaaaaaaaactgaggctctgtggtcctcaggattttggttggttggtcaatgcctgtatccccccctgcaccccatttaagcatcacacaaagcaaaccctccgtccccattcacagatacatgcaaacacacactcttcaaatcttctataattttttcaagtgaatcctttgtttgctctgctatatgttacagcatcagtcactgactccctggcagacattaagggtaagaaagcaattatactcttgaaaaagcacatttatggacactttacatgtccattcaaaccttttccccttgcaaggcttgcctttggctgcctctagatacagagggcattttaaagccattatgtatgtatgtgcatgagtgcgtgtgtacagttgtagcttcaaaaagcatttacacatttagagtctgttcttacctttgccttccattaaagcaaataaggatcatgatacttgattttatatgggacatcacttttgaaaaatggtttacgaaacacccaaataaaatgcttttggttttcatagtttgcagagaatacattctcctataaaacatgtttttttgtttttggtattttttttagaaaagacctcattgattttcagatgggcttgtggttatggtgtgcacaattgattttgattcaggaatacctctggagttctcttttagatggatcagtctgtgtgtcttactacagtacaataatgagatgattttaatctgaatatgatatttttctttactattgagcatattttatattttatttttgtcaactatttttaatcttaaatgaaagaaaggtgcatttctactactcttgattcccgggctgaatgttttattttgcacacctttttctcatcagaaattagagaaaaagtgcattttttttcttgcttctctgtgttttgaaactttcctattttttctgtatatctgcagtatctttgtagaggcctgatttgggcttggctttcatttcaaaaagcattccactttaaagtagctgttcctttatcctatcaacgaaagcatggaaaagtaatacgagtaatacacatagcttaaaatgtttactcaagaagaataagacgtaagaagagataaaagagacaaagaggaacttggagcagtacaatttaggataattgtatctctgtctaagggttgttgtgagaattaaattaatacacataaagcaattgtaagagtgccctaccctgtaagcactcaataatggttagttagtgttattattatctgaaaaaaataaaacatgtaacaaaatagcctttacatactgtgtttcagagtgaacaaatctggtctagggttaaaatacagaattttacgtttattttaaatgttccactcccttggtttttaag

SEQ ID NO: 39107 - DNA, 731 bp, Bovine  19866880841023
  misc_feature (1)..(1): n is a, c, g, or t
nttaaagcctttgtttgtgtcttatccactgcctcttacaatagattcagatagatttttgcacaccagtttatgtttgagtaatgcttgtggagttgaatttaaaaatgacctgtctggcaaagggttaagacttgggtttgacaagaaataagtgaatagggactttcaaggaaacagtttctgggaagtgatagagactgttctgaaattctgattttgttctggtttaaaagttttaaaaaccacatatatgtggttactgctttgaatcatctcactgcagtctttctgcttgaaaaaatattcacatctatttggaaatagcagcaattaaaaatactaatgaatttcaaatttctcttaaatcttagaagcagagaacataaaaaattttgacatgctatgagccgttaagtgaaaattatgtatattaataccaatgcctaattgtggaagaagggaatatactctgctggttaaagtaagatacagtgtaaacatcaagatggtatccaagggtaagttaaacccaagaagttcctctactttatggtggtttgacttgagataatgctatggtcagaggaaatggagatgaactttggaactccttcagcttcaccccttcaatacaacaaactgcagacaaagaaaacatttctcattctgtgaaagactaatcttaccactgttctgggtcctatcccctgcaccttagtgattatcct

SEQ ID NO: 39108 - DNA, 843 bp, Bovine  19866880845092
  misc_feature (1)..(1): n is a, c, g, or t
naagagagttagaaagagacagagaattcagaataatgtaatttgtcatccagggaagtgaatagatgagaagtcaccaattattggcttgctcagcagagggaaatgaaaaataattgttgaaaataacacaaaagctcccagaaacagaagggttctcatttgagagacagtagcctctgagaaagagtctggtattaaattgcttcactgaatatctttactaaaccctgtgtgctttataatttaaatctggcaaaggaaaattatgttatgtggatttcatgtgaccatccctttggtttatattcaacattatctaaatagttcatgagtgggtagtcgactcccagtaagcctcagtttctccatctataaaatggagacaaacaatagttcccatttaagaagtgctttgtagaaataagataatttttataaacaattcacatagccataattgcacagtattcaagaaatgtagccatttttgttaattatgactattgttgttatctaaatcaaaagacagtgaagcaaaagagcaaagtggttaaaagcatcactcaagcccatgactagcaggctgtgtggtctaaaaatgccacacatgtttcaagatgtattatgattatctttgttcaatcttattctcctatctctaaaatatcactttaagaaaaggtcagaaatctacatttgaaggacttagccacatggtctcctcccataggccctccatccctgtttctggccctctgaggggcctcagtttaagggaatctaagccctaagagttgcattaagagatagagttgcctaaataacctgtgactctgaaga

SEQ ID NO: 39109 - DNA, 2628 bp, Bovine  19866880880405
  misc_feature (1)..(1): n is a, c, g, or t
nttgtatatatacatgcatccattctttttaaattcttttcccaattaggttgttacagaataatgagcagagtttcctgtcctatacagtaggtccctgttggttatccattttttaaaaagtacaactgcattgtttttaattttgaaattttaaatacttgctaatcaaacatattttctcttagaaaacagagtctaggaagaatttttaaaaatctgcgtattcataagtgtttatggttccattgccccaccaggatacctttcaagctatgcaactttttatttatttctttttgatgggacaggcagtaacgaagggaataaaacccactagtagttcttgaaaccatatttattccaacattgtattttaatatttctttttatgctccccaaatatataatcaaatgtagaacagttgaagaatagagagaaacataaaaaatggaatcctatcccactccctaaagatagctgctcctaatattttgatctactttctatcagacatctttctatgtcaataaacagatgtctgtattgtatttcagtcatggccctggccagaaactgaattcaacccaggtgggtaaaatgaagagactgtaatgaaaggactctgtagagggatgtggatagggattagggaacagacaaggaatggacattgaggccgttacctggacactcgcagtatcaggaagctcttaccatctctagggctgaagtgaatgatgagaaaatagtagtactggaactcaattcaagctgaagccaaagaggcgtgattactccctggggtcatagagctgcctgggttttgctggtggcactggtggtaaagaactgccagacagtgcaggagatgtaagagatgcaggttcgatctttggattgggaagattccctgcagaaggggatgccaaccccctccagtgttcttccctggagaaacccatggacagaggagcctggcaggctacagtccatagggttgcaaagagtcagacatgactgaagtgacctagctcgcatgcatagcactcccaccagaaattcagtactgaaacaaagagagctggaggaaattctcttctctttccttttgcagtcacctgcattagtttaatccaactgaaagtcagacaggaagggcagttttagaaatcggccaagggcacagagcaagacacagaagggtatcggaaggatggagtgggttgacaaatgaacaataattgacatagtgcccattatggatatgccatactttaactcaggaatctcctacagttggttatttatatttttttttcctataaaaaagcttgttttaaaatggccatataaactgatatgtgcacatttagtgctcgattaacttataggatatttgttccaaatgaaattatgaggctatttatctcttgctaatctgcagtaatagtttatgaactaccataactcatcttaagcttgtaactcgtgaaaatttgtcacctataattatatcagtgcctttatatttgtgatgtgactttttactttttcaaagcctcctcgggttgataatcttatttgagccccacaacactctggagacagctgacagctgaattccttaccacactcattccttatgaataagtctatgctgttccttttagtgtgtgtctggtattggctttgttttgagctgcctttaacctcagcaattccaattttgttgagaatttaatgaactactttttctttctcacactgcatttcatctagctaatatacttccaatatgtttattctacttgatacttatattatccttttcctgtaaaggtaggaaaatccaggatcaggaagactttccatttacagtttcataaagttaggggagaaaagtaccagctaggaccaaaacaattaggctgaaaaatggtctatgagggtctagaatatgcttgttcactgacaggcctagcacatgaatgaatggatgaaccaacctaagtgttcttggacttcaatagattgagtacaaatgagttcatcttaccattggccagttgtggtggctcttagatcctggctgcccaactgtagatagatccttagctttctcctccaagtcttccctaggggttttgaaattcacagcacatgcctcacttccttttgtagaagtctgtatattttctacaccagccaacttttcttatttttatccttttagttgtgcaaaaacttcattctatgtgtgaacagacctattctctgctccatttctcaagcactctgcctcctctgaatacatggagaaggaataaattgacactcaggcatttatcagatctttcagcactagagcaactccagagagccctagaaagaaaaataggaggtgtcagtgggatacggatttgggggaaagatacctagaaataaaaggcaaaggaaagggagtaaaaccaaaagtaattaattctcaactgcaccacaagcccaggggtggggtatagattaggccctgtgtcaccttactccagttgtggaggacaggatatgagactagttcttcacagatactttataacaatctattctcactttattcatgagatgta

SEQ ID NO: 39110 - DNA, 1418 bp, Bovine  19866880912557
  misc_feature (1)..(1): n is a, c, g, or t
nattctctctggacagatgtcttatcagaaaaacatatgtagctaaagagctatgtacatattacccctacttaaagagtatctactgagataaacaagtgataggacctcctgattatatttaaatagcaacagctacatcctgcatcagaccttaggcttactttgtgttcagtgtagactggagactgggaaaaaaacaaacaaacatatactaatgcctagaaataaataaaatatctagtgctgctttataactaagaaataactgttttatggacaagttcagcaaaatgagttaagattagatttatgtgttttattatctttctgcaagtataatctgacacagaatattattttcttggtgataatttctagtgtgaattgctttaagcatgagatagtttgggatacatataatacataaacacagaagatcaaattatttactatccaagggaaaaaactgttgtctatagccagtctctacagtgaggtgtataactaggtgtctaatttgacggaagataaatggggatgagaaagtagtattagttggttacttcatcttttaaaataatgtttattgctctaagatataaaagttttcctgttatccagtaagtttgagcaataggctgctttggtaaggctgataaataagaaagtacatctagcctaatgcaagatacaagacagatacttgaaccatttatgaaattactgagtaaaactgctaacaggaatttctaagaattaacaaagcaataactaatttcacctgtagttgaagggaaaactcttaaggtcaggcattgggtaaaataaaattcctcatttctttattacccaaatataagaaattggtgatggacagggaagcctggtgcactgcagtccatggggtcacaaagatctggacgtgactgagcccacttaactgaacccaaaaatatacgttttaattgaagcaaagatgaataccaacgacttccttacagagatgaacttctttagttccccagggtggggggggggggcatgttgtactggcaaaaagcttaattaataggacccagaaaatatatttttcattccacttctgttcctaatagtatgaccttgatcttgtcctttcacttacctggactctggtgctttcactaataaagtgagagaattggactggacaacttccttgacatcttcctgtcctgagacctgaatattttgccagttaagaatccaagaccaactgaccactgagtatatcactgaacaggatacaaagagtataagtgactactagagtaatcttagaaataatgaaggcttttgaggccctttctgagttaaaattgctattttcctataagtgatttcatctgactgagggacagaggaaatcagggcaa

SEQ ID NO: 39111 - DNA, 749 bp, Bovine  19866880922076
  misc_feature (1)..(1): n is a, c, g, or t
nagagaatgtaaagatgtatgctcagtgccactgtcaaaatgacattgacttctttttgtcttaaaaatgcaatagactttcctccagatctggtaaagtcagagctttttaatgtgctttgttaaaataaagggttagctttaaagacaaagcacaggttaacctagattctttattaatattgtatttgtggtgacagtacattgcacataattctataggaattctattctaatttagtaataattcatgtctgtgtattcagtatgacagcatcattaattatgtctcaatgaatatggaaaacatatacgctgttaatgctaagcattattagaagttaaatcatattttttcatgatacatataataaatagtaggcttaacacatcatctttaaacccagggagtatcttaacctgacatttttgttcttacaatttgtgttgataaatataaaacaatatttactataggaaatgcaaagtatagaatctgtccaggagaatttagccttcttagcaggagcatgattatttggttaccttctgctgtctgcttcctgcctacacagtgtgatctttttcctcctccttcttcctaatatcctgtgaaggtgccaattaccctgctgcttatcagttgaaaactatgcctggtgcaaagggaacatcaattatttgtgagctgagagctaagcctgctagaatcataataaaggaagctggagcttctagctaatagaata

SEQ ID NO: 39112 - DNA, 883 bp, Bovine  19866880936080
  misc_feature (1)..(1): n is a, c, g, or t
naaacagaagtaaatagaaggaagaattttatagaacaccattatcacattttttcttaatgaaaagcagcataattgtggtttacacagctccttaatctcacattaaactaacagattgctgacttatacagaacatggcagtccaagctttctatattgctgtgcttaattttaggtcattatcctttattatgtgacttgtaatccttaaagcccatgattgtgtctggatatttggcaaggattgtacttggcaatacagggattctacttctaagagtgatgatttaattgaaaaatatagtatgattagattacatacattgcttttcttttgtaattgactagtttcttatcagtgtttttttcaacctttaagatcactatttagttttaggactttgctttaaaaaagaaaaagctttcacaactgaaatacaagtagtttattattataggaatttatccatatgctcttaaagtagacaatttaaataaaattctggctcatccacaaactggataactgtagtcaagttacttaatctttctggtctcagttccctcatctacaaaatagtaataatagtaataatgattaatagtgataattctaccaaatgcatgggattgttgttacaattaaatgagctaaatcttgcagtgtagattatagactaatggctagaaagcaaaaggtaaataaatccagtattattactattattactactatgtccttgcctagaactgtgtataaatggcaataagatgcttagccttcaattcaaggtactttattttactatctatatgggcttccctggtggctcagattgtaaagaatctacctgcagtgcaggagaaccagatttgatcc

SEQ ID NO: 39113 - DNA, 1247 bp, Bovine  19866880944153
  misc_feature (1)..(1): n is a, c, g, or t
ntgaggtaacttgcaaaaaaaaaaagtaacactaatgtcatattttagtgattaaaaagtactttcccatcgctctctcaattaacagtgacaatagccccaagatactgagaagtgagggacctaaggctcagagaatccaaacaacttgcctagtttcacacctgggacctggaacactttccagcatatcaggacccccacctttgcagctcatctaattgcataaatgagtcacaagccaaaatcatcatcattcatgctacagtatctcacacagccctgccttttccagagccaagaataaatttttaaaaatcgtatttcttttcacttattcacccatgctgcactcacctgcttgtgctgtgaactcttttgttcatcagtcccaagttagcattattcatttgttcattttacctgtatttgttgagtgcctactgtgtgcaaggcatcaatagcacagtgattatgttataggaactataattatagatgagagcattatttacattttaaaaattcacttcaatcatgcaggatacagtgatctatactgcattcaaagcaaagtaaatcacagggcagctggttccaattttttttttaagtaggcagagtataaataataaataaaataaaagcgtcactgtgaaaattttatcagaggtcataaatgtgaaggagttaagaggctgggctgcagtccagaccccgccaccagtggcgtgtgaccttgggtgagtcacctcacctagataagcctctgtttcctcctctgtgaagtacgtgaattaagtggggtgatttttaaagtaccttttctgatcagcagtctccttgcactgtagctaaaacatcactcagtgcatctgactgtcatccccaaaggtctcaggggctgagagaagcacagggacttggttagacacaggatctaaacggtaaaacactatccagagcaatccacttggaaggcaataagctcatgtataaacataactgactgaaaatttatgaacataatttttgaacataatatgttcaaacatatttgaacataggtttgaacataatgttcaaaacacgaacatttcaaattatgaacatttgaaaaattatgttcataatatatgaacattgaagaaattcctaatattggagcagtgtcctacaataataaataatactcaaaggaaattaaaaatcaataggtaataatgtatcaatatcagttccttagt

SEQ ID NO: 39114 - DNA, 1890 bp, Bovine  19866880970489
  misc_feature (1)..(1): n is a, c, g, or t
nctcgtactaaagattcagccaatttctaattagtaatagaaaaagaagccaagaaaactcagctgattgctttcctgtagcagccagatatagcctgaatacacacatgaacacagaaagctcacaaaaaaattaaaaatagacacatgaatgaatctcacttgtaaccattccaaagcttctttcctaatggttgattatttagctcttcattactcattttgtcatgacctggtttcaatctgatgtttttagagagcctggtgacttgcttgaaactcgtcttcttattcttcattcagctacagcttctctgtggaagtatttaaggagctgctgtgtcaaacactatttcttcagtgtttggattcatgtcctgggttctgacttatctgtctcttcttgaatttctggttcatttgtgatctcttgtagccaacagctccaatactactaagctagagttctgcttacaacctgactcatttgggtcagcctcctccctgttgactccatttctacttctgagcctggcaccttgtgtgatattagtttctaccttaaatgcaatgacattagtcaatatgcatatgcattcctagttctggaaacaattttgatacaactaaattccttgagagaaaaagcagggatttagtcagttttgtattctcagcagagagtacagtgtctagcacacggcaaggcaactgttagagaaatggtggttgaaggaaaaattatccgtatgttcttatgtcattcagttcagttgttcagttgtgtccagctctttgagaccccatggactgcagcacgccagacttccttgtccatcaccaactcccagagcttgctttccatcaagtcggttatgccatccaaccatctaatcctctgttgtccccttctcctcctgtattcaatctttcccagcattagggtctttgccgatgagtcagttattcgctttctttataggccaactctcacatccatacatgactactagaaaaaccatatccttgattacacggacctttgttggcaaaggattgtctctgctttttaatatgctgtctaggttggtcatagcttttcttccaaagagcaagcgtcttttaatttcattgctgcagtcaccatctgcagtgatttcggagcgcaagaaaataaagtctgtctcatgttgttggaatatcccattccatcagaatgtcattcatcttggtggcagcgtccttattttactattttaacttgtcaatatatgtgtccaattttcagccttagaacaattttaataacttgtaaacatctcttattaaccgtttattatgtctaaggttcagtgtaaggtactacaaatcttttattaggtcatctcatacattgcttgtatatctttctaaatagtctatatcatctggcaccctaatttcttgtttattcccctttctttcccacctctctgaactccttgagggcaaaagttggaatttattagtcttgtgcttctagcaggtaatgtcctatgtggctcatgacgggtgttccttaaagtgtgctgcctacataagtggaggaatgataaatgacagcaccagacatgtatcaaagaactgtgctgtaagaatggaagaaatgctagataatatgctaattgtcataggtaggaagggaataggaaaggtcattatagggacagtgatggttttcttctaaaatgttaatccggaggcattttttttaaatttatttttcttagttcaggggcaaactaaatatctgtctagagagctacaaggaaaaattaatgccaacagatgtttgaaggcaaaaaacaaggcaacccaggagaataagccacaagaaatgaagacagctaa

SEQ ID NO: 39115 - DNA, 948 bp, Bovine  19866880982541
  misc_feature (1)..(1): n is a, c, g, or t
nttgttgctgtgtgagaatgttgagaccttctcaggtcttgtgctcaggtcttctaatttctcaagggaagccacaattttgaatttttgtgagatagtcttaattttaaatgttttcaactgagtctagtttgaatatacagacatagaatgattgctattgctcacttaaaggctttttaccctaatgggttttgaaaaattatgctatcttttggtctcttctgttttttggtgtatcatgactttttctcccatgtatacactacacaaaagcattataagaagaaatattttgtaatactgttttaggcaaaaatactttctgatccattatttgatacagtagtttcaggtcagagattatcatattgagtgtttgaattgctcaccatgtttgaatgaaccccagatgttttgctttgtgtacaaatgccaagtgccagggataaagaggtagcactttcttctaactctccagcaattgcatgtgtgtgctatgcaattgcatgtgtgtgctatttccacattttgaagtgctctcctatttagcttttattttgcctggagggtgtttttctgtgttataactttattttcaagtacagtctgagtgcaggataaccacatgcccccaaaaggttgaaaaattgatgaagaaaatgatacagaaagaagagaagaaatgagcacaataaaccttcatcacattcacattatattttatgtgcaaactgtatttattcacttttaaattgttgtttattacatatacagtttttattgttcaattgctatactttttttttaacctgagaaaatagtttaatagggatcagtatatcaatttgtggaccaatataaaacatgtctctggagtgggttttgagcaacaggatgctgctttgtggcattcagtgaagaatggctgtaaaaatgttaacacaa

SEQ ID NO: 39116 - DNA, 1485 bp, Bovine  19866881012858
  misc_feature (1)..(1): n is a, c, g, or t
naatactggagtgggttgccatgcatgcctccaggggaccttcccgacccagggatggaacccatgtctcttacatctcctgcactggcaggcaggttctgtaccattagcgccacctgggaagccctgtatatatatgccacatcttctttatccattcctctactgatggacatttaggttgtttccatgtcctgcctattgtaaacagtggtgcaatgaacactgggatgcatgtatcttttggaattatggttttctctgggtatatagaatgagatgctaaaatttagatttgaagcatgagtgagtaggactcacaagacaaaacactagggaaccaagggaatttctcattcttgtctccctcctttagctccttcctgcttggtttcccttgcttgattagccacatttcatgactaccataatgacctacctggtctaatacattgagatttggagaactgtagataataagactttgacaggttagagacagccttactgatatgcctgatgattttctgccaagtctgattctatcacagctagcctggcagttgctacactgatcatccctcctctcctttcttccctctgtgtacaactcctcacactgagtcagacacacccctctgcacactaagccacacaaaactgcacattcctttatttctgggtcctctccttttaccatttttctgtacttagatattgctatgaactgactcgtattccctcaaaattcatacaatgaaatcctaccccctaatgtggcaaatttagagataaggcctttagggaggtaattaatgttaaatgaggtcataaggcaaaaaacatgacactgaaagatgtactccccaggtcggcaggtgtccaatatgctactggagaagagtggagaaataactacagaaacaatgaagagatggagccaaagcaaaaacaacacccagttgtggatgtgtctggtgatggaagtaaagtccaatgctgtaaagaaaaatattgcataggaacgtggaatgttaggtccatgaatcaaggtaaattgaaagtgctcaaacaggagatagcaagagtgaacatagacattttaggaatcagtgaactaaaatggactggaatgggcaaatttaactcagatgaccattatatctactattgtgggcaagaatcccttagaataaattgagtagtcctcttagtcaacaaaagagtttaaaatgcagtacttgggttcaatctcaaaaacgacaggatctctgttcatttccaaggcaaaccatatcaatatcacagtaatccaagtctatgttccaaccagtaatgctgaaaaagctgacactgaatggttctatgaagacctacaaggtcttgtagatcttaacacccaaaaaagatgtccttctcgtcacaggggactggaatgcaaaagtaaaaagagattcctggagtaataggcaaatttggccttgg

SEQ ID NO: 39117 - DNA, 960 bp, Bovine  19866881038447
  misc_feature (1)..(1): n is a, c, g, or t
naattcttaccctatagaacctagaaattatctttagaaatgaatgagggtcctttctgaagatatttgaggagtttctgagtagggcatcagtgctaatattccaagtttttcaaagtatgtgtatacatgcatacaagcatgtgtatatgcacacacatttgtgtgttacagagatgctaatagctttaaaaagtgattcccaaacaagttttggaaacactgggattaaacatagtgaagcaaatttctttatcattctaaagtacattgtaactctacaagaggtaaacatgacatgtggtatttatgtgaccattagacactaaaatatcttgtagaactaatgtttcacagaacacactttggggcccattccatagaatctggggtttctgttaagtgtaaattctgagaatggaagaagaagatgtttctgaatccaaggatgaacaaattaaagatcttagaataatggttagcagaaaaaagtttgagacatttaaaagtagatgtaaactgttatacatgaggatattctatgaagggcaatttggcaagttattctacacatatatatgcacttttattaagtggtgtttacatatggttataaatttcagcactgtttgaaaaagctagagataagaaagaacccacgtatgtacatgatagttgctaaattatgtggtacacacttagaatgaattgtatgcagctgaaaaagttagctaagatacaggttaataaatgtgaaactctgaaagactggacgtcttgctaatttttaagggctttaaatttctttcagtttttaaattttttgttagagtataattgctttacaatgttgtagtggcttttactttacaagaaagtaattcagctatatgtatacatatatcctcttcttacttgaacctccctcccatgccccatcccactcctcttttcatagtc

SEQ ID NO: 39118 - DNA, 1343 bp, Bovine  19866881047630
  misc_feature (1)..(1): n is a, c, g, or t
ntattgttaaatatgtataaacatattttgagaaacaaattgaagatatgactgactgcatgaccactttaacaaatttgggaattgaacacattatttttagcaatgtatttgacattattctctttggtgaatcttatttccccactttgacttacctaaaagcctaatctcaattgaattgtgaatcttggtttattcagaattattttgtgatccacttttactggaaggccattgctactttaagtcatgtgattttggctaatgcaataaatttttgaatcctaatatgttcatatctgccaaagaattatccccagataccatcaggacttgatgaaggcagtctttatcctagtccagtgattcaatgggggaaaatttcagatactatccatggatattcttaaaggcaaatagctctttgcttaaaatttagttaaatcatgcactcagttgttaagcatgcaaagatttcttcaccttcctgaccacagtgaaatgtgagcaaaatggccacatttattggaaagatttactgtgaaaaattcaatacacagtattttgatttccttaaatatgacacatagttcccaaaagcagatcaaatctgatgtggcttatttagggaagcagtctctaatcctgacaccttcattcaataatttattttaatgaagaattttgtaaagaattaactaacatgtggcaatgattttaaggccttttaatggatagcatgctgaaagcccttaatctcccctgaagggctccagacacatcctccacatcctgtattcagcatcaggaacaagctcagaatgaaaacctctggtgatagtaactaagtccctcatctgctctgtctggtcatgattaggctaacaaatagaatttgtttttagaattgaagaaatcttgctgttgctgctgctaagtcgcttcagtcgtgtccaactctgtgtgaccccagagacggcagcccaccaggctccctggtccctgggattctccaggtaagaacaccagagtgggttgccatttccttctccaatgcatgaaagtgaaagtgaaagtgaagttactcagtcgtgtccgactcctagcgaccccatggactgcagcctaccaggctcctccatccatgggattttccaggcaagagtactggagtggggtgccattgccttctccggaagaaatcttaaccatcacctattctattcacttcattttgtaaatgaggaaagcaaagcccaaaggggctaagtgaccagtccaaagccacactactttaaccacaaaactgggattgttctcaggtctttagaatcggcgac

SEQ ID NO: 39119 - DNA, 1068 bp, Bovine  19866881077410
  misc_feature (1)..(1): n is a, c, g, or t
naaaagcatcaattctttggcactcagccttctttatggtccaactctcacatccatacaagactactggaaaaaccatagccttgactagatggacctttgttggtaaaagtgatatctctgctttttaatatgctgtctaggtttgtcataacttttcttccaaggaccaagtgtcttttaatttcatggctgcagtcaccatctgcagtgattttggagcccccaaaaatattcctactggatttagtcatcagttaattctccaaaaggtatttcatggagaatggaggagttctgaattattgatgtgtcagcctaggaagtatgttactttttacagtgtcggtttgcttaagcaggcagcatagttgttgcaaatcctatagttcagtattatctctttaacatacctgtgaggttttattgcaaaaacttaattaagtactgtcaactgaaaaaattaaaactccaagtgccattagggcacaggcaaactttagagttatggtgtggagccctgtttctaaaggaatttgtgggttgcagtagagctttgttttgctgttgatcacaaaagcagtattatggcttgcttaaaaaggcattttaagttattttttaaaaagggctttcccattcttcctttttagttcctgaatgcatttttacatagcactaggctatgctaagtcacttcagtcgtatccgactctgtgtgaccccatagacagcagcccaccaggctcccctgtccctgagattctctaggcaagaacactggagtgggttgccatttccttcttcagtgcatgaaagtgaaaagtgaaagtgaagttgctcagttgtgtccgactcttagcgaccccatggactgcagcctaccaggctcctccatccatgggattttccaggcaagagtactggagtgatgtgccattgccttctccgttacatagcacactttgccctaaaagctagatatgagaaatgtcctttaagagcttctgctctactgcaggtatcaatgctatgcataactataagaaaaataaaaacaattacaaa

SEQ ID NO: 39120 - DNA, 1267 bp, Bovine  19866881105252
  misc_feature (1)..(1): n is a, c, g, or t
ntttcctcctgtaagggatgttcccaacccagggagggaatccatgtctcctgcctctcctgcattgcaggtaaattcttttcccagtgagccattggggaagaccttggagataggatagaaacatctaatgtggcaatgtcagatactcataaactttggttaactgtgtcccaattccctccattagtgtatataaatattatgaatcagtatttattgtgtctattattttgtgctgaactctgttctaggcaccatgataataatcagaacttgcccatgaacaatatctcatccttagtcttgcccaaacaggtaaaattcccccagaaattttgttttggtctggtataggagatgaaggaaggcatggtctcaagtaatacctatgtaaagtggaccatttagttcctggggcaccacataaaataatataaagcactaaaagtaataagaccttttcagtgcagattggggtcacccataaatgctgttcacttaagctctccaacaggcttaaataatcatataaaacttggtctcgtgttttgaatgtagttagaggaacatgcaatttagatttaaaaaatcaatgtatattagtgttaatctgaatttactttaaaagaaaaacaatagtccaggagataatataatgattaggaataaatttttacaagttttatttttttaaatgtctcatgtatttagtatctgagatcagttctataacaaagtttaaagtaaggtaaaataccagtggattatagctgggtaattagtcactgtctatttacttaagaggctttgagtttgtggtttagtttaggatttactgggaaagactggtacatggatggaagtccagcggtacaaactgtaatccttgcccaattatctagggatacaattaatcaagggacaaagacagaacatttgtgaaattgcttatcttctacagtgagattctggcttgaaatatagtcttatttgaggtgttgatttaaatcactgtttaaaatgtgacttgaggcaattttggtgaattttatgttttgtaaacggtagagtgcaatacggttattcttctgttttgctcttctgtgtcaattccttcatctatcttttgttgcttttaaaataaatatctggactaatcctgccaagagaagatcacaccccaaacatggccatcctaggtccaagaggggaatgtataagtgtgtgtgcatgcatgtgagcttctatgtcatgagtcacatgg

SEQ ID NO: 39121 - DNA, 3696 bp, Bovine  19866881137535
  misc_feature (1)..(1): n is a, c, g, or t
ntatatgtaatgaaattgaatttctgagacactagataatttgtagagacactggggcatacctgttcccatcacttccaccaggtaataatgtgcctaacgatactgagtatggctctgttcagctcagttcagtcactcaagtccaactgtttgtgaccccatgggctgccacacaacagtcttccctgtccatcatcaactcccagaacttattaaactcttatccatcgagtcagtgatgctatcaaaccatctcatcctctgtcttccccttctcctctcacgttcaatctttcccagcatcagagtcttttccagtgagtcagttcttcacagcaggtaggcaaagtattggagtttcagctttagcatcagtccttccaatgaacacccaggactgatctcctttagaatggactggttggatctccttgcagtccaagggaccctcaagagtcttctccaacaccacagttcaaaagcgtcaattctgcagtgctcagctttcttatagtccaaatctcacaatcatacgtgactacaggaaaaaccagagctttgactggatgagcctttgttggcaaagtactgtcttaggtgggtcatagcttttcttccaaggagcaagtgtcttttaatttcatggctacagtcaccatctgcagtgattttggagcccccaaaatagtctctgttcccattttcccccatctatttgccatgaagtgacaggaccggatgccacgaccttagatttctgaatgttgagttttaagccaattttttcacttactctttcactttcatgaagaggctctttagttcttctttgctttctgccatagggtggtgtcatctgcatatctgaggttattgatatttcacccagcaatcttgattccagcttgtttatcatccagtctggaattttgcatgatgtactctgcatataagttaaataagaatggtgacaatatacagccttgacgtactcctttcccgatttggaaccagtctgttgttccatgttcagttctaactgttgcttcctgacctgcatacaggtttctcaggaggcaggtcaggtggtctggtactcccatctcttgaagaattttccacagtttgttgtggtccacacaatcaaaggctttggcatagtcaataaagcaggaatagatgttttttctggaactcttgcttttttgatgatccaatggatgttgacaatttgatctctggttcctctgccttttctaaatccagcttgaacatctggaagttcacgggtcatgtaccagtgaaacctggttggaggattttgaattaggaattactttgctagcatgtgagatgagtgcatttgtgcaataatttgagcattgcctttctctgtgattggaatgaaaactgaccttttctagttctgtggccactgctgagtttttcaaacttgctggcatattgaatgcaacactttcacagcatcatcttttaggatttgaaatagctcaactggaattccatcacctccactagttttgttggtagtgatgcttcctaaggtccatttgacttcgcattccaggatgtctggctcaaggtgcgtgatcacacctttgaggttatctgagtcataaagatcttttttgtatagttcttgtatatattcttgccacctcttaaatcttctgcttcagttaggtccatacaatttctttattgggcccatctttgcatgaaatgttcccttggtatctctaattttcttgaagagatctctagactttcccattctattgttttcctctatttcttggcattgatcattgaggaaggctttcttatctttccttgctattctttggaactctgcattcaaatgggtatatctttccttttctcctttgccttttgcttctcttcttttctcagctcattgtgaggcctcctcatacaaccactttgcatttctttttcttagagatgatcttgatcactgtctcctatacagtgtcacaaacctccatccatagttcttcagacactctatcagatctaatccctcgaatctatttgtcacttccactgtataatcattaagtaatttgatttaggtcatacccgaactgtctagtggttttccctactttcttcaatttaagtcgaatttggcaataaggagttcatgatatgacccacagtcagcttctggtcttctttttgctgactgtttagagcttctccatctttggctgcaaagaatataaacaatctgattttggtattgaccatctggtgatgtccatgtgtaaaatcttctcttgtgttgttggaagagggtgtttgctatgatcggtgagttctcttggcaaaactctattagcctttgccctgcttcattttatactccaaggccaaacttgcctgttactccatgtagctcttgacttcctacttttgcataccagtcccctgtaatgaaaaggacatcttcttttagtgttagttctagaagttcttgtaggtcttcatagaaccgttcaacttcagcttcttcagcatttctggttggggcatagacttagattactgtgatgctgaatggtttgccttggaaatgaagagataattctgtcatttttgaggttgcatccaagtactgcatttcggactcttgttgaccatgatggctattccatttcttctaagggattcctacccacagtagtagatataatggtcatctgagttaaattcgtccattccagtccattttagttcactgattcctaaaatgtctatgttcactcttgccatctcctgcttgaccatgtccaatttacctttattcatggacctaacattccaagttcctatgcaatattgttctttacagcattggacttcactggcactaccagacacatccataagtgtgtgtcattcctgctttggcccagccacttcattctttctagagttattagtaattgccctccattcttccccagtagcatattggacaccttctgaccttgggggggcactcatcttctggtgtcatatctttttaacttttcatactgtttgtggtcttgcagtaagaattactggagtggttttcaattttgtcttccagtggaccacgttttgtcagaactcttcaccattaccagtctgttgggtggccccgcttggcatggctcatagcttaattgagttatgcaaacctattcaccatgacaagcctgtgatccatgaaggggatatacatacatatatatatatatatatatatatatatatatatatatatgtaagttacattttaactattagtataaaggaaggatggggaatgagaagagtataagcaggtgatttaattttcttagaaataaattactagcctattcattgtccatctgatttagtcaattcctaattatctatggtaaatggaaagtagaaaaaataaggatgagcttatacatcccctgataatcccccaaccatatttcagaacatgtctatgctcagaaacattctaatggcattacagtttgagggcatagtactctagttgtctcactatggtcatatcacagagatcagtgatcctgttgtttatttgggtgacctcgtttctgtgacagaataaatgctctcatatggcatgcacatgtgctg

SEQ ID NO: 39122 - DNA, 1123 bp, Bovine  19866881168546
  misc_feature (1)..(1): n is a, c, g, or t
natttcaatcccttttggtgacacaatattaattaaaatagtttatgttgcacttcaactggaaaaagagtcagtgaaaatagcagctactcagaacacatgttctatacgcatcaacatggagggcagaaaataattttctctttctccgggcggcagacattagctattcaagagagttgctctgacttagtttatctctgtgttatcactgaaataataataataataataataataaaaaataagctcttcctgtttgtatagtttgctcaataggaaataaaaatacacatgaagaaaatgcttctaattctcacctgctagtgcctcaggaagagcaaaataaatgtctgtgcccacgcagcattatgggatattaagaatcacagtcactgtttctcttaattaaaaacagttataatgttattaaaaattctttttattttcaattcctaaataatggttgcaattgaatacattttctttctaacacggaaacataggacaagtatggagtttttcacacttaaaaaaaggagaaaattatgtaaatgtattagaggaaatgaattctcttttaacaatgatttttaaagtggcagttaattcacttaacaaaaacatttatcaaagtacctagtatgtgcctgactctggtcaccacttgaggctgagagaatctgaacttgaggctggaaatctaaattttaaccagttctccaaagatattcttaagcacatttgaggcaaaggaacttaaatcaatctcatcattgcccctgtaccacacaattaatggaatatacaaattattaataaaattaaagaaatattcactgaataaaagaccaaaaagaataaatccctcaaaaattcttgtttggggcctgatctgcatgaccacctgagaacatcaagacctagccggcctaatttgggccttccacagccaaaagtcctcatctggtccctaacctactatttttctctgcagtgactatagtttaaagtagttaaaagtctttttctatctactgccatctaaatgacacagagaaagaaatattccctgttctgtaggactttgtaaaaaaaactacctgaggtctttcctggaaat

SEQ ID NO: 39123 - DNA, 1641 bp, Bovine  19866881172958
  misc_feature (1)..(1): n is a, c, g, or t
natgagtcagtcctagaaagggtaattaaggcaagaggtgggagtgtgatctggctggaggagccaggacaggggaaaatggtgaaaagaggtgaggtaggagaatataaaaagagaggtaggatttgtctgcttctgacagaaaatccacaaaggtgagaagaatagtttcaaatgactcacttttgtgtcttgaattaatgctgaaatgagctggaagtcccagaaaatatctttttaaagaaccgactactccagtaatgctaagattcctttggattatgaccctcaagtgctgaccctcctctaccactctctataaaccactatggtgttctctctctataagcctctggatatatctgttttggctacgcttctgctaggattctggaatgtcagaaaagtgaaagttgctcagtcctgtagactctttgtgaccccatggactgtagcctgccaggtttcggtatccatggaattctccaggcaagaatactggagtgggtattcttgggcttcccttgtggctcagctggtaaagaatctgcctgcaatgtgggagacctgggtttgatccctgggttgggaaggtcccctggaggagggaaaggccactcactccagtattctggcctagagaatcccatggactgtataggccatggggttgcaaagagtcggacacaactgagagactttcacttttatagatacctgttgaattaataaatgaatatattctttcttcaaggaacctgtaatgtgtgtagaaaggagatgtattacacaaaagaagtagagaacagaatttggtatatgaccaattgtgtgattcagactaaaatttaagtatatatctccagaatcgatctacacattattaagatttatgttcttactagaaagaaaccaaatgtgtcagatagtatatcagtttgctagggctgccgcaacaagcagtacaaactaagtaccttaagtggcagaactgcatcatcttacagttccagaggttcggagtctgaaaccgaggtgtcagcagggttgttccttctgtggactgtgagcgagaatctgcgccatgcctctcttctagcttctggtggtttgctgacaatctttggcattccttctcttataggaatgtcaccccatctctgatttcatcttcacgtgtctctctcctgggtgcatctttctccaaatttccctgttttataaggatgccagtcatattggatttgggatccaacctaatccagtatgacctcatcatcacttaattaatcatatctgcaatgatcctattccaagtaatgtcacacttctgaggtttggggtgagtttggcttaattcctaatacatggaaagagggtagattttcttctactttgccggtttggtaccattaaagttttattttagtctcctctgcttaattcacttaatagatgagatctattgtaaattatgaataataaaatgaaggattataaatgagttatttgctttgctgtttacttaacaggatttatacacagatattgagatttaaaaagccttctgataagagtggctaacatttattgaatgttcactatctaatgattttcatggattttcccacttaactttca

SEQ ID NO: 39124 - DNA, 1619 bp, Bovine  19866881229168
  misc_feature (1)..(1): n is a, c, g, or t
nactctttcagttcctttaaaggacctattactacttggctctcaaacctcacacatgctattttatcacccatttatttatttaaaaatttttagtgccttcagtgagccaagcagtgggcaaatcccctgaggatacaacaaggaaaaggcattcttgtagaatctccagcccctgcctgaaaacccttccccattcccaccactgcttaatgttcatgtcccaaactgaatgttatgtcttcgaggatttcctctctgctccccacaaacaggttaggtgtcctactctatacttcttctgttacaatactgatcaccctgtattgtcattgcctggtttcttgtctactcccccatgagactgtgagctccatgatgggaaaggaatacgtctaacttgctcacagttatatcttcaatgcttaggtcactgccaggtaccctgaggattctcaataaatatttgatagacagatagttctaggaattccaagaagtttagaactacaatatccttaaaaccacagataatttgtttctaaagtgaaaatttcaggccctgttataggtaataaagaagatatttggaagtatatatccaccagaatctatgatataaatggaattgtttattttttaattatactaataaataaaagagcaaagcaataatatacaactggagtgaatgaattttaaaatattgatgaccaagaatcaaatcacttgaataaaaacaaatggttataactgggatatttcccagttacctgaaacctaaagccaatgctgacattaatgaataaataaagggagtagggagaagagtcagtaaggactcagaaacaaatctaggattcttattctcacttaatgtagcttttgaagtttggcctggaactaaagcaaagaaatcagttcccattaagatatcatatacagatgcatctgtgaggctaaatatcctttcctggaaccatttttcctgggatttatcacatgagtgccaatataaagcagtgctaagtcacacagtagaatatacctccaccagtgtttcaaaaggtgcaaaaaaatgctcttaaatatgacactttttagtatcagccatctataaaatcaaagaacatgacattgagccatctcagaagccatgtctttgattgactgagataatgtggtctaagacattattttctcatggtctgagagcacagggatagaatttggaatagtgtaggtaaatggataattaacatacccatttaggctttttctctcaaatatcaaatatcttaaatgagctttggaaaggttctggatcacattcaatttgcaatcaaattcccttaataagattttacagtgcagaaattctttcttgctgattaaaatgagagtcataattttgagtcaggtactgaccaaacttcttacataaggagagacagcacgctggaaccgagtcatgaacagcctgggtgcttacaagtagcatgcgagtgtatttgaaggagcaagagatcttttcaagctcagatgcatagtagttacatctagaggcagtccagttttaaagttttacagcaaaggttcatactggtcccctgtgggtg

SEQ ID NO: 39125 - DNA, 1612 bp, Bovine  19866881300907
  misc_feature (1)..(1): n is a, c, g, or t
nctttgcagagacaactgctggtttccatggcaattatgtctatggcatctagctctccccctgcatattggtgacacaggacagaggaaggccacatgttcagttatgcataagttacagtcttggttattcaagaaagaccatcatttaccctataccttgagagtttaagatgttatttctaaagcagaaatagacacacaaatgtatggataccaagggggaaagtggggatgggataaattgggagattggaattgacatatatacactattgatactatgtataaaacagataactaatgagaacctattttatagcacagggaactctactcaatgctctgtggtgacctaaatgggaagaaaatttaaaaaaacccgagaggatatatgtaaacatatagctgattcactttgctttacagtagaaactaacacaaccttgtaaaacaactattgttgttgttatttagtccctaagttgtctccaactcttgcagccccatggactaacctgccaggctcatctgtcctatactccaataaaaacattttctaaaaagctgtaaaatttagtgtactacataatgaagctagtccacttgtaggaacctacgttaatgaaataatttagaatgtgcacaatgattttatcaaaagcatatttgttgcagcattaaacctaaatgctcaagaaaaaagagtaaaatacattctgaaacatctttatacatactacacagacgtcaaaacaaagcccagttttgggaaagcaaatttcttgtcaaagaaagatgctcatgatatattatttcatgtgaataaaagttgaaaaatagtcttatggtatgcttctatttaatagataataaatctctttatgtgtgttcatctatgtgcaagcatttttctgccagtatatacacaaaaatatgaacaattttttaaaaagatgctatgcagttgacgcgatgcatggtcaaagcatgagggcatataaaaatacagatctactgtaagcttggctggatcctttatatgacttgatctgtttctcacatcagaatgcattttttggtgcctgaatacaaaatacatgaggagtgtttaatttcccttgatttgtttccttctttatctcaaagcccctttttcatttttagagtgaagcaataatgaaaaatacatgaaatatgaggaagagagtcctaatttggaactatccttccagtcatcctaattgaaatactctctgaattagagaattcttcatgaaaaacagctttatgagaaacataaaatagattctgggaaaattattctctcccaaggatttgactgttgatttctgtcctggtcatacagaaaaagctgcacagtggtgaagcacagacactccatccagctccatcatttatgactctgacatctttgcaagttacttaacatttaagttccaagttctgttctgtaaactgggaataacaactactttcataggactgctgggcttaagctagtgggcataaagagcttagcattgtgcctaatacataggtattattcatatccatattaactattatcttacttatcatacttagttca

SEQ ID NO: 39126 - DNA, 823 bp, Bovine  19866881314352
  misc_feature (1)..(1): n is a, c, g, or t
naatggggaggatgtttcttgaagttgtttgttgccttgacctagccatcttcaaattttaatgaatatttgcatttctgcaaatgatgagaaaaggcaggaaggaatttttacacattaactgaacccaaaatagagaacagagagaggtaaaggagcataccatagtggctaagacagtgaagaatttgcctgcaatgcaagagaactgggttcgatctctgggttcgatccctgggttgggaagataccctggagaagaaaatggcgacccactccatgtgttcttgcctggagaatccatggacagtggagttacagtctatggagtcaaaaagagttgtatatgactgaatgactaacactttgatttttcaaaagagcataaccactgctgaccctgtcgccatatttgtttcggtaaattcttctatagagtccttgtcataaaactttccgtgcttttccattatatgttcttaagtgtaatttaaaacctacttattttgtattgtctacagttgaaccatttatttctttaggaatttctttaacactaataattaagcacaccatagtcaaaggcatctttaccaagtacatggactttctcctctatctagcttccaaaggtactacaaagatatttagaacaccagccttgtagttgtcaatattttgagatgtgtgatgagtaaatggaacaccttacatctttcagtggtagaactgtcaaagaatgtttatctttcttgcctctcaccccccaaatgtagactatttcagaatgcattacagaggaaataaacagtgattttaagtt

SEQ ID NO: 39127 - DNA, 843 bp, Bovine  19866881329233
  misc_feature (1)..(1): n is a, c, g, or t
ncatcttaatgtgacttgttgctttttgttcacaatagaatctgtatcttatagtggaaattatatgccagaacagtagatgggaacttggatatgtctcttgactcatgcatgccaggtgcctaggatctgcaggagcacatctcatttatcaagtgcctattttactaattcaattcccagaaggtaaactgattgctatttcattcagtttcttggaggacttcagagctaccttttaggtggtgataacagtatatatttctttatgtaattttgtttctgtcttttgactccaaaaagtaataaaatcctagggtcttgttttcctactcttaggttgactccaactttatttcctagctgctaccctttacctggatgactataatccccaatttttactctgaacagagctggagaattgaattagacaggactatcacctcctttgttctatatgctatacttttattattgagcttactgttaaatagagctatttttatttgtgcttcttataagttatagcttctccaattatgtacttcatatcttcatctcatcctcttagatttaagcctttaagactgttttatcttaatttttttggggggggcgctgcatcagtcttagttgcggcatgcaggatcttcagttatagcatgcgaactctcagttgcagcaaatgggatctagttccctgaccagagatcgaattcccctactttgagagtgtggagtcttagccacagggccacaagggaagtctctatcttaatcttttattgataaatttgataagcataaaatttcaagaatgcttataaattccccatcctc

SEQ ID NO: 39128 - DNA, 1437 bp, Bovine  19866881329252
  misc_feature (1)..(1): n is a, c, g, or t
ntttggtttttgtttttgtttcgtaaagttacattttaattattttgggtgcatgcctagaagtgaaatttctgagtcacatggcaactctatttcacagaattttgttatctgtaaaatgtggtgaacagtccctctaagctatgaatttcaggaaaatgttatgaggatcaaacaaaaagtaaactaaaagcattccataaacactaaattactaaaaagctttaagtattattcacatttcaaaagcacaatgcccatcttcaacatagtagatgctttataaagatgtgtgtgctgttaacaaacaaacaaggagaaaaattaaaaaacaaggataaaaaatatattattaatcctgcattgtaccaatcaagcagaagcaagttactcagtggataccatgagtctgcatttgttttcctaaagcagaagaataaataaatgtcttcatgaaaaaaaaaacaaaactaactcaacgtcttcaaaggctttctatcctggcaatcttggcttcctgggtgactcagtggtatagaatccacctgccaatgcaggagatgtgggttcaatccctgggtcaagaagatcccctagagaaggaaatggcaacccactccagtattcttgcctgggaaatcccatggacagaggagcctggtgggctacaattcatgaggttgcaaaagagtcaagacatgatttagcaactatacaacaacatactggcaatgtgtttctccagacaggctctggaacgaatggcttgtgcatacaacagtggcgtccactagggacgtgtggtattccacttcagctctcttgaaaaagagctctgccaagtctcattatttttcaggagttaaaggtggactcacacccctccctgaaaactccaaggaagaagcagtatttttttaataaactgcaaattggcatccattcatagctgacatgttgctaccatttcaacagtgtgttcattcaggtgttctgtctgaattgagacttttaggcactaataataattaactactttcttagcaatgaaaaaagtcttaaatgcctatttacttaatggtcccctagggtgtctttgttttgaatgggattaaaaaaaaaaatcttagctgcaaaataagcaggtgattctaatcaataaagccagaggactatattgattactagaactccattctttagtcattaaccctgtgaattctctaccaaagccgggtaggactatttctacctcttagaacatagaaaggctcattgagaaactggaatctcatttcactttcatgtcttccactaagcttacagggtcatgtttagagagtccattccacaggctgcacatgtgggaagattactttcatgactgtctctcagtagaactgtgtttaaagatatttggtgttttcttcccattgg

SEQ ID NO: 39129 - DNA, 1185 bp, Bovine  19866881331390
  misc_feature (1)..(1): n is a, c, g, or t
naaactgtgctaatactttgtccaagaaaattattttaagagaatatttaaaatgcataaattcaaaaaatacattcatccccctcaactaaattgtaaacaaatagcaataaccactaggaaaagagagtacttggagctttttaatgattaagcagaaccctgcttgccgctggtagtgctctgggctgtagacaactcaggattatctctgggtcctggagagcagttctgtatgaactgaatctgacattctgagctagtttcgtaagtcaatatcatcattgaaaggaagccattgatcaatgaagtgaagctactaaaaatggattccagcctgggaaaaattcactggggaagctgtaaatgtgcctggcctgtaatggccaggctgggttctttgtgatttaactggctaggagctgaaggctgctggccagacaaacccctagcaataacacatctcaccaggttccagatccccatcaccctcttgaggcagaatgaagggcagaaggaaggagcaggcctcactggagtagactgggcagagatggggtctgctgggactcagtgaccatcctcacgccctggctaattccagcttcccagaagcgtgactctataataaggggctggtggtggccttgccgcgtctctgccctcttttcttgcttagtggctcatcgcacattgatggagatgaacaatggggggaggggctcagaggccagtaggttagacaaagaatgaatttgtgccttggctagatccacgccaattatgtctgaataaacaaatccatggtacaagccaaaagcctttcttcccccactcccccaacacactttttaatttttatcttgttccgaaaagttggacatattccctgtactgtcctggtacccagatggcctgtttgtgtaagcagtggggaagaaggtcaataatacatcagcatgcacagcctccactaaggtcagtcctgcataaaatacaccgtgacaacctgagggcaagttttaaatggtgctccacaacaaggttgcggggacgacagtgagggcggtgcatatgctgccttctcacacaggctgcgaaactgacttctgccccttcctccccgctgcaaagatatatcttcctgggtttgtttagtggtcttttaggcaaagttttctttat

SEQ ID NO: 39130 - DNA, 1725 bp, Bovine  19866881396424
  misc_feature (1)..(1): n is a, c, g, or t
ntattagtctataatcaatactatttgctgtgtgctctgtcactgaaataaaaccatgattgttttgcaaataaagttttaattactaaaataaacatcctcattttgaaatgtagtaaccctgtatatcccctaacacaactttattaccaggtataaaaatcaacctaggttttaaaagtcttaaaacgttgatatttgaaaggaacaatctgaacttgtgtgttgtttttcagtgcaaacaggtcatatatcttgggagagagtctgaactcagttttttcacctgtaacatgaagataaataattcctagctcacaaaattcttgccaaaattaaattagacatatgtgcaaaccacacagaatttggaggctgctattaaaatggcaaaatattaaaaatctgaacttgaatattagtgcctgtaagtggattactattaacctgtacatttcaataactgctgtcaatattcatatacacagatatttatttaaatgctgatgttaagcctatgcaatcacttaactcattcagctatctcagagggaagaactgacagccaacaacttctgcaaaattgttaagaaaatgtctctgaagccgattgagacaactggtctcacagctttagccccttcaatctttaaaccatctacgatagtaagaaatatctaaattataaacctaaaaacttcctagcatctagcacaattcacaaactggtctcactccgactttgaacctgttccacttacccatgagattgtactacaatcaaactccttaagacattgctctatttccagctcaccagaggtctaaccttctctagactgtgtaccaaggactatacctcaaagaataagggttctataagtgaaagtgttagtcactcagctgtgtccaactctttgcaaacctgtggactggagctcaccaggctcccctgtccataggatttcccaggcaagaatacttgaatgagtggccatttccttcaccaggggatctttctcacccaggaattgaacctgggtctcctgcattgcaggcagattctttactgactgagctacaagggaaccccacagaccatacaccccatctaaaagaaaacagcactgcaacacccagacaaaatgcttcccaagtgaaatactattagagctgccagtctgcaacttttgactctgcacactccctgggaaaatgtttcattgtgactatagaatcatgaagacctcagtgctataaacaagtgtatcactacagtaaagtgttgttttaccagactacaacttaccacatcctattcactctcctcagttaactagcattgttttccgtactgagcttatagtcgggggcgaggggtgggggtaagcaagcactttttaaaagcccatggagggactcatgctgaagggtaaagaacagtgaattagaagtctaaggaccaggtataaatcctacctgtgagaccacctagctctggaactttgggccagttggttcatctctgcgacctctgtttccacttctttaaggctgaggttttatcaggttgtggggtaagttccctgctgactcaaaaggcccacaattctatgacttaagaaaacaagtcaaggacaccaagagtcagtccatatccagcccaacttcctccattacatctccacagccagaccattatttactaaggaagacaaagaaata

SEQ ID NO: 39131 - DNA, 1198 bp, Bovine  19866881610791
  misc_feature (1)..(1): n is a, c, g, or t
ncctgggggaaaagagggagatgagcctgagagtcagactagaaagatagataatctagagcctaagggatcaggtaaagagtctttttcctaaatgcaatttgtgagttttaggtttgtggctttggctgcagtaaagagaactgtttggaagggaagggtataattaggaaaaggacttaggagattgttgctgcagctcaagcaagagacagaggtggcctgagtggcaaagtgatagcaaacacagagaatggacagacttgaggaagagttctaaagcagagtcatcctcagaatcatattgtgtcttccttttattgagtcaacctcccaactcatcttctcttagccttttatatcccaccattcactaataccctgagaatatgaaaatggagagaaaaggtacccttcccttcggccataaaacacttatgagaaattatcacatttccagtatcaataggaaagaggccctctgacatgaaacatgcatacccaaacttccatatcaaattaactaatggagacccttagtcttttcaaatgaaagaaatcagtaccagcacagctacaaagtaccaaaagtgagactgaaaattgtcttcattcctcccaacccagggttatgtctgcttgaccatccaaagggaacatggtggtcagcatcgggctgccctgaggagggaggaggctaacgtcccttcccctctgcttccataaaggctcggaccacttcaggactaaaatggatgttgatcatggattcttaaaaggacttgtaaaagaaaagaagtaatacattccctcctgtgttgtctcttttccctagaaaccctctatgaaaggtttttattatccaaggtagctttttagatgtcactccagccctaagtgtatttgcattaagatgcagcttatttcttgtgtctcccagaactttgccctcttactattagtacatttacaacccctcacactcacaacagaacaagagaagtcaaagtagatgaaagggaccagatccatttgctcctaaccaggccccttaagagcctcttagaggatcccaggttacaaaaatgttcatcttttccattcatgaatacctttttgaaggcagagatgggtctataaaatggcacaagaataaagtctgtttttcccactgccccttctagaatcttttcttcaa

SEQ ID NO: 39132 - DNA, 758 bp, Bovine  19866881653728
  misc_feature (1)..(1): n is a, c, g, or t
ngcttagtttcttttatctgtatatttatcataaattgtacttgaattgcaagtgtttgatctttatagaaactatggaaaaataaaaaatagacaaaatttaaataatttgtagttttactcataacacttcggcatttgatgtgtattgttctaaaatgtgtgtgtgtgtgtaccatctgttgaaacatgctatatatactttagtaaaattgagtcatagtatactggtagactacagtccatggggtcgcaaagcgtcggacacgactgagtgacttcacttacttacttatacagcctattttataatctgccttttctacctaatgattatcttgaacattttcccatattcttgtaaaacatgacttttaatgattaaatagtgttccatcatatagatgtaccatattgactgaacagttttcttattttgaatatttaagtggtttcatcattgtagaataggaggtggcaggaattcagcttttctgcatgtggtatcagatggactttctaaaaatgactcttcattctgtctgttgcttccagctcctgctgtttctggaaacttgctgtatcaaccatctctccttttatcattaaggacatgaatcttatcctcttatggtagaactaagagtgtggctgcaacaaggccagacaaactcaaattttaatatcttttaaaaagttatttattttttactggaggataattgctttacagaatttgtgttttctgccaaacatca

SEQ ID NO: 39133 - DNA, 866 bp, Bovine  19866881787451
  misc_feature (1)..(1): n is a, c, g, or t
ncaattcaaggctcctaactctctgtatctaacttttactcccatattatgcatagtacatagtaggtattttaaaatatccatggaactttatcatattatcaatagacaaataaaatgaaatttcaactttttttttttttaaatctaagactgaccttaaaacagaccccattcaactagtttgaaaatctggtagaataacagcctttatgtttatattgggtaagtgatggcagctatataaggtcccaactttgtatttatttgcccgtatgctagttctggaagtaaaggcagagctattgtgctaaaattttatttcttttccttaccttacacttaaaaaccttttacaatatacagatatacaatatacagatattcatgattctgttaattcaaagaacaagcctagatcatctcttgacatagatatcattcccatttaaaagatgggaatcaaagagctagaagtgactcattgagaattagagcctagggctgtaattttggttcattttttccccctagtgtactgtgatgttagctaataaaataataataacaactatttattgaattcttattgtgtcccaggccctgtgctaagcacttcattcacattatgtcattgtaatcataacaactcttaaaggagacactattattagtgtcattttacagatgaattaactcaggcttagagagtttgggtaacttgtgacaaagttctgaagctagcatgtaaaagagatgggttttgatactatgtgaaagtgtttaaccacacacaatgctgtataatttcttgtacaagataacatagataaaaatgtagatggtaggaaagagaagaaggtgaa

SEQ ID NO: 39134 - DNA, 1137 bp, Bovine  19866880172588
  misc_feature (1)..(1): n is a, c, g, or t
ntctcacatcctacatgacccaggaaaaaccatagccttgactagacggacctttgttggcaaagtaatgtctctgcttttgaatatgctatctaggttggtcataactttccttccaaggaataagcttcttttgatttcatggctgcagtcaccatctgcagtgattttggagccccccaaaataaaatctgacagtgtttccactgtttccccatctatttcccatgaaatgatgggaccacatgccatgatcttcgttttctgaatgttgagctttaagccaactttttcactctccactttcactttcatcaagaggctttttagttcctcttcactttctgccataagggtggtgtcatctgcatatcggaggttattgatatttctcccggcaatcttgattccagtgttgattgtggagtgataaccatataacaaattaagtagcaatgaagtttaaattagtcagtgaaactttagagatcattgaatgatgcagaagaaaaggtccttaaggggatctaagaaagactatgagcaggagtttcagcaaagtgtttacattttacctgtgagtacactgtgaagagaagtagaaaaaatgtcagtgctgttgtgagaagagcctgagaaaaacttagatttaacagttgagtgtcagaaagattttattggcagccctgacatttcacagcatgtccacagcggggaatcgagttagcagaaaaagaaaacctgtcaaaacattacatgcttgacttggaagaggaattttgatagattcattttttttcccacgtttttctcagaacactaattacaagagatgctcataaattttatgtgaagaaagaatttcttaagcaagtacatttgaaaagtttgggctaaattagatgagtaatgttcttcactgtgagacatctcagagtctttaatgtgttaatatttcttgtgaatctccaagagaagaacaaaatacacagcattcttcacatttaatccgatgttaagcttttatttacaaatcttccttttggcctttctcaaatatactttggggaaaaatgatatctgatcagctaggataatagatttttgtatctatattaagtcatattaaaataatat

SEQ ID NO: 39135 - DNA, 1445 bp, Bovine  19866880202003
  misc_feature (1)..(1): n is a, c, g, or t
nttatcttgggggcctccaaaatcactgcagatggtgactgcagccatgaaatgaaaagatgcttacttcttggaaggaaagttatgacccacctagatagaatattcaaaagcagagacattactttgccaacaaaggtccgtctagtcaaggctatggtttttccagtggtcatgtatggatgtgagagttggactgtgaagaaagctgagtgctgaagaattgatgcttttgaactgtggtgttggagaagactcttgagagtcccttggactgcaaggagatccaaccagtccattctaaaggaaatcaatcctgggtgttctttggaaggactgatgctaaagctgaaactccaatactttggcccctgatgggaagagttgactcattggaaaagactctgatgctgggagggattgggggcaggaggagaaggggacaacagaggatgagatggctggatgacatcaccgactcgatggacgtgggtttgggtgaactctgggagttggtgatggacagggaggcctggcgtgctgcgatttatggggtcgcaaagagtcagacacgactgagcgactgaactgaactgaaccaaacctttaactatctcaaagctaattagttgtttggttttcctaagttttaatgacaacacttcatacatatgttggatcttcatagcacagtcaagattcatcgaatgtgactgcatttatgatcaaggtaaaatgccttaattaaacaagtaattaggagagaaatgaatgcaaagtccaattagtaaatcttttaactgttcctcccagtgacaaaccaatagccattcctgtgtagtcagttggtttgatcatgagaattacatacgatcctctgaaatgcacaacagcaaaagtaaaaatgctaaggaaaaatcatgaatacaatgtagtagaataacgattagaccgggagccaggaaacctgggtttttggttcaggctgctgctcataagctgtgtgacataggataaaataccttaaccttccttggcctcagtttcctcaattattagttatggaagctggacgacatgaactccaaagtcctttccagtgctgacatttttcaagcttgtgttgaggaactcctccctttcaattcttattttggaagccacttgcttcctagcaccatgcctgtcaaatagcatccctgtcagcaacttacaaggtagatctgtcagtgcaagagagcagcttctgtctgatctagttttgtttacagtggcagcatttcagcacatcctctgcgctttcagcaggaagcagccaggcagcaaaattgctctagcataaaataaatccagctgcagggcatcttcaaaatgctccctatgtgtttttcaatttagcccactattaaaattttagagcacaatttagagctacagtctgcagt

SEQ ID NO: 39136 - DNA, 2909 bp, Bovine  19866880379328
  misc_feature (1)..(1): n is a, c, g, or t
ntgagagtggagtccttacccggcaactttctgtcttttcaagactgtcttctaatccgttcagtagacttacagaatgagttgtcagggttgaatgattttgaaggaccatcttggtctctgaatagtatttggataaatgaaaaagatggcaatgttcatttttcaaatgggagtcatctgtaacaatggggcatctcacaaatgactgataaaggaaaataatgcctttttctattatggagtcatttacatggatcctttgggggtgggacctttctcaaagaaaatttatttgactttagttattagaggatttaacaagaatggggttttgtggagttttgggtcttgcttttttctattgtaaatcataaaaatgtgggtggttttaaaataaaacaccttttaacctttttatccaagcacatgatgtatcctacaagttaaatagatcccttaaagatcttctgatataagaattctaatggaaggcaaaaaagcataattatgtggtcaagcagagtagtacagtctcttaatttgctgtcaaattactttaaaagttttaattagcataattaagtagagtttaagtgataagatatactactttatgttttttatatgtatttctctctgtgagtcactgcatttaataggagcctttcagttttaattacctcctctactgttggccaggcgtgaagcacgaatcataacaacatggataagtggataagggccactacaagccagattgttcccaacctcacctgagttctcagtgcttttaagtgattccctctattgtcttcatctgttggctttcaaatatcttgactggcacccacgttttacatcacaattcagtatgcacataggcgtgttatagtaacttattatatacagtgattgtcttcactgtactcatggtactctggtttttttaaaacatcgattttggaaccttttgccatcagttcactgaaaaataccaagttgggcaactcagtctgccactctccctggtgatcatttgccatctcttctgctctcatgtctgaccccttctcgcaatgttaccagacgccctgaccccctgctttgcagtgagagagccactgagctgtgactttcttggtttgtcaccaacctgtgagtttctgcactggtaccatccgttcatctgtgtgctccctcccttcatggaagaggtttcttttctccacacctgctctagataccactctttgaactgtggccccacagaccgtgctgggtcagtgtgactggcagtcgtgcctagggtgtatgacacatgcccataaaccttaaaattgaaagtgctcagccccataaatccccagatgcttatgtatcttgataccacaaacttctggtgacctccactaacaggatagaagggatgaggtagagagagtcggtgacaaacactggtgccactaaacatgggaagataatgaaatgtgctgaccctcctgctgggtcacacctcctgctgcaaagatgtgaattgaaactcaccttggtgaagtcaagagaggttgtcatttggcttccagaatgatttgtttttgctttgctagcactttcagcaaaataagcaaaaagctgatatggtgtagaaataaagcaaaaactgtcattatcccaggtttaaaggccacagtgactcttctcagacttgaggctacattaactgtctgtgtctggttgaaagagtgagtggcagtgtttgtaggaatcgcaggactcttaaactatgtgactgccctctggaatcctgtttgaatatctcaaacctgtgctcccctgagttcttaatttcagtctgtctaatgcgcagggattggaaggacttcattggaaggaatgatgttgaagctgaaactccaatactttggccacctgatgcaaagagctgactcatttgaaaagaccctgatgctgggaaagattgagggcaggaggagaaggggatgacagaggatgagatggttggatggcatcaccgactcaatggacacacgtttgagtaagctccgggaattggtgatggacagggaagcctgggatgcttcagtccatggggtcacaaagagttggacacaactgagtgactgaactgaactgaatttaaataaatataagaatcactggagaattttcattcctcttataagaattcattttaaggacttccctggtggtccagtggttaagaacctgccttgcaaagcaggggaggcgggttccatccctggtcgggaaactaagatcccacatgctgcagaacaactgagcactgccactactgaagcccaagcaccataactagaaagtccgtgggctgcagtgaaaggcccagatgacacaaggaagatcctgtgtgccacaactaagactggatgcagccaaataaatattaaataaatattcattaaaaaaaaaaaaaagaatgggtcattatattacccaagattgagaaacactatgaaagcctttaggatgaagagacctgaacaccttacctgtaacatatagtcccaggcccacagagtggtatgattgtcaggatcctatcaaatctggatgaactagagtctcatagctcagttggtaaagaatctacctgcaatgcaggaaaccccagttggagtcctgggtcaggaagatctgctggagaagggatagcctatccactccagtgttcttgggctgcccttgtggctcagctggtaacgaatcagcctgcaatgtgagagacctgggttgggaagatcccctggagaagggaaatagctcctgctattctgtcctggagcactctatgactgtatagtcccatggggttgcaaagagtggacacaactgagcgattttca

SEQ ID NO: 39137 - DNA, 2292 bp, Bovine  19866880466266
  misc_feature (1)..(1): n is a, c, g, or t
nagctatataatcatctcttggaataccaataaaagcacatgtatttctgggatggttaggccttgacgtgcttggaaacagcactgggcttgatggctccctgggtttcttccaataatatggtataaaactggaaaataggagagctgttggcatctatataagcagcagtgtactgtgctttcataccacattgtaaacatataaaatttttaagaattaccatatgccaagcttcttttgttcatgctcaatacagataaaagtgtagagaagaaaaaatattttcacttaaagatgtgtgagaacagtatttttctatatattacgagcagctgatgatctcaaaaccatcttctgagagactaaaactaaaattatgttgatttatatctattcaattgacatttccagaactgtttgtcaaattgttctgtggatccactatatcctttagtaattttaattgagtggggcctatattctattatataatatctttacagacattaatttgttacaaaatatttaggaatacaaaaatgtctactaagtattttctgaatttaacatcaataaggaagttaaaacttgtttttgaaaaaagatctgtctttcattccttcaaaacaaatgaactgatttccatcagttttgattctaaataggaatgatctcaaggagtttattagtaaatctgggggaaatgcagcatatgaataagtgaataaatataccacaagacagctatcaaaggagtgggtcacataccatagacgttcagagtggggtgacgttatttcttgttagggtgataggctaagcaccgaagaatttatacttttgaactgtggtgttggaagaagactcttgagagtcccttggacagcaaggagatcaacccagtcatcctaaaggaaattaatcctgaatattaattagcatcaactgaagctgatgcttaagctgaagctccaatacttcggccacctgatgtgaagagtcaacttactgaaaaggactctgctaatggggaagactgagggcaggaagagaagggggcgacaggacgagatggttcgaaggtatcactgaatcacggagttagaacaaactccaggggatagtgaaggacagggaagcctggcgtgctgcagtccacggggtcacaaagagttagatacaacttagtgactgaataacaacaaagaagcatatgtaatagttagttaaatcaacattcataaatctctccaattccccaagggagatagagggggttgcattcagaacctgttaataaagcatctcaataaagcatctcactcaccttcttactagtcaactgaacatcacaactcctactctgtctacctttcagggtcaccatgagggtcaaagtcaaaacggaataatggaggggaaagcacacagctgacatagtagagacaaaatatttatcaactgtaagaatattagttataaataaatgagttactcttgtaactcatagaaagtgtgaaaactgctcagttgtgtctgactctttgtgacctcatggactacactagtccatgaaattctttaggccagaatactggagtgggtagcctttcccttctccaggggaatcttcccaacccaggaatcgaactcaggtctccctcataccagctgagccacaagggaagcccataattcatagggatgacttcaagcgtaaaacccagattactgcccagaggggcagagagacagccatgacttggagctgactacctgatggtggtgccttgcaaacggtctatcttcttattgagctcagcgatgatgctgtgcagttctgtgatgcgttcctcgtaccgaagtgtcgttcgctcctggacgtcctcatgctctctcatgaggtgggactgctcacactgggatcaagagaacaagacagaagtgccaatgaattgacatacctaatagcaagagaggctaagtcttacagcctcggatcatcacaacctcgacacagagtatgccccaaataaacacatacctgcttgttggcccagaagacacatcaacagctgaacttcacaaagtccctgatggccactcaagtctctacctttttagctctacatttccaggtggctctagtggtaaagaacccatttgccaatgcaggagatgagatgtaggttcaattcctgtgttgggaagatcccttggaagaggaaatggcaacccactctggcattcttgcttggaaaacccctaggacagaggaccctggcggg

SEQ ID NO: 39138 - DNA, 1335 bp, Bovine  19866880470282
  misc_feature (1)..(1): n is a, c, g, or t
ntccttggaggaaatatcattcctttagagaattttctaatgtggcataacatttaattctttaaatatcactgtgggaagaacagaagctttttaaagtctctcagactcagtaaacagtgtgttttcttctgtgtaaattccaaaagtccgccactaatccaaacagcgctcttcaaatgagagtaaatagaggaaaaacttcaactgaaaggtcatcaaaagaacgttcctaaagtacaaacaatagccatatgcagttgctactaacttcaggtctcttagagatgcaatgaagtctgggtacacactcctgttcacagagacaactgcagtcagggaatatcaagggactccttagaaaactttttgtcagagatcgacggcataggatagactgaaaattgaacagaagttggtagaatacaagagatgtacaagtggtggccctgctgtttctataaaccatttacacccagtttatagacataaaagaggctgaagaatgaggtcacggccacaagggccgaacaacagccactatatctgcacagtactcttaatgattttcctaaaatctttataagcattgcctaatttggtgataacctctgagatcaatatagattcatacccagaatcatcaatttcacaaagctggtcactatgtgaggtttttaacccaagtatgacactaaattttatatgccctctcctatactccactgaactaacgttatcaatgagtttccttctaaaactcttgtcattgaagtgttgagatagccaccaatctaaagatttcagttccaacctaccctaagcaattaccattcattccttggaccatttagaagtgctgtacctctggcaattcaatacaaagattccctacttcaaccaaactgcaactacccttccttactcctaatgaacttgctttgggtctccagttacctccaggcattcatggaacattcatgggatttcactaaatattcccagttacctcctctgaacactcacacctttatccacccccccaagtccaatgggcactttatgactacctccccaacagagtctttcatctccttgatcttctaacctattacagtgggagggtgggtatcacaacccagggaatctttaccagacacctcctctgctcctggttcactgatgtgtgctggacacagatatacgctcactggtgtctcaagaggcagtgaaaatcacagaatgtcagagtttaaagaggatattgagctattgtgtataatgccttaacttgaaagaagaaactaagattaaaaaaagaaaaagaaaataagg

SEQ ID NO: 39139 - DNA, 2997 bp, Bovine  19866880478750
  misc_feature (1)..(1): n is a, c, g, or t
ngactagataggcagacaagacaagaggattcacagtgaagctccgaggaactctatttagaatttgaaaagaccttgatcctgggagagactgaaggcaggagcagaaggggacgacagagatgagatggttggatgccattaccaactcagtggccatgagtttgagcaagctccgggagatagtgaagtacagggaagcctggtgtgctccagtccctggggtggcaaagagtcagacatgactgagcgactgagcaacaacaaagggggcaaaagggcagcaaatgaaattcaaaagtatccagcagaaatagaagagactatgatttcacagaatccaagaggggagagagtttcacgaaggaagggtggtcaactcttctgaatgctgctcagaagtgggataatttgaggatgtaaaactatcaccttctctcgtatctttcatcagcattagtcacaaaaggctcacacccttaggccaggcgtcccaagtgcaaccaagctacttttaaaaatcagcagatgactcgaggcagaaactaaatgctttgtctggcttaggagacatctcactcagatccttagacctgtgtgcccccatctgctttggtctctctcttcctacctcagtttccaagctgctgaacttctagatctgatccgagtccttgagatcttctagccctgaaaaaatgattgtatgagttttatagagcgctgtattaattttctaggactggatgacttgcacagcaaaaatgtaaaccactctggaggttagaagtacaagcacaagctgtcagccgagctggctttgttctgaggcctctcctcaccttgtagatggccatcttcatccttgtgttcgtgtggccttccttctgcgtgcatctgcgtcctaacctcttcttttaaggacaccagtcatattggacaagggcccaccttaatgaccttgcttaaccttgctgtcgttgttccaagtcatgcccaactctttgcagcctcatggactgcagcacaccaggcttccctgtccttcactctctcccggagtttgctcaagctcatgtccattgagtcagtgatgccacccaaccatctcatcctctgttgtccccttctcctcccatgctagggattgaattctgaggtgccggggattaggacattaacatatgactggggggacacagttcagcccataactgatgtattagtctttgctcaagccttagacatgatttaagaatcttaccgcgataggcctacctttcctaggtctcagatccattcacttagtcaatttctaaatgatcttcttgacttcctgtctttctcttagtgcttttttaaattctttttttaatttctatagttttaaaggttactttccatttacagttattacaaaatattggctgtgttcctcatattatgcagtacatccttgagcctatcttacacccaatactttatctcgcccactctctcacccttctgttgcccctcctaccttcccactggtaaccaccagtctgttccctattgctgtgagctgcttctttcttggtacattcatttgattattgtattttttttaggttccacatacaagcgataccatacaatatttattttcctttgtctgacttatttcaattactataatgcccttcaagtccattcatgttgctgcaaatggcacaatttagttcttttttatggctgagtatttcattgtatggggcttcccaggcagtgctagtggtaaagaacctgccagccaattcaggagacataaagacatgtgggtacagtccctgggtcaggaagatcccctggaggagggcagggcaacccactccagcattcttgcctggagaatccatggacagaggagcctggtgggctacagtccatgggggtcacagagtctgacatgactgagcaagcaagcaagcgagtatttcattgtgtgtgtgtgtgtgtgtgtgtgtgagccgtacctgctttacctatctgcctgttggtggacactgaggttgttttcatgtcttggcaactgtaagtagtgctgctgtgaatgtaaggatgcatgtatcctttccagttatagttttatctggatatatgtccaaagtggatcatacggcaactctgttgtcagttttctgagccacagtccctccaccaatttacagtctcacccttccagtttagactttctgataatggccactctgacaggtatgaagtgatacttccttgtggttctgtcttgtatttccctgatgattagcaatgttgaacatcttttcatgtgactattggccatctgcatttcttctttggaaaaatttctattcggttttctgcctattttttaatcaggttcgtggtattttttggatgttgagttgtatgagctgtttatatatgttggttattggttggttatgacccttatcagtcatatcatttgcaaatattttctcctattcagtaggctatcttttcatttgttgatggtttcctttgctgtgcaaaagcttttaatttaattagcttttaagtttaatttggacagatcaaaaaaaaaaaaattgctgtgatttatgtcagattgctgctgtttcacgtagcctttagctttgtttggctgtcgagacttgctttaatcactcgggtttaaagttgccacaccgttggcctctgtacacagtaattcatcaggaatacacagactggtcccaggaaaattcactgagatgtataggacctttcttcactgaagtttagtgctctacgccttaggaagttagctttccagaagtagtcctttttttcccagcagctcttcagttcagactagccagtgatggctaatactctaagattgttattgggggtggggagatttatttcatggctatcccctgagaatatatgatcatataattagagaatgaaaggattcgcactgtgcag

SEQ ID NO: 39140 - DNA, 1523 bp, Bovine  19866880482888
  misc_feature (1)..(1): n is a, c, g, or t
nttactctttggaagaaaagttatggccacctagacagcatattaaaaagtggagatattaatttgccaacaaaggtccatctagttaaagctatggtttttccagtagtcatgtatggatgggagagttggactataaagaaggctgagcactgaagaattgatgcttttgaactgtggtgttggagaagactcttgagagtcccttggactgcaaggagatccaaccagtccatcctaaaggaaatcagtcctgagtattcattggaaggactgatgttgaaggtgaaacgccaatactttggccacctgatgcgaagagctgactcatttgaaaagaccctgatgctgggaaagattgaaggagaaaggagaagaggacgacagaggatgagatggttggatgccatcactgactcaatggacatgggtttgagtaatctccggtagttgttgatggacagggaggcctggcgtgctgcagtccatggggtcgcaaagagtcagacatgactgagtgactgaactggaccctaactttaaaatgtagcatctaacatttggaatttttcttgaaataaaagtcccaaagcaataagaatatttattagctacacttattacagtggataattgaaatatttatatccatctgtaacttttagttactctgttttcaatagctgaaattcacagaaattctgtgaaactggataaaattccaatagctgttttcctaaatatgaagagccattttagtcgtatttcactttatcacctttcttggaatgaaaaactaagctgacagtgtcaaatgttgaactgggaggcatgaattggtaaagacaggtttggaaagacttgctgtgccaaagtttataatcagagtagcaaacatgcccctacagtgaaagcaacctgtctcctagaattactgtcctcaggtagttagaaggagcctgtacatacttgattacaccaatgaaaatccactgtttcgcctctccttttacaacatttatgccatttcttggatgaacttaaggactgatgaaatataagcacggatcttggattcttcctttctctggctgtgtgccacccgcccccttttcacttttccttatttagggaccgtgcgtttctaatcagttactaacaatgttatagacaaaaattctcccaagtttttctcctctttcttcccccacctcctcctttaccatcatcgttatcatcgattcttactccagttttcaaactatttatgttgtcttaattatgtcacatttttctgctagtaccactttctccaggttcagaaattgaaacctgcgtaaagcaatcgcagtgttccttttaactgactttttgtttttgctttcccactcagttaaagattgaatattttttttaaactgacagtctggaacaaaaacttttttttttaactcctagtgaccagcccgaaaaatctgagatttaacttaagaggtaaaaataacaaccatgcccactgagta

SEQ ID NO: 39141 - DNA, 1713 bp, Bovine  19866880494849
  misc_feature (1)..(1): n is a, c, g, or t
ncaaactgagaagcggtgtttgggaggagttagagagtaaaatgattaaatcagatgtgaagagaccttagaactggatgggaaatggaagccctagttgaagggaaggtagatgaaagcgatggaacaaggtggttttgcttttgccctgtctttaaaaagcagcggttagagggggcctggcacccttagaaaccctgccatctactaagggcaagaatgtctccctgtgaggtccctgtaggccagaactgcttttgttgttgtgttcatgcctggcaaaatgtcttggcatacaatcagtgttggtccatgaatggtaggaggagcagcctttggagtaaggggttgggagttgagagaatgaaattatggtggtaatcactgttgctggaaagatagagatttaggggttgaatactggcattgaaaaataaacgtgattgtatttagaggcttacatttttgttgtgcttacgcgcatgtgtgtaacaactgagatgctgacgttatagtaacactgcctgcagtgtgggatttttttttttggtttgtaaagatgaggctacatgttgaatgctttctaaaaatggcatgaagccttttctgtgactcctggagtggagtcaggtcatagagctttgtctgacggaggctatcagcaacaaatgcccatgttcagaatatctagggattgaagattcgtgagaaggaaatgtgtagcaggctgcttggcagagaaaggggaattgactttttcttcccttttagcattggatagatgtgtattgtctgtatatgaattgataaagattggttatatgtataatttatataccaacatagttttatgtactgatatgttcttactgaaagatctaatgggatactaattatcaaatacccattggtttttaaatggaagatcttattaaaaggtactttattaagctgcaaataggtactttttctgtaatcatttgtaatcttatagcatgttagggccgttctcacagagaagccatgtgttaggcatgtgtcacatatcactctcacatttttcatgcttctgaaaatgtttttttttaatggggttttatgctatgtttgtttcaaataaagcatctccattcaggtgtgctacaaactgacctctaagcctattcagttgtttagttaaatggggtttgggggcggatgtccacacccaccatcaggtaagagggctctgtcttctccctcaaccatgtgctcaggtatgagagcagactcctacaaaccctgctatgtaggtagacacttcattgtgtaagtaggcaggaaaccagtcaccgagcctgttctctaaagagcattgcaaatgctctgacaataccttatgtgaaaaattgctttgacacacacgtggcatgtctgaggtgggatcctgataacctagtcagcatcaggtgaccagaagtctccaggctggggagctgcacacaggattgttgcagagtctgactgtgggcaccatggcacagggtaagactgagctcctgaaaatctcctttgattccctcgtccttggatggagctccatcttgtccttgggtggagtgcctgttccatgtttctggccaatccacaggtcttccacatcatgaatttcctcagtgagaagtcttggcccacctccactgagctcatttacaaaggctttaatgttgagaa

SEQ ID NO: 39142 - DNA, 2055 bp, Bovine  19866880533750
  misc_feature (1)..(1): n is a, c, g, or t
nctgactcactggagaagacccctgatgctgggcaagattgagggtaggaggagaagagggtaacagagaatgagatggttggatggcatcatcaactcgatgaacatgtgtttgagcaagctccaggacatagtgaaggacggggaagcctggcatgcttcaatctatggggtcgcaaagagttggacatgactgagcaactgaacagccaacaacatagctgccccagcccttgccccagaaaggtgcatagtgctgcctgatgacggtgcctgaaggagagacagaaggcgtgctgcttactctgcttatacgcttaggaaagcatcactttctatctgagcagtggtttccacttgacattataatgaaatccctataagactattcctagaagatgctaaagcaggatgaggcagtgacccaaagtgaaagctcaggttgaaaggggtcaggacagtcaccgagagtgccgttcaagtgcctccagcaggatattctaaaaagagtctcacagcccacctccagctgggaaacatttctagaaaggaggggaaagtgtccttttaaaaacaaggtatttaatgcccttttgggtttggagcggcactgggttcggctccctgtagtgaggaggtttcttcatgctagagctcccagtatgttctgcaaggaaagaatggacatgtggcctcagcttctggtgtctatttttatgccctggttgtgtgtaggggaaaatggaaatatattttcagtatgtgtgtttttcccctggtgtctgctgactcccacggaagctgtaaatccccaaatccaaacataagaagtccatgtcaggaggcaatgacccaccactttggactccattcaacatctacccaaagaatatccttggcaaagagcagtgacagcataatagtggtaaaaatagcaatcatgctctcagttgtcaactaaatataactcttaatggctaaagttctataaactaatcaatttttttgttctaacaaaatagtttgaaaatcaatgttaccttggacacacaaattcagtatgatatcagatattccaattgtcatataattagttgttttacatcattatcttagaatttccactgttccagtgtttcctatacagagtgaagggagaatagaagaaataggatttactgtatacttttctttctgtaagaaattatatattctgtatacagtgaaaaagataatgctgatcagtctatagataattttaaagagaaaatgagtttagtaagcaatggagaggacttcccaggtggtccagtggctaagactgcatgccccaatgtaggggacctgggttcgatctctggtcggggaactggatcccacatgtagttaagaccggcaagccaaatcagtattcataaatgaaacaatggagaatattggagccttggtttcaggtaaacctcctggggaagccaaaggttgaagggaacttgagattagtcaactggctgccatgtggttttgtgaagctaaggaagagcggcatcattgacaaatgagtgcttcagtagacaattgcccagtgagaacctgttactgaagagaaaggaaagtgatttagggtgcgcagtgcaaggaaaggggcaccgaaccaggagaagtaaagttaaaactagaacagactggggagggttgaaaggcaaaaattcatgcccattgtagttctcttttcaagctcctctaatgaaaaacagatatgccatcatgtctgcaagatttattcattcaagaacatcagaatcaactctacctttcccctgaaaggggcaatgcattaaacctttgctctacgcagttcaatcaggagacagacgaggctatataccgttttcccctgttataccgttttgtgcctcaagacattttcctttacagcactaaattggggttgtcatgtgaaatttacgtgtatgattgtttgataaaggtcactctcccccattaaactacaagttccccagtgacaaaaattttgtcttcttttttcgctaacca

SEQ ID NO: 39143 - DNA, 1671 bp, Bovine  19866880574977
  misc_feature (1)..(1): n is a, c, g, or t
ntgggtcacctgttgatgggctcaggtagatctgatgcctctgcacgttctgtgtgtttggggcaggtacaacacgcctgcctctgtgggtttcaagggcaggaagcagagctatgcaggacagcaggcttcctctggttttcagacctgctcacccagaaccagtctggacacgtctctcagatggatgtagatggccttcaggccctcttcccctactgtgtcttattctgcagttactgtctatctgtaattctttggttttgccatttgttaaaccaagcctctgtgatgttgctagcttcctcgcactccagaatagtttttaaggaggaaaacaaaaatggaaaatgaaaaaaataaatattgtagaatttcaggagtcactctcaaaaaataagagaaaccggactacattccaaagcaggggattcgagttcaatccctagtccaggaagtaagatcccacaggccacagtgcaactaagcaactactgaagcccgagcactctggagcctgcaaaccacaagtggagagaagcccatgctctgcacgaagtccccagatgctgcaagacccaatgcagccaaaaataaatatacgctcaaaaaaaagaaaggagagaaatagaaagagaaacctctggaaggaacagaacttccctggcactctgaatccccaacagcaaagactgtctccccatgaaatcagtcctgcatcccatagtgtctccagacaaatggcacacggaggagggggagatggtcagtggacacttactagtgccctcagttacacgagcctttctgtcattttatcagggagaggagtccaactggtatcaccgatcagccagccgggaaggagcatgctccccagaagcctcaatttctcaagcaaagatgatgagagtcaatgactgctcaagtgtcagagatagaatactgccttgaaaatcaccagttcaaccgctttagttgatgccaaaggaaaagggaatgtagagaaagtctgctcaaaggtcacacagcagcacagaggtggtgctgggattagcctccatgctccttgcgtcatcatcccaattcaccctgttaccagcacactgcctcccgacatccgctcttttacatgctgagacatggacccttttaaactgacacaggttacttagatgaccagcccttttctgcgatcctgtgcgcttgctattggaatccaaacatcaatcaccgttatgtcacacacttcctgaggagtgcatgtgactgtttatggaagcagcgtggggaattcagatcaaatagtcagtgagtgactcaaaactggagacaaagacagccaacacgggaaaacacatgtgcctttttctaatgggctagaatccaagcatgtgtaatactacgccctccacttcctacgtgctggtgactggaaatcttggggttagtccaaggtcaacctacatgcatgaagggaactccctaggatggtcttagaaaagcatgccctcccccaaacgggtaaatttagggcacatcgttccaagaaacaatcgtaactgatgatcttttttccaactgttatgtcacacagggatttatactttttccttactgatttaagaggcagggatttcatccagaaggatttcttagaggctccttcaa

SEQ ID NO: 39144 - DNA, 5245 bp, Bovine  19866880624202
  misc_feature (1)..(1): n is a, c, g, or t
ntcttgagtgtcctccgaggtgtgttttgtgactccgacttcacaacagtagcagtgccacatgagggagtactctgtttaaagagttaatttcaacctgggatgtctagttaaaaatcaacaggcgagtagtggatgcttaaaaccccattatgatcaaaggaaatttggaggatgccttggaccccttcatgttaaagtctcctaggaatcatctctggaatgtcaaaaaccattctgggagaactgttttattctcagttgcaggttggtcaacatgagagactcctcttgtaagccagaaaaaaacagaaaaacaaaaaacttcttaagtatatacctaaaatcaggaaatttgaaaaaaatagatggcctgaaaattggaagaagttaaattttattgtaacatagtgtgggctgttatataatttggtggtgggataaaaaaaaacgacctgaaaatgtatccctctgactgatccctaactccacctctctgtgtccgcttgtacactgtgatatgcaagaaaaggcagagggtccaagtacctcatagtggaacttgctattacctaggatcaggaaaaatgtgccttgttagggaagtgccaaaaggtaaagggacaatcacagtcccttcacttaaaaacattttagcccaaaggaaacagagactgggcttccttggtggctcgatgtaggagagccaatgtaggagacgtgggttcaacccctgggtcgggaagatactctggagaagggagaggcaacccattccagtattcttgcctgagaaatcacatggacagaggaactacagtccactgggtctccaagagtcagacataactgaacaacagaacaggcacacactcagctgaaaaacaggacttgcacaaaagctaggaaatgttccttatcctacaggctgttttccatcactagattcagggactcaaaggtcatcttcctgactccaggcagtagctgccacagctttattggtagaagttaacaagcttacctttgggcagccactggaactccagacccctcatcaagtatgagagattctggagatcaaaggccaacattggatagctggtgatatcctctgaagtactaagctttgatccttgactccccagagctttccataccctcaaaacttgccatatcctcaacttggctatactttatttgtagttcagtttctcagtcctgtctgaggctttgcaaccctataaatcgcagcactccaggcttccctgtcctccaaaacagttaagtctttctttaaaatcttccagcaatttcagtgtacacagaacataattaaagcatcttattgtgacttgagagttcctcctctaaaacccagggcagcctacatctattattatgttacctcacattctggaataacattttaaatgtaatggccaaaatctgtgtgcttagtcccacctgactccttagggacccatgccccctctatccaccaccagcctcctctgtacaagggatttcacaggcaagaatattggagtcggttgctacttcctactccagaaaattgtcccacccagggatggaactctcatcccttgattgtcctgcattggcaggtggattcttaacctctatgtcacctgggaaaggtaaattctacgtatttcagcgtgcagtgtcttggcttatgctgacctacaactgtcaatcttctctatctgggtaactcttcttttcctccgaatctcaactaggagattttttaaaaggtattgtcagcaagtaacaaaaaagctctagaaatctagtttacagtataatgaatatagacaattttgtattggcaatcatcaaagttcctaagggacaatttaattagaacgaattacataagcgaagaggtattacttgttgctacaactgcaatcatttcagaatacgtaatttagtaaaatgttgcacggcttaattttacacgttatacgtcaaaagtatttaaaattttttttaatctttatttctattttctttattttctcagatcaaaaagttttctactcaggcagagacactcatactacctaaacatttttgtatgtatcaatagcctataacattacgtacatatttttcgttctcaggccataaacacaacggcaagccgagttcgcatttcctgcccaaagaattaggttccttttgaaacgggttgaaacgaaggggacggaatctgaagcttaggtggagcagcggaaggggttgaggctcaagaaacagtggaggctgcagtagtactgcgtagtaagagtgaaccagcacccgacagaccattttcgcgtgttggccacaagacacccacgacagcatcagaacaagtgaagtgcctagtacagacatattaactccagagtgtggaaacagccgcacagtaaacttccggaaagaagcggaaagtgaaccgagggaagaaggcttcagacttccgcttttgcctacgcttgcgcatgttcgtttccgccgttaggcccgcctctcggcttagtggtgcggacggaggggcatggagaaggtggcggcgcgggagctgtttcccaagacacaggggtaagctgactgggagaagtgattgaaaagaaacaaacaaacaaaccaggaagagcctaggttgcgcacgcagcctgggacaaacaagtccgcaccttcctggcactattactggcgtccatgggctcaggaaggcgagaatcaaaactgcgaatggagacttaatggctgagggtagaagggcgagacggttttgtaaccaaaatataaaaaccaagatttcattacctagtactagagagactttcctgcacttgacgcagtggaaagggggcctccagaccgtattgcaggtgtgaccagtgatggtgtctgtttcgttttctcagccacaaaaaatacagagccttcttgaagaaggaaaaacgaaagaaacgtcgccgggaactggctagactgagagactcaggtaatggactcatcttgttttctttgtataaacttgttgcccctactgcggcccaaaattgaggccccagtgtcaaaagagaggtgtgtgtcttatgacatgcagggtctggttctctcgaaattaagttataaccatattagagaaaatactgacgttttaaataagacagagaaaggtacgctgaatcactactatttgtaaatactcgtaaagaacttgatgtcacaactgtaagaattgtgaatttcagcagctactgtgttaactacttagtcgatgttttcccatatactggttgagtatattaattagacattgttcagatttttctcaaactgaaatagagtaaggtacctatattgagccaaatggtaacggaaactgttgtttttcttcaactatttacaagcataaaactagtcgtggaatttgactgtaaacatacatacttaaaaccaaataaaatcacacaacccattcatgtttacataaatgtaatactagggattatatggaacaaagtcttaaaaaaatatttgtacagatagctgttactggattatgtggtgtttgtagtgctttattattgttgccttatagttgttaaacacttttttcctgttgggaaaaatagtggaaccttaatttgtccagtgataatacatctttggctgaaaaatggcagaacctaacattttcccataaacttgtgtgtgtaatgcagtaaacttagtactgcttagccaacatgcttataaattcagatggatgcactgctatcacacaacagtatcggcttttaatgtttgtcatctacattttccagaacttgctttttaagttgtccaagacagttcttggactgtagagactgtgacctcaagtaaacaggatttttggacttgagaaatggccatagaggttttgtttaccaatgatgttcccaggcagtgattctgctgctgctgctgctgctaagtcgcttcagtcatgtccgactctgtgcgaccccatagatggcagcccaccaggctcccctgtccctgggattctccaggcaagaacactggagtgggttgccatttccttctccagtgcttgaaagtgaaaaatgaaagtgaactctctcagtccctgtccgactctgtgcgaccccacagacagcagcccaccaggctcctccgtccataagcaatatgtggcatatttggcatggaaaaatcattgtaatcacacacaacaggtgacttgtttatattattaactagaaattagtccattagcggcagaagaaaatgtcaggaaaagtaggtaggataggttggagttacttactccttttcacactcacagcaaatcttggtaggtagttcatttgaaatcttcctttctaaaaacagatttagtatgtttataggtaggtcactactttgctttttattatatagctagtgccgtatctaaaactaagcagttgtctgtcagttaacagctttgctcctagttctgtatattgtgattcacagttcttaatctagagagacttaatgtatagaataaaaaatacttctgtttattcattgtagtacacattgaatgagccaacatattccctaaaatatagaaagtattactataagagtgaattggctaatgatttgtagaaatttctctaacattgatcttgcagttgtaggtaatcttttcagcatctagtttaatcttggatagcatgaaataaactatcttgtcacaaattaaggtaaaatgtaaaaacaagctacaaaactgaagtatgattctgtttttgtttgaaagaattacatgtataatacaatgaaatacttgctactttaatgtatgctggcaaatatttgattatacttgtagagaaaatacctcacttgaattgttcataattattttttttggactgtgtgaacttgattttggaggggttaaaggtttaaatgagtcagcaggtatttttgagtattagcaggtgcaagcaatgtctacttagtggaaatacctctgtaagtaattcagaattatatcctctgccagataagtgatttatctgataattgtatcagaagttactaccatttgtgggcttattctcttttaatttagaaatctgaaatagtaaagtttattggttagaaaggcagtttaatatagaacgggtaagcctttaaagacagcccactccag

SEQ ID NO: 39145 - DNA, 1299 bp, Bovine  19866880646294
  misc_feature (1)..(1): n is a, c, g, or t
ntggagagtgagatgttttgtccaaggtgggtagatagttgttcttgaggatcatggttcagcccaggaggggaaccctgagtaatgaaccaatgatctacctgctcccagaaccgacagccctgccagcagacaaatagatgacaatgatgggcaggcctagcagctgtgagaagtagcccctccaatctcagccacagcccccgacccccttcctatgctgagtccaccccagagagactgttgacacgattacatatcctcttcctggtagccccgccagtctctgcaacaaggttggttgtcagccgtcaagtttatgaagtctcaccagtgctcctcagccagaagtgatttttgtcccaagggctatttggctatgtggacaccttttcgatggtcacacctggagtactgtggctagaagccaaggtgctcatagtgcacagaacagtcccctacagcaaagaatgtccaactcaaaatgtcagtggtactaacgctgaaaaaccatgagttaataagcaagtggcagaaaaatcagacacgtgagtcgtttttaagaactgatggcttagttgccaaggttcaagagtagccctgtataaacacagtcgcagtagtttatatggggaatggcgtgtgttgtttttcgatcatttgttttgttttgttcgttaagatcgccgagagggtgaagctctccaagaccaggtctgaatcttcgtcatctgatcggccagtcctaggctcagagatcagcagcatcggggtgagtgtttatgagttgcaaagggacatgtcacataggagaactacacaatggctcgtccatgacagaagcactgcccaggggccctccaataaaccgggtgattgtaataggaaatcatacttgatttccttccaaagggtcaggttaaaatgcttagtggttcgccggtagtgaattaccccttcagctttaaagggagctttttgtttctctagttgaaaccattcagaaagaaatgattgaggtcttgttactggcaatacagatcaaagtcttgaaatacttgctttatatcaccctgcttccccagagaccaagtgagtcaggaagctctaagagaacttgattattcgcacgtccctcttgaaagggaaggtgctctccactgagcaggatcgctgcctttgaagtacagccgatgctgggacagaccggaaccttccagctcagttctggagttttcttatgtagaatgccgaataccctggggctgtgaactgatgtatagtgaaaagagaataatt

SEQ ID NO: 39146 - DNA, 723 bp, Bovine  19866880670316
  misc_feature (1)..(1): n is a, c, g, or t
ngtgatttaacaccttcaaggaaggtgggagtttccacttgacttttaaaaagaaaaaacacccccaaacctcagtgcttgggcatctgtgatataaaccctcatgaaataatgattcccatttctaagctatgtatacagtataattatgttattttccttttttcctgtagccctgtgggttctttcttggctccatatatctggggcttgattagaaatccatgctaaccaactcagggctggctattggaaatccattgtgactgacagaacaaatgaggtctctttatgtttagtcagcagaatctgcaacctgcttgtgccagcgagggcctctgaggttcggggatcttgaaaaatgcaggggcttcgcttacagacacaatatccaaatggctcccacttggaagcggggggtggtttgcgcccctagtttctggagcaatcacgtcattaggattaggtgagggcattttctgcacagcttctctcttccctcctcaagcaaagcgattaccatttaaccacatggccagaagtgctggcagtgtaaaaactgagctactacaacttggaaggaaagagcaaaagtggcagtgagtcagtcaggagggtagtgaggttccctacaaggcagcattcgggtccacctcagctggaggctccactataaaatcgacagccccggctggatcaagacagcagcctgggcatgcactg

SEQ ID NO: 39147 - DNA, 1672 bp, Bovine  19866880731944
  misc_feature (1)..(1): n is a, c, g, or t
nctttcctggaaatcttaaattgaattcttttgacacacctgccacggtacttgatgttatagcatgtatataggtttatgcaggttgtgaaagtcattcggttgtgtccgactctgcgaccccatggactgtagtccatggaattctccaggccagaatactggagtgggtagcctttcccttctccaggggattttcccaactgagggactgaacccaggtctcccacattgcaggtggattctatagcagctgagccaccagagaagcccaagaatactggagtgggtagcctatcccttctcccgaagatcttcctgacccaggaatcgaaccagggtctcctgcgttgcaggtgggttagctgagctaccagggttataatataccagggttataaccaggttaagccctggttatattataagtttatatagggaagccctgcttattatataggtttataattaagcataaatgtttaatatttattaaagtcactctctccccaatggaaacttaagttctaatgtaaactgtactatactttctcttccttctccttgttcctttcccatcacccccttatatgtgaacatttcctaagatatggtgcctctccccatttggacttcacatcctttcaaccatagggagctctttacctcgtaacttcaaagcctttatccgcaaccccaatctctccagagatctagttgagcatcttcaagtaggccagaggttttacaacacttcaattgcaacccatggttggaacatttcccttggcaacttaacgacatatacatatccaaaatatatgtgtcatgaaacaacaataatatcattctggctttttttcctatttgatttcattttaaaaacattttgattttttatgtaatttcaagacttacttggaagggtcataaacctgtagtttaaaacacaccataccaacgtgctgttaccaggtatttccacacagacatttcttcacaacctcaaacacaatgtatttatttcccaaatcatttctcaaccaaacttccttagtaaggaatacaatcattctgagtcactcaggatgaacattttaaagagtcattttggatccctgcttaccccagagttgctgaacctattgcctcctccccttcagtgagtcactccccagcccatcctttccattcttgccatcacagctcagttatactgaacttggaacagtgcaatcacctttttacctggttccctacttcctgacttttcacgtagaaggtgacacgtttgaatcacaacaggcagaaaggcacatcaaggcagaaagggaatgcagctctttggttccactgtgaccaacaaaggaatatgtagagaactgaaatgaatgagccttcacctgccttcatctactcaacaagctgcttgactcgctaaatctcgatccaggctgtctcatgcttctaaagttttgattataatccagaaaccgagccctggcgttgcggcaacagcaggcagacttacccatgtctgcagtgaccatggtggactggttttcagggacagacacagaggtctggtcctgatccacgctgtgagagtcctcgttggcctcatgtgactctggctgagctctgatcgcaattccgagtactcatcttcctc

SEQ ID NO: 39148 - DNA, 945 bp, Bovine  19866880838610
  misc_feature (1)..(1): n is a, c, g, or t
ntcattaaaataatacagacactatttagaaaaatagaatacctaggacttatctaggagagttgactaacactgtttccaaagtattaaagtaagtctaaatacccacatatcgataattaataagaatctacagaacagcacagggaactctcctcagtgctctgtaatgacctatacagaaacagaacctagagtggatatatgtataaactgatcccactttttcacttgaaactaacacaactttgtaaatcaactatactccaataaaaattaatgttaaaaatcataaacaaacagataaacaaatacccacataaaaaagtaaagatcagatgcacaactgaatcaaaacgacaaatctataatcgagagtaggcagagatttcttagtggtgaacagcacacacacacagattcataaaaatcctgtcaataaagcaattcaaaatgccttgacaatgcccttgccccatcctaaaaagcatgaactgcctcagcatgatgttaactcttaccaccaagggattctgttgcttggctggctggctgtggaccccatttggttttttctttggattaggtgaatcttgatactgttttctgccatttccccttatactttgattctgtttttccaataagaaataaaatgtaaacatacagcacaatgtaacaggataaaacaatatacccctatgatacatttagctggttcgatcagagttcagcaaagccccccaaaatcttcctaaaacactgaagaaccactatcaacatctttcattatagagagcttcacagagcaagaatcctccaaagatacaaaataaaatagcaaatacaatgttcccgagaaacaactttgaaaaccttatgactatcaatagaggacactgaggcacgttgacttcagtccttagatcaggaaacaagcaccag

SEQ ID NO: 39149 - DNA, 2262 bp, Bovine  19866880866964
  misc_feature (1)..(1): n is a, c, g, or t
ncccacagcaagggctggggctgcatcaacactagtgagtgcctgtactttacttcccttacagataaaataggctttctgaggctgctctgggaagctaacactcctgtgtgacttttctttttttttttaatttatctggaaaataactgctttacaatgttgtgttggtttctgtcacataacaacgtgaatctgatgtaagtatatatgagtcccctctcccgcccgcccccagaatcccacccttctaccgggctgaggctcccggagttctatagctggtccccactagctatctattttacacacagcaaggtatacgtttcaatgctactctctcaattcatctaccctctcctttgccctctaggtgctcacgtccgttctctacgtctgtgacgctagggagtttttggtgtattttccccctaggtaagaactagatttatcatgagagatacacattccacagacggagagcagtccatctcaaaaggtgagaggtctaggttgctggttttaagggaaaatatgttatgagttccaactgaaagaataatccaacctaaggagatacaatctgtttagaaaataaagcctgcttatcttagaaaggggttcccttgtggctccgttggtaaagagtctgcctgcaatgtgggagacctgggttccatccctgggttggaagatcccctggataaaggaaaggctacctactccagtgttctggcctagagaattccatggactctgtagtccatggggtcgcaaagagtcggacacgactgagtgacttgcacttcattatcttagaagagaagttcatgaacctaacagtcaagggagctcattctgaacaaacgtaatcaatggctttccatatctgtcttatatctcaaggctcctttgtgggctgaaaaatcacttaacagtagtttgagggaaatagtctaaagtaacacaaaatgacgtggggcaataatcttgtctgctctcaagcttgggtcctctctaaggaaagttctggaatgattttaggtggcctccttggccacatggccatggtcacattcacagacaggccttgtatgaccaggctcagatcctcgcaaggaaggacatagtcaccttagccttctgtgagtcgctgtgcgaaacttctaagcctgccctgggcttggttttcaggggttttcatgaacttcttgggaaagattaagttgcccaattaaaggagagaaaagaaaaaaaaaaaaaaaaaagtagcacagggctgggcctgtttcattgccaagtcagggtgctagttttctgtcctgtctaacattgccaacttacggactggtttctcaaagtttcagaatcaggttaccaagaatctgattctcctttaaacatgctctgccagaggacaactgcctccttagcgcctcattcctaacagaaatcgaattttctctggacaggctgccctgcctttgtaaacacttccttcctactctgcagaaatcatttttggagaaggcaggactgtctttccctgccccaaatcccctttctccccactgggaggggctgctcaacactttggaacatttctcctgaagccattaagcctcatgggtccattaagccaggaaaatctggctttaacattaaacgtattttcatagtcacagctgtgccaaacagccaggtttcatgtgtaaattcttccttgggtgtcttccaaaaactacgcataaggaggaaatctctgtctaaatgatcacaccagcaagcacaagggcatatgcttccttctaaatcccacaaaaataagactttctcaccaaaaaccagaagaaatttcaaaatacaggagcagaacctatcacagcctgtgcaaaggtccgtggggtcagggattttgttttacagacagttgctccagaccagctctgctgttccatgagcagaggtgggaagacagcctgcaggaggcaaatgaaccccacccccaccccccacccgcaagccagcatgaccacatgccatctcatacatctgtgctcggctctgccgcagcacccagcatgggttggtctaagggtgtgggagctaagttggagatctgcagcatctcaatgaacagcagacactttgctagtaagccaggagctctgatcagacagtggctccctaaattctgtcgccagctctagagacctcacaggatggtggtaagcagagcacaccagccaaaggcatgttttc

SEQ ID NO: 39150 - DNA, 1327 bp, Bovine  19866880902944
  misc_feature (1)..(1): n is a, c, g, or t
ntaggaggagaagggggtgacagatggtcgggtggcatcactgactcaatggacatgagttttaagcaaacttcgggagacagtgaaggacagggaggtctggcgtgctgcagtccatggggtcacaaagagtcagacatgactgggcgactaaacaacaaagcttgtatttggcaaatcttgctttcaaattatgaccgtaattaaggatatagcatagtaatgttctcacagatttagaaacctgaagatcaacagcatccattaaaacaaaacatactcatttccccaaacctgggaaagtatgaaacactaaaatagaaaatccgtctgggtttagtctgagaagtcatgtcatttaccatgaagagactataagagatcttctcaataagatagtgtgataggatatttaaatcgtttctcctcccatccccagcatcaccaagttatgtcttcatgggttgtttaaggtgttctgtattctcagaagattgaagacacgttaaaatataagtacaaaacagctgacaaaaacaaagacagggaatggttttggcatcatctgagacagtgagaatgatcaagtaatttgtacgttatttttctatcagaatgaaaatgtttctgtagtgagtatatttgaacctcagctgtgtgtatatgtgggtgtgcatgtaaactttaaattctgccattaagatgtcaagttctctttatgacacactggctttcatctctccattctgcagtcactgcaggcagaagaaagaaaatttggtatatttctttttcagacttctaagcaagcatgcataagatcactggattattgtgtatttcttgagatgttaaatattttagatttcttttgcagattactacctcatggaataaaatacgctgttctgtggtggtctaaattcttgcgagatgatgtctgaagtagtgctcattctattttgcttcctgattttgttttttatgaacatttcaagctatttgatgctactctttttgaatatattgttttagcctccttcccactggcattaatcatttcattttagttagcttagaacagagttcatggaaatccaggtgtatttatctcaggtggtaatcctaacatgaatggtgccactgattacctgtgttgattgtatcttttgaaccacatagaatgcaataaaactgttcatctattttttctccagcatgaattaactgcagcagttcattaagtgtcactgtttttacgggatgttgaagccattacaatttcagggcagtgattttacaacttggcatgattttagatactttt

SEQ ID NO: 39151 - DNA, 1361 bp, Bovine  19866880997100
  misc_feature (1)..(1): n is a, c, g, or t
nccagctgttctcaaactcctgaactcagcttctgcatcgcttttccagcctttccttggccctcctgcccgtctttcttgccttccaagctcttatttcagtttgtaacagtatgtccacttgtaggaagtggttgatgaatgtgcttgtggctcactcaactatgagttcttgagaacagggactatctggttttgttcactgttaaatcctcaggcctagcacaggaacctggcaccttgtaggcactcagtaaatatttgtggaaagaatcagtgaagtcctttttgcttcttaggcttaaatcaaaagttgcatttttgcattactggtacactagtacacttatttttatttttatagatactttatttctgtaaacataaaagcaccctttttgagaggtttctgagtttttctggagttgctaaagaagaaattgctgttgggatttttcttaccatattaagatcttatataactcctctgttctttatgcatgccccctggactcaggattgagtagatatacagattctgagatgatagctatccaacactgttaatgacttttccaaatgtgttaaaagtgttgttttgactagggtgaaatccactttctggaggcttcaggaaaatattgcagcccgaggtgctatttcctgatatttctattggacactgcctaggggactatgacacaggcagccaggaaactcaaatctgtggccatatttgagatcacagttgcaaggtgtttccaaaaagtgcaaggctctgcaaagaaagtaggaagtaggtgaatggctgggtctgctaaagtcacatcaccacatagacagttccagaaggacagagaccgagctttgacagtggtctgcaactagttttgaagaattttgacatgattttgacaagacaagcaaaaaaactaccagtattcaaatcttacacattccctcagtttctaatgcattgtatgggtattgactgggtaaggttcccaaacatgtggattaaacctttttgctttaccattcaaattgaccttcacttctaaaaacattttaaaatgtatcactaaagtatattaatttttgtttatgtatttactaaataagttgttactcctacttgtcttgcatttttgaccatctcatgggaagaagcttttacttcttgtaaaatgttagttggtcagttgtgtcgactctttgtgacccatggactgtagcccgccaggctcctctgtccatggagttctccaggcaagaatactggagtgggttgccatttcctcctccaggggatcttcctgacccaggaatcaaaccctggtctcctgtatcacaggcagatt

SEQ ID NO: 39152 - DNA, 931 bp, Bovine  19866881033440
  misc_feature (1)..(1): n is a, c, g, or t
nacggactttggccatttcctgaagctatgaaaaagacattgtattgttaatttctaaggcctaatttttttttcaaaccaaataggatgtttattttgctctttaggaagaagcaaagaacttgactatttgcatagatcttcttacccacatgccttcctcctgagttcattcattgcctaatgaaggcactactgggatgaggaagagttggcagctttttgggggcattggtcccaagttctagggcactgtcagactagagcacattaggagaagctcttccgcatggggactggttgggaagccacattattttatttatttattcattaaaacctgttgaaaactgtgtccctgaagacggagatggtggtaaaagaatataaaaatatatattagactcaagcactaaccctgcccatcacgtgtttgcagtctcataaaacataagcagaaatgactattctaaatggatgcttgccataaaagcaggacaaatgaagatctactgatctgtgaagaatggctgagcccctcagagatgcagagtgaggagaaagtatcccaggatgtgggcccatgaagagagaaagggtgggtggggactagaatgtgcaaagcatgtgtggggaatggcaggtgttccattctggaatggaacctggattagatgagtgagttaaagccgccagatcatggacagttttgagagccaggctaaagtaatgggccttctgattggcaatggggaaaaatgcctctatgggtttttgagcacagaaataataggattagacctgtgcttttttagacattccagtggatttgtatcacactcatgagtaactaatatgaattcaagtagactaatgttgagtatgattctggtatttaaagaaacatatttttcatactagatggccccta

SEQ ID NO: 39153 - DNA, 1058 bp, Bovine  19866881056035
  misc_feature (1)..(1): n is a, c, g, or t
nacttccataaatgtcgctctgttggcctgagcatgattgccaggattttaaaaagctgaggaaccaaatcagaaagtcctactctgaggaatccttgcctcccttgcagcaacttctgttttttctctgcccgacgaaaagaaacgtcttccataaccactcttgtgtgttgactcacctttttcacccgacacatctattggtataaaatgagggaatcatcagattggaatgaattttgagaggctgtagactaaactcccaagcaggattgtacccacattatcccaaagagaggaggctagccccagacttgaaaggttctccaggagagaaattccacagccgtcactacagctttgaagacacgaagtccactgtcaggagaggtgttgcgagcaagcctgagccctgcagctgaaatgtaaacccagggtgatggcgactgcccccagggtaacagcccgtcatttgcctgttggctgctgctaatctgccttcatccatcttgccttagagccaagtaatcctgctttacatttgtgatatttttctgggagctcgaagctaagctcagtttttgttttttggaaatgatggcctagattaagaccgataggaagactgtctcatggagtctttgggttttgtcattctgtccgttcatctcagatggtgtttgtgcttaaagtatattaacacacacactcgcattcagaattttgacaagagtcactcggccctctgaggagatggcctctgtgtatcaggcaaaagcttgctcaccgttgtttccagccatgtgcctggtgattgacagtgtaaactgcttcagctgaagcttagctttaacagtttgagtcaatgtgggttttgtgttgttgaaactgcagtgtttctagtcactgccagatttaacctttgctttggtgtttttatgaaggttagaaatgtttcattcttaagcagcctttaagaatatttaatactttctctgcatactgtcttgccacttgcaggaaacaaaattaggctgcctttgtcaatttttggtttg

SEQ ID NO: 39154 - DNA, 1563 bp, Bovine  19866881081884
  misc_feature (1)..(1): n is a, c, g, or t
ncctttctttacattttagctctttctaaaatgcattgctcttctgccgtcattaagtaggcctttattaagctttatgctatagactggacccattgcttcatttgaaggagtcagtgcctttctttgttccattcagaatagaagtgctttatctttgtgcatacacacacacacacacacacatatactgattttaagccatttttaatagaattttgaaagaatgtctttcttgttttattacttaaaaattcaaatatcaaatcagctaagtttaattgtaattgaaggtgggcagagaaattacctttggatccccaagtatattattacctagtaagaatctaagaaaggacattctgtctaatttttctttaacatactttttttccaccggactgattcaagctatcttggagggaaagtttagctgttctgttcctaaataattgttcattcactcatatacatttgaggctttctctgatagaaatctaaagttgcaggtctctataccaaaaggtgaacacttctttttattaatgacacgtatttgtgtatattgcaaaaggtcaccaccacaagtgtacccttttatatgtgctttggcctgggtttttttcaggacatttcttttatagaaccagtagtcggtgaatttctctgagcatcagcatttgtgataaggattccctctgtccctctatagatctgctgctcaataactgccataatttagtactcctgcatactttatgtgatatatatataatgtatttatatatatataaagtggtttaaaatttgagggttgaaatgtgaacctaaggtttcattattaaaaggtaatataattacattagcaatattttagatcacttaaagcagttgttttataaaaacttgtctgtattttatttagaacttaacttagatagcagtaatttccctggagtgaaactacggtccaaaatgtccctccgttcttacggaagccgagaaggatctgtatctagtcgctcaggagagtgcagtcctgttcctatgggttcatttccaagaagagggtttgtaaatggaagcagagaaaataccggttatttagaagaacttgaaaaagagaggtaacttttcttcattaagcagtaaacttttatactccaatttttgctagattttgtcattttgtgacaatacaaaacaggaattatgaagcgtgtgtggtgggtgatcacaagcagcactagagagcattttccatttattgtctcaaagcagtgtattactgattgtccttatcttacatctaaaaatgtgaaggaggcagtttcttgggattctaatgctcaaatgctctgtacattgaataatgtacacatagtacacataatcacagtggctaaaatatgtaactgagttttgattgacttttccgttatcttttcaaatgaattaaatagctaccagattcagtataagctgactggtttccattattaaacaagtgaaacaatttatcagttttggtttcttaaaaaaatgttgcttgatacagaatca

SEQ ID NO: 39155 - DNA, 1836 bp, Bovine  19866881093260
  misc_feature (1)..(1): n is a, c, g, or t
nacggcagcccaccggctcccccgtccctgggattctccaggcaagaacactggagtgggttgccatttccttctccaatgcatgaaagtgaaaagtgaaagtgaagtcgctcagtcgtgtccgactcctagcaaccccatggaccacattttataattcaaaacagaaagcattagactattcactaggcaatattaaaggtgaatgcccgaagcaataaaacagcagatgcaaacaaccaggacctactatacggcacagggaattatattcagtattttgtaataatccataatggaaaaaatatatacatataaaactgaatcaccttctgtacactagaagctaacacagcaatgtaaaccaactatacttcaataaacgaacaggaaacaccagcagatgcagattctactgggacaaccctctgctgataaaactgatggctctgtaaatataatatctatgtcaggtatgtattggaaaatttaacttacactcatgcacccttacaacctctgcaggaacaacctgaactgacctttctcagatgaaagagggccacatcaagatgtagagagcaatctagagttacctctgccatgtaagtgatcccttcactaggtcacctggccacaccagcagaagttgtaggatatacatagtggccttgtgagagggacagatgacagctccactcccaggaaccaggaagtgttagtatgaagtcaacataggtttctgcagcccctgcttagatttcaactactagaaaagtaatttcattagcaatttttgaaactatttttaaacttctgctatactgatttattctcaaaacttggtaatataggtattaaatattaatattaaatattaatattaagatattaaatatcttaacgtgtcccataaatatttatatttgtttaattttattttttaatatttttttgtatctatttggctgtcctggctcttagtgtggcatggggagctttgatctttagttatagcatgcagggtcttttattcatggcatgtggcatctacttccctgtctaggaaatgcatctgggctccccgaattgggagtgtggagtcagcctctggaccatcagcaaagtctctatacttgttttaaatactattcaaggatattaacttgaaaaatggagtcctcattcaaagtcctaaaaaaagaaagctctgggacagggggaagaggaaggcagctcagaagaacaaatagatcttatctccagggcctccatgaagagaacaaaaaaaacagttcattaaagttcacagggaacactccagaacagagtctggaatgaagtctccctccacaactgcttcagagcccagaaactacattatgaataaatcattcaaatcattcatcttatttgctcctcaaaactttcttttctctatgacacaggcaaaaggaaaaaagcaaaaacataaccgaagtactggctgtaattatctacaaaatagtcacgggtgcctataaggataattttttagtattacagttttctccataactccttcatcttaaaatagttcagtaatactaaccataatacaaagtgaaaacaaccagcaaacagctgacaaacgtaaattttacgacctcagtggtgcttaaggcaacatttacagactgtcagttgtatttttggtccaagtacccagtaggccagagaaggaaagtgtgggcatgcgtcgccctgccctgcagctctcctaacaaggaacacacagttgcagagagaaaagcgggtgtaatggggacataagcagctgagtggaaaatacatctg

SEQ ID NO: 39156 - DNA, 781 bp, Bovine  19866881106421
  misc_feature (1)..(1): n is a, c, g, or t
ntagagttaagtgaaaaagcacctattacaaaacagtgtgtgctatatgatccaatttgtttaagatattcatgagtaaatatttttagaaggccataaatacaaactgtttattccaagcagatgagatttaggatgcattaggcagggttcagttaggaaaacaaatgcttttggatgtttcaagcaggatttaatttaggcagttggaaggaccagagaaaagaaggcagggtggggggcagctggcgctgtcagccttggcatcagagctgtgatggagagactgctgctgccccattgctgcccacagctcaggctcaggctggtcagagcagggtcttcatgctcaccaaagccacaatgacggccccaccttctcactgccttccagacctggcagacccaaaactatcccagagttaagggagtttgggaggtagtccctagggtcagtcttctttgatttggggggactacagaggaggtgtgggaacggaaccaggcacaagcaacatgcactgtaacctactgtctttggctccttgacaaccaaatgtatcctctcacacatatacagttccaaatggctataacgataccatcaagcttctgtaactatcccttgttcaatcgtattaataaatgtactcaccttcttatcgaaatgggagacccaaagtcccatttatatccatggctgggtgacctttcctcttctagtttaatggcaaattcacctaaatcatgtagcccagctattacatgctacgttttacca

SEQ ID NO: 39157 - DNA, 1016 bp, Bovine  19866881134875
  misc_feature (1)..(1): n is a, c, g, or t
nccctctcctcgccttttcctcatgtcattaacagtcattgcagtcagctataatttcccccacttggtcattttcttaaaacacacatgtaggcaggcacacatacacccatggctgcttctgattaattcagagggtttcttaggggatgattcagcatgattcatcagactgtttctttggcgaacccctgttaccaagtagccaatgtattttcagtagttaacccattgcataggctaaacaagactcatatttcttctagtttactgatgcagtacagctcagttataagtatccagacatgtcaggataggataaaaaattatggaatcaggtcttagaatgaagggatttttaggactagaagaaattcctctgattcagaagtaaaagaaggttattctaaatttagttctatttatttacagaatgaattttgtttaagaagtagttgattctgagaaggtcctagtgttaactgataaggggaggaaagttcaccgcctggggatcacgtgacgacagtcagaactaatgttagttttcacctgtttgttacgaagtatgttatgaactctggaaagcgttctggaactgtgtttcccaagatattgtttatcgaaatgcctactcactcatgatgtacttcagttaaagtgcataagaactgaagtacatgagtgaattcttaatatgtccctagcggcaggaccccacttgaaaatggggatcactctagtttccagtcattagtgctatttcctggagctgtggtggaggcccaggcaaggtggagactcatgagacaactggtgctggcgtctctggtgaccagaggactggtaacaagtggttataatagcttgtcttgatatttctgctttgctgtctgttttcgtgttgaattcacgcatctagtgtcatggtacatatattgcctgagtttttcagttggtattggagggcagcgtgaaagtataatgatgaaaattgtctcattgagatcttacta

SEQ ID NO: 39158 - DNA, 1069 bp, Bovine  19866881145815
  misc_feature (1)..(1): n is a, c, g, or t
naaataaattttatagacagggaagaggcccacacgagcaggctcggctcacactcaacgggtaagcatccccctgccagcacacggagtccagtggagaaagcagtggcgtgcgatttcctcgcggccttgccgtgtgaccctgagtgaccactcagccttgctgtccggtctgcccgcccctgcctcctccacctcatacaggggataccacctcctccttgccgcctcctaagcatgacggagaaacagcctgctcctctcagctgtgcccgggtcctcaaggtaggctacacgaatagcacagaagtacaagaagactccttcctgaaaactgcctctcctgagctgcatatcacagcttacttctccggcgggaaggctgttcagctagattttactaggaacatgagcaagacagggatctggggtggagaagggctttgcagcacacaacctgtgcagacaacagtggagacaaggtgccccgatacgaaaactcctcatgtgcaagacaggaaacctggtcatccagatggggttttatggcaagcctggagccaatattcccacaataagcgctcacggaagtggagggaatgaaatcagaccagatggaagttagatggtaaatgtgcgactgcctgaaggcctggttttgttccagacataagaaggttgggtgcagacacaccgagagcagggttgtggggctgcagctgctggggcaggacagggaccaggcagcgactggagcgtcgcaaggcccttcccggggctcctgccagaaaaggccatgccaagcttccaccccaggtggtgccagtggtaaagaacccacctgccaacacaggagatgtaagagatgcaggttcaatccctgggtcgggaagatgccctggaggagggcgtggcaaccccctccagtcttcttgcctggagagtcacagacagaggaggcttggtgggcttgcagtccatggagtcacaagagtcggacatggatagtatcttagcacgctcagcctctgcccgcccctctacacacctgctctcttcagtcctgttc

SEQ ID NO: 39159 - DNA, 800 bp, Bovine  19866881351362
  misc_feature (1)..(1): n is a, c, g, or t
nttccctggtatttgtgctttttattttgtccttttactgtcattttaatgaagtttgtaaagtgagcgtagataaatgtatacaatcaatttttactatggattacacaaggagatagcttatttacaaactgttagtagccaaattataagtaaacagataactgaagtaaggtatctatttatggctctataagctttaattgactaaacgttatgaagaaatagttataggtttttgaaatctacttaatttaatgaaaaagcttatcaagtgttctcagttctctagaacatctatttcaatgacactgcactaactgtgcacatcttctcttagaataaccacccatcattacatctgcaaacaaaagagacaatttactaacctctgcttctgttgcttgggactgtaaaagctgtcgtatacgaagtatgtccttttctatttgttgaattctggttattcttcgctaaaataaaataagtaaccaaattagatctatttttattgaaaacattagtttttaatattaatttaacattaaccattctatggttaccatttaaaagcttaggattgtataaaatcattctttttttctataccaaattatgtgaaaattagatacatatatatacatattcatatactgaggacatcagtgggatcagttcaactttttaacatatctaactttataaaacagatctctagatttaggaaaactgtacaaatgcaagtcatgtatctacttggaccataaagaaaagtgagagctgaagaattgatgcttctg

SEQ ID NO: 39160 - DNA, 745 bp, Bovine  19866881456696
  misc_feature (1)..(1): n is a, c, g, or t
nccctatagactgtagcccccggctcctctgtcctgggactgtgcagccaagaatactggaatggactgccatgccctcctccagggcatcttcctgacccagagatcaaacccgtgtctcttatgtctcctgcactggcaggcgggttctttagcacaggtaccacctgggaagcccaaaagtaacagtagaaatctatcaacaaatacatttcttcttaaagctgatataagccaaaaggaagtctagaataaaatctttgcctctattctggtgttaatgcagccacaatttaaacatgagatgctgaatactgagtcacagcttacattaacctaagtcagggtgttaagccactaatatccaagaaaaccacgtggaatctgaggagtacctgctgcaagtcctcgctttcagactggagctgagccacgagcgctctcatgcagcctttcatagagcagagagtagcctggaaagtcaagggttacacagcgttagtaacaaggcaacctgcagccacccataaaagaactagaaccatcaattacataaataaaagacaaataccctcctaatcctttgcaatattcattcctttcttggcaaactggaaaaataaagtgaataaataataagaaatgataagaaaagggtttgaatgtaaagtcttttatttggatggaactaatatgtgtttgacactttcaccaatcaagatttccagattttttgctgtcattc

SEQ ID NO: 39161 - DNA, 1436 bp, Bovine  19866881732459
  misc_feature (1)..(1): n is a, c, g, or t
naatgaaatgtgtatgctcattgccttcaacttcaagtggctgaagaactctagaaactgattttcaagagctgtaaaaggagatttattgataaggagtggggcagtcttcagccaagaaggccttccttctgtccccactgaaactgaaggaaaatgaggccgcgtgacctctacctggcggcccgtgtgccctgaggcattggaggattcgtgctgcaatatgtgaggtgcccaaaagagagtaagatgtcctctgtgacaaagattagggttctctcacccctgcaggtggggctctagacttctactacagttggctaaatcactgggggcctgcggagccctgaggttgattaaaaagaaaaagccagtgaggtggacagccccggctgcggcacggcagctgctgctgctgggtcgtggggtggcgcatgctgagagggccaagagacagtgactggagcccagcaggaggcatgagtcgtgaggtgtggctggcccgggtggtggtcaagaaacacaggaggggggtcattcagagaccaggcaggcgatcggaacttgagacggccccagacctgaacgcagagcgagaaccttgattctgagggagggctttgtccaggcaggaagtttgaaaatcagtcccaagacttttcaccttaatgacttctttagaggactgtggttaggaggtttgaggtgccagaactttgagaggggcacaaatccagagcagggagtatgatggagacactcgccaagtaaactcaaggtgctattttaatagctgctcgaggcgaatttacccggcacacgtcatgtggaaggcgtcctcccacagccaggctgtaactagaaaataaaagctgcatttacagaaagattaagaagttggtgatgaaaaaagatttgaaatttaggttttgatccaaggaatcaaactttaggaaaccaagattacattttaagcaatctctagattctgggaaagaggtttatgttagcgagcttatagaatttgacaagctaaaaaaagacacagaaaattgatagtagtcaggatgtagatttttatatcagcagggggtggcatggcagagataagttattggcaattatattaatgcacctgaattcctgctgctgctgctgctgctaagtcgcttcagtcatgtccaactctgtgcgaccccatagatggcagcccaccaggctcccccgtccctgggattctccaggcagtggacaacttttattcttgaaagaaacaggaagaaaataacctggtttatacagataaagagaagttcaatttatagagtaaatatttactgggatcacaaagctgtcctctctttctatcaaatgccccttttctcttgcgaacagaagcagccaacattatacaaaagggaaagagaacacctttt

SEQ ID NO: 39162 - DNA, 942 bp, Bovine  19866881830406
  misc_feature (1)..(1): n is a, c, g, or t
ntttctacttcagatccgttgcctctctgctactgaaattcaggttttttgagacaaacagcttgtgtgtgtgtgtgtgtgtgtgtgtgtgtgtgtgtgtgtgtgttactacctagtaggtttgaatgtgtacatatgaatgtgcgttttcctgggaaaatacagtgcatgcatgctaagttgcttcagtcgtgtctgactcttttcaaccccatgaactgtagcccaccaggctcctctgtccatggaattctccaaacaagaatgctggcgcgggttgccatgctctcccccaggggatctttccaacccagggatcgaattcacgtctcttaggtctcctgtattggcaggtgggttctttaaccactagcgccacctgggaaatcacagtacatgcatataaaaatatagaaattcaaaatattgtttttatttttgcacaagtttatatgcttgttaaacatgctaaggagtcaaattatgaaagattaggaaacaaagtacttttgaaataggaatgtagaaatatattttggttattctgttggacacatggagttgggcttttagtattttatggtgatgttcctggcactctaattgctattatgtcattctgtacattttagagaagaagaccaggacattaggacagaattaagctgagaaatgactgtggaccttgagtgacctctttttgagtcagtcttgctcaggagagtagtcatggtcctaagaacttctagcctgtcttccctaagacatttcgtcaggaggagggtgccctgcagtagtttaaccaggaagtgtggcaaaggcgactcaggagctccaggagtcagactgctctaggtcaggctgggtgacgctggggtcctctgagaacttggccctgtgtttaatttttagtttggtctgagatttgtgacatacgaaatt

SEQ ID NO: 39163 - DNA, 677 bp, Bovine  19866881879328
  misc_feature (1)..(1): n is a, c, g, or t
naatcttacccctcactcctatgacggaacggaagaactttctcttcggcacacgcgctctgtctctctgttcctgtctgcctggggcctccctgtcctgtgaattcttttctgtttgggagcaggggtgatgggatgagcagaattgatcctgacagtcagggtcctcctaggccatctgttaagtctgatagatttcatagtagttgggttggaatattgtttgtaatctggggatttggggcagccgaatatattttaggcaacttgggatggatttggatctaattcccagagaaatactgatttaatgtaaacgcttcagcctttctctcttaaaggggcagatgtgctgttaacatctggctgaagtgagagtggggagagactcaggggagaaaaagtgcacacttatgtgtgcgcatacacacacacacacacacacacacacacgttagcattaccccagaacaataaatcacaacaaaatggcaggggagaaaagtgtacattcacatgtgtgcatgcacatacacatacacacaagtgtgttaccccagacacacacatacacacataccacacaagttagcattatcccagacacacacacacacactcacactcactagccttatcccagacacacatacacacacacacacgttagcattatc

SEQ ID NO: 39164 - DNA, 1748 bp, Bovine  19866880348394
  misc_feature (1)..(1): n is a, c, g, or t
nattagcactgagactgctactgctaagtcacttcagtcgtgtccgactctgtgcgaccccatagacggcagcccaccaggctcccccgtccctgggattctccaggcaagaacactggagtgggttgcccatttccttctccaatgcatgaaagtgaaaagtgaaagtgaagtcgctcagtcatgtctgactcttagcgaccccatggactgcagcctaccaggctcctccaaccatgggattttccaggggagagtactggagtggggtgccattgccttctccaaggtgcctgctatttgttcattcattcattccacaatagactttcaggcactactttaggaatgaagtgatgaatagtccatttgttgatagcctacacagaaaatagactattctttgaaatatattttcattcttgtaaggttgatctgggattgattttttcttttgacacagaagaaccaagcaagaaatgttttgtttcatccgcatgtgtcaaagtggatgctctctcattccttcagctggcttggtaataaagagatactgctgggctgagacaggcaccagggtctatggtggtcccttactgctttcctcagggaccagtcctcttcccagtgtgttgaaaggtagtgccagtattccacgatgatcatggttgggcttccctggtaatgtctctactcttattttcttaatatagtgacaggatgcatgctgctgaggtggtaaatgggaagaagaagtgcagtgaactgtctgtttcttggggccttctgtattaatcacaggaggaggtgtcagacacggccagatgagagagccagctgactgaagttcatgtcggatccaaattagaatggcaaaattgggagaccttgatgatgctgaactgaagaagcttaaggttctcagagtggttagggctggaagaatcagagaggtcatctaatctagtggttctcagacttgaaggggcattagggttttctggaccccatcccagagcatctgatgtagttgatcatgagtttgtacttccccacaagctcatgggtgtgccagtgctgatgagaacccctgacctagtcccacagctggtctgttgagattttatagatggggagaggacacacagagataggtggaaaggacttgtctagagtcacacagatatcaggagtgaagttggagtcaaaaccaggaatcctggctcgaagtcatttccataccgtcactagaacaatattatttttaggtccaggtacattattatttttagttctactacaggatgatgacatatttcaccagctttgcctgatttggtcacaaatttatttttgagggcctttcatttaaaagctgtctccatcctacattttcttactcagttaatccacatttttgactacagctctgcactaggaattgcacttgaacccaaggtggtattatagcatggtagtctgaaagcatgggtctcaggaagtttgaccttgagtaaatggctttttcattttctcatctgaaaacgagaatagtaatacctcctaggacagcaggtagagcgccgagattgtacctggccctcactccctgaccgataggcctgatgcaatcattgttaactgggtagaacgtggtccccaccctctcatgcataggtgacttactgagtgctacaactgagagacaggggaattagaggaacaagcacagactggaattaggaggg

SEQ ID NO: 39165 - DNA, 1846 bp, Bovine  19866880361042
  misc_feature (1)..(1): n is a, c, g, or t
nccccttgtaggatttaaccctctctatagtcatttgtggagaaggcaatggcaccgcactccagtactcttggctggaaaatcccatggatggaggagcctggtaggctgcagtccatggggtcgcgaagagttggacaccaactgagtgacttgactttcacttttcactttcatgcattggagaaggaaatggcaacccactccagtgttcttgcctggagaatcccagggacgggggagcctggttggctgccgtctatggggtcgcacagagtcggacatgactgaaggcgacttagcagcagcagcagcagcatcgtcatttgagactctggcacatttccttactgatttgaaacccttagagagtgtatgtgtgctggggttaggggttatcacattttattcattttttttctttttcttagttcttatcccaacatgtgagtctatggctgctttgatatttatttggggtaaggagctggaaagggactgggtttcccctctagatcccagtgtctcctaagaatctgactccttgctctttgctgtaccttggaatggggagtctgtgtataacaagcaaagaagagaacttggctcgggaagcctgtgagcagtcattgctgaaatgtaaatgcaaaagattgaaaggaaggatgtgagagtgaagccagctgtctcgcttccagctgtagaatcatcagaagagctgccgcgctcaaggtcaaatacacaagcccaacttggataaaaattgccagggagttagagtggacgttctctgatgttctgatgactttgaatggggcactgtaattccctcccacagcaaggcttactttaaagaaaaaccctgctttggggatctccctttttgctcacctccctgcagcgtcagggcatgccaggcgaggttggcgtcactccttatagcaaggcaagtactctttctgagggcttcatagtgacaaggccctggcacacctgctaggtcttcaaaagtatttttttaacttgacgattatttaacaattcagtctcctacacttataatgcggtaaaatcagatgccaggagagggggaaagagttgctccggatgtcaggaatgcacagatgcactgagaacgctaaaaatctgaaaatcgcaaacaaacataagcgatgagtttttaaattacaaaaattattttgggtgatatacatgttccacgaaagctatttttactttatgggttctttaataatgctaaaagatatatgaagtaattaacatcaataaagggcttccatggtggctcagtggtaaagaatctgcctgccagtgtaggagacacaagagacgtgggttcgatccttgaatcaagaagatgccctggaggaggaaatggcaacccactccagtatttcccatgcctgggaaatctcgtggacagaggagcctggtggactacagtccatgaagctgctaaagagttggacaggactaaacaacaaaaaagtaaatgtttatatttttactctagtttaggaaaaactcttacgtaaattctattgtaaaaccataacaagtagacaaatagtttctccacacaatagatcttactgaatgtgccagggtgtcagaggaaagaactcaggaaagagaatagagacatttggaggaaaagggggaattaaaaaagaacatcttcatggaggaaagtacacataagtcatattgtacattttcgtttctcctgatatcatatagtcattctttttctactctgacaggtgagtgagaagtgttgctattcctttctacaaattaacaaaatcaaggcttaaaaaaccag

SEQ ID NO: 39166 - DNA, 1165 bp, Bovine  19866880429857
  misc_feature (1)..(1): n is a, c, g, or t
nttagtatgacttctactaaagagctaaaacccattctgaatgcctaccagcacagatgaggtacatgatggtgcatttcaaaatatggagcactgaatgcaaatcccacttactgaaatgaacagaggaaagaatgaattagagacaagaggtaatatcatttgtatgatctttatgtatgatgtgcacgtgtacatgcatgcttagtcacttcagtcatgtccaactctttgcgaacccagggactgtagcctgccaggctcctttgtccatgagattgtccaggaaaggatactggagtgggttgccatgccctccttcagggatcttcccaacccagggatcgaacttgcgtctcctgcattagagtcagattccttattgctgagccaccagggaaacccattcatgtatgataatacattttaaaataaatgttacttgcaaagctattgcatatatatatatatatatatatatacacacatatattggtaaagcattgggaagatatacaaacagactatagtaattactttatgaagaaagtatagagttggtgtgggcagagaagaaataaataaagtggctagtgagagatgactctgaaggtctattctacatacttccgatagttaggatattgtgatgagagtttatccatatactacatcataagtgtgcttcaataaagttaaggaacagaatgtcttctatgtactgcacatgtattcgattggtgggtcagcatagaaagctggaggaatcactggattcaaaattaaaatcaacaggatcactttataagtaggggtttgtattcaacctcatgtgtaataagaggacaatagtctctggccaggtaagctcacagacttgacgttgggacaggatgagatatgaacacaaagtcacactacaagggctctataaatcacaatcactgcttgtactgtttgtgttctttgacctctcaaatttccctggagagaaactgacaagattgtgataatagataatttattttaactcctttgcttgaaccacattattttatctcccctgtctcctttcactaaggtctgaaatgaaaacaaacatcaaatgaggctgtaggattttattttatctgtcacatacagctgtcattaaacacacttgaga

SEQ ID NO: 39167 - DNA, 1826 bp, Bovine  19866880479602
  misc_feature (1)..(1): n is a, c, g, or t
nattccatggggcagctaaaattgctctggctacttatagttaagaaataagatcgaatctctgtccatgtgtgtattttatttattttttatttttggccatgccactccagggatcttagttccctgatcatgaagtgaacccagagcccctgcagtggaagcttgaagtcctaaccatgggatctctagagaattccccaaatatgtgttttacctgggttttttaatctgttattttccatccagtagcccaccttcatgaagatctgtagctttaagtgtgaaagcctagtgaggtaccaagtcctgtgccaagaggtcaccagaggaacctgtacttattcttctaatgaatttccagagaaaatgcttcttgtttaattcccaggaagaaaacaaaaacatgaaaaacagttggcacctagcgcttctgtcttgtttggtatgaaaaccagtccttttcaggaactggaggagggagttgctaccccaagggcagggtgtgccctgactcgtgggaaaggcaaactgcagtgacctggagggtaaggagaccttttcttagaacgaggtgaaagtcaggtcagttttcctgtattctggttgtttccaaactggatttctcttcttggctgcagtaatttcctttggagactaggagggtgccagtaatgacagctggatgggaccctcaagacccctctgtctattggtttgatgcatctgtgtgttcattcattccacacgagatgccaggtatacctgtgaatgaatgagtgaaactctagtctgggtttaggggatggaaacatgaatgctgtgccatccctgtctccagaagtcaagagaggacataaaagtatctgcagaaaatatctggtggctctaactgagcagtgaccaactctagggactctggggaaacttcacagataataagtgttatttgatggagccttcaaggatgaatggggatttgtctagtgagatagagaaggagaggatcattgagcaagagaaataacatgagtaggtgagaaagtgcatgtgctgtactgtgtgctaagttgcttcagtggtgtttgactctttgcaaccccctggactgtatagaccgccaggttcctctgttcatgagattctccgggcaagaatactgaagtgggttgtcatgccctcctcctggggatcttcctgacccaaggattgagctcacgtctcttatgtctcctgcattggcaggctgattctttaccactagtgccacctgggaggccaaagtgcatgcacttggaaactggaaatttggaaattggaaattccaaatccttgtaaattggattcattggggatggactgcagagtagaaaggccatggagatgagggtgcagggatgggcttaggttgagaaaggtcttgattgctgactgagaacttaagactgtgctatgaaaggagaatcacctagggaaaggaggtgattaggtctgtgttttaggaaagtgatgggttatggatggttaaagggggtggttaaaggggacctccttggtagctcagatggtaaagaatctgcctgcagtggagaagacccaggttcgatcccttggtcaggaagaacccccagaggaggaaatggcaactcactccagtattcttgctgggagaatcccatggaaagaggacctggtgggctacagtccagggggtaaaaagagtcagacttgactgagtgactaacattttcactttcaaaagtggtggtagtggagatggtgagatgtgggtcatggtctagtcccaagatacaagttaaagggag

SEQ ID NO: 39168 - DNA, 1441 bp, Bovine  19866880516077
  misc_feature (1)..(1): n is a, c, g, or t
nctgcattgtaggcagatgctttaccgtctgagccacaagggaagcccttcggtgcttttatttcagtaaaaagaaaacaaaaatgcttacaggttgttttcaaatgacccttgatgccctcaaaacagactaggatttaaaaaacaaaaaaagtaacaaaggttctgaatctttatccaacatatcttctctagtttatgtttcctttatacgaccttgaagaatcaggttgccagccattcattcattctctcctcctcactccgaagttaacttagaagaacttttaacactcttcttgccacaaggacaaattcatctcttgtatatctccacagatatcatggctcccagattctctttatatatctcctgagagctaaacctttatcttagaacctcatgccttaacagtttaaggctccagtttctattaaaggtaaaaatccttctggcaagattttactttggcatactctcaaagatgtagacctctttctttttgatagctagttagctagctggatatgaatatacagatataggtagatatggatatatatctgtatctcagtgtgagtacatttaatatattttttgtacagatgtgtggagtcagcagacatgaaatttggatttagagatgactggattcaaatcaaagattcattattcattagccacaagacatcaggcaacttatttacaatctctttaagcctcaatttcagtatttgaaccttgaaatattagtaccaaatttcaaataatattataaaaattacatatcagagacctgccatatagtagatacaaataaaatgttagcttcctcatgaactatatgtaaagaacatgaatttatatcttgttctggggtaggaagaagaatgtttgaggatattagcctagaatggaagagttaagagggcatgagggtggcagaggaacatgctgggggcatacagaatggagagcctatggcccatttcatggccttactaaattcatgattttccatgggaacaattttactccgtgtctttcaagagtaaccaattttacgcaatttctgtagctgaatcatactttcatacaattttagagcaggaagtgaagagataatattgttcaatctaactgttttatgattgggaagatcagccccgggtggtctggtgatgtacacaggccataagtgcacagctaagaagggtcctttcaactggaccacacttttctccaggtagctcttgtcgtgtacagtggttaccttcttgattggctggtacttcgtttctggtgtagctgaaataaaatgtccttcattctagcaaattatttgttctctcctttcaattgagtatccatacacaactctgtggccttgttcagaacaaactcaaactttgcagtaaatattagctcctaactaggatt

SEQ ID NO: 39169 - DNA, 1729 bp, Bovine  19866880672661
  misc_feature (1)..(1): n is a, c, g, or t
nctaagggtgttgtatctgcatatctgaggttattgatatttcccccggcaatcttgatgccatcttgtacttcctccagcccagcacttctcatgatgtactctgcatataattaaataagcagggtgacagtatacagccttgacgtactccttttcctatttggaaccagtctgttgctccatgtctagttctaactgttgcttcctgacctgcacacaggtttctcaagaggcaggtcaggtggtctggtatttccatctctttcagaattttccacagtttattgtgatccacacagtcaaaggctttggcatagtcaataaagcagaaatagatgtttttctggaactctcttgctttttcgatgatccagtggatgttggcaatttgatctctggttcctctgccctctctaaaaccagcttgaccatctggaatttcacggttcacgtattgctgaagcctggcttgaaggattttaagcattgctttactattgtgtgagatgaatgcaattgtgcagtagtttaagcattctctggcagtgcctttctttgagattgaaatgaaaactgaccttttctcagccagtgctgagttttccaaatttgctggcatattgagtgcagcactttcacagcatcatctttcaggatttgaaatagctcaactggaattccattacctccactagctttgtttgtagtgatgcttcctaaggtccacttgacttcacatggatggcatcgctgagtcggtggacatgagtttgagcaagctctgggaattggtgatgaacagggaagcctggcatgctgcagtctttggggttgcagagagtcaggcacaactgagcaactgaacatattaaactgaactactggcctgccagggaagtgccagtccttcctgttttgttttcagatggttagcttgtgttgggagcttgcttgtaacttcaggtctttgaaggtttgcggtttgtctttcctgaatgctgctactccatcaatgatatatttatctttcttatttaaaccttttaaaatgattacaatttcttagtttgtttggaaactgagtacatacttgctgtttggttacatgaacatatcttgagtttcaatcccagtgctcccacactgcattcctttcatagagcaataatttatgaggcaacctaaaaaattatttcaggtgtgtctgtgttgcatggaagcctttttatttgtaattcatgtggcctaagggcttgctggttctgtaatcagggtggagtcttatatgccatggatcttctattctcttgtgctccttgttctagcttgcaaaagccatgagcagctgcaggggaaattaatgattaaaattttaatattccatactatttgttgcaacctaaacatgtatgctactggaggatgagacctgtgacatgctgatactgtgtgctaagatggagaatattgctgcagaataagacttgggtgttgctttgtttggcttcttggaaatggagataggaactgggtcttatactgttgaaaaagagaagaggtatggatagtgtcattttcctcttctcgtattcctttgggaaaaatgttagattcatagcatgatttgattgggcttcccaggtggctcagtggtaaaaaatcaacctgccaagcaggggacatgggtgggaaagagcccctcggaaggaaaggcaacccacaccag

SEQ ID NO: 39170 - DNA, 1525 bp, Bovine  19866880675604
  misc_feature (1)..(1): n is a, c, g, or t
natctcagacacagccctctcccatttttaaatgattttgcttactctccagagtgtgtggtaaaactgaagaaagtctaagctggctaatatgggcttttactctggtagactaaggcttctgcctccgtttcaggcaagcatctcagtgattcttgaggatgtgtttccttcggtcttggttgcctgttcctatagtatgctcatgacagtgaacactgggtgatatttaatcacatccttggaaaaagtgaaggaattcaaataatggaaattcttaccatcctttttgactgcatcccctctgaagaaactttaatcaggatttttctttaatgagatctatccgtggtgactctaaatgtaatttaatttttgtcagaattcagttaagctttactcaaagacccttgttcgatattgatttcagagttcagcacagcactcaagccctcagatggatgttttagcattttaatttcttctgaaatttcaaaagaccagtaagctgcaacactaaaaatgtaaagagttctcttcagcgggatggtgggggagctgcgaggataaaatgaaatgtttgttttgaagatggagtttgtatgaaggaggaccgtagggctgtgtgtatctctcttggagacaaagccctttcacaggaagcaccagcaatgtcattcattcagttgcctcctgttccgttagtggaaaggagatgtctgaaaaatgtcctgtgcagaatggagaaagcctatcgctgggcctcagtctgtgccttttgttgttgttattgatggagtcagaatagtaaagatagtggtttagttagacaattattcctgtgtaaggaccaccctgcttgatgttctgagttcaggaaggagattagtctaaaataatttaatttattcttgcctaaattagtcatcaattatatacataatttaggtaaaaatacaccagctatggctttatgtttgagtcaatggttatttatatttgccagtgatttcttaaatccttaattcttacatgtatatagctgcaattaaacaaatttgattcattaaggcactgtaatcctctttactaattttatacatgctttcttttgtattttctattgattgatttaatgtgaatatgtacatagctttccattgttaataatttccatttttagctttttatttgtttacttttaaattatgtttacatactcctttctaaaaacatttgccactagaaagatattgggtatttttcaatctttaagtattgtatatactgctactgctaagtaacttcagtcgtgtctgactctgtgtgaccccatagacggcagccaaccaggcttccctgtccctgggattctccaggcaagaacactggagtgtgttgccatttccttctccaatgcatgaaagtgaaaagtgaaagtgaagttgctcagttgtgtccgactcttaacaaccccatggactgcagcctaccaggctcctccacccatgggattttccaggca

SEQ ID NO: 39171 - DNA, 727 bp, Bovine  19866880695469
  misc_feature (1)..(1): n is a, c, g, or t
nccatgtaatcagcatgaatagcaaagaccgtataatactcatgtttctatttgttgccctcaactgacatggttggtcgtttgttttgttttaaataaaatggggaagcaacaaatatattaaatccatctgcagaaaacccatatttgcatgtggaaaacaaataagtgggtgcctgaatgggtgattaggcatgcaattgcccatctgcacccggggccccagcctccctgcaggtgcgcctgacacaggagcagagactccgaaaggcaggtcctccaccatggagagcgacagacaggagggaaaccgtgccctccgcaaatggacttgttctgagctgcgccccctacccccgccccatagggtcctggttctccagtcactgtccctgtatcttacagctgaaaaccagaaataagttttgccatcctttgcttagatttctgcggattctttaaaccacaaaggcaatttttttttctgagcatcttcgatatgttcttaataaatatttgttgttgcatctatctttatgagaatgggtgaccccctcccctgtactcttcatctgggtcattctactcatcacactggcctcacttttcagtcttaggaccttggcaactgctttctttcagcttgaaacactctccccactctggtctccagcttactaactcatagccttcaggccttgctcctgtgcactcataataagacctt

SEQ ID NO: 39172 - DNA, 1250 bp, Bovine  19866880713864
  misc_feature (1)..(1): n is a, c, g, or t
nctgatgtgatttccctataactttccttggattttgataaatttaaaaatcccaggaacaactctttgcacttacagaaattaagagtgcttaaaggggaccacctgatggtgtcagtgtgattacagcgagagagacccaggggaaaagtgacatataatgaaacaaaattggtgcttctcagcctagagattctcctacctatgccaaatcttgaagatgtttcggcaagaaaaaaaaataaagaaagaatggagaaagagttaaagaaatggttaaagagaaaaaacataaatgatctgaattaaaaagcatatagaactggcattgatgaaccttaattcctttgagttatgtttccagcagtatggaattcatgccaattaacctgccttctcacaccaagtccctcggtgctcatagctaagacatgccagcaagaccaccttttctgagtttaagattgttgcaaatgtatctgataaattccaacattctttccagattaaactgtataataaaatcagaaataggaatagatggatataccattttgatttctgatcccttgtatgtgacattttctatcacctatcagcttttagaaacttctgtttgtccctgatgttcagggtctttttcacttgtaatacacaccacaagtatacttccactctcaagggtcatgtcttttggatcaagggagatttgacaaaattgttacttgaataatttcttatccactgtttactctggtctttctggagttcctagtttttggatttagagtttatggtttcatcttctaattttttttgttttgttttctcttgtattgatgatctctgtgtttttattctaattactggcttacttccttaatttcatatttcaacaattttccagacatttttattgtcatatttttaatttctcaaaaactttgttttattctctgattatttatgtatattttgtctttaaatatatgaaacaactttttcttatatcccagatgctttatttagtcttatctctctgaggaaattatttttaatatttcaccttggcttcttccattaagtctgcttgtttcttttttattttttattttatttacttatgtattctgttttgtgaaagatttttctcagttgtttttcctttttcatgaaactgtctcctttgccaaattttctatcagtctgagaattttttcttgttgctattaaagaactctttatatatt

SEQ ID NO: 39173 - DNA, 2433 bp, Bovine  19866880777264
  misc_feature (1)..(1): n is a, c, g, or t
naactgagttctataaatgcaaagagaatgcaaattaagaaagcttgaagttcagtatttaaaactggtatctttctacttttattttcataatactttgcccatgagaattgttagagttttgtacaccatacactttggtgagcaaagtttcaaggtttatttgggccatttagaaaaagcaaacctaattctttttattttatggctagctgaagccatagagtttcatgagtccttgttgatctggtcttaattaaaactcattaggtaaccttaaacaagctacttaacctttctgtgcctcaatgttcacatctggaaaacgtaatgataatagggcctacctcataggattgttaggagcattcaatatgtaaaattacatttctcccactttatgaagcacctttctccctcttggttcaatttctttgaggttgatatgtatgctgtaattgatttcataagatttaattgtgttacagatttacgtgcaggagttctttcttccttagtggtaaaaaattaacaatgcattttactatcaaaggcatcatattgtatgtataaagtgcttttaaaacagagtctgaccctctgggcttccctggtggctcagtccttgaagaatctgcctgcaatacaagagacctgggttcaattcctagatcaggaagatcccctggagaagggtatggctacccactccagtattcttgcctggagaattccatggacagagagcctggtgggctacagtccacagggttgcagagtcagatatgactgagcaactaacacacaagaaaccaccaggctttttcagagagattcgtgaaacctaggtcagctagcctcgctctctgctgaatgttagagttactaggtcaatttaaaattcccacaccactgactaattcaatccagatctctaagggtggggacacccagtcatctgcatgttgtaaagcttcctggatggtcccaaagtccaggcaagatggagagtttactagttccccaaaatgagccctgggaaccgtaagatgtggcaggacttcctggggcaccaacccaaggcccaggaagagagtcctgatggggaagacaatgtcagggccctgatctcacgtgacctaatgggattcccacgtcatcccacatctctcacatctctacagaccaggcagggagcttctggggccagggcacatctccccttcctgcaccccagcctagaagaatccaaggacagggactgtgtcctaagcatgtcctaggcatctctattcccagcagtgaccaacttgagcagcatccagaaagacgtccaaagaacagtgagtgaaggagagaagggaagtgggaagggtgcgggggattccccaagactgacaaggcgtggttggggtacggggagggcatattttccttcagggaaccagggggtcatggagccagactgcatgcaggaagcttcatcttgggctccccagggacctcatatgccacagcggtccttggagaaagttccaacttggcaaccacaatgtgaccctcctcaaagcccccaggaagctgtgtccttggggtgggcaggagaccggggaggcaggcacacacacaattgctcctttatccaagctgttcttcctcccccctgctcccgcagagaatgaaaaggtcccttgtgggcaccagccctgagcactgggacgggacccaaggccctcagggcagcgcctccctcagcagcggccctgaggctggcacagctgtgccaccagggctgctcaacagcttctcccccacctcactcccacccccaagcagcacccccttgcagcctcctcagagccttggtcccctcccagggctcaagatatgaaggcagaagaggctctgctatgaccccagccccaacctgagtcctgcccttgaaatcagaccaagccacggctccagccacttggagagatgaaagccctccccagctgagtcttcaccaaggctcccagttaacctgagtttcttggcccacatctcaagggcgcaaatggccaccagccaccgcatcctccactggggacttggctccatgtttcaacctgacagacagcctgggatctccccagagttggggagaagcagcacattggctctatatccagagcagacattctgggcctcctgtcctcacaagagactgaaggctctgagggtcagacactcagcctccgctgagtaccttgccacacaggaatcctcggccacagagcttacatcactgcagccctaaggctcctccaccctggcccaggcaacagggtcccaggacaggagacagaaacccagagtgtcagggccctgaagtccccgagggtgggcccacgagctgcctggccaagcaaggctctgtgtgcttagcca

SEQ ID NO: 39174 - DNA, 865 bp, Bovine  19866880834176
  misc_feature (1)..(1): n is a, c, g, or t
ngaacactttccattatgtaaaagcctattttgttttcatgtcattcttagattacatcatagagtggctgcagccgtctcgtaccgtattatgaataaatcaccagcttaatcatagaatgagccagggccctagatttaaaaggaaaatattagatcatttttaataactgatataactcaagccagtcgccattgaagcagggggaggtgatgtcatcctaaagaagtccaaagaggaactagagagggtcagccctgggcaggtcccagagaagcttccatttacaaaggaagaggtggctgatggcagctgagtgggatgcgttctctggactgaacgatcttgtcatgaaaaccaacaatgacttctcaatagaccatcctcatgaaacacaatgtacaaatagcttgttcccaaaacgactatatttccaaagaccagaaaacatgaacatattatgatgtctgtatttatgtcttgggagccattgagcaaaattataaatattaaggcttttagttattcagaaaaagagatgaaagctggggtgacatatgcaaatgccacaggtctgacgtaagccaaggggacagtacaaagtaaggacactgagacaatggcctgatagagaaaagaactagagtggtttctagccgtcacaaactattaaggagatttgggaaaatgaaacatttactgtgcaccaactatgcactaaatatcatacacaattggcactttaaatacacatgctgctttgtgagcccagaagaatctaaaaggtaggtgctagtagcactattattttcagatatggaaaagtagtgtgaaaaatgattaaatgatgtaagtagatatgca

SEQ ID NO: 39175 - DNA, 1083 bp, Bovine  19866880839324
  misc_feature (1)..(1): n is a, c, g, or t
ngttaagtttttttttctttctttctgatgttattataagtggaattgtttccttagtttcttttctggattgttcattgcacagaagcacagttgatttttgtgttagtctgtgaactcttagatggcaggagccatgccttctttttgttttgcagagttaatacaaaaatataataacatttattaatatttgtttatgtatatttattttacattagcagtaatctttgtcttttttttttccttttctctctcctgctttagggtactactagttcaacagcttctcctccagtctccacccctgtcacaggacataagagaatggtcataccaaaccaaccccctctgacagcaactaagaagtctacaatgaagccacagcctgcaccccaggctggaccaatccctgtggcaccaattggaacactaaaaccccagcctcagcccgtcccagcttcttacactacagcatccacgccttcaagacctaccttcaatgtgcaggtgaagtcagcccagcccagctctcattacatggctgctccttcaccaggacaattttatggttcagggccaggggcccaaggttataacactcaaccagttcctatgtctggccagggtccacctccttctacacggggaggcatggattatgcatatgttccaccaccaggacttcagcctgagcctgggtatgggtatgctcccaaccaaggacgctattatgaaccctattgcgcagtagggcctggctatgggggcaaaaatgactctgatccttcctatggtcaacaaggccatccaaatacctggaaacgggaacaagggtatactccttctggccctgggaaccagaaccctgctgggatgtatccagttgctggtcccaagaagacctatatcacagatcctgttccagcgccctgtgtaccaccactgcaaccaaaggtaggaaacttattaacatagtggtgggaataaaagggtacctatcttggcctgccttccccagaaagcagatcctaaggcaaaagtgttaatatatgtgctacttttatttcattaaaaagtaca

SEQ ID NO: 39176 - DNA, 2334 bp, Bovine  19866880999570
  misc_feature (1)..(1): n is a, c, g, or t
naatgtgtacatagctttccattgttaataatttccatttttagctttttatttgtttacttttaaattatgtttacatactcctttctaaaaacatttgccactagaaagatattgggtatttttcaatctttaagtattgtatatactgctactgctaagtaacttcagtcgtgtctgactctgtgcgaccccatagacggcagccaaccaggcttccctgtccctgggattctccaggcaagaacactggagtgggttgccatttccttctccaatgcatgaaagtgaaaagtgaaagtgaagttgctcagttaacaacccccatggactgcagcctaccaggctcctccaacccatgggattttccaggcaagagtactggagtggggtgccattgccttctccgagtattgtatataacatgcctataaataactgagtaaaatgttttatgttattttattttgaattactttctaaacgtaaatcctttgatttatgttaccaagtttacagcaatttggagaactttttctagatttaagaagatttttttccaattttcagaactgggagcaataacaagaccaaatgttaaactataacctctatccgcttgaagaggtttgtttacatttgttttgaatcaatttaataggtacattatgtaatggtttttaatttgagtttttataattagcaaaatcaatgagattcttttatactttgatgataggtctcttaaaacttagttttggttattctagtggatttatttaaatgaacagattaaaattaagagcactaacttcctagggaagaaaagtagtataagtaagtgtacatggttctagtccttgctctcgtggtgtgatgttagcaaggtaatttaatttctgagtaccagtatcctcatttattaaaaggaggtaataacttcttcccggtcttcaaagggaaggagtaaataagtgtaatattttgtacatcatgaagaagtggtttactaatatcagggcttgacctgattaataatattattattgttgctttttcccttagcttaatttgatagaatttagaaatcctctaagtttgggataatttaatagctgcagttgctatggaaatactgaaataaatagatgtcatagaaagagcatgaggacagatatgagaaagaagttcatgttttgcttaagaagatttttgtgttggcataggcagcaactgtgcctcccacttatgtggccttctgcccttagtgaggcaggtttactcctaagtacagatttataaaagagttgctgtgttcttagcattgccaaagagtctggacctagagacctagtgcatcagagattctcagcaagtctgtttatgaaatggcagccaaggatctttccctaaaccagggctcttactcagagtggatggaatccaacccttaactctccagcagtggaagttagtacagacatttttattacagttacaatctaagtgattaaaagacctcaggaaatcggaggccaactccacaggagactaaacacttgaaagttcctgaatttgacacattagtggccaacacacacagtcttttgctctctctgtcactacatggctacagtcaaagcattctaacttttcaagctacattaagaggcaggttttgtacctccacagggaacttgtccttttagatgctcaacttctcctaataaaatgttttaaaagcagttatggcctgtgctttatgtgggtattaggaaaggacctgagagtttagactaaacttgaaaaattcacatgaacttcctttcttttttcttaattacccatttctgctctctcatcttcctctccttctctccctctctcttttacatgcacacacacacacatacacacacacacacacactttcttcttatgttacatcatcccacaggcactgtcccaggaaggagaaaaatgattcaagcaagagaatttgtcaagtatactcttgagagacttaaccatgttaactactatgaatagttctctcttccatttgcacgggcccttgcgttttataatgctcctgagcctctttaactgtaccttaccatacctgttagaaccttgtgaaacagacaagggggagatcctttgtcctgtttatagtggttttgatgttttcaaagtaatagccaaaatgaagactagggaacagatctaacttgcattttattgctggatccatactgctgccctgaaacgagagtttagctttctaaaaatgtatagatactgacagcccccgggattatagacttaaaatct

SEQ ID NO: 39177 - DNA, 1119 bp, Bovine  19866881007750
  misc_feature (1)..(1): n is a, c, g, or t
ntgggctcattgtttttcatagtttacttggtttatcacccagtgagggacagcttgacatttacttttcccatctgtttgattctgatctcctgtaggtgtttctccaaacttagcaaaactctcttgaccatatgaattgatagcaagtgctttcttgtgtatctatcataagacagttacatccagaggcatatttgacaattagggagcagtctcagatggttaagaatctgcctgcagtgcagtggacccggccgggttctatccctgggttgggaaaatgccctggagaagagaatggctacccagtctagtattcttgcctggagaattccatggacagatgagcctggtgggctatagtctgcgaggttgcaaagagttggacatgactgagcaactaacacatgcactttctttctttctaaggaaagagaatgaagtctggagcgaggcatggcttctgcatcctctggtggatggtggagagcgcagtcattgtgctctccagggacctgcctcagttcgggacacttgtattattgtgcttagcatttctgtattactttacatttgcaaagtgctttccagtgatttattagctgtgcttgtttttaatagcccctggaggtaagttgatattcagccttctgagaacataaatgcatagagaaggctcatctcatcagatattattggatctggggtcaggactttgaactcctgggataaggccatttggggtcattgcctcatgaggattaataggagatcaagtggacttaacttcagctcccagagtctctcaggcagaggtggaatgatggcagctatttaaagaaattgcatagaagccattatcaaaagacctggattccagtcctgactcggctgttgaccatctgtgttgaccttgagctgtcactttgcctatatgtgtcttggattcagtctctggtaaaacagcgtttgtctcccaagcccctttagatctaacattgtgttaaggatgattctatgactttgaaccccttctttggaaggggtagttggtgaattatatgacaaggaacatgggtgtccatctcagtcacggaaggcactctgcaaatgtaa

SEQ ID NO: 39178 - DNA, 1251 bp, Bovine  19866881016171
  misc_feature (1)..(1): n is a, c, g, or t
naaactcaaatttattgaaagcttcctttcctaggaattgtgttgatgaaagactgtgagggtgattagagatgaatgtgatcttcaccctgccagttagcaattcactctagtggaaggaacagacacacacacatacacaaatttaattcaagatgatcaattctaaaatggtagcaaagttttatgcagcggaaaactcaaacaaggaaaatgaattctgatttgtggttatctgggacatacatttggggaaggcacagtttaaacagtcttgaaattgtacaagaacttttggcaggatggaagttggcaggccccgcctgccaggcccaggggaaggagagctcagtgagtgacgggaagaacagggtctgaagcgtgagagaagggagttttggagaaggactctggaacagtggacaagtggggtcacaaagagtcggacacgactgagagactgaactgaactgaactgaactgatgcagggcacttgaggctcatatgaggtttggttttattcagacaacagtgcctttggaggtgacagagtagatcccatcacagtgacaaaagtgaaagacccagaaacaaaggtagaggcagtctttccactcctgctccccagtggggtggtttggggtggggagataaggctgaacagtggcttctagaagggatctgatggcccctcccagaaaccacacctgaccttcttctgtaaataccaaattacctgttcatttccccaattacctaatcagtgaaatcaaatcaatcactgttaattctaactttaataaacatacttgagtttacatataggctgttcttcctcaaaccataaataactgcacgatgcatgtgaactttgccaaggaggtttaggtggggggaaaaataacattcaattaacaagcttgtcagaagctgagtcattatacatgacaggaaaacacatttgcaatattaaaaaactaattagaatatatattttctagaaagccataccatattaatgagaggggaaaagcctctgtatcaaatctcagaacaaagcagaaagggccttgtgtgttacaatccagagccaaggggagcagtagagcctcatggggagcgtgctgcttgagtgccaggctgcccgcagcaaagcctgattctgccccgggagctacttggcctcaagtatgtgcttaatctcattgagtttacccatccatcacatgaggatggaaacagttgtgaag

SEQ ID NO: 39179 - DNA, 837 bp, Bovine  19866881029578
  misc_feature (1)..(1): n is a, c, g, or t
nttacagttcgtgttctgcaaaagatggaaaccaacaagggtcctgttttgctagttgcgaacgcacacttcacaggaatgcattttatgtctggtattctcctgccgctcccttgccctgtttctctttggccatatatggaactgagctctaacgtctgggtcacagaactcaggcctcgggtatgaaagcaatctggtttcggtgctgtttgtctttactgaaaatccgatgaatccatctaggaaacatttactaaaatgcaaaaggcaggaagaattgattcacaccctgaacttggcacacagaaacagattattcttttgctcacccaaaggtatgctaaccagattctgtggagaaagtgacaaatttaacaaatataaaagtttcttgctcaagaggtgtgtgcatgtgtgtgtgtgcgtctatatgtgtgcaactcacatgtgtgtcggggaggggagggtagttgtcctaacagagttagaaagacaaaattgatgcaaaaagcaagacagtaccatcaaaccaataacaatacatactagggattcatctttcctgatatgacttagttatctctttatgtggtatctgactctcaaacttttgcaaatagcacttcagaaatagaaaatctctttgaaaatggggattacctgcaattattatttcaatttaaaacaagcatttagtaagcatctataatttccaacaatattcctgagaagacttgtgtgtgtgctgtgctcagtcactcagttgtgtccaactctttgtgacttcatggactgtagccctgcaggctcttctgtctggggatttcccaggca

SEQ ID NO: 39180 - DNA, 1441 bp, Bovine  19866881103654
  misc_feature (1)..(1): n is a, c, g, or t
naaaaggaaacatgtgatctatatatatatatcaagatattatgctcactactgataagctttgcctactgaaatttaaattagaaaactgtggtcttccgaagcacatacataaaaaacaaagatggctccacatttatgctttttttcagaaaggatgcagggtgttatcagccaaatgcatccaaatctgatgagtgttaggaaagcataaagtatatcatcttatgaatatggcaaatattgaaaaatatctgcaaaacatcgataccaaccaaaacctagacttcagctacagcatcaaaaaattcttgcatccttcatttgtaaccaaaaacaaggtctgactttgttcacagctcaattagtcaattcatttagggcagaaggcctttttcactcatattctggatggatccaaatgtattaaaagttcaaagagtattacataccatttcaaagtttatttcaaactaagcaaattaaagaatacagaaatgtgttatttttcccttggcttacagagaaaaaattaaaaaaaaaaaaaaaaaatcagcccgaggtggtccaaagcataagaagtcactgtttcaaatccgagaattcatatttacttttctaaactcttaagaggtaggttataaccttaaaaggctggaactcctcaatggaagggtgaaccactgtctatggaacaatcacccctccataagtactggggtagagtagaagtaacataacatttgaagacagacaatctagaggcaaatcaaatttcaccatttactctttcagttggagcaggtcacgcgtctttcacttcttcattgttaaatgagaataatacttgacagcgtattcagttttgtgaaggttaactaagaaatctcactgaatctaaactgatgagacgattattcccccaaatctttatttggcaatgtgcaccatctgttgggcttcctggtggctcagacggtaaaaaattcacctgtaatgcaggagactcaggttcgatccctgggttaggaaggtcccctggagaagggaatggctacccactccatcaattaataaaaatgttgaggccatctaaattcgactaagttcaattcaatgaaaatttactggatgctcatcatatgtgatataggtctctgccagatgtcatgactggagggagggagggtaggagggatcaggagaaagggagaagggaggagggtccatgtgacttacagtttctgtctcctgagatcctcctatcatgtggagaagagagcatttcacatatgaaatctctaaagaaaactcaacactgtataataaagtatcccaaagacagtggtgctgacaatggcttttaatggtagtgttttgtgaagtctaatatgaggttagggaagggttcagagcaacagagaacagaccttgttattcc

SEQ ID NO: 39181 - DNA, 861 bp, Bovine  19866881129846
  misc_feature (1)..(1): n is a, c, g, or t
nacactcctgacctcaaaagtggagctggcccatggcaagtatcttcccaaaagggaaaaacagaagtaaaccctgacgaatgaatcaaaggagcttcaagtgagcagattcctggcaggaaaagtcaagaccctcttctagattcactaaataagttatgggacaccaagactgcaaaattccactgctttatctggcccagaacttgtggaatgagaggataaaggcagatcttatcacatctgtaaatggaaaggattttagagcccatcacaaggacaaggcaaacttcaaggctttgatattgaacatgtgtaaagtattcaacctccctgagctcaagctttcctgtctgcaaaatgggtctaatacacctacccatcaaggtgtatgtgaccatttcttgggattccataccagcatgcaaagcacagagtctgcacagagtgcgccttaaccaatgttcatcctcatcttccaaggtctgtctacaacttctcaaagcctatgattctgtggttctaatttactagaactacaactgagtctaagccatgtatgcttcctaagtctgttagatgctgtgtgttccatgactataaattcatttactttgtcatccaaaaataaaacacatacctgaaaacataaatatccaaacgttttccaccaaaagcaaactctttggaacagttttgaagatggccttcaaattcagttgatgagccagacagtagtaaaaacctcagtttaatgcccaagatctcatttaaactgtccatcagccctataagaaagatttcctattgtccactgaggaaactaagggtcaagaagtcaggcaaccgtccaagatttgg

SEQ ID NO: 39182 - DNA, 1799 bp, Bovine  19866881141689
  misc_feature (1)..(1): n is a, c, g, or t
ntgatttgaagtgtttttctaagcaccttcctagtcttaagtttttcattctaagatgaattttataaggcgaatatgaaaattgaaattagattaagtctgcctgagggtaaggagaagaagctcaatgctaatatttggacaccttttcaagaccccaaatttgctgaaaaactataaaagctataaataaaacaaaatataagaaaatcaggcaataggcatgttctgtttatgtcagcagagtatttctgggtgattcttcttgtaataatgtggtttccatttttagattatcatattcagtaaagacttactttttatggaataactaatacccaagcatctaatatctagtgagataagttaagggctctcccttagcaaggcgagcatagggagatcccagacaccaagcaaatccacagaaactgcacaaaaccagataagctcagtagtgggctcttgcatcagctcctgttcatgtacttttatttgtagttctgtctcgggcaagagataccacacaaggggagtgcaaagttgaaggtctttagcaaaaatttggactgtaaacacagcttggcattatcagcattctgttaagttcaaagaagttacaacaaatacagcttgctttatttctgaaacaaaactgtgcacatatttgtggccataatactaattaacctgtagattgctcctttcatctattcagtgtgtttttcttctccctgttacaacatgttggggttatttttttcccatctggaatattctcaaactgttctcttagaagcactagggagaggaacagtatatgaaaagactagagagactgacttgcacaataagattagagaagctatagacgtaaatataacgaggctaaaggatgactaaggagtgccatgatggtagtctataaatatttgaaaggtgtaaatgctgaggaataatttagcttggtccaggtggtacaaatggatgtgatggtatgtcttaaagacaagggaagatctctgttaaagaaaaactttaaaataagttgttgtccatgggatacagtgaaactggaacagaaaagcagttgaaaaacattagcataaaagtcatctgagttaaattcgcccattccagtccattttagttcacggactcctaaaatgccgacgttcactttgccatctcctgtttcaccacttctaatttaccttgattcatggacctaacattccaggttcctatgatatattgctctatactgcatcggacttaacttctatcaccagtcacctccacaactgggcgttgtttttgctttgcgtctgtctcttcattctttctggagttatttctccactcttctctactcttctggaacatgtgaatttaactcagatgaccattatatctactactatgtgaaagaatcccttagaagaaatggagtagccctcacagtcaacaaaagactctgaaatgcagttcctgagtgccatctcaaaaacaacaaaatgatctctgatcatttccaaggcaaatgccacgaccagtaatgctgaagaagctgaagatgaatggttctatgaagaccttacaacacctgatagaagtaatatccccccaaaacgcccttttcattataggggactggaatgcaaactaggaagtcaagagatacctggaataacaggcaaatttagccttggactacagaaagaagcagggcaaaggctaatagagttttgccagggagaacgcactggtcatagcaaacaccttcttccaacaacaca

SEQ ID NO: 39183 - DNA, 1475 bp, Bovine  19866881169043
  misc_feature (1)..(1): n is a, c, g, or t
nccattgcctgctccctcaccattcataagtaattactctcttctgtgttcccatcacatattactcattcctctgtaatagcaatttgttgtgccctttacctccagtcagttatttatagaagtgtctcccttcaccccccacagtggaaacttctgagagtagggatggtctctttgtctgttctctcttcaactgtacctgccaggatgttttgtcctactcttgagactttctgtaatgctaaattaagggggcagacagctctgctcatcagaaaatcacgtgaaaagtttctttaaaagagatttataagaaagtacatgttacgtaggcatgggatacaaagagttatgctcaaaaagatgaaccaaagtgacaaaaataagaatgctgaggttctttaactgaattttcagtgacatgtttcatagctgtcattttgtgtgtggaggtaatgacatcaaaagaaaatacatcttaaggaattgatgcagtttgctaaattgactcaaaatttttcctgttttggaaaaattagaattctcatctatcaagtaagaatttttattctaattgaaaaatcacagtcatagggtaaccgttgttattttcagtcttttcgaaacatgtattagatataaacacagtagatatttaggttaagatacagatataggtgaaggatatttggaaaatgcaagagaactttcaatgagtaatgcatgctttcctgggaggcagagctgtttgatggttatatactgtgggcttatttgaaaaactaacgagataaaatgatgtcttcatctgtgaaggaaaccaaaaagtactgtcattatttgggaagccttgattaccagaatcaagaataagtctttattcccaaattaaggtagataatacagttatttgaatttaaataatgtcagtggcattccagtgaagcttgctgagtcatagccatgttctcttcttactgtaccacattgctcttctgttgggaatacctacacttaggttatgctttccagtcttttttacatcatgattcacatgaaaagtgatggccttcattgagcacactggagggagtagatgaggcttctcctggcccaaggtaactaccgttcagggactatggaacctctggccccttctgccccttccaagcatgggccacctgggccccattggaggcgctgtgtattagcctgccagttgagaagctttggactagagagttgttttgcatgattaaatagattgtgtttcatttttgtcaagtatcgagagtttgcttattcatgatgaaactaatatttatggagcatcagttttaggcaaggatactgttgtagatgctagggatcttacaatgagttttctggcttaccctgtgcaagccaatgaaattgacagtagatgaactgtcttaagatctcaacgtgtttcctgtcttgttttatacgca

SEQ ID NO: 39184 - DNA, 698 bp, Bovine  19866881171275
  misc_feature (1)..(1): n is a, c, g, or t
nagcctgacacataaggtcttccatgttctggcccaacattcctttcagcctcatgtcccaccacttccctccgtgttttctgccactggcctccccagattagtcactttccccgagaacaccctgagctcctccctcaaggccttagcacatcgtgttccctgggctgatttcccacctcctcatacgtggaaatcctcttgtgtgctcaggctcagtttaaagtcatcttcagcagggctcttcctgaccttccaaaggacacccgcatgtactggtattttgcacactcttctcccatcttgttgtgggggagtgtgtcctctgtaatccctttgagagctcaaggcaggtccagctcagcgcccacctctgtagggcccatacacagtgcctccagggcaggaggtgctagtgaaagtctgctttgtgcacctctgagcgcagggcatctgacatcgtggcagttcacggttgcgccgggagctgggtggggggggtggtgtgttcagaagctcatactaggattacctgcgatttgtttcatcatgaccccagacatttgaattctgtttttgagtcactctggtatcagctcactcttaacctttctctggcctgcttcccacatagctggcagatgtcttcttagcactctgaacttagggctctggactttttatttcatgtaagaaca

SEQ ID NO: 39185 - DNA, 2350 bp, Bovine  19866881174399
  misc_feature (1)..(1): n is a, c, g, or t
nctttgtaaaaaaggactttgaaaattttggtccagtggttatgagagggttaaagagagcccatcgttttgtaaccaggcccagccattttgtataagccatgtcaggatgttgtctgcatgctgtctttgctgatcacagtaatcgggtcataagagaaagagaagtaatagagtgtctcttagcaaccaaccccaggagaaagagaaaattactcaaacccagccatctagccagggaagtagaaaaatagtctgaaagtctgttgaaagtgcccaggaacatgattcctacgtggcagctcctataggctggcttgggtctctctctctcttttttaagaaaacggaaagtaagaaataaataaagaaacaaatatctgaaacagaaacttttctttctttgtcttccttcctctctcttgtggtaatttgttttttgaaacttatctcagaaagagggagaaagaggcaaagagtggcagggacccaagaatctttgtctcctaaaacaggaacttggtggtcccaagtgtgagcggatgctgggagagaaaggtggtatcatttcattgtccttggtttttccaattgagattggaaatggtagaatactcccccaaggagtaggaatgcaaaggctagaggtggtattattagttttctaagatctgcttttgcctgccctgcttgttaactgtgcagcagtcagctctgttgttgttcagtcgctatgtggggtctgactctttgccaccccatgggctgcagcacgtcaggcttctctatcctttaccagctcccagagtttgctcaaactcatgttcattgagttggtgataccatccaaccatctcatcctcagttgtccctttctcctcctgccctcaacctttcccagaatcagggtcttttcaaatgagtgggctctttacatcatgtggccaaagtattggagtttcagtttcagcattggtccttcgaatgaatatttaggatcgatttcctttaggattgactggtttgatctccttgctgtccaagggactctcaagagtcttctctagcaccacagtttgaaagaaagcattagttctttggcactcagccttctttactgtctgattctcacatccatacatgactgctggaaaaaccataactttgactatgtatgtcagctctgtagctgttaatatttatcactacagactttggttcaaggttgtggtttccaaacttttttttctgacacaaatggcagttataaataaaatttgctttgctaattatacacatatagatatatataaagatgtgaaagaaaatttcactccacacaacatgctgtcactttacatgatacacgttgatgttttctatttcagtttttcaaaatacttttggggatctagcaaattgattctatgatccattaatgagttggtttgtacagtttggaaagcactagtctagggtcagcatttgccttctgttttaattgaatttaaaatgatgccaaatagcaagttcagccatgggaagagtccttggccagcactgtgatgttccgagtgatggttgtttaagctaaatattttttttttgtcatctgttatgtagatgcatcctaagatcatggcttgaaatttagggaaatgaacctgaggtgattcctcttggcctgtcagcagtttagaaagggtgccatagtgtggccaggaagcactggactggactcaggagacttggttccattgggcacattcttttctcatttggggctccttgtttagtgatggggttgcattcagttcagttcagttcaagcgctcagtcgtgtccaactcttcgtgaccccatgaattgcagcatgccaggcctccctgtccatcaccaactcccggagttcactcagactcacgtccatcgagttggtgatgccatccagccatctcatcctctgttgtccccttctcctcctgccctcaattcctcccatcagagtctttttcaatgagtcaactcttctcatgaggtggccaaagcactggagtttcagctttagcatcattccttccaaagaacacccagaactgatctcctttaggatggactgattggatctccttgcagtccaagggactctcaagaggcttctccaacaccacagttcaaaagcatcaattcttcggcattcagctttcttcacagtccaactctcacatccatacatgaccactggaaaaaccatagccttgactagatggacctttgttggcaaaataatatctctgcttttgaatatgctatctaggttggtcttaactttccttccaagggagtaagt

SEQ ID NO: 39186 - DNA, 1403 bp, Bovine  19866881208860
  misc_feature (1)..(1): n is a, c, g, or t
ngctcttgtttgcaggaaataagaagataatcttgcctcaagggctatatagtcaggtatttaacacaattatttatcagctgcgtaagcttcaggcattgtatgtacacttttagaccatctataagatatactctgtgaagtaaaattattggaattttaactttacatgtgagcaatttgtgatccagagtagcaaaacataatccaattctcttctgacgtcttgaaccccaatacgatagcatagcaagtttgggctcaggacctcagagaggccaaattcccagagacaaattctaaaattcacaagtggccccatgcgcacatacgtgaaaagtatacctactggctcagcagcagtaagtacccaactggtatctttcatttcaacaaatgtccagttcacagttttatgtaaactggaaatatgtatgttcaaataacaaaatataccaaattaaactttcatatctgtagttaatgtattcactgaaagatgacatgtgacgttcctggtaattcttccacagtatgaaagtaagcttagcagttatcttccaacatggtatttttgtggagaggacagaccagttactcaccatgacaaatagtgatatgtaggattagtattaaccacctccaatcttctgttcaaagagactacctttatcatcattacgcttattttagctacaaggcatacaaaggaaatgggtgttgaaacgcacaaaaatgtgacaatatcttatctgagattcggctcttgctcttaaaacacaacgttcccatgcatttgctgtggtaaaatctaatcatcttgagtaaaaaacatagacaaatttgtattctgttgtttatttgcttttaaataaaaaaaaagataaaggaataaagggaaccatgggatctgagactaaggctaccaccaaaatagatatttaaacagtgggagagaaggaaagaaataaggaaagcagtcctgacaagaaagctctttaattttgcaaatgtgatgtgtgcttccgcatggacatagagctaattatttccactaagattgtgttataaaatggagaagctcaacaggcagctttgtgagcttctttttaaaccaatgtctaaatggagtgactcaatgtaatgtaacacaatcatctctgagccaaggtcttgcaaacaaatcacagctaaaacctaccccagggactgtggccaggacaccagagaaggcttcctcttccctccctaggctccagtagagctggcttctcctggatacttcagagcacagctgccttgcttcccttcctcctagttcactgctgagaccttacccacatcacacactcagagcacactcttacactggggcaagtcaaatgggcattttgggaaagaag

SEQ ID NO: 39187 - DNA, 2107 bp, Bovine  19866881220162
  misc_feature (1)..(1): n is a, c, g, or t
nggtttttatttagcctttttccccgtatagaccccaaccctttgctgattttgattactgcccaccacggacatccctgaaggctctaaggtagtcctatcctggtaagggtagtaaagctcatacatgtaagtagactgcctggaacaacaaagatacctaactgaacagaaactgtcctccagttcccatcctgatctgttgtcatagatttgaactctgtgtaagggccaggaggagcctcagaaattcaataaagtcatttttatagcagagaaaacctaaagtccaaaaaagctgactgatttgcctgaggttatatggtttattaatgtcagaggcaggaatagaaaccatgaaccttgctgatgccttcaaagaactacctgctttctttgggactgacatgaagaggtttaaccatatgcggctacaggccccagagaaacatccctagaaaatgttgggttgcataaattctggttggagaggttagaaataggacagcatttgcttcagccccaaccaaggtggagagtttcagatttccaggttaaatgcctctgaaactttatgctagaaccttcccactgccctagtttgtttatttttaaatcaagcatgaactcaccactcggtgtttgccagagtttggatgaatgtcagcatcaggccactgtaataatggcttaagattatttaatcctattacttatacacttcattaggctgagtgaattgttggcagtggttcagtaaacttcctactttagtagataaaagggtggaaagaaaatagggaaggcgtctgttcctcattttctttcatatttatcttgtatctcttaaaggataaaggaatggtaattacccatctacagcatggagtctgcatcagtagggtcttctgaactgctctgtaccctcagaagagaaaaaatgaaatacattttcaattaaaagaaaaagggtttgggcaaaggagagagagaaagagcgagtgtgtatgtgtgagtgtgtgtttacgctttcaaattgatcttaaaaataagcctaaaaataagttcaagagccctaaataagatatgtagtctttcatttaagggacctgatatgtagcagcaaaaaatgttagagaaagaatatggaatttaaagtcagacctcattcacactcagctaggccagctaccatgctgtatccacctcatttcatttggcttaaattgcatcacaagtagaatgaaagtggtatttcttacctctaaaccctaagtgagggttcagagaagttgacagggcttagtagtagaaacatatgcgggctttgagtggtaaataactgcacagaccaagcttcaaggacatacctaccaaacctgcaaaggagaagtttgcctaacttgaatcactaaaggtcagttattcaccagcattaccgtttctggaatgttacccgcagattgttggtttgagaattctgagtctgaggggcaatggccagccatgaaactctggaaacttggtttccccaaaaggtgtcagagatcactgctttgatgtcataatgttgttgctgtttagtagccagtcatgtccagctcttttgcaaccccaggtttatagcctacccggctcttctgtccataggattctccaggcaagaatactgtagtgggttgccatttcctcctccaggggatcaccctgaagtcctcattaaaagtaaaattctggaccactccccagaattcctgcacaaacagccagaaaattagcatattttacaaggctcttggggcagattcttagatatgctcaggtttgagatccctgtgcctctaccaccagccccttctctgtaagaagtagtcctcaaataattcactattaccccccgtctctctcctacacattcccttacaacacatgaccaaactggacatttcccctagccattgctatcttagccctctctctgtgtgcccagactggattgctgtcttgtacctttccccatctccatcacttgaaaatctgtgtcatccagccttaaaaagcttttttggaacttccccaatttgatgtggcctttcctagatatgca

SEQ ID NO: 39188 - DNA, 1243 bp, Bovine  19866881249111
  misc_feature (1)..(1): n is a, c, g, or t
naactcctaaagttttgttgccacttgagagccgtcttttctgggtttttccaataagtgttaatgcgaagcagcccattctgcacgagaaaagagagaaaacagactttgaggtcagttcctcatccacctcaacgccatcagccacaccacatttccaccctttgtggacgaagctcaggaatgcagatcctgtccccagctccccgctcctgctctccagtctggccgacctaaaactgtctccaggatacaggactgttccaaggaacactgagagcaagctctgtaagaaaagaggaccttgccaacaccagcgctctcaggataacaaagcggcctgcaggcagggcaccagggccaatgtgctgatcacagggctgggagctcgtgatccctgacaaccgccaacaccattttagacctcagtgtccttacacaatagggggaaaaatgctcttttctgccactgttctgacgtggcactctttgaattcaaggtacttgtgataatgatgcctcacattatcacatgctttactgtttagtaagtgcttttccagacagtctcatttcatcattactgacaactatccctggagggttatacccattgtagtgatacgaaaagtgaggctaagtaagatgtaagtatactccaaagatcacaccaacagcaagtagtgaaaaggatgttgatttgaatcggacctatttataattactgttctaaattcttctacatacaaaatgtatgacttctggccaactgcttaacttttctaaacctcagtttacaggctgaaaattagagatgaaaatagcccctctgtctaccactcagggcagtaataagaatcaaatgagataatgtgagcaaaaccctctggaaaatgcgtacacgttaccaaagtgtagaggattattgtgattacttgtcaatgactgtgcattccactataaacacaaaaaagcactgaggtcattctcaagacaaagacacagcaaggctctgggaattgaagggaaatgattcgatgtcctttcagggttctgtctatacactactcactcatgcaggttgaaactcagcagcaactgtcagattttcaaccgccacatcacaaacatctacaggacaactcaagaccaactcgccccttttggctacaagcaaatgatagagatgggcactaggaagaccccaagccccattcagagcctcagtccgaaaacggacctg

SEQ ID NO: 39189 - DNA, 1145 bp, Bovine  19866881256538
  misc_feature (1)..(1): n is a, c, g, or t
naaaaagagtgcctacacctcactgtgtacagtcatgaaatatgtataatacatgtaaaacctgtatacatgtagtatataataagtgctcagtgtatggtagttttattgtaaacagaactcattaatggggatatttagaatcatgtcaaactagagaacctctgctccaagcagaagtcttgatgagtagcagagagagatttaaggcttcatctagctctactctttgtgttgctcttcagagaagagtaagataaggaagatgtggtctttcttcacaatgaccttacagtaaagtggaaggtaccaacatatattatgtatattatatagtatatacaatatatatacatatgtgtgtgcttatatagataagaaaaaaaggcccaaaagttatgaataaaatacaacagtaacaaacatttatatgaaattactgctgacttttaaattggagactatgtcccaaggtaggttatagtacctttctatttgtacaaaaccattttacaaaaaagctccacttgcaagtaaggtagattatatatctggatcctggactccaggaggacaaagccttcatttttctttaatcattcacatcataacccaagtaagttaaattcaaggaagcagcaattgtacactgtccaggtatttcctattttgctgtctgcctgtttcctactgaactgacaaaggaaaccaggatcagatgcggtccaagcttgcaccagctctgattggcctctaattattcaatagagatcacaggtacatttctgaatggtttggacaacaacttctgatgagtcccaaactctcctgattagaatgctttaaccaaaggaaggaaaaaaaaaaatcagcagacaaagaaaaaaacattaaccatattttctactatctgcaattcttagcctagtagtaatatactctttgttctgctgaaaaacattctatattgattatgctgacactgacagtaaagctgtgtggtggctggctttattttaattttttctcttcacatctcagatgagaaagtgggttatgattcatcctgcacaatctgagtcaaaattcatctttgtctcttttcaattagttcttctgcattccacattaaaaagcaagagtag

SEQ ID NO: 39190 - DNA, 863 bp, Bovine  19866881263580
  misc_feature (1)..(1): n is a, c, g, or t
ntagagagtggttatgagttctggaaaaagctgtgataggactgctctggtgcatgtgtgtgttttgttttgcttttactttttagttttccgagtctttttaggaactgtgaggcaaccttcactctgggaagagtgcactggctgtctttctgtgtcttttctttcctcttcctgcctggcctggggccttgtccagcttgtgatgatgaagtgtggcaaggccagctcctgggagccgacctgaggtctctgagcagaccctgggcattcttcaaggttccccaccctttttcctcctccttttctcttctttctctgctccctccccctctctctccccacccccagcagcagcagcagccctcccctccctaaaataaataaaccagtcgctccaaaaggttccaagcacattagtcacatatcccagaagtttaatacagaattattttgacagcgagaacaagaagtgttttctagttgaacgcacagaacttgcttcttccaactgggctttctgccgcagagacagatgatatgtttttagatggatctgccgcgcaggagactgcgtctcttcccttggaaacatgacaaactgctcactcccgaaagtggttggggaaaagatgtgaaatgagagggagagggagaaagcacagacttattgagaacataactttctccctaataacttcaatcagccaccgagagctttctatgtgtttatttatttatttggccgcccctggagccgggaagtccttttttaaacctcgggctatgggtgttctaaaagatgaggacaggtcgagttattgcaatgcgggtggctctccaagcattccagttgaatagct

SEQ ID NO: 39191 - DNA, 1232 bp, Bovine  19866881265389
  misc_feature (1)..(1): n is a, c, g, or t
nctattctgcctgaaaccgcaagacacaggaaaacatacagaatggataataaaagatgctggaaggtcaaagcacacagcaggctcagggtgtcacagctcagggtcctgccctcctctgtccctggtgctattcctagccatccagtctctggacactgtaaatctaaggaaggaggataaaaacatcattccatgatttgttttttcttttacagctcctagggtcaatcattgtttcagggcatgatttctttatatggtatatttgccaaaaggcttaggtgtcaggtttatttttataatattcataatgaatctatttatagatgatttacataggcctgtcatgaccccaaatcagctgagatttcaggcattgctacctgaaatcatacaagagcaagtgttctattatgaagtttgagcattgctgaggcattctagaagaatctttcttttttttttttacatcttgtttagtttttggcaaccagttaaaactccttgggacaacatatgcaggaaactggtatttacgatgaaagcacaggaggaaaagcatagcatcgtgaaggaggatctgaggtccctgaatctacattgtttacatgataaaagaagcataagacttccgcagctactgtcattaaggagaggatctgtacgcataggacctggaagaaagttcaagagcattagaggactgacccccgaagttactgaaataaacaaatagttcccaaattttgcttgagacccaatcagaattacctgacaagttttattttgttttaatgtagactcttgggacccatgccctgagattctgattctgtaggactgatgtgagcctcaaagacagtgttcttcgttgtttttttttgttttttttttttaatgttccccaagtcagtctgacgactggcctgctttaaaaaaccattataacaatgatctccaaatggtgcataagagatggcactccgaaaaggagaaaaaaacactgagaaatctatatgtatttatttatatatggttgttacactttttactttaaaatatagatgcacagaaagttgtaaatataatataaacagtcccaagaaccactcactcaccttctcccaatggtaacatctaaaaagatataatattaaagctaggaacattgactttgtttcattactgttaacgagtccttattcagttttcaccatattttaacctgt

SEQ ID NO: 39192 - DNA, 1319 bp, Bovine  19866881365674
  misc_feature (1)..(1): n is a, c, g, or t
nctctattaactctccgtgagtaaataaaaagcatagatttatttgacaatgagtccaaatggtacagggttttagaaaagggtaaagtctcaggaaaggtttgattaaccctgattttaatatatatgaaaggaggtataagctctgcctgatttaggaggtagaactgggaaagtaaatcagaaaagcttcccagtagatgaggagacacttgacatttgattgacatcttagatatagaatagaagcaatgactgtgaggtaccaaatatctatggagcattttatattttatcaatcatagtttctgatttcatatcatatctgacttgatctcattagaagacaaggtcacaagtgggcagaaactttacctatttgaaaaataaaaccccgcaaaactaaaacatcatatgggtaggatacagattaacttatttttcctatgagatttacttttgaattctctctgaacacaacagacgtaagtgatcagtggttgatacaaagaccttaataatgcaatatgcttccctgtggtctgttggagcctgcttgcagtccaccattgacttgaggcagagaacgtggctagtctaccctgcacagttgccaagggaacagccagcgatttatgacatcatgatctgatcagggtgaaatagaagggccccataacaatgccaggagatgacaagctgcttggaaaatcacaatgcttatccaaagtcatctttcaaaacacatatgtggcaacagaaaatccaaaccaacacatacaaccatgaaaacaattacttttttcaataaatccatggtgaatcctgacctaaatatacaagtcaaatactgcttttttttttaaacagttaaaatttgctgttatttttgtctcattcagagatataatcttaaatcctgacttagattattttaactgacaacagccccaaaggaaatgagtccatgttgaaatattttaatagcaaacctatacctggctctatagtccttgaatatcttggtttttcctcataaaatacaagaatagaggcaaagcctatatcatatcagagtctttagagaaatgctagaaaagctatccaggtggtctaggagttgccttgagttcgagggatagggttaagtttggaagaaaacccaaaaggcatgaggaagcttgttataaatacggtagcaataagagggaagtgttgctgctgctgctgctgctgctaagtcgcttcagtcgtgtccgattctgtgcgaccccatagacagcagcccaccaggctcccccgtcccgggattctccaag

SEQ ID NO: 39193 - DNA, 891 bp, Bovine  19866881394224
  misc_feature (1)..(1): n is a, c, g, or t
ncgttccctgtcacctcccgcccctcctgacaggctgctatcttctcagcaaaggctgagcggggctctgctcacaccctcacagggaggcgtctgtgatgctcctgtgttggggaagctctcacccagttcctatttatgcaaaagacaccctgggaataaataaaggtcctcactctcacaccttctactcctaccaaatatgcacatgaaaaaaaattgaaaataaaactcacagaggtggggattctctactattgagagaaagtccttaacacattactcaggtaatcatttccatgaatgattccatgcacatttttttatttttctattgatttacaatgttgtgtcagtctacagcaaagtgactcatactttagacatacatacagactttcttttttcatacttttttccgttatggtttatcacaggatactgagtatagtttcctgtgctatacaggagaaccttgtttaaccatcctatatataatagtttccaggggatcttcccaacccagggatcaaacctgcatctcctgcgtctcctacactgcaggcagattctttaccactgagccattggggaagcccatatataatagtttacatctgctaatcacaaactcccacagtctttccctctcctctttccccttgacaaacacaagtctgttctctatctgtgggcatctttaagagctagaaataaggcctaagaaagcaactagtccaacgccccttatttacaagtgggcaaactggaattcagagcagagaagggcattttggtcagcccagtgggcttcctgctgaattagagcactgttttccgttcctccggggcctcctgaggggctagggtgtgcgtgtatgacacagccta

SEQ ID NO: 39194 - DNA, 1082 bp, Bovine  19866881406813
  misc_feature (1)..(1): n is a, c, g, or t
nacagtgctatttggctggctagaactcagctctatgtttaagaaatgagtgggttgcagtagagtagtgtcttcccaagtagagtttgtcagaattttggaaatctgaaaagtttccactggttttctgcctgtttcccctatcattgaattcactgaggctagaaaccataacttgttacccagtagctggcaaaattcccggtatttacaaggtggtcagttaatggttgatgactgtatgaatgacaccatttaaaaaaaattctaaagtcatatatttagaggcaactaatgtatttctttgctattggatggcttgggaagataaagtgttttttctgaaaggaaaagatatttgaatctactattctttttctctgtaagaaaagctattgtatcttaaatattagtactaatattcattttgtaaactaaaatgaaagaggagaaaggaccaaatgcttattttttaaaaataacaaccacaaaatgttttttcttaatcagatattggaattaaatcatgctatacatacaagtttacgttacgttcttttattttcttgtaacattataacataggagtgagtgagtgaagtcgctcagtcgtgtctgactctttgtgaccccatggattgtagcttaccaggctcctccgtccgtgggattttccaggcaagagtactgagtgggttgtcatccttctccagataagagggttagcatactataatatatataggtcttgagctttatcaaagcaaatgttgaaaacagcaccagcatgaaaagtgtcttagtttattcgccattccagaggacctcaggtatcacagtatatggaatcaaggctttcctgagatgccctgtgcaaccaggcagttttgaattcttctatgcaaatcctcttatcttataaggaaaaaattgagactcagagaacagcatgagcaaatttgtttcaacccaaaaagaaaagaaggatgacataactcttcattttactttcagaaggaagttccactgaagaaatgaggccccaaatgattgacctctgtcagccatttgtaggatttcac

SEQ ID NO: 39195 - DNA, 1105 bp, Bovine  19866881429354
  misc_feature (1)..(1): n is a, c, g, or t
ntgtatatatcttatcaataaactaagattttcccttagatttatttgctaaaaaagtgtatggtcatggaaactgagacgaggcacatgatcagtagagagattttacattttaaaatgtcaagagattataattaatacctcagttgaggttaaacaaacaaaaatacacatttttttctttgtgggaaggatgataatcattttgcaactcacaagaatcaaatttaaaggtgtgtcatttctatggagctatttcttgtggatcactatataaagatatgaattttacaacctgctgagcacatcaaacaagtttaactgtataatcaaaatctgaagacaaaagacttctaaatggtccttactctatgaattcaggcctatttttcatttcttaccatttatcgtgcctgaaatatttaaagtaagttatgagggcctgaaatataaagcactccttataaaggaatattcttccctaataagtgaattcaatttttctaactctgtggaataaaatattcataatggattaatgtgaaaggataaagacacaattaaatgtaatttctccttattaaaattgatgtcagatattgggtttagataggtatgctttaatagaaaatatgaatgtagcagagcataaaacatattactgtattatttttttcttgcagtcctaaaatgcaggagtaccctctgaagtctgcaggcagttccattaactcattgttatatttatgagcaaataggcccagagcccattagataccatagtccctattgcaaaagtaaccttcagtaaacagagtaattggcttgatgatgcctgtgttaatatccatgttagctctcttgtcaacaacctcgaggaaatctccttctagagtctgttagtgcatatggaaatacattctggcctggaatggacatagatgacacccttgcagagttctgtagacatttagcctgagaagcaaaaggcaacattcttactacttttcagtatcaacaaactcaaaacaatgatggccactgaatgataatcattcactgggcttcatgaagtatgagatacatatgaagacctcagaagtaa

SEQ ID NO: 39196 - DNA, 1555 bp, Bovine  19866881510801
  misc_feature (1)..(1): n is a, c, g, or t
natcaaacatggaaattttcaggagcattctgaaagaaaccgtgggcatcttttgataaagatatggatccagacacagaatggtgtgatgagaaggctccctgggcaattctgaggtgggatggatgtggactgatagtggtgaggtcagggaggcagtgaggatggttttcccactaggagggagaaacaaggagaagcactggattttttactatcagtccagatgaagcatcagcctgggcttctggaggactgtgtccaagtggctggagaaattggctggagcctaggagcccaagtttgagtactttgcctgacctcatagctgatttatttcgaatcatcactctcttcactgaagcatcatttctccaacttgtgcttcagaatttggatacaaaatgtatccaaagttgccggggacctttaaaaaggttccatttgctgtctcagttctagtcctcacagattacccattcccacaagacactgcagattcattttggatgctctaacgaaaagctgctctaatgcaactcctagaaatccaaaagattgctttcaaattcaccaaaagcttttgaatttgaataacacctctaataagggtatagaaatcaaagtgctctctctcctcaaagcatttaaaaacacactctacccaggcaaaaaccaagggatggtacttacagattctctggtttaaatgacaaaattttagagccacaatgtcttcctctgaccagctctgcgttcttaagtcccttaagctttctgagcctggatttccccatataaaaacaacagcaacaacacaggcacacacaagaaccaaaacctgtatgtcaaactcaagtttagattggaaatgttttataaactggaaagcacttggaattattactaatgctccttaattctaaacacttaatgcacatcaccctataccaaggcagtgctgactgctaacggtgcaaagaaatgagtaagttaactcctagatgaagatgaaacacatacttcagtctaagtaagaaaatgataaatgttataaatctcattttacttctgctgaaaatagatagaagggaaccagatctagtatgtaaccttactttatttcactagagttgggaaatggattataaaattttccttcaactttaagaaagtgttgtaactcagaatctttctgtttttgttgttttatatagttattattgaaatcaagttctacatattccaatacattaatttgtttatttaaggtaagggaagttttaagtcctgcactggaaggataatattgacatgctggatgaatctagaagacagtggtcagcacagtaagaggcctgatatcagtacagataacacatggatggagaatttagccagaagaagagaagattcagatggacttgaaaactttcttcaaatacctaaaaggctttcaaatgaaagatgtattagctgtcttttttgtggacagatgagtagatgttgtaaggaaagagacttccatccaaaacaagaagtaactttataacct

SEQ ID NO: 39197 - DNA, 826 bp, Bovine  19866881591975
  misc_feature (1)..(1): n is a, c, g, or t
naatacatccttcaaacgatcatgaataaatggctcctcttgttactcttataggagttctagaaataagactcaatgtgaagaatccaatagcgtaaaaaggaaggcagcagtgtaagcacttctaaaagtagcttgttgatttagaatcaaagtaacatattatatgtcaccatagatttggactgtgagtcatagactgttaaacttgggaggcagctgcgctggactagaaagaaagttaactgggagtcaggtgatgatggctccagcgctggcagcgccactgacctgctgcacgacctcagacaggtttagccccatgggctctcctcgttcatccaaataaagaacaattcacctcaaatctctctggttttgtagtttgatatgaaattcaactagtacttgttcaaaagataccctttcagaattcatgtacagaagatcatccactgttgtcaactctacttgcaagttaggaaagaagtcacatttgaaattgcattccttgtctgaaacaaaagtgttacataattaacatctaaagtgggagataagagtcttcttcctctccatgcaccactgtggatgctggataccaccaactacagcatagaaggaacaaatgttcaggatgctaaattcttccagaaacacacacacacacacatattcatatatgcacacatgtgaaattcacacatggaaaatagctttcaattttccttcaaatacgctcatttcccattactcgatatgaagtactcatgtaagcataaaacacatttcccagaacaatagatagacctttaaaaatacaacc

SEQ ID NO: 39198 - DNA, 1547 bp, Bovine  19866882091016
  misc_feature (1)..(1): n is a, c, g, or t
nttctcatataatagataatgcagatgatgcagattcaaataataagaatatagtgatcattttaaaaaagcatgttttctctaaagggaggaaaaaatactgagcaaacatctagtgactgtgctatgagcctaatgtgctgtaaatatagtgtccttgaagcattttatgtgaaatatttgataggacttagcagatttttgcttaccgtgttgtctgaggattgtaacacaccacctattctttttttttttttcgctttcggtcacccaaactcccttggacatatgtgaacggaggtctgtttgtttccactgaagcaaatatagtcacttgctcacactggtggcttccctcactgaattccactactattttggaaactcctgtatgaaaacacagcaacccaacctgtccccacggagccgtatgggtgatttccacgcagggctgcccagtgtctgtgtagtgaggttcagtttttgataaaacacaaaactgggctttgtttccttttggtaggcttgttactacctctgggaattctggtgtaatagcaggaagactggcattggagtcccaacacaggtcttagaaaatctgaattctaattctaatctctcaaggctttatcacattggatgaattgttcctaagcctagtgtccttgaggagagggtagaaatttatgacctataaattcctttcagctctaatactctgtgattctgttagtgatatacaaataagtcaactttattttttccttttcagaaattccttcgtgtctatatctgtactggataactctcttcagactgcctttcaaagttggccacattttaacttcaccccaacaggcaaatttcagcaatgagaaacccctgtaggacttgagagaagggatcgcattcttttacattttttgtctcttgatggcttcttagtagcaataatagactggaatggttggttctattgtagtagttggttgtaaacaagagctgttgaacgaagctcaccatatttcctcttacctacagctaagaaatttaaaatgcataaagtaattcagagtcatttcagttcagttcggttcagtcactcggtcgtgtccgactctttgtgaccccatgaatcgcagcacgccaggcctacctgtccatcaccaactcccggagtttacccagacttatgtccattgagttggtgatgccctccagccatctcatcctcatcattccccttctcctcctgcccccaatcccttcccagcatcagggtcttttccaatgagtcaactcttcgcatgaggtggccaaagtattggagtttcagcttcaacatcagtccctccaatgaacacccaggactggtctcctttaggatggactggttgtatctccttgcagtccaagggactctcaagagtcatttccaacaccacaggtcaaaagcatcaattctttcggtgctcagctttcttcacaatccaactctcacatgcatacatgaccactggaaaaaccatagccttgactagaca

SEQ ID NO: 39199 - DNA, 2277 bp, Bovine  19866880341484
  misc_feature (1)..(1): n is a, c, g, or t
nccctgggattctccaggcaagaacactggagtgggttgccatttccttctccaatgcatgaaagtgaaaagtcaaagtgaagtcgcttagtcatgtccgaccctcagcgaccccatggactgcagccttccaggctcctccgtccatgggattttccaggcaagagtactggagtggggtgccattgccttctcctattctttgctagcactaccctaagtgctttatatggattgtttcattaaccatttcagaattatgttttaaaatccacataaaagtggtgattggctgcctgtgtgacaacaggcagacttttaaatgtagagatgtccagtagagttaccaaagttcccctgcctgggagggaagcttaaacaatttcaataaattcttgattggctgccctatagacaaaggaatagagagaaacactgaagtagtagaaacccaaacatttgcttcataatttattatatgatattactttgtaatagcttgtccttgaaaaatattttgttcagttgaatattattctttgtaatgtcttttatctatgattgcaacggtagagagctaagaagattctaatgtagaaaatcaacccaactgtcatcatcattgggtattattttcaaagacaatactcttcagatcaaaagttaaaaaatgtgctgtttctacttactcatcatttccttgaacgaacgtgtttttttttttttcatattaaacaaattttatatatttaaattattaacacctgtctagggatgtgaaggcatactaatgattaatgttaagggtatgactttaagtttaattctaggaaataaaagagaacttgaaatttagatagaaatacaagcatcagtattgtgtttttccaagaatgttggcagtttttctcttctatagatatttggaatgtaaattcttcccagaaacttaaaaaaaaaaagaaagaaagaaaaacctatgattagttgggcatcgtcttcttactgaataacaagcaaggtactaagctggtggatattatctataaacaaaagaataagagggatattgagataatgcttccagtggcaataagttggccactaaagtcttagaaggcattttcaaccagaaattcttaagaaattatatattcattagatagtggttcataagactgttcttgagtgatttatttttattttcaaagatttttgccttgtttcatgtaaagactataaaattatttcattattcacttcaaaatcttccaagaatcctttcttctattctgagaattttaactgaatttattgcataagaaattggatcaccatctctaaaaaataatgatatattagaattttaatgtatcctttaacagctgaaagctgtgatacgtttatttatcctgccacttttttaaaagcaaaattgaaacgaggtagcatacagaaataaaaatcctatgtgggtaactttttttaacaataaaagcctattttggtttgaaatatttgtcactttcataagagtttcataacacgtaatcttattttaccacaggtaaatgataggaaaaagacacagagctctatttcatgcaaatacactttgaatttcattagttctttgttctgaaacaagatcttagtctattcttccattcttttcctgacccaatctataaagccattgtgttttgatcattcagccaatctgggacacggatacacatgcattcctcccacacactttaaaagtattaaagactaactacaccacttctctgcaaagtcaggcctattgccaagccaggggaatgtggagaatattttacttgcagggacacccttgaaagtctagtggtggactggagtgactggccattgcttcagctgagagtcactgtaagagttgggaacaaacgtgcagaaaggagaatggcaactgcatcaagcaaagagcccctaccctctccttgagaacagaggaagttggaaggcagaggcaaaatatcctgattgtgaatgctcatgtcacacctttagatgcctgaatgatggaaatgatgcaaataccagtatcaaagctccagtcagattctaacaggggacttcaaatggacctcagggagataaggtagctgaggtgtgtccattctcagactttaagacccaaaaacagtatagttgggccccttggataacacaagtttgacttgtgcaagtccacttatacacagattttttttcagtagcaaatactgctgtaca

SEQ ID NO: 39200 - DNA, 2075 bp, Bovine  19866880388696
  misc_feature (1)..(1): n is a, c, g, or t
nagtcggacacgactgaagcgacttagcagcagcagcagcatatctaattaaacttgattttgtttcctttttcttatgttttaactctctggctcttaataccaaaattattctaccataggagcatcagtgaaagatattagccttcttatagctaaatagccttaaacattgcttagtatagaatatcagattttcgtttgtgacattcaggaatcccaacacgaaatgaatgaatttaagttctttttatattcccatgagaaatgatctctctctctctctctctctctctctctctcacacacacacacacacacacacagggttaaagttggagagaagatcaaataaaatcacagcactggaggaaaactctgtccctggttgcctgtcagtagacattatttttttctctcccataaatacccatcaccactacaaagctattgtactgggctattgcactcaaaacttactattgacaatagctgtgggcaaaatagaagccatggcagcttgctgaggaagcagctgaattgagtccagcaggcgcgccgggtacatcccttctgtaagagtcatctgactggcagcttgtagccttgagtcaaaatccaccacaaaggcaattagctcttcaccctcagagatggccttcgtagttgtgcaccaaagctgaccccctattaagaaaaaaaaggaagagaaagatagaattgacatagaatgctccagcctgctgtacattggattgatgttaacagcaccttctcattttcacatcagtttctactgggtggagtgttggatcaagacaacagctgccctcctcttccctttgttcacttaaaacaataaaacagccagttattttaccagcgacacaggtttataatagcaaagaactgcaattcgggacaggcaactatggcaaaccacatgaaagtctggtaaaacaagagaggaaatttttatagaaaaggggaagttggagagctatgataatccaaaagtccattggaaactggaagtttgaaatatagtggcttttcattggctgagttgttacagactttcattggctgagctgttgtcaggtgacgagaaatgctttcttcctccagctgagcggcattaaatagtgtcacttcctgatggagatacaaagtccatttcttcctgttgggctctgtattgaagttaagtggtacttgccagctcctgcatctgaccttcctactccattttatgaattttcatacctcctgtgtggaaaattatatttcttgcattaaatgtactgttcagtgatcaacagtgggagaagactaaggaccgagtatagacataatctgtacagagttttgtcaaaacgttgacaactttttgccttctggtgcttgacttaatcattaaccgtgctattacatggtatatactgccaaagaacaagcatggtagggatccaaccacaaaatgtattccaagtgagcctttgaagttactcttcctgtaccttactcctctttttctctctttcccagacactgatatatcagatactgatactggtatgtgtgtgtgtgtgtgtgtatatatatatatgtatatatatatatatatatatatgatacctaaaactacaaagcaagtaaacaaacttcctaaaatttagaaagtttaaatgaaattccagttagttttgttctccgcacaagtctgcttccatttttttttttttttcccggaggggcggatgctgagtgatctttatttttataatatttcttataatacagcttctttatctctctttaccctgactgaacttcctgaaaagaagatacaccaaagatccttttcaaaaaggcttatttaaataaagatttgtttaaatgaaaagaaccctttcttcaaacactaagatagactctggctcggcgcttcaaatgatcacgtgtggtgcattaaaaagaaaattaactatgcaagtacatcttctaatgtattggaatgcgatagcaaatgctcatttatttaacatgtttagacaggcaaagcacttatattt

SEQ ID NO: 39201 - DNA, 1139 bp, Bovine  19866880525651
  misc_feature (1)..(1): n is a, c, g, or t
nttaacatgtattgcttatttaatacttagaagtcctgtgtgtatgtgtgtgtgtgtttatgagtgtgcatgtgtagttatctcccatcttattcattggggtggccaaatcaaataatttaattaaatgttcaaaatattaagcgttgtggcccagataagagaaaaaggcaaagccgagacacagaagtccagtgaccaactggtctactgccctcaaaaattctaaaaggtttccagtctaagcatacataggaattctgaaaagtttaaatccctgagaaaggtgaatttggcaacttcaagattattaatagtgcctaaaacacacaaatcagaatcagtgcataaagtatataagagtaaaatgaagactattgtataaaatcatattttagtcaacatgattaaaatgcccaagggataactttgaaacaatataaatatttctcattttatctgtggagctgtgatgtttccaagtgttccaaaggtgccttttccactttttatcctcctggtactaagtggagcagaaataaattaatgattccccttggttttaatcacctacttaataagtgtttcttacgaaaaataccagctagtagtgtgaacaaaaattatttatcatcttttcttacccagagttcttatttctgcatagaaaagaagttcttttaggtaaagttggccaaataatgtaacatataaaatggaaacatttgaaagtgaaagggagtttgattgttaatctgagacaacaagcataaactggcacatcctaagaaaaatactgaattataaagaagcaatttgatgtaccttatttaacatgacctttgtttagggaacatataacctatacttacaagctccaagtctagcattggtcagagttggttacatcagggctattcagtgcacggccttggactcctgccatttggtgacctgtttgttactcagctacaacaagttaaggaacttgtattaaaatggtaaatgttcagtccgtaagtcgtatccgactctttgtgacaccatggaccctccaggcttcctctgtccatgaggttctccacgcaagaatacttgggagtggggttgccattttccttctccaaaaatgtaaatgt

SEQ ID NO: 39202 - DNA, 1098 bp, Bovine  19866880527559
  misc_feature (1)..(1): n is a, c, g, or t
ntgctgctgctgctgctaagtgcttcagtcgtgtccgactctatgcgaccccatggacggcagcccaccaggctcccctgttcctgggattctccaggcaagaacactggagtgggttgcccatttccttctccaatgcatgaaagtgaagagtgaaagtgaagttgctcagtcgtgtccgactcttagcgaccccatggactgcagcctaccaggctcctccgtccatgggattttccaggcaagagtactggagtggggtgccattgccttctccgttttaaaagtctacttttatctaattatcaaacccaaaataatgtaaatttcttttagagaggaattagttgcattgccatcttttcaaccccacaccctattttctgttaatctactctgtgtttgctaatcttgttaatatttaatgcctatttaatgtatgttgtctaatattctattttattacagtatttcaagcaagcatttagactcatttgaatcaaacttctttgtaatttaaaaagtatctttttatctttggtaagtttcagttttccctgcaaattatttttaagctgagtttttctattcttaatggttaataattcatctctctgaaattgggaacgcatctttaaaagaaggtctgcagcaatgatgtcttatgatgtagtgtctgaggcagacactgagagtggctgatctgagcagatgtgagactgttttggtcaacatcacatataaatttcagagtcaactgaatattatgttcttttatagctttcccctgtaaggctgtgctactgtttccttctgctttttgccattgttttttcttttttatatgatttacttttgatgtggagagaaagatagatgtaggggtaaaaagatgattctgtctttactggttttctttgacaatacaaacatgaacttgatattgattttagttactttccttaatctcaagtatgggggctttctcccagtctggaaattcttagtattatacatactgtcaattcatcatatcctcagtacacttaaatttaggcgtatctgttgttagtgggttgcagttgtataaccagattc

SEQ ID NO: 39203 - DNA, 1156 bp, Bovine  19866880562242
  misc_feature (1)..(1): n is a, c, g, or t
ncttttgagtctctgagcctaagaatacaaaacaaaggatggttccttctctcatacaacctgtagattaggacagagacaaatgaacagactgcaacctcatgcgattaatgatttcacgggagcagtccatggtgacagaagcacagaggcatgacatttaatgaaaactcggtgtcgtgaaagcttcccagaaaaaggaaccaataaaatatctgaaatttggaggcataatcttaaatgaatctgaattctgtaggtttcacgtccaggggctccatgtttaaaaaccattttttttttttttttcagattaaaaatgagaaccacttccccaaagaaaaagattattggagaaggaaatggcaaaacactccagtgttcttgcctggagaatcccagggacagcagggcctggtgggctgccatctatggggtcgcacagagtcggacacgactgaagtgacttagcaccagcagcagaagcagctaagttattgtgcaggaaaaatggcatcttgaaggtggtgaaactaaaaacatttcagtgatgcaaaaataggatccagagagagttttaagatgctaacaagagacaattaacgaaatattcctactgtttgatggttgattgaatgaagtcctttccctcattcagtatgggccaaatttacccatgatcattttcatcagtaactactaggaaaagaagatggcaggatgactacaaatctcagaagacatttgatacacatagaactttagtaaatcactcaaatgaaaatattatcattcaactattaagggcttgattgaactagtaatttcatataataaaatgccttcattaaatgtcacttatctgccaaatcaaaactgtagagcttagatttcaacttgggccaacatctgcagaaatactcagtattgataatcctgattcatggaacaatttgatctaatttgtttcattatgcagcacatataattagaaaacgactgaaaataaatactgcagagtattcagtaaagaagcactaaaagtagctggtagtacacaattaacagctctaaagaaattacattttacaattattttaaaccatttatgaaactgattaaatgtacaatatgcatcacattaataaaaataagt

SEQ ID NO: 39204 - DNA, 2257 bp, Bovine  19866880574341
  misc_feature (1)..(1): n is a, c, g, or t
ntgggggaattttttttaattacaagaaaaatatcaacaaaaatatttgcatcaggttttggtcactgtatatataaacttcttttccttcttaataaaattgtaatctaacaattcccatctcatcacatagatcaatttccctctacttattccttcagtttaataacatcctttctgaccctgctttattaaaatgattctttacatgtacagttcattattgattaaaccttctaaaaaactcattttataaaataacggctctaaaaatgatgcctgatttcactggctaattacaaacagtttgatagcaaacagtggttctctaaatggtcatcctcagacccacagcattatcatcatcagacaacttgatagaaattcaaaattgtcagactccaccccagatctggcttcagaaactctgagggtgaggcccatcaacctgtgttttaacaaaccctgtaagggattccaaggcacgctcaagtttgagaacaactgtaggaatataaatgctagaagtcactgtgtaacagtacaaattatatttttgttatcatttaatagaaacagtataatattttgaaattaacataggctccatcctttgtgtactacagctgattctgtgatcaaactacttatcaccagggcaacttagtgcaatcagacctgattagtggcaggttaggtttgcttatttagtgctggttaatggttctcccaaataatgccagagaatctagaaagtgcttcagtcacattgtttgagacaattctgggatgacatggaacagactagagccactacttcaggctgatcccacatgttactgcttcatacacttccaggagccctgaataatgcaaacaattgagcagccagtgaatttggctaaaaagtttttcatgtgtgtctggctatggtatagaaaaatatctttatacaaatagggattgcatctcaatttttaaaaattacagcctgctatgtgagttatttgaaaaccaggaacttcaagcagcatggcgttctcctcatcctcctcttttgaggatagggcatctcgtgagacgaaaacgtccagccatcagcaggcctatcaatcagtggcaatcagtgtgaagcaagaggtcccagccagatcacacaggttcctccacttatcatctctcactccaatcccttattatgatcaggctggtgcacaaaccaagtgtggtctccaggattttatggagcagtaccgtggccaaccttcattgttaaccaacatatgcggcttgcaaactacatgtcccggcaccaccgccttgaacagaatagtcaacaacaggaacaaaataggccactacagaaatctgttccattttcacaaataggtgtggcctcctgctcctggaatgctgccaatttggccctccgtttgagtttgacacagtaaataatgatgaatattctctctatgcctgtacagtcctgcacacgttttctgcacagcgggaaaaacaattccttacacaaaacaaagcactgttgtggatcctgtacattaggtgggaatacaaactttataagaatttgcctaatttcacaagtgtatgtgtaattttccaaatttccattctgacagatctccttcatcttcgggggatggaaaaaacaaaacaaaacacagatctatagttgcaaaaccctaacaaagcgatgggggtgggtggcgctttgggggtaaaggtggaaacaaatcaacatgcccaccacgctctaattgtgccatgtgctgggatacatatcaaaagggcactttataacaagcgttctacactgtcattaaaccactatacaggtacctcgattcagtgcttgtgaacatctctagaggccccagaaggcacttccccataaaacatatcttcaaaaagacttttattttatactagcacattaaaagagtatctaaagacacagaggcactcaatatagctatatttttaagaagaacacttactctctggagaattaggagagcaggtagggtgccagtgataacaaagtagcttatccacactgctccagcagaggcaacgtggaggaagcatctaagggctctcttaaaaagaaaatatcctctgcctttggcaacaaaggctacaatagaataaaagcaagcacctttacagggcagaagttatagggtaagccaaaaggtggaaagctcacataaatgaactctctgctggtgactca

SEQ ID NO: 39205 - DNA, 2925 bp, Bovine  19866880587008
  misc_feature (1)..(1): n is a, c, g, or t
ncaaaacattaacatttaaaagttatattggggaggagcttcttgattagagaagaccaaggtgcaagcctcttctgtggtccccatctggtttaccctacaccagctgcctctgccaggccacccaaatttgaccctaacaagattaaagttgtatacctgaggtgttccagtgggaaaatcagtgtcacaggtaccctggctgccacagtcattctcttggatctgtctccaaaggaggtgggtgatgacatggccaagacaactggtgaaaagttgggagtacagtgaaactgaccattcagaacaggcaggcccaggttgaagtggtactctctgcccctctctgaacatcaaaccattcaaggaccacccagaaatgaaaaaaaagcagaaaaacttaaagttcaatggaaataaggtttttgatgagattgcaaatattgcccgactgatgcagtaccaaccttcggccagagaactctctggaatcattaaagagaccttggaggctgcctagtttgtgggctgcaacgctgagggctgccacgcatgtgacatgaccgatgatctggcggtggggtagtggaatacccagtaattaagactacagagaaaaatattttgataaagggtcattgataaccaaaaagaaatatggaatattcaaatagttacagggaagtcatatcaactcttcatgaaatatgaagatactttggtagcaattcttctcagatttatgctcagtgtggtcatgcatgcagaccacctgtctactaagtctgaggttgtgaactaaagtcgtgaagaaggccacagacaaacttcaataggttcatgagcaccctaaatgttatgcaatatcacatgtgtatatgcacacattttatctgaatgaattaaaaatgttgtaagaaaaaactttgaaatacttaatgaccaaagacaaactctaaataaattgatgaaataatagtagttaaattagtttattattcaatgtgagagtgactgatattctatctggcattaattaaaatagagatattgcttatagaacaaatgtctgtatggacttgcattgcatttgtagaagaaacagttcttgtgtacagaagcagaattcaaatgtttaggtagtgaagaagttacctaataaattacaatattcttatggaatgatgcttccatgtgtagccaatcattgggaaacccaataaataacccaagcaccaataaatcctcaagtgtttattaatttcttactctgcttctagggggtctgtgcagtggtgataatatgactcataggtttgtctgaacaattatcaatatgcttggcattttattccacagtgtggaagaaatgaaagaaattaataaacgtcaactgctagccctgtgtactaactattgaaaaaaattctttatttttatctgcttacttttcaaaggatgccaaactggttccttatgaatgtgatacccattggggctagtgttaatacagtaaattagactatcctgaagtgtactggaggctcaaggtcaaagccagtttgtactgaaatgaatattaacttgactaatgtttccaaatgtctaaactgcagaggtatactagaagtttacagatgtatcttttatttgaattcatgttccttctgtgttctctacacttagggtatccaattttagattataaatgtattggcatctgcaatgtgatttgatttctactttagttcattaaaattgtaaccatcatgggatactaaaatttcactagattagagaaacaatatcaatgcttttaaactggaagatgtgtaaaatcgatacttaaaatatctcttaattaaagaagcaagctaaagtgacatatcatctttaacttgttatcgctaacattacttttgtctacaagttgggataatcatctttctaggtgcttacaaagatgttacatttctgaaaacaagataaaataggtatttacttttcttgaaggtcctcatgagaaggattaacacagtttgctgtgtgttactggtctacctactggatagacacatcccaggagacacaatttggactcatatgcttcccaagtggtacagcggtaaagaatccgcctgccagtgcagaggattcaggagacagaggttcgatccctgggttgggaagatcccctggagaaggaaatggaaaccctttccaatattcttgcctggaaaattccacacaccagagcagtctttgagggttaccacagggttgcaaagagttggacacaatttagcaactaaacaacaaccaccaatacataaaacagcaaaaatgtttcttccttcctgccaacagcttaacactcacatttccatccataaagaagttggaaggacttaaaactgattcagattatatgtttatgatgacatgatcactggatttttggtggtatttccttacactttatttttaaaaatttaaaccactttattgaggtaagattggcttacaaaaatcaacatatttaatgaatacaacttgatgaatttgaagacaaggctacatcttacgtattattctgaaaatttaacaaggtctgcttttaaaacccacttctacaatattgtctgttaattaaaattcttcttaaaaataaccaatattttatatacagtggagtctcacggggcttcccagaaggcaatagaggtaaacaacctgcctgccaatgcaggcgatgaaagagatgtgtgttcaatccctgggtctggtagatgcctgggaggagggcacggcaacccactccagtattcttgcctggagaatcccttggacagaggagcctggtgggttacagtacacagggttgcaaagagttggacgtgactgaagcgacttagcacatataca

SEQ ID NO: 39206 - DNA, 1299 bp, Bovine  19866880597122
  misc_feature (1)..(1): n is a, c, g, or t
nagaaatgccatggtgttttgttttgttttgtttttaatcaatgaaaaaactccacttgggagattatggccaagagggtgactttggaggttgtgactaaataactaagagtttgatcggataatatttaaagatgtttaggtttgcagaagcctaaggagtgaaagaaaaaaagactccataaaacttagaggtcttcagaactagatggaaaaggcatttccatatcctaacaaccagagaaatgctccatccaacagagatgtggggataggaacttgatggctcctgttagattgctctgtccttttctttctgttttattacatattatatttaaatctagttaaatttactttttcccagttttattcagataataattatacagtgatatataacacaatatgtagtgacatataacaccatacaagtttagagggtcaagcataaggatttgactttcatataggcagaaaccaacatagtcttgtggagaccactctatcttgagcatatgttttcactgatgcagtgaatcccctaggagtctgtcagccttttagccaaaatgtcttgtccttaaaagtacagcttcaaatgttttgataaagcaacacaaaattacatgggataatatactcctaacttgtgttaggagtatataatagtttctttggtaggagagtaccttttaaacctgggaaattttagaattaaatgtacaaatgtttgaaagaagagaatctgatgatctttattaaatggcttatgtatgtttatgattttatatggaagtaatatttcagttattttggcatattagaaaaataagttagccatgtattcaaattaattcatacttgtgatttatgtagagttcagaatcacttaagacaaccctatattcatcatatatgttcaaattattagatacataagttattttagtacttgggaatagtttgtttattatttcagacaacccaagtacttagaaggaaagtaaaaatttaatgaaattttaaatgaaaccaaatattttccaaaggcaattaggtggttggtaaaatttgctagaattttaaatagaattatatgaaatgtaactcaaacaaaagcctcttaaaagagaagataggttattgcatttgtaactttaatggaataagaacttttaaaacaaagaaaaaacacaaattgacttttatgcatacagaaatatcctagaagtcaccccaaaactctttatgtaatgcataagctgcacaggtaaccagttttactaaaaaaaaaaa

SEQ ID NO: 39207 - DNA, 876 bp, Bovine  19866880599136
  misc_feature (1)..(1): n is a, c, g, or t
ngggaccctgtacatagcctttttctttctctcaactgagaaagtttcccttgcggttgtgctgtgctgtaccgttacacgtgctctattttctactctactctaggcaattctctttcatttataaaatgctagtcatgaccttctaaattgacttcatgacccgtttatggatcgcatcctatagtttgaaaaacagtgttttaactgactgaaaggtgacaagcgcagaagagaaaaagaggcaatgcacagtttcaatagatgaagtgaattccacttccctgctttgacaaaggtaccagtgaaagaggagaagagctgacgttcagaaaactgatgtaaggggacttggagggagggggatcaggatgtcctggtgagatgggggcggagtttaccattctgttcagactaaatgaaatggtccattaatccaggaagaaaaaagcgtttagttcattaagcaaaagacaagtgtaatagctgtgtagtacttcagtttgctctgccattagagccaaagttattgagagaaacactagaaagagaagatgggagaagagagggatttgaagaaaatgtttataaccttacttcaggcctctaacaataaacaatatttctattactaaccaaatgtgactattaagataccgttttaaagaaaagatttaggttagggagatgactgtcatattgggtggacaaatcactcatgtgtttttttcctccaaaactaatagaagctactataggtcaagactagctcgaagggaggcacagtcattcaagctgaaaatccggctgaaggtggcaacaagtgccttggaacaattcaattagctaatcacagatggctgccagacatgcagt

SEQ ID NO: 39208 - DNA, 1197 bp, Bovine  19866880726485
  misc_feature (1)..(1): n is a, c, g, or t
naaatggtgggttgaggttggtgcaaaaaaagccacaatttgtaagggaagcgctgccaatacaaataatagtgtcatgctttcaggtctgtttcatggagggctgaagtttgtgtttctgtctacaagtttgcttccttatgacccccttttcttttccctttatgctctcctaactccagaaattattgtatttggcttaaaatgtgaaaaatgctccttaatatggggacactttggctaatggacttaggtcaaaataatcgatcctgaagacaaggtaatccacccaaatccaatctttatgctcttcttaattttattacatgcttcacagacagtcaaaactgggttcagaaatggcaactattatgcagcgtttaaatccatttgcctcacataggtctgtctatcagaaataaaatatttcacaaacatgcttttatcatcctctcccatctctggcaaagataaaaacacagagagaagaagaagaggggttcaaaaagaattaatcaatgtaaatataagagctgtggctgatgccaacatattagtgctcattctaatgcaatatgaagaataaaacaattaaaaagataatggtaaataattttaatagcatagaaatacaccctaaagccaaatcacattgtaaaaatagtaaaattagctttaattatgggtgtgcaattctatattagtaaaataccacaaaagtccagcacactaatatataaatataatcatttcagagtcatggaaaatagacagaaaaccattttcttatagaacataaaagcgtaataaaaagttaaaatagtggtctactttatttacccagtaaatcgtcactgcaggcctattgtgtgtgataggtgttgtcctagacaccaaattcagcagtgaacctcttcccttaagagttcatatcccaagagaggaggaagatgataaataaagacacaaaatgtatccttggttaaatgtttaaaagcattatagagaaaaaagaagtcagaaaaaacccagagggaggtttgaaatttaaaataagatagtaggacttcctggtgatccagtggttgaaactctgtgctcccaatacaggggacacaggatcgatccctgggtggggaactaagatcccacatgctgctggtgtggcaaaataaaataagatggtgaagggaagac

SEQ ID NO: 39209 - DNA, 823 bp, Bovine  19866880786457
  misc_feature (1)..(1): n is a, c, g, or t
ntaaagagatagtcctttctagaatgccaaatattaacatgtctcagcttattaacttaattgcatttcagcatttaaaaatgtacccttattgaatgatacatacttacccctttatctatggtggaaacacattctctggtgactgaagtaagggacttatgttgctattcatttggtgagggaatgaactgataattttacacagcaccaggcgctgaattagacagggtttcaaaaatacctgcagtgttcttctgaaatgtcctactaatccttcagaattgggaaagaaacaagaactccaagggaatatgacttggagaatgagagctccaaagctaacatattcactcataatttttagcaaacaaagattgcattgaagaaagtattcttaaaaaaacttttttatgcccagaaacacctaattttcgatttttcgcacaatttagccaaacaccaaaaaaactgctctacacagtatcacttcatctaaaacttgaatatacattcttctgaaggaaattgagaaggcacctcttttggaatatagaacttaatcaaagaacgtagaataagattacttatttactaccttttaagaaagttacacattgaaaaggggttgtgattaaaataccaattataagtccatttttgatttactttgtttatggggaagaacaaaaatatccatattagaaatccatatacgtatatctagtcccaaatctgtcattttagcaaacacattagcttcaatcttgttctctcaaaactttttccaggataaaaactagtagcaaaaggacaacttagt

SEQ ID NO: 39210 - DNA, 1770 bp, Bovine  19866880840381
  misc_feature (1)..(1): n is a, c, g, or t
ntgttcttccttggtaaaatatatctgtcaacacaggctaaaatattcttcacacattttatgtcatattttactattattggaatttgaaactttaaaacttctttatacaatggacataaaatagatttatggtatgacattttattgccttttgtatatgttagctatatatatatctcattgattatctctgattaatcattagttgagctgtttcaattttcttaaagcagtagtaagaagatttgaggtataacagacacaggaatctttcttacttataaggtttgtagtgaaacaatgggcttccctggtagctcagggaaagagtctgcatgtaatacaggagacctgagttcaatccctgggttgggaagatctcctagagaaggaaatggcaacccattccagtattcttgcctgggaaatcccataaacagagaagcctggcaggctatagtccatagggtcgcaatagttggacacgacttagtggctaaacctacctagcgaaacaacataacaatgattaattcaagaaacagcaaaagttaaatatatcttttatctatatatctttctgacttcactggaatgtctttagaaaagtaaaagtatgttcagacattacttaatacgtatttgttgtttgggtctattttcatccataagttaaagatcttcaagacaaatgtgatttttgagtttatatctatacagtgaatggagatataaattaaatggccatactttccagtatgtgctagctgtttgcgtgtttcacaagacccaaatcaaccggactgaaagctgcagttcttaaacactcttgtgttagtaattttcacaccaacgaagtgtttccactaatagtagcagtagtggtagttgccggtaatagaagacctactgggtatgcactgaatgagagctttgcttcctcttaaatgtattacattcttttaattctcactagagccagctttacagaggtaaacacaattactttcatttcacagctcaaacaccgaaggctcaaaagagctcagacagtggtcaggatctattcctcccaggtccctgtgattccaagcccacccactttcactgtgattgactgtctggcgttacttcacaatacaaatcagatcgacatttttacatacagccaacaatgtttgttttaaaacaaccactggtaatcatttattattataaatactttttcttttgatatgttttataaattccccatgagaaaatactagtattctgaaaatttatgagaaatatgattagatactacaaagttgtcctcttttaatttttctcttccttaggtatgcaagtaaatttaacaaagataagaattcaacaaggtgagttaaagtaagcataagaaaggtctattcctactcagaaaattattataagatggagctggaacaaggttgccacataccagttcatgtgcttaatccatgattctaaagtagacactaactttgcattgtcacaccacccctatttacacatgttatatcaacatctgcttaacagtgttttgactcaggccaggaactgaaaacatcataaaagtcacactaaaaagcattatatccctgctttggttaaccatatcagactgaagaaggctcttgaagttccagtgccatcacttctgtgatttctctttgaagagtttcttaaacttaggaaatgcaatttttctacacatcactaggaaattgcaaattacgtgagaga

SEQ ID NO: 39211 - DNA, 1288 bp, Bovine  19866880848198
  misc_feature (1)..(1): n is a, c, g, or t
ngcatgtatggatgtgagagttggacaataaggaaagctgaaagctgagtaattgattcttttgagctgtggtattggagaagactcttgagagttccttggactacaaggagatccaaccagcccaacttaaagaaaatcagtcccaaatattcattggaaaggctgatgttgaagctgaaactccaatactttggccacctgatgcgaagaactgactccttggaaaagaccctgatgctgggaaagattgaaggcgggaggataaggggacaacagaggatgagacagttggatggcatcaccacctcaatggacatgagtaaactccgggagttggtgatggacagggaggccttgcatgctgcagtccatggggtcgcaaagagttggacatgactgagtgactgaactgaactgttctacctgtataatattttagcttttgtttgcttcagaattctctaaataagaatgattattttaattgaagtgcactcaaaaagtattttatttatgtaagtccttcaatgaattctataagacaaactactttttaaaaataccacaggtttacgtttagatagaatgtttttgtgaccattaaactttctgcaatattataaaaacaaacattatgtactaaattatcacttcctaaggtctatacttctgtctctttccttttattatatttagggaaaaatcagtatagttcaacttcaatagctgtcaaaatgcttaatatatcagaaatgttattgtttttggaaaaaatatataaaatacatatgatatggattcaggccagaaatggcacctcatttagttgtaaatataaaaatgccatgcactcactttatttagaaatattccttaagtgtttggtttatactgacattcaaccaatctgtgtttattctcaaatttgagcaggatacctccctatcttatgtttaaaataagtattctatcaataatttctaaagacatattcttctcatgatgatatttagcatgctattttgcaggctaaataatatgcaacttactggttcataaaggataatataaggggagaagtcattaagttatcacaatcttaacctttagtataacaaaagttttgaatattgcaccaataatgtacaggaggcagtttatgaaaattaaagtttggaattgaacatttctagacaaatcattaaatttattcttctctgcaataatggagagaattgctgttccaccaaaatgcaaaacaaaatgtattcaagattatttggtg

SEQ ID NO: 39212 - DNA, 1891 bp, Bovine  19866880965579
  misc_feature (1)..(1): n is a, c, g, or t
nttctcgctgtatgcttcttgacctgcatacagatttctcaggaggcatgtaaggtagtctggtattcccatctctctaagaattttccacagtttgttgtgatccacacagtcaaaggctttagcatagtcaatgaagcagaagtaggcatttttttctggaattctcttacaagatgtgtatttataatacgtgtatacttaattttagggcttccctgctagctcaactggtaaagaatctgccagcaacacaggagaccccaatttgattccttggttgggtagatgccctggaaaagggataggctacccactccagtattcttgagcttccctggtggttcagatggtaaagaacccacctgcaatattggagacctttgtttgatccctgggttgggaagatcccctggaggagggcatggcaatccactccaatattcttgccttgagaatccccatggacagaggagcctggaaagctacagtccatggggtcacaaagagtcagacatgactgaatgactaagcacagcgtatataattataaatgttaaataacttgttattgttttcataatacacatcatataacatctgaagaggttgaccaccccccaaactcgtttacattgtataaatatttgatctttagagtgtgttatatctatcatactagaaattgagaaaggataaaatgtttctttttattgtcccctacaattaaaagtgacttcagaggaagagtgagagacaagtaacttcataaataactacttgttattcagttacgactatttgtgctaacatgcaagtcaatatcatgaaacaagaatgccttgcaacaataaaacccggttcttctcaaagtgagacacagcactgagtttgaagcacattcatcacactgactcaagttcagttgagggaaagcaaacatctcagtgttttttaacctggcaaaaagacacaaaaacgttttcttcttttcatcattttaagaaggtaggaaagcaaaaatattgtctgagttacctctttaagcacaatttagtctccttgagaagacaaaatgctgagcttggaggtgaccgggtaacacagaattgaagcccattttgaagacactcccggttgtcagcctcaggagaaatgtgatgtagcctttgataagaataatggatttggctcattactggctgaagacacgtgttgtgagatggagtatcctcaaagcaacagggaaatttcagcttccttcaaaatggcaagggttgaggcactgatgaggctaacagtacacacaggtactaagaaacaatctaatgcagaaggcttcttctatgggattacctaatttcaaaattagttgtaaaaattcatgtcaggcttctaagagatgcaactgataacaacaaacacctttttttctttattaaaattttttttcaaattgaagtgtagtttacaatgttatatttctggtgtacaaccaagtgattcagtcatacatatacacattctttctcatattcttttccattatagtttgttacaaaatattgaatatagctccccatgctatacagtaggattttgttgtttgtctgttttacatatagtactttgagcttcccaggtggtgctaggaaagaacctgcctgccgatgcaggagacataagagacctgagttcaatccctgggtcaggaagatgtcctggaggagcccacggcaacccattccaatattcttgcttagagaatttccatgaacagggggagcctggtgggcaacagtccatagcgttgcaaagagtcgaacacgactgaaatgacttagcacgcatgcacagtttgtatctgctaattccaaactcctaattcatg

SEQ ID NO: 39213 - DNA, 2484 bp, Bovine  19866880967725
  misc_feature (1)..(1): n is a, c, g, or t
ntgaaaagctaagattattatctctttaatgacgcaaactttccattataatgtgatttctcaatatttgtgagtagaaaaatgccacacataattgtgataaaaatttaaatcaataatttagattcttgttacaatttacataaaagaattatttttgcttctagtgttttgatattttcagaactagtgaaatgaacaaaaatgtttgagtcattttaaatgaaactcaatacattagttatttcacaatttccaaaaatagtttagacagatctttttaaagtctcattcatttttcgttcaaattccccatcctttggaagcaataatgaatatcattagctatgagtgtatgcctgtgtgtgtatgtgtgtgtatatgtgtgtgtatatgtgtgtgtatatgtgtgtgtgtgtgtggcatggcatccccactccagaactcttgcctggagaatctcatggacagaggagcctagtgggttacagtccttagggtcacacagagtcagacatgactgaagtgacttagcacacagcacgtgtgtgtgtgtgtgtgtgcgtgggtgtgtgtttgtgtgtgtgtgcatctagcatgtaattcagtggttttaactctgaagctggcgagatcatgtcctgttttccttctggcctaaaggtgcctttcatagtctttcattttcatattgactttacccagaacctagttgaaggttcaatcagtgaaataaaattacattacaattatttctacttagagaaatatgacagctagaatttttatgttaattaatctttggttttttattattgtgtgactacctatcataaatttccttgcaattcagctttagtacattctataaattattttagtttattccagcattaacctgacttgcaaatggttaaatctgcactgagtctttcatgctctaaaatccagcatgctctatattaacatcagaagaaactgttttgatattcagaaataattgtaatagcaagaataaaccacaattcactgaattcatggtcagattatattcttgttatcatgttagattctatgtaagtaaattagtacatcttaaacatgatgaaccataattcacaaacatactcatattttcctcagactcggactaaagaacaaacaggtcgctgctgttcttgtcgagcatcccacagccaaatgaggaaactcctgcttcctcacctgcatacccagttaagcaccatctgtttcctgttttaatgtgatatctcacatagtttttccaaacctttcacatcagtaagcacaatcctaatagacagttaatatgaattaagaagcatgttttcaccaaaactgtgttcattttttttctctctctctctcattttctgaaatgtgtaacactacactggctgagccaaacccacttcagtagcatgaaattccctagattaatataggttatttacagcatattgactagactctggtatccaggagcagggggctgggcagtacagaagcacatgtgcctaacaaggaagctgggattttaattttgcatggaaggaagtagctcctacttcatcttgcctccttttctaatagttaaagccttccagctccctaccacctccatcccttaccatatgaaattatcaaaatcatgaggatctgagcaacccagtcatttgcgaatcttctttctgccccatctttactggctttactgttttcatctctgacacatttactggctggggccagatctatcaggtaatgacgtatgctttagtttcccataagttctggatattgggaaacaaacagtgattaatttgtttcctcttgggaaagtggtttgagtcccatgaaatcaatgaataaaatgatgtgctacagacacttaccttcagctggattcccaaacagcttctcactttccattcttacaaggatgtgtgctgctgatgctgtttatcgagcttctttagtgaaggagtccaccagttaaattgttatggagccttttgtataagaattctttatgaatgccaaacatgttgctttcatggaggacatatagtataattaagtgtttctcaaactttagcatcaaaataatccaaaatgtttgtggaaacacagaacactgggtcctacctacctcctcccatccaaatttctgatttagtatttccatcatggagcccaataatctgtaacaggtttccagaagatgctgctggtgctggtcttaggaccacactttgagaaccactggtgtattatgtagagcttcaaggatggatttggatttgtctgtattttagacctggctctgccccttaacagctgtgtgaccttgaaaaagttattaacctcttgaaacctcagtttgctcagctgtaaaatgacggtaatactgacttcatgaagttgtagtgagattaaataaaggatgcatgggaagcttag

SEQ ID NO: 39214 - DNA, 1108 bp, Bovine  19866880987036
  misc_feature (1)..(1): n is a, c, g, or t
nttgatataaaataagatataaacaaaacaggcatatatctatctcttaatatcttatatagtcaggtagaagcagaataaactatgctatattacaacatgaaattgtttcataaactataattatgtaattatatatttatcaagttttactatatctaaaaaatgcctttagtagattgcacaatggagatctgttaatggtttgcttacagaaaaagcaatgaatttagtttatcacatgcaaaaacataacacatattatcatacaaaattcatataaatgatatcatcatgactcattcaacattgtgtaaaatcaatcatgttaattttgttgaaattttcataatgatatatctggcatcaaagatgaggtaaacagaaagtttgaattgattcttacaaataaaatactaagccttgaacaaaatttgaacaccctctggttccccaaaaatgagaaaatgctaactcccctgaaagcacaaattgccttcaaatgttccttcattttttttccaataattgtggcttaaggaaaaaaccaaactgatatcaaataaaaaatatgttttgggattttaatatggccagaagagtgataccacaatgtcataaggtatttcttcctttttccagtcttatgagataaaaatacaagtaggacactatgatagcctctatttctatattctaaaaaaaaattactttccattttgcattgttggatgagttatgcaagaaaaatttaatgattttaaaataaaatttttaaaaaggagtactagatccagaaaaacagagggtttgccaaggaacaataatgtcatgtggagggagggggaagtggaggagaagggaaaggaggtctgtgccaagcaaagctgggggctgttcaatcagctctatcagggctccatcagtgtctccactccagccaaatccagagaaaacaaggagtcaaagattcaggtcaataagcttataggcgatttgcacaaacagctcctccagcaaggtaaaaaacaaagtcatattggcttttctttttcattccttctctttgaactccctggtccaaacacaccctggaaatgtcaatgtt

SEQ ID NO: 39215 - DNA, 866 bp, Bovine  19866880993922
  misc_feature (1)..(1): n is a, c, g, or t
nctcttcccaaagatacattaaattaggggtgaaatattttgtgcacatcaatgtctttatggcaatcatgaattttccaacttatattttatcacattcccaccagttatattacctcactcccagtccagtactctccatgtgttattcagctgacttcatttgtttgtgacctggtcagaccttggctccaccatctgagagagtttaagtgggaaatctcagtaatgcacaagcttctaatccaacaccattacatttgttcagtcagaggtctcagaattacgatgcctcccctttctggtgctttgatatgtgagttaattctgtagcacacgttctgatttcatagactttggggcctaaatctatgtccccttgaccacagtaaagacatctgtaaaatgatttcttctgaacttaaactctgtctgaatctcttgtttctccccattttgtgccttcttgagcaaccaagccccagtatcataaaaatcctcatatgacagaatgtagaatcagcctatatgccgtctaccaacactgaacacctcatgtttttctattagtttgttgttctgtggtttccctctatcattacaagatgattacatatggaattgtctttaaaaaatatgaatgccaaggtatggaacaaataggcaatgaggagaaatgaaccatgcaaacaaatccattttgatttcctctttgccactaaactcaagacttggtctcttctgaaagatttatgagccttcctaccataaaggaggttggattacagctatgcttactttataaaatgaaattctgccatcataggcaagggttcatggctgtaattatttcaatgatcttccca

SEQ ID NO: 39216 - DNA, 1899 bp, Bovine  19866881031939
  misc_feature (1)..(1): n is a, c, g, or t
ncgagtgatacttttatgacaacttatgaagaacaaataaatgatgtttttttccacaatgccttggtagtttaatcagtcttgtggcaacttttctatcacgtcttgaaacctggaggaaggcagattgaaaattttgcattgcacttttggaaagttggtttatacagtctgacacaagatacattttttaaaagcatacatttattgtcacaagactgcaaggacatgatatatatctagaactgcatctattagaaaaataaagcaaggtttaatctagcactttaagattcagtgttgcctcaaaaccaaccagaacaaattcagactcaatgaactcatcatgcttgaaataatatagagaattctattattttcaaaggtagtatactttctaggcagcttcatgtgactatatatttttgcaagtattaatgttggaaaaaagttttgatttggagctacactgaaactcagactgggccaactgggaaactggactgtcatagtgatggtgatattattatgtgccttaagctttactgggtttctatagttctgcacagaggcgctcaaagcacttcctgtgttttatatcatttgtcctcacaacattccaataatgtaggaagggggcaaccataattaaagattagatgtgtcagttttccattgtcgtggaaactcattaaactggaacctattcagcctgccagccaagacaattaagcagtcatttcacttatcagtgtaccaattacttgatttttctgtaacttcctctccattttctctgagacaaatactgcatcttccataattttaatgttcaactctggtgataatacttcttgggaacagtgttttgggacacttccgtttgtgaaatttccttaatgactcttctgtagcattcaactttcatatttacatataatgctgatgtgaaaaaaatttttttaatcatataggtaatgattataaaaagatttagccttctactttttttacaaaatattatcataccatatattagtaattaataatcaatgccactaactaggaaaaaatacttccttcagttgtgtggcagaaactgctgtttgctaaaaccatggttctcttcttatacacaaagctggatcagatttcccagtctccttcttagttgaatgcaggcaagcgactgtttttaccattggaatgtacacgtgggcagtgggtactaaccccaggctacttgctccttcatgttatttttttctctgactggctaaaatggagataaattcaagatgtctttggaggccacatggtgaagacattagcatctccatcagtctaggtccttgcatggctttatggaggaagatcacgttggcccatgcagaagagtgaacaagaagtctgttgggttttagccatttatacgtttggagtctatttgttaccacagttagcatgtaataactattatatcattgtttcactacaaaaatataaatatgtaggaggagcttaataacgtagatatatacaactaatgaaaacatttattgaaataaatctcattgaccacaaactatcagaagagaataaaaaactaagaagccaatggattatttattaggttgaaattgcctcaaaacttgtaagatgtaaactttataaataagacccatacctctatgtatagataaaatatctagttctagtttttccacagtttgtgtccagttgatatcaaaccttacccaaatatcttagttaacatttaggtttttgtagacccttattttggagaaggcaatgacacctcactccagtattcttgcctggaaaatcccatggacataggagcctgttgggctgcagtccatggggtcgctaggaggt

SEQ ID NO: 39217 - DNA, 1113 bp, Bovine  19866881034051
  misc_feature (1)..(1): n is a, c, g, or t
ntagaggggcagcatggcaagagactactgagcatgcagattgtggtggaaccacagtgggacttgacccagaagagagatgtatgggccagagagatcaagaagaacaatgatcatagggtgaaggacaggaaataatgagaggaagcataagacagggagataaatattttgaaaatgaagcattacaggcaaatctgagcttcccataaacatggtagagagagaaaatgtaagaataaaatagatataatttcagtggtcatgcagtagaaaaaaacagagtttatcagaagaaataaatgttatcccctatttgtgagctctgagagtcatttatcatcattagggtatttgaactactgttggataaagggcattcagatagggaccaaagtttttgttagctgctgtcccacaatatgcattctccattggtcttggctttttggatgtgtggtgtgagtaaagtcttaattataataagtaaattatattgtggcgatggaacacagtggtaatgagtgattgcttatgactcatagtcctacatggattatgagaaaggagaagcctctctggagtgattgttaaacaggaaagaataaacaattagattgtatggaaaacggtattcaaagatcataactttctcagattggtttgctctttctgtgtagactaggtttactcgttagggagacagtttagagagtgtgagctttggttttactttttgttgttgacggtgatggtgctgttggtgatgatgatggcgataatgttgatgtcggtgataatgatagtttcctaaagggaatgctgggtttgaagcttgaagactgagtccagaaaactgaaagctaatggtttcttgatggccaaacaacagatccctgaataggtcaattacagttcagagtaacttactttgtctcctctttggaacaagaaatggcttaatttggtagaatcctcttctgaacggaacatagtagttgaagtggcttttctttttagttgcagtgagggtttttgttgttgttgttcctttgaacaggtttggtttgaggggaagcaggggaagagaaaataaacttatttaagcataaa

SEQ ID NO: 39218 - DNA, 3061 bp, Bovine  19866881195791
  misc_feature (1)..(1): n is a, c, g, or t
naatatttgtggaagggataaatgatgaacagtaaatatattgtagtcaactgtccaagcaacatgaaaatattcagtcaactggccaatcaatatgaaactatgtgtttaaatacacagtatgacttatgagttataaattttttttatctttcaaaataatattgcattttaaaaatcctgtacacattttcagactgttgaattaaatattagcaccccgaacactcttcctccagtatatcagtgcagttttcaactacacaaaatcatctgagtaaatggactcacatatcatgcccagccattaatgattacctttgttgcaaaagtattccacctcttcacaactcagattttcaggcccaaattctgtggaaaagctttcctccagtggaaagtccccctttgatataatgtctgtttcctctgatggacattcttcttcttcctcttcaatggcatcctctagcggcccttgaaaaagaagagggacactgtacaaaaaaaatccaaagaattgtgtgaaataaaatccttaaacagggtctttttgattaaggtggtgaaggaggataaggtattctacgaaaggacaagtagcacctagacaagataatgccacatctgcatcaacaagtatactgagcaatttaacaagtggaaagaaacctgttcctgaaattactaaatagaaagcaacctccatctcccatccttccccacctccaacttgaagaccaaagcttattcttttattctctcctgaagagcaaaactgtgcactttatgttcatttgttagaattaactgcctggtaaagagtacaagtctcttttacacttgttgtacaattttacctgagattttaataaagatttaaagtaattgaatgcattttaattgaactgagattttaataaagtcaatacttttaaaaatccatcttaagagtggattctgagaaaagatttcattatatgtgtttgaagcttgaagaaaaaattacatatttctctccctgatgaaagcataacccctattcataattaattgaattttttctgaaatgaaaagtagttttctaatgaaaaaaatgtaatttgtatttatgtgatactttttctgtaataaaaatacaacttcccttagagtgaatgagtcaggtgcattacattaatggacctattttattgaaaggaaagggtgggctgtagttgttgagatggatctgaagtggatgacatggaaataccacatggccgattgtgaatttctgactgcccagaagaatcaaagtatccgactcattttacgaagtggaagcctgcatttgctcctaaagaagcactgtggcatttcatccaaagaacacaattatggtaatttgtactaattgtcactcatgtcagcagtctcatcagacaggctaaatacttaaaaggcttaggcagtctctttctcttacttcttggaaatgtggatttaaatttaaggtacattcaagccaaaaaaaattattacagagtttctttgtcctttctaaaatttattttttcttcttttctccaaaataacaaatgttaaggaagaaaggatgcactaattccaaacactctggtaatgtgctttttcaattctaggtggaaagttaaaaaaaaaccacgtgtgctcagttgcattcaaaagccatggatctcatattagtttttatctcttgttcattatttcaagtaatatataatctttcaccttttaacaattatgtcaagtactaagacatgcaaggaatatataaaatagtaataaggtaaaatattacaatcactaaaacagttatttgaataattttaattattaactgcaagtctaacaaggaataaaatagaatattttccatgtttttattttttcaagatacttagttttaataacaagtttggtcaaaataagacacctaaaccgtctcacttttatatctcatataggactttcaaagtactttcttatgtgatctttaaaataacccagtgaggtaggtatggaaattattattctttcttttggtaaatctggaaagtaaaggtcaggaggttagctaaccagaataaggctacaagttaatatgtggaaaagttgacatgaaaactctattttattttaaaatgccttttataccacaccactatgcaaaccattcttttgtagttataaatgcattctttcataagtaaaactataaaacaggttactcataaacacagaatccttcagaaattgctcatgtctactaacataactttatttttaggtgtttaaagatctagtcttaaaattgagaaacctcttactgctcttctcagattatcaaaaatcaaccaaaatttaaaccctcccagcaaaaataaccaggaaagtcttttttacagacattaccaaaaataaaataattgattatgaatatataattatttgcataatttatatccttaccaagtcaatctataaaggaaactgccttaatatcagtttatatcatgtaacagacaagacaatctagacttcttttggaatacatactctagggtttggttaacaaaaaataaatctctaattgtaaaataaatattttaaataattcatataaattttactgaatgtcttttttacttgtgtatgctcttcaattacaaaagcctatatattataaagaaagtgcatgcacattactagaataaaattaatagtaaaatactttgttttttaaaaataaaatgtgagcagactttctaacattcgtaaaagagtctttattgaagataatatgtacttgaacaattacttaaaattgtccaggacttaacaatttggctccaatagtatacattaaaataaaatttaatcacattattaaaaattaaatggaaactcttatgtgaaattttgaaagaaacccacaaaacattgatatagcctcaataagtgtctaaccaagccattcatatatatacacatatggaaaaaggcttccgcatcatatataacttttatttatcaaaga

SEQ ID NO: 39219 - DNA, 1017 bp, Bovine  19866881242583
  misc_feature (1)..(1): n is a, c, g, or t
ntgtacctttgttatttattgagatttttgaaaggggataaatgtgctatttttgctctgaattaaaaaaaaaaattaaatgtttcctaagaattcgtatagctaagagaattccagtgagctttagaaaccgagctgatagtcctagcgaaaataacgtcattcttacacataaaggggaaaaaaaaataaagacaactgaagtgccagtaaaatagaagcagtattttatagcataccgcagtaaaatgaaaacagagagcaattagtgaatgggggccggaaaagttgtcatcctgtaaccagctgtaatctttaagtatctttaaactaacagatactactagggttttctttcattcactccacggttactctggcaggttataaacaaacatacaggcataaagagtccaaaacaaagtggttgtcaaagggatgaatgataggcagtgacctcacatacccaggatggtagtatgctcagttaggcaggctcagttgcctagagttaggtgtattccctctaccgagccctggctgatagacacactcccatccatctttaatctctttgttttgttgtttaactcaggctgttaaattctgtttaaaataatatttgtatgtaagtatgaggatagataaactagaaggaaagtgagatagttaccaatgtcatttcaactttttcttcctaaaaaaggaaatcccagaaggatagatatatttggagtggctcagatggcgaagaatctgcctgcaatgcaggagagcccaggttcaaaccttgggttgggaagatcccctggagaagagaatggcaaccggctccagcattcttgcttggagaattccatggacagaatttagtgagctgtatggtgcatgggatcgcaaagagtcagatgtggctgagggacttgcacttttctcagtcttactttgcattcgtaaagagccttcagatttttcttataaagccatctatttgtatttaaattatcataaaataca

SEQ ID NO: 39220 - DNA, 1309 bp, Bovine  19866881273870
  misc_feature (1)..(1): n is a, c, g, or t
nacacatccagatttttttttttttttttaaccaaattctctgggcaatcagtggcccagtcacattggcacaaaacactttcaatgatattcttcccaaagcaactttgaaatgacaaagaacattcttagaaatgttaagtgggaaatctacacttttcacacagataaataaggatgttatcaactactgatttggggcattcacttcaactaagggtaaatcttggagaaaaggtagcgttttcaaattcagagttcctcaagggcatgatacctgattgacatgcccatctataagcttcctgattacatctatttttttccccagatgtctgattttattttcgactttactttgccacatttgaataaccatctaacagattaccttgcacataaattttatgaatgttgctataatttgcatgaattatgtttatatttctgtggtggattttattttccaacctataacttttgccataaattcctaaatgcaaaagaagaaattcaacagcttcttgagaacatttgctgtgtgtatagacttaatcaaatcacttatctttgcttttatctacttgtcaaagtgtattaaaataatgcattaggagtggatttagggtgaactgaagatgtagtactatgaataaccatgctagggcatactgataatgaaatcatctaaaagaagctgaaaaggataattatatcacttttaaaatgtatcttataataaattaaactatatgactagtatactcctttaaaaactatttttattttgattaaacaaatagatgtacatagctttaagggtcaaatagattttcaaggcttataataaaaattagcagttgcttgtcctgtttaacagcccagtgacaattcttgctctcaaaggtataatcactgtcaaatcttcttagctaattctcttgatgctcatctcatatttctaaataacatgttttactactttaaaacaattattagtttagatattattgactatatcaccatctactataaagatatgaagatataatggctgtatatacccataatacacacattattccaaatttttggtaattcagaagtttatattttagtagcagtctatataggctatgatgattacattttattttgacctctttgtttttcctgaagttaataattattttctttgtcattttctcagttttccatgacctatcactactttatccccaaattattagccaatgtaatactgtccagtatgttattacatcagtacattcaaagacattaattagca

SEQ ID NO: 39221 - DNA, 851 bp, Bovine  19866881322400
  misc_feature (1)..(1): n is a, c, g, or t
ntgttaggcaggctgtattatagattataatcatatagtaggctgtattatatattataatcatataatataacttggacaggcttgggttggtttcctctcacagacatttattaacttgtcaccttgagcgtattacctaatctccctgaacctcagtgttgtcttatataaaatggggatgattataagtgcagcgagcttccctggtggttcaggtaaagaatctgcctgcaatgcaagagactgcctgcagtgcaggagctgcagtttcaatccctgggttggggagttcccctggagaaggaaatggcaacccactccagtgttcttgcctgggaaatcccatggacagaggagccttgtggactacagtccatggggtcgagagagtcagacacaacttaccgactaaaccaccaccaactaccataattgcagaagctttatcctaaaatatttataaagaagagttttgggtaatattaatacatatacagagtgcttaccacaaattatagtaagaagtaaaactcatcatatattagttattactgttgttattgtatttagtgatgttactattattagtcattacacccttcattgtgcctgattatctgggtaagatcaaagccaactggaatgaatgatataattaatagactggtaagtgtctccataccagcagtcctttgtgattaatattttatgatgggttccattttcaaattaaatttaacagccttgatagctatgcagaggccaataccgaaatactgagtcatctcattggataattttctgttagaagtaatgggtgtcgagtttaaatgactgacttcactgga

SEQ ID NO: 39222 - DNA, 1141 bp, Bovine  19866881347877
  misc_feature (1)..(1): n is a, c, g, or t
nttccctttttgttcctcaggcattttttgaaatttatacttttgtcgtaaaggcgacatccccctacccccaaccagttgccaggtaatctttgtgaaagtggaggctcttttgaagttttaagattgaacaaggaaaatgcacttccagaaatactaagtgactgcacaagctgaatcactccttgaccctggaaaccctctttgtgaggtttctgaagtgtgaagtatgcccagagagaggaatgctatttttatttatttaattaatactcatcccacttttttatgtcccaggcaccattttatgaaattaagagctattcaatcctcataacaactttatgaaatatatactgctacgactattttaaaaatgatgaaaggcagaaagagtacctaactcaagcatggtcccacagctggtaagtggagattaatgtaccatgtagggaacagcaagggttccatgtcacaaggagagagaaagagggagagaaatcagatgcccacctatgaatttacaaacactttctctctcagcatcccaactaggactaaacataaactagacaatttggtcttaatcatgattttgaagtgagatatatgcattactacatttgttcctattattatttgaaatacctaaacacagacttcattttccatgagcaaactgggtgttttatccaaactcactatttctttggtactgattttctcaattttaatgtatctcactgttgattactattctcagtgtttttttaaaaagacccaacatgaaaatctcattataaaaataaaatacaaaaataaaagagaccagccagatagtttctagatttagtagttgggggagggaacctttttttaaaaaaaatattcaaacaaactacacttgtcaattagtatctcttattcacattttaacatttatctgggtataaatgtatcttgtatttctttcacagtagaaaattatatgaagccgtgtgaatgaatccaaattttttatgtccttattttttcttattttttacatacacatcgagttctatcagcattaaatataaggttctggatgacttaaatacaagtattaattttgaatggttgagagcaaaggacagcagga

SEQ ID NO: 39223 - DNA, 998 bp, Bovine  19866881405761
  misc_feature (1)..(1): n is a, c, g, or t
ntgttggggccctagttattttattttactgttgatgtaagagcttcttagtgagatttcatgacttaagggtcacacagtgctttactgacaaagaccaaggactcagtctctagatagtaggtcctgtgctggaaagagtataggacttggagttgaatgtcatgagttcaagtcccagcctagctacttcttaagcattagatgataggtaagctctttatcatttctgagtctgcttttgcactagaacttggggctactcctctgggatgtggaagaaaaatgcacgtgaagcttcaataggaaaccatagcacactatgtaaatattaatgtgatttgtttttctctgctctcaaatattaataattttaattctgtttctattctagactgtaaagacagaaaaagaaaatacttcatgattggagcagtaactttcaagtgaaacatttttttaaatacaaaaatacattaccaaagccagagaacaatatcattccctttaatatgtcaatcaactagaatttattaagcatctactatgtgctcaatactgcagaggccatagaaaaagctatggcatatttctagcctaaaagagctaaacaatccgtcagaaaaatgcatataaggaaatgccaataatgtaagataaatatcagtaaagactggaagcaatgacagtgtggtggtgatcagagaaccagcgagacaacaagaacagggcaagggatagactctctgtagtgatggggaaaaccttgcaaagagttaagaatttgcttttgccctgaaggttggatatgatataaactggccaaaaagacagagatgttagcttctctgattcatctctctgcttttctctgactcagtggttccattttggttaacatgatcccagaagcaccaagcagattcttatcggtcgttttctaataactgctgacctatcagtagggaatatggaaagacgggcatggagtataattt

SEQ ID NO: 39224 - DNA, 1233 bp, Bovine  19866881445646
  misc_feature (1)..(1): n is a, c, g, or t
ntgtttaccctgagctctttgctccagcaaaggactgctgctgagaagaaaggtttgcctcaccccagtggtctctttacattgttcagagtggattgccctgcattcctgatgtcttaactgtcttaatacctcttctgaacattattttaatggactctccttaggttgctacactctaaggcacacagtctattaaagaccagaagggaactgcagaagaaaacactttgttctgtctagaactcaaagcgacacctaaacttttttttttttccttttttttttttttttttaccggctacagaacgaatgctgcctgaatgagtaatgattagaaagcgtttggaactgtattaccataggtgacagctctgcagagataggcaggtaatgttaagaggcaaggataagaggctatgacattatgtctggagggttaaggactcacagtcaaagcttgaactgctattactggatcaatacttctcagttcaacacttatcttgactactggttagaggcttttgtagatatgaacactgagagagcaaaataaaactgaaaaaaaaaatgattgttgctgttcacttacatgtggattgctgaagttatttaggtttcagatccacaattcctttttcatggggcaaactccagtgacctgaaagcaggataaaaaccaacaagttatgaattatagtgcttgctcccctgtcctttcccttattctgtttcgaaagaaagtgaaaccacctctcctttttccattttgtgcccagtcctgcttggatttctttgtaccttaatatttcctctactttctaagactgtatttgcccagagtgattacaccattcaaggttaaaactcttgaaagtcgacaggaaggaagtatgaagtcatatctttgatatttgggtcatctgtgaaagaaagacagccctgaattgaaaggtgtaatgaacagtctctgaattgtgttacgtaaaagttaggatccacacttctgtctaaatgtaagacatacttatattccatatgtaacaactaattggaatgagctcagagtttcttagtctaactttgtaactaggttcacgtttctatgattgctgtaaataaaaagttgctgtagaggatgcgctgtaacctccagaaaacaaggatggttgggggcgaaggggggactgttcatgaaatctaaaagaattggtttgtgaatacagaatt

SEQ ID NO: 39225 - DNA, 1008 bp, Bovine  19866881505840
  misc_feature (1)..(1): n is a, c, g, or t
ntttttctaaaaattttttctgttctcgtggaaataagcaatgaagagttttttaaaatcaaggtcattttagaggaagactatagaccaaatacaataatttttaaattcaaaggagaatacatactggatctgttaattaaatgttaggctaaggtttagaatgtcagtgcattcttcattatgcaatcttgatttattaagcattagtaaagcataactgaatcatttctgtatttgcatggtgtatatctaaactaagaaccctaagaagcataacatacatttaaaaaaaaaatagacataaaatgctgtgggtaatgtcttttgaaaggtaaataatgggtgactttttttgttcggcaatgggttttttgactcacacaaatgaagaggacttttcaattaaaagctctctgaaaaaatgatttaggttttttggaattccctggagatccagtatttggaacttggtgctctcactgccagggctcaggttcaatccctggtcagagaactcagatcccacatgcaagctgcatggcatagtcaaaaaaaatatatatattttaagatttagttttccttctttaatgtaatcttgaatgtaaactagatggtttaaagtactcaactgatggtatcacttacttgcattaattgtcacatggtcactttgctctcaaattgacatattaagatgcattgacatagctgccaattttgcctttaggaataaatcaaaagaattaactcagttttcaagataacaaaaatttcaccatctagggaaacaatgtttgatgaagtgaacctgtattttcttgccattaaattacttggaaaagtgagactggcagtatgaacgtgaactgaagtgtggaaactagctggacagagtggctttatccagactgctgtcgattttgttgaggcatcagtagtaccttctatctaagcattcatctttggtccccttttcataagttaatttcactggatgacgtt

SEQ ID NO: 39226 - DNA, 620 bp, Bovine  19866881884331
  misc_feature (1)..(1): n is a, c, g, or t
nttgaaatgcatacataaactctaaccgccccatgcctggctatgttgtctatctaattacttggctaatgctgaatgagccaaatgcttaaagaccattaattttcctctcctattacttcctaatacttctcagaaaagcttgtaattttcttatctaaatgtttcaagtattaggaaccactgctgaagttggaatggtaacataaatagctatgaaaattatctcagtaaccagatattattttcactccctaggatccatcacaggcaattttgttccaactgctagggaatgtcagtgaccaaaatctagaccctgtctccctttaattctttgcattcaagtctaagtatgctaagcaaacagctctagtcttttattttagctttctgttggccctaagagatgcagtaactctgtagctaattgcatatattttaaaataactcacgtaagctcttcaaactatagttagcatagagactatcacatattagaggatagcagtttgttatttttcagattgacatgggctgtagcaattttcaagggtccttgctcctctgtgaaggctagttcaataaatctatgtcaaatttcccaccattcatctaag

SEQ ID NO: 39227 - DNA, 1159 bp, Bovine  19866881891161
  misc_feature (1)..(1): n is a, c, g, or t
nattagttcttaggtttttagatccaggagcctaggaaatggtaaatttagccctttgatttgtgtgtcttgatatgtcatagttctgtgcccaaaaaactgatcagttttatcaggctctgacatggctgtgatgctttgtggcatttccaccagagcatattgtatcatcagagagaaggtccacattgcaccagctttctaattgggatcatcacctaaccacaagcctccaagtttctggagaactgagacatgggttagatgctctgactctctccatccgtgccctagcctcccaaacatttgtactctttggttacactgcaagggaatttataactcacttacttttctggaaatctaaattttgagtccaataatacagacacatttatttccatttctaccaaatggagagctttatttctggcttattttccttttgctcttcagtatccaaagcaaccctgaaattcaccaagtcatatttatgatttttcatttatcaaagaaacaaatacaactcttacttgctgttcaagtttcaggtcattgatattttttctgcatcctttcagactagattagggatccatacaatgagctccttcacgtctatggatgctcctagaacactgtcctataaatgcttctctaattgtttaccttatgtctagactaaaaggttggtggcagggggccatttgtgtcttcctcatctctgcatttctagtgcttgtcatgtaagtgtgcccactgagtgtttgttcaatgtaactgtgaagcctggaacatgttcttgtacagttttggttccttaaataccctttggaggaaaaaatctctctgaattgttatttattgcgttctcttgctttcagtccaacagtttggcacacttcagaaccacatactgtaatctacatttgaggctgaataagcgctgttttaggggagaagtatacacgaggctttatgttgaaactgtattatatattgtaggtaactggagacattctcccatcagtcatgccaatcctctggtggttttttctctgctttttgtactggaggcttataaccaccatctgaaaccttgtaagtaaagaccaagcactgcccatacacacaagaatttaaaaagactgaccacatg

SEQ ID NO: 39228 - DNA, 1825 bp, Bovine  19866880017506
  misc_feature (1)..(1): n is a, c, g, or t
ntcgagttggtgatgcctccgcctctcatcctctgtcgtccccttctcctcctgcccccaatccctcccagcatcagagtcttttccaatgagtcaactcttcacatgaggtggccaaagtactggagtttcagcgttagcatcattccttccaaagaaatcccagggctgatctccttcagaatggactggttggatctccttgcagtccaagggactctcaagagtcttctccaacatcacagttcaaaagcatcaattcttcagcactcagctttcttcacagtccaactctcacatccatacatgaccactggaaaaaccatagccttgactagatggacctttgttggcaaagtaatatctctgcttttgaatatgctatctaggttggtcataactttccttccaaggagtaagcgtcttttaatttcatggctgcagtcaccatctgcagtgattttggagccccgcaaaataaagtctgacactgtttccactgtttccccatctatttcccatgaagtgatgggaccagatgccatgatcttcgttttctgaatgttgagctttaagccaactttttcactctccactttcactttcatcaagaggctttttagttcctcttcgctttctgccataagggtggtgtcatctgcatatctgaggttattgatatttctcctggcaatcttgattccagcttgtgcttcttccagcccagcgtttctcatggaaaaggtataaataaaatattctatcatatcttgtgatgtttttcacatacaagctatttatctactcttacctatatcatcatcaatttatggtatttgtgtttgcttttattctgattttttagttttggcagaaatatggtgacagagttgttatcagtctaattttcaagcttctgaataaaacttcccactgcctttcaccagcttttgcatttttcttcttcctggagaaaatgtcattaggaggaaggggaaaaaggaaaaagttgagagtttgagaggaggctagagctaaagattacttcatagtgcattactaaatcagaaacgatctttttatttaattcattctttaaaacactacttcttttatttaatgtgatgactttttaggtaaatgtgggccacagaggatatgccttagtgttagaatcattagtgttgagaaattctggatcgtgggtaatttataatctcagttttctggtttaatatgttttctttttcttcctaaaaagtaagcattacttgttatatttaaaggtcttgattttaggaaccaaaagagtcagagtgcatttaggacaataaaaacactctaggtgttcttttattattttggcagcttggcatgtggaatcttagttcctgaccagagattgaagctgtgcccactgcagtggaagtgtggcgttctaaccactgaactgccagggaattcccactataggaattttgaacaggaaattttatttcatggaattggtaaatcagttttggtaaagtagagaagccaaacactatggcggggaattctagagatgagcaacagcaggaaaccattggcgtctttcggacagagagagacagtgggaagatgcagtgtcaccaagctagccctggatgttgggactgtgtggcatgggttaaaaaccccgaagagggctcaaacccagagctgggaccgcagaacctggggctaaagaactggagttggaaccatagtgtgatgtagaaagaggagaaataccaaggcttctcttctgccctccaggcctctgcctttgcctctcttattgggg

SEQ ID NO: 39229 - DNA, 1403 bp, Bovine  19866880253910
  misc_feature (1)..(1): n is a, c, g, or t
nccttggactgcaaggagatccaaccagtccattctaaaggagatcagccctgggatttctttggaaggaatgatgctgaagctgaaactccagtactttggccacctcatgcaaagagtcgactcattggaaaagactctgatgctgggagggattgggggcaggaggagaaggggaggacagaggatgagatggctggatggcatcaccgactcgatggacgtgagtctgagcgacctctgagagttggtgatggacagggaagcctggcgtgctgcgattcatggggtcgcaaagagtcagacatgactgagcgactgaactgaactgaactgagtgatttgggctctcgctgtatatgaacctggcttttgtttccattcttttcctaacttacaaacaaaagtgagtacttgaaaaatttggggctacacgtttagattcctttgtttctaatgtcattgtcatgaagtttttattgttgtgtgtttcattattccaggatttgcaaaaatcagtattatagattctgcacatactgcaaaatgtcctgactatactatatttatagaactatataattttaatttagttttatcccatggggaagatttttcacatttgagttacatactgtatagaaaaaagtaacaccagtatttttaaaaccgatacagcccagaacatgattacaaaggaaaagcaaaaacatatcacacctttcaatgcagttttagctagctgtatttcactagaggaaaacagaaattttctaaaattacatgcagttagagttttaatgaatccaaagcatttctctcctgccaattaatacttagggcaaggttacttgtaatgcattactcctttttcttgctacaactaagatgaaagcattgattaatatagtgtaatcaagaatatgcatataagtagatatataagtacaaacatatgcatatgtgtctgagtgtgtttgcgtatatgcctttgtaaattttcagaagatcgaaagctacccacccctaggctcacatagaaactgcaataagaaacaagagtccaaggaccattcttcactagattacttgcaactcaaatagggcatttcaggagcaaaactagtgattgtgttgctatagcaattctgccatgttcccggcaaccatgtatatgccatagcttagagttttaatatgcccacttcaaagtcagaatagcacaagtgttaaaagccataatgtatttttaatctaacctttggctaatatatgtgaagattttaaaaagtttcttgttccttactttaatgggaaggaacgtaattaacaagaattctgggttgtaatatgaaatggatttatcgtcttaagaaagtttaagaaacgatttcagcttaaaa

SEQ ID NO: 39230 - DNA, 1909 bp, Bovine  19866880346075
  misc_feature (1)..(1): n is a, c, g, or t
nttggagctctgtcctcacataccaactgacagcttgagttaatttattcattacctgttaattacattcttattagggaaataataaggcaatttaaaaagaaaaaagaaacatagaattaaagaatttgtatctttgaagttcattcccacccaaattctcagagtatgaattattattgttgttcagtggctcagttgtgtccttctctctgcaatcccatggactgtagcctgccaggcttctctggccatgggattatccaggaaagaattctggaatggcttgccatttccttctccaggggatcttcctgacccagggattgaaccctggtcttctgcatcgcaggcggattctgtaccactgagccaccatgtatgaagtatacatgtagagaaatatccatttaaattgctatagaaatacagttctctgttcttccttggtcatatttgaaaaaatgaatctggtatactagcctgaattatttctgaaagtcatttggaagaagtttagctctagggtatccttattctaaagtgatttttttgaagtgtttttcaagttaggtcataaaaacacaaaagtatctaaaactctatgaaactactggcaagtattatcagaaagaaaatgcttatgtaacttcataaggactctgttccatctcattccaccctgaaagtatctgtacatgaatttagaggaaattaccaaaggcagacctgtgtctgaagaaaaggatcaaagagatgcagacagagtcactattatcagaaagacctcaagtcttacaagatcaaagtcttggtatgaaatgcatgtcttcatacttaattctgcctcaacccaccatccaccctccaaaagtaaaacctccaagaggaaactatttgtgcaactgtagatctgaaatctcagtgagtacatagtacctaaatactagagaactgtcaccatgcgatctctgctcccctcccaggccgcccatggaggactctcagactctcttgacccctgtggtgagctgtgggcctccaggagccctgctgacccgccccgtcatcctcactatgcatcactgtgcagatccccagcaccgaggactggaagatacagctcaagaaccaggcagcgcagggacagtgggaggtgagcctctgtggggataaaggtgcagttcatgcggataagcacaggcgatcatgggaaggcttttagttttaaagcaaaacatgggtggaattttagcttattctcaaaatgagagagagaaagggaaagagagagggagggggagatggggagacagacagtcagacactggctcctgagtgctttatctactgactggtaagcacaaagaaaatgatgaccagtcattagctaactcatagggaaagtgcacttaagagtcttacataaatcccttttgaatatacatactatcttgggaagggaaatatatatatatatatatatgtagtgtgtatatatatagatatgaaaatgaaagtgttagtcactcagttgtgtctcactgtttgtgatcccagagactgtagctgaccagacccctctgtccatggacaactcgtccaggcaagaatactgggagtgggtagccattcacttttccaggagatcttcccaaccagattgaacctggatctgccacgttgcaggcagattttttaccatctgagtcaccagggaagcctgtgtgtgtgtgtgtgtgtgtgttttaattttcaggtagagaaacattgcacctgggtcagaaaatgttaggacttacttgccaacaagtcctggaaataggtctgaatttaacctgggaaagcaggaagtgtgtatcctaagctccaatgcaatgaagactgtgtatagcaccttggctgtctg

SEQ ID NO: 39231 - DNA, 1605 bp, Bovine  19866880390048
  misc_feature (1)..(1): n is a, c, g, or t
nttcttagagtccttctcatccattaacttctttccactctctgtggctgttttagttctggcccttctcccagggctctgtagtaagctttagaagacagtatgcctctctccctagattacccaatgtttctttaggtattagaatagttaatacttcctctccatcccagattttaaacattaaatactcatacctatgagtggtttatttacctttcagaattaggacttagaagataaattgacttagagtaatataggaattttttaaatactggcactttatggggtgcaactataaaaactcatcacggccatgccatcttgtaatttaaagtttctgttatttttgaagtactgcaagaggaattctgagtcatatattggataattaaaatgttagagcaaacatttatacatggaggtaaatactgtgttcagatggaatattcttaaaaactcttcctgctaaattcatcttttgatctaatttccttttctaattttagctttttgtgtactggttttgaaagagtgaggctgttaatatttttttttgtgtgtgtggtgagtgcttcattgcttagcccacagtgttaatgcggttaaggacattggtctgatttcccaatggttcagtaatcttcctgtagtctgtagtcatggactgtcctccaaaccatgaccaaccatttcatagatgttagtcatgagggagacagaaaaggggagtcgggatggctcagtgtcaattcattctaaaacaaattaaggcacatgccctaccagatgcggttcaggagttttgccttcttttatttaaaagtaattcagcctttattcagggcttcccaggtggcgctaccataatttgctacagattatgcctctatggccctcaacagtgttagttgctatagttttccatcttctttctctggtctttaagttggatggtttactgaatttactgagatgcagtgtgttgagatgaaaaggacatagtttttcaagtcagacccctctgctctacttctttcactaattagttgtgtgcccttggttattctgaatctccaactttctttctttgaaaaaaataactatatggttgtaagtattaaataatatacataaggcaagaaatagtatatgcataataaatgctaaagttctctatttatcttttgtgatacataaaatctagtcagtcaggaaagttttatatagttaccagttatttaacactttcttgatgccaagcatgctgtatatatatgcagtttatatatgtgtgtatatagtttatgtatatgtatatatgtatatgtagtatatacatataatctctacttctcatgataacttcaaaatgtaatttataattatttcttttaaaatgaagaaactgtgatgagttgctatctggggtgcatggttatcaccaaagcacagtttacagtaaattgggtgtacagggatatttctagggaagtgatttttaagtattatagttgaatgactacctggatagaaaaaaaaacatccaggtaatcatttcacgaaaaatttttgttgtaaaaaaaacagactcttggggcc

SEQ ID NO: 39232 - DNA, 1225 bp, Bovine  19866880470940
  misc_feature (1)..(1): n is a, c, g, or t
naaaaaaaaaaaggaaaaaaaaaaaaaaagagatgtaactatagattttaataatccttgatttaatagcactgtaactggggagaattagatgaacctaagctttcatagagcccaaataataggacatttagaaaatgtaagacatagttactctgactgacttttcagtaatcagcattctggatggattttaaacggtctagtcatcaccatcattttagtgtagatgtatcccggttctaagatagtgctattgctcaataggtaacagacatttgttaggacagtgtcgttgtaaactgtgtcatttctcattactgttcgcaaatacctgagacagtctcggcacccaattcttattgcatacaactttcagagcctcatatcttacacacatctggatcgttgatgctgtgaaaacactccactgcaccataaccccattgaataaaagaggaaaaatttaagagaaaagaaaattcctacacagtgtaaaggtattttattgtgctctatgataatcaacaaattttgcttttactgctgaagtttgaactatgtctgacatttttttttcttttcgatacaccttgcagtagcgaatggctgtaagatgaaagataactgataattttctctccctcctgtcctctccctctccccatgtgtgtgttttgtgactcaggtctatttttttcaaatatatgatttggttcatttctgtcatttgtagcatccacaaatatttagtcaagtatttaatcttcccatgaaatgcttcagagatttgtcatataaaatcactggtttctctttagtgctaagtcatagcaaattatcatcttttttaggttgatttcgtagagtgttaagtgctgtttaaatttcacttcgatatggagctatttatttttctcctaatcacttaaaatagcaagagctaatcaactggagtttttctcctttttatgaatacatcagtttacccctgactcacatacatgtttctgcctttaggtcagtgggaacttttcccagctatgtttttttttttttttttttttgcccccttcattcctaatttctctcaggaacaaatggcagcatagttaagcattagaaacttgttgctaaaggtgctaacctaaacatcagtgccaggatacgactgagacttaatagactaattaatttgtctactgcacctctgacctgggaatta

SEQ ID NO: 39233 - DNA, 1668 bp, Bovine  19866880488893
  misc_feature (1)..(1): n is a, c, g, or t
nagaaaaacacaaaaaatggaataaggccttcaagacatcagcttcgcgctgatgggtctgtcagtacctcagttccctgttcgtttgcctttctgaactgtttatttaggcactcttgagtgttcctgcacattgactacattagctgaagttgatggaaatgaggttattctgtagtaagctgacagtctgggtccttgatgtccaacaattgaaaaaccagaaatgatgccctgttagaagaaagtatattaaggaagtaaagtgagaaaacaagttagagacggaaaacattgtttccattgcagggtcagtcgtttgtaattgtggagtggttttgaaagctagttttgtctatgatgcaggtaaagccagttttgactgcagaacaaattagtagagactagatgtccttactaattgactgtgatcacatgacccagatggaaaagtcccaggccaagtttcttagtggacaaatgtcccctttaccaatggctgtctcctcagccagggaaacaactgaataagccaggaaatgacttccacgataatgtcttagcaatcagtgtttaactaccaacaccataatcaatatttgctgctgaatatatgcgctttttttttttgagcaaacctaggaagatggtgtggagaaggcaatggtaccccactccagtactcttgcctggaaaatcccatggacggaggagcctggtaggctgtagtccatggggtcgctaagagttggacacaactgagcgacttcactttcacttttcactttcatttggagaaggaagtggcaacccactccagtgttcttgcctggagaatcccagggatgggggagcctggtgggctgccatctatggggtcacacagagttgggcacgactgaagcgacttagcagcagcagcagcggtagcatatatctgtctacatgattattaagtatgagggtaaagacatttttgggcttccctggtggctcatagggtaaaagcatctgtctacaatgcaggagacctgggttcgatccctgggttgggaagatcccctggagaaggaaatgataacccactccagtactcatgcctggaaaatcccatggactgagaagcctggtaggctacagtccatggggtcacaaagagtcggacaccactgagtgacttcacttcacttcacttcaaagacattttaagccaaacaagttctcaaaaacttgaccttgcatacactctttcttagaaagctactggaggatgtgcttcagaaaaataatgaactaaactaggaaagaagtgaggctaaacacaggaaagggatgatgagaaagacctgggatgtcagcaacgtttccagataaagaaagcaagtaaccccagcctagaatcaaaagatagatactccaggaggggatgtctctagaagaaaataaaactgattatctgctgtttttaaagatatgcaaaatatttagttcatttggaagctttgggattgaattaactagtgtattaaaaaccaaggaaatgataaaataattgctaaatccagggaatacaaaaaattgaacaataatcatgatcataatataagaactgaatattgactctagtgattcagctcttttggggaggatggcaggggggaaatgtat

SEQ ID NO: 39234 - DNA, 1673 bp, Bovine  19866880527630
  misc_feature (1)..(1): n is a, c, g, or t
ncaagtaaagcacagaaggattaggtaacttgcctgaaaccatccttttagtaaatggcagcgccatggtgggtttccttctgtcatatcctacccttagtttaatagatacatctttagtgtgacattttggtgctcttagggactgctgaaatctaaatgactgtcagcttagcttcctcctgtcacctatctctacttacccccttcctccaacacatacacatccctcacaccctgcaaaaataacctatggccaaagtgttaactgtgctactaaatttagattgtattttgactcaccgttctattttctgattcttttctctgaagtcagcattgtataaaagctgtaaaccaaaaagcacaccctctcttttggcacaacgaatgaagcagtcactttccccagccacatttacttgctctgttagtcagaagtggcttctttattactgaagaaggggtgttttgccagcttctttcttcatttattcttaaccgcttattaggcatccctgggccaagttctttacaactgttaggagaacggagattggtgaattatagcatgatcagaggcttggagtctagaataccatgattctaaaattcttcagtaaatcttcaggaaaatgataatgatactggtgctagtggtaaagaacccagatgccaacgcagaagacataagagacacgggttcaatccctggggtagggaagatcccccggaggagggcatagcaaggcattccagtattcttgtctggagaacccccatggacagaggcgcctggtgggctacagttcatagggtcacaaagagctggacacaactaaagtgacttagcatgtacacacctgtacctcatgtctttaaaatggtttgcagaatataaagcttctatttatatgcttccttgctgaagtcagtgatacagtatctggcatatacacaaatatgctcatattaattttataataatagagtattataaaattatataatgattgaatagaattatcatctgaacacattttattaatttgcttatttacaaaatttgatttaagacatctctaatcttaaatatcatttttgtcctaatctgtgagtacatatgaattatatttctatatgaagtatattttattctcaccttctggattcaaaactacaacatttcagaaagatttatgtattatctatttagtagaaacctttcaattactttctagtatataaagactaaatcacagaagataaggaatttgagagacttgttagcaatcatttaccatgtgctgttgtccttgtaaactcattttaagctctgttggttgtcacacactgaaggatgaagggaacagtgtggctttggctggagcttatcactgctcagaataactttggtgtattatctttagtggcattttagcttcgttggtccacttcaaaatgtccatcagagacaccaaagattgacttaaactttgaagacttgtggctccatacaaatctaattttggaaccctcaaagtttggaatttggaaactctaattttgaaattctgccatatctgacaacagttctttctatttgaagggcaaaggggaatagttctgatatttgtaattaatgactttaaaaatcacctctcttattaaaa

SEQ ID NO: 39235 - DNA, 1631 bp, Bovine  19866880660158
  misc_feature (1)..(1): n is a, c, g, or t
ntgagtagcacctgttttagatctcggacccacgcttctcgcgttaatatgcaaataacccgaggacgttgtgcctgagcccgccctcagagattctgattgggtaagactgggatggagtcaataacctggcatttctgagcggctctgacggtattgctggcccacagaccacgctggaaggaggtgttctctcgcttggacctctctgaaggtgagggaccttaagaaaatacaggtagaaaccagcgttgtttttcttcctcttgtctaagaccagagacacccacttcagtttctgaaaattagatacgttaggaaattatgccctactctgggaatcctgcaagtttcttttacccttttttctttgcaggattttacggcacttgtggaaagcagggcagagacaacagcccctacgcagacctggcttttggccgaaacagaacactttaatgacccagtgagtgcgcagcccggcgagtaagtgaggagttaaattaaatctcaaatggtagaggtttctcccatcattccatatcgggagtgttaattttcctaacctttaaagataaacttcatgggaggtgggggagtggggtaataaaagagcacgcagggagccaggtgtaatgcatttgggtgtttggtctggttgattactctttctgtgatgctggaaattggcctgagtccaaatcctgactagaccatccttctctataagaattaaccaggtcagtggctcctacatttttatcgtgttagtagctcctctgaaccaacttcagaagcttacacgtagaatagcccacaggtaagcatttctcacgttaattttttagtttttctctttctttttttttttttttttagtaaaagatacttttaattcacaaaaccactaaagaaactcagggctcctcatgttttcaggaacagggtttgtaagtcagttaaccagaaggtcgcctaaatttcttctgttgcaacattcaagcacctgtgaggattgcagatttgttctggttgatacacatccattgacattatctgcaatgactttgacttgtaaagagtagtttgtttttaatcatgattcgtgtcttcagtgcttccctctcccccaaactaacaaccagcgttgtttgttgttgttactgttttttttttattttcaaactattgaaaactatttggtctgggggtggggggcgcggaggaaagattgtctgcagccgctcagggaggtctgggagttgctctgttttcttagctgtgctgtgcaaatgaactgaaggtttaacacttaggtgctgtttgaagatataatacaacagagcccagaggagggagtctgggcccgccattgccggcctggcccaaggcccctcggtacagctgctctgggggctgcaaagctagaatttgttgccatggcttagacctaaacaaacccctgcctgttctggtatgtagattatgttcttccaggacagccctgctcacttgttttgcgtccatctgtgggacacacaggtttcaatcattccttcaccgtctcccattctaaagctgcagtttgttatatgatatagtgccttgtcacttagcagcagacgccacgg

SEQ ID NO: 39236 - DNA, 1455 bp, Bovine  19866880664301
  misc_feature (1)..(1): n is a, c, g, or t
ntctttgtctgagacctggagcatagtcttttgaaatggaatttacttccaaatgattcaagagcaatttaaaatgaatgactgcaaagctaattttatctgcatttggctgcccatccatcagagaaataattcatgatatattacaacaaaaggcaactggaattaactatttgaatgagacttcagcttatttttaatattttgattaaaatatcctttgaaagacaaagactatggcttatattacaagtaacatattaatggatacatcatttaaatttaagtagtggaatatataatgccttaagtgtattggacaatttgaaagtactgcatgatttctaactctaaaagaaaaaaactttttttctatgtttaaggaaataatttccaaataatccccatacattattaatagtgacatgaagtcagcatgctatttgacatgcacttagctgtgaaagagaggcacctccttctgcccccgtttaagcctttattatttctgacttttgctaacataaaatcctaagtgttttcctgcctacagtctctactttgccatgtgttctatacaccatcttagaaaagtttgcttccttcttcaaataatttaatcaatgcaatgtaaagcatgatggtaagtttctttttgcttatcacattaactaaaatatactgaatgattgatgaggttttgaggaaatatgtatttgcacatactggctatagtgtaaattggtatcacagtagagagtatttgaaaatacaaataaaaactaaatctatgtatacacccaaataggttatcccacttcttcgaatccctgtttcagacataagggcatcagaatataaatgtatacaaagatgttcactgcagcattgtttatttaaacaaataaatgatacattgcaacaaaatacagctgaaattaactatttaaatgagtctgagaacaacttaacaacaaactaaggaatgatcagataattattaatgatatatccatccaggagaacactatttcatcaataaaaataaggaggcaaatttgtatgtattaaattaaaagggtgtccattattcactaggcaaataaaacaagatttcagccaatctgtatagagtgatgcaacctcttgttaaagaagacagaaaagaaggaatgaaaggagagagggcagaaagagcagtgtgtgtgtgtgtgtgtgtgtgtagatggctgcattaataaatcacaagaaaaagtgtaaggcaaagcctagaagccaaagctcaaaaatattaacagtaaatacttcttgggggagaagaatcagagagctttagggggaattttttccctctatttggaggtggatttttcacatgctagattacgggaggatttctattttttaatgtgttttttgagtttggtattttaaattaagaaaaggggaaattag

SEQ ID NO: 39237 - DNA, 1495 bp, Bovine  19866880688319
  misc_feature (1)..(1): n is a, c, g, or t
ncatattgtctgggatctaaggtggtagctataaaaagaggcatgtcattcattccctgccttcctggaattgccttgtacagaccattcccctgggtttttccagctaaattttaattcactcaagccctagagttccccctcttccctcaggaggctgctatctctcagcctgagaagtttaataggcagagacaggcgaaaggatattgaagaaagcaggggctttctaacatgtaactctataccagggaaataccaaggggtttcacgaatttattctcataatgaaaggagaacccaagcaaatggtaaagcataatctttttcactctctctttaccctcttctattttgtcctctctagactgtgatctccttcagtgcatcaggtcttagttttatctctagttacaacaccaagtatctgggtcatggttttcgaatagaaagtctatgtacctcctctatgctgcatttttacaagcctgttttatcatgtccagttttcaagcctggttgtatattagcattactactgagcttagaacaagtaaagaaaaagctatgtcctgtttccaattaaaccattctctctgggggtgaggccaggatataggtattttccaaaatcccccactggtgattgtcaaatgcagcccgagttgacagccaactgccctaataggtccttgttgctcttgctgtcacattcttggagatttctttcaaaacagatttttaaaatcagattgaactctcaatgaaattaggaatgagtacaagacttccctaatctgaactgtttttcactgttagatattacacttctgtgtgctgtgcttgcatttttttgccaggttctaatattttgctaattgtagttctcatgttatacatgctggttttgtataaccaaatagtacttttcagaggaattggcaagagtagttatttcaacaggtatccccaaggggactctgaaaatctctaagggatgactctggattgatggtatttgagtgagaagtctataaagactccagagcaagtaaaggcctctctcctcaagttttagcattaggtaattggtggctcagtggtaaataatctgcctgcaatgcaagagtcctaaaacacttgggttcaatccctgggtctggaagatccccaggagaaggaaacggcaacccactctagtattcttgcttggagaatccatgcacagaggagcctattggggtacagtccataggatgagtgaatgagtgagtgagctcactgagtgagtgagtatgcacacactattcattgttattgtagcattttaaacaaaaaaaaaatctctattctgttttttaaaatgccccatatatatgtataactgattcactttgctgtatagcagaaactaacataacattgtaaatcaactgtactccaattaaaaattatttaaaataaaaataaaataaaataaaataaaatgccccaa

SEQ ID NO: 39238 - DNA, 1168 bp, Bovine  19866880694103
  misc_feature (1)..(1): n is a, c, g, or t
ntgaagtcccttttatctaatttctatgttttctcttcacaaacagctcttttttgacatctcaatttccattaataaaataaccaacattccagagacagcctcaaaactttggggttatccttcacgccagtctccctcatcctctatacccaaatatttgccaaccacaacagattccacatactcaatatgtcaggaatttgtccctttctttccattgctttggccaccatgaagttcaccattttaccatctgtgtaacttccaaaagtgttccagttcttcctaagcagaaccccaactgctctgcacaaagctctgttccaagtgattttattttcaaccctgagtggttcccctccaccaaaaaaattaagtgaataccccttggcatttaagatccactcagtacatggcagttttcttcatacagaacctacttaaggcttactatcctgaaacttcatttctccaccatttcctagtcatagttccctacctttactcatggcatttctgctcattgaatgtccctttctcccatatcctcttcccagaaaggctgcttgatatttcaatgatgatctcaaacactggctaatacataattttatttttccccatccacctctgaccatgccctcacagaacacctgtgtcttgtatagtttctaaatatgtcctgaacattgtttatttttgcttttacattatgccattagtaatccactggctccatgagggacaggaaatgtgccacagctatttctcatctagaggcacctaatggtctgatcataggaacactgtcagtatttgcagaacttggttgaaaatgtaaatgcattaatgcaggtttggaagcaaaccaactcatcaaagagtgaatgaactggtctgtccactagcacgtttactgcccctttcctggacgctaagactgggactcgcactggtcacatgcagtttcatccaagttcaccaattatcgtcagtgaaacttaagttctttggatgaatggattatataccaaaaaacttgaagcaaagaaagtaaatatcaggttaatattaagagaggaactatctttttcaaaggaactcctatcattccaccacaagggaaaagtatcctttcattaagtgtcaaaataaacatgcttta

SEQ ID NO: 39239 - DNA, 2627 bp, Bovine  19866880760099
  misc_feature (1)..(1): n is a, c, g, or t
nagttagatttatgatataaatatgtgtaagtattagaaaaaaagaaatctcaaactcctaagtgccacagcataaagatcagatttacacaaaaattaggagattctaacattacttatgtttctagaagggaatagacttgggtattgggaagagatgtatccattaaaaaaaaaaaatgcatttctatgcttgttcaaggctttaaaaaaaatcttgttcatgtattacttttatttaaaaagttttaatatatcagtaagaattaagtagttaaaagagagattatatagtaaacagaatgaaaaatcaatagcatttagctgcttagagagattttaaaactatccaacctctaaaatctttaatgagccttagaagcagacaggtgcatctttggccctctcctctaacgtgacatttggcatcaacatcaacttgctcttagtttaaagtttgctttctttccccagctatgccttctgctgctccacttgtagcatgatatgccctgcctcaggctctaaaatggcttatatgcatctatctcaaaagcatttgtcatctgtcctaatccagtgcctgctaaagaccaaaaccagttggcctcgattagtcaaatgaagcctgtttgtttgctctttgaagctaggtagcaaatacaagagttttccagcttgccatattacctgatgcttctgacatgaaatcagttagcatagtagctgtcatgaagtcattctttctgtttagataagaaagtagccaaagctctcaggttgattttaacagactcctatagagaaaggattagagtctctattaatacactcagtcccaggattcctagaatactgggctattctactgatcttctcccctcacattcttccaatgaattattcttctctccacagtggggtcttatttcaagggcgttcactagctcacttataatgtcaacttgctatttttaaaatgagatcatcaaatcattaattcactttaatgtcagctttattgagggccgattttgaaagtacaattcaacaagtcttgacaaatgtacacggttgtgaaatcttcatcacagtcaagctgtaatcaactccagcactctccaacaggtcaccactgcccttttgcagtcattcctcttcctgaccttccagcttctggcaaccactagtctgctttctgttactatatttttgccttttctagaacttcatacaagtggaatcatacagtgtatagtgtttttgtggatgacttctttctcttagcataatatgttaagattcatccatgtctttgcatgatttaagtcgtttgctcctttttattgctgtatctcattatatggatatgctatattctattcattcattcacaagttgatgggtatttgagttgtttggcttatataaacttataaaaaggtgcttacaaatttttgtgtgcatatatcttttatttcatttgggtagataccaagaagtagggttgctgagagttggatttaagtctactattactatctgctattattaatctacaccttactatttgttttttattgtgtccatgtgtttccagctctttcaccccatcctctgcccttattctgaatcttttgtagtaattatttttagcattccattttgtctcaactactggtttgagaactccatgaacagtatgaaaaggcaaaaagataggacactgaagtcagtcagtgcccaacatgctactggagatcagtggagaaataactccagaaagaatggagagacagaaccaaagcaaaaacaatacccagttgtggatgtaactggtgatagaagtaaagtccaatgctgtaaagtgcaatactgcataggaacctggaatattacgtccatgaatcaaggcaaactggaagtggtcaaacaggagatggcaagagtgaacactgacattttaggaatcagcaaactgatggactggaatgggtgaatttaactcagatgaccattatatctactactgtgggcaagaatcccttagaagaaattgagtagccatcatagtcgacaagagagtctgaaatggagtacttggatgcaatctcagaaacgacagaatgatctctgttcatttccaaggcaaagcattcaatatcacggtaatccaagtctatgccctgaccaataatgctgaagaagctgaacagttctatgaagacctacaagaccttctagaactaacaccccaaaaaagatgtcctttttgttataggggactagaatgcaaaagtaggaattcaagaaacaactggagtaagaggcaaatttgttcctgaagtacagaatgaagcaaagcaaaggctaatagagttttgccaagagaatgcactggtcatagcaaacaccctcttccaacaacacaagagaaaactcacacgtggacatcaccaaatagtcaacatcaaaatcagattgattacattctttgcagccaaagatggagaagctctatacagttagcaaaaacaagaccaggagctgactgggctcagatcatgaactccttattgccaaattcggcctgaattaaagaaagtagggaaaaccactagactgtt

SEQ ID NO: 39240 - DNA, 1597 bp, Bovine  19866880787588
  misc_feature (1)..(1): n is a, c, g, or t
nacaaataaaagcttgttctgtgggattgtagccattaatcttactaaatttgggtaactgaaatgtagtgagacatactgatgatgtttttatttgaaatacttcatgaatagacaatctgagacatgcataaagcataatcttcggtaacagtagtgtgattactcttatatatggaatatgactttatatatgtagtgtgattattcatgtatgcagtgtgactactcttatatgtaatgtgactttacacattaaatacacacatcaaatcaattgttattctctgtataaaataattattctaaacttaattctcatatgctgggaaagattgaaggcaggagaagaagagggtgatagaggatgagatggttggttggatggcatcactgactcagtggacatgagtttgagcaagctttgggagttggtgatggacagggaagcctggggtgctgcagtccgtggactcagagtcagacacaactgagtgattgacctgactgaactgagttctcattaacagagtgaatattttctaaaggaagttaggtggactttgtttaaattttggtaaatgatgcatgtaatttggacgccctatttgaattttattccaaatttttaaattctattcagtggaaatattgcctttacaagaatagagctttaaaatttttaatatgtttgtcaatgaagataaatgattctaaaatatgaatcaattgtttgttatttgatttccttctcagaggtccttctcttaacactggaaactaacaatttttctttttggtatgagaccagccccaaaataaaaatagaaaattggcaagaatccatgtagtacattgaggcttttccaccgagtcagtctgataacttggcgagaaagtagttaccagttagtgataacagagtagtaattatccccaaatatatagtttctcttattcttcttttgttactgatcacaatagatttatcttaatttcacattgacattgtctttaaacacctggattcatgtggccaacataatcccagctgcacttacaaaagttggttgatcagagttccagaacttggattttgttgcttcattttgttctagcatgaaaatagtcttggctgagtggatcatggaaaaagcaagagagttccagaaaaacatctgtttctgctttattgactatgccaaagcctttgactgtgtgaatcacaataaatgtgaaaaaattctgaaagagatgggaataccagaccacctgacctgcctcttgagaaacctgtatgcaggtgaggaagcaagttagaactggacatggaacaacagactggttccaaataggaaaaggagtacgtcaaggctgtatattgtcaccctgcttatttaacttctatgcagagtacatcatgagaaacgctgggctggaagaagcacaagctggaatcaagattgccaggagaaatatcagtaaccccatatatgcagatgataccacccttatggcagaaagtgaagaggaactaaaaatcctcttgatgaaagtgaaagaggagagtgaaaaagttggcttaaacttcaacatt

SEQ ID NO: 39241 - DNA, 1471 bp, Bovine  19866880800655
  misc_feature (1)..(1): n is a, c, g, or t
ncaccagatgacccactggaaggtatccagctggaaaaacacccagttttggattcaataaaggcaatcaaagagagggaagatggagcaaagtaatcagaaatttcctacacatgtcttgaagtcacattcatgtcttctcttgtctcacagcatttcctctgaaagaagttctaagatcacgtgagcaatagacagacactgtgccccaaaaggcactgtaacaagagggcagaggctctgtttgtgcactggatactatggagtggggatggcatgtcagcagaagagcttcgtgaggagatgacctgggtgtgaattctgctgaccctcagctgttaactgtgaaaccctggctatgaaccctagtcctttcatctctaaatgtggagctcatcataactcacagaatagtgaggaataaacgaagtgaggaataaatgaaattaccagtatgctgactctacggtagctatgttttgtattcttactatacactaaaacaacatactcgtcattgtgacttcacaagaaaatcgcatctctttcacaacaaaaatgagtgggagaagactgtctcatttatttgagagagctgtcttgtgtttgttccctgctgcatggtctctggtgtacattttcatttgagatcctgaggatcctctagcttcactttcataaacagaacttcattgaggcacaccaaatttaatagagcaattccctctgcacctaacttcaagtggtaggcatagtaagaggtgatttatagtttccttttctttaaagttaaaggcagaagagcctaaagcagaattgtctagctttgtcaatttcctgctttctccctccttcatccagagagtacaattatcctggtcagggtgctaactaaattgcaggaagaaaaatcacacaaggcacctgagtgcccacgtcttccagcttcagcacaccctgcagcagcttcttaaggtttgatcttcagccatagattatggtgatcacatggaaaatagcagaccacaaacactttctcagaataaagcacaagccaatactcatctctgtttaaaccaaatatccatgttggcaaaaggccttcagggatggatatacttagtgttaaccttgattctagacagaagaaagaagaaaactaaaatataaagggatctcagtttgctaatcttcatttctcctgctgcaaaagaagggcactcagagggactgtgaatattactttacattgggaatggaaaaatgaatatttgatgtgcacaaatacaagacttttagtgattttctgttgctcaaattgaaggcacatgaataatgaccatggaattttattattttcttggacaggctcatgtttgtgtaggtgaaagtatatcacctgaggaaaacactgttctgcgtcctacaggttataaataccgaatctttactcaagagcatagtaacagag

SEQ ID NO: 39242 - DNA, 1249 bp, Bovine  19866880801108
  misc_feature (1)..(1): n is a, c, g, or t
naggtttttgtctatggaaaatataacgacttcctataaaaagtcacatgacacagggtagctaaaaatggagacagcaatgtaatgttattaaataatgtaggaaatggtttcatgaagaaaacttccttcacctcttcttggaaagtctctggctttaaggaagtgatggtagagcccgtcgttaaatcacattcagtcttttgccctcgaactgagtagcctgtatcaacaatggatggtacatgcttgatctctatattgtaaaacaaaattaaagtaatattttctgcttatttataaaacacaggaatagatttaaagtgattcacaacttggcaagttttaattttatttcagcagagaaaataattgagcagtgccatgttcccagtcttaatctctttttttatttgatcttcactttgtcttctaaatagataacaaaccaatacaatattgtaaaggtaaataaaataaaatttttaaaaaatgctgcttaattctgcagtccagtatgatttccaaaacaaacttattggaaattgaaaataagttcaactatacccgtggttaatcttttttctgtttttattgatgaatttaattattgaccctcggtaaactacttctaagtataataatacagtttttaaagtttgtcttaaagtaagaccagagtctttggaactttttgtttacttgtaaatgtctagaaatgaggcatttgtcatatatcaaaatacagtctttctctgaaacatcaagttatatttaggttttgaaagatttcttattttataaaaatagctcacctctttcaactttgtgtaaagatatcaggctgggctaaagtgacaaagaatgccttaaggggaactttgaatgaataactttgaaggaaaactattttcaccaaagacttgtccaaatttaattagttacgggagttaaaggcagggagaaaaggccaggagcctaaagggatttcaggagtaaagtgtcaaggagaagtgaggtctcacatggcgaaggaagtgttgctcctttaaggtttaataattttgtgacctagtgtcaagtgttttgatttccagtggcaggagaggtgaaatgagaaaaattaaccaacactttatcttgctggaggtgattcctacccttaccatcttctttggtataatggatatattatattttaagcagtaaattttgaaagaatgtcacttgctccatcaaaaaagataaa

SEQ ID NO: 39243 - DNA, 1687 bp, Bovine  19866880816585
  misc_feature (1)..(1): n is a, c, g, or t
ngagttgcagagagactataatcagatgtagcatgttatttcccactcacaaaatgttataaattcaactttgattagtgaggggatgtatttagtccaaagctatgcacacctcatgatatatgatatttatagttgcttagaggatagacatatttttttatacaggaactggatgtgtacttataaacactaaagaaccacctttcaaatatgtatacttctgttatattttgtgcaaggatttcttctcatgtaattcctatatatttctgtcttatagaacttctttaggaacagttcaaatgagaaggaaaaaaaaagctgaagttcttgacaggcactggactacatgtcagtaatgcggaaatgaataagataaaaactcttcctaacccttgaacttgccttctagtgaggaagaactataaacaagaagaagagtagagagcaatgggtggtgataggtgatatcagggggttatgtccaatatttgaagcagggtggccttccaaagaaggggtgttttatacctgaagaatgagtaggagttatgacatgagatggtgataaagtgtgggaagtgtaatggccagctttatgtgtcagcctggctaggctgcagtccccttgttcaatcaaatagtaacctaggtgttgctagtgaagtcttagtgctgcttatttggctctcaatggatggaatcaagaacacactttttatctaggataatttctcttactcaaggaagctaatttggggcttaatcacatccagaaaatatcttcacagcaacacctagactagtgtttgattgaataattggggagtgtattcttggcatcttgacttgtaaaatagactgtcactaaagagtttaacaggaatgaaataaatatgtgctattatgaatataatgttaaattttcaaatctttattggattcttttaaactataagtcattattttagttaaaatataaggattaacttaagatttatgttgtcttatttatctattgataattgtttagtttctataatatttttctgagcgatcttgctttattcattagattcctgaagttcaaaataatagaataggatttataactcttaactattaatggagagtaagaacgcagtagaacttatcatgggggggaggggtagaactttttcttaattcactatataaatctttacgtgttgtgtgttagtcgctctgtcgtgtccaactctttgtaacccagggactatagcccgccaggcttctctgcccatggaattctccaggccagaatactggagtgggtagccattcccaacccagggatcaaacttgggcctcctgcattgcaggaggattctttgccatctgaaccaccagggaagcccattaagtttctaattgtgttagcaaacctttctgacatcctaaaattaataagcacattaaagtgaaagtcagtattaatgaattataaacatgttatttatataaccagactaattggccaatttttattataaattcagattatcgtaaacttagtatcttttatttcactatctcattttataagaaaaaaagatttctttgagagataaaatgcagcttgactatagcagctaggacagccctagtatagagaagataacccacaaatatttttgagcaaatt

SEQ ID NO: 39244 - DNA, 1044 bp, Bovine  19866880817751
  misc_feature (1)..(1): n is a, c, g, or t
natattagaatatgtcataaaatgactaagtgtcaaactaagaccctattgtatggagaggcttggccaaaaaaaataatataaactatatcctaattcaaaaataagtgaaatgaaaagatagtattgatttgaaagattgaatatctcttatatttatgtatagtaggcaatgtatagtaggttatatatagtaggcaatatttataaaattctggtttagttatgtcttggcttactcatgagtctgaaagattataagcaaacttgagatatttactgataggatttccatacttaaatatcagccagcgagaataggtttgaggcctcaaccttgtttttctaaagccttctgattaagttgtcctctcgccatggctaagcctggctctgatgctacaccaccatcacatggaaggggactcagcccccagactaaaatgacatatgctgtggcttttgtcctagctcttttgcttttgtaggatgaccttgagtggcctccaaaacttcttgttctccattgtaaataagagatagtaatatgtattcctgcgtaattcacagattaaagtcattgtagacgacgcagtgcatttgaaggcatttgggagacttgtctggtaaggcattattcttatgtcttccagtcacccaaaaaactagaacatttctatctgccagctacccttttttcagcacatcctgccctcaaagtatctgctgtatttttagtaaaagttaaaaggaaaaagttgaccgtaatcctgtgtatttctttctggtcttttttctgtgcatttaaaataagatgaaaagcaacaatgcatatattctttcgtaagttcctgtttatgtataacataaatttttttcttgaattctttttaaacattatttttgatggatatataagatacttatctgagaagacatactgtgtttacttaattcttgttctgtacttgaaaggttagattgtttctagttttctttttttaatgcacagaaaattccttatgcaaaatttttgtaaaattt

SEQ ID NO: 39245 - DNA, 1178 bp, Bovine  19866880827510
  misc_feature (1)..(1): n is a, c, g, or t
nttgtagaaattgggtgtgttaagaaagtttatccatatatctggatagcaataaaaagcgtttcctaggaaactgtaagatcctgtaccacacagcatacagcccaacgaagaggaaaattaggttgatttctaaattcaagatacacatttgtacaactgtcctgaactcctgtggcggtgtccgagcagagtgggcgtggacatcggtggctgtgtctgccttctctctcccgctgcagtcttctctgtggggctcactggtccagacggggttcctcctcagctgtgagcccctgggctctcctcctgcacttcagccccagcctgggtcagtactgcccttctgctaatgacactactgtttcatgtcttcccatttcctctaagacagctgccagcacgctcaggtttccatctgggaagttctgtgcttcccagagatccaggatgacaccagttggacttgatttggtggcaaagtaattcaagtacctgtaattggtaatgggaaaaagggctgaacggtgtgatttatgggtctgttttcttttcggtgttgacgaaacctttttgtttctgcatttctataagtatcctggtcccccttgagaaactggggcttgcagtgagctgtcctgaataactagctcatgtttaattaggtcagccccagacaggagacgtgatgcttaactttgttaacctcaactctgagtaagataatttaagagacaagatgtctatgggtcacatcctgaacaggaaatcaagaggcttatgttttctttccagcccagcctctgatcatctttgacaggtcaggcctggggttttgcttggtagtgatggcaaagttctaaagagaagaggctcctgaggtctcttcataacagcactgctgtgtttagcatgttaattacccatccagcattaggtcctgcttcaacagtaggtgaggaacaataattagtgaatggctatatcatttaggggggatttagcccatcagcccttgcgaagtagatcataaaactcgatgcttagaaaagtcagagaagcccaggatgtctctcaaccatgtatctgcaacaccatggtgcaagagacaaggtaggcacttaatacatgtggcagaataaaagcaagtaaatgtgcagaggaaagacaaaaaagaa

SEQ ID NO: 39246 - DNA, 1831 bp, Bovine  19866880841337
  misc_feature (1)..(1): n is a, c, g, or t
naaattggtatttacattgatacatccatatccttttttaaatatcttcattaattaaatatgtcttcatttcaaaaataaagacagccaagaaaaaaaaaatggaacatttgtcatactgagcaattatattcaaaaactatttttaaataattttagaattatattctacaatttagcctgaactagaaaggttaactcatgcgtgcttttgcaagcatggggggaggtgtaagaactggttcacagatagtaaatcaaaatcattttgataactatctacttccctgaagttattaaaacttcattggggatttttcatcataaggttcaaataactcatgttctttccaggttgcagtttcagttaattataaaaggaagaaaaaatgtaagagctgctaaaaagtcaatgccaatgaaaaatgaatggtcaaatgctcagttttacatatttcaaatcatggacaggtgatttaatttgcaataacattcatacattcaaagccacaaatgcaaaattcaaggcatttttggtatctaccaagattgaggagtcatataagttttttaaaaaacagggtaaaaaaaaaaaaaaacagggtaaatcatctttaattattttcaaagactttccacaacaaatcttcaaattttgaatgatcaaaagctccctaagagatgttatattatcattagcttgattatgtaccataacaaatgagtatctcatgcatatattactacttaaatatatacacattatgaaacacattttaatatcttttaattctaacaagagacagctttagactgcctttgtcaaaatgggattaaatactttcattataattaatctttacgtttttctctgctttattttggtcatccatgcccacagacagtgcctgaaaattatcatgacccttaaatattcctggtagcttggatcttccttgtagctcagatggtaaagaatctgcctgcaatgcaggagacccgggttcgatccctgggtcagaaagatcctctggagaagcaaatggtggtccactccagtattcttgcctggagaatcccacggttagaggagcccagcaggccacagtccattgggtcgcaaagagtcagacatgattgagtgactaacactactacaactactaaatattccatctcaaaattcacttattcatacatcttaaaccagaaccttctgtccttaggcctactcatccaactgtatcaactaaggctattctctgacttcactggaacctcaatttccttgaatcctagttttctctgaatccactatccttctccttcctctacatgctaacccacaatcaagcacaagaattcagtccatggcactctcattgtctcaaattttgctttctaagagaacacattctggctcatagcttcaattaccatatgtctatttccagcctaaatctctattctgtttctcagcccagtgtattccaacccagtattataaaatcaagctcatttgcttcacccataaacctacttctttttcagtgttctcttagtgagtaagtttcatctctcaattgtacaggcaagaaatctagaaggcacttggaaactatcaacagatcctgttcattttacatggtatttctctttcaaatttatccatttctctccatcttagccttgcccaaacctaagcttttaatgacctacctgcataagtcaaaactcaacaggtgctcaaagcattgtgtatatatcacaccatttatcaatctttcaattttacatttcatagtgtgattatttgaacaatgtgtaattt

SEQ ID NO: 39247 - DNA, 1901 bp, Bovine  19866880851381
  misc_feature (1)..(1): n is a, c, g, or t
nttgggttacatgctcccctccccaccagtaattgtggtcataggaccagaatgctctgattggctggaggagtcctgtatagcttgagagtgtaggagacatttctgtcacaaaacaagaggaaatggaagatgagcaaagaaaaactatatgttttcactatatcttccattaacaggtgatgaaactaaggttcagaagggatcaatgtcttggcgatgtaagtcttctgacactgagtccaatgtgtcttgcacattttctgtcattcattcagccattcctgtgaagattcaggtttgtaggtaattaacagtaggggtgtttttagacctacaacatggtattctgagatactgaagagtcacaagttgtaaatgggtaaattgataatgggaatcatgaaaatattttttgagtctttggtttagtaggattcaacctgatttcccaatttatggaaaaagatagcttgattttccttgacagatcatacaagtgaaaactgtccctgtagtattttcagtgatgtcaacagaaacaagttcagatagcttccttgtttccctcctatcctaaccattgaaaggacttgatttgctttggtttggatgtggttctcattttggtggaagtgaagtggcacattagcctgagggatttgtgtgtgtttgaaagaggcacagacattcgaaccgcccacagctgccctgcataggagacatcttcataaatactgcatgattctgcatccacatttgcacagagtggcacaaccttgataaccacattttattctagttcagtttttgttgactttctgcttcactttttgcagcagtctgtctggaagggatgagaaggataatgatttcacaagaacttgagttgaacccgtacagaggaagagggagttagggggagggtctgccctgaaatcaacctgcttatttaagtagatttgaagaaaaacagagcatgaaaacaacaaatcagcctgacttatctaggaggagtggataaaatagtccctgctggaggaaacgtgtaacccaatccagtactttatcacatcttcctgaaaccttgaaataggtctatgaatttatattgtttccgaaagccctatgagccgtgctatcttaccctgccccactgtgaaccctgaaatcaatccattgctctctcaaactttgggaaaatgatatgcctctaatgtcaatgaactagctgcgttcacagaatggcttttcactccctgagtttactgaagtggaagacagaaagggtatgactttctgaaaataaccacatgtgctcaaagacctagattttctaggcatgagtgcatttctgataaaaaatacctccttagtgtgaagaaacctggttattcctcctctccacaaatcgtttgcatcctttatatttgtaaagattgtcaactcctatttctcttttggagatttgataaaacagaggccttggtaaaaggaaaatggataccgttaaaggaaatctacctcctgtaataaaataagagctctgttttagatgcctctgcctttttacaaatctccctcctctgcctcagttaacattagttcatagtcgttatttatattatatatattctggagaggcccttcgtagatggggagaatgcaagttaagatttctggctcaagaataatagctaaaagctgtggaattttgcatttgagttgcactacatgtcttagaatattttctttataatctttttacaaattgtcttagcttactgttacttatttcacaatcattttaacagtgctcatatcttattctatagggtaaacaactttcaaatttcttacacatattcgatactgccctgtttctctgttcctgtcagcgt

SEQ ID NO: 39248 - DNA, 2093 bp, Bovine  19866880855870
  misc_feature (1)..(1): n is a, c, g, or t
nctgtgcacttttgtgagttttacattatgaaccataacaaccttttcgctctatacaagtgatagggtagcttgatgcttaacaaatgaagccagactctgagctgtgaaactgttaacagatctagtaatgacatgggcctctgtttggaacatttcataatacaactggggaaaacaggagtgaccgccatttagcacattggcaaagaggtttttctttacctcttgttctgtataagtccatggaattaatgagaaattgattttgcagtttgtgtcagtagatctagagtctcttcagttgaattttatttcgaaaataccagatttttcagcatttgaacattctatttccagcctttaagcagaaaatcaagtaatattttccttgactatcaaaaaatagtgcttccttttacttataaaggtaagaatctagtgtgatgtgaaaaaatatcttgattaaacatctatgagttatatatgtgtagcaaaataatatctgtttttaatctgaataataataaagcaaaaataaatcattttaatagagaaatttaactgttataggcttacctgaaaaattccttacatattctgccttattaacctttttctctttgaataataatttatgactgtggtttgcagtgacaaattatataacttccatgtgtctatttttatagtaaaaagaaataaataacttggaataatgtcatttcctgggatttgtaaaattctgcagagtgttttaaacaagagagatcaaaattcttgagatgggaaaatttttagaagaatatcctttataattccctgtctcattataaatttatgctcttaagagaacagtgatttcacaactaatcatgtacaatccttgctaaaagaagtgagtgctgccatggaatattgatgtgtatattagagttacctcttatgaccctttcagcaacaaactcctattttttagactgtcattgtcatcactaatttttttttgagtgggagttgacagcttctttgttatcagtgaaagaatataaaatatttttcagattgctagtgaaaaagaaaaattgtggcttgtaaaaatgtcaaatcttgaatttgtcagggaattgtaattctaaattttatcaattttgccatttagttcagatatcatttaggttgatgtgagggttcatttttatgaatgagacatctaatacttagaggacaaattgatctgcagaaagctttataatatggcttcttacagaagggactggggcaaatttgaaataagcttcatataattgaattttcagtgacaagaattgaatttatactacatatatttaacaatagcctaaaattatgaattatgaatttagtttttaacttcaattactaaagtttctagtcaagcaaaaaagccaaccttaaataatgctgtttcttttcaaatgctgtcatttgagattataactcatagtttatataatagtatgcaaaagtgcaaattcagagaacagtcctgactttaatagaaaaaatatggcatcataatcagtgtattattgtgattaggttgattactatcactcaaaaatgagaaatttaatgatagatatgttgaataaatctgggaagaaattttaaatataacctttcttgaacccctataacaaatattttttatttaggcaaattttacttgatgggcttaacactacttatgtgcttatctagaagtgaaggtagctttaacaacctgaataaagtgaaatatttgctggtataacttgattaggagtattggtatggaataagtccatttttaaagaacagtcccaattcttcacagatgtttgcttttttgagctaattggtggctggctgtctttcaggtgaattaatctttgtttgattacattgtaaagtccttgagggctggattcttgctttccttgtacctccccatgattggggtagagtaggtatttagtacacacgtgttagctgaagtaatggtcttgttctaagcaggattttgaagtcagatcacatgccttggtgtgataggaccagccagccaaata

SEQ ID NO: 39249 - DNA, 2004 bp, Bovine  19866880937669
  misc_feature (1)..(1): n is a, c, g, or t
nttaacagtgttacaaataggcaaaagtcttacctttctctgtagcctcttttgtataaaatatcttagaactttaatgcagttatacttttatttcattctgaaaatcaaatactttaggacttcatttaaacttggcctgctactgctaagtcacttcagtcgtgtccgactctgtgcaaccccatagacagcagcccaccaggctctgccgtccctgggattctccaggcaagaacactggtgtgggttgccatttccttctccagtgcatgaaagtgaaaagtgaaagtgaagtcactctgttgtgtccgacccttagtgaccccatgggctgcagcctaccaggctcctccgcccatgggattttccaggcaagagcactggagtggggtgccagtgccttttttatataccacaggccttatccaatactctgaaatataactgtgtacagtaatgcaaatataatatggctattgcacatacaaggtatttgtaacatgtatttgaaagtgaagtgaaagtcactcagtcatgtctgactctttgcaaccccatggactatatagtccatggaattctccaggccagaatactggagtgggtagcctttcccttctccaggggatcttcccaacccagggatcgaacctgggtctcctgcattgcaggaggattctttaccagctgagccacgagggaaaccctcctactcacataattggagattcaggtttacagactcatcttatattctgaaatcttaaacctttataaaaattcattaagccagttcatgctcaaaagcctgtcggttatttatatgatatatagcctaaactctgtaaccttaattcagaatcctacacaatctgcttccactctgtctggctttctttccaaccatttactataggagccatctgttccagtaagatttttttttgtctcatgctattgcacatataaaatatttaatcctgcctctaatccttgctcatataatttcctctcttttcatcttctctatctctgtataagttcaattcatatttcagcatccagctctgccttcagtgttgggcccagtctaatccatcccttactctgattttccatctttattccatttgaagacacttcattttaaagtgactactgttttttacttagttctctattacatatacactgctttttctatggtactgtgaacctcttgagtgcatttacttcagctagcacatagttcatcagaaatggttgctggtatgtcttgttttgaactgaattaggattttggggcaagagcaactattccctctttatgctttgtaccatttgtggatgcccgtattggggaaatgtgagcagtgggaactgtcccacattttagccattcactcgtcatcccagagcttaaggctaggttccaatttggcaatggaaccatgttgtgatgtggcactgagccgaatgtagaaaggttggacaagaggttctatttgattttggtttgctcttcactcacatgacccctttgatcctgatctctcttattcattttagtatgccgcagtctccctaaaaggaatatggataaatgatactgaaagattatcttttacctccccaaacttctattttcctgagaagtaaggtctgtggattctgtgaaatgcttaacatgtagttaaagcttagaatattccaaaaatttctatgtggttatgtgtgaaattccatttcatgaaatggaactgaggatgttggcttgatagaattaatagcatttattaaatcctaacaagcaattgttcagctactctaagacagagaatagatttgaatgccatccattaggatagtgctgggagttgctggtgtgtgtgaaaagaagtgggggtgtctcttaagaaggggaagatagcagagattttttttttccaagaaagttattcttaaaatttcaagtaaactcattctaatgctatcttagat

SEQ ID NO: 39250 - DNA, 1122 bp, Bovine  19866881000733
  misc_feature (1)..(1): n is a, c, g, or t
ngttaaaataatgtataggaaaaataataccccaaataatcgatagatctaataaagattaaatcaaagggatcatgaaaaacttcactgaacactcaatgaattttctcatactgctgtataaagtaaaacttttttagctaataaaaatcaccaatgaatgttcacattagtgtttaaaaataaggaattatgcaacagaactggactgataaagattactcacattatttattatgtcttggtgatgccttcaaccatatctaatacacttaattcataaacaatcatacagaaaagagaaggaatttcagttcatcttccgtgagatgagctctatctaagtttcccacagcatggccatctttgggctcactgacctcaggacccataaacactagggcacatcattaatcactttaattgcaaagttgtcaatttgcaataacaaagcaactccagaggggaaaaaagtgagcactcaagtgtgtagagggatgtctctttaaaccatttccccatatttaattgtacttctagttagtcggctttcctaaaactcaaaccttaaacatttaaatcacttatggcaatgcatcagtggtttttttccaaatgatttgagaacatataaggattattttttctacaaacaagagtacaaaatagctatgtatcagtgtgctgtatatacagtagtagttatatatcagggcttcccaggcagctcggtggtagagtccacctgcctatagaggagacacaggttcaatccctgggttgcaaagatccccagggggatgaaatggcaaccccctctggtattcttgtctggaaaattttatggacagaagagcctggccagctacagtccatggggttgcaaagaatcagatacaactgagcatgcacacatgcagcatattattaacacaatacctttcagcttataaaagattatactcaccacatacacatgtattcattttcatacacatagtctcagtttctttctctctctttgcattttctctattaccatctgaaccaccaggaagcccctctctattactacgagtactaaatatagacagacagaaataataacccaaagtccacaga

SEQ ID NO: 39251 - DNA, 3312 bp, Bovine  19866881011369
  misc_feature (1)..(1): n is a, c, g, or t
ncctccggatttcttatttaggaagtttctggtgtctctccagtattctgtctcttaagtccatttctcatttccatgcaccaaaggcccttttcttcctttgctccagcagggagcatcaacaagactgccaaaaccattcagtaaggaaaggacagtcttttaaacaagtggttttgggaaaatatgaatatccacatgtaaaaagtaaagatgaatccctaccttatacaacatacaaaaatgaactctaaatggatcaaagaactaatcataggaactaaaagtataagactcttaaaggaaaacatatgggaaacgtttcacattccttcattgggcaatgattctttggatatgatttcaaaaccataggcaatttaaaaaatagataaagtaaacataaaacttaaaacctctgtgcatcaaagaaaacaatcaatagcatgaaaaagcaacctaatatagcatgaaaaagcaacctatgaaatggaagaaatcatgtaaatcatatatctgataaagggctattatcccgaatatgtaagaatgcctagaactcaacaacaacgaagaaggaaatggcaagccacctccagtactcttgcctagaaaatcccatggacagaggagcctggtgggctgcagtccatggggacgctacaagtcagacacaactgagcaacttcactttcacttttcactttcacacattggagaaggaaatggcaacccactccagtgttcttgcctagaaaatcccatggatggaggagcctggtaggctgcagtccatggggtctcgaagagtcagacatgactgagtgacttcactttcactttttactttcatgcattggagaaggaaatggcaacccactccagtgttcttgcctggagaatcccagggatgggggagcctggtgggcagctgtctatggggttgcaaagagtcgaacataactgaagcgacttagcagcagcagcaacaacaacaaaaacaaaacacaacccaattttaaaaatgggcaaagactttacatagacatttcttcaaagaagatatataaatggccaacgagcacaccaaaaggcgctcaacatcactaatcactagggaaatgtaaattaaaatcacaatgagatatcatctcatacccaacagaatagctattatcaacaaaaacaaaataattatttggagaggatgtgaagaacctgaaacccttgttggtgggaatgtaaaatggtacagctggtatggaaaagagtaactctttaaaaaatcataaacagaattactttataatctaacaattctacttctggatatatatccaaatgaattgaaagcagaattttgagaagatagttacacacccatgtgcatagtaacattatacacaagggctaaaaggtaatagtaactcaagagttttacaatagatgaatggatagagaaaatatggaatgttcacatgatgatgcattattcagccttttaagggaaggaaattctgacatatactacagaatggatgaaccttaaagacattatactgagtgaaataaaccagtcacaaaaatataaatgctgttattcatatgatgaagccataacccctcaatatgatagtatttgaaggtggggccttttgaagataatcaagcttagatgaggtcatgaaggtaaggcccccataatgggattagtgtctttataagaggaggaagagggatctgagctaactctgttgtgttctctgtctctctctgctctataaggagacagcaatctaactccaggaagggggtcatcaccaggaatccaatattctggcaccatgatcttggactttcaggcctccagaatgtgaaaaatagatgtccatggtcgcttaagtcactcagcatgatgtattatgctacaactgcctgaacagaatgagtttcaactttgcccaataatgtggacatatttaacactactgaattgtaacatgtaaaaatcattaaggtagcaaattttattgtatgtatgttttaccaaaattaatttttttaagaggtttgtttttttttaagggggtggggggaaacaacctttgcccaacccaggcttccaaaatattatatcccagccagggtgaatcagagagttgatctactcctgccccatttccatcctccgtaacactgtgaagaatgattaactgcttaaaatcctgcagtggctccataacattgtctctatctgatccaatcacctgcaacagaagcatctgccccgcctcattctccagtttcatctcttgccaccagtttccatgtgctccacgttctacttgtatctgtattttcaattacaattttctcttatattcctgcttttctctcagctctcttcagttcagttccgcaagatttcattgaacatgcactatgcgttgagcacttggagacaggatacatagattagttaatggaatgcttctattttcaagaatttaaaagtctagtggagggacactcataaagaaatcccttctaccataataatgtcatctgtactctcaaagaaactcataatctaagctttttaaagtatttcaaagacatactgtttcatgacaaatgtgcacccaaaatatatttccatgtaaaaaattagaaatccattatttatactgtagaaattctatttactggccaaatattaataaaaaattgaaaatattaatgtaaaatttaaaaatatgatccaagcattgcacattgattcaaaaacttttgaaatatcaaagaaatttaaaaagcaaaactcaagaggtatgtgtgggtaaacatacatatgtatttattaacatgcaattatgtgtcagcactataacattttaatagtagaaaggaaaaattgcaggtacatttttaaatacattgatcactttttatcactttaaactttaacttaggtaatttttcctctttactagtttcataattaaagtttctcctgccatttagagtaaacacaatttcagacatgggagagaagaatgaccagttcaagttcaagggttcactgcacatgaatatccataaatgccccttgacagtcttggtagtataatgaaccttgcaattactcagcaggccatcaccacaatacatgaacataatgctcgcaacgtcgaacaacaaaacattatacaaataatgccaaccaactgttttggttcacatagggcttttggaaaccaattaaattgcaacagttcctcttaaatctttataaacctgcaacgagttttc

SEQ ID NO: 39252 - DNA, 1103 bp, Bovine  19866881051561
  misc_feature (1)..(1): n is a, c, g, or t
nctcaataaggaaatgtggcagaggttcaggtgggtcagatggaaaggtttctgggagttcatgaaaaaagtcgtcatctgggaaaacaagaaaatgaaaaatgtttagaactttgtagccatttgcctttcacttgctatttgttcaaaattaataaaaactgtgggcaatcattagtcatatccatttcacctgccttctttaatcaaggtatacagaaggcttgcatgtacttcaagagcatcacacctaaacaataagatgtttaggaatcattttctaggaacttgcaatcagctgtgtctagcttgagtcgaaaggtataggaacatcaacccttcaactgggcatgtgctagtgtccactggatgacattttgacatctaagggctgaaaactccaccctcagatcctgctaagtgccttcatttttgaataaacaaaggcctgagctgacttacacctgtgtagaacaattaactgcacctttttccagtcccctttccctgagctccccacactccccatgccttagacaaccctgcttctttattctttacttcatagatacctctagatggcgctagtgggtggtaaagaacccgcctgccaatgcaggagatgctggagacaaaggtttgatccttgggtcagaaagatcccctggagaagggcatgacaacccactccagtactcttgcctgggaaatcccaaggacagaagaggcctggtgggctacagtccatagggtcgcaaagagttggacacaactgaagcaactttgcacgcacgcataaatactctgaacccttgccttcggagaggtggttctgagacttgctccttgatacccatacttagctgcccttttccctgaaaacctatgcagctctgcattttggcttgctgtatattgggcaaaacaaacctggcttgataacaataatgattcataaatcatctaattaagtaatttgagtgcctgttattaaacaggcaatatgttaggtctagtgactagttgtttaaggatttagatgattattcttatttttacacatgacaaaatacaatatctagggtgataattatcttgccctg

SEQ ID NO: 39253 - DNA, 1882 bp, Bovine  19866881051614
  misc_feature (1)..(1): n is a, c, g, or t
nctctgccctccttccccttcccctccccaacctgcgcctagtcaagattcaaagtactgttcatcaaactgaggctcatatgcattcagtttgagtcagggccagcatttcccatcccccttttttgttttgtaaataaaatggactacaacagaatatattacaatggattgcatgtgaaactacgtgtttttattggttcagatctgtaccagttaggtcatgaaataaagtatacttttcactgtgtattgtgatgaagagtttgaaaacaggggtctactttggtgctactcaatttgcagcccctggacactgctgccaggtcgtttgttcctggtctgcaatgggatacgtactgaaattgagaagaagcatttacaagtttttgtagcaatttgacattgccagttttcaaggttttgatcagtggatttgtcccattaaaaggtgtagaccagtttgggtgttgaacttgcatgatgagagacatctgttttgagttgtttactgttaagaagcactatttgaggatttttttatatgtgagattcacagcatggtggagagaatgaattgtctcagaataataagcttattacaccttttggtaacataggctgaatgtgcttctaatttgctagagtttcaaattttctttctgtaatgacagaggcattaaagaatataaaatgttttataatctctttgcttaaaaaaaaaactttgttaacactggacaactttgaaattctaatataggtatattttacaataatatccattaaatcatcaatcagaaatatatgcaatacatccttattttataaacaaagtttagtttctataaacagaaataaagtttctggaataaaagaaacaactgactgtgttccagtcctttctttgtgatagaataattgtgacgttaatcacaaataagaattttaaaagaagaacaaatatttgaacacttaatcagctttaaattttccttttttcagatttagatattattatcatatagactactttgaattactttaataagattcagtgatgaggatgattgtacttctgaactgataagtgtgaaatttagggctcatcttaaagttattaaggatagatctggcttatctacgactaaaagtagccacatttgatcattaatttttaaattcctagactctgagtactccagatttttaagaaacctaaatccaccccaagttattttttaagtgttaaataaatggaaaaacctaagtttagactataaagaatgaaaggttttcatttctgtgctttccacgagacagcagcctgactttgttttcctaataaggctgtgctaaatgttggaatgcttatccccttgaattttactgaaatacctaaaaatactcactttaccgaaaaatttcacaatttaatttgtttagcctagacaagaatagaaaaagtgatgtatctggaaaaagttagtggcaaaattatgcctccagtattaacatagggcaagagagcatatagaagtgagcctcaaagagcattatcttacactttggatttttgaagaacaaattagttattttgttcttttccatctgtattctgtttgtctttatatatttaagatctggggcaagttttagttcctctctcttctccttccttaagtagcagctcatatagttcaagcatactcatgggctactttattgcttggcattgtgttgagatttactcttctttgatgtgagatttggatttagctttcttacaaaatgaagtactatatttaggaatacgttttcatctgacttagaggggtaaaaagacacggtccttatagtggtatgaagtagcttatgtgtt

SEQ ID NO: 39254 - DNA, 1482 bp, Bovine  19866881053886
  misc_feature (1)..(1): n is a, c, g, or t
ntttgcaataaccagtatgcatagtataaactcaggaagaaggcttggcttaatgcaattaaccaaatcggaatttgagcaagatgatctaatgagtccctaagccaaaagttaacagcaaaaataaaatgactacttgatttcaaaatgaagggagaactgacccaatgcaaattttctaattattgtccaaattactgaaaacaagcgagtcaaaaaaaattctattttatcttgctgaaacttagctgtttgcaatcttgccaataaaaggttacaaagtggaagcaaggtatcttccttacccgacactgaaaatctgagccttctagtcctagacatccagaagtgaccacgggcatcccagagtcatcttcttctatcatcgtgaaacaatatccatctgtgctaaagatcaaacaggcaaagtaagtgtgtgtgtgagagagagcgagtgtgtccagggtaaaaggaattgaagatgtttaccacttgtttggggcttccctggtggatcagtggtaaagaattaacctgccaatgtaggagattcgggttccaatccttcagtcagaaagaccccctggagaaggcagtggcaacccactccagtattcttgcctgggaaatcccatggacagaggagcctggagggctgcagtccatggggtcatgaaagagttggacacaatttagcgacttaacaatagcaacagtttttgtaattactggatttagctactcattcagcggttacagagtacctgttacagcacttattccagaccatccctctgaacagggatggagatacaggaggcaaataacaaagacgtaattcttcctcttgtgaaactcaccacacgataattgatatttaatcaaataagtggttggtcgtcatgatacctaatttatacttttaaatacataatccactgccattcttatacttaagaatcgtaccttgtataagatgaaccaaaaattattaatttgtgaaaaagttactcccaaagagtagaataatatgacggttgctttcagtgggaatcaaaatatgttcttttgctttcttttttaaaaagtatttatttatttgactgtattgggtcttagttgcagcatgtggattctcatttgcagcgtgtaggttctagttcccagaccagggatcgaacctgggccccctgcattgggatcgtggacacttagctactgggccaccagggaagtcccttttcctttctttttaagggctatcagtgtgtaatccaatgttgtgacacttgaatgctataagatattagagaccaggccacatgaatattactatctgctttaagcaaagttctgtttccaacctattgaaccaatttgaagtatttatatatgtgtactctatcttcaaatagattatactttcctttattccaaatcatattttcacatctccgtgtttgggtctatgtcaagtctgcc

SEQ ID NO: 39255 - DNA, 495 bp, Bovine  19866881102454
  misc_feature (1)..(1): n is a, c, g, or t
ntggtgggtacattgaaaaaaggaaaagggttctaattgtgttttttctattagctaaaaggtgttcttctaaatgtgagagcaaacaaaaccactttgctcatacacaaggaaagccctctttctgaagagcagttatttccactttttataaatgtaaaagattgcccagagttttaacgcttttattgctttctgattattttttattgaaatgcttattgtttcttgttaaatagctgctttaattatacagcagtggcccaacttctcaaccttttccagaagaagcccccagtttccattaaagagttttatgggggctccccacacgtcagatttcacacagccagctacattggctttttataaaggtctttgaatgcaatgccaaggcctcccactaattgttttatgggctcggtgtgggatctgcatccctgactgaggaagccccatgttaaaagactgtgggagtgaggagttgtcaaacat

SEQ ID NO: 39256 - DNA, 1641 bp, Bovine  19866881119443
  misc_feature (1)..(1): n is a, c, g, or t
ntttttctggtggtgaggatggtagtgcaagtttaagcaaaagatcagtggttataaatgaggtttaaaatgctaaatttggaatgaacacggtacggttggaaaaaatgtgagaaagtcaatttggcagggaaagagcatcacattgggaagtcatgagaggttaagtgtctataagaaaagaagaaaccagcttttacagttgctcgaaaaccaggctgggtttgtaaactcatgttaaagactattaaactgtagtatgacataaaaagaattttcagagggtcagaaagtttttttttttttatatactatacaaatttctgtatatttttaatacacgagatgagcatatattttacatattgctcatgtctttaaatacatttgaaagcatttgcagtggccttgttagcaatgcatggtaatggtaggtagtcagcagtttcataagacatgtggtgtgtgtgtgtatgctcagttgctcagtcatgtccgactctttgtgaccccatggactgtagcctgccaggctcctctgtccatgagatttccaaggtgagaatactggagtgagttcccatttcattcactaagacacgtgagtaccctgaagtaatgtgttcagttcctctgctctcctcccatactctgtgagaaaatgtaaggtttaaggatccttttctagacaagtcatatggacttgtggataatccctgagagagtttgtaagcattttatggtttatcttgaaagttgaatattcctttggattattaaaatgtctcttctcaccttttcttttaaatatttttaccaatattgtttcagccacatgtgctgtctttataaggacagcattctttcttgaaatgtaatataaaatttcattacaaaatgctcacttgggttccatttcataaagttaatttacttcacagagctttggaaatgctttgtctcgtggagtttttgatctttgattaaaatgtcaggtaataaaaatattatgtgaattgagatatatctgaaatcaagtctagggtagagaatataactttagttacaacatggaaagttttgtgcattcgttattatttttgaaatccccttaaaagtgaaaaataaagaggtcagtgtgataatctaaaaattagttttcagagattcatatgttaattgaattgtctgtgtgttttcagtgtcagagtagaagtttaatagctcttgacttattgtttaaattaagagttagtagtgacacatcttgaattattgcatgatctgcacgatatgcagatgacaccacccttatggcagaaagtgaagaggaactcaaaagcctcttgatgaaagtggaagaggagagtgaaaaagttggcttaaagctcaacattcagaaaacgaagatcatggcatctggtcccatcacttcatgggaaatagatggggaaacagtggaaacagtgtcagactttgtttttctgggctccaaaatcactgcagatggtgactgcagccatgaaattaaaagacgctcactccttggaaggaaagttatgaccaacctagatagcatattcaaaagcagagacattactttgccaacaaaggtccatctactcaaggctatgggttttc

SEQ ID NO: 39257 - DNA, 918 bp, Bovine  19866881136388
  misc_feature (1)..(1): n is a, c, g, or t
ncaaagagccagggagagctggttacaggccagaggggctcccttcatacgcacagacctttaaaacagcttggatttattgtggctcttaagtggcccagaataatggcttagcatggataatgtcttggtttaattggtattgtgaaagccgatagtttctagcgtggaatcccttgtctctgcctttcgaacaatccctcccaggctccctgaatcaatacagccgtcacgtggggctggcgaggagcctgctttgggatggccaccacactgggaagcagctgtcccacgggactgcccagatccctgggttccagctccctgcagcacggggttcatgtgagtgttcctgtggaaggacgggctagagactttctgttgccaattgacccctgcgagagtctctcccggttaagttggaggggtggagacggaactgacaaaggcgagcagaaagtgaccccttttacagaagcagagccccaacaaggccctgaggtggggatgctgctagaacggaggacggcctttgcagaggaaggtgacatttatatctctaagaaaaacgagcctagatgatcctaattcccattacggcatttctttccaaggtcacgatatttctcttaagtcttcctaaatcttttgaccttaaacatatttcgctcctgtccttttttaaggtgtgtggaatatcctaacctttgggaccccaaagcagcctggacctggaagaagctgtcttagaatttagcacactgtgttggggttacatgtctatatgtcggtcttcctccagccaaggttcgtgagtgtggtttgcggccgggacagaggctcacttgtctgtgtgtcccagagcctggcgtggttcctggcaggcatactgaatgagtgctcccaggaaggattgaa

SEQ ID NO: 39258 - DNA, 1418 bp, Bovine  19866881139273
  misc_feature (1)..(1): n is a, c, g, or t
nggaagcccttagacactaagcttatagtaatttcttattgcagaaaacaagaaactacctagaagttaaaaaacaaatgttcaggggtgcaaagaaatacaaggcggctccagaagttctagaacaacctaaaaagtcctatccctaatacatagatgtgtgagaccaacttttccttagaaataagcccagaggtagataagcaacatggccacttccctgagtgctgccctgcggcattttctttaagggtgtcacaaaccggcctgactgggcagctggaagcggcagctcagaccaggcatccgtggcaacagcagctgcgggagcagcaggcagagcccagaaatgaggagacttgacgggaagtgtgtgcatgtggtcacccgagtccaaccttgttattattagggatgaggcatggcagacagactcggggggggagcacagagctccccagcgtgcgcacagacagagcagcagtgccgctgggcgtgacagtgacccgaggcaggcgggggaggccagctgacagtcagatgttccctctgccggctctgcagccagaggagaaggcagcccacggggagctgagcttggtgtcgctagaaagctggcagggcacgggggagggggacagccttctgctttggaagaccccaggcccgaggctggaaggcagaggagatagccttgagcaaagagagagagtcctcatccctggatgacaggggtcatttccagcacaggatgaaagagtgaataggaccaaggtgagctgcataaaagctggtgagagatgggattttttaaaacaccaggcagcacagtacttgagggcttgtcttttgagcttcaatgtatgtgaggctctgaacacctgctggtttgttcgtggtgcctggggagccctgagtccattgtggtagaagcctgggcgtgggtctcctgctgcacagctcagtcttccatgctcggtctagcgccctccctgcagagagtgtgcagtgagagtccctctccacggagtcatagagccaaaccaaaccaaactgaagcctcctggcatgcaaggctggctgctgctccatttgccaccctttgtgctcttgacctgcatggaaatcttagtaatatccccacgagagctatgtccacctgcccaggtgccaggcattgcccccaggccccttggcagcagtgactacagccagttcaggcctctgcacttccatctagaataaagaatgtgtggaccactcacatccagacagtaccaagaaagaagcaagacaaaaagaagcaaagccttgatctaacctcctccaaccttcttttccagaagagattttaatgtgttatgtgggatttacgttgcatcatgtgtttcttccttcctgtgctgtgtgctcagtca

SEQ ID NO: 39259 - DNA, 2251 bp, Bovine  19866881170997
  misc_feature (1)..(1): n is a, c, g, or t
nattgcttttatatcttgaatctttttctatccattggtttcaacttccctttttgaaatggacttgactttccttctatcttttgttgcccctgagggcaataaatagcctaagttgcctggatgtggccagttcagggctggcatgtgcgctttaagtgttcactgctgtagaagtgctcattaactgttgaggataaataaataggtacttctctttctgatggaaattcacagacttttgtttcaattagcagatgttataactgtcttccttctggtaaatggaagatcctcccagcattagtgaacatcatgtacgccccagtggtaaactcggtaaattcatcagtctgttggtgaaagttaatattctcctggagggatatgttagatttccaaatttaagtgactttgttaaaagaagttgagattgactctttgtcaaaccagttcataggtttccatgaaaatctgataaaatattgaatgatttataacttgtaactgtatgtgtaaaatatagtctgcctcaattttgttaagttggaaatgtttaaatgtgtatgttgaaaaatatagttctgaattaaattttgcatagattaatagagacatgagttattttagattacagtgatagaattatgacaatagaatttagtttgggagaattatttactattagtattagcacatgtttttgtccttgatatgaaattacttttattttgtcagttgatacagtctatcctggattgatttacttttctcataatccagtatctaatatactttgaacacatacttctaatttatgtagctataaattatatttttattttataatacttgtctctggtttactattccttaattagtgaagggtttcttgtatttttatatagatatatttatgccaacataaatgagtcagttgaagtaactgcaaaactgttacattggtgcttggcacataatgaacactatacaataacattagggaccacagacattctttccaactagattataaatttgtgtgtaaactcgttgaacgtgggaccttatttttcttatacatcaccttctccctggcatacctggcacagtgtttagtccagagtgcctataaataaatatttgttgcatgaatgtaagcccctaaggaacagtggtcatgtaaggtgggaagaggttgcagaaagtggagtttttctggtaactcatgacaaagataaacacatttccttctcttacctatttttatttggtgcaactgatatatcttacaattacaaaatgactatggttattgaaagtggatgaggtgtcattaagccaggacacactgacatggctgtcttctttctggccagcttccattctcattcagtatatatattaaaggccatagttggtagcattttgaatattatctgtgggcttaagtgaatatttgggggtcaagttattcaattaagctgtgtggatagaaaaaatatgcatacacacatatacaaagggaaaatcctgagagaattaatgagcattgtgcaagccctgctgataaatgctgtatgtctaattttaggcagtgattgatattttagcatatataaaccattaatgtattaacctttataaattagtaagtgatgttttaatattaggaatgagatattttaacatatggagtgttactttttatagttccaaattgcagtcatggtaatgaaataaattatagattttattacatttatgtacttgccagttcagtagagaactcagatattttatagggtcatgaaaattagtcacattttcttcttgtaatgataagcacccatattaaaaattatcacatttcaggtactttattttttgatcatcattgtcttatctttcccctttaagaaaaagcagagcaactactatacatatataaagtaattttatacttgccaattgatcttcccttgggggctactgtaatttttataaatagcttgctgacttcgaagaaacagtagttctgtccttaggaactcatctggaaagggcatttctttggggatatggagaccatgtgtggaatttcagctacaggaaaaatcctgggatttaaacaaagaaatattgcctagtttaaaattgaaggtctgtttgtgaaacgttgccttgctcttaatagcagtattttgtttttagaccctaatatattgtggaattatagtccccagtctgg

SEQ ID NO: 39260 - DNA, 1011 bp, Bovine  19866881179639
  misc_feature (1)..(1): n is a, c, g, or t
ncttgttttttcgatggttcagcagatgttggcaatttgatctcttgtttctctgccttttctaaatccagcttgaacatctggaatgtcacggttcacgtactgttgaagcctggcttggagaattttgagcaattactttgttagagtgtgagatgagtgcagttgtgcagtagtttgaagattctttggcgtggcctttccttgggattggaatgaaaactgaccttttccagtcctatggtcacttctaagttttccacatttactggcatattgtttacagcacggtatatagttataattccatatatgctttcatacattaattctgcaggtaaatattgactttttctctgtgtgaaattcacttcattgagtgtctctctttttcattcctctctataccacttttaacttcaacagcaatttaatatattattcacagtagtatcttaacttactaaccttgaaatttatttctatctttgttatcagaggcttattggcaaatcaaatagacaaggaataatagagaaggaaagaatggtgacctaggacacactattctacaaaagtaattcatgcttctttgaacgtgcaaaaatatttgttgaaaattagctagcatacaatgtgtatggtctttgagttgctcattaatactccacgtgtaatcttttaaaattattgttggtagaaatagagaattacttagaatgactttttttcttttactgcatcagtataaagtagatgggtacagctttcagagcacagtgtgagcttaaaataagactgctgaagtcatgtttcttaactagcagagccggttttttggtcaattttaagctattttttttttttcccactgaaatgtagttaatttacagtgttgtgttagtttctggtatacagcaaattgattcagtgattaaatcactgggtcagattctttcctattacaggttattagaagatattgaatatattaatagttccatgttctat

SEQ ID NO: 39261 - DNA, 986 bp, Bovine  19866881222844
  misc_feature (1)..(1): n is a, c, g, or t
ntatttgttatctcacttggagggtatctccataaaggcagtgataatgacattttagtggtttgattaatttccctattagctgtccaaatataaactgtacttgtaactttacattcagagagattttgtttcttttcctttttgtcctcgttgggctttcctggcatctgtccagatgctgttacttaataatatctgtatggcttattttctgctcagaaagatgtagcgaaagaccaaagtggtcacaccttgctggcagtggtggctccacaggccccatgtctccctcagtccttaaggcaaggtctcactgagcctccacagaggaaccttacagtgctcagctctgggacgtggtgagtacttaattaaaaaaaaataaaagcatgtttaagaatgctgtttttcatggactgcccattacatgagaaaatgaaaatgctatgtcgagttctgggccaaattttaacatttatttaaaaattaggtattttatttttttggactgagaaatgttggaaaatttacactgccagtttagacactgcaatgttaggaggatcatttgagaagcggcaacctcaaagtaattttatactccttgagttacttttcactttgatccttactctggcacttgaaggcagctcatggagttgggcaggtggcaggcacagagccatggacctctggtgtttgagacaactcaaaaatccatcctgtgctaagtcagtgagaatggaagatcttcttgattagtgagttttaccactggcaccattatattctggtacccttggtccatgttctaaagtaattaggtcttattcctggagatccaccttccctcactactccattatctactgtcaaatgtccctcatgttctccaggttctatccagcttcactcatacttattttgtggggtttctagcagtttttctgggcaactatagttcatccctaatctcaggtcat

SEQ ID NO: 39262 - DNA, 1417 bp, Bovine  19866881313967
  misc_feature (1)..(1): n is a, c, g, or t
nccccgtccctgggattctccaggcaagaacactggagtgggttgccatttccttctccaatgcatgaaagtgaaaagtgaaagtgaagtcgctcagtcatgtccaactcttagtgaccccatggactgcagcccaccaggctcctccatccatgggattttccaggcaagagtacaggggtgggatgccttctctgtgataatccctagagctcctaattagttttatttcatccacaaaacgcaaacatgttctcaatattacaaataagaccatatcatatggacacactatcctatgcctgtaactcttaggcaaaaatccttaacatctgcttatatctggagttgtactctgaagctagaattcagtccaataatggtatgccataaagtgacagcaacaattaaatttgatattagctataagatgacatttaaacatggtatttgttgcatataactacagcttgaaaatgaaatgtttcaaacatgattatttataagtgaaggcaaaccctacttattagcatgaaaacagttttgtttaatttactacctattgagacttgcttatttggttggttaacaataagtaagcaaagaatagtttaatctcagtggcatgaaacataaatattcataaattctaaagcttaatgtcttgacaagagtgtggagataatcacaaaatttcctacatgttcccagtcatttatggtcattaatcagttaactttacagatagaaaagaccttacatatttttttttactaaagtggtaaaatacagagagtctattcctctattttaataggcctcaatagctctaaaatctctgagaattcaaactctttccttgcatcttcatgcagctatgaaaataaaattattctgataccatttaaattctttcctgccacaacataaatacacatgccaaagtatgcaagattaaaagaaaaatccatttatcagcaccagcgctacataaaaaccaatcctagtcctcccactttttctccttctgaagcaacaatgataggcaggtagacctcaaattagacttgcttgtctggcttctagtccctcgcctgtacctaagcactctgtaatcagagaactcctttcactgtaaatagcccctatacaaggtaagtgtggaaacagcttctaaatcatttgaaacattttcggcacagctggcagaacacctgttaatatttgaaagtagatgagtgatgtttgaaacacaaaacaatagaaactaaaggactgttcacacaactttcactgcacacttttcagacaactttaaatatactcaaggactttggtgaaaaagcaacaaattacagttaggttaccattttcatattcttctgaaaacagagatcaacccacgaaactaagctcc

SEQ ID NO: 39263 - DNA, 554 bp, Bovine  19866881604441
  misc_feature (1)..(1): n is a, c, g, or t
nttcatgtaattccatgaacaggggccattcagtatttcacgaggatgcagaataccaaataacgcaggtaataccagtgactaaaatacttccacattataaattacaaatctatggtagttaatattaactctgagaaacaactagaatactgtatggttagtagcaactagcaccccctcccacctgccccctgctactcaagagcacttcagaggcccaagatcggaattttttaaagtaaatggcttcattactggttttatgggaactattattagttattttaaaatttaactattcactctttttaaaaatactttccaaaaacaatatattcgtttccatacaattcccaacttgattcataacttctctatagacttctcattattctggaaatctaaaattacttcttaataaaaatgtactctaaatgcaaattatcaacaaaattaaaatgtaaattttcttacacggatacatgcacataagtgactcatacctaggaccctggaattctcatcctaaagaaccagagtgtacatctttt

SEQ ID NO: 39264 - DNA, 811 bp, Bovine  19866881662120
  misc_feature (1)..(1): n is a, c, g, or t
nctgaatgtatgaactcggaaaaagatctgatctagaattattcagagttatcagcatattgatggcaactgaggctgtgggaattaatgagattgttcagggaaagagtagcatgaaatagaagcgctcttaaggtataagacaaataacagaaatactctggggacagagagagaggcaggagaagaaccaggagagtacatcatggaagccaaagaagcagagtagagaatatacgggatccaaaatcatttctatataactccagagcctatgaccctaagcattcattcatcaaatatttactacatgcttcctgtgtgccaagctctttgccaggcactaccttgacccatgaaaatatgaaagcagatcttctcgaatgcatctcaacctggaagtactaacttctacaccagttgagaagaaggggccagtgataactgaggtgattaatttctgctattttaatttccttaataagcctgctagggtaaattttggaataatgtatgaaagcattattttttatttgccctgctacacttcacatcttagattatcacttttaagcccttcatgtattctgtaaaagatatatttcctacagagatgtaactttctttccttccacctggctgcacattctttccagccattataattaatggcttcaaagttcttgaaatataacatatggatataaagctagattcttcatgttttgagaaatatttcagagaatttatataagctgcttcagaaagggaaataaattataaatctaccgctttctctaaggacaaagaa

SEQ ID NO: 39265 - DNA, 954 bp, Bovine  19866881684661
  misc_feature (1)..(1): n is a, c, g, or t
ncagaagaatattaactctggacctgacatatagaaactcgccatcaacagtgactgaaatcactgaatattatcaaaagtgtcatgattcagcctgcatttaataagttgtacatatactcccttaagagcgactgggcacaatatggaaaataccccatttagacaataagaggttggttttcttaaataaagctaaagtgaactacatgtaaaagtcacctcagaaaatatagttattgctatatccaggcagtaaaaatatcagatgaatgtactgtataaaaattgagtgttaaaacttaattatatggaattcttttcttacactattatttgctacaattttctagatctgtatttattcacttactcattttcttcatgcactcatgtatacaaacttttcagctgctaccatgtgctaagatatggagatctgaacataaagaacaaaagttaaggacaaaatttaacagatgcattcattcccagggcattttaggttaagagccaaggttttgccagaatctccatctattacatccacactcttttcccagtttccacattactccccagagtaattctcctacccccatcaatgcaatataattattctgtgacttttctattcaaaaccatttcaactgctgggaacaataatgtaagtatgatttataactgcattataaattcattccattgtgacttgtgaatacaaattaccccaactggtgaataaaagccttcagcaataaagctgtagctttcatttatcatcaatcaaaaaatactcttattttcaaaataaattaaaacgaggctgtttcaccacatatttataagccgtataaatatacttcctttcagggagtaaaatatatacagacaatgtgggacttcacatccacgatgagcatctgatttaagatctttaaaggagtcagattc

SEQ ID NO: 39266 - DNA, 2771 bp, Bovine  19866880387969
  misc_feature (1)..(1): n is a, c, g, or t
ntgataacaaaaaaagtagatgggtaaaacaacaattttggtggatcaagagagcagagcatacaataggctttccctcttacaatttcatcacagcagtctcttttttttcaatagcatggttgaagatatttattgtaaaaacttgatcatacataaaagcagagggatagtgaagtcccatatattgatcacccagcttcaataatcatcagtgttatgaatgccaatatagcttcatctgtctccacccctcaccaccctttccctatggactaatttgaggcacattccaaacatcacattattttaatctccaataacagcagtctcgtcttgaaatcagttactagatgactttccctatagaacaaagtcttagctacttccttgacgattgaattagatgaagcgtgtgaatcccagttttcttactacaccttgcccctaagaatctcctgctgaaaatactgtcatcgtttttttctgtctttatgccttttgccacaccctgaagtgtctccatctttccccaggcccctgccatttcgtctcatccctcaaaattgatatcaaaagccaactttaggtaaggcctacaaacaacatttgcccttctctgtaaacgttttagagcacttagcaaacaccggcatggactgtgtatccatctcatcttgtatccatctacaagatcggatgtctaggagcaaaaatcaatggtatcttgacatcattgtcagcatctgtcatgttttgcacatacaagatattcaataaatatttgctgaatgaatgaatgtgatgttgtcatttattggcatagctttattgttgcagtgctcggaagattctttgtgtctaaggaagagagaaattgggtgttgcctttcctagactaggagaggtagggatccctagttcattgaagaaaaagaaacaaagtgggtaaaactggaggaacacacagaatatccagtccctccctgggctcttgcatcagaagaagagtctgaatcatatttatgggagactgataatgagatacctgttgttatgctcacatgagctcttattttgtggtaagagcatcactttcaaataccaccagtttaagatttgttattaggggacaacttacatttaaggcactctaatttttgaattccatgaatatttctgcagtatcatctacccacagtagaaaaaatgagagtcttgtggaggtgttctaaaggaattaaacccaaggtggcactctttggaatgggttaagaaaccacctgccaatgcaagagatgctagagagtgggtttgatccctgggtcaggaagacttcctggagtaggaaatggcaagtgttcagtattcttgcctggaaaatcccatgggacagaggaacctggcgggctacagtccatggagttgcaaagagttggacatgactgagtgactgaatacacacacacaagattccaaagtgggaaaatgaattattctagtagagtgctttgcagtttatacttaactttttcttacatatcagcatatcctaaatgaaactgaaaatagatattattaatatttccattgtttcaagaaaggatattgatagcaactgggaattagagtgtgcaaattgcccagagtcacacagttagtgaatgatggtatcaatgtatctctacatacagtcatattggataatgggaaatttaaaaaaaacacattttaggggtcaaggaccacaaaacaaatattaaaacgtttgaccctcctttgttcagatgtttctcttcatattatttatggtaactttctatgtctcaggtttcctcacatgaatacatgagattttaaaatgtactgtaaagacctgtgaggatcaattgacaattcacctgtggtatgcacgctgcaaggtgtcgcccagaatagacgctagatgagtgccagtttcctgttattccacaacccttctcttcatggaaaacattcatggatgcatacaccagaaacaacacatacgcacacatacagacatattcatgcaaatgctggactagtacttataaaaaagaagagctgctatatagagcatcgacctataaaattgataagcattcagttaagcatggctgtacctattactaatgccactcagctgatgcatccaggatttcacaagagaactcttgtgatgtgtacaaacaacatcaagtgactgaagctggaagggtatgtgttggattgggtggctgagggcaggagtggactcaaacacatccagtacaaatcatcaaagggtaatgtgctctatcctaaaaatctgtgattatttctagtttgcataggacctcagagactgtacaatttcttttcatattcctttgtgtattagtcactcagtcctatcagactctgtgatcccatggactgtagcctgccaggctcctccgtctatggatttctgtaggcaagaatactggcatggggagccattccctcctccaggggatctttccaacctgggggttgaacccaggtctcctgcattgcaagcagattctttaccatctgagccacaagagaagacctcatatttctatccctggtagtaaaataaccctatatgggctcacagagaaatcaaccttatatctcacagattctactccaggatagagggagaattaataagcctagccattgaacataaaaatagggagaaagtgctgtgatttacactgaatttttaggtaaagggaatt

SEQ ID NO: 39267 - DNA, 733 bp, Bovine  19866880455152
  misc_feature (1)..(1): n is a, c, g, or t
ntttcgttgtattagttgagaacctttgaatctgtcttgaaaaacaaaaaaatcaaatggaataatggcaaagacttgtgtcttcattaaggacagtaattaagtaacctttttgtgagaaataaaatccagtgttggttaagtacagacagtaagatagtaatgcagggaatatatgaataaaagcaaaaccatctcccaacttagaagtcatctccacaaaggtaagagagaaagaaaacaattatgttattgtataaacattaaaccacaatgtgatacgaataacaggcaatctaccaagagattacaaagacaaaaggaaagcacacccttttatatagtctggcaaagacaatcttttccacaacatgttttcaaaataaatgattgtcctaaagaaaaaaaacgtcagcaccttcctaagtttacctgggaattggagtaaccatctgtgctagctaattggctttatccagaggagaaacaattacactgactaaaaaagtgatatacatacatatacataaaatatttccatccttcattttatatattgagtaaattcagtattggctttgccaatgcctgctcatatggtttacatcttctgaactgagggatgattaacaagtttcgcattcctgaaacttgtcaagctttatacccgtttcagtccattttcagcacatcatattattcttccatttaaatttcatgtatgtcctttaca

SEQ ID NO: 39268 - DNA, 1716 bp, Bovine  19866880487454
  misc_feature (1)..(1): n is a, c, g, or t
nacgggatcctgagtcactggtgactttataacatgcctaacccttcatttagggccctcaaatctacaactactcactcaaataagagtatctactcaactaacctcaaaacagttgaaattgagtcactgaataattgtgattattataatcacattaattgtgatcataaatagatgaagtttaattactaatgtgtaaacaaaattggctcatatccaggtaacacatgaaaatatggtaagtccatctttgttctaatgttcaatgcactgcaatatttttcacaatgctcttgcaagattatcctttaaccatcctggagaatggttaaaatcatgattgtgccttaaggtagacacatacaagccagatataagcaaagaaatgagattctataaaatgacaatataaaatcaatctttaaaagtacagaggcttcccaggtgactcagtggtaaagaatctgcctgccaatgcaggagcttcaggagacttgggctcaattcctgggtcaggaagatctcctggaggaggaaatggcaactcactccagtattcttgcctggagaatcccatggacagaggagcctggaaggctacagtccatgagatcgcaaagagccagacacgactgagtgactgagcaagcaagaagtgcagtacaaaagtcattagtgttctaaacaacagtatcaaaaataaattggaaatcaaacatacatttcctcaaaatagtcattagaaatgtatcacccattcatttaacttgtgttaaaaagcctcatgattatatctgcactgagtacttttgcaggaaactctgtccctaccttcaagataattgatgtttgaaacagaacacttagctataggtgcttagttgtcacagagatttgtttgaaatcaaactttgtctctgaaaaattgagtatgaattaaatgtcaagcaaatttttgagttataatttagagtgactttccgactttcatttgctaaaatgggaaccacaaattgcttgagatggtttcagtgctttttgcagaaaataatggaagtcaaatttttaatattaatattcttacaaaaaaattcagtagtaacctttctcaatcattggcataattcttttctgttgtttgtttccactgtctttttctctcttttttaattttttaattgaaggataattgctttacagaattttgtggctttctgtcatacatcaacaagaatcagccataggtacaccccatttcccctccctcccagacctccctcccatctccctccccacctgcccaccctaaaagcctgtcacagagaccctgtttgagttccctgagtcatacagcaaattcccattggccatctattttgcatatggtattgtcaatttctatgttactctctccatacatctccccttctcactcctctcctcccaccttgtccataggtctgttctctatgtctgtttctctgctgctgccctgcaaataagttcatcagtgccatctcttcagattccatgtatatgtgtcagtatacagtatttatatttctctttctgacttacttcaccctgtataatgggctctagcttcatccacctcattagagcagattcaaatgtgttcctttatatggctgagtaatgttccattgtgtatatgtaccacagcttctttatccattcatctgttgatggaca

SEQ ID NO: 39269 - DNA, 1457 bp, Bovine  19866880494015
  misc_feature (1)..(1): n is a, c, g, or t
nttgagaaactagttttacctacagctcatttaacctccggttgtgtttgtgcagtaattttttaacatttgcttgacattgatcccaattttcaatttatatctttcacagtgactctgtgagtcatattctatattttttgtattttcagtttgtatatagttgttattaccttaaaaagagtaatgattcctgaatatccttcttctttggtgttgactaggccttccaaatgaacaatgatatcttatttttagtaataatctatgttgttcttatagacaccttattatgatgactaggtagacacaagggtttttcaaaaccaatttaagtggtgtagctgttgtaatatttttttaactcttaacagaattatatcttttatttacttttagaaacaccaataaatagtctatagtgactttgtgtatgttagtcactcagttgtgtctaactcattacaacctcatagactgtagctcactaggttcctctgtccatggaattctccaggcaagaatacttgagtgagaagtttgttctcttctggagggaatcttccccatccagggattgaacctgggtccctgcattgcaggcagattctttaccatttgtgccaccagggaaaccactgtgattatatctgcagagttcatatttttcacctttatttcagagtagcatagtttaagcatcatatgtcatgctcacatgttttatattcctttcataattcactgtaaaataagaatgttgtactcataaccaaattattttaatattctatgatcctgtttttactattactagatattaagtgttctttttgcatgttaaatttttatttgaaaataaaaccaaatacctttaatatatatttatataccatcttttgatttaagacagatggctaagaattgttattacaactaagaattattacagatatatgtgcttttatgtttttttattttatcttaacagaatttcatggaatgtcgattcattcattgtctctattagttgcctgattatctaataaagtgagcgaaatcactctgtcatgtccgactctttgcgaccccatggaccgtagcctatccggctccgcaatccatgggattttccaggcaagagtactggagtgggctaccatttccttctccaggggatcttcccaacccagggatcgaacccaggtcttctgagttgcagacagacgctttactgtctgagccactagggaagccctgattatctaataagtagtctataaaatctatgaggaaagtggtacaactttcaagccaaatatacgttttcagctttacctaaagtaaaagtcataaaagatacctgttctttaatgtttactgaagaatctaatgaatatttaaattcatgacttgaaataacttgggttaactgatttttattttcaagacatttc

SEQ ID NO: 39270 - DNA, 1061 bp, Bovine  19866880504862
  misc_feature (1)..(1): n is a, c, g, or t
ntcatcatcggaggggttctgctctgtgggttctgctgttgcaaccgaaacaggccaaggcacagatatttagcccctgggcatcgtgtgccacatgcacgtaatccaccacggccagtggcagtgctcagtaggacttccaccagttacgtctaacacctgctttcagctcgagctgtggattatgatccatgtgttttatagacgcttgccagaaactgtaagtatgccaggcaggagaatttgctttatgaccgctcttaaattgagatgagaagtttaaagggcatgtagattgtagtcacctgtggcaggaagagaaatgacttacttcggaccctctaacctcatgtgtattaaatgcatttattattctagactcaatcttcagtccaatttgtgtaatctactgataaattactcttttttcactatcatatattatctattaaaaggtctgaattctattgctattgatatgccatagcaataaaacatatttactaacatgatgacaaccaaaatgatggcttctttcttttttaaacaattagctgaaaaacaatggacatcaaataatgcttttaattgaatttatcaaaatatggaaatactagttcaatgaaaagatttgttaatcctttaggaaactcaaatgcattagcaattaaacagttttagggaaagggagctttgatttctgctaagatatttaagaagatgattttaaagcctctaatgtatatagttaaacttgcttagaattatatatacaaagaaaaacaatttataaatgaaaaataatatgctttcaaaacttatgatgtgtacctacaagcaaacagaattatctgtcttgataagatacaacaatagaagactgtgaacactcaattcccatcaaaagtaaatacagccccgattaatgaattaaggtctaggtgttgaagggaatggtttctgttccttgttttattctttagtcattgcacaggtctatacatgctaagtagaatgaggactcaaggtcatgattcaggcagttaggccaaaataagtat

SEQ ID NO: 39271 - DNA, 2243 bp, Bovine  19866880520509
  misc_feature (1)..(1): n is a, c, g, or t
natgcttacttaatattaccatattaaaatgtatcaaaatatccagaattatgttatgaattacatccaaatgcaacatgaaatgaaaatgtcaacttgtctgaataaataaaacatttgctcaaccactgtttatggtgtcatcctactaaatacaaggccctttgaagacagtagaagctgatgtgcattctgcctttgaggaattatctatttaatgacaggaagtcacagtttcattgggaagcttatatgctaatggtaattgtgtgttggtagtcaaccacaagtataaactccttgttggcgtatgtgtgttcctgacaaatctttggaagtaagcatttggatatggaaaggtcatatcctttaaagatttcagtccttatacaaaagtctctgatacccctaacctaatattttaaggccaacttctatttttgtagttatacttaataagataagggtaagatattacaactcttgaggcctgaaagagaataaaaacagagagaatatcagagcaatttagacctagaatgaagcacagattatctggcttaacccttaagtttaccagaagcctactgttcaacctttagatcgttagtatgtgagaaacgacaagacaactcccttgatcactttttccttcttcttccgtctcccctccccaccttactgtattcttctggagtactaaagggacctcccggggatgttttcattttgagcagaagacagatgccagtgccgatttgaagacatcacatgactgagcaactaagtaaacatcatggttttaggaagggaattgggatgcagcctactccttcatactgatgcagcctccttatccatgctcttcttaatgatcatagagcagtgttggcagactttttctgcaaagggtcggagtaaatattctaggcattgtgctccctttcatttctacccaacctactccactttgccgtgtagtgtgaaagcagccatagacaatacaaatgagtgtggcaggggtccattcaactgtgtttgtagaaactgaaacttgaactttatacaattttcacaggtcatgaaatagtatctttcttttaattcttttcagtcatcggaaaacaaaaatcatgcttagctcacaggttgtacaaaaacaggctgtagtcagatttggctggtgggccatggtttttctgtcccttttgtagggaacacttatgggatgtcccttatatgtatactgattaatctaacctagtcagagttgatacccaacgaaaataaacataagggggacataattgcctcaaccctcgttgttgttcttgttgttgctttgtcactaagtaatgtccaactctatgtgaccccgtggactctagcccaccaggcccctctgtccatatgcttctccagggaagaatactggagtgggttgccattttcttctccaggaggatcttcccaacccagggatcaaacctgcatctcctgcattgcaggctgattctttaccactgagctacctgggaagccaaccctagttaggatcccagaattttcaggattattttccttatctctctacatttcaagatgatcaggtggtggaccacacacataagataactgcccacatgacctggtaatcaaactttgttctatgcttattcagagaccaagttctgctggactgtgccccatatttatttcttatttattttcctttcccctcatctttgggattctccgcaggtgatgtctgccagcatttatggaaggcagatgcctgtctgtctactgatccactcagtaatcaaggaagcttcccagggaagaagtgtggataaagctccatataaagaggtgaggtagttgttgggagggcttcaaactgctgagtcattgctgcgtcatcatttacaagttgccatttctgttacaaggcaaatgtgagggtgtgtgaatttatgtacaatttataacatcaaattcagtgaaacatttgccagtagctttatacagggtggatcaaagtaaaggacagaagcctagagactggaaagaaaaggagattaagatttcatcacagctccagatttcagccacacatcaaaggtgtttgttctgttggcttgttttaagaacatgcttaaatgggttactgtataatttatttgtcaaagtaaggattttaaatgccgttaaactaaagacattatgagaaaaccaatttt

SEQ ID NO: 39272 - DNA, 2291 bp, Bovine  19866880794095
  misc_feature (1)..(1): n is a, c, g, or t
ngctgagtggaagaaaggaagggagacagagaagatgagattactgcttaagtttataattttatattggaaggaaaatagtataaacattgtcaaaaaatgaaaacaaaatagcttctggaaaggtttccctagtagctcagacagtaaagcatccgccagcaatgcaggagacctggattcaatccctgggttgggaagatcccctagaaaaggaaatagcaacgcactccaggagctttgacaggaaaattccatggacagaggagccttggcaggctacagtccatggggttgcaaagagatggacacaactgagtgagtaaattccctggatggtcagttctttttaacaatgaaaaattagagcaactaaacattagactctaagttgttaaaggcattagaaaatatgtaactagaaaataaactagtaaaccactttctaactagtaaaccactttctattttaaagaaaatataaagaattgcatcaggaaaattagcctatagattgaacaccataatgcaatcattttcacttctgttgagttttatactcttatcttcaatcagtgaggaataagtatgtaacaatactttaaatctcttgcctcctctttctatttccctataactgtaaattaattgatacagtttggcagatgaaatctttgtaatactaggaagtatttttataggcttcctgggtggtgctaggggtaaagaacccatatgccaatgcaggacaagtaagagaaatgagttcaatccctgagttgagaagattccctgaagaagggaatggctacccactccagtgttcttgcctggagaattccatggacaggggagtctggcgggctatagtccttagggttccacagagttggacaccactgaaacaactccgcacacacccaagtatttttacttccttccctacaacactagcaacactttatctccctgcctagattttaagttttgaacaattactttagttaatagatagctcaaataatgactagtgaagtcacttcagtcgtgtccaactctttgcgaccccatggactgtagcctaccaggctcctctgtccatgggattttccaggcaagagtactggagtggggtgccatttccttctccaagggatcttcccaacacaaggatcgaacccgggtctcccacattgtaagcagatgcttttaccctctgaaccaccaggaaagtccacctcaaataggtgcttgattaaatataagataaattgaaataaattaatacaaaattagcttcctataggcacctcatatatccagctcatagaaagtcccggggtctttcaaatgtcatatctgaaacctgaaaacaaaaatagtattctctttatttaaaatatctgaatgtttaactcttatacaccataactacatttacaaaaagtttttcaatatttgtcatggtccaaataaagaaaaaaagaaagaatcactcagactatatgatggagtagccacactctccgtttttgtagaacccctcaggccactgattaacacaatcaattgagtaccagaccactacatctgattaagcactccctgattttattggcaatttaagaactccagcttaatactgaggaggaaattgagaagtattaaaactcatacatcttttttctttccaagagggaatacttcatttggtatccagtcctcactagataagggataatcaatggagacaaacacattgtatcacggacatgcataaaatgaataaataaaaaggaaaatatacccccaaacacaggattttaaccaacagccttactgttgagtggactgttctttccagtgaactcctttgcaactcaagttataataatgccagtaacaactaatgaaatgagatctctgctcctagaaatactaggaaccagcatattatttaatactctttcctgatttcttcaacatttcctatgaataagaaagataagcttctgtaaaaactttcaagagactcgaaacatgcctgaatagagaaaaaagaaaagagaggacaccaaggactgatggggtcatctctcaatctgatgttggaaaatggactcctataaaatagattgtcatattatcaattatccagggggcttgcctggtggctcagatggtcaagactctgcctgggggagatgggttcaatgtgggttcaaatgtgggagacctgggttcaatccctgggtcaggaagatcccctggagaaggaatggcaacccact

SEQ ID NO: 39273 - DNA, 1227 bp, Bovine  19866880818357
  misc_feature (1)..(1): n is a, c, g, or t
nttaaatatttgtcattcaaagcatatgatttgattgtgcaaatgttgttgacacaacagcagtgaaacttgcctgtgaaggcttcactatgcctaatgaaataaaagatttatgagacctttgttgttggtgttgtttgtggttaatgcacaataatctgtattgaagacagcaatacctgtgatttgccacacctactattaaggaagtatagaagatgatgtgaagatggtgatgttaaaactcaggaaaccatctaccttttctacaacggcactgtctattcccgccaccatgatctactatggcaacaactacggggctatgaatatgataggcttagctgtggctatcaaggatatggtgactatggatatgactgctgttgcccctattactatggaaaatattggtcataaacattctactgaaaaactctagagccactgaacccattatatttgtcctcttgtgaaacagagattctgctgttgggcttactcatctcatcctgtctcttcaaaaagcaacaatcaaaattgaaatctaaaccatcatgaaaataattcagatctcatctttccctggttccattgtgcaagatcataaagatttttttttcttaaatgcaatgaaaagtttccttttgttctctaagtatttcttttaataaatttaatgtctttgcaaatatgatacactttcacatcattgcatatggatgattgtaacaaaaaaacttgtatttactatcccaagggattgactgaccccaaagcttacctccaccctttatttcctagtttttgtctctctgcatatttctcatgctgtttaaagctgaatttccatgggacatagttaatttcttcctcatcaataaattcaacttccttttacctcacaaacaaaatggctcaaaacacacgtgaagtctggtagctgcatggggttgtctgtccatttccctagaacacagaggaacattttaagtggtgcttctgtgagttttccaggtgtctgttttctatttgctggtatactcttagttgcttgatgtcattcatatagaatttgtgtcaagcttgaaattgaatatataagtcctgaggcagccctaagaacctggatgtcctttttttttttctaattttattttatttttaaaatttacataattgtattagttttgccaaatatcaaaatgaatccgccacaggtataca

SEQ ID NO: 39274 - DNA, 1864 bp, Bovine  19866880848303
  misc_feature (1)..(1): n is a, c, g, or t
ntaaacatctctgtgtttatttgcttttcttacaatcaataatgttaacaatgcattgctatttgtattttatgggtctctcatgtggccctagtggtaaagaatccatctgccaatgcaggagacataagagacacgggtttgatccctgggtctggaagatcccctgaagaaggaaatggcaacccactccagtattcttgcctggagaatcccattagcagaagagcctggtgggctacagtccatagggtcacagtcagacacgactgaaatgacttggtacgcatgcatttgtattttaaaactaatgtgtatggaactacgtccatgttgtcttctctggtctatgttccaatatgcttcacacgaggcttctgtatgagctagcttgatcttcgttctgtttgtatataaagcttccagagctatctttatccctggagatacttagtgactcagccatctgtttttcagaaagattcttttcctgataaacctctctccctagtcacttgccatgaatgcaggagaactggtaagggaatataggtcacgtagaacatactcattagacttttccccatagaagagccctttttttggatgaagttcatacggaccccctacttttgccttggagtgaattcactgctttgcaggccactctgctgcttatcacctggcaaagtggcaggacacaccctctagacatgcctgaatatgtctgctcactaggaaaaatagagttcattactaaggtagctcttatttctactctttctatgtctatagtgatgttgatatacatgctttggataactgtcacattagagcctaacaagatatctttaagacagggtgttcattttcattttttaaatgagctgaacaagccacaccaggggttaaatcatttccccataattcagttcagttgctcagttgcttccaactctttgtgaccccatggactgcagcacaccaggctgccctgtccatcaccaactcccgggagtttactcaaactcatgcccattgagtcggtgatgccatccaaccatctcatcctctgccatcctcttctcctcccctcttcaatcattcccagcatcagggtctttccacatgagtcagttcttagccactgaccacttaagtggccaaagtattggggtttcagcttcaacatcagtccttccaatgaatattcaggacagatggccctgagggtagatgtaactaattgatggtcagaattaacaatcaattcctcattttgaggatatcctaaccccatcaagaaggcttatttggtttctgtttagaacagagttttattatcacatttacaaaaatctatttggcaaggcaggatggttctctacaggtctactttattaaccagaaaataaaacaggagacaaaaatttggctaaacactgtttgttgtaggcctgccaaaggaacagagtggccgctgtggagaaaggcaagattggacacctaaagtctaactgaccaaaggtgggaggaagtgaaatacagatctgaaggagaaggaaataagaaggcttggcatatggggagggatcgtgttatatgagtcactgagtaaaacccaggaagggagaggttagttaaagagaagggaaatgaatcagttccatactgcagaggcaaggattaaaggataaagttggaaaatcagaagaggaaaccgtagattagattcaggtcgacttttgataaggccttgaatttatttttctgaaaacgtagagttcacttacatttacataaatgtcaaattaatcaatcaaatcattctgctgttgttagtgtctttcacgcaatgcgttta

SEQ ID NO: 39275 - DNA, 1833 bp, Bovine  19866880873981
  misc_feature (1)..(1): n is a, c, g, or t
ngctcctctgtctatggagattctccaggcaagaatactggagtgggggccatttccttcaccaggggtcttcccaatccaggaaccaaactcgcatctcttatgtctcctacactgacaggcaggctctttaccactagtgctacctgggcagagcttccagtggctctgtaattacataacctcagattgcttttctttttaatttgtattccactgcttttctactgactttggcaaaacccaagtaattttatccatgatgatcaaagcatggttataaacttattagtcaaatgatttccagatagtcaaatggaaaacaaaaacaaccaaaaaaaaaaaaccccttcattttctattttggtttttgttatttggtttgtttgaacttgccttggcatttgccctcctaaccgaggccaatttatcagggaaaaagacctaatctgaaatttattcccactcttgtccacttcaatctccctgcctagactaagagtaggaaaatacagagtcttcatgggtcagaacttcaattaaacttttgggtaactgtatggccaatgaagacagtacggggtgtattctaaagaaatattatattagctttgagacacaagtccactgaaatactgagttttaattataagattatagaatgattcctttgccctaaaccttattatcacaccattgagggtccagtataatagtaggttacagcagaaagagctacaagatagagactctttctgaagggcatttagaaattccaaagccaagaggaaaccaacctacctgcctttatctgcttccacttacaacaaatacctaactcagtccaacccctaatcagattaatacaaattatcacactaaagacctctttcctcaattctcagtacccaataaatgtatctgactttcaaaaacaaaaaactacaaggcatgctaaaaggcaagaagaaacacacttagagaaaatcaatcattaaaatgagtcagatataataaagatattggagttaataggctgagaatttaacaatctatagatatgatattatgctttttccatttattctattaatatattgatttctattcatgattttctaatggtaaggttttcttgcattcttcaaataaagcttggttgtgatatattctctattccgtctcttagtaggttaaattttcttatatattcttaagaacatgtgctaatgagaaatactggcctgtactccctgataatgataatatatttttatttggaaatattgttgatttcaaaattcatagcagtattccctctttccttattctctggaacaatgtttagaattcaccagtggaattatctggccttaaattggtattttgggaagatttttaatcatagctttaatttctatatgagaaaactattcatattttttcctcttgggtcaagttttataaatttaacttattactataatatataagttcaagataaatgattttgcttttattttataaagtattttgaatatactcaaaagaaggaagaataaatacttcaaaaaactttatagatttaactattgttaatgttttgatatagttttttcatgtttattttctcaagagtgctaaaataatttacttcaagctagtttatccctattttctttgaaattaacatgaaaattttcaagaaaaaatgaatttaaaaaataaactaaaatgtgattgtcatcacagggtctcttcaacctttagacatagaattcctttgtatggctggtgaagaaaaacatgcatattgactataatgaggaagat

SEQ ID NO: 39276 - DNA, 1875 bp, Bovine  19866880923699
  misc_feature (1)..(1): n is a, c, g, or t
natagtgcttccaactgttagtctaactctccatttttgcagattaagaaacgaaggctcatatgggaatgcttccaatgcttccactggaatgggaacaaaatgcttccaagggaacaaaaaaaatagaaatacagtttaaaatatgatataaatattcacaacatttataggtgggcacatatatatgggtgctataagaaaatttttctgattttatctgtagctttaataaaatctaaaagcttgcacaaagaaatatgacaattaggagacagtatttaacagtgtattttcccagtctgtacataattcctgtacttaaaaattctagtctatctcttctttaaagaaaacaattgtgaatacttaagaaagcattttctgagtggctatattttctttgaagggcattcaaatatagatcatatgtagcaaggctttcaaacatttgttgattacaaatacaattttaggtagtctgacaatcatccttttggggagaaatattatcaataagagtagattcactgaactagatattgcgccaaaactagaactgattacagatatcggatggaacgggccagatttctgaacaatcacttcctagagacatgtgagttaagtcaacagattgctatggaaacagaaaaggaaaggaacacatccttaggaacagaatgtatgatctgacagtacacatttatgctgtcacagggaaaggagaaagaaaaatctctacttcaaggcagtcaatacttttgtggttcttgtacttcctgacaaaatatttgatctgcttgggcacccaggagaggagacacagctggcaagggatcgagatagattctaacacagaaatattacaacgcactcttacaaatgtgttatagaaagccatcagatttacaattctgtcctccaccagctccctccctgtcactgagggaacacacactagaactcacacatcaaaatgaaatcccaaggaaatctaagaaaaatgtaaacaggaaaaaaaaactgtttaaaaaaaatagcaagttcaatgtcacagtgagaaaacatttaggttttttgtccaaaagctgttgctctcttcaattgtatcttaaaatattcatttaagaaaattgaggtggggggctttagatattcttttggagaaatctattctaagataaaccgagaagatgaagaagggggaggatcaagatggagagatttataaacttgtttgtcgcagtgatctttattggtcagggatgaactgtgggatacttgtatgtgctttactcctgttatggaataacctgcatttcctccaaattcgtacactgaagccctaacctcttaggtgactatatttggagatgtggcctttaaggaggcagttaaagtttaaggaaatcagtacgtgggaccttaatccttatgaaaagagagaaagactcctgagatgctcacactgaggaaggaccgtgtgaggacacagcaagaaagcagccactgacatgctaacgaggggcttccccggtgactcagcggtaaagagcccacctgccaatgcaggagatgttggtttgatccctgggtcaggaagatgccctggaggaggaaatggcaacccgctccagtattcctgctggagaaccccattttcaggacttgactgagggtctgaacacaaatcaatactgagatagaagccccattttaataacctgtgaaaacattcacttctgcctgacacaaaatgaaaaaatgaggactaaaactttgtttatttttgccttttgtagtacctgaactcatgttcctagggcctcacactcagcctactcttttgggaatggtagttcagtaacatta

SEQ ID NO: 39277 - DNA, 2381 bp, Bovine  19866881004546
  misc_feature (1)..(1): n is a, c, g, or t
natcttttacttctgtggagtttcaaaaatattgatatcaaatttttgcataaacatgttcccaagacatatgctttaaaaatagaacataaaggtattctttagtttctgaacttgaaaatatgcatgattccatgtccagtaagttgacataatgttgacactgtattttgggtaataaattactatacaaaatcacttagtcagagtgcaaaaaggtcaataggaaggtaatttatattcagaggggtttcgcttcctcatcataaaagcttttttaattaaggtatacatatgtggataccatagaatgacttcttttacgttacaaagctgttacattaaattcagactaaatcaggattacagtaaaaataaatatgaatattttaaagcaattattagacaagaatttaaaactatggaataagaaaaatgagatttcagaaatttaatttttatggagtatagttgatttacaatgttgtgctagtttctgcactacagcaaagtgtatcagttatatatatacctatatccactccttttttagattctattcttatataggtcattacagaatattgggtagagttccctgtgctatacagtagatttttattagttatctattttatatatagtagtgtaaatatgtcattctcaacctcccagtttatccccccttcccctccccagctcttggtaaccatgcttgttttctacttctgtgactctatttctgttttataaataggttcatttgtactattatgtttagatttcttagaaatctaaagaaagcatatcatatatttgtctttcactgtctgacttacctcactctgcattagaatttctaggtccaccttgtcactgtaaaaaaaaaaaaaataatttaaaattaaaatttatgtttggggtctaaaaattgcatactcaaataacatgtattaaatgataatcacaaaaataaatatatatagccaagaggggaaaaataaaaaggaaagggagataaagggaatagaatttattgagtaaaattcctaaccagaacactaaataagtatgaaacataaggaaaacaattatgtaaaaataggtaggcctcattttagaaagaagaaatttgcatttagataatttaatcatataatcaaatgtatttacagtatatgtggctttccaatgtttgactatatgtttgatttgattcatccatttttatggaagaatattgagtccaaattatcagggactgtactcagagctggtttttcaaggatgcacagaacaggagttgtctttactgttttaaaccggtataaagagatctgaatggaaaggtattagaaataatgcaataaagataaaagagtttttcagtaatccagggatactgtgaccagagaatgtgttggctatggcactgtaaagtaacgttgtctgtaccagagaatttgtcaagtagaatttatagttttgaatttcaaggcagactgaaaaggtaagaaactgaaggataagaaaaatgcaatgggattatatgttttttatgtttatggttagggatgaaacagcagagtgttcagattagaccagtgaccaatatcagaaaaattggtagaatgatttctcaacagaaggaaaaatgtctgataatgaaacttctcaaaaattgaagttggcagccttgtgaaaatccctgttaaaggcattcaataaagtactcgatcaccacttattcctttgttgtcgaaattcaagtatatccagtggaaagaatgatcttgactttatactcccttccaattcagatttcatggttgttacagtgaaaaataatctaaattttggagtctgccagattctgaaaaagttgattgaaataaaacatagaaactaagataagcaaaaaaaaagaaaaaatgcccccctaccccaacaaacaaagcaacatgactgaatgtttggtcatgaaaggttgaatgtttggtataaagttacatttcaattagtgaggcaagacatagttttaataaactttggcaagtgctttgacatgtgtctgcacataagaaccaggaggtgctggcggtggtggcttagttgctaggtcatgtcaaactctttgtaaccccatggacatatagcccaccaggcccctctgtcctttggatttcccaagcaagaacactggagggggttgccatttcctcctccagggcatcttccagacccagggatcgaacctacatctcttgcattgcaagcagattctttcctgagctactagggaagccccaggaccaagaggaggatgatccagttcagacaataacacggaggaaaggcatctcacaggagcgattacagat

SEQ ID NO: 39278 - DNA, 1249 bp, Bovine  19866881023093
  misc_feature (1)..(1): n is a, c, g, or t
naaaaggaaaaaaagaaaaaaaatgggtaaaatttagatgaaaacaagttggacaaaatatatgtacatcccttttttcctccatccaatatgctaccatgagcatttttatgtcattacacatcaatgttcacctaatcatgtttattgttgttgctcagtgtctaggtcatgtccaactctgtgaccccatggactacagcctgccaggctcctctgtccatggggtttcccaagcaagaatactggagtgggttgccatttccatctcccattatattcataatgctgctatattccattgtaagaatgagcataaatataactgaaacatagtttatgcaatccactgatcaaacgactttttttaggcttatagcaagataaaggaaggcattttgtaaactgtctctttgaagaaaattatatttgctagcaattacacttggtttcatatagcacatattctattaatgttgcttaaacaagtaagatttttatttttctctcttaaaaagggtagagtttggcagctcaggtctggcacagctactctgataattcttggagaataaagactctgtccagctttcccttcacagcgatccagcatacggcttttgttctcaaagtctcagaacagctgggtgacctccaggcaaaggggcaaaatgtgcaaaggagcaaagactcaagctcctgagtctgtctgcctccatcagaagaaaacagaactttttctgaagcctgacctgggtggctcccacttagtctcactagccagatataggtcccatggcaaaactaggtcaaggaagtgttgagagaggcatatttttaacaaagcagatttctactccaaaaaaaattccctctcttagcaaacaaggaaaaatagattccgggcatgtaactcttggtgtccatcacagaagtatatgcataacagttacatcttattcactggttgattaagtgaccagtgatgtcttagatctgacctacagggaaagttgcatgtctctaaacaaaattactgttgcacataacttatagcctaggtccatccatttgtcaaatcttttaaattagaattctataaacatttcccatatgtaataggaaaggagagtggagagaaattcatctatttcttattcctttcacaacaggcaggcaacattctgctcaagatttcttagcaaaataattaattcaattgtctttgtgctaaaaagatgaaggctta

SEQ ID NO: 39279 - DNA, 1608 bp, Bovine  19866881113415
  misc_feature (1)..(1): n is a, c, g, or t
naatgggaaaccaaaatgtgaagaagaaaataaagatcaccttttaaatcaattatgcagagaagctttgttaacagcttagcattttagctttatatatatatgtttacaaaattgtaacaatgtggtatattcagttttatttatttatttttttcccttaacagcaagagtatttctagatcattagtagtagttataatggctgcatttgtatagacattgtcatgatttatctaactattctactactggtagacatttatatttctctcaattttgacataataaaaagtattacaatgaaacactgtacttctatagaattatatatgcatgtttatggttatttcctatgagttaaattagtagggattaaattaatggggaagctcatataaactttctatctctttctctctcttactctctctccctacctccctatggtagcaaagctcagaattcaaagtatatgttttttccaccactagaacttgtcttcagttagaagctttcagggatttcaaagcattccttagctctttacttgggcattgtcattataacttttcttaaaaacctatatctctaaataaaaaaaattgttcatgctgactgtcatgatcaagtaatacagagatgggtaaaggaaaagtcagtatcacctgcttgtcacatcccagtcctttggtcccttgtgaggaggttaggagggggacattctgtacgtggtgttattttgaagtcaaaattttctcttttgcacatgtcttagctgcatgacttgccttttgttttgtttttttttttctgaaaaacacctcagtgtctggttagaaacaggataggggtcagtttgaacttgttgtaagagtgctgtaagagttacctgttgaagatatgataaatatgaaagacatctgaaaaatatccctgatgtaaatgttgaaaatgaagaaggacatcctgtcccctaatggattttcaagtgctttcaaaattgagaaaacactgaacaaatctgaaagacagttgaatgctatgtcatcagacagaagatattgttttcaattagagatattgcattgctatgtaaagtaaatgttagaatcatttcatttttaaaaaattcattttcacaatgaagaatgcctttcctctcagtctaggagaatctagacttttatattgattgaataaattagacctaaatgggcagtgctacatttgagtgactgttagtctctcaattaactaaaagtgtctgactctttacaaccccatggactgtatagctcactaggctcctctgtccatggaattctccaggcaagaatactgggagaggttagccattctcttctccggggaattttctccacccagagattgaacccagggctcctgcagattctttaccatctgagccaccagggaagccatttagctgtttactaatcaaaaggttggtgagtcagagcaggcctcacggtaggcacagcttataagcacagtaattagtgttcattaacaaatatccaacaagtgaagtttctgtaacaagcattcctacttaacagttcttggaaccaataggctagtatt

SEQ ID NO: 39280 - DNA, 3272 bp, Bovine  19866881175266
  misc_feature (1)..(1): n is a, c, g, or t
ntcccttattttattttttgaaatatgtatctctacatatttatgttgaatgaagaaaaaacctgtacctttaatatgggtatgtcccgtagtatatgactcctggtaagtactgagatagtccaaagttgtcttattcacctctgattcaaaatttagctgaataaagcaacagtttaataaagttggggtgtgtttttaaaaatgtgtatgagtcttcaaagtggatagattagaagttcatcctagtcttgtcgataacatacataaaaagggttgaggctttaaaaaaaaacaacaaaaaaccagcatgttgaggagctgtgtatatgtcagaatcatcggaccttaaaatttgcaggattgagaagaaaagtgaagccaaagaagtgggaaggagagagtcaatgataaaaaaaaaaagaagaagaagcaacaaacaaatgtaataagaagtttgtattttcattttataggaatcagtcataagaagccatcaaaggcttaagcaagagtgaaatacattcagttttcgattagaaagcatgttctggtcaagacatattcattggaagagaaatatagggagatcattcctagttttgtcttttcaaaataacttccactaaaggttttgggtctcttaaggatgtaggatcagagagatctagaaagcagtttgaggaataaaccatcaagctagtccactactgtgaggtaaaatcacatagttgagtgtactaagtcctagccacttctcttgcaggcagttgaggttagtcacacatgtgttaaaataaagaaaaactgaagcaccaggttcttagttctgacttaaatgcatttattataatccaaaccgaataaattcttcccacacccaatcaacactgaagagcattgcaaaccataattttatgctaaggagagatgaaaaaaagatgaaaatgggaaaggaacagctttcattgggtcaggcacaggaaaaatcaagaaaaagcagtcactactaggaaaagagcagaagcacgtggagttcgaattttcatcttggatcttcagggtgagtattggcctggaataaagaagctgcaggcttccttaggtagagcaagacggacggtaaggactgaacacataaggcagagtttggcatccactgaagacagggcgcagaggtctgaggccgctggacacaatgctgatgggatgaaaaccacagggcaaagaacccgaggggcgatatccacaagggagaaggcccgagggtcgcgagcagctggacacataggtcagcggtctataagacactgagaggcaggatccagaggggtaagaagaagctggaggaaaactggttccgtggcagggtcttggcacatagcaaccagaagaagggtagctggaagtttcacagctgctgggctcgcagttggctggctggcagctggtaggttcactgcaggtctcctggccattgctcaggatccaggttcggtcctgacagctactgggcaagcagagagcatctccgacgctcacactcggagtgtagaggccgacggaggaggcgacaggaatgtgacagggactcctgagagaccccaaggtgtagtttccggagcagtagttgtggcaagacatggcgaggtttcaggagcaggttgtcgtccgttgcaaagaagtgagtgtctcaggtttctccttcatcttgctgtcttatataccccgaaagaaggcggtgattctgcccagactcttctgcattgtgtgacgccgcatcacaactcttcattagagtccaggaagtgatgcttccacctcccataaaactggatgttccttgcaaggctttccattgattaaggatatctataaagcagcgtgactggattttaatagtatctgtgctccttaaattactcaagcaagacagatatcttgaaggtcgttttccttatttcaattataaccgccactccataagagaacaaagctggtggagctgatggaattctagttgagctgtttcaaatcctgaaagatgatgctgcgaaagtgctgcactcaatatgccagcaaatttggaaagctcagcagtggccacacaactggaaaaggccagtttttattccaatcccaaagaaaggcactgccaaagaatgctcaaactaccacataattgcactcatctcacaggctaacaaagtaatgcttaaaattctccaagcaaggcttcagcaatacatgaactgtgaacttccagatgttcaagctggttttagaaaaggcagagggaccagagatcaaattgtaaaaatctgctggcagcatcgaaaacagcaagagagtgccagaaaaacatctatttctgctttattggctatgccaaagcctttgactgtgtggaacacaataaactgtggaaaattcttaaatagatgggaataccagaccacctgacctgactcttgagaaatctgtatgcaggtcaggaaacaacagttagaactggacatggaacaacagactggttccaaataggaaaaagagtatgtcaaggctgtatattatcacccgacttatttaacttatatgcagagtacatcatgagaaatggtgggctggaggaagcacaagctggaatcaagattgccaggagaaacatcaataacctcagaaatgcagatgacatcacccttatggcagaaagcaaagaacaactaaagagcctcttgatgaaaatgaaacaggagagtgaaaaagttggctttaagctcaacattcaaaaactaagatcatggcatccagtcccatcacttcatagcaaatagatggggaaacagtggctgactttatttttctgggcttcaaaatcactgcagatcatgattgcagccatgaaattaaaagacactttatccttggaaggaaagttatgaccaacctagatagcatgttaaaaagcagagacattactttgccaacaaaagtccatctagtcaaggctatggtttttccagtggtcatgtatggatgtgagagttggaccataaagaaagctgaatgcagaagaattgatgtttttgaactgtggtgttggagaagactcttgagagtccctcggactgcaaggagatccaaccagtccatcctaacggagatcaatcctgggtattcattggaaggactgatgttgaagctgaaacgccaatactttggccaactgatgtgaagagcttactcattggaaaagaccctgatgctgggaa

SEQ ID NO: 39281 - DNA, 1801 bp, Bovine  19866881240357
  misc_feature (1)..(1): n is a, c, g, or t
nggtgagaaataaaatacatttaatgatttgctacataatacatagtgagcatgaaaatacctcttctttatgtggcttaaaagtaagtgcttccacttagaaaaggctttgtaataattaagcagagcaagcatcactacttaattacatgaaaaaaaaatgaaaggaattatagtgaataggaagagactatgaatatttaaccatcattatattttctctgaagcaattttcttcacacatgtttaatatgtaatcttaaaattcagaactaagacatcttccttctgtctatatacatttattattactattttattaggtgcaataagatagatgattccttggtacagaatttttatatattaaataaaaatatgtatgcatatgcatgtagactaaaaattttttaaatcagctagttataattaacaaagttagtttcagtatttatctttgtagttaggggagctttgataaattgagcttaattgggagcacagaaaataagcattagtgctctcaaatagtatgcaatcatttatgaaaatatcttcatagcagcatctcctttacccctcatttgaaagaatccttatgcaccaacagttagctgctaggcatttgcatgtgaggttattcaaccccctacaatctacataaagtaatgcatgctgctgctgctgctgctgctgctgctgctaagtcgcttcagctgtgtctgactctgtgcgaccccagagtcggcagcccaccaggctccctcgtccctgagactctccaggcaagaacactggagtgggttgccatttccttctccaatgcatgaaagtgaaaagtcaaagtgaagtcgctcagaccccatggactacagcctaccaggctcctctgtccatgggattttccaggcaagagtactggagtggggtgccattgtcttctccgaagtaatgcataaactatgtattttatatatatagtttatgtatatattttctatacatagttcatataataatttttttagccaagtgcatttattaatatagtacgtgtaaaaaattacatcctaaatacaactattgtgatttagatggaacaaagtgaagctggactgcaaatgaaggacatttgtccctgagttcatatttttaagtaccatagatttgagtttcatttcaatgaggtcaaaaagttgaccctgagttaggagtcaaaaatctattgaaatcacctctttcctgcggttttaacttaggctacttgaacttggtcccagttttcttacttttcaagtgataattatactatttacctctcaatatagatgtgataattagttgaaaagtgttttttggaaaatatttgccatacaataagggcttcataatttagtttttatattcttggcagagatattatcagtatacgaaataaaaagtagctactttaagaccagtgggtctcatgatcgaaaatcttgtttgtatatgtcacatgactatctttttatttggccaagcagagatttttaaaattaaaagtatgtgtgtatgcatcagtcatgtctgactctttgggatcccgtagactgtagcctgccaggatcttctgtccaaaggatttttcaggcaagaatactggagtgtgttgccattttcctcctctagggtatcttcccaacccagggaacctgcatctcctgtgtctcttgtattgtaggtggattctttacctgctgagccatcagggaagcctaaaagtatggtcagcctcaaaacaaatacagtcatcttcatt

SEQ ID NO: 39282 - DNA, 1006 bp, Bovine  19866881365380
  misc_feature (1)..(1): n is a, c, g, or t
naaaatttacacgctataaatttgatagtagattactttttaaaagtatttgggctaacatctccatcttcttagctaatataatttaagtccacttatatgaggcattccatattcatccagctggtaaaaagagagccgagcagaattatttttccataaaactcatttgagtcttacagagtatcatgatcaggcaatgatatcattgtcttttatgcaccatttatatcacacatatcagttgttactaagcgtaaatacatgctttgtaatatggcaaaccacatcagggatggctgagaaaagaattgcagtaaaatataatgctgaatgcagggaggaaagaaaagagccatatctcaacatccttcaaatgaccctctgagtcacaaattaaaccagggatgatgaccaactgttctgagcatacaatgatgccttaaatcaaaggccatataaactataaactgtcttcgactgtaaaattcaagtaagcctatttaccatgctgctaatctatctgattgtaattagacaacacattaaagagattgtcttcttttaatttttaaaatttatttatagataatttttgactgggctgggttttgtcactatgccagggctttctctagttgaggccaacagtggattactctctggttgcctagttgcaggggcaggcttctcattgccataggttctctagttgctcagatctgctctagggcatacaagcttcagtagtcatggtgctcaggcttagttgctccatggcatgtggaatcttcccagaccagggatcaaacccgtgtcccttgaatttgttggtggattctttaccactggaccatcaatgtattcctaaggagatgttcttatacaacttgtagtgtacaaagacattggagattggctgtcaagaacatctcacccacaggtgcagtgcacataagccttctaggccagcaggggatatttagatcttctctgatgctgttgg

SEQ ID NO: 39283 - DNA, 522 bp, Bovine  19866881567195
  misc_feature (1)..(1): n is a, c, g, or t
nggttcagttcctgggtcaggaagatgccctggagaaggaaatggcaacccactatagtattctttttaggagaatcccatgaacagaggagcctgatgggctacagtccctggggttgcaagagtcggacatgacttagcaactaaagcaccaccaatatgtatatttttccatatatggaaggatccagcagggtcacttttcactttcatgcattggagaaggaaatggcaacccactccagtattcctgcctagagaattccagggatggaggagcctggtgggctgccgtctatggggtcacacggagtcagacagactgaagcaacttagcagcagcagcagcagcagggtcaaggcaatgaatgtgttaaaaactgaatttgcacatttgtgccaatcagtgaccctagaatcactttaaatgaaaatatcaatttgtcttctctgcaggtagcagttaagagaataaagcaagtgaataaactcttagtaggatacctactaagcatttaaaca

SEQ ID NO: 39284 - DNA, 1852 bp, Bovine  19866880411805
  misc_feature (1)..(1): n is a, c, g, or t
ngtgtcctgcatgctctttcctctgtgttcgcctcttagagcatgggagtctaagtgtaatggcacttcttacttggtgactggcttccaagagggcactccaagaaataggatatagaagccgtcaatcagtgtcttacaagacctgagcacagaatattggtatagtttcacttctatcatattctgttggtcaaagcagtaagatagtctcaccagattcaaaaggaaaggaccaagactctgcctctcaatgggaaaagtgtctgagaattatgaccacctttcattcataacagatatttcaccaaaatctcactggctttgcaatagagatggaattggtgaaaaaaaagcatgggcatttttttgtccgacatacataaattctaatcccggctttaccatttactaacagtgtgatgtgtatggtcctcaatttccttatctctaaaattgtggcagtaacataaatgccctagagtattgagagaactagtgaaaacaatatataaaatgtaagatatggcaggcaataaatatgcaaacctaacaataattgctgctgctgctgctaagtcacttcagtcctgtccaactcgatgcgaccccatagacggcagcctaccaggctcccccatccctaggattctccaggcaagaacactggagtggattgccatttcctcctccaaggcatgaaagtgaaaagtgaaagtgaagtcgctcagtcgtgtccgactcttagcaaccccatggactgcagcctaccaggctcctccgcccatgggattttccaggcaagagtactgcagtggggtgccattgccttctctgaataataattgctagcgtttattgaatacttagtaagtgctcagttcattgaatatgctttctaaatggtgtctcagtgagtcgttgccccttcctggagtgacgtgtcccacactggatggctcaaaaagagcagcacccattttctccagcttcagttgtgttcgtccttgagtctgctccgtttacctgtctgatcatttttcactgccttgttgcttggatctccatttccacatactgtttatttcccatttatgctgctccctaaggacccaagtgctgatgcacatttggcacttctttgacactgccttctccgtgtttgttctcagtgctgtcagggtggttcttgacagcttctcacacaatctgtcagcccctctgagcccgcgattgcctgctcatcagagccaagacactcgtgtctttgtttccgtgagtgctctgctgtcagccttcctttatacacggtggtgggtgctcagttgttggcctacccaggaacacgatgatctgcactttggagcaattatttaatttgaggcaattacttgtaggtgttctttaaagtgaagatttttccaggctgtgactaaattttgatacagcagcttcccaggcagttaaggaactacttcatacccagaaggttgtcgctcagtctgttgtcactggataaaggtggtgaccctttattttcgcagcaagctgagtttctattgcttcacgtcctgcaagcagtcagatggtttttgtgtttttaatatggagacaaataataaaatttggttttgatagaggtcacctattattagtctttctcctccttactctcaaaatatcagttcagttcagttgctcagtcatgtccgactcttcgaaaccccatgaatcgcagcacgccaggcctccctgtccatcaccaactcccggagttcactcagactcacgtccattgagtcaacgattccatctcatcctctgtcgtccccttctcctcttgcccccaatc

SEQ ID NO: 39285 - DNA, 1510 bp, Bovine  19866880597278
  misc_feature (1)..(1): n is a, c, g, or t
ntctatggtttttcctgtggtcgtgtatggatgtgagagttggactatgaagaaagctgagtgctgaagaattgatgcttttgaactgtggtgttggagaagactcttgagagtcccttggactgcaaggagatccaaccagtccattctaaaggagatcagtcctcggtgttctttggaaggaatgatgctaaagctgaaaccccagtactttggccccctcatgtgaagagttgactcattggaaaagactgtgatgctgggagggattgggggcaggaggagaaggggacgacagatggctggatggcatcaccaactcgatggatgtgagtttgagtgaactccgggagttggcgatggacagggaggcctggcgtgctgcaattcatggggtcgcaaagagtcagacgtgactgagcgactgaactgaaagcccttaaaagtagagaggaattgggcagtctttttagcaagttctggtttgtcctttccaatcacagtagcaaatatatatatacacacatacatacacacacacacgtatgaatatatgggtatacctctccatttgaactccaaccaaagagatttgaatacagtactgtttatttatagaattctttgcaaatgcctaagtcaagatctctcaccaacatcattggactcagggttccatctctatgtgtagctgacaatcttcacataattttgtgtaataaaatataattaaacattttttaaagttaaattagatccctcctctccttgtccttttctctctcctcctccttttctctctcctccctgagtgtaattagttgttccacacttttccacgtccaccatttggaagaagtttgtgacatcccagtgacttgatgaatacactcttcatttcactgcctttcctatttcagtcatttgttttaaaatgatatatgatattagaattatgaaagacagcaacagactaagcctcaaaacatccctttgagtgttcttcctcatgctagttatatagtcagtttcccccttgtaaattattatagtgaggaatttattagggaaaacatcatttaaaaattttaacagctgctataaactgtcatttgcagtgctcagctgacattcaaacagctgcagtctatgagtgagctttaactttcagctgctggaggtctttcaactcctgttcccatggaaatgaggagggctggatgggtggaagggaagtgagggctgacttacaacatttccccatacattatttttcttgcctcctcacaatttccatggaaatgagggcgtaagtgccactccaccccaagctttggagagcaatcgttcatgtgtaaacaacagtggatggaccttaaacaggcatatacaaaactaatcttaacctttccttccacctgtgcagccaagcctacttgcaaacatattcttatttgatctattttcccatttaaaatgatttcttttagttaacttttagaaagttagt

SEQ ID NO: 39286 - DNA, 2020 bp, Bovine  19866880609914
  misc_feature (1)..(1): n is a, c, g, or t
ntgcttgctgaagccgatgacagtgggttatgacgttcttaagtggaaacaaatagtttgggagaaacgtggatgaatgtatatccttcgagagtttggaagaggggatacttttttttttcagccacaccatgaatcatgcaggatcttagatcctcaaccaagggttgaacctgtgacccttgcaatggacgtagactcctaacccctgggcctccaggggagtccctggaggaggaactactaatacctctgcccacgttcctcatttggaaagcaaagtataaggatttgagaataaagtggcagcggtttgacatttgcggcgaacaagatggctacctccatgctcggatctctgctgcggatcgtctggcaggtggttccttcatcagcttcaggccaagctcgaagttactatgtcgattggagaatgttgcgtgatgtaaagagaagaaaaatggcctacgaatatgcagatgagaggctatggatcaattctctcaggaagaatattattcttccaaaacaccttcaggaggtggctgatgaagaaatttctgcccttccccaggatagctgccccgttagaatcagaaatccatgtgttatgatgtcccgtccacgaggcgtaaagcggccctggaggctcagccgtatcgtcttccgtcacttagctgatcatgggcaactgtctgggatccagcaagaaatatggtgatcagctccagaacctactgaccttgcaggaaaaccatttaggcaagaagagacttttctaatagataaaaacctgatttttatttgagtgttctgtcagtgaataatagttttctaaacatattgttcccaagcatagtgcaaagagtaattaaaaaaaagaagtttgtgggggaaaaaaaaggatttgataccaagtaaatgaagtattatgaatattatgatctctagagtagaataatttcatttattgagcactttttctgtgctagaaaaattcattttaatccttccaacaaatctatgacatagtattgttatctttattaacaagtggaggaactgaagctttgagggtttaaacaacttgtccatgaaggtgctacttcagatggccgggctgggctttttgaaagctacaaaaccctgggccttaactatttcattatagtgtctgtatttaaaatagacagtcagcaaatttgagacaggttactgactaaaagtttgtaagttatttgcttagatcatagaatacattttcccatggaaggtgattggtgatgacgactgagttcttatcagctcacaaatgtatgtttaaagtataatatacgaaaagacactttttatctgccacactaatgattaacctagacagcatattaaaaagcagagacaaaaaaataaataaaataaaataaaaaaataaaaagcagagacatcactttgctaacaaaggtccatatagtcaaagttatggtctttccagtggtcacgtatggatgtgagagttggactataaagaaagctgagtgccaaagaattgatgcttttgaactgtgatgttggagaagactcttaagaatcccttggactgcaaggagatcaaaccagtccatcctaaaggaaatcagtcctgaatattcattggaaggactgatgctgaagcagaaactccaatactttggccacctgattcaaagaactgactcattggaaaagaccttgatgctgggaaagattgaaggcgggaggacaaagggatgacagaggatgagatggttggatggcatcaccaactcaatggacgtgagcttgagtagactccaggacctggtgatggacagggaggccctggtgtgcctgcagtccatggggtcgcaaagagtcagacacaactgagtgactgagctaaactgaactgaacgattaaataacaaaataaaaatatcactgatccaagaagtctttaaaaattatcttaaatggcaggacttggaaaatgtcaataaagaag

SEQ ID NO: 39287 - DNA, 1843 bp, Bovine  19866880653128
  misc_feature (1)..(1): n is a, c, g, or t
ncgtactggagtaggttgccattgtcttctccgagaaaaccctctagtgtagatttaaatataagtaagttgaatttatagtagttatttcctgattggcatttttctaatgccaactaactaccattcccatatctgcagctactgctaagttgcttcagtcgtgtccgactctgtgtgaccccatagacggcagcccactaggctcctctgtccctgggattctccaggcaagaatactggagtgggttgccatttccttctccatttccatatcagggtgcttcaaatattaatcaagtccaaggtatagactaaaactaacacatatcacactgtgtagcctgtagtgtcttcatttaaattgtagagtctaacagtagggtaggactgtaagagctatagagaggggtaagattaaggaggaaacagctcactgcggtttatttctctcctcatcccataaaggaagcagaaagaaagtgctgtaagcaaaaggcatggagctaaaaacataggcctactaattgtgccacgcagttatgtttgtctgagtgaggacctaggagcctggtgtatggcgcctgcagagcaggctggaaagaataccccggagccaggtcattagaagatctaggtcattgccaaattgatgaaagtgtgaattattttggtagttgctagttgtgtgaccatattttctgaactaaacactgggcacatgggcttagcagatgtttgtaaccattctgaatatgagaagcaatctggagtacgaaagaacatagaatactgaattttttaattgttttggtagcttataggacttagaaggtagaatatttgacatcagaactaccttaaaaaaaaaaaaaagtctggtcccagaaatgataagaagtcagtaaggttttaagacacagaaagatcataactgtgctagtaagaatgttcactggaaatggtgtctacgctaaactagaaagggggataaagaaaggaggaaggtgacaactgaaaaaaatacttataaagttatgaaaacagctcaggaggaaaggcctttgttagatggcggcagtacaggacttgcctggcggtccaatggttaggatttcacgctttcactgaagagggcctgggtttgatccctggttgaggagctaagatcctacaagctgcatggtgcacccataaaattaataaattaaaaaataataaattacaaaaaaataaaaggagacagtagaaatacaaaggaaggaccattaaaaccaataatagagaggcctttaaagcaagtcttccttgctcattttggtcaggccaagagaacccttccctcctaaaacttctttcaaactagtctatacaacttatttaacaatcacatatggctataattagtttttcctgggcatgaattttcttaatccaattaggatgccttatggtaaaaacaaacaaacaaacaactgctttatttaaacttggtatctcctgctttaattgaaacaaaaagctgaatactcagtagatgcttaatgcagatttgtcaggttaagcacattcttcatgtctcagggttcacaaggaccgtgttaagtagtcaaaatattggaataaaaaaagagataaagactgtgcctatatattttccttgagtatgggtattataggagacacaatgacagatagctgataagtagaaagatacagaaattcacttaacataggatatttctgttacctaaatgagaagactgtgataaccaattaaaaatggcagttttccttgatatgtttgacagagccaataattagctctgctctgtggggcaat

SEQ ID NO: 39288 - DNA, 700 bp, Bovine  19866880794049
  misc_feature (1)..(1): n is a, c, g, or t
nttgtgtccgactctgtcgaccccagagacggcagcccaccaggctcctctgtccatgggattctccagacaagaacactggagtgggttgccatttcctcctccaatgcatgaaagtgaaaagtcaaagtgaagtcgctcagtcgtgtctgactcttagcaacccccatggactgcagcctaccaggctcctccgtccatgggattttccaggcaagagtactggagtgggttgccattgccttctccccatgggattctggagtagactaaataaaggtggggtgccctacttaggacaaaatgtaaactatggttaaagggtgcctggaccatgggggccgggtcagaagagaggcaggcccaggcgcatctccactctcaccctgggcgcagtcgaggccggtgaagccctcctcgcagtaacactcgcccgtgtcacagaagccgtggccgctgcagtcgccggggcagcgccgctcgctgcagtcctccgatatgaaatcctcatggcactggcagacgccacgcacgcattcgccgtgcccgctgcagttctcagggcaggcggggtaggcgcagtcggcgcccacgtagggcggctcacacacgcagcggccatccacgcagcgcccgtggccactgcaggcaccgggacaggcgagccgctcgcagtcggcgccctcccagccgtgtctcg

SEQ ID NO: 39289 - DNA, 1137 bp, Bovine  19866880818364
  misc_feature (1)..(1): n is a, c, g, or t
ntttgggaggatctggatagaattctgctctactgaatctgtctacaattaaagtacttctaaattttaaaagaatatatttgactgtttcattctgtcagtgaattatcttttctcttggacttaataaacatactgttcccatgcatagtgcctagtgttgagcattaaaaagtttctgtgaaaaagaaatgttcactgttcaattgaatatcattttatgataagttcgtgttctagtctttgttgatttaagtatttcttgcataggaaagctgcttcccacccccacagccagcctctctgattatcactgattatctcactggtctaagcctctgtgtcctttctccctgccacagtctcaacagccagagggacggccgggtctaaggctacatgactgcacaagctacagagtagtggtatcaggctttcccaaaacagcagcaccaatatacatctcacccagaatatatcagtgtcccatggatgcagatcatgtctcctccttggtaaattcagacatcttatttcctggtgttagacagatatcaagttgggggtcttgatttccatttaacatcacaaatggtgaccatgactttattcattgcattcccactgtgtgaaaagtttatgaagaaggaagacagtggaattgggcagagggcaagggtaaaccaaaatggcccatcagagtggccctgaattgggctgaagtggccgaggctgacatcctgcctgggtctgtcttaggatcagttgcccatgtgcaggcagctctgcagctcaaaccacccctccttccttgaaggtgcatctgggaggcattttccagggtcctccctcaaggcaggttggaagagccctgatgagagctgagaccagtcctgcattggccacttggcagcttgtggtacttcagaaaagtccttcccttcccagagcccctcatcctaccaggtatcaggggctgagatacagcccctagtgaccccgtgtacagcgcttcagcagtcacccgggggttttctgtgccccccacctcacaagccccttacaggccaacagccaggcagcaccatacttcctggggcagcgcggctcctgtgtggtctgaggacctgcctgtgt

SEQ ID NO: 39290 - DNA, 1592 bp, Bovine  19866880969680
  misc_feature (1)..(1): n is a, c, g, or t
ntgctgaggatctctgcctggctgggggagggttgcagttctagctgccaataacaaaacttaagctgagatccctacagcacaagctttattcagcggtcaaagaatggagaagcgggaactaagtgcacaggtcaaattctggcccacctagcaagagagatttaattttgaagagtaaaaacaaaggaaggaggagtgaagttaatgatggcgagctgtgtacattagtctacctgagaaggaacagtgatttttcaaaggagtggggtgccactctctttttatcatttttttgactcctaatgtcccagtcaaggctgctggtaggcatgtcctttaatatgccactatagaaattcagggtagagtgagactcagggtctgttggaggtcatattcaccatcttggtcccagctggttctctctccctctctttctctctctcttttttttttttgtacctttctttctcatctctggactgtttaaagattaatgttaacttctgctaaaggcataggttgaatggttttgaactaaaacttggagcatcactggcaacataagcggtcaatattaacttctaactagatagtaacttctgggggtccaccacggtgccttacccaggctgtgtatcctccacacccaccttcatagtgttaagcagtggattggccataaagttcatttgggtttgtccaggtactatgatttggccaacccaatataaagtaggtgctcaaggaatacgttttggctatggatccccacccctgttccctcactgtctccacccctgttcctgttctgtgtgcagtggtcgccccccagggactgcagctgctcaagagcacggaggattccctgctggtgagctgggagccctccagccaggtggaccactacctcctcagctactacccactggggaaggagctctctgtgaagcagatcaaagtgcccaaggagcagcaccgctacgagatccttggtttgctgcctggaaccaagtacattgtgaccctgcgcaacgtgaagaaagacatttccagcagcccacagcatttactggccaccacaggtgaggaagcagccaggtttcccaggagaggtcctgctctatacatcttcttccattgtccccacaagtacccttctactactcaggccattactctgctttggagtttgtaaaacacagctgccgcaatcctaggttctgaagaaaagtctccattcttattcccctcgcgctgctcctccaagccagtgatggagcctgctggattgggaattacaggctcttctccatttcctgagattgttattcatcagttgctcagttgagtctgactcttagcaaccccatggactgcagcacaccaggcttccctgtccttcaccatctaccagagtttgctcaagttcatgtcccttgacttgatgatgccatccaaccatctcatcctctgccatcctcttctcctcctgccctcaatcttccccagcatcagggtcttttccagtgagtcagcttttcatatcaggtggccagagtaatggagcttcagcttcaacatcagcc

SEQ ID NO: 39291 - DNA, 917 bp, Bovine  19866881051867
  misc_feature (1)..(1): n is a, c, g, or t
naatttcacaatgaacagggaaataaatgtaggtgcccttttagttttgcgttcaccaaagtggacatccgggcttccagacccagccctgtcacttcccaagctgggcaatcttaagcttaatttctctaagcctcagctgtctcatatgtgacttagaaataataataagacctaccacacaggatcataatcagaactaaatgagataattcatgagcagtgcacagttagtataatgcctggggcatggtaagctctcaattaattcacagctaaagaaaaagcctctagaagcaaggaaagtcctgccattttccagctcactgatggtgattcactagtccaccgttcatgcaggctgtacagtatacactgtatggttaaaaattaatgtatattttattctttatgatcgcccaactatataattctttcacatcccagctatgcaatctgttaggcaactgaaacagtgaattcaattcttgcaccatctcactcttattctcaccaccccaaccagctactgccaggactgaattgaaaagaactacaaaacttttcaagaaagtctccaattcaaatatcccttctttgccggctccaaggattagcctttacccagcggcatcaagctcacagcctcccaacatgacttggcaggagcacagagtgtttgcacgaggctcacaattcaatacgggctcagagcactgtctaaaaactaaaaattacataggacatcttgcatataaaactaccatgatttcaaattcttttctgattaataaattacaaacttactgtcaaatattactgattcagagcaacatttgtcatcatatattttcttaatccacagatgctaaatctattgctactcccctgcgaaagtctttaatatctcttgacat

SEQ ID NO: 39292 - DNA, 965 bp, Bovine  19866881156636
  misc_feature (1)..(1): n is a, c, g, or t
ntatgtttaaaagatatggatcatgactaaggatgacatctacagagaagaaacggcaaacatttgcaaggactttgtttttctattacaccaggacatgcaaactaagactcttggagaatggtttaaaaaaaaaattacaaatttaaatcctaactaaaattatacttataatagttcctagtaataatgtaaagactccaaaagttatttgatttttagatagctcaattcttaatgtctctattatggcccactggtaaaaatgctccacttcagaaatactcaattatatatgtgtaaatgtaggtatccctcacctaataaccatatatgtacatacaaggcaaacacatgagagaatattatgtttggcactataaaacttctttcaacctcactacataagaaaccattaacctaagttttactcctgggatacttgaaaagtactactaaggtataacagtgtttagttttataaataaaaccatgaaaacctgtagaccttggtgcagctgtaacaatgccaacagcaatacttctattttaattcccaggaagttatgcctcaattgctacacaagtacaactatcatattagaaaagaaataacagccccagaggaatgtgcaaggccccacctaccatagacctgggcttgctgatggccaccagactagtgaggaagtcttcgtcgtgcagctggctgaaaacatgggcgtcataggctaccataatggagacttcttccatcatcttgccagctgtctttccacagcagcagctgctgtcccagctccagaccagactatccaggggaaaatcctattgcagcttggtgccagtgcacacacccacctgagtttgagggggtggagtgtcaaaaatccagaggaggggaaaaaaaaaagcagctgctatcataggcttgtctagcaattcacccccagtagaaaactgag

SEQ ID NO: 39293 - DNA, 809 bp, Bovine  19866881206642
  misc_feature (1)..(1): n is a, c, g, or t
ntgatgtgatgcagttgtgagggtctgatggggaagtttgggaacacttctccctggagacactggcctggctgatgtgtgcttctccagaagctaacctggtcctgaggtttttagaagtgcttttcagtgcactttgagcatgttaacagggtaagatttttcagtcaacactttctcttccatggtctgagttccgctgagtgattcgttaaatgaaaaatatctgaactgtgccagctccaccctgtacatgcatatgccattcttatattccagtgtgtttttccatcgcacggaatgcaaaacatctggagaaaagagagattcttcccctccctcttaaattaactaacagtctagccaggtgtgagagtgtttcctgaccttagaaattattgtgtcttttttggtcatgttaataaggcacataatacaaatttatttgcaatccaataaaatatcccatcctgcttttagaatataataagcaataaagatatttcttgaacactcatgttctagctaggataatacactttgaaagtttaattggcaattcaaggccatttgtaattaaatgctctagaaattcaagggcaaaaatggttgccatttaacatggtcctagaaggcctcagtggagtggccagtgtaggggctgaccctggagggatgtgtgatgttacctgctgtgagcccttgaagggcagggaccaaggctcgtcatctatatatctaaaggaaccatgtctctaggacccaatgatacttggcaattaatgctcgttgaactgacttaattgaca

SEQ ID NO: 39294 - DNA, 684 bp, Bovine  19866881237248
  misc_feature (1)..(1): n is a, c, g, or t
nacctgcagctctttagactgccttaggtagattgtagtcttgaggggagacgcacagcctcacccttcgctctgccgaatccccggaagagcagtgccggggctccagggtccagagcccgttctcaacccggcactggctgcttgtttccaggtctgcagccggggacggaatataagatcacagtcatccccatgaggggagacctcgagggcaagccgattcttctgaatggcaggacaggtaagaaccgcgtggaggcactgtgaatgcatcctgtgctctcattctgctatattcttggctgactcctctttggataaaaactctgtacttctgtgtatagagacagccagtctctctgtgtactgacatttctggcggaggagtgcggggcaggagaggggaagcaaacttgttctatctcacatttttcttgctgttgaaaatctccacctggctcttggagtcaaggggataggccgtttccaacacctttctgcttattttaatagcttcaatcactgacttctttccaaggcatttattatcttggacttaggcacacggctccacagtacccaagacaggtgatttataactttttgcttgcatttccggtggtttttcatgacaaacacactcaagggagtttgctttaaaatgtcaagggatattaaaga

SEQ ID NO: 39295 - DNA, 1586 bp, Bovine  19866881757389
  misc_feature (1)..(1): n is a, c, g, or t
ntaaggtattggaatcagtcagagcttagatggaacagtttttgaggcctacagcttcaatgagaatgcccttctctatatactgttctcatatttgtttctttctgttccccctgctgcatgtacagatttgtcaaacaaaaaaaaagacaggttctttttttcacccacatgcaacagttgcaacagggttacaaccattcctattagtttttaagtctttttctaagattttttttgtatgtgaaggagaaaaaagacatttagcctatttttctttaaagcaacacaaatccttatctcactatattggttaacttcaattttagactgaattatagaaattctattttctcttagattttggagagaaatatatcactgaaaatgtttattgtagcatttgaaaaataaatgaatgctacccagtgctaaaaattaagactgtaaggtagtatgtaatatactaaatctggtcacatgtggaatggtattggtctgattccagggagcagattaaccagctgtagtccccaaactgggccacagaaagctgatacagctatgcattcagagtgagctaattaagcttatttaaaactagacaatgagacaggaggggaagaatggtagcagagctatgtaggacactgttctttaccaccaccaaatgctacgttcactggaatagtgctggcctttgcactgcagatgctgagaaacccgaagcggtattttttatgtcagttgccattgggcaattaggtcagaagtaaatatacattcttgctgaaaatattcactgtaggcaggaagctatagatatttatgctacacaaaatttaattcaagactaatatgctgggacccttgcctgtccggtcccagtggttaagactgcccttccaatgcaggggcatgggcttcctgatcctacagctaagatcccacatgcctcggggccaaaaaaatcaaaacataaaactgaagcaatactgtaacaaattcaacaaagactttaaaaaacggtcctcattaaacacacacacacacacacacacacacatgccaaacagcagttgtataaaacaggctgagtatgtctgtcttcagattcacctttaccgtaccctactatctgaaaaggaaagcagtgggaaagcgagagaaattgagaacctttactgtagtcacctaccttaaaggtagtccctggaaggaaggaagtcaaactggctagaaatcatcagcaggagtattcaatgcatgataactgcactgccatttttttttctttctgaatttatttttttattgaaggataattgctttacagaattttgttgttttctgtcccacctcaacatgagtcagccataggtatacatatacccctccctcttgaacctccctcccatcttgcactgccattttatataccaagtgtttaacatgggaagaaaaactcatccctcctttgcatttttaaaaacctcccatttgctccttcactccacagatagatactgataaactaccgtgttgcaggcaaagccagccaagaacaaatgctcagtgcggcccct

SEQ ID NO: 39296 - DNA, 1079 bp, Bovine  19866881869358
  misc_feature (1)..(1): n is a, c, g, or t
nttactttgtagaagacaaagcttcactatctgtggcctgaacatcagcttctcatccgagtgatcatgaaagctccttttagaaaaatgatggttttgaaccttggtaaaacacccatcactgcttacagtctccagccccttgtgtagggacctgactattctagatctactaggtggcgttagtaggtagaatagggaaaaggagtccaaaatggcggtggctaaaagacaaggaagagaaaagcccacgaaaataaaacaaaagaaggtccgaggaccagagtgaggacctcaggtaaaacaaacaacactcctggctggcccaatttacataggacaggtccagggagagataaacatataaatagaagagccaaagctagcgcgctctctctctctctctctcctgcgcgctggggcactcttctcctcgtgtctttggatcgatgtgccctcacacctcaaagatggattttcctgctatcttctaaataaaatagagctgtaacactaagctgtaacactgatttgtctaagagctataacatggtccattcgagacctgagagctataacacagtctatctaagacctgagaactgtgacacaccgagagggctttaatgtccgttactccaaatctttgttgtgacgagacaaagagccgaggaacatatactcgcgtgacagaactaagggcccaagaatttatgactataaagtacttgattatcacaggaaatctcaagaatgtggtttgcgtgtgtggaaatgacaaaaaaaggacagtaagagaatatcaaaagaccataaatagatgataaccacagagaaagaaattgaaatcaaagttagagtgaataatcacaatagaacaacagtatgttatttttttcattaaagtcaaatgatcagaattaggaccatgaatctactataattgttcttcattttcagaatgcaaaccgtaaaaaaaaaatccttttgttttaatcttggttctctttgctgcatctgacattatacaatgctgcttatcggtaaaatcaagaaactcttcaaagatccctcttcct

SEQ ID NO: 39297 - DNA, 1179 bp, Bovine  19866881308901
  misc_feature (1)..(1): n is a, c, g, or t
ntgtttatttgtaaattatgaggaaaggtctggaaagctaccagtcaaacttctcacagtgcttgccttgaggaagggactgagaaaggaggtggacagtggaggaggaacttcactttttaccctctcactttcacagcgggtttgattttgacacaggcatgtactgctttcatagttaatgtttctatttaaatagcaaaggcagaaaacaaaaaactgtcaaacccatagtggaaaaatggatatttaaactgcaaaccaacggagacatgacaatcgaatggaatgcaagattcttgacgatctggacagcaaacaaaaacaaaaaacagctctaaagagctaatcaatttatatgtactataatattttttttttaattagaggataattacaatattgtgatggcttctgccatacgtcaacttgaatcggtcacaggtatacatgtgtccccgcttcttgaactccctgataatattcttatgttaacgttaaatttctcgagaatgataatacttgtggttacaaatgagaacaatacttaagtagttaaagtattgtgatgtctgcagtttactttcaaatgtttcagcaaaaaaaaaaaaacatatagaacaagagaaagcaaacatggcaaaaaatgtggagcaagttcgttaagtaggtgaaaactgttaattattctttcttttggttttctttagatctgaaactttggaaaataaaatgttgaaggaaaaatgtcaaccagtagctggaacctgagtgtcccaggaggcgtgaaacctgagactcccaggaggcgtgggatggcaagacagcatctccatcggagcgctgacagccccagggcacccaccttggtggtaaacagggcatcgacgtcatgccaggcccggagcttggcgcgagcggccagcgctgtcagcacgtactgtttgtctgggatctgaaagcagaggcccagggaaattaagagaagcagaaatgcatcaggggaggggcttgagagttctggaaagacaggcaaaaatagtccctggtattgattctgccccttacgatccacaaagctcttgggtctccaagccccgcactgctgcgggctcttcagttaaggcctccctcacctcccacagactcactccgttctcctacccctaacgccaaggc

SEQ ID NO: 39298 - DNA, 1032 bp, Bovine  19866881653758
  misc_feature (1)..(1): n is a, c, g, or t
ntgcatacacattatactataatgctaatatacatatatgtttgtaaataataaggtgaagagacaaataaaagcgattagaggtggtctataaaaagggattggggtgggggcaaaagagggctctcatttctccactagttggattttttttcctaagaatgtattatttttatgaatttttaaaagaacattaaaggaaaaataaaaaaaacatctgctaagacaacagtgtggggagaagttcgaatggccaccgtctgatactctaccgtctctgagacaggttcttggcatagatctgactgacaaaatcttgggcttgaaattttaggggtgatgcttctccctccctacaggccttgaggtgctgggaggagaacagctcgctcagatgctgcagcacttgggggtgcggcatgtccttcgctgtgcagaagtttaagagtgcataaaacatgccctccagccacttgatgttgaggcttattccccctaaacatcagtgagaaaggaaacaccagtgagcaccacctaaaaaggtctacagggaaccgaggacaaaccccagacagtgaacggctaccttctgtccaagacagtttggttatgtaaacttctttaccagaccaagagccctgggtgtgccctttataacacgtcatgtgttaaccctacctacagataggttaatgtagacattgctaatgacaaatgcatcttgggaaatctctggaatggttcttgcaataaggcgcactgcaagattacagtaaggaaaagccatttggtcccagaggctgcattcttttgtttaaacaggctctcctctctggttgttgccaactcatccttagaaggtctgattaatcacacttctcagcttttcctttaaaaaggctgctttttaaaaaaattttttttagatttttaaaaaatgtggatcattttttaaagtctttgctgaatttattacaatattgcttctgtttatatatacatatatatatatacacacacacacatacacac

SEQ ID NO: 39299 - DNA, 2333 bp, Bovine  19866880434738
  misc_feature (1)..(1): n is a, c, g, or t
nccacatgccataactagaaaagcgctcatgtgccccaagtagagaaagcccatgcacctcaaagaagacccagtgtagctaattggaagaaaagaagaaaaaaaaaagcagatttaggatacatgactgagagtaggctttttggaaacatgggttacccagtagacagactgtgttattcaggattctccagagaaagagaaccgataggatatgtgtatatatataaagagatgtgttataaaggaattggttcatgtgattatggaagctggcaagtcaaaatctgcagtgtggaccccaaattggagacctaagagatgaaggtgcaggtgaaatctgaaggcactcggctggaaattccttcctgaacagggaggccactcttcctgttctatttgggcattcaatgattagataagtctcatctacataatggagggcaatgtactttactcacagttcccaactaaatatacatgttcatctcatccaaaaatgccttgcaagttaacacataaaattaaccatcacacagaccaagtttatacttaagtgacagtgcaagtggttttgctcagtcatgtccaactctttgcgatcccatggactgtagcccaccaggctcctctgcccatggaactctctgcaagaatactggaatgggttgccatgccctcctccaggaaatcttccagacccaggtctcctatattgcagacagactgagccacctgggaaacccttatacttaagacaccagcaaattacggtactttaaaagaaaaaaaaagactcttgaaaataatctgatgtgtgatatttcagaaaaaaacaatcatcatccgaaaaaattggactctggctatcttatccttaattttacagtttagcatttttaatattttgattagatgcagggtggagagggaccaaaaaaatctccataatccactctaatattgtagtgcttgggacccttaaaggccttgccttctcgtcatcactagaaatttcaagccatcactatacgaattttttctgtccagtgctttagaagtgataatgaaagtgaattgaattcatttggcaaatattaggcctgccaacaatattcttactttctgtagagattgtgaggtcagcatagcataaggggcagcagcaagacatcgaagtcacagaaagcctcatttcctaactcttttcaacacttttctatcagtgggatttttggcaagttacataactctccaagttgcaatttccatatctttaaactaaagataattgagcctatttcccactgctgtcacgaggattaaaggagttaaagcacttggaactctgggcacagtgtctgacatatgataactcaataaacattattctcgtgatagccatagaagaagaaaatgagttagggtaaaaagcatacttgttggaccgaatccatcgatactttctacatgttgcacaacagatattcctggtaaggaggccactgaagaatcatcatggaccccattcctctatttttggagaccatattctatatatcaagcatattaataaactcatatcccatgttaagagaagcattcagaaggtaaactgttttgtaagattttctaaaaatacttttgctataagagctatttgaaagggaacgtgttagtcactcagtcatgtccaactctgcaaccccatggattgtagcccaccaggctcctctttccgtgggattctccaggcaagaatattggaataggttgccattgtcctctccagggcatcttcccaaaccaggaattgaacccgggtctcctgaattgtaagcagattcttaatttcttatatatcaacttggaatttcaggaattccttaaaagtaaaaatctaaaatgtttcttacaaactggaattttcatagaatttaatgtttaatgaagttgtcaatattttgtgtgataaacagtttaataaacatttaaaaatttgactgcattttaaaaaatattttggagacagtaaagctgtatacaagtaacaaatattcttgaaagttcacagatcctagatattattcttatactgcataatggttcagcggtcttgcataagttttaagttcttcagaaaagtagaaagagagacaaagagtgggggtggggagtcagaaaaccaagcttccatcatgagttaaaaaggtgtttataaatttttatttttaatcatgaaacatttcaaacatacagaaaagtatataagaaatataattcattccattgcttattgcatctcctgttttacttacaagataatgtacttt

SEQ ID NO: 39300 - DNA, 1485 bp, Bovine  19866880439281
  misc_feature (1)..(1): n is a, c, g, or t
nccagggattgaaccctggtctctggcatttcaagcagacgattttacggtctgagccactagggaagctcagccactggtaaagatggatctaaaaataactaattaaagggtccttttaaagaagtcctatggacctacagtggaagggacttgagattctgcatgttaattaagagaccctgaatatgaactgggcatagatattgcttttcagctatctcctgtaccaagtaaggcagcagtcttcaaacaacttaaaactcgagagtaacatatgactccttgttctccagctaccattttagttagctccactgctgaaaactcagggctattcttttcttgcctgctgtccagctactgaagactctgtgagtggctgtgcttgatgccattgttccctttcctcatctcctccctcaactggtctcacaaatacaagtttggtcactgcctaaaaggcaccctctgagcatttcctaagagcgcagcccacctgcttgtggtttttcatatcattctcaagctcgtgagaggcatgtttcctactttttagtataccagctattcaaaaagttcccacggattccatgagatcctcctgccttttgccaggaaaacatcagagcatacagtacaaggtacctgtaaaattcctttttttgtgtccagatatttttttttaatgtaaaaacaacttcagcttaaaaaagttaaattccaaagccagcaagttctagcactgaggattctcctctattctcaagaacagggaaatcaagggagtttccattttaaaccatttaagaatcctgtgctttctgagtggaatccttgagagccatgacttatcttgtgtttgtctcagtgtttggttctcagagacaagggtcaaaatgactttcaaaaggctggctttccccgggggctactttttatgtagaagccctcatctcataaacaattgaattagttcacattaaccactatcaatggcaaaagtacacaaaacctaaagaaatcacctaaaataatgtttttgaaccagctgctaaattaagtaatgtatttgttttattgcacatttgcataatagggcaaactagaaactctctgtaacagatgtgctggtggcagggagatttgattactggcttctgttattaatcactgcacgaatcttaaatgatttgtttctacagtttgatcaatttacatctcagaacatacatttatgtacacaatgtagagatgaagcatctgttcacacctttctggaggcatcaatatatttatggaaattgaagttttgttaaaccaaggcacaggaaactttggtcaaagactgacaacttttggaaagatcccattatttattcctcgtcaagctagttaatagaaaaccattttagtacattatgttctgatgtctattgtctctttcatgggaaacaaacaaaatatatgctattttgaaactca

SEQ ID NO: 39301 - DNA, 1556 bp, Bovine  19866880578657
  misc_feature (1)..(1): n is a, c, g, or t
ntatttcttaatataaagtatttctttgtgtatttttcatagtctatagcttctaccggagaaggcaggggcgccccattccagtactcttgcctggaaaatcccatggacggaggagcctggtaggctgtagtccatggggtcgctaagagtcaggcacgcctgagcgacttcactttcacttttcactttcatgcactggagaatgaaatggcaacccacttcagtattcttgcctggagaatcccagggacagaggagcctagtgggctgctatggggtcgcacagagtcggacacaactgaagtgacttagcagcagcagcagcagcatagcttctacatgcccacaataagtagaaagcagagatttactgggcagacagggtgatttataatgataccagcttatcttgctttctgctgccctatttgatatggttaattaacatttcttcagcttctaccactttaatttaagagagaacgatagtacattttatatatgcaaaatgtattttcagctgtttacacgtgcaccatatctacccatacttcttggagggtagaaacagcacagaaaaagccttttacttatcatccttttagacatggtgtatctagtttcttctgcttgagcacaagcctgacgagtgtcttgtctctttacatcttgttctttacatagttcttgtctctttacatcttgtcttctgtgtgagaatgaaactgaccaatatggccacaaacttagaatagaattttagatacgtcatcactgacataataaaagccctcttccctcactgccatgacataattcttttgatccagcccaaaatagaattggccttttctttcctgtttctttgtcaacagctatttttgcaaggttttcattacttcttaattgttcaaacttcctatcttcatttttcttgttaaggaccgattttacaaatgagttcattatctctaccattttagactcatcattaatttcatgctcctcatttattagtggacctattttctctctgctacttcttttctcactgcagtatctgtaaaatgccattttttttttttttagtccccttcactagctttattaagttctttctacataactggtagctttcctatgtttaattgatgtatctctctctttattccaaatagcaatttttcttcattgaatttaatataagatggtaaaatacatttgtatttacacttcatatttgcacacctcattcttcaaataaattttaaatctgctctggtcttcttaaaataccaacagaagtactagcagaaagaaaactgagacaattccatatcttataaatgaattactgtatacaataaatttcttcatccttaattagtgaagatattcataacagttttatcaattaggctgataaagagcattatttaacaatgcccttggccagggcacataggaaagccaaggttagaattttagttgctaaactgaagatattagcaattttagcaactgggggtcatctgaggaaagaatgtatagga

SEQ ID NO: 39302 - DNA, 3627 bp, Bovine  19866880588987
  misc_feature (1)..(1): n is a, c, g, or t
ngatttccggaaagtaaacagttaaaccttggatggcaccatgtagccaatacccctcacccctactcactgtaccatctacacttttgttcaatttttaaaaaactgaattcaggtgtatcagtttggatgtggacaaagtttaaagacaagctaaggttgcaaacacaagtatctacaagggtcaagcagttggaagaagtgagtgaagcagaaaaagcaaaagctggacaataaacaccgtcagcttccatgttcagctgatgttaggtggggtaggcactgcagcaagctgggtaagtcttggggcagttgcctgtcagtaatagcctattattgccatggggaaatgtcagcccagggttaccagatcttccaactttttccacagtctggaaaatacaatttttacttgcaaactgatttaaaaagttggtttctaattcaattcaaagtaagttataggctgaactaaacccacttgtcagcctcaataaacttttaactggtttgtattctctgcttcagaattcagttctcacatggatgtttgggaattgcatggccatggtctaaaaccctgatgtgcacactcaggttaccgcaaccaatcttggatgagcttcacgggaggtaaccagatgcaagggacagtttattttaaaatgttgcttctacatctcctctatttaagaaactatttcagtgctgtgtatataggctcttaagatacacagatcaattgtagaatggctctgttccaaacatgtaacaaagacaggtaatttctgtgttcatcactaccactctggaattgttttctcctgttgccatggtttccattctgaaaatcagaagcattgaacacttccttcctattcatcctcagggacagagtggaaactaacttttgaaaagaaagaaaagcttgtgtgcaagtcactacaaagtttggcccactaatgctcttatccgaagaggtaatttagcccctggtctccaggaagtaataaaaacatgggctccttaagtctgattatccttcaagttctagtttagcctcctcatttcttagaaaaataaaactgaggagtgaaaagtattagctgttgtgttgttcagtcactaaatcatgtacaactatttgcgaccccatcaactgcagcacgccaggcttcccagtcttccactatctcctggagtttgcccaagttcatgtccactgagtcagtgatactatctaaccatctcatcctccgccaccctcttctgctgccttcagtcttttccagcatcagggtcttttccagagtctgctcttcacatcaggtggccagagtattggagcttcagctggtggttatcagatgtcaactccacagactctcatatgtcataaaattagtgctgcaaagtcttcggaaatcaatgctccttaggtagagtagcaattggagccagaattcatttaagtcagcctggtggtgtttctgcagtatccatgcactacccacaggcttctcagccctgcctaagaagcttcaaataataggaaaaatgaacacaaaaaggctttaaaaatggaagcagtttgttggctctttactattaaattttcagaggtagggtggacttcaaacacaatttgatcaaccatttcattcccatcatggtgatcatgatcatctttatcaccatcatagcaaattgtaaaattatgtttatatgtgttaactactcttctaagtatttcacaaacatttactctataattttcaccatactcccatgagatgggtactgttacaacctgattttatccttgagaaaaccgaggcactgagagcttaaaccccccaagtttgcattgtagggccaggatacaaacttgggctactgattccagagcccttgctcttagcctctgcacaaagattcagattgaactagtcaaggataatccttagggatcagtggttttaaaaatatctctcaggtagattgtgatatgctcccaaggtggaaaactaatgctgttaacagggggttaagaggtgaaactgatgtagagtaggcaatctgaaggtccacggcaaggaataccatgttggaatttaggcctaactgctgctctgcgatgcttacatcccaatggaaaagaggagtaaacaccatcaactgatggaagaaacttctggatggaactgctgagcactgctgagcacaatgactgctcctgcagggaccctttgcccaaagaactcagatattacagccacagtatgtttgcagggtgtccattacctgggtattacaatttttatattatggcagtcagagactgattataattaggaaagagagaaaaacttcccagggacatggtgcttcactatagatcccctgcctctaactctcgatgcagaaatctttgcaagagtactttcatggatctcaatgacaacaattaagcttgaagagcatgagaagacattttaatcagaagctaattaagaacaatgggggcatatgtattactgatgtgtctcgagtactctgactgatctgggagattattccattaatatctggatgtaaacagacaccggacattttctcaggatgaagcaactgcactctgaagtttccacctccaaatctggcttttacttattagatgacaaataaaaatgagcaacatttacctttctggggaagatgtcaggtgctgattccacattttaggacagcatcaagtgtaatacctgaaaacatttacctttctggggaagatgtcaggtgctgattccacattttaggacagcatcaagtgtaatacctgaaacaacggtggtcaagaaaccagtgctaatcatatttaattgttgctccattataaaataagactaagaatatatctggccataaacacagagggatagattctgtgagtaatagaaatataaaaataaaaaataaaaaagccaaagtaaccatcgtagtagtattgtgtaggttttaccttctgttagtgttggacacaatacaaacacaatagggcattttcagggaggaggaagttctctttggcatacagtctctgcttcaatcaagcaatcagtccatagtgtctccccttaccaaaacaattgggttgtttccctctaaattagcttggcatttttaagtccatgctctctcaggaaccatgcttgctaatcaatggtgcttgctctgtgaccccagttttcccggtcatgcttctcaaagaggctgtccaggaaacttcattctaaccttgtttacactgctggtaacagataacagagatcctcttatgtaaggagtgaattttgcatatggagaattctaccatatgacttctgactgacttcccagcattttcttccagtcccttctcaagtgagcactgaaacatgcgtcaggcaatctgggttgtaatctcacaatgtctaccactgtaagctatttcaacttctctgagcttcacttttcttgcttcacaaaacaaaaaaaagatgagatgattttagcgtcttccaaaattaaaggtgttgtggatgctatttatttttccttctggctttcctgtctcctctttagtcc

SEQ ID NO: 39303 - DNA, 1607 bp, Bovine  19866880645673
  misc_feature (1)..(1): n is a, c, g, or t
naaagaaaagaaaatgctgaggaagcctattggagaatagtacatccagtgttgaaaatcagagagaaacatccaacaaaattttggatttcctacttgacccacatgcagatgaacccagcgtgcagtgttaccttctggattctcagcacaagtgctttggagccacttcactgagaatgtgaaagaggttaccgaaaatgtgggaaaagagaacggaaggggcgtgtaatgacaaggagagaacaatgcgggcctgtggaggtgaacagttttaaaatcactaaagaatacaaagaaaaacaagagattttaaaaggtatgatttgagagcttaaaaagggagaggatgactaaagagaagaacaatggttctcatacagccaaaaatgagagtcagccatgacaagtggggtctgggccaaaggaaagtgggtagaattttagacttatcccatcctcacaggaacaggtccatatgcctgccacagggttaatagatactgccgcagccacagttggtctaagagactcccacaaaatcggggctatgacctcagtctcacttcttctaagtgctttaaaacatgagggccaggtgtgtagctggggtttaggggcagcgtcgactcacaagaaaaaagtcctttggtcttgcttttagtagcagagataaaacattattttaagaatctaaaaataagaggttagcaaggaaaagaagttgtttctcaggtcatgttaactcatggcaggaggaatagcaggaagtgccagagaaggcattgactatttgaagacagaccactatagatttctcccatctccagcaaaaaaattcattcagcaagtcaaaaagtaacatgtcttctgtgttgtgaaagttgaaaacttttaaagctgcttttccaagagctgctggttacagaggatttgtatttgggtttactttctttctttgtttatgtttaaaagcaagttttctgaacccagtgattttccttgtggtctagcaggtcaatacatgctttggaaattttagaaagcatgttttatttattttctcaaccaaccaaaaagccccttaggaaccattgtagtctgttggttaagtatggtttcattcatatgcttcttaaaggtctgttatttacagacagacagtaatgactttatctgagctaatcgagttcattatgtcattatatatttagggcatgtcctgcattcagaaaaaaatccctgtgagaacccggtacagagtgccaagaaccacaatagtattcatcaaatttcctgattgtggtgttacatgcattgtttttgtttttatttttttctctaagcaaagattggcaattcacttcttgctccaggagtactcaagcaaaaacagttcagatacctggtttcaattacttttcagtaaccgtccagaacttgtccccagctgaacaggtaacagtagagacttttggacattgagcggtgtcaagggagaacacagacacaaatttgtcactacaaagtaactatcagctatttggtatctgtgaagtgcattgcttttggggtccccagacagaggaagagattttaggaactgg

SEQ ID NO: 39304 - DNA, 745 bp, Bovine  19866880697095
  misc_feature (1)..(1): n is a, c, g, or t
natgataaatatgcaactctacaaactcttgttgatatttaccatctctcatggcggtgacttagcaccagcacgatggtggtattattaacaccacaggccacgtggaaagcagaacacataaacctgatgatgatgattttactgatgtaaaatcagtaaggattttacaaagacttttcccccaaattacttcctagttgacaaatgtagatttatagatgactaaatgaagaatggctttccgtttagatcaatgctcattattttaaattacttttgcttatcttctatttcaagttttcttgtggtccaatagttgaagagatttgtgaataattaagtgatgctggtgctatatgagtttcatcagattcttcaaatagaaaatgagttaagctactaattgttggattacttttttcatctagttcaaattaaagcttttaaaatttcactcctttgtaggtattcaaatgccacatggttagatgcaacaataaaagtaaaattacttgttttgcagtgaaaatctgaatgcaaattttggggaatatggcattataatcataatgaaaagaacaatgttattaattaagatccttatgtagtagaaatatgttgtaattgactgtagaacatatataattcaaaagtccaaatttgggatgatattttacaaagaaaatagaagttctgaaaatttattataaatactatatatatgtagtagtatatatacata

SEQ ID NO: 39305 - DNA, 1751 bp, Bovine  19866880828605
  misc_feature (1)..(1): n is a, c, g, or t
nctacagtccatggcgtcgcaaagagctggacacaattgaaacgacttagtacacacacacatccttttttccactgtgcctaagcatgacccagaatagtccacctgctacactagttctgatagtgcagagaagggccttgtttgctcttaatggttagcccagatagtagaatctcatgctaaatcagcaccttttcagatgccctctgtgacctgaggttgattttctctaatccagaccactgttttgaacaaaccttctatgaccttctgcttactgcccccttttctctgattgccagcgctgtcccttgtgcatcttatcctgctgcttctggaaggagatccctgctcctttctggatgctttgcatgtttgatacattctgtttcatgacctgctctttcgttcctctgtccctttcacttttggagagtattctttcagcagagcctcctgactccttagaattgcttttataaggcagttactgctggtgtttgcaagttcatctttactttttttcaaaaccaaaaaggaaaaaaaaaagataaaggaattggcttcagctcagaggaagcattctgggaagagaacgcatgcggtcctgtgattctgcatcttaaacaggggcctttcctcatgatgagaattaccttggcctgggctgagccttcccaaaggaccctttccacttaagctttttattaaaaaaaagtaaattgggattattgtattccctcactttacattggaagtaaaatttttaaattaattgtggcctaaactgatagcaaacagagaggttctgatagcagcctggcggcctcttgtttagccagcagagatttcagttattgcttctgggaatggcttggctgagatatttttaatttacatttttttcttccttctaatgaaggattgaattatgacttacgagaaaatccccagtgtcttggggagagagagagagagatgttgactaacttcctctgacttgattggagtgcagttatttatttgaagctagttttaagtcacaggggtggcattctgaaggatttctgcacataagggagcactgtccagaaaatgtcgttggctcccctcaggagcccactgtgctctgacttcagtgggcagtgttgtaaaagattagaagggcatctctgtaccagttactcacactcctggaatgtccatcccgattggaccagtcaaccaggtttcaaagtcagaaacagctctggcccctctgaacctgcctctgccttagcaagtagggaattccaaatggtagcctctccatatagccaccacctgctaaagggaacaatccctaacagacagaacagatttgtaaatggtaatctccgctgtaacaatcgctctctgcctgctacatagtgggaatggtaaaaatgtggatgttgcaaaacataattactggcctggaaatgttccttctgtggcagatggtatgatcaagagcagagacagacatgtccttccgcaaaccaagggtaatggttacacaataggcttaggtaatagccactagaggaggtagctttaggtaaaactcagttatgtgtattaaaagaacctcttttaatccggacagctcaaggaaaaatctctcttgaggacaccgggcttgagtcccactaccagcacaggatgcccggtgtgcgcttcaagaacagagtggctgtgtcgggtttcttgtgttctaaggtaatgca

SEQ ID NO: 39306 - DNA, 2145 bp, Bovine  19866880900251
  misc_feature (1)..(1): n is a, c, g, or t
ntattttacccttcttccatattacactgctgttttcaaatgtcattctcacagatcagtggttggtttttaaatctgttctctccccattaaaagcaaatagcttagatggtatttcttttaaatgtagaccagaaatatctttaagcgaagattatttaacctgactgaattttttaaaaaagaatttaaattataaaattttcctgttgactacctaatcaacactttagtgctttagttgtggaagaaaaagactcactttatctgtgtttggtaaatattttaaaatgcaatgcccatacacacagtttggttcttcaattacttttcctccacactgacaaaccatctaacgctatttaatggcccttcctagagcgcttcatgattcagagtcttccagctgtgacaaatcaaaaggcacctatgtattctttggggtttttatttgcaaaaatgtcaaaaattcaatttagttttgattttgatgtacattaatcttcacaaccttttatgcatcaattaactggtaaaagttatgagggcatcttttcacggaatgtgtcatgaaggccttttagtctattttttaagtatatattctttgctgtttttgcagtgagctacacttttaaagggcccattcttggcttctctttttggaagtctgctttatatgaaaacaagtttagttggagttccctaaaagtgcgtactctttatctagaatggttctagtgaagcaggatcatagcaaggacatgcataactgagcttaaagatgtttatttatgttttatttttctaattttaaaatattattaatgtatattatagaactgtaagaactttagaaagcattcagcccaactcatttttacagatgagaaaaaaggggtagagttaagctggacatcttgtatattcaagacaaaacctcagatccttttagtcttctctagagttatcaccctgctcttgtcagcctgaaacagattttgtggttaagaggttacaatcctttcctgcccactttcatacagttaactgagcttctgaaactgagcaggaccctatggggctcctgggcatggaaacctttccgtgtcccccatttcttgtggagaacagactccagcctccatgattgtctcaaagggtaaattccaaagggagatctgaacagttgctaatcggggaatggaagggatgcaaagttaagagagaaatagccaagaaacaatggtgcagccttgggcggcacagtcatataaacacgtctttaagtactttatagaattaaaacccagcaaatggaagatgtcaaccttcttcataccataaagatcacctgagccagtctaaaggaatcagaaaagctcaaaaaccatcatgatattgtaattatcctccaattaaaataaataaattaaaaaaaaaagattacctgagaccagattagaggagcaagggccctgtacacaccataatcttatcagcaacctcacctttgaagcattgccataacacccctcaccaaagagccctgggttggaatacacaggggaggcgcctgctgtgtccccttttgccttgcagagcagtaaagctattgtttcctgcttcacctaaacctctgtctccaagaatcaacttggcacctgtgtacagaggccaagcttttcagcatcacttccacattgatctccattgagaactgtgagctcctcagaataaaactgcctaggatgtctccagcacactcaataagacattctgactttagcctaactaacaagaatgagagaatttctaagtgtgtgcaaaatgtggagctgcccctgttccacgagaagaaatgaatacccttttaattttataccattcctttggcctaaaccctttagcatagaagcctggtgtggttatttggctttcctccctcaaattcatcagtaggacataaatcacttctggatacttcttgcttcttcccattctttaacttttggagccaactttccacttaatctattattcctgggaccctagacatggtaattaacctcagagatggaatttagtcaaaaatgcactttgcaaactgctttacattagaaaaactttaattgtgttcagcaa

SEQ ID NO: 39307 - DNA, 833 bp, Bovine  19866880914769
  misc_feature (1)..(1): n is a, c, g, or t
ntgttttaaaattaatagagcttcaatcttttttattttgccaatagattgagttgtgatgcctgctaactctgtcttcattctgatttagtaagcatttattaagaacagttttatatttctctaactgcatcaccaaagcctctctctgtcccctggacattaaattaaatataaaatagattgcaccacagctaaataaatagatccttaattttctcaagcaacatatacacacatgtataaaataaaataaacggtatagcgttgggcgttgggagtagagaaaagatggctcacatgtaggtttagttatcaaaatccacagcatataggctgacagcttttgaaatacataaactgtttctctctctcctgtttccatagcaacagagtgcacaaagccttcgtttttgcacatagagagaaaaaaaattgggaatggagtctggaattgtctgaaacaaaagaaaaatgtagaaaatggaaaattaagcatctatcgtcctcaagaccttcacacttgctcatgcccccttcacatttgttatttaaaatatctatttgaatacatgttagcatagctttgaggagctgggtcaggacctgaaagattagagcattacacctcccctctgcaagtcggaagtcattgctgtctttgttttggtcaatttcattatgactccctcctacaaggcattctcaccagagttttgttgactagcttttggtgtgttcaccacacttcagattaagatttattttcccttctccaggggatcttccgaagccagggatcaaacccaggtctcccacattgcaggcagatt

SEQ ID NO: 39308 - DNA, 777 bp, Bovine  19866881053298
  misc_feature (1)..(1): n is a, c, g, or t
nattttttttttgtattaaatttggagaatggatatccataatggatgcgatgccataggattagttgcagatgtccattgggcaaagatgtttaggaaattctccaacatgaagaaatataggggtgcaaattccctagaagaaacaggaataacaaaatcagttttgaccagatacatatggatgaaggaaaagtttgagatttttttgtgctattttcagggattccaattacaatatgaaatctttgtaggcctaacagattatttgcaaaatgcatttctcagctaaaactacacattttggtttctgttagattagtttttgtcattccggcagctgggctggctcatgctcatttaatcacctttgtcattacagaaaccagagtaaaatgacatgcctaagttcacacaagagtcagggataggaagaaaattagtaaaatgttccgtccactagcttcccggttgatacataatccacagaaacatcatatgttgtttatatcaagttatttgaaattcttccatgttgtttctcattaggaatatgttttcccaacacacttttcttttttttgctagagaggaaatatggattaatttcttgccagttctgtgcatagtcctactttcgttatattaaatgcatcctaaacatgctataggtttgttttggattgtttatagaaacatactgggaaggaaaggaaatgattgctaagctggatttcagtaagggagtaatcagaggctttcatagagctgatttca

SEQ ID NO: 39309 - DNA, 977 bp, Bovine  19866881137979
  misc_feature (1)..(1): n is a, c, g, or t
natacaaggcagtccgcatgatcccttcaacattacagtcctgattgtataataatgcagaaactacaggccagttagctgttccagcaaattctccctgtaagtggtaaatttctggaaaaaaataatttctaaagaggcttttggtggcctgaaagagttaatgcagattcctaaacagcctggtgacagcctgggaatagtgatatttggttgactatgacaaagaatctgatctccctgtatttgtagtgccaaaatagcattgcataagctgtcaagcctcaagcaccaggagcctatcaccaaatattaatttacctgttgtgtgcatctaataactgacagctctgaatcccatatcatttttggtggccttcctactgacatgttctttgattaagaaaatagtcagccagaacgccagtgtgtccctaatgtggccacctcccatttagcctccttattatgctggaatatttttctctaaattagattttctgtcttcatagtggcagtttacatgaatttaatacattataaaatgtgcagtccccttgagattccgtgatagattgtggtatttgaaacccatatttccatgggaaataaaagcgtaggccatggccaaatattttatcagcttaacattatcttgagataatggtactattaatgcttgtcacccctgtctgtttcccagagcttgtgttgcttcctttcttgcctctgaacaaggtgctgaaagttttagagctttgagctctactagtaatattcaacccagataggtaccctttgttctatgttgtctaggaaaaatcatgcatgatgagcccctctgttatttccccctcactgatactgaatctagtttccaattatggctacatgggatgggacctctgtatattacagcttggctgtgatgggccagtgatacagtgtcaaggatagcagcacagctgtgatctctt

SEQ ID NO: 39310 - DNA, 780 bp, Bovine  19866881231726
  misc_feature (1)..(1): n is a, c, g, or t
ntaagccctttgaaaaagataaagaaatatgaaggatgtgtttcctcttccctttcctttaagaaaaggttgaatgtggtttattacccttaattattatgactcccttgattcacctggcaacaaattggcttatcagccagggactattagttgtgcattagcatcaagttagacactgtatcagttttcaataaactcaatgaataataacttgacatttgaacagagctttgtaatttgaaaactatttttcacaatattctttctcttcatgtttagaccctggagcaggggttgacagattacagccacagaacaaatctggccagccactagtttttataaatatttattgggacacagccatgttccttcttgtacgtaccatctgtggttgcttttgtgctacaaaagcagaattgagtagttacaaaagatattgtatagtccacaagattaaaatatttactatcttgtacttgacagtgaacgagagctaagccttgctctgcagctccatgttggtatcctctttaagtcagttaccttcacagcctttgtttcacagtgatatttgtaattgtactattgttttctaaagtacaagctacgtgaagtctagagctgtgtttgacttatttttttattcactgaaataattaaaataataggtgatgaaaacattaataaattcatcttatttgattctcttaaaattcctacgagattccatacacatctttacccttcatatctggaaagaagtaaaataaagtg

SEQ ID NO: 39311 - DNA, 1860 bp, Bovine  19866881233802
  misc_feature (1)..(1): n is a, c, g, or t
nttttattaggtttttctttatgcactactcgattctacacacatttcattgcgtctttcagcagaggtgaaaactaataagaaaccataatttattgaatgaaagcagttcatttatttgaggacaattaactaacctctctttagcattccatttttccagttaatttatctcaattaccttgcttctttatgagataacttgttgatacatttttgacccagagtgaatgcatattaaatgggactaatgtattaacattatttgcctttaccaaatatttccaagacatctccttcatgaatatcaacaaagaaggagagaaacagggcatgcactgggagtctgttatacaacagcaacattttagttatgccgtcacatttaaccctgtatcatagtgaaaattgcttctggaagctttaaattttgaaacatgagaacagtggggcccagcaaggttcaacagctggtccaatgacacacagttaatgagaggtggggacaagacacaagtccaggtctgacgataacaaagcctattatctttccaacacagtactctgactcacaggcaaatgagaaaacaaatcccctctagagataagatctggtgtctggaaagattaaatgacatacagcaaagggacactttgagtcatggagagccaggtgccattcctgtgttctggactgaggtctgccttgaatgtgtccttaaagcccaatcctccgtagggaaccgtgttttccatctgtgtgttgcaagcttcccactcaggaaaggttccagattgacatctggcaatttaaagttcccctagagttatataggatgagaatctggcttatattttcttttcccaacatagcagctcatcatgactcggctgtcacgggctgttacagtggttggcaggcttggtgtgtgcaggaagtcggggtgacagagccaggatgcctcagtggttaaggatgagaacagaggtcccgagcactgccactgactccaactcctgctttaggcagtcacttaacctctctctgcccagtcttcccatatagaatggaaacaggaacactgataaaaatcctcagagaagctatgaggcagaacccctccacaattaacacacagagagaacaatggaaaagtttaaaaccatttcagtgtgagatcattcggtataaaatgtcattaaaatgattactgtttggcaattctggtccagcaagtcttcaatatagcattggctgctgtgtgtagccagccttttaggaactgctgaggcaagaactgctttgtggagattttgaaggacaataatagaaaaatcaaatttttaagaagtgcattagatcctctattctccagctttccaaaggcttcttgatgccattttctacatcttcttcaagttttgcgtgatccctagtccctgcattagagtttgcatcaaagaaactatcagttgagagtcactagttcaatgaatcaacagttcaaggccaagagaaaccataatgaaaggtccttgggactttaactgttggatagaatggctaatggctctgactttccttgtattatgtggaaataattcctaagtgccaaattgttaagaggtttcatatttccattttccagtttctttgggctctctaaacatgcagtcagttgcacaggtgtatagcttgggcaaacacccactaaagctttactggaccctcaagctcctaagaaagtgaccatccacacctgttcatgcctgggtggtgtcctccttcactgctttgcttctcccatctatgtgagaaatgagacttgctctccataagatgtgcttcatatgctatga

SEQ ID NO: 39312 - DNA, 1265 bp, Bovine  19866881269939
  misc_feature (1)..(1): n is a, c, g, or t
ncccaacagctgtgcactagcatcgaagctctccctcgggtgctttcaagcctcagtcaggacagtgatgagggaactacattggaaatatggagcttctgatggctcaggtgagttggtcaaaatcagaagaaaaaaagaaaaaaaaatcacacttcaaagggttgtctgcattaagaaaagcacaatgaaagaggagaagagagagggcagccccacaccaactctatcctggaggctcttcttatcattctgctccagtccctgtgattatgaggagggaggggaagcacccactaatcagggcagtgtggtgtgctattcacaagctcataactggcagtaaaacagaaaggcccgtgtctgctctgctgagtaatttccacactgaggccctgagcagagatgttgtgtcatttgtaacatctgccttggcatccaggagccaaagtaagctagttagagagttccactgcttctttctccctcctcttatgacaaatctaaaggactcagggttatttataaagaaaactagtctgagctcttcagagagttgtcagtttgatgcaggtgagacagaagagaggattggaagttaggaagacactctggcctcttatttacctagaaaagaggggagagtagcatcaggtgtatatggagaaatcctcaagtatcaaagcagaaataggaagagtagagggggtgggggtcgtcaaaactgcacaggtgggaagatggtctttatgccttattagttttcaagctcttcacaatgtctcagacaacaagagtgaacaatttttatatatgagacaaagctccaggagtaatggggcttcccaggtagctcagtggtaaagaatccgcctgccaatgcaggagattcaggagacaagggtttgattcctgcgttgggaagatcccgtagagaaggaaatggtaattcactctagtattcttgcctggagaatctgatggataatggaaactggcaggctgccgtccatgtggttgcaaagcgttggacacgactgagcacgcatgcacacatgctcagtagcaatgatggggctcgatactaactgctaatttcaaaagtagttggtttttaattgtaatcttaacctttcctacttatcctaaaacacagattctagaccagtgcttctcactcttaatgtacatacgaatgacctggagatattgttagaccaaggattccgattcgaagctctcgggggacagaatacaacttccag

SEQ ID NO: 39313 - DNA, 1173 bp, Bovine  19866881350329
  misc_feature (1)..(1): n is a, c, g, or t
nctgcaggatgggcccagaatctgactttcagctctatctgtgttcccatctacctttctgtaagtaagcttcaaagagaggtctaatttaagacgtacggtgtgttcaaacctgtagtttcagataaggattctccctcttacataatgcattttaaaatgagagcaaaaagcccatgtcagtgttggattttcactgcttggctctcagtattcttgagggcttaaactgaaggagatcagggtttgtgagccacagtaattagtgctggtggcagtaagactcgtagaactgttgatgaaaagaaaccataatttctgttaaactccttagggtcttttttctgaaagggagccttgctatatttctttttaaagcttggatcaaataacttaagcagacgctatgacaatactatttgaaggaaagaaacctatggtatgactcactcacccaccaaaagagactcactctatacacctactttttccttggctttactttctgagtcttctgagtcaaagcctttgaaaatcagtctgcatgtcaaatccccatgaaaatctacttgcacacatctttactgttcatccttatccatttcacctttttcagtgtaagctgaaacaatttagtgattcattaataaggtccacatttaccagaaatctcatttttctctccaagttaccactgctttagtgcccatcacctcatctgctgaagactgagagaaaattcctttatcctcagaattttacaaatcctccagttcacctcaactctcctctctgagagccctcggttactgaagagacaaacttgcatatcaaggtcagaaaactgtccttagcagcttctactctagtatataaaatcaccctgatttcatttgcccttgagagtactgggaaaatttttaattgagtagagggtactcttaaagaattaaatttggtgctcatattatatccaaataccactgcaaataacagatatactgcctgccacagagtaggtttgctgaatgagtccttgtaaagattgtagagctactgtctgagattatctggttgtgcaatattttattcaaaaaaattttactgaacatttgcatggcaggcatagatgcaatgtgcactggacctcgaatccatcatcctgcctccaaa

SEQ ID NO: 39314 - DNA, 832 bp, Bovine  19866881422092
  misc_feature (1)..(1): n is a, c, g, or t
naaatgtattccacgttacagctgtactaatgtacttatttggccagtatcttattaattgatatataggctgggtcttttctttagttactgaaacattgcttcactaataccctttgtgtgagtgagtacatttgtagcccacattcctagaagtgaatatactgtatcaaagagtaagtgcaactaaaatttgatatttacaactattgtcaaagtactttctaaagggaattctcctaccaatggcagttgagaatgcctgtttctctataactttactaaaattgcaaaatatcaaatgtttttatctttactttttgaaaagaagattcgattttcttgttgttgctacaaatgccatcaggatatagcttatttaccttttcacttgatatgaaaatcaaagcaacaagaatgtatcagtttcatttaactctctatgaaagaagtttaaagaaaaaggtgtgtgtaaattctcttcccctcacacttcaacccccaaattcatacatatgttttaggtttctttaaaaaagaatgcacttggatacaaaacattgttctaatttctaatatgtgcagctccatttgcaaagagcaaaactagctataacaggtatgtaatttcatggtgtcttatataagtggtcatattttgtgaggagaaaatgccaatgaggcatagttaaaggtcacctattttaatgaaccagtttatgactcatggttttacccttacttttctttctctttttttggtaggttatactttgattagcatagagatgtctagtattgtagtacttcaagtttaatattcttatccaga

SEQ ID NO: 39315 - DNA, 2465 bp, Bovine  19866881564211
  misc_feature (1)..(1): n is a, c, g, or t
ngatgccttctaggtctcctgtctatgataaggaaaatgaattcggccaggttgtaaggtaactaatatgtatcagataactgttatatactcagtcttttgcttgatcatgtggcaagtttaaaagtataagaagggatctttgactttaagaaatgtagaatttgttatggtaaaaattgttcacgttactatcaaaaatgctataagatcaaagagacaaatttttgaattacttatctgtcaaatagggcttcccaggtggcacagtggtaaagaatctacctgccagggcaggagaccaagagacacacattcactccctgggccaggaagattcctggagtaggaaatggcaacccagcctgatattcttacctagaaattccatggatagaggagcttggcaggctactgtccatgaggtggcagagtcagacatgactaagcacacacacacacctgccaaatactgtgtaaaattctttctatattacctttataatcctcatcaaattttttttaaaggagaagaggaaccaaaactcagaaagtccaacatgtgtgctcatacataggcagtgagaggtggagtcaggacatgaacttagggatctgattgcagagagtggattcttaacctctgggctgtactgcattgtacacattgtaaataagaaacttatcttgcaattactaaggtaaacttttaatagccattatctcatgtaattatcacaacaaccccatggagtaaacgccattttttaattgttgttttacaatagaaactgagtcaaagataggccttgtacaaggacacacagctggtagattggggaactagcatttgaaaataggctgtcagtcacaagacatttcttccctaaatgtttgaaaaaattttcagtttgtgagcaagtgccaagaatagcccaataaacacacacacacacacacacacacacgcgcgcacatatccattatctagattcaccaattgttaacagtttccacatttgtagaaccactgctaaccactataattatatagctgagttatttgatcagattgaatgctataggaatttatttaaaaattaaattaatagatatgagtggctttatagaggtgggtcttaactagttcttgaaatttttagataagtagagaaaaagaagatgttctgaaatagggaaactctgggcacagcaggatgctcatgcaggcatatgtgaaggaaagatttaggttgaagaaccatagaaaacaaatttcgggcaaaattatgagtatctggaagccaagcaaagagttcaggctgattatcatagaaaaaaaggagcctctgacagccttttcatcaggagaaattgcagctaaatattggcatttataaataattaatttctttgttttttaagaacttccacacaatatcactactctgaggagtcatagcactcttctcgttctcagacaatgctttggaaaatcagtaatctgaagaattattgcaatgacattgcattgagtgatccttacaaaacttagcaaaactgtaatagaaggaaaacatgtgtttgtttgtttttttaatgatttctttacccacgtttaacatcttgtctttgttcttcttaactattaataggacaaggaagagaacaaatttcatgcttgctgttattgagactgcagatatactgcagaatggcattttatattccagaattttccctttctctccaatcaaaaatttacctgacctgtgcctgatgtttttaaggccctcctaagtcatattatccaggccagctaacctaaagaatttaggtgctagcttataaaaatataatgtattcctcttaaccaatgtataggggtgaagagatttaggagatgttaaacaagctgaaaatatggaaccctttaaatcttaccacataggtggccaaaagaaaaaaaaaaatggacctatgctgtgttcatccctgaatgtgatcactggttttaataaatggagaagtaaaaagtatgctgagcttactgaaacactgaaggttttagagtctcactgcattctagaggtgtggattcatggtcactgagcagaggagctggaaaaggaaagctcttttaccacctgtatctgagagtcacattgcctgtacttcctgtgcttgacaggagaaactgagatgaatattgcaaaacaaatatgctggccatgtgtatgatatgctactaacatttcaaacatgatgcagatacatgacacacctgtcatcctaaccttgtaaatccctctggttctcggggtggtgagttgtaaacagtaatgtttccaagtcagtagttttctctgctatttcagggtcagaaagccttggaataagcaataaatacaaaagtttattctacagtcttagtcaagttaaaccaatctcatgcaaagatctaa

SEQ ID NO: 39316 - DNA, 1348 bp, Bovine  19866881646949
  misc_feature (1)..(1): n is a, c, g, or t
ntctttgaaatgaaattgaaaaggaaaaaccattttctttgaggacaaagttcatctcatttggtgtgctgcacctgtctaattttcttcttggagaaagaaatcttgactaggaaaattttaaaaaaatcgtttatactagtggaggtatgtatcataatgtttaattcaaactagtgttacattctgagaaaataaatataagtgaattactgtctgtttgaagctgtgataaatacctagcttggctgaaattattagataccattattctgtttccaaaacgttggcgaagggcaacagtctgaacgacgctgaagtgagcactctccaatgttttcctttgttagggaagtgcaggtgtgctgtatgatggtgggtgttatcacactgaaaaccgacacatacccctcaaaggtgttccaagtaaataccttgcctgcttccaaatttggaaaaaaaaaaaatcagcacctatttttagagtagcatgtttataaatattaaaattcacaattgacttttttaaatgccactaaataaatactttagataagtctgtatccgtagcaaacaagagggctttgctatctgaagttatgacttcctgtaaataagaatgctacaagattacagatcaacacaaaatgaaatacaaaatatgagtgaatatgtcatctaaactggaaggaaatatagctgtgaccccagacaaggatttatgttcaagatagaaaaatgatattttagtcaatggaaaaaagaaagtaatgaaaaacaaacccaagggtaatcctcccctttaatgcatcttgtctcctatttccttgcctctttggtctttttctatttccatgtcagctctccttgttcaatcttacctgtgcgattcgctacatgtttatatataaatcccatatattggaaatagatgcatgattaaaaatgagaaagcatttgaaaatgaaaaggacaagcaaaattttatcttatctgttagatcatgggaaacagatgatctcggcttttgccaaattcgcctcaaaaatttatattccctagcttccttctttgtgaatgttttccatttggaactacactgtcagtgcctttttatttgttctgtatccaaatgtggattcagctggattcctctgattttgttttcattccatttgtatctctgtagaagactgttccacatatccacaccctttatgcaaaatgtaatagctattaaatacagtgttcaccatgaccttcaaaaacgaagacctactatttgaaagttttggacagtagctactttctttttaaaatcaaaactcaaccaatgtcctgataatca

SEQ ID NO: 39317 - DNA, 3186 bp, Bovine  19866880424510
  misc_feature (1)..(1): n is a, c, g, or t
ncctatctcccctagctgacctttctccccttagcctaaatatcatctcctcagactggcctcccctctttccgtatcctcagcacccaagagaacacctagcatttagcgtatattcagtatctgttgggtgattgccagataataatccatatttgccaactgagtatgatactgtcaggaaactcaggaggttgtgcttcttccccatacccagtggaaaaacgaacaatctaaaaggcagatccaaggtggaaatcttccttttgttttgtcctcctaaactggaagctagggagttgcctccactccaccactccccacccaataaagggagaaaggaaggggaggagggcaagagggagggagaaaaagagagaaagagaaaaatctcagcgaagactggatcatactaagtttgagggagaaaaagttatgacttctccaagttgttaatatgtttatgtcagctgaaagtcttcaagaggagaaaagatgccttgtttctaagaatgatttgaccaggcagcagtgttcctccccgtcttcctccttgtcccgaagatccagggactcatcttggcatgcattttgcaaaacaggaagttaagaacagacatgtgcaagacagttaccgtcatcccaggccctgacgaggcgtttcaggttcgtcacttgctttggcccctctcccttttattgatgaagaaatgagcctcacagaggttagctcactcaaccaaattcacagaaccatcaaatcaagcgtagcggccaggatttgaaccattgattccaatggccttgatcttctcactgctacacaattcttctcaaaatgttgcttctaattcactaaagcagatgttcttgctagcatgcagtataatcacctcaagagcttataagatacagattcctgggccttctactagcctatttaattcagtaggtccaaggttggacctgtacatttgcatttcttttttaaaaaataatttattatccctattttagccaatgaaatctttttattattttattttatttttctggctgcactgtgtcttcactgaggcccacaggctcctctagctgtggcacatgggcttaggtgccccacagcatgtgggaacttattttcctgaccaggtatcgaacccatatcccctgcattggaaggtatattcttaaccactggaccaccagggaagtcccctatatttgcatttctaacaagtccccaggtagtgtctgatgttactggtttggggcccacattttgagtaccactggcttaaacagcaagtatcactgtttctttttccttttttttttttttggtaatagtgttcttagaggcctgagaagctgaagactctttcaagtagttgttcctgccttcaaatgatacaactaattcattttaattccacagatatttcttgagtatctactgttatagacccatgatgcaataaacagagatgagagtcagaaatgactaactccaggtacatggccttagggagacccttatctggctggtggcagcatgggctgaggaagggcactaaggagagtaaaaataaacagatgactgtgataacagcatgtcaggtgttctgatgaatgcagggacccagtgcccaggcataactgggccctccccgtctgcgcgacagctgggctggggaacagtctccctacagagttggcacctgactggtctcctacatcatgattagtagtcagctgggaggaacaggtggggttccaggaaatccaagagcaagtgcaaaggcatggagataggaaagaatgtggtttatctgaggacgactcagggaaatgttgatgccaagactagcatgcagatgtgtctagattcaggccagtatggggaaccactggaaatgaggatggaatttggttgtgaagggccttgtctacataccgtgggttatgaatggcagtcagacaatgaagaaagctcataattgaggtaggtgtctcctgaacaagataggcaatgaaagtgaaagccgctcagtagtgtttgactcttggcgaccccatggactgtacagtctatggaattctccaggccagaatactggagttggtagcctttcccttctccagggtatctttgcaacccagggatggaacccaggtctccctcattgcaggcagattctttaccagctgagccacaagggaagccaaacctgctgcttattcagacatacgttcatttggtaaattttttttgagtctgtgctgaatgatgagagcagtacaaagaagactcaaactctgaacctctcctttaggaagagagaaaacaattatgacctaaactccaatatgaaggtgaaaatctgcccttagtagaaggtgtcaagggacttccctggggttccagtggctaagatgccacgctcccagtgcagtggagtgtgtttgatccttggtcgaggagctagatcccacgtgcccagctaagagtcgtgccacaactaaagatcccacgtgccacaaagacctgaccaaaaaaaagcacaaaaggcatcacgacagaatgagaagttgtggagcagcctggaggaaaagcggtgacccaccgggagaagcccagaggccacatttgtgataactctcacaggagactcagaggtaaagcaggtcccaactatcaccctcgcagaccttcatgagtatttgtatacctagttctctgattcaccttcagaagtgtagggaagaaggtaggaagcttacaatccaaaggcttttagagaggggttgcctgtagacttacgcctgccttttcctccttgctcaacatccagagaagagctggcctgcgtgtctccgcagcctgatgaaaggatggatgtgccagcctctaaataattgctgcatgaatctttataagcacacaaatgagcggcactcggctggtctgcagtggcggttatcacccgcaaatgcttcaaagaatgggaagcagaggctctattcccttcttcccacactccctgatgaatccacactcttagaatatgagcaaagactgactgatgagctgatttagtttagctttgtaggatttttcccccaatttagcaagcaatgaggacccgcgctatttctactcttccattggctcttaagtctcat

SEQ ID NO: 39318 - DNA, 1708 bp, Bovine  19866880491690
  misc_feature (1)..(1): n is a, c, g, or t
ncttggtgtttctaattctcttgaagcatctctagtctttcccattctattgttttcctctatttgtttgcatcgatcactgaggaaggctttcttatctctccttgctgttctttggaactctgcattcaaatgggtatggctttccttttctcctttgcctttctcttctcttcttttcacagctatttgtaaggtttcttcagacaaccactttgcatttttgcattttctttttcttggggacaaagtcaaccttaccccctacttatgagactcacctaacatggcagaactgtgtacatggcaaaacaaacgtgaactactccctgtgactgtctttgttctttgcctgtatagtgtggcatgttttcataagaaaagaaaaatcctgagaatttttgcttagtgatactgacacttcagtcacatcacttccaccatgatggggttgccctgccatgttcataccctgccttgcacatcattgcatcacctgacatgcaaactcctcactcaccttaagtctctctgcgtttcagcccaggttggcactagtttctttcttagcagctgtgattatttgaaaataatgtcaaaacaaataatttccttttttcaccgcctgacaatcatttagtagctatgcctattcccgagtctctgccctcatctctctttaattattctcttcctcctctcctccatcaattcccttggctaattcagaattccccaagaagttggacagaggcatctgagggctgggaagaaagaagcaaccatttcctagagctcagtgatgtttcaggaccatggacagcgatattggatggcgataggaaaaatccatttgtctgtctttgcctgtggttaccaggcccctgtcggaaccccacaggtggtggaggtgacaaaactctacaaagacactttgcagtgagaaccattctccccagagcttagaagccaaaccttataccatcacatacaaagaagagattgcatctgggccctgccgttgtcctaatgtcagctcgcttggcatttaccttccttccccaggctgacctctgatgatgggggcaggccctggaggcattgttctagctgggcaaatgctgcagccattgtgtcggcatgggagagctgccggttcctttccagcccaacactgtaattttatcaactctggctcagagaaacctatatttataatgctaattaggagagcacacatttaatttgagtggaagactgtttgtatctcgctgagcctgagagcacagggctcaagcgacaacagtcagaggcaaagcaggcctttctcccttctccaagtatttgaaacagggctgagccttgccaaacagtttctctgttggattaaaaagagacgaggggggagggggtgagagtgctgaatatgccggagctcagaaaactttgcgtttatctcctgtctgcataatatatttctctgtgcactgagaaaacatgcctcttatgttatctaattgtttcctgacacatttagcaacatttcacactctttaaagtgacattaacattgctgacagtggaggtgctttcattaggtgggctttgaattgtagccaggatgcactgcaggtcttccaacaggcttgtagaagccgagaaaggcattatttatgaaaatagagccttggccaacagtgcccccgtg

SEQ ID NO: 39319 - DNA, 1276 bp, Bovine  19866880507621
  misc_feature (1)..(1): n is a, c, g, or t
nggagaataattataacatgtgaaacatactcaaccttcagatctgaaatgacaggtaaataacacaatttgaaaggaatagagtctctctccttagacaacgtttatgtcctctcgcttacaatgtaaatatgacaactcacaataacgctgctcttagcctcacaaccgcatttgtgcaggtgctatcaccgagaaaaatgagcatctatcttccagcttcaaatgtgtccacaaacggtaatttgaggcagccattcttcctaaacaagaatttccctcaatgctaattgcttctaagggctggtcagttaacggtgacaaatacttccactcattaaaggagatgccattgagaatgggtcccacttaatgcaaggatgctttaagtggcaggtcacaagataaaggaactttgggtcccagggctcaagtgacacctcccatgtgccacagcaaatggctagagggctttgagctgattgggtcaaaaattagcagatatgacaacactgagaacgtgattctgcatgtcaaccattgtgatgtccccaccacagcaaaactgtcaatgtcgagcaaagactaaatgtcaagtctggagatcccaccaccttttaaccactcaccacttctctgactggtatttactagggaattgtgacaaactggagagtgggctcctgtttggcttctgtatgcagtaaagtttatgtatcttgttgtcaaataccatatcgatactatacatcagaaaggaataagataaaaatttactcctggggagaaatagcattgaaccaaactatattaggaccttgacagacaacaagagaagggatttctagaagaatttccaaagaatcacttgaacacgaacaactcatttttgctgttctgctttgtatgttctggttgctgtttccaggcagtggaggatgcatggcgacggtatggcatccctaaatccttgagctgctcccagctacattcaggagacacacacatattccctaattctgtgtgtgtacctaattctgtgtgtgtgtacacataatgcacgcacacacacaggccaaatgaactatgagaaaagcctcaaaagaaaagaaaatgctgtaagaatataaaaatgggagaactgagggacattgtggaaggcctcactgagatccgtggtcactgagctaagagctgaaggatgaagacagaagggaaaggcaggaacgagcaagcaaagcaggcatgcctcatttgactgcactttcgtgttgct

SEQ ID NO: 39320 - DNA, 934 bp, Bovine  19866880535174
  misc_feature (1)..(1): n is a, c, g, or t
ncctagaattgatggcgtgttaaccttgcatattcaaagaaaatcaaatgagtgcttgcaggaacagttgccaactgcaggcaatggagacttcagtgcagatgaagctaaacacctgatgtgggaggcattagggagagcctgaggcatagatgagaaagtggcaaatcagtagttgctgaaaatcactactaattttatcaaattctctacctcttacacggtgaacatcaaacccgcctgcctgggtcagatatctcttctatggtcttgtacctgggaagatagaaaggacaggagaatgcacctctgttcccaggatctggcaccaaaaattccaccagcgaagtctcctccaggagcaggagcgtcctgtgcatattcagctctgtctgcctttgccttacttactttctccgttcctttgaacagagaaagatttgaaagcagattttgattaatggaagatttaaagagtattaggacatcttgcaggagcaaattggggaagaagagtcttcaaggaacttggaaatgagccagtagcaggctgccattctccacttttcttcattttcgggaaagctctgcttcctgtgtcgagatcagatcatggtttaggaagcactggttcctatggaactccaaattttcccttaccaggaggtagatctgataggttagggttcatcaaagtaatgttactgtttaaaacagtaactgttttaatgttactgtttaaatctgcatacttatgattcaaagtttaaccttactttttctcctttcctcccttcctctcttctcatttcttgattcttaagttgctgtgtctctttatggagatataatttatataccaaaaaattcacccactgtaagtcctagatttaagattttcagtaaatttatacagttgcacaatcatccccaa

SEQ ID NO: 39321 - DNA, 945 bp, Bovine  19866880568296
  misc_feature (1)..(1): n is a, c, g, or t
ntttcatttgtccacactcgtccaaatacgactgtaaatatggaatctcttaatattgcattggcaaaaaagttcctttgagttttatgtaagacgtatggaaaaactcaaatgaactttttgtctaacccagtagttttacttttcttttaccttttaatgaagtccttaggcttatagctatcaaagtgtaggagataaaggtataagactttgtcaacataatttggtctcgcatacacattacctcaccctacagctttgtagccctgtagtggtgacttgtgtatatttgttttgtaaatataatgtgaattaaagtgaaatttattttgagactgttttactattctataatagctttgaaataattagagaagcatttgaaaatccataagtcaaagagtaagctcctgtttatttagcataatcataaagctggtaaggaatcagtcaccctattattttatgaaagaggaattttgatatccaatgtgttgactttttttctaagtccaactaaagtcagagtcatctgaagagctttatagaactacacagactaagtcccatcgtaagcctcctcatcagtagcatgggtaatgccccaagtggaaatatttttttaagttccccaaatcattctgacatccagccaggtttaagatctatggacctactctatttcatgttaaaattttatgtatgtctatataaacactgtgtgtctccattacatttattaatataaatacatatttatcattagatcatgttaattcctttagaaagtctgtatttgcattatatataaacccaatctatacctatagatgtacagaaccagaaatattataggcagaatggccacaaatgtttttctaaaaattattcagttcctgaactatacactctacttagagtatagaggttatgaactcccct

SEQ ID NO: 39322 - DNA, 1537 bp, Bovine  19866880575551
  misc_feature (1)..(1): n is a, c, g, or t
nacctcgtgcaaaggccctgaggctgggatgagcttggcctattccaggaacagagaggagagcggtatggctgaaacacaagagagagaagttaggaggtggacggaggagattatgggccgggtatagtcattgcccagcaaaggcatgccaggcctctcttggcatcttttttcatcatctccagtgggacatcttcctgtcctcaggtgcccaactcactctgctcaagtctgaccctagcactcctcggctctgccttgctccctcttctctgcttactgggttctttgggaaacttaccaaccaggccagtcaccaaatatgctggcagccagctacacccaggttcttgggaaacttctggcaacctcccaccattaagactcatgcagatccaagttcaagtccttgcttggccaccaaccagagtctgtggccctgggtgtgttatttaacttctctaatagcctttgttcctcctgagaaatggggatgagaataaggtttctgggagggtgaaatgagataacacatatcagcttttgcattttgcctggcacatagcaagtgcctagaaaaaaaaaaaaaaaaaactacttcttattcttgatgattctgttttcctctgctacaagaaaacatgtcatgaaagaatcaggagttgcacctatgtagatgtagtctccttgctccttatgtcaggaatcatgtttgattcttctctatctgttcgatactcataatggagcccagcacgatgattgttacagtcctcaaatacaggtgatgctgtttcctgcccggaggcttgggtcttgttctcatagctgggggacagacaaccccgcagtgcccacactgggccagtcagcacctagtgaagcaacttggacaccgaagacatggagcctgcaagtaggaactgaaaatgacaggcgaggccacgtggagggaaggcaaccactccccaaccctcccaagcacggcccaccgctctcatccttccatgcttcctggagcattcagccctttgaaggagagaaaagaagctgtgcagagctttaatgaggaatcagccagacgcactttgccacgggcctggctggaggcggaaagagatgcacaggcccccaggagcgacccgccgctgccaatcgtcactggatgccaccgcagcctccacgctcgtgtggcttcaagcagacctcactgacacatgctgcttccctgcagtccaaccacctgctacacgtgcctggctatctaaggtggcatcaacatcagacgttggaggctggggatattgcctgcgcagagccaggcactgcaggctctccatgggacaggtcagcgtttgccactgcccccgtctacatggaccaggagcaagcaggtggaccagataacaataaacttatttgcccactccctgccctctcccaaggtcctggccccagtagtaacttcttccagaagggccatgagtctgtctctaaccttgtcctctgggcaggtgtgcgtggcaggcttcca

SEQ ID NO: 39323 - DNA, 2157 bp, Bovine  19866880581035
  misc_feature (1)..(1): n is a, c, g, or t
ncactgttgaataaatatccccagaaagccagcccacttaacaataatacttcaacccacataaaatccaaaccatttttgtgacctgaagtacctaccatatttataaattaaacactcccaaagcttcttaaaactggtaattttctggcaaacagaattcaaaaggattgattttctctcaagtaatattagaatccccgagctaaatattagcagaaatctcaatccactgccgatgttagacaaaacaagagttcatatactctcatgccttcactttttcttgctaaccagtgaaagcacatccagaaaattagcatctgaggacagttttcacctatagtattagaaaattatgcctttatatcttgtgtggtaattcagtaatgaagagcacagtgtcacaaagatccttgtgaatgattgcgtacactagctgtcccacagatacgtgaaatatcgttctcaaaattttatgtattaatttttctctttaaatcaagtcagataagcttaacaaggccatatatttttttctgcttatcttttacttgtgaaatggcattattagaaaaatcaacacaatttcatttatacatgttgctattatttaattcatatattcagctattgtttctcagcagttccaaattcttttaaactagcattaatatataaatttgaaatgtttttacacttatgtttaatgccagcatatatctatgatagggcttccctggtggctcacacagtaaagaatctgcctgcaatgcaggagtcctggattcaatccctggatcaggaagatctcctggagaatggaatggcaacccactccagtgttcttgcctggagaattccatggacagaggagcctggtgagctacaacagtccatggggtcacaaagagtcaaacacaacagagcaactttcactttcacaatatacagactacttagtattctaagcactttacatacttgcactcgtttagtccttacagcagtattatgctgtattattattatgtcttgatattttgcccattttaaagattaggagaccgaggcatggagaattgagatggcttgtgcaagtgtcatagcaggtaagtggcagagcgtaggttctaatcaagcagtctagttccaaagtccccacttaaccattctaccatgcaggtgaaatccccgccctcctggagtttatgttcttctgagtagacagacaataagcagaaaaacattacagtcattttcaagggtgataagtgctttgaaggaaataaagcacaacaaagagatacaagactgggacacctcagacccacacgtcccagtgccgcagggtcacagattcttctttaaatgaaaactgccctccttgcttccgtggagagaactgaagagccagccaagacagatgtcccttctctcttctgaaaaatgcctttcccagggtcatttgattggttgttgaacagcgagcaccaccgatggtcctaagccattcctgtgcccctgggctgggcagccagttcagaaaaagatgactgatgcccaaattaataatgagcaatggtcccacgcaagtaatcaccttccccgacctgttcctcatgggggtgataactcgaatcccaggtgaagtatatccttctcacttcgccaccaaggaagctacactcattcctctggctgacagcaatttgtagacgtgggtctgggtagccggacatttactaggttgctaaggaacaaatgccttggttacaagaggctccaaaagcagtatctgtttgtcatatccttttagatcatttattttatcccataaagacagctgcgaccaatgaactgtaggatagagggaagctaaatatgaacatttgtttcctgagagatggaggaaatttctacttcctatacaacatccctccccaggcccccagacacaaaaacgaaaaccatgtgctttcctccacaacccttacaacttacaagtaagttgttcagagtcacaaagtatttcatgaaatggttatttttttcaggcacggccctaagcattatctcatgttatccttgcaacatccccaaaaggtgtaggtattattccctagcagaaaaccaggaaaggggttcaagaatcac

SEQ ID NO: 39324 - DNA, 2849 bp, Bovine  19866880595288
  misc_feature (1)..(1): n is a, c, g, or t
ntgtgcatctctatttcttgcttttgtctgggggcctctcatattacatttagattgtatcctttatcatcccaaattgacatttatgcttttacttctattgtttccctagcttctccctggtatggatcaacaatttgttttaatctgtgtcacttctcttatctccctcgacacagaggagcagtcatttggcaccgccatccgcctacagaggtggtgttatcaagagggtggtggggtcctgccccttctccccactatctaaagggctggcgaatgttaattgcttttccagttagtttataagaatgcagaaaccactgaatgcagcttgactggttttgatgaaagtaatggaatgctagtgcctatgaataaataaatctgatttacatagaggaccattgtgggggtggataggaagctggtgaatgcaagcaaattatagtttaaggacacattattccttggcttttattctaagtgcgggaggagagcttagatttccttggattcccagagcggtggggcgcgggctgggggtgcggggcggtgtggaggggaggtgggcggcgatcccttggcttcagagaaagatgctttccaagagcggccttggtctgaaacttaagggggatgcgttctgtttggaaataagctctgtttctctgtctcactcttgcaatccccttacaaaaagaatagcaagccgtgaagaatttatgagcagtaaactgaacatgttggcgtgaacatcagagtgccctggcgatagatccggcaaaaactctcagaggcagacgggatcgcaaccatttctagttcgagtttatttgcgtttcctaaattcccgcaagatcacggtgactcaagatggaataaatcaaggcactcttattttcagacgagacaaggcaaatatgaaggaaagctgtgctgtgtgagtagcctgatcccagctgactgcctagttgtaaaggtgggagcatgttctccatttgcaacagagaggaaataagagtcctaacatcagggtgtatgtgttctggggcacccaggactgtcctcagataggcccatctgtcaggaaaggagctggccagaggatatggacaactgagcttgacacctggactaaaggagaagcaggaatgctgtgttttacaagtgactctgttggtggcttccaacaaatgaaggaagattaaacgtcaaaattcaatcacccagagaagatatgggtcaagtattattcttggtgctgggagtacagtcatgaataaagcaggtcacagcctccaggccacatatattctcccacccagcccttagcaggttcaaggaggtacataattgaaggagatgttgacatttacatacacatgtttactaaataaaatgctcagaaaagagacagttttctttgcatttagcctcattcatgacatggtagcatccagaaggcctaagaaaacacccccaaaagaacccagcatgcaagttaggagttaggtaaaaatcatcaacaaatataagggggaagaaaacccatctgacttattttgcccgttccagggtcctctgtctataactatatttgaaattgtgttattatacactatgacccatgcttatcttccaagttcctcataatcatttctcaggtcccgatgatgcattgataggctatagattaaatatgaaattaccacagatctcaagcacccaaagatttatggaccgagggctaggcctcgtatcaaatcaaccatctaggaaaatatataattttaccataatattaaaaattactggcagcatcttcatcttatccgattggtggtgtcctgatgataagccacggtacgcaaagagagaaatcatgtgataaattaaggaagagacattgaaaaatatatttattatgtttgtgtgtgcaaggatttcacttgctgtgtatcgaataaaaagaacttattttttaatgcccacttcctcagttggtgccattcacaggagttactaaagtacataggtagggaaaacaaagggtatagttagagtgatgctgttgattctaaacagaaatgtttcctggtcaccatgaatgatatgcactagaagacctagaggggttacaatctgcatttcattctcctctccagaattgtcttgagagtctagatccttatggcccaaagggtggtccacagatcagcacgtttgcaatctctgagagattgtgagatacagcctctgaggccccccaccccagactcactgaattagattctggatcttgagttagatccccaggtgattcatagatgtattgctgtttgagaagtgtaggttcgaggcaaatcatgctgtgacagacataaagcatgaaaggaggtggggagctcttaatgtatctcggaaagtgtcctgaatgaccgtgagacatgacccaaatgatgatgatgataaaccagagcagcaaaacagtaaaaatggtagctaatgtttattgaacacttactatgaacaggacgctctgcagagggtgtttcattcttgacccaacataatcttcatgaggacagccctatgagtagacagtaaataaatatttgctatgagtaaatatttcctgtttacaaaggaaataacgcctaagagaattaaagaactttcccccagtctgcaagcttgttagtagcattgccaaggtggacgacacccatatctgtgtggcttcaaaacaactgtaagatggtcccgttagatagaattgctagttgacaggggaagctgtatggagggagaacctggaatattgagcaggaaattaagtcctgaaa

SEQ ID NO: 39325 - DNA, 4047 bp, Bovine  19866880605177
  misc_feature (1)..(1): n is a, c, g, or t
ntcgaggaatggagatctttatttgtgggagaaaaaacccaaaaaacaaaaactagtgtaggccaatattagcattaacattaaatattatgagtatatatgaaaagtcaaagtgttgctcagtcgtgtaccattatttgcaaccccatggactatagcccaccagactcctctgcacatggaattctccaggaaagaatactggagtggattgccattcctttctccagggattcttcctgacccagggattgaacccaggtctcctgtattgcaggtggattctttactgtctgagccagcagggaaaccctatgagtatatatacatgtatatatgaagtatgccaggcctttgaagtactatacttgaactatcttattgaattctcaaataattcttaaaaaatattaatatttgtttccattttacagatgaggcaagtgaggcttagagaatttaagttacctgctgaaagtcacttatatgataaggatttgaagaacaactcctgatttttgtgagcaagcctgagtagatttagtttggagttgaaagtgtcacaaaacatgatcaatacttctgtgaactgagatagaacatcctaaatgctcacaaccgtttcttagaaattttattgcaattccttccaacctacagatttgagtacaagcccttggggcaaaggataaacatgtgcctgggaaggtccctgcgggtacaggctccagttcgtacaagtcacccttagggacctactaattcagagagtctctgcacccagcaggaaggaagttcaattaaaggcaaatgccacattgtgcatctctgctgatgggaatcacctgttttacacgaatacctctgactctggtctgagggaaaaccactcagagcatttcaagtagtggaatcagaggttactgaagcggaagttatcagccagaccctgtcctgtattatctccttgcaggagaggaatgagaatgatgttggcgatttttgatctgattgtattgggaagataatgtcaatgaaaattgagtgttattactagtgcaaagtaaatgtcggggcagactgagacatttaagaaaaaattggagaggccactttccagggaaaactattcaattttattaacattagagctattacatgccttttttctttttttggcaaaaataaaataagataattgagggcacctgataaccaaatatcagagtcaatttatataagggtataatccagaatggaaccacaagtgacctgttttactttgctagtttctctttttcaaaatgaaggacccacaactgcatatgcaaaaatatgttaactactctattctgaaagtttggttacttatttggtacacactggtaaccataaaatcaaaatcctttgaaagtataggtattaactttttcttgctcgtatcctactctgcccttcatcatccaactgttttaacataaatgaaatggggtcatatgcacatttttgtgtaatattggtaaccatgatgaagactcatgcactaacaataataaaaatattaataatggtcctactaagaatagttccatatcactgcttactatgagtcttgtactatgtaattttacatgcattatcttattcctttttcacaatgacctccgataatcctaaaatcattgtccatttcccacgaaggaagcagaagctcagaagagtgaaagattttgcccaaggtcacatggacagagcctgtattttaacacagcccgttcacctcggtgtctgtttcatatcactcctcgatgtgccttccacttgcacagtctacttatacaacaagatttgtgatacttaaaatcatattttaaaaggacctcagggttatttaccccgtgtcctgattagtataagatcaattccatacaaagacatgccttaaggttgtacaaaccaaaactataatgagagttcaagaagggtttagagacattcctggatgatagatcttccccagttagggatgcccctttgaggacaatatcaagaagggcagctctcatcatgtcacaccaatgtcccttggcgctactataaaagacaaaatattgaacagtgtggactataattcttaccccatgggactttttcatgttcttctgattcttaaaatatatctaagtaacctatttctacaattcatcaagcttaactgtgaggaataactgaatcttgctgttccttgtccaactggaggcaaaggtgaagagttcttattagaagaaggccctgctatttctgcagcttgttttgttggagagaaaacgattggtctatgagaagatctgggtccttttttcatctctgcttcccaggtgctgggtgaccctgagcaaactctgatcctcactttactcattaacagtgtgaatgacttgaagctggggtgcttctcctcaaagaaaggatgggacaaaaaaaaattcaccagtcagcagagacagaccagggaatctgtttatctaatcccgaattctagatggaaaaacgtgccttccgaaaaatttatcaccacaggcctgcccttaggcaaatttgggattcaacatttacattacaagcatatatcaggaaaccccaagacaagaaatcaaagtgatcttgacttagttgtattttatagagcatggcacaagccaacacatatttctctgcaaagatggaatgtctctacaaggatgggatacagcttcaagtcaggccccacaaaatatacacagataaattccagagaacataagctcactctccaaaactgcaaagtaaacaaggaaacaggtgttcatgagcagtcatcagcagaaacgacagggggaaaaaacctttagacattggaattatgagagtcaaattgtaacgtaactatgtttaaatattttttaaagaactgaaataatgagcaaagaactcttggggacttccctggtggtctagtggttaagactctgtgcagccaacgcagggggcacgggtttgattcctggtcggggaattaaggatcacatgtgccactgagtggggcccaaaattaaaactcctaggaataaaatattctaaatagaaattcaaacaccaaaaaattaaaagcatctaaataaaaacccaatgtatattagtcacatattagattggaagatacaaaaagtttattcagaatattgaagagagagacaagaagactaaaatttgagagaataggaagtaggaagataaaaggaaaatgtttcgcagtctttctttcctgaaaataaaaggaatgaacagaatgtgggataataatatggctaagaatttttccaaagtgatgaaaaggttgaatcctcagaaagaaatatacacctacctagccacaatgccataaaattgcacaatatcaaaaatgagaagattttgatgactatgagagattagaaactcaggttgtctacaaaagaaaaatgttattctcaacaaatttttcagcaacaacaattaaagccagaaaagaatgaaaatcttttaaatctttaagtcactgaaggataataaatgtcagcctagcattgtgtaactgactgaactattattcaatataaacagtattaatagatatttttcagacaaacagaaaatgagaatttgttaccaactgatcctaaattaggggcttctctggtggctcagacagtaaagaatctaccttcaatgcaggagacctgggtttgatccttggattgggaagatcccctggagaagggcatggcaatctactccagtattcttgcctggagaatccccatgaactgaggagcctggtgggttacagtccatggggtcacaaagagtaggacatgactgagtgactaagcaaaagatcctaaattaagaaactttttgaatattcattggaaggactgatgctgaagcttcaatactttggctacctgatgcaaagaattgactcattggaaagatcctgatgctgggaaagattgaaggcaaaag

SEQ ID NO: 39326 - DNA, 1403 bp, Bovine  19866880606081
  misc_feature (1)..(1): n is a, c, g, or t
nctgaagcatttgagggtgatctttcctctgaccctctatttgtcccacttcacttgagattaatgagctgattctgtggtaccaggataaataacacctctaaatccttgattctcaccgtgattttcacattcacacatcaaaaggactggtcacagcattccatcccccttttgaggattttgtggtacttacctcagctccagatctctaaatcttaggtggaattgccctaaacccagaagtagcaatgccttattttgatttctgctgttggtggctcacaaaacacgtgactgtaggattgggcaggatctagggttaagtacccacagcccaaggaaagacatttgcggaaattaattgctcccaacccctaaggctttggagttatctttggagttggtctctcatggtgttcattagcatatcccatcaaaatccagaaagctctggatttctatgccaagggtgttcctcaatgagattgtatttgggctccatccatgaatatatgccaccaatggcctcaacctctacaattagaaaggacctcctaaatacattaaagatgattcattcaggagatggaatgatggactgctacttatgatggcccatgcccttcttcaaagccagccctgatatatttagtaaactcatattctttttcaaaaaaaaattacctaatcaaatctctcatcaaatgagcaatccattgttgatattatgaaggcctttaatctaccataaatctttattagaactcatccagagcttctagtttgagagaaatgtgattatggcactcttaaaatgacattacatcattggggtgattggtttatcatttggagaagagacatcaatcataactagcataaccacacagtaaatgaattcaacctttctaccgcggaacaatgacactgtaattgctcaaaatcaggcttaaaatgaaatcggaaaatgctctttcttcaaatatgatgttaacttaatggaatatattatgaaaaatcatgtttgaggaaattctatataattaaaaatatgtggaaatatattcccttttttctttcatcagaacctgattttagctacaggatcattttttttttccctttgcttctgagattatgttgcatttaattgaactatcctcgcttatgttttgctgctttttatttcatactatgtaatcgtgatgaatattgtattataaaggacaagaggcttttgaaatgaggtgcacctgctgatagctttttaaaaacagatgattattagcaagaaaatgagcttttaaaaactatctccttttatgcatatatgtatacccaagccaagatgatttccataagaggggtcaattcatactcagggctgtctagaatgtttt

SEQ ID NO: 39327 - DNA, 2065 bp, Bovine  19866880711171
  misc_feature (1)..(1): n is a, c, g, or t
ncctgacgaagcagaccacaggactatattctgagcatgtgtaacccgctaggtgtgtgtctttaggtagcttgcttaccctgccctcctgtcccatctaggtaatggggattatgagaggggcttcttgacagtgttagtgagaggtcacccaagacaaaagatttagcacaaagctctgcacaaagggagtgtctgataaacattggaggccagttacagtgaacatttctgagtttgctggtttcttattttggtaaacttattgcagttcttgaaaaccacaagcctattaatgaagaatatacaggattctggattttaattaatcccagacagctttctacaagtaagaaaatatactgggtgggttgatatgaatccacagttcatggttcttcagagactgacaactgtaggacccttctctcacggtggtctttcttaagtaggaagtcgcatgattccttcagaggcaaagcctggaacagagcgtgtggcgttcagacgccctctcgctccaacccctggtcccccaggtgtgttctgtgccactctggaacacgatccagccctgcccagttctctccccatctcacacagtctccctgtccaccacattccagccatgctggcctatttttgtctttcaaaaacagctcttctctttgtcacagggttcctttaccttcaagtctctgtttaaatgctacctgctgaagaacctcccatgaaaccctctcgtgcttgcccctccttcccagtatacatcacttatctttattttcatattagcacgtttcactgcttgaaattttcttcccagtctgcttatcatctcgatacccactatagaaggtatagaaggtctgtggaagacgactcttgtctgctttatggaccactgcactcttaactactggaaaagtgcttggcacatactaggaattcaacaaatacttgtcaatttaatgcatgcccaaatccaagaatcaataagggggttgaaactgaaacataccaacagcatcagagagtccatagaccctttggccgtaggcatctgtcttgtcccagatgaaggtgtaggccaggttaggagaggcctggaatgacttctggaagaggtgcccctctacagcaaccatgagatgaaccttgatgaggttcaggggcactgtggattgggtcatggtgatcttcagcagtgacttgtagcctgcggtcctggagctcaggtagcgaagcttcacggtggaaccagggagctcaatttcttcatgaagaacctggaggagaggaaacacaggtggaaacagtgcatcaaacacaccccagacgctaagctgcgtgcaacccacggctacccgtctgctatcgtcctcaccaaagcatcccaccttacaggggtggggtgtaagaaccccttcccatggctgaggagagagaaaaaaaccaacaaccacaactttatcctgcacgatggggcgaaggggctgaggttatgatttttggattaataattattcttggtcactgttgtgtttctttttaaaaccacactgttggcaaaagatgtaaataagaacagcaggctttattgctagttgcatgcaaggaggccacaagaggctgtaattatatgaacctgcaacttccactgacaattggtataaagcaacagggaagcaataatgtaatatgccctctgtcgtaacaccgatgtagatcattaaagcgcctcttatcatgtatctctgtgactaacaggaataaaaagcaatttgcaggtggcgtgcacatatgtgtatcgtttttattctattaaaagctccagtgactgccaaagtcttgaacaactatctggaaacatctggaatgtccaggagagattcggttttctctccagggacaataaattatactgtgaccttactttttgtccctcccgcttaatagtagtttctggcttaccccaggagaaagagacggtgggaggaagttggccagtgggtttgggtcagggccggatcgagagtcccaccccgggacccggagctcctac

SEQ ID NO: 39328 - DNA, 1893 bp, Bovine  19866880750119
  misc_feature (1)..(1): n is a, c, g, or t
nttgaatgctcttaactgcaattttgtggcatgcttcagtatttattgttttagagtcaaagattcagggagagagaataccctctcagggagagagaattctttcatatggaaagagataacatcaaacagtgattgtctgccttcgatcatgtattgatagatggctggaacgagaatctgaacagttcaccaatgtaacactctttttgatacaccaaagtcattgcaattttacttacaaatacagattaggaagtgaaagactgattgactctggcagtttcaaatgcattatgtttgttctgaccccagctcaaatgaaaatagaatgattccaaacctcggaatggtcccgaaactgaaattactcatttgaaactgccaggactgatcagtgcaaaatcaagttcttctgagtccttcatttggagaacatcaatttcaaggatttaagataatcgtctcaccttattatcagataaatcttcctttacataggcagctactgtctttcaagatagtgcctcactttctaagaaaggaaagacaagacaaaggtactaggggaataagtgatcaaaataaaaattagagaaaatgaatcagaagattttaagcaataaaactaggtttctcttaatcacttagaatcacagaaattctaaagcaccaagaaatatgtagcccaaagttgacttttgaaatacggggaaactgagtccctgagaatgaaagtaatttacagagtaaaaaaggacgaggaagttgatgagaactgactctgatttttgccccgattaagatctatgacataaaatctagcatcaacaacatccatagtagataggcccattctgaagcaaaaggttaattttcaaaacaattagtttctcaaaaaatactagccctcaagcagttgtgaaatatttctcgtattgctgttctcattaaggagaataaacagagaaccgtttggatttcttcggttgtttataattcctttagcaagttcagacttatttgtgtctgaggaaggaagcctcttatatcgaaacatggcatataaactaacggctggttttgacattgaacttcagctctaggattggtaggagtgtttgcacttaatgtttataatgtacaaatagatccttgttaaatcctcagcaagaacagccttgtgtaaacccttctccaccatctctctgttcatctccctccctccaaaaaatgaaggaggaaaaactctatcacagtcactaagcatggggattattggaaagacggaatgactgtttggtttaagtataatttcagtgtgtaaatgttcacagctacctaagaagttaacagaaggtgaaaccaccctacccttactcaaatttccctttttaatataaattctcccccttgaattccctttgaattcttctttgtcctctgttgttttctagtgtgatggtaagttgtatgcccaatggcccaacaactactggggtgatgaggaaatagcagccctaatttaatgctaattatgtgccaaactgttgactatcattgttccaagtagacctaaaggacaaaactaagtagcatccccattttacagatgagaaaactgagataactaaaagctaggtagtttctatagcgtctcatagcttggaggaagcttggctttaactctgctgtgctcctgtttgcccccttttactgcactgtctccactgagcacacccctagaggccttgagttccaagaatctctagatctcattcctgttgatttcatcccactggtgaactttctgtgcaaataaatggtaggaggaaaaatactcagaggcactgagaaatctctcttcttccatcaggacttctgtgttgaatt

SEQ ID NO: 39329 - DNA, 1048 bp, Bovine  19866880763393
  misc_feature (1)..(1): n is a, c, g, or t
ncatatatagacattaacagtgccattaaacatctcagcttcttctcaagagtaagaatcacaatgaagtgtctgtgagactggtatgtaaatagggaaagtaataacgcacagactcttcttaaaatactttctatatcactattagtttctgcagtgacattttaaagttatttccctctatgttctttcctagttagccaatggaatgctcactcacagagagagaaggcactttctgatgcacatttttttaaaagttggttaaaattcacgttatgaaattgcaaaagtgttgataattcattcaaacttggttttttcccatgcacttttctaaagaaaatttaaagtgtcaaaaatacgtatcttgtgctcattattaaatgctaaataccacagtgttttgagctgcctcgtggccattgtaaagaaaacaggtgttctgatagattataaagtgtgagtcagatgatgtgtgggacagaattttaatgaagctgcaagcatagaactctgactggcctcttgaatatgatgctcagaagtagttttaaagacaagatagtaagaatacaattcgggaagcattcattaataatcaacaagtaaatgggacatgaaaaatcattacagtaaaagaccttagcattacaatgtaatttaatatagcattaaactaaggagaaggtgggtataatttgaaaggacatctatgtctttgtatatgtgcaaatatacaaagaaagtatcttaatcactacattaagtcaagaccgtaagcagaagtcacaattctagatgcagaggtgcctctggagatgggaaaagactcatgattatggaatccaagaataattatcaatttctctaattaggtttctatttagagatcttttgtgaaacctaacttttttcccttttgtttttcactaaaatgtctaggaagaaagctgagtgaaaacacacttggagtttcaggtgtctgaggaatttcaaaagaacagatctaggctttgtatcttcaacctcttaaaaggtcttccag

SEQ ID NO: 39330 - DNA, 2066 bp, Bovine  19866880772443
  misc_feature (1)..(1): n is a, c, g, or t
ntttccatagcacattcgggatgatgccagagaaagttcatttcacacctgaaatggttagacctcataccgttccttacagtatctttctgtctgtgctctcaaccctttaaaaaaaagaaagaaaagcaaggagaaggggggaaaaggaatgatatcttcctctggaaacatcacacggaagcaacggtttcacggtggtgcgttaggaaactcttagatgtcaggcaccgaggagatgtgaaacagcatctggtgcttcccgtgcaattttttaaaaaatcatcaaagcactttacatacatgaaaccaccgacacttctgtgggggaggaattattatctggttatcatgaactgggaattgcggcactgagaggttaaatgattttcccagcaggtgagaggagaaactttcccaggccggccaggagaacttccctatttgtatttgtcttctaatgagggctgctctgatgatccacaggaaaattttgggaattggggtaatgatttatcagcgcaaggtttttaaaagccatttcccatgtttcaaagtgaaatttgaccatgagaattcatcgcaaatgagcccagataactgaggctgacacaaattcgtttttgaagtgaaaggatgggaggattggccttgttttcaaactgttaattttcttgttaatcatggggttggttaataactacctggttatgactgtggcagagagagattgtctgaaataggtcatgccttcattcagcccggcgtgtcctgtcttgatggaaggctcgggaagcacagaggctcagctgtgggaggggcgagggaggtggaattgatgacactgtgaccagctcttccagggatggggcagatggaagggctggcgcagggcactcttctgttagagaccagagattcaggacagacttcacagggagccctcaggggacaggagggtaacaatggcctgagatgtcattcttgaaatgtaggcgctttttaattccttaaaattgtttttttgttaataatgtgaattaagtattctctcattctctgtgttctatgaaaataaaacagttggaatatttagacaagattaaaatgactgttaaaaataccccaaatttggctcagatggtaaagaacctgcctgcaatgcaggagacccaggttcaatccccaggtcaggaaggtcccctggagaagggaatgactacccactccagtattcttgcctggggaagtccatggatagaggagcctggcaggctatagtccatggggtagcaaagagttggacacgactgagtgacttagcacacggagatgatcactgttaaccttttgttatgtagagtccctctctctcctctctctgcataagattcgtgagagcaaggactttatctttttttcaatatatttttaaaataggataattgcttcacaatattgttagtgtctgtcatacatcaacatgaatcagccataggtatgcatatgtcccctccctctcaccccgtctcagtcttccgttgtcacagagtaccagttttgcgtcatacagagaatttccactggccatctattttacacatctgtgtttcagagttaactctttcaattcatccctcctcttcccttactgtgtccacaagtcagttctttatgcctgcatctccattgccactctgcaaacagattcattaggactttatcttaattgttcaccactaaattactaacactcagaactgttcctgagcgcatagtagaccctcaataaatatgtgctgatgtaggacggaaagaaaaacccattacatgtattatatgcaattatatattacacacataattatatgtgatggaatattcatgtaattttcaaatcccagtcagagaatccaccttatacaaaccctctttcaaatggcaacatacgggtaccatgaaccatcacatgcagacactaggcttcagtatttgagggctatggaggccgactgcctgagctggaatctacacttcagcacttactagcagaatgaccttaggta

SEQ ID NO: 39331 - DNA, 2564 bp, Bovine  19866880785916
  misc_feature (1)..(1): n is a, c, g, or t
nttgcaaagcattatgaaattgttacttcttattgcaccaactgttagggtgtttgagagcaaggaatatgtcctattcatttttcttgtaaatgattattaagtataatgccaactataattttgtaagtgatttctctgtgtagaaattgtattaaggactttatacgcatcactgctgctgcttctaagctcctcaatgatactgtccccattttacagaaaaaaatattgatctgcaaaaagcttaatgtatttgcaaagaagcatagagctactccgtatgatgatggtacagcactgctttgtgcaaccagactgttattaaccattaaggaaatgttcagtggacgaaatgcttcgagacctgcctctaaagatctgagtagaactacttttcattccaccccaaaaagtagcaagactcaccggaaattgaaattgattaaaataatgccacttgaatactcattatatatatatacacacacacacacacacatatatgtgatacttatcactcaacctatatatttattatattacatgagtgagtgaaagttgctcagtcatgtccaactctttgcaaccccacggactatactgtccatggaattctccaggccagaatactggagtgggtagcctttcccttctccaggggatcatcccaacccagggatcaaacctaggtctctcgcattgtaaacgaatttcttaccacctgagccaccagcgaagccccatatattatattatataatatatatatatatattgtagattgagtgataagtattgcatttaccccataacaaaacagaaaccatcaaaccaaatattgccccctcttccaaaaaaatagcaaatgttaatgttattgattaaatctgggagaagctgggttcaaacagataagagaagtttttactgttgaactcgtccaagcttttaatatgacaagagttattatgaagtgccaataaaaggctattatatgaattatttttcaaactaacttcactaagaaacactttctttgtggagttttgtactgcactgactttctatggattatattttagaaaattcccaaggggatgctagagcaatcagaactgttcagacttcttcatgcatttaatgctgacacacaaatggataaagaccaacactgtaaatcagcattttattttgtgcagatatggttcagtaaatgcaactgggcacttggtacactaatataatgagcactttttaacagacattgttttctaaaaagaaaataaagttatgcagaagaaattccttgcatcattctatgcaaaatgcataacggatttttaaataaaattccaaaataaattgcctgattaagacaaatgaaggaataataaatgaaaacactgaactcatatatttaaaagggtggaaatacgttgttggagaaaagagggaagaaagcactaccatttacaaatgactcaaagagaaaaatatggttgaagatgttaacatttttctactattctatatatgcacaaaagtgaataaggtaggttgaaaatttcaacaaattgaatttaaggcatataaatatatgcttaaaattttaatatcatggttctattcaacttattaggaaaaacaaataagaatgacattcgagcaaaagaaaaaggaaaacagaaatccctctattactatgaatttagtataacaataatagtgcaaaaatatatataaacacacacaagtatattttacagagcagaaggtcccaaaatagactatactgcacaagacatttaatatagactgaaaatataggtgaaaaatacaagtgaaaatgctgataattgattaactttgaagggaaaatagatccttatctgacacatatataaaatttttaatggattaaaaattaatattattaacaattcttaattactagaagaaaatagtacctatttattgaaccttataatggggattcttttgaagctgagaccaattcaagatagttagaatactagaaatctttactacatgaagattttaaatagcttcatgtgaaaaaatacaataaaaaaactcctagggtaaaatatgagtaaataatatgacaagcagaagttgaccataccctaagaatattaagagtagttataaagaaataaatctttattaaaaaaaatgaaatgaagcagaaaaatcagcggaaagtaaataaatttaaagtatataatcttaatataaataaatatcataaatttaaaaaataatattatgattacttattatacaggcaaaataatcaaaaggacatgtgaaactattattagtatctttttatatagcatttaaaaatgtatattttcaccagtatatttttccaaattattttataagaagcatataactagatttttataatcataaaattaataaaagttatctcttaaatcagattatatttttaaggcatacactttcatagaatattaatgtttttcagtgctatttaatacagagagaattcccacaagcaataacaaagg

SEQ ID NO: 39332 - DNA, 2205 bp, Bovine  19866880818887
  misc_feature (1)..(1): n is a, c, g, or t
ngtttcctaatcctgtgaacatgacttggatgtatagagtgtccatgagttactatttgggtcaagaaggaacagaggcagggaattctgtgttgataatgcaggaaaaagaaaacctatccccaaatgataatctactcttctcatcatgggcacccttctacaagctagtccccaaacctttctcaaaactcatcattgaagattctccccctctgccgctccgtgagacaggatgtgctcaaatcagtctcttgaccacacatctcagtcctgagaagaagagaggcctggagtgagcctgctgaatttcttgagttcccgtaccaggaaaacttaaatgaaaaactgagtttgccatgaaacagtaaaaccttatacgaccttcaaacggttggatggcatcaccaactcaagatacatgagtctgaaccagctctgggagatggtgaaggacagggaagcctgcagtgctgcagtctatggggttgcgaagagtcagacacaactgagcgactgaataatgaccttccaaaggatgcacagctaccgaggggaaaggggagtagggggaggaattgggagattgggatggacacatacacactattgatactatgtataacacagacaactagtgagaacctacaatataaaacagggaactcttaatggtctgtggtgacctgaatgggaaggaagtccaaaagggatacatatatgtacatgtatggctgattcattttgctgtacagtagaaactaacacaacactgtaaagcaaccataatccaataaaaattaattaaaagaaaaagaaatacacttgtgtgtgtgttggtgaacctgctatgagtgaaaaatgagatgggagcaatgtaccatacccgaccacgctgctgtctccatcgctggcttccttgtcaatttcagcagcaccaccctctccccgccccaggtgggacctgactcaaattgtagctcattagcaccaagggagagaagtttaaggaaaaatgtgtcataaacaatggtaatcctggcttaagcgggagaaagcgacctttctcccctccctaaaacaaatcactgttttgggccaggcgtgcctgttttactattaccagttaatacgaccgtgggccgaagatgcagctgtggccccgggaacagcctccagagccaggctgaacctaatccctcaggtaatggaaaacctatttctatttctgaggcctcactactcttcataccgaagagccttgtgcctgtcacacatttattgaagcttattactcatcgagacagcggggtccagttagtatttggaattatattttaaatcacaatttttctcttatttattttgggattccaaggctatggtgaaagcatgtcagagttattcttcatgtgctttcaaacaccttaaagcccacccctccccctgaaattcttttctacgcagagaatctttacgcatacgtggaacatcttcagccaagacacaggggtcacccctgtgctctgggacctcaggactccaccagatcacagggttctaggggagagatttccagtctcctcactcagcattagagtaatcttccccaggccactggctttacttctccctctcacaccacgctcttttctttggctttcaaagataaatggatgcagtctctgaggatgctggggacggaggtgggaacagatgggctaaaactgcagtctcatcatccagtggaaaaataaagaccaccttaatctaaagcagaggattttctgaactgaccatgaggcttgagcttattcactaggctagtggtgaatatgtggttttcttgttcaacagaagccagaggaaaggataattctctctagctattcatctggcctcctgccgtctttatcttcccaagaaaaatatatacaccatatacactacagtcactcatagggatgcctccccgtatattttctctctggtgcatgcttgctttttcttgcggcatttatgcatttttcttcctcagtcatgtttttttttttttttttaacatgctctgccattagaatctgcaccccactttttcatgtgaaagaaaatcagccacaattggacagtgtttgcacaacacgtttctctgcaatttacacctagttactttcccgatctgggagtctttctttacatttccac

SEQ ID NO: 39333 - DNA, 1442 bp, Bovine  19866880820094
  misc_feature (1)..(1): n is a, c, g, or t
ncgtattataaataggcaggaaatgttgactgaaagaatgaatgaacaagcctctgaatgacaggaggcaacgagattacacccacatgccatgaatgcgatgcgttaacccctcttgcagtcagagattgcctcgtgagagatccgtcaaacatggaggagtgaagcaaaactggcacatggacatcgtatgtaggctactgtctgttaactttccatttttactttacataccaggagagcagattgatattgcattttaattgtgtatattagaggaaggcatatggttacaacattttcctatttaccttctgtaacatgaaatttgtcatttttttcccccaaaataaaggattgaagggagagtgcctgctttttacaccagttcagttttctcccgtgcaaaagtctcctgagatgtgtaacgagtcaatgccaagatgatgctggcaccattttcttattgccatggtgatctccagctctcctgaaatctcaagggagactatggtattttatataaaagcaactcgaattttggtaattaaaaaagctggaaggaatcatctttctacattttgccagcttgagtaaatatggatacaaattatgtctagggaggaaggagatgattgcagtttattaggtgggtaaccccatgttagaagatgaaaagcatcatggaagtgatgtgtggggtatttatgccaattcagagccctactgtgaatcttcaagtattctcatcacaaccttccaacaaacagctattctctttcctggcgttgctcgcattctaaaatagagttgaaggtatgattgtcagagtattttaatgttggaagcactgtgtaatgtatgtaaatgttggcagttatcaaagtaaagggaaaaaaagtgattctcttaaactggaaattaagttagacaagcataattcagactctaggttaatcacagcctccccccatcaggaaagttcttacattaagagttcttttgaacttcatttgagcaactgtgctctcctagaaaagcctcaaagattaaagggttttgtttcacttcagaagacactggaaatttttttaggcattccttttcagctataaaatgagcacttggaataaatgaacatagaggcaaacattaaagggcagaacatatataggggagaaaccagggctggtggaaggaaagtgacttcttgtatctttgggtgtaacttggtgctcagtgcgagctgggaaaaagcaagaggcagctaaaggcagggcttggggtcctcacgtgtgtgtcgtcctattagggcagctaattgtcaagggcaaagaaagagaaagagtagaacgatgctctttaattaggaactttacacaaatgtagattccccatttgcagatgggcattttaattgatttttacaaaaccacctacac

SEQ ID NO: 39334 - DNA, 873 bp, Bovine  19866880848875
  misc_feature (1)..(1): n is a, c, g, or t
natttactggcgggggaaaatgtccccttttgcccttgttctgaagcactgctgtccccctccgcttgcatgctctgagcagtcagaatcatggaaaagccagcgatcatggcaagtcaagtcggtaactctctgaaactgactgatagtggacagcaggcaggaacatgatctacctgggttccccgctgttctgacattcaggactcagaccctccatgacagtgtctctccttttgtggctgcaccacgctgtccatctcctgccaagccggtgattgttctagtgatcgttctctcaaaatagctccactccagggacagcccccatcccatttctcgagaagagaaatgaataggtctgggctgatgtgcaccgagggttgcagtccagctgccagtctgggagttgagcttgacttggagggtcaggtaagcgagccgcggtgcagatgcttggaaatgcacgagacagctacaatgcaggggcgcttctttaaaaaaaaaaaaaagaaagaggggggaaaccgattccccacgcatcttcacattcattcgctgttattacgagcactcatgtccatttgacgagttacatttcctggaggagacggagcttagccccacgcagggataggcaactaactcacatctcaaaccattatagaatttctcatttctattggcatattctatcaaggaacataagttctatggggattggcagactagccaaggtgactcatttgagctgaaaagagagaaagagaaagaagtggggaggggggaggaatgttaaaagtctctcggctgcattgcacgaaacggctctgcttaaattttattgaggatcgcgctctgaccaagtgccta

SEQ ID NO: 39335 - DNA, 1058 bp, Bovine  19866880859265
  misc_feature (1)..(1): n is a, c, g, or t
ncggatccgcaagacccataacccacttcatcccatctcacccttcagcctgggtccagtcggttagcctcacttcacagacacgttagagtttaaacctgctcatacagtgaatatgtagcagatttatcatcatttcaaacttgccttgaactggctgatcaaaaggcaagtttcttctttgaagattttcttttgtaagcttcactgccccaaatcaaaaagggcagtggtacagactcccaggactacgctctgcattttctaaggcaagtgccttcaagtcctggagcatgttttctatttataagtgggtgtgctgtgtgtcagactaattcctgatgcctctttttttggtccacaagatttgcatgacctaggaggactatgttttggaggaagttttttagcccttccgagtttagttttaacacgattctgctcttccccgccccccacccagactttcacacgaaatccaaagtgaatgcctctgaaggggtcttgatgggttttattggatcaaagggctctctgataataaagaaaccgcacagagatttactgagtgcattaaaaaagaatggctttgcgtcagccctggtaaaattacacacccataaaaaaaaaatattttggccagccactctttcagaaaagtgagtggtgatttccaaaatggtggattccttttcaagtttttcagctcccccattcttgacaacatccctccaggactccaagtcagaaacctgaggagcatactagatatttctgtcttcacctccatagtcgacacaccacaacttctatcaccaatctgtcttctctggaaggcaccgctcacagatccctcctgttttctctatttccacggctccctttctgatctgggctctaaccgactcatgccctcactcgttattgcctgagcctctggatcagcctccctgtctcctgtcttacttcccaatctatctgaatcttcaatcaattagcgaataaatatttatggggcatctactaggtaactgacatgctatcatgtcgtaatttta

SEQ ID NO: 39336 - DNA, 1819 bp, Bovine  19866880863552
  misc_feature (1)..(1): n is a, c, g, or t
ncttatgtcatgatattcattcatttgacaaatacttagaaaccacttactagttgccaagccctatgataggtgatggtgtgcaatgggaagttaataataaatgaataaatgaatgaatgaataaataaatgagagagacttcctgctccatggaacagaattctaatttaggagagaaacaagacattattcaaataggcaacaaattaaaaatgtaattgaaggctaaggaaaaatactttgaaggacagaaacatgattttgcagaacacatacgaaagcaagaggccaaatttaatgagatcaaagatttttctgaggcagcaccaggagctaaagatgaaaggaaggagagtgaactgtgtgacactcagggaagtctatttcagacaacacaaaacagtacacgcacccacaccctggctcaacggtggcagagcacccatggtccccaggagctcacagcaggctggcatggcaggaacttggggcttaggggagagtggtatgaactggactggagaggcatgcaggaggcacaacagttgatactatgtcagtaaataatcctgagtctttttcaaaagctgattctgagtagatacctctgaatagcagaagagtatggaaccactctgaggtcatcgaccctcatggagcatgtagacctgtgcccagtttggagctgagcaatgagaaggagatggaactagggaaaatgaaacctttaagaaatgttcaaggaatcatggacatcatatgtgatgaggaaaagattgggggtgggggctggataggctttcaggatcagcatgctttctgcacagctgaacagtccctggctaatttccctttctaatgagaccagcacaaaatccatccatttaggctattcagcttttaggtaaatgtaccaagctgtcggggtagcgaggaaagaggggttgacattgatggatggagttaaataccagagtctccccccttcacgcagacttttctaaagcactattgtgacagaaaggcctggaagattccaggtgggcagggcaggctggagagagtccaagtgtctccctcagtgggggaggaagaaggctggaggggggtgtccctctgtcaggatggaagggtcctgttcagatctggcaacagccttgcatgtggtgggatacattcctccaaccaggtccagagggacatatggctttcctctgacgcatttttttttttttttttgtccagaattacaaccggagcaatatccactccttcattcatttctgtggtagggctctccaaccttttggacaataaattgttatttatcttggttctaaaatagggatgacattgctcctgacctacctttaaaaaatggttaaattgaagtaaggaatgttaccgtgccttgactcaataactggatgtattataccctaaacgtaaaagatcttaaccaagccagactctttggaaagacctgagactatgtggggagtggtgatcattttatgtttattttctgacagttgtcctgatcagatgttaagattcatgactttgccctacagttctcatcatttaaatgaatccagtggcaaaggaggtggtgggttacaggactgttaccagggtggatgtaatgttgacagttacattcagaaccaaggatacttactgcagacgaaaggcacttagaaggcctagaatcctcataacaagtctaggacacatattgtcatttttttgcattttacagatcaggactgaggcatagagaggtaaaataatttgctcaagctgataaacagag

SEQ ID NO: 39337 - DNA, 963 bp, Bovine  19866880914523
  misc_feature (1)..(1): n is a, c, g, or t
ntcagtgcacagagaaaattggagaatgagagagagggggggatctgaatccatccggccaaaaggaatgcaattaataaaatgaaatgcagagaacagaatgtggacacagcatcgttgacattggatcgcattgccctttacaatgtgtgtatgtttaggaaaatcgcaccgactccctttgtccttatctctggccaccttgggagttttgatccttaaaatcacaaagaggacagagaaggatcacaaagcactccctcttggatgcgctgccatccgtctttttgatgtgaaacatctaaaaccaaattctcaaaaataattttccactgagcatttattctgcgctctgtttctctggtgattcttaacaaaggttttgttgccagtgcccagaggaaagactaatttaaatgtagaaagagatgcttaaaaaataatgtcatctgttggcaaaatctccgagggtattaccttcctttcacacaggcagggagctaaacctgattgcatttagggttatctttagcagctaaactcagaatcaaaacattctcatgaggactattgttctaactaatctacttattatgcttttattcagttttaatagtcttttattaaaaaaaaaactcaaaggggacagcaatggattttgcaattattagcgaggaaagcacagcctatgacctactagcactggtttgtctaagaatgttcatcttttgaaagctgtattttaaaccattatgttaattacaggcgctcactcccctctctgccatgctgccctctactcccaacaaagtacaaccagtatgaagctggctttcctccgatttggaatcggaggtggaagagctcagtaggtgtgatgcatgactgctgcttaaaagaatgagatggagcagacgagggggcttattagaaaaagaaaaaaagttacactctagaatatct

SEQ ID NO: 39338 - DNA, 835 bp, Bovine  19866880940432
  misc_feature (1)..(1): n is a, c, g, or t
nactcctgccttaaagacagattctttaacgctgagctaccggggaagccctctctctctcacacacacaatttttattaaatgattttgttttcacaagaggggaagtggtgacttgtactaaaaagattgagagtttagagtgaagtgatgatcactttattctgagaattcatggggacggaggctatagagcagagagaagagagagggaccaccattccttagtctcactactcaatttgacagccagcctttgagcccctaacctgtgccaggcatgatgctgggtgctggggctgaactttgataacccacgtggctaccaaggaaagaagtgtgcacaacaaaagaagtattggtttttgtacaacatcaaggactgattttctctctcccctcgagtgttagcaaactccgaagacagcactttgggggcccctcatttgccttccttcctgaggcacaagtggccaattctgagagcagttgagttgtgcttgaaaaatgtcaagtgcatttggaaactacacatttttgctgacgcccggagtcccgagctgcgctatttccatggccaaccactgggaagaccttcggttggggcatcacaaatgacttcttggagcacactaagccggcccccgagagggataagctgtcttaagagctagtttaggaaaaatccaaagtgccctgacccttcttggccctcccattgaccatctggccagaccatcaccctgtggggtctttttgcttccttttatttacctttattcttgcgtcatttgactgtgatctttgagtaatcagagtctgcattttcttcaac

SEQ ID NO: 39339 - DNA, 1192 bp, Bovine  19866880945686
  misc_feature (1)..(1): n is a, c, g, or t
nagatctagagaaatttaagagttttcatgaaattttattgtaatttataaaataacctttttaaaaacaaggactaagaagccatcagtattgactaggaaggaatcacagagtgcaagcaagccaaaagaagaaaaacgtaacccaacagttttactattgttttctggttatataagcagtgatataggcttgttatggaacatttacaaaatacagaaccatgcattgccactaccccactgttagcaatctgttgcagaatattccattcttcttttctaggtgtgtgtgtgtgtgctatttcttacacagatacggagcaacacataagtaatttttgacattggtagctaactacatgcattcacatcgtggatattttttcagaggtgacacttatgacatatgacctattacagttatgttccaaccatacttattccttacctatttaggcatttttaaaaattcctgcaacagggtatcttttttttattcatgaaggcacaagaagctgcttatgcaaatgttggatatcgttcatgttttcttatttttaaggccatggctatgtcttcctttctaggacaggtctttcttccttgattaggtaggctggccattttcaattaaaccaacagtaatgaacatgaataaagacatattcactccccaattccatgccctgataatttggagataatagacacccctcaaatatatgataataataataccattaataaaataatgtaaactatattcttcaaatagtgtccaagaagtcacaaaactacagaaaacagtcactaggaactcaagcaagtgtcactatttgtttctctattttcctcttacactttctccaaagaactataacctgctagaaatttcaagttcaaactgatttttagagttcctgacctgggaatacagaatgactcaatctaaaaagagataccaattgagaaactgccataggtacccacagaagtgcaagatttagaattgatcctttaggtcctaggttgatgggactttagcaatatccaaggcatagtttacacagagaagttgaccctatggaaatttccatgttcttgaaatcttatgttacttggtcttttgctaaggaattaccagcacactcacgcattctttctgatagcagatcccagtagagctaag

SEQ ID NO: 39340 - DNA, 1375 bp, Bovine  19866880978317
  misc_feature (1)..(1): n is a, c, g, or t
naggagaaagaaaacagtgcttcacccagttcttacctcttcatctgctcttaaaaaaaaaaaaaaaaaaaaacctgaggcattctaaggctgctgctaatttcacttttgatagaaagtgatccttggattaccataattcttggccatgaacccaggaacccctcctcctgtttgaattgaaaaatcattttggaatgggagaggtggaatttaggaaagaacacatggctttccagccattcaaaccccaagcatgtattttgaggggcagaaggctaaaaaaagaaaaaatgaatgctgccttatccaaccactgtctctgtgccaagcctttatagcatcctcttccttcattttgacagccttctgaggtaagtcgggcttgtgtcattgggtttgtttctttgtctttaacggaagagggaaatcaagtgcagaaaaatctggagacttttcattggcacataactggaaagcacagatcggggtttcaacctgttctttctctgtttttcctgaactcatatatagaatagatttgccaaaattttcaatcccaccagttacttgacttgtatgagaagcacttctaatgtttgtacagatatctttctttacatcctgaaaagggcactgtgctgagagacctgcattttattaccgtttctgctacgaaatagttgtgtgcctgtgaattagttaagttcttggggccttagtttttccctcagtaaagacaggaggttgagttagataatatttaccgaacttcaaccattttccatcaccattatttttggcacatctataagaacacctataatttatttgtttgatgtaaatgaacttatttacaaaagcagaaacagactcagacatagaaaacaaagtaaaggttaccaaaagggaaagggggtagggataagttagaagtttaggattaacagatacacatgactatacattaaataaacaaacaaggactgactgtatagcacagggaaccatattcaatatgttgtagcaacctataatggaaaagaatcgaaaaaaatggaaaagaatctgggcttccctggtggctcagtggtaaagaatccacctgccaatgcatatgtgggctcagtctctgggtcggaaagatcccctggagaaggaagtggcaacacgctccagtattgttgcctggagcgttccgtggacagaggagcctggtgggctacagtccatggggtcacaaaagagtcagatacaacttagaaactaaacaagagcagcatatgtgtgtgtgtatgtgcgctcaccgttcaccctctgcctcctacaccaccacctatctccctgattcattgtacggatccctgtcttcctg

SEQ ID NO: 39341 - DNA, 1205 bp, Bovine  19866880980175
  misc_feature (1)..(1): n is a, c, g, or t
ncattgcttaaaactcagttatttaaaagcattctgccatagtatatgctgttttaagcttactggtacagagactaaagggaaagtgggttcttagtaaagtccttgtaatataggacgacaggaagtaacatattttcattttttccccaagagtctgcggtgtgctcacctgattttatgaatttttggacatgatgaaagtgcatttgggatctcatgatgtatagtctaggctactgaggacctagtccacctcactattagcccctactcccatccgactgaattctagagaggttcttggttggtagggcaatgaatatttcctctaatatcatctgtgctgatgttgggttgggttgtttctcagttctgagtcgctgaagacgtttgtcaatggaggctttaataattaacagaggaactcaaagatgtagtatagaaacccttccacccagaaggcaatgttgctgcttaccactgcctgtctacttggtgtttcaaaggttgcatattggatactttccttttcactttacatttaggatggaaacttttttccttccacctcattaccactatgatgttctgtgccacagtaaaggcctataaagataccctaagctctggatgacagcctgatgtgtgctaatgccgttgacaccattagccaagggctaagtcgagtgcgagtcagatcagacgttgataactggcaaggtaagcaggcagatcctgccacggcagaaggaattctgatagaataagatcattttaatgttgtttccccaaactaaagcttgtgcagcctacacatacacgaatgcatgacttttaaaggaagacactgtgagccttttaatccaaaagaagcgtcccatttttgaattactattttaataccttttgttgaaaagactgctattctgctaatgttgatgaactctgctgctgactgtatgcgactaagcttgtttccagggaagaaacccacgatgttttctttgtgaaagatggtgggaaatagttcttgaaaggattacaggactacgtgaaacttaattttctcttccctcccagtaataatcttgctgaggtcccattttctcatcaccacattgctctaataagtacctgttcctgttctggttgcaggtttaccttctataatccctgcacaaactccaccatcagacaatctc

SEQ ID NO: 39342 - DNA, 1517 bp, Bovine  19866880993554
  misc_feature (1)..(1): n is a, c, g, or t
ncataccacttcccactcgctgtaccgttccaagcctgtcacaggaatagatgaatgtgctggtccctctgtgtggattcttcttgcatccggaacatactgctctctggtctcagggctgcctcatgcaactggctccttgtcctcatggcagacatgcaggaggggccagaaatcctccctactttttcgagggacaagaatgagaaaggcacagacaaagcgtgtgtggggaaccattgtggcaccgtggctggtggatgagagagtgcaggtagagggatagaggccggtccatttctcccaagcccctctcactccccgtggtcctgccaggattctgatatggtcatctacagctcatcttttctcttccgtgtaattcctgggctgtaaactttgcgaccactttggaacctgcgggctggaagttggacacaggcaagtaagttttcagagcgttcttgggagataggtgcacaaatcccatgagtagtaaagggatttgtgggcgtaacttccctgcagtgctttgaaagtttattccgttcagtgtatcgcagtacagtagggcgaaaataaaagaaatcactccaccatggccgtttgaaagggatttaaaaaaaaaaaaaaaaaaaactcctttaagatttaattgtttaaaactcctttaagactttaggcatttccaagaatgttctctctcacggttttgtttgcagctcttcttttaggcagaaggtcattttggcactaacagccttcctcaaaaggataattaatacgttgcagcaacccctcccttcaagtaggaagacatgctgtcgtctaccgcatccccaaaggatgataagcaaaccgaccctggaaaaagtcaccaaacatattgatggttgggcagtcagactgtaaattgaagttgccacacagatttattttctccagacaatggccattcctttaagttaaatagcacactgggttttttatatttatagaagactaatcactacttacaaaaggaggtatctgttcccgagtgagccttgacaatatttaggaagagattctgtagcccacctgacttgttccgtcttggcaaagccgtggttcatttaaaaaactcagagggcccagtgacctccagtcaggacttggtggagggagtcactggctggagggcatggtggtcgactctgcaggtacacgtgtctcagtcagaatctcaggcttcccatttactggctctggatcttgggctagtcacttaccacattattgaccagagatgtaattacccaagtgttattgaccagagacatttcagtattcacttacaaaacaaatcgcaggccacagaccttgctaagtcgcttcagtcgtgtccgactctgtgcaactccatagacggcagcccaccaggctcccccatccctgggattctccaggcaagaacactggagtgggttgccatttccttctccaatgcatgaaagtgaaaagtgaaagtgaagttg

SEQ ID NO: 39343 - DNA, 1956 bp, Bovine  19866881011918
  misc_feature (1)..(1): n is a, c, g, or t
ntagaaaccctagctaatgaatttagaatcaggaagaacaataaagcccagtttgttgactaatttattaacaggctatttttgctcatgccctgcattgcagataatagtaataaaaatcttaggtgagagaagatggcttctccgcagtgccttcattgttttttaaggcctttcattgcccatcagcttctctgtctttaaggaaatggaagagacagcagagagggcaccagacaaagaattaagagaccaagtttcaaatccaggctcagccagtcattggctgtcatgggcaccatctgtacagcaaagatatggaccagatgacctttgagcccatcttaactgtggctcttccctcctaatgtgatgcagaaaaggaagccacaaggctgcctctgataaggggttcatgccaatgggggaggactatctagatgaatatacatcccccatctccactggtattggacttgagctgacagttgtcctgctgtgagctgggtgatgcagtcagtactcaggctataggtgtcacgggactcaggttcaagtcacccctcaaccactcaccagctgcatgttatatcaattccttgagcttcaattttgttatctgtgaaatgggagaataatgtacacactccataaaatctatgcctggcacacattaagggcttaataaaaggtagccacgatcacccatggttgtcatgacaaaatgatctgagacccaacaggaagtgagacacatttcttgagtgcctcctgtgtgtttgatatccccaggttcctgcctcttttataccgactacaccctgcaaggttggtttgatcaccccctctccccatagagatataaatggctgagagcatgtgcttgattccataatcagctccccaattctgagccctgttagtgtgggcaaaattcccaacaccttttgggctcaattttttcatctattaaatgggaatgataacagaacccacttctggatttattgtaaagggtaagtaaggtaatgcatactcagtggctcagtactggccactgaatcagtactttataaaaatgttagcttttattctagctgaggaatgtaaagctcagagaggtgaattcattggttcaaggtcatctgcttatgagtagccatgcagggctttgaaccctgatggggctgaatctctcagggactcaggagagggagatagctccttctttaccctgttgctaagctgctctggcttggctgccattctcagactgcctggctgtgggctctgagttcactcagaaggctcactgggagcagttggctgggggctgcctgggtctcagggaaggaagtgagtctggaccctacttctcatttgcagcagttgagagaacagagtagggccaccacgctaattgtcaccttccagacccctctcctcactcccgcttacagaaggctattttcaaaagagagttccccctctttgttccagcacaaacagcacatctcctgatcgatatgacatctcatcctctaaaacatttataatgtctgcttcctaggattccagtggccacgtgccacgcgcagcccacatcgccttcccttgtagttggtggtcttagggaccagcaccctcttgaacaagactgctggttgctgttccttaaagagagctgagtattgttcggattgtcagccctgaatggtaatcttcagggggtgcggcggggagaaagatgcattgaggtgtatgtgtaaggattgtggggatgtgttttgctatcacaaaagctcttaaaatccgagaccgtgatatatttgcagaataaaacctaccgatattatcattctctaaaggtattttgatcacatgggtcctttcttggagaaagaaaggcttttattttagttctttcccgggaaaaataacagcaggaacggagta

SEQ ID NO: 39344 - DNA, 1202 bp, Bovine  19866881014379
  misc_feature (1)..(1): n is a, c, g, or t
natgctgggtttcccagggccccaggcaaggctttttaaaaatgcaagtgtcaaggcaaactgtcatgcgtgtttgccttaagtaccggaaaagcttgtcactgccatcttggaagccttgatgaagatgcagacggacaggctgaggcacgggagatggagagctgcccgatgggaaggtggcatgcgagacgaaaaggcaggggcccaccttcaggcattttctttgcgagtggcagaattaaaacaaaacctcaaggagagtctggtaaggggagggtgccttgcagacgctgcagaggcttggacttgaaccggggtcccgtctggctctgaggtttggcttgataagaagtgaagtggttacaggacacaaaaaagccgtgtctgcctttctgggagaggacatggggtggatggagaggtcagggacctggaaggaggaggaaggtcagggcagggtgaaggctgggacaacatctgcgcatctttgggtgctgggcagggctgaggttacagggtgaactgcgggcagcatgtgggctccatcacctggctgcccctcctggaacctggtgcagcctggggcaaacgacccgatgttgttgaatctcagcttcttgagatggaaaatggtgaaaatgactgaaaatatctcatagggatatggtctggattaaacatgggggctcagcacatacctgatgctgagtagaccctcaatcactgctgcagctaatgagcaatgacccctgtagatggcctccttgaagtaactgtttcttgcctcttagtccccattcctttcttccttatgagatcctttgtttaacagccgagagcctattttatttatttcatttatttggccgcactgagtgcttagttgcatcatgtgggatctctcgcagctttagtagttgctgtgtggctttagaggctttgtggcacgtggggtcttacttccctgaccagggattgaacctgagtcccctgcattgcaaggcggattcttaaccactggactaccaatgtgctgttaacttttagctcttgcacttccggtgtgttcatcaaagtctttcttctttctcaccacaaatggggtcataacacacctttggataaatccctctgcagggtccatcagaataaaccacagggggcttcactgggccggaaggtgcccctgccatgggcct

SEQ ID NO: 39345 - DNA, 2673 bp, Bovine  19866881047774
  misc_feature (1)..(1): n is a, c, g, or t
naaaaagtctaccctgttcccgcacagttctacagaaggcgacgtccagctgcaactggggcactggaaggaaacataggcagctttgtactttgccatgaaatgttatgagccaccatccttcaatgttccaaagggaccaggaccaggtgccaggaagccacatgacacacctcaatctcccaaatgtatacagataagggagaatttcccaacgcgtgggacaagtatcgatggtgatactccagggaatatctggttcacatgcttgacatttaagtgtattgaatcacagagcaagcacggtgttggctttttattatgtcattgagaaagcctccactggatactagcatgtctttcttcctaatacaagcaatccttattatttgtggatttcatatttgtgaattcgcatattcactaaaatttactgttaacccccaaaaagccagacctgtggcgcttccacagccattcatgaatgtgtgcagggcagggaaggagttcagctgtcctgtgcacattccagctgaggctgaacaaggacacgctctgccttcttgtctctgtctccccagtgttaaagtgttatttcacagtctctttggtgtcacgttttcacacgtttgtgggttttgttgatgattctgttctttaaaatgacccctgagcacactgctgaagtactgtctagagatcctgagcgcaagaaagttgcattatgacttatggagaaagcacatgtgttcaataagctttgttcaggcatgaattacaatactgttggctaggagttcagtgttagtgactcaacaatatctattaaataagattaatattatttaatatattaaataagatttaattctgtctttaaacagaaacatgagatagaactatgtattggccagtcagtgaaaatactgtgaacagagaggctcataggaacctaaccctttttcctccctaagagcaaaggcttagtattccctaattcagtgtccatggtgactttaaaactatcatgaataatgaggatcgtccttacaattaggtgacagcagcatttgtaagaatttgttaacacttttgtttccccttatttgtttgtttttcatatattaattatctttgctgttactttaaatttatggcataaatacaatagtagtataaaatttcattgggttataaagtgataaagattttctctggatgcatttatttaagtgaaataactgagttaattgaaacttatgtaatgtcaagccaatgataatatggactaggaaagatggtagtaaatgcaaacacaaaataatatgtgaaggaggtaggaaaagtaaaagtttatgggaacttggtattggagaaggcatttattcatctttcttacttattgcccccttagagtctagttctgtagccacgagcacatttaatagagattctgtgacttaagtcaaagcagtgaaaagggtaaatgtcaggaatggggtgagtgtatggccattctaaatccaaactataacccttgaccttctagacagaatttatgagggccgtgggttaggagttttccgtattggttctttgttgttgctgttgttcagctactctgtagcgtctgactctttgtgaccccatagactgaggcatgccaggcttcctggtccctcaccatctcctggagcttgcttaaatctcatgtccattgagttggtgtttctttataattaattaacagtcttctgaattactgttaataatctaactcaccagatgtggccttcaaaacacaagtgggccagtgacccagcaagctggttctccgccatgtgataaagatgactcgcttgcacccctgggaagggaagatgttcccaccccacctcagtaaggcactgagatcatttccaagttcagctctttatggcaaaccattcttcaacgtgcttctttgggggaatgggggggcacaccacacatcatgtgggatcaaaattccctaactagagattgatcctgcacccttgcattggaagcctggagtcttaaccactggactgccagggaagtcccccaacctgtttttatagtaaatgctcaagagaaaggagattttttgcacttggagcaaaagatgtaaaaaccaaaaaaagtacaagggagcagtcaaactgaaatgagaacaattaaagagacaaaaagtcccattagctgccttttgggtacttttttgatcttttcaccaaggaattagtagcttttaattttccccaccttagcttaaagtactgctggtggaaaagaaaggagcattatggggggaaggctgctttggattaaaaaacaaatatagggtgaagtcaatcaagcagctgtcagatgccatgaacacagggtctgcttgcctagctcagtccctgggcttatgctggacaacaaaagtctcccgtataaaagcagaagcttttttacacctcttttctaatcatcagatgtgtgtctccacttggcttgacattttttatgatcatctgaccgactggctgcttctgccacttaaaacggaggaggaagggttgcttaattttcaaagcacactgaaaggacaatgcttttgaagtcggatgtaagctccggttctgcgttctgttcttagcaagg

SEQ ID NO: 39346 - DNA, 765 bp, Bovine  19866881195375
  misc_feature (1)..(1): n is a, c, g, or t
ngaattcttatttcatacatgttccagtgagcaaggaaatgtatatcacagatgtggtgtaatccgggatgctaggcttcagagctatacatgatgctgattcagtcactggaggccagaaagcaccaagttccacatatggcttcaccctctctccttagaaaagtgactctatttccatcagaagaacattttttctcatgcctctcttagatcattaaatatcctacgctgatcatcatttcacctttgcaaaatagaatgacctgtttaaatggtccccatttttaaatcatttttctccgaatggggccaattttaaatggctgaatgccctcccacctagggaagggagagtgaaaacggctcattatttcagcagatcacacaagccttgatagaggaacgtaggaggtaggaagccagaattcagtttgatgatcacatgatctttcttcctcaaaccttcccattcaactgaagattttgggttatgatcccaaatgagtcaaaatagaagcttggaaaaaaatttctgaatagcccctttgctctattctgtgtatacttaatacagatctgccccatttctcagtccttacattaaagctgacttacccagaaatgtgcctacatttactagttttttttgttttttttttttttggtagctggttaaatatgtccccaagtggaggcaagatgtttggagagatttgaaaataagtgaaatataaggattcgactcaagtcactaaatgcaat

SEQ ID NO: 39347 - DNA, 974 bp, Bovine  19866881204216
  misc_feature (1)..(1): n is a, c, g, or t
nataaaatgtgacaattccatcatagtgacataaatatttttacctgaataatccctgctgttcctttgaaactgaaaattaattcacatattgttttccctggagtagcccaaaaacctacttttttttttttcctttaaggtagagactgtgtgtactgatgctgaaccaagtattatttctgaacagcgattttatttttccagtgcatgctatgctaaaaagcaggataatggtactgaatatagaatcaatacatattcaaatggaatctgtttattttgctttgaaaacatgggctgaattgtgatatccacaatctactgttaatagtatcaagccattaatggctggctttgtgcttcctatgaagaccgatttcacataacccaggcaagcctggccatgccgatttaatcagcctgcttctcggccttgtgagaggatgatcacaggcctactggtgtatcaagagccatggggaataactctgaaggatgctcctggttcaaatcccagctcagccccttcctagttccatgaagccggaaccaagcactgaaactctgccttctcaacaagtgggataacatcaaccaccccagggtcagagccattacactgccctacaccaaaagccactgtgcttgtcgtcatttatatgaacggtgctgtgtgcaacctgaacatgccggcctgctcaagggttgtcacgattcaggtcattctgtttataaaatatttagcacagcccctaccatgtagtaaggccccagggaatgctcaatctttttattagttttaacatagatcatctatgatttctagtttcacatcccaattttgaaaaggtttgagaaaatactgtaatccacgttccatgtgattttcctatcaaggaagcaatgggattttgtaaattttctaagtattctctatatgttttcagagcaattgtcttggcaaatttcat

SEQ ID NO: 39348 - DNA, 1390 bp, Bovine  19866881269930
  misc_feature (1)..(1): n is a, c, g, or t
nttttaaaataattttgtaataaatctcagccctcttctaaacctaagaggtgtagttgggaggctaaatatactgccaaagaaacaccagtaaaagcaaagcaaacagatacaaaaggtgcttttactttctgcttattttggggaactgatagcactcatgctataaacccattatagccagtgattccaaggagtccctggaagagtagaaattgttatctgtataaaataaaaattaagcttattaagcaccatcttgtgcctcagcatccagtgtgaggatattcaacttaaatgaactattttcaaacaatgttgatgaaactcataatttaaaaagcaagatttggagttgccagaatagctatgtgggctgtgccaagttattttagcaactaaccaatatatctcaatttatatcagaaatctcttatgggatatagccaaccatttcaacacacaattatgggcattctcaagtccttcctgtaaatttttatgtctcattccttgtattacctaggtaatctagtcagcaagatgtcttctgatatcttcaagatatcttttgagcttatataatcaaatacaactgatattcaactattttcaaatctagaacttcccagtccacttcctaggcagttctgaggttgcctgtctgcttaaactccctctgaaacagaacatcacatgactcaaatgctcactatttcagttttgctttaaaatccaggtttgggaacttcagtttgtggtccaggggctaagagtctgtgcttccaattctggggctcaggtttgatccctggtcagggaactagatcccacatgacacaaataagagcttgaaagcgacagctataaaaagaaaaagtcccacatcctgaggatcccttgtgctgcaactaagacctgacacagccaaataaataaataaaatcaattttaaaaattaaaaaaaataaaattcaggtgtattgcttataaaggctgatcatgacttcctaagagtgcttctacagactgagaaattctacctcaaatcctattcttcatggagaaatttgggaataaagacattgcttggtatttagcaacacctcaatgtgaaatatctacttggttgaattgattaaatctgtggctggaagtgaagtgagtgaagtgaaagttgcccagtcatgtctgactctttgtgacccccatagactattcagcccatggaattctccaggccagaatactggagtgggtagctgttcccttctccaggggatcttcccaacccagggatcaaatccaggtctcctgcactgcaggtggattctttaccatctgagccaccagggaagggcggaaagatgtagaaaatgtatcatcattc

SEQ ID NO: 39349 - DNA, 1605 bp, Bovine  19866881345835
  misc_feature (1)..(1): n is a, c, g, or t
ntggactggtgggtgacatatctactgtaatatattcctcaattaaatacgtggatagaaatagaatttaaatattcaggaataataattgttggggagaggagccctaagcgatattcctcactgtctatcatttttctattcttacttctcaaatttagggcttattaacatttttctaatatttttccctcaagcgagcagaaaggtgaatgctgaagtaaaactgaaaagtaacagaaagttacattacaaggtagtcttatcataatttgtaccctagctggtcgtgtttacacaaatctggatggttcttaagaataaattacaacttgagggagaaatcactatttatacatgcttttaccaaagagaagaaaacagaaaatgaaaaaagctaaggagatagaagttgaaaaataatagtagatatttatgaagcatttaccatcatctattacacatggttatgtagtgattatagtcattctctcctctaatcctcaaaatcactcccatcaatctattataacccccattttacagatgagaaaacagagcctcagagactaagtccttaggccaagatcatacatcaacaattggtggaactgagtgcactcttgatttctaagcccaggtttcacgacaccacctcacaaggggaaggtgaaagtatttcatttcaggccatggtttccttctaggagggaagagctctctcttgaggctttcacagcaaggagacaccctttcactcctgcccatctccaacagcttggaggaacaagtatttcctgcacgttctggagaatccaggaaatgtggtgtacaaatgaaagattttcttcccaagagtgctttctgtgcggcaggactcgcagaagaaagaggacaaactggaaaatgcagtcagggacagaaacctcagaggagaaggctcctgcagaagctgtgaaaaccttactgggcttatagcaaaagtcttttcttcacattacaaatgttgacatcaatattatcatgtaaatgcttgttaaaagaacaatacctcctggaggtaaaaatgagtccccttaaaaaaaaaaaaaaagaaagaaagacatcacagatcactatgcagggttttttttttttttgccatactaagggagcatgtcagatcttagctcctcaccaggtatttaaccattgccccctgcagtagaagtgcagagtcctgaccaccagaccaccagggaagttccaccgtgcagatttatggtggtaacaatttctagtaacaatttgccaagagtcactctgttctactgagtgaaacacaggctctggtgtttgttgctgttcagtcactgtgtcgtgtccaactctgcgaccccacggactgcagcatgccaggcttccctgtcctccactatctccagagtttgctcaagttcatgtccactgagtcagaggtactatctaaccatttcatcctctgccacccccttctcctcctgccttcaatctttcccagcatcagggtcttttctactgaattagttcttcgcatcaggtggtcaaagtatggagtttcagcttcagcatcagtccttccaacga

SEQ ID NO: 39350 - DNA, 1225 bp, Bovine  19866881360172
  misc_feature (1)..(1): n is a, c, g, or t
natggaaggatggatgatttctgtaaaaccctgttcccactttgcacgatctaaccatagaagactagtaaagtggtctcggccacgtgcaagtgacagtcacacacactgcttcatttatctcttcatcaaaatgaaacccctaaactgaaatggaaacccttaggatcattattatttcccccccatttcatagacgaggcaactgaggctttagagattcagcacttttgtccaaaatctaaaatttaataagcgactgaatcagaattttaattagacaacgagtttagtgcctattcttgcttcagctatgatcctgtcgggaatcctgcccttgttttctactgaattaaccccagagttggttacaaaaaactcccaaggttatcaatttcaccacatggtttactcagttactaggaggtccctctctctccctttctccctccttcagttccaaacgttgatactcatcatatgcccacataggactgtacactaagtccccgacacaggaaacttcaagtagcaaactttcaaagacatcttcaacgccaggtgttgccctcaatctcctattgcagacaatccttcagttctaccatctcccacctcctccagccagtaagtcctttgcctgttcactagaccccagcccctgtatgccagctgcttaaaggtactgtactctaagcttacaaatgttttatgttttgtgtttctttatgtattacttgtgcaagtattataaacctgttatagtacagtactgtatagctgattctggtagctgggtccctaggttaactttgctagactaacgaacaaatgggacttccgaatgctctctaggaacggatcttgtttgtatgtaggggacttactgtacccataagcttgaccaaggccttgctaaagtcgtgtgattcctcagcataaccaagtgatttgccggtaggcaaagaacgcttcatgtgccagctgacgtttttgtaacattagaaacatcactggtgcttcgcaaccgtgcctgcgctagtcctcagaaggtggaagcatctccagaaggtcagtggtggaggaagaggcggggctggtgaacggaggagctgttccagccctggtggagcgcaaatgcggctactctgcctctccgtctgaagcacacacagccgtggcatctaactgcattaatgagtttcctggggattgcagccggagc

SEQ ID NO: 39351 - DNA, 973 bp, Bovine  19866881410938
  misc_feature (1)..(1): n is a, c, g, or t
ncccattcattcattcgcagccttggttcatttgcagcccaaggttctttcttcacttgcatggtgaaatagccaataccccaggaattaaccagatcgtagcacagcgctcgggagaaagggtgtcgccttaaacgactcttgagtgtgctgtccagtcaggttcctcatccaagaaaataatgcctagcagggcatccccccactaccaccaccgccccagcagctctgtcccttgccaagagacacactcctgctgtttgtcccactcaggtattgcagttgacaagaatgggctcatgtactttgtcgacgccaccatgatccgcaaggtcgaccagaatggaatcatctccaccttgctgggctccaacgacctcaccgctgtccggcccctgagctgtgactccagcatggatgtggcccaggtgggattctctctctcctctcatttcccatcactgtgccacacctgattctgagtctgaacttctcacctgggttctctttgtgttagaagtagagtgggaggagatacagatcccaggtttgtctgcagaaggtttgaaatgaactggacagcaagatggaatgggacatgtgagacaggcatgagagagaaataggagaaagggagaggggaattctgctcagaagcgtggagctggtgacatgctccagccgtggcagattatagggtaggcgttactgtgtaattacctctcttctccatcattatcgtgggtttgagaacataccatacggtactacatgtcaatcagaacttccctgttaatctgaagcaattgcaccctcactacataaacctttactttgtgaagttgtaactgagcagatccctctgtgatattcccccaagtgatagtcttttagtctgggctcttacattagcagagaacagaggttcactcaaatgtacaacaggagtaaaaggactgtatacttaaaacaa

SEQ ID NO: 39352 - DNA, 1504 bp, Bovine  19866881627857
  misc_feature (1)..(1): n is a, c, g, or t
ntctctggaaactagctcttgtgtcgttactgttgcaggaacccccaggttcatgactgtctccctcaagcaacagatcccatggtctcccctcaggtccaccagctgggaagggagggagcccaccctgccagaagggagtgattcctgcccctcccaggcagagcatagcttccaggcacatccaggcgtgtccatcagggtgctgtctgcattcctgctccatctgtcctcgcaaccccaagactccacatcccccgcccaccccagaacctccccactactcttcagcgttcctgggaactgagggctttatcctcatgaaattttatgacactgtgcaaggctcaggaaaatctgcacatgttccattttcagaaatggagtcctaatcaatgtctccatgtgcagaatgcgagtcctaatgaagagccaacactagtaaaagctaacatttacggaacacttaccatgtgctgggcacttatgaacatttaattcgaaacacataagtacactaagccctctgaacacactgatatcatttaactgtcaccatagccttttagttatgaatgaggatactgagacacagagacgtcaaggaactcacctagttaagaagcaactagcaagtggcagaactgggatctgaactccagactctgaaccatgattttaacccctgaatgctaatacttttcacagcaactagcaatatgtatttataagaggtgatgtatgtgtgccaagtatgaagctatccatcacaaaagcagtatggttcaaggactaagaaagtaggggtcaggagaaggagaaccagctgggctgtgatgttagttctagctgctgctgtgccagtcaaggtcacaatctgaaggcagatgacgtacacaccgagtcacgtgaggagagtttatcaagtagactattttagaagtcgtggttggggttcagggaaaacaggagggttggtgcagtgttcccaggctggccaaagagggaacttgccagcatcatcaaggagcaaggggagggagtgaagaggagaatcggaaagagaacactatatggattgggccacttgagaggactggcatcttggggacagagaaatagccagcccctggccccatgacacagaggaagctggtaataagtacatgcttccctttcctccatcctctgatctgttcccactgagtaaacagttggcagccagaggacgagggcacccactgatgcagcccatgtggtcagctctcaggatggagagcaaggtcctgagagatggaggggcacgtgaaggacaaatggaaaatatggaacacagtcattatcgtgataaactgggacaaacctcaacctccctgggacttgatttcttcatcattataatgagacaattggaccacatgcaatttatgctgccttccagctctgacattttaagatttgatgaatccaccctccacctatgtctcaagagattttttaaaag

SEQ ID NO: 39353 - DNA, 1192 bp, Bovine  19866881731171
  misc_feature (1)..(1): n is a, c, g, or t
ngggctggggcccggcagtcggcattttaacaagtccctccagcaggttctgaaggctgctgtgtgagaaccgctgcttcaggatcaagtcctaagtccttaaaaaagcctccaaggccccacatgatccaaacctgcccatctcatctcctgtcacttgaggtttctgctctctgaccttcagccacgctgctctgctctgctcgagaacacagcctgcctgcatggcctggatcctcctcttatgctttggcagattcctcccctaaaccctgctccctgcactcactttggcaaagccatgcatccttggcttgttcagagaaggctttctgactttcaactcagggttctgcccccatcatatgacttcacagcaccacctattccttctaaagcacgcgccatcattctaattcatcctttgtttggagcagtaggtctccacttggctgcacattagaatcacttgggagccttgaaaaatcctgattgtaggctgcaccccaattaaatcagaatctccaaggatgaggctcagacatcagtattttgatttctcgagctccccaagtagttcctctgtgcagctgagattgagaactctcagtgcccgtcttcctgggagcctccaggcctcctgagagcagagactctgttgtacaggctgttttccccgcacctggcattaaagatgtttgttgaatgaaagcataaataagccacatggtgtttctgctgcttctctgtgtccttgagtcagcagccaggtaaagggaaaagcttcctgcaggccacaccccctgggtggatgacacctcctccaagtcaaagaagcagctggttccagtgctgggtctaaaaccaggctgaatccagtggccgtggatgcatgctaggggagtctgtgcattttaacttggaaccagctgatgccttctgaccaaagagacaggatagagcacccagggagaagggaggagagggagagggagaagagaggcatgttggtagattaagagggtgacaagagttgcacaaaggcaaggatgacaataagaagagagcccaatggtttaatttggttcttggaggataatcaagttgttgtagctcgtgctgcctattcccacagctgtccagcaaataatgaatgtggtacctacccggtatggaaatagggacaaaggca

SEQ ID NO: 39354 - DNA, 1555 bp, Bovine  19866881785531
  misc_feature (1)..(1): n is a, c, g, or t
nacaactgaactgaaagaaaaatatatctgaggctttgtcttttcatgtcgatgtcagggttgagaatgcagaccaatgaacacctgttacaggacagaggcgtgcacccaggggcgtgatgagttgccattcacactctataagcatgcatatttcaaggcttgctgttagtttccctaaaaagctagcacttgattagaccaatcagaaagatggcccaagctcccatttgaatactttattttgtgaaaaagtccatcttccaaaagcatagcctgggctggcagtgaggcctccagcttgcagcacaggtgtgctgccaataattcactttggttactgccaaacagacgtgacctgggaagacttcacttcacctcaccgactccatctttgtgcaaatctcatccacaaccatccattttcctccttgcccacacctcattttccctgttgctctgcaattatttattatctggctcagtaattgttttgtttacagtggccatgcaaactctattgttagggggggaaaaaacatgcttctttgcccatctagattttcctgtgtgggcaataaaggatgttggtctgtaagagctcttaatatacggttctctgtgttcaattttccaaaagatgaaaattgcccaaaagcaaagtaggcagaagtatggtaagatgctgctgcagcccaggttcctgctgatggatgctggccccctgaatgtcagggagctcccgctagtcactgctgtggcccctgctttctgaggagctggcagtgtccagctttttggaatagcaagtcctccgcttcacccctcccaccgtctcctgaactgcttcagttagtcatccctggccttttataaaaccaaaacaccgaaaggcagaactgttagcccagcctagcagatgaggaggctgaaggaggcactgggacttgggatcattttttttttttagtgattctcatgtatatatttcagcatttgatcccacttcacataaaatatttacttcatgacgggcgatgggggaaatgtcatttttcaaatttctttagcttaattacaaaagatgtaaatgtggtctcgcttatgggaaaaaagttactcttaacaatgaggtgtaaattggtgtctgcttaatctgttcacagtaagaataaaacctcacactcgcctcctcgcccttatttttgcagtagtacctgggaagttaatgcattctcttgctgcatctccagtctcttaaagagacaagagagaggggtttcctgcctcatccttctaccagctgtaagaacattcatttccagtatctcttttggactgcggacagctgctatcttttttgacctcagtcacgggcagccaaaatctaacctttttctggtctcttctctctccccaaccattgtggtctcctgcagatccccaaatggagtaaaattaataggggaatcagtgttatttatacaatgaccttgtgctcctgggggaagtgcaggcgctattctttcacttatgatgttttacatttcaaaga

SEQ ID NO: 39355 - DNA, 1113 bp, Bovine  19866882076335
  misc_feature (1)..(1): n is a, c, g, or t
ngcatgaagagatggatgaaggactgtcccttagaaaacctggaggcaatcattccttagcatcctttcattccaggaaagctctgtggtagccttagcacaacagagtagcccaaggtgatactgagaatcttggggggtgcccagtggctaactggctggctagtggagtgctgcatcttcctgcctcttttccttgtacaacctggaccctcagctaagttctgatggcttgaatacatcttctttgccggggatttcagcatcttaactccatgccagagatcagtgggtttataaactttgataaagcagtggaagcagcaagtttcacatactatcacccatcatattttcatatcaagcagaaaaaataagtttcagtagtgttacaaagcatatttatttatgcagacgctctttttatccttttctcgacagaatattggcacagcagttgaaatggggtgggggcggggggagaaagcagcatgttcccatttttcgatacccttcctgccaacttggaattaagaccaacttcaagatttgaatatcttcagcatgaatctgttgctagattgtggtggaaaacttaaaacaatagaagtctcaaagtgagatagatagtagtttgccatatgcataccctctgtgggcatagtggcaggcagaagagggagagaggttataccttcttctgctgctccgtctctgggaggccccatcagtctggcaacttctgaatcccacccccctaccacttctgtccactgcagtcacggctccaccacctaccagccatgtaactttgctcaagttatttcttgattgcctgtttcctcatcagtaaaaaggaagtgagagcagagcctagctctgcaagggttgttgcaagagttaaaagagatcatgtgcattaagtgccgagaatggtgcccgcatctgttgggataccgacgatgttagcggctattgttattatcgtgctttgcatgctaagtcactttagtcatggctgaatttttgcatccccgtggactgtaacccgccaggctcctccgtccataggattcttcaggcaagaatactggagtgagtagccatttcctt

SEQ ID NO: 39356 - DNA, 1678 bp, Bovine  19866880397408
  misc_feature (1)..(1): n is a, c, g, or t
ngggctcctgctggggcctgagaatcgctgacttttgtctttattatgtaacatgtgtcacttaatacctggcaattcagtgtaattgccaggtaattcagtggtaacataccaagatatcttatttatatatttttaatttattttttggctgccctgggccttagttgctgctccagggtgctctctagttgcacaagcaggggctactctttgttgcggttcatgggcttctcatcggggtggcttctcttgttggggagcacgcacgctagggcacgcaggcttcagaaactgtggtgctcgggcttagttactctgtggcttctggaatcttcctggatcagggatcgaacctgtgtcccctgcatcggcaagcggattcttacccactgtaccaccagggaagtcccaggtgtcttattttcatggtggtcatcgggcttggtggggcggatctggccagagggcaaaagggaatgtggtctctcccaagtggtgggagctgttgagagatttgaactggtagtatgaacatcagatgttctgattcttaagttttctgtctttactccctagaatggcttcaataagaaaacccagccgtcctgtgcgtgacatctttggcgacctcagtgatatttccttagaagattcaaagttgggggacatgtggaactctgatatcagtagacatcttaccaaaatagcacccggtcccagcagatttttaaaaagaaaccagactctgggtggaaaacacttcctgccaaaagagaacgctgtcctggggagcgagcactggcactcttcaagtagaccgtcaaccactgcctccaaggtcagggccaacgcggcgctcgtgaagctggcacagatagagaccaagatcaggaaccggaaggtgcgggtggatccatcggacgcagaatccgaggactggctccctagcagagctgaagaaactccccctaggaggacggctgacctttcttcacagaacacaggacaactctcccaggaacaggcccttgaaattcctgtccctgagacagacatgccgagtgggaaggtcagtaggtttctaaagaagagagaagcacaggtggaaaagatacccatggaagcccaggttgggaaggagagggatgctcaaagacccagagagaaacaacctcctagaacactggattcgccagacagtgatgaagaggaaatgaaaaagttgctggggagcttgacagaatcttctggggaaaaagaaacaaccaccaatcagggtttcaccaaagccactgagaaagaacaaacaaaactggtctcggtaaggtttgcatgtatttatccatttttgttttttatttgtttatctggctgcaccgggtctcagttgtggcccgtgggatcttccctgtggcacagggactctctagtgccagcacacggctctggagctcctgggctcagtaggtggcgacacaagttgctctgtggcacgtggtatcttaattccccaaccagggatcgaacctgcatccatgccctgcattgcaaggtggattcttaaccactggaccaccagggacatcctgcattttgcacttatttattttgtacttgtttgtattaatactttgcatttgtacctttatgtcatagcactagagtcttgagggga

SEQ ID NO: 39357 - DNA, 742 bp, Bovine  19866880517844
  misc_feature (1)..(1): n is a, c, g, or t
nactaggacctgccagccaaaccttcacagttagccctgactcaccaccctctccgcccagctgtcctgagtctggacacaacctcgtctccaggggcccccagggtctagctcccccctgatgcttggcattctctccccaaaggtacttgattttcttctgccccctggacctcttttacaagtgtgtctgcttcctgccagtgaaactcatctttgtggctatgaaggaggtggtgagagttcgcaagatcgccgtgggcatccatcacgcccatcaccactaccaccacgggtggttcgtcatgatcgccaccgggtgggtcaaaggtaaacaggaccatggccagagcaaagggaagccaccccactgagaaccccttctctcagccatcttatccaatcccatgtgggagctaagaccccatatgccttgggaccaaaaatcagaacttaaacagtagaagcagtattgtaacaaattcagaagagattttttttttaagtaagtaggacaatgaaacattgatagctaatgcctctggagaaagctttctcagctgcgccctactcacacgtggggctggacccttctgtgtgtggaggccgtcctgtgcattgtagggtgttgagcacatccctggcctccacccactcgatgcctgtagcacctaccatcagtgcaacaaccagaaatgtcttccagacgttgtcaagtgcctcacagagtaggaaatcatac

SEQ ID NO: 39358 - DNA, 1655 bp, Bovine  19866880567025
  misc_feature (1)..(1): n is a, c, g, or t
ntgtgtggcttcctcgcctttccggctggggtttctctgaacagctgagcaggttaccataacgggggctgaggcactctgatgtaggcaggtaggcctgtgccctgccacacggcagggtaaccactgaagtgagatcaccaggggagaggctcctgagggacgcctatgacaaagcctgctgggcggcagctggccgtctctgaaacacacctgccccgagataagcgcttgtctgatgtgataaaagctttctatcgagggcactgcacgtgtgacacgcgagctgggggagaagtgggccctcctagtcaggctcctcacgccaccccggagcacaaggtgtgcctgctgtgagtttctggtgaagaaagacccgggaggacaggccgggaggggacagcagcctcccctcctgctgccggccccccggcgggtctccgggagtgccatacctgttcctgggcctgtcatgggagggagggctgtaaaaggcctccacggccgccagcagcctctcgctgggtggcatggggggtgggaggcggatgtctttaggatccaaaggcttgtactcgtggtcttccagctgcaacagagaacacgctgtcaccactccctgcctcagcgccccaggcccatcccatccagggaaccgaggggcagcagacagctgtcctgggcatcagagtgcctcaggcggcccttcttgggaaaccccatactcttgtagggctttaaccacaccaatgactcagtagctacagaattctctctctaccaaaaatgcaaagaccctgtttatccagaccctccgtggaccccagatcccctcacttgccgaccactgagctgtgcccagatgcccacctccggggccccgctctgtgcccccttctctgctccagcccctaccccaagggcagccccactggcacctcgacctttagctctccacgctgcccccgtgtaacctgtctcaacttccagggaggggcaatgaccagagtgccctgagccctggccctggctcccttctgaccccctttcctgccttgcttggttggttgaccaccccttttctgagaaacgcctgtcctcagtccctggacaaggggcttccaagtccaggaccaagaggaccccccttcacacccagccttctcgagcagtaccaaacctgcagcccaggacggacgctcagaggagcagagggacatgggccttgctcacggccacgtgtgagcgtgcaaggtagggtcgttaactgaggcacacccttaatgacaagctgatcaagttcattggggtgcaggaaatgggggggacaggggcctgggaaacaacgtcttgtagccaagtggggaatggatcctacccgtgaccgtcccacctggaggacaagcatgcgtggcgaggcctggcgctcatctctgcaacgttaccttcacgaggggggccatgagcccagcagggaggtcgaagtagggcacgttggggaccaggctggggtcgtcatggttgatgtgcggagggccctgtcgccgcatgtgcgggggctgcccgttgaagccgtggggtggagggccgaagtcagggtgctggggcccaccccaaggcggatgctcgttgatcccaaggtgaggcatgcggtg

SEQ ID NO: 39359 - DNA, 1209 bp, Bovine  19866880576226
  misc_feature (1)..(1): n is a, c, g, or t
ntagctcttgttcctgcggtagttctcgtaggggtcgtcaagggccacgcccacacccttgtactggtcccacttgtcccgcacgtccccccccttgatggggtcctggatcccttgctccttcacgccgaggccacctgatccactccagcctgagagagagacggatgagtggttacgacccaggggacccaggggaagcccgaagcgttgcgcctttaccctgatgtgaggttcagtgcaaatgcctaccgggagtccgcgacacgcagggcacacacttggaactaacgcggtgagaaagagcaccggcagaagccctgcaggtttctgttttccaagcgggaaccttctgactccctcagccccctcaaaccccgagtgcccagagcgggctgttctgtcttccccggaaacttacccattttcaccagcatctgatgtcctttgttctcttccccaagccttgagtcgggtataggaggtgctgaattagaacccagaccagccgaggaactaaaattaagacaggtaacgtcttttacaaaagagcggatacatttattggaatgaaaacttagagtattacagcatgtggcttctatgaagggtcgccagcgtgagacggacacacacacacacgtttcgggtctctagccgccttctttatcctcttcgccggccagttaagggggtcccctaagatgacggtccctgccccacacttggtggcaacggccggccacaccgaacccgtcaaatggttagaaaacagagcccagccctggccttgggcttcacaacgtgaccgcagaggtaagagcgaggagtgagacgtgatgccaccgtcactgcgctagcgagcgcccaggggcccccaggtgccgcctgggcgcgggccgcctagagaggatcttctaacgacacgtttcaacattcacagcaaagcatcagagggttccagtgctaccagagatcattggacagttaagacagaaatcttacggcggggtggggctcctggaccgtgaccggtgcctccttcctggggagtaggacttggaccttgagcgcgagcgggagcgggagcggctgcgagaggagcgggagcggctgcggctcctgtgggccggggagaggaaagggtcagtacggccaccgagaggccccaggcctcgcaccccgtgcagcggcgccctgctacctgga

SEQ ID NO: 39360 - DNA, 1480 bp, Bovine  19866880713954
  misc_feature (1)..(1): n is a, c, g, or t
ngtggctctagactccgtgtggggagttgtagagtgggctggtagacagggacgagcaggtgggtggcccgtgctagtgccaggtaatgggaacaccgtggagggctcgtggcaggagacgtgagggtggtgtcagccaggcgggcaaggctggagggggtggaactggagcgggagcagtcacagccttgcagggtctggctgagtgtgaatgcatgacggtggcagaggcccgtgctgcactgggccttcgtcacccccaggcagcctggggcagctggaactgcatgcccagacagcgctgcccgcattcccccagtctctcggcaccgttggaggccttggtggaggggagtgtggcctccttttggccccagagtttggggttctccgcgcgggtcactcctgttccagtggctgccctgtctccccagcaccaggagcagcactcggagggcccgcagtgccccctccagtgagccgcacctcatcttcgtgtacgaggacaggcagatcctggaggacgcggcagccctcatcagctactacgtgaagcggcagccagccatccagaaggaggaccagggcaccatccaccagctggtgcaccagttcgtgcccagcctcttcttctcccagcagctggacctgggtgcatctgaggactctgccgacgagggccgggccagcccccaggggcaggctgcagaccctggcggcgaccggaagaagccggcgcctgggccgcagagcagccccccagaggagaaggggggcttgcgggcgaggcgccggccccggagccgcagccaccgcagcacaagcccctggacgacgtctacagccttttcttcgccaacaacaactggtacttcttcctgcgcctccatcagaccctgtgctccaggctgctgaagatctaccgccaggcgcagaagcagctcctggagtaccgcaccaagaaggagagggagaagctgctgtgcgagggccgccgtgagaagggcaacgacccccgcccatgagctgcggctgaagcagccgagtgagccccagggcctgccccctgggcgccgggaggggagacgcctgccctgagggagcttggggcgggagccgcgcgtgtgaaccccgcagccttccccgtggcagctgtgtgagccgcacccgcagtgaccagggtgccgcccgcaggtgaagtggagctggaagagtactacccggccttcctggacatggtgcggagcctgctggagggcagcatcgaccccacgcagtatgaggacacgctgcgcgagatgttcaccatccacgcctacgtgggcttcaccatggacaagctggtgcagagcatcgcccggcaggtgagcaggcagccgcgccgggccctttccttcattcctgtgctgcggttggccccgtggttggcagcttttcttcactttcagttaaggtagagttcatgtaatgtaaaattcac

SEQ ID NO: 39361 - DNA, 902 bp, Bovine  19866880759099
  misc_feature (1)..(1): n is a, c, g, or t
nctgtgggtacatctggagtcaatggcagtacagacagagatgacaccaagaaaggacttgagcagtgcaagcagagtttctaaaaggccaagtgagacctgaaccagaccgtcagggtgggaaagttgcctgtgctggcattttttcttccttgaatgcactggcacaaatgcagcagttatgagcagctgggatcgagcacgactgagaagaaaacgcataagaagccgacttccttgactgcactcaatgttgaatcatcaaagagctgagagctaaaagggctggcggtcagaggcccgatgccccagtcaacacagaggcataattccctgacaaagtacctacttcggaaccagctaagaaaagggcatgttcttggcacaggccaactcaccaggtcgctgctgaccaggaaagccgagagatctaccaggacccacgtggggatcataaaaaagatggcatggcagcccaagatgttcagcagccggagatggtggatccttgaatctcttaatacctgaagagagaaaacctctttaaaggctggttgtaactataagtggcaagaggggctccgcttacccaggcccgaaacatggtggctgcccattatccctggtatctgaccttgactgccaaacctgcaagtgcgcccatgacgagacacacggcccatggtgaggcacactgcccatgacgagacacacggcccatggtgaggcacacggcccatgatgaggcacacggcccatgatgagacacacggcccatgatgaggcacactgcccatgaccacaacaagcgccgtgtttcatatgcaaaggaccgagagaagaaaaacaaaacccagcaacactcaattgctggtaaagctacagtgaaacaggcactctga

SEQ ID NO: 39362 - DNA, 2161 bp, Bovine  19866880762102
  misc_feature (1)..(1): n is a, c, g, or t
ncgacagccccgtgcacacggagcagcccaggacagagctggacaagcccgaggccaaggccagcctccagagcccttttgaacagacgaactggaaggaactgtcgcgcaacgagatcatccagtcctacctgagccggcagagcagcctgctctcgtcgtcgggcgcacagaccccgggcgctcaccacttcatgtccgagtacctgaagcaggaggaaagcactcggcgcggggcccggaagccgcacgtgctggtgcctcatggcccgcccacggacttccctgggctgagccgcgaggtcacccgggacgatctggacaaaatccaggcccaccagtggccaggggtgaacgggtgtcaggacacacagggtaactggtatgactggacgcagtgcatatcgctcgacccgcacggcgacgacgggcggttgaacattctgccttatgtctgcttggactgaccggcccttcgggctctaagtgcattcccaccttgcagtcagccagggaggacgggcgccagggcccgccgcctccagtggttgggaatccggggggtccggcccggggcgggagggagggggcgagagtctctaggtctctctgcactcatccctctaaattctccttttgtgaaatgctgctaccagtttactaacaaaattgcaaaggaaggaccgcgtgaaaggaaggccagcaaagtgagttcagaactctatagcaaaccagctataaaaagcgttagtctcccaccccagaagaggtgcggatgcttcccagccctggtgagctgggacctctagttgcaggcaggcacagaaaaacctgtgggagaggttacctttaacacagtgacagaagcacgcatctcatctttgcattttctgtttttaacatggccctaagcgtctgaggcagtgggcagtactgtggcctcggtttgcaccccattggccagctttcccatcacggtgcctcagctgtagtgagctgctggcatcaggcaggccggctggccacccagttcgacccatgctccctgggcgtccacacatttgtatctggtttcagttacagcccagtttttaaagaaatgctgcagaaatttgttttctaaagtttattttgccccctcttccatctgaccaccagacgagtaacttgccttttgttcttccctcttcagtttccccttcccacacatatctagaaaagttcacctttctagacttcccttcccttcaaaacacaaaagtaaccgcgggtgctactggtgtgtaagctgtactgttgggcgagaagagacctgtctgtatgctggaaacactcataaccattcctttagattcgtttgccttatggttatttgtcataaacgcgatttgcaaaaacaaggagccttagtgaatgtacagtacctagacttctgtgttctcaggacgcagaagggagcaactttgctatttggtccagtaagtggacaccttgtgatataaatgtggaaataataaaaaaaaaaaacatttgcacaaaccagtctgagaattgttttttaatttggtcctttatagccacattcatcctctctggattctggattagccaagacaacctggaccccatatccaaggttcaggtcctatagctagccaggctgtgggggaggtgggcagggcagtcaccaagtccagcctattagccttctgcatggagactgacctctaccttgcctttcattcattcagggtcacaatgcctctcccacctccagagtcatctgctaactctgggtgacagagtcggagagaccacatctgtctccattccagacctcactttccctagaaacagctttgccctcccaagcaggctccacaacccaggtctcaagtgaccttgtcttacccctgaaatatttgcagttcttccttaactataaagtgatgatcttttaattcttctccctcatctctgaaaccataagctttggctttctatttttttcagtctggaataataagtcatcttgaccatatttacttgatgtcagatgaaagaaatcaactccccctttagaggagcagccccaccaggcaaatcaggaggtccagaaacatgcaatcaacccagagccacagttgcagagccttgggga

SEQ ID NO: 39363 - DNA, 2506 bp, Bovine  19866880819657
  misc_feature (1)..(1): n is a, c, g, or t
nattggtttataatggctacatgatctagctagctctatgtccttttacttagtaatttgcaaagtttataatgacacagcttggtgaatttctacatgttgcacacattcataagacaagaccaccacccaaatggaattacaggatcctctgatctcttctagtctataaccatcccattttcatgaaatgattcccagtttatctatataccaccttattactggacacataggtggcttccaatcttttgcccttataaagatgctgccgcgttgatcttccttgtacggacacatttgtatctgactgcttcctctggatacatttctaaaagttgcaaaatcctgagtcagggggtgtgaatgtgtagctctcagttgacatgctgcgtctgtcaatcctgttacttcaggattcccctccctgtgcttctgctacgctttgcctggacagtgcaattatggtactgtattaatgagcccctaacccgtctttaggacttggcttcaaaactagctccacaggggacttccctggtggtccagtggttaagaatctgccttccaatgcagggcatgcaggtttgattcctggtcggggaactaagatcccacatactgcagagcacctaagcgctcacccccatgccacaagagaagcccgctcatggctacaaaagatcctgagtgccacaactaagaccggtcgcagccaaataaatgtttcaaatgggtaactacatattctccatacgtctgtgtgtgcccatgttcatccttgtgtatatttaatgcaatacttcatttattaaatatttgatcctccactgtgtgacagatctgcataaatgtgtctgggtgtgtgtatacaactaccatgtatctggatgagacattcattcacttacttcacatgtatttaataaggactcttctgtctactgggcttttctgatagctcaattggtaaagaatctgcctgcaatgcaggagaccccagctcaattcctgggttgggaagatctgctggagaaaaggataggccacccactccagtattcttgggcttcccttgtggcttagctggtaaagaatctgcctgcaatgtgggagacctgggtttgatccctgcgttgggaagggaaaggctacccactccaggattctgacctggagaattccatagactgtatagtccatggggtcataaagagttggacatgactgagcaactttcacttcacttctatatactgggcttcccagatggtgctagtggtagaagaacccacctgccaatgcaggagacttatataagagacacaagtttaatccctgggttgggaaggtcctctggaggaggactggcatggcaacccactccagtattcttgcctggagaatccctaggacagaggagcctggtgggctacagtccgtagggtggcaaagagttggacacaactgaagcgacttagcacatccacatgcacttttatctactggggacacagaatcctgtacctttaacagagctcacaagtcatcttaatgtttcttcttagtttactaagagcaggtcaatggagtgttttctagatttttttcttaaacaatctgaatcatgctgggggtgggggggagcagcttatttctaaggaaccttgatttaaaaagacaagtctgaggttaaaaataatggcagaacccgaatatactcgggggagggcttgtttcttttgcttatctgtagtgagataaaaagtatctccaaatgggctggtttccaacctggacaccatgtacacaaagcacctcattctaggagggagagtgaataaagagaggtaatttgcccatatttattttctcctacaagtgtgatgtaaaacttttcacacgtgcaggagcaggcaaccacaaccacgtggggaagcagccgttttttgcaaataaaaatgcttcccagaagcatgacaaatgcaagactaacaggtgtagcacagagccgaggcgcgcatgtggttctcatcagctgcctctctcctgttttaaatgtaggtcttcctgtaacaagaagaaaagttatttctctcgaggctgcggctaatgatccactcagcctgccttttttacccctttgcataaccgtatatttaacaagagcttccacggagagagccggcaatgaaagaaggcaatgatgaggctaggggcggggagaagcccttagacttgacatttaacagttctgggttcgaccgataactctgggtgaccttgggcctcagtttcctcctttgtaagggcgtttcagttttccagcaccaccattcaaagcagggtgggagggttttttaaaccaatgattctcaacaggggtcgagtctaccagccaggggacctctggcagtgattggggacatttctggtcccctgcaggaaaagggtgttactggcagagaccagggatgctgccgaacattttgcaacgcacaggaca

SEQ ID NO: 39364 - DNA, 760 bp, Bovine  19866880880028
  misc_feature (1)..(1): n is a, c, g, or t
ntttcactctcttcctctttagagaaaggacacggggtgggcccagcatgccccagaacccctgattctcttgtgtttttttttttttcccctgagtctcataattcattaacagcagtattggaattatggccctgacactgacaggaaaaccaatccaactggatatttttcacctaatgagaaaaatataaatagacataaaaaacagaaataaattctgaatacacttctgctggcttccagcagggtgggagcaaaacccagcagcacactggtctctcaagccatattttccactttgaccaacgccaagcataggctaaggacaacagagctggcaagaggtgacggagccacaggctccagggaaggcatctcttggcagctcccgccaaggccccgggcatagccaggacttgaagaacgccatgttctaatcaaagcttcagcctggactgcagggacatagtttaacttcgtgtagaccccagttccctctcgagcatagagagttactttgaaagcacaaagtatgacacagaagtgcagactgggaggacagagaacgaccatcaacgggatcattctagagaacgacactgagaacaataatgacagaggagacaggcgggctggacttacacgatcatgcagaacatcatgaagacattccacagggcgatgaagattcgaaagtatctgaggctcagcaggaactccccggatgttgtcacctggaagtcagaaagcattttca

SEQ ID NO: 39365 - DNA, 1398 bp, Bovine  19866880887875
  misc_feature (1)..(1): n is a, c, g, or t
nccattgttctttctttggctgggccccctgagggtgggactcagaagggctccagcagagtatggtcctgttcagaccagatgaggcccagaggcagagagggcagccatctgtcccgggacccttccccaagtcctcccttcctgtcttacctggcaaggttcggggcctgcacttgcccatcctgtctcctgccagcaggatggggcagcctatgctgcctcaatctggattgacccctgaatacaggagagtagagtctgtggaagggaaggcgaggggcccagtgtccagaggccactgcgtgtgtcgggtcactgcccgcgttcctgccacagggccacagttgtttggccttgctggttggccctccagaggctcggtagctttgttacctgggaagggaagagtagactgggggacagcaggcaaggatgctcggagtcaagagaaccccttggggagggactgtttgttcaggcccaggcgagggtggaagcgggtggctttgggcttctgggctaatggaccgtgggcaaggccagatggtgttagctggagagtggagaccatcccaaaggtctccgaggagagggcaagtggaaagggcccagggccaggccctatgagacagggtgaacatagctgggacaggtcataggagttctctgctggggggtgagtatacggaggggagctgcccaagtagccgccaaggggatacctggacccccgccgcctcctcacaggggctgcctctcctcctctcctgccagtcatctgcaagcagcaggccccggagctggaaccggctgcgaccctgcctcccctgccccagcccccgctggcccctgcggcacccgtcgcgccagcccagggcaccccatccatggacgagctcatccagcagagccagtggaacctgcagcagcaggagcagcacctgctggccctcagacaggtacgggcccgctcctcccgccccacccctcctcccgaggggcacccggcactcacctctgtgcctcaggtttcacgtctgcactggcgctaaggacggggctgtcccattgcccagggcttggagcgagacagtcgtcgctcctcccgcgctgccaccgcctttattgtgtttagctcaacccctcacgccggaccctaaggttgggtctcctcccagtgagctcattgcataggctttgacacacatgcccccatcatgctgcagcaggtgtgacaagtgagcctgcacgtcggaaatggtgtgacagagaacgccaggtggcctctggtgccgttcgcacagttcttgccagttaggaggaggctcttgtgaggtggacccttttgtcccagtccatcacagcctggtacttggccagatacagtaggatcaa

SEQ ID NO: 39366 - DNA, 898 bp, Bovine  19866880958772
  misc_feature (1)..(1): n is a, c, g, or t
ngaccccctgtttaagataactatgcaggtggtcactactgggcctggctagggtgggtggctttagtcagtggttccccctaacaactggactattcgactgtttcttgactgcttttcctttattcctgcattgtctcacttcccttaagataattaattacttagatgtgttcaagggcaagcattgaggccaggcttcaatcacaaaatggctcaggccaaaatggtttctcttatgtcaagaaagccattactggttcccttactctggggacccctaactgatctgcttatattaatctaattatctctgtggaacaaccaccaggctcattttaagggctcggcatgcctcacccagggttactgagctaagtgcctgagccgagacttgagcccaataccacccctctccaactctctctcctccaggccctcgtgggtgaccagtacggcccctgccctgtccccacgcagatcgaggaaaaggagtgggaggcgctgaaggctcagctgaccgccaggccccgcgacctggagctggtggcacgatgcttctggagagacgagaacgcggtgccccccgcctacctgctgcaggccctgggcactggggaggcctctgggcctgaagaggccaccctgctctctgcactgcgctccggagcccaggaggcccgcaggctggggctcatcagccaggagcggtggtactgctaccaccggtcaggtgaggctgccaagactcccctaggggtccctgggaaatgcccaggggttcaaaatacacatcacgctttatccaaacaccaccgcctgcatttctataaatgctaaaccaacctagctcccggaggcccagttctgagaaagattatttttctatccaagagag

SEQ ID NO: 39367 - DNA, 609 bp, Bovine  19866881042698
  misc_feature (1)..(1): n is a, c, g, or t
naaagcggggctctgccttggtctgagacgcaaggagtacttaggcccagaaaggtaataggaagaatcccactctccacaagatcatcttccgtcggcagcgaccccaagaaagacccagcgaagccaagtccactctcagaaccgaaagggactctccacgcgccttgggcacccggctaggtgtaaaggaggccgggggggctcccttcgaagccagaaaggttcttccaaccgggaggaaaggtaaacaagacttccctcatcaccgagaaggccgagacaccggcggcacgggctccccgagtcctaccccggacaccagttgctcacagcctttccccctcccctcccccccgccgggagggcttcccgggggtcgcgggtcctatggtaagggcgaggcggggaagcaccgtcaggaacagcaagggtcgtagaattagagtggatgagggggaaaaactctagtctcagctcccatctgctcccttcgcccaggccgcacgaaagcctcggcctcacgtaccgagcgctgccgggctgcccgaccagcccccggcccgggcccgggggaagagagacagggatggcagcggccctcagggg

SEQ ID NO: 39368 - DNA, 1249 bp, Bovine  19866881076508
  misc_feature (1)..(1): n is a, c, g, or t
ntcgaggtaggtggcatcttaattccccaccagggatcaaagctgtgccccctgcattggaagtagagtcttaactactggactgccagggaaatcccagaagattctattttgaaagagtaaatgtttgaggaaacactggaccaccccatgtaaaccctcgtgttgtggctcccaggaatattggtttggaaagacctgtcaagaggagaaaagcagattagggagatggcctggctactccaatggggaaattgtggagaacaccaccattgacatagctgtgactgtcaaagatgagatgaactcagtggaagagatctcagagaatactgatgttaacatctacctcgttggacaacagaaaattccaagtgagcaggcattctgtatgtgtaaagaatgtgggaagcgtttccagcaaaatgaagactaatcaatatcagggaattaaacgcacacacacaaggtgtttgtattctttgtaagcagaagccagcctctctctctcatctgctttgaaatgaactctgcttgttctccaacccagaggaaatttgtggacaagtcccttagtttttccaggcaaatgcttgcaggtattatgaagtccattccagtctgatgctcatcgtgtttaaagccacttcctttttcaggcaagaacacatggggtggtttatgtattattttcacaagttacttctcttcctgtgctactcgactcatctgagattgggggagggatggttcagggttctgtaggtgtcagaaggaaagaaagatcaggaaatgtcttacttgatgggtacagctggaaccaggtatgagtaccagctaaccgtgggctctgtccaaacgctgatctccatggtgaacccttcagtgatgggcaggatgccatagagctggtcacatctgtccctcgctcagcttctgccttctccaagtgcaggagacacagggtgtgcccccacgcccgtccgtcctttccacaggcaggggctctcagaggcggagttaaaggatgttctgtccttggatgatgaggtcctgcagagcgtgtaccaagactggaccccacccagcaaagagcttctgcgcttcccacccctgctgtgggtgaggcttcgtcgagatctgggtaactgcttggccaggcggcccgtggacggcttcacccttctggccattgctcacaggtgagtcgagcgggtggtacacggcggggggacgccaagagcaagga

SEQ ID NO: 39369 - DNA, 1098 bp, Bovine  19866881231646
  misc_feature (1)..(1): n is a, c, g, or t
nacgcagccctgagagggcaacggaggccgggagggccagacccggctgagggggcctcacctcgtcatagacgctctcgatctcgttgagcaggctcttggagcgaagcgccttggtgtcgttctgcttgaagttcacggcctggtggtccagggacttgaggtacgctttctcatactgctcccgccagatcttgttgaagccctgctgggcctcccgccactcctcctccttggccttcagcctgtgggggcaagcaggctcattccaccccagacccacggacccgttccaggcccggacggcccgctgcaggcacgggggtaggctctgtgccggatggagggcggtgggagcggctggcggcctcgctgcagccggctttacggacgctcaaacgccactgccctgcagcacccccgtcccggcccgcggcactgactgcgctgcgtgcggctgctgcgctcccagtggatgggactgtcgggctgctcacgactggggccccagcactgggcgtacaaccagcccagggcagccacttaaccaataactgttcacagcacagggagggcgccaaaatgtgtgattaaacaaaaggcaagccatgatacaggacagtcccatttgtgctttaagataattactcttcatgtttaggcatgatcacgtgcagagtggaatttttgaggacacaaacaatcactaacggctgtacttttgtcttggggatggaaaagggagagaaaggaagaccaaaaaacacaaccagccagcctgagtccccaaggcccccctcagattacacctgggacaaacagcagtaatgagcccctgggtggtgcagtcagaagcgtgagggcacctttttaggacaacggggacagcggtgacagggttcttcttgaggctctcgatgatctctggggctttgtcgccgtaaatgcggtggatagcgcggcgctggatcacttccgatgtgccccccagacagtcgtccaaccggaacttctcctggtcttccggcgccatgcgggacagcttcttctggacgctctccaacacccggattgggccaggtggtctccaggacaacg

SEQ ID NO: 39370 - DNA, 622 bp, Bovine  19866881404093
  misc_feature (1)..(1): n is a, c, g, or t
ntgggaaatgatgagggcggggtctagcagggtgggcggggcgggcatagaagccggaggcccggaagggagcccttgcctcccctcccccacaaggcagatccagggacccaagccgtgagctcagactggcggcagcgaagggcggagtggaattactgggaacccttttctttattttccaaacttcttgaatttagattgcatttagttcaaaagttttatttttttaattttgttttcataaatactaggcaaatactcgcgtgaaattccaccaggtcagggctcagggcttcccgggcactgtctccactctgtggagcgtggtcctggcccctagggacttctccatcccaggcccaggcagaggcgagggccaagtggggagcttggagttcccagggccctgacagcttcgcctcgcccgccaggctggtcccctgaagagcgaggtcccgtggccgttccggaggagggggtgacagtcacgcgctgtggctgcgcccgcgcctgcagcatcagcggggagccggtgtgtggctccgacggcgttgtctacgccagcgcctgccatctgcaggaggccgcctgccgccgccgcgtgagattggagcccgcg

SEQ ID NO: 39371 - DNA, 1294 bp, Bovine  19866881411950
  misc_feature (1)..(1): n is a, c, g, or t
ntaaattttatttaaaaaaaaaaaaagtggcatgcccaaggagcagagttgcaaggcatccactcccagtactttggcacaccaccagggttgactgcagtgcccatggccacgacctctccgcctgccttcttcagaggactttcatctgtagttctggtgtggagcccctctgagcaaggagcccatatgcctgcccgggttgctgagacagtgaggggtcggggggcaattacctcgaacatcaggccatgcttctggcagaaggtctgcacttcgggagtaggcggtgctctggagggcttccctctctgcgtccatatctgcaaggaacagcatggaggctaggaaccggacaaactcagaacttgtccctgcctcacagctctgcttttagcctcaggtgctcttacaaaggaaagctgtgacaaacctagtgtgtgtgctcagtcactctagtcgtgtctgactctgtgaccctacggaccgtagcctagccttccaggctgctctgtccatggtgattctccaggcaagaatactggagtgggttgccatgccctttttcaggggaccttcccaacccagggagggaacctgcgtctcttacatatcctgcatcggcaggtgggttttttaccactggcaccaacaaacctagacggtgtattaaaaagcaaagacaccagtttgccaacaaaggtctgtatagtcaaggctatattctttccagtaatcatgtacagatgtgagagttggaccataaagaaggctgagcaccgaagaactgatgcttttgaattgtgatggagaaggcttttgagagtcccttggactgcaaggaaatcaaaccagccaatcctaaagggaatcaacactgaatactcatcggaaggactgatgctgaagctgaagctccaaaactttggcctcctgaggtgaagagctgactcattggaacagaccctgattctgggaaagatcaagaaggacaaaagggcaacagaggatgagatggttggatggatccatcactgacccaatggacatgaacttgggcaaactccaagagatggtgagggacagggaggcctggcatgctgcagtccatggggttgcaaagagtcggacacaacttggtgattgaacaacaacaactcttacaaaggttaggaccgttcatgaagaatcaaaagctacaaaaaataggaggcatgccagaaagaccaactatgcctgagactttcctagtgttagtgctaaaaatcccacatcccaggaaacccctcagacc

SEQ ID NO: 39372 - DNA, 873 bp, Bovine  19866880422057
  misc_feature (1)..(1): n is a, c, g, or t
nggggcaggttattattgctggcagatggttagtctgattcagccaaggaagctaataagaatccacacatcaggagtctccaaattcccccaatttggagatagcttcctatggagatcaagttgagaaatatagaaacaggacctgtggtctaacagagattatttatttgtaaatgcaattgcctgagaagtattacaaaagtataaaaatcagatcatgttcaattatatatttaatggataaaaacataatgatatgaaattcattctggcccagaacatctaaggtatgcagaggcaataccaatagatcatcggggaaaagaatagcctgaaatgtcattaattaaccaaagaacagatatttattggccattattttgtgttaaataagaggattccagaataaataagacatagtttctacactcaagggacttttaaactaatggcaggaagccagggggccagggaggagctagccatattaaatattgcagactctgcctctgccccctggaccttttgtgctcaggctggaacaacagaaggccactctgcccatgtgtgcagcaggctcctggtgctgaacaaaggccccagcccctcccccaagagcagccctcagccagtgactctctgaggttgagatataaatatctcaacacctttacccctcaggtgggataattctaagacatgtgttttgtactccttccaggagtttcctcatggacctagactcttggtggtagcttgataactcatcagcctttatcatatactttatacatcagccttacttgaatccttgtctcaagcatttccctggtggctcagacagtaaagaatctgcctgcagtacaggag

SEQ ID NO: 39373 - DNA, 698 bp, Bovine  19866880448218
  misc_feature (1)..(1): n is a, c, g, or t
nccaactctcacatcccgtacactactactggaagaaccaaaacttcgcctatttctgttttgtaagtttgtttgaaacattttttttacattccacatataagcaatttagattgtcataccgagtgaaataagtcagagaataatgcaaaactttaaatgctgggattaactaactacagcagtaaatgctagaatcatcaaaattctccaagattaagttacacgccatgacttacacatttgcctggtttttattttatgtgctgcacagtctaaccccaacctttgactctgtaaccaccctggtttgagttggggtttgaacagctgcccagcccatcagtgcttcagtgtgtttgagcaataactcatgcagagatgcttaagagctcacacgtcttcaatagactaaaagcaagagaaataagattccatagcaacaacatgtcactctaaatcatcagtgctgtttcacgaacaatgtgagaactgcaatagaaaatacggcagggagtaggaccagttcagcagatatgattggctattttctgggaattagatcactttggtcagagagaccacaaaactgctcatttttattagctaagctgttgaatctagaaagctagaaaaatttgccattatttgctactttgtctttcactgaaaaaataaaagggggttttattttcctc

SEQ ID NO: 39374 - DNA, 1891 bp, Bovine  19866880453847
  misc_feature (1)..(1): n is a, c, g, or t
ncaactgagtgactggactgaactgaactgatcagttgctttacaatgttgtgttagtttcttctctacagcaaaatgaatcaactatgcatgtacataaatcccctctactttggatctccatcccatttagatcaccacagagcactgagtagagtttcttctgctatacagtaggttcttattagttaccttttttatacatattgtcaatggtgcatatatgtcaatcccaatctcataattcattccaccctgctttcccacttggtatccatacatttgttctctaggtctgtttctctatttctgctttgtaaataagattacctttaccatttttctcagattccacatttatgcattaatatacagtatgtgtttttttctttctaacttactccactctgtatgacagtctctaggtccatccacattttgcaatgtttttgaaaactcacacattcctagtaatttgctaaagtgacatagctcacagctaggaagtggccaaacttgactttaaactcaggtcagaagagccttgaaggcagtatcttcttcaccaggccagactgggggattcattccatccagaagtcctcttactggtgccaaaggccactcccatcccagacaaaactgagcccccagccacagctagagtcagcactccagaaatctgtctagtcccagtgacaagggtggtggggcctctggactcaggttctaattaaacagaaaacacagcttccctgggagcatgtttgaagggaggaacccagaaaggagagagagggagaactggcaagcacccatcactatatcttggaaatggggttcttagttggggttcttcatagagacagaaccaacagaacatttaggaaaggtgatttataatgaggatttgatccctttgtttatggaggctgaggattctcaggattttcagtctgcaagttggagtttaggaaagtgtaactcagtctgagcccagagtcctgagaaccaggggaactggtagcgtaaatcctcatccaaggactggagaagaagggataagatgtcccagctcaactgtgagacaggatgaaaggggcaaattcctccttcttctgtctctgtattccggattagatgatgtccagagtcagacacgactgaagcaacttagcagcagcagcagcattcattttggggagggaatgctgctttatagagtccactgattcaaatgctaatctcatctggaaatatcctcccaggcacacccagaataatgtttaatcttggcaccccatagcaagtcacactgacacataaaattaaccatcacacatggggccttgggaaagccatgcaggcacagacgcctcctaggatccctctggttcctgccagcagcatcctccctcagcaatgacagaaggaggcattatgtccccagtgtctacacaagggcttcagacaacttcttcagctttcccggagctccccagttgctgtgccctcaggacactcccttggatggaattctgggtccaggctgtaaggacgccaccataatcattagcctcatctaccgccacatcttccaaaatcatcagtgccttctctgaatctctaattgtggtttctcaatcagttgcttgcaaaatacatttttgtgtttaacccatcactggcccagccactctaaaataaagcagatccagctagttgtacatctaatttccatgacaaactacacttttgtctgggtggaccctggcacagtttccttttaaaaattgaggtgtggttgctttgaaatgttgtgttagtttctgttgtctaacgaagggaatcagctatatgtatacatacatcccctccctcttgaatctcc

SEQ ID NO: 39375 - DNA, 4441 bp, Bovine  19866880522342
  misc_feature (1)..(1): n is a, c, g, or t
nctcttaaaatgtgaagaccttcaatggagggattcatggtctaaatggaatttacatgaaacactaaagacaaattttaaaggttattttgtttagtgctataaatgctaacatacaaaacaatcctataaaagataagaattatgatataatctaatctctccattcagcttgtgttgttatttaaatttttacaaatatttctttgttcagaaagtacataaagctctgtatctaatacactttcaatttcctttttatttaactctttgaaggttctaaataatgtttttgcacaaaaaaattgacagctttcatgaattattgcaccattgtaacttctcaataataaacacatacgtattcttaaaccagttgatagaatttcaacaaaaaagtaagagattttttcatatatttgattatttcatatatttttcatatattttattattaccatccccacatttcaaaggaaacatgtaaacagaagctaaacttaatggaatattctataataccaatattgctgactttatatgttagtaacctatgtggtcagagtagttacacaaaatctgaggatgtcagaaatgaggctgaactgggtatcgaacttctagccttccagagctcagtgtccatgcatggcatgcctggaacagcactaaagggggccctggcatcctttctgagcagaggcttcccaggtactcaaggctcttctattcaattcatgtcctctgtcttggaccagagctccttccagctttactcatacaatcattggccactcccccaggctgcagtgatgtttatgacatctttcataatggccacggttgggtcttctctggtaatccagtggctatgactccatgctcccagtggagggggcccgggtttcaatccctggtcagagaactagatctcatatgtcccagttaagagttcacatactgcaactatacacacacacatatgtatgtatatcctgcacgctgcaactaaagaacccgcaggccgcaacgaagaccaaagattccacccgccgcagctaatacctggtgcagccaaataagtaaatagcgaaaaatgctggccaaggtcgtctacacaccataattgcctgcttccctttagtctctctttcctcacccacttgctggcaagtcctctgaatagcagttgggctcacacgtgcacaccctgtggtgatgttcctgtttctctgtagcagaaccgccatccttacggtacatccttggttagcattcagcatcacaaccgtttgcaggcgcacaaaataaagggctggaagaagagccaaacccagtgtagagagtgcatcgccgatcagctgccaagggcattgtcggcgcacccatcagccaaaacacgcagggaggtctttggagacagttgcattgattgagagcctatgagaactttcagaattaaaaaatatatattttaacaactgaacactggagacgtacacacacatatatatttccaagagagtcagtgtgagcagacaatgccagtgtggctcttctgtttgtgtgtatctttgtctccaccagactggaaactctttgaataaaaaagccaagtctttctatctgtatatgcccagctttttttttttaattaaaaaaatgtctaactttattgagacataattgactaataaaaattgtacatgtttatgagtacaaaatgatgtcacatatacattgtgaaatgactactgcaatcaagctaatgagcatatccatcacctcacacagatgtaacttttggtgtatgtggtgagaacacatacgatccactctcagcaaatttccagtatgcgatagagtattactgactactgtcaccatgctgtatcttagaccataagaacttactcacctttttaactgaaacttggtaccttttgaccaacctcttcctattaccctcatcccccagccccagggcaaccaccattctactctgctaacttttaaaagttcaactttttaaaactccacatataagagaaatgatgcagtatttgtctttctgtggctgaatacgcaatttttaaagtaaaacctgctacatcccaggagcttaataaacatgagatgtttattaaatggtgaatgaaggagtgaagtgaaagtcactcagtcatgtccgactctttgcgaccccatgaactatacaatccgtggaattctccaggccagaataccggacagtgtagcctttcccttctccaggggatctttccaatccagggatctaacccaggtctcctgcatcgcaggcagattctttaccagctgagctaccagggaagcccaagaacactgggttcggcagccttctctatcagatcttcccgacccaggaatcgaactagggtttcctgtaatgcaggtggattctttaccagctgaagtatcagggaagccctatgaaggagtgagaaaattgtcaaagggaaccatgatgccccacccccaggtcacctctggggatgaacagtccctgaggcacctgctcagtctgccctgtggatccagctgcctggtcagcagagcagaagccacaaacacctcggggaccctggtggctggacataagaagaaaggacaagatgctgatcccctcatacaactcagaggagacggtccacacttggcaagggaccctccatctctcctggccagcagctgagcattgagtccccaggagcacgcaggtggcaggcagcactctgtcatccctgccaggagttcgctgtgagtgggcacagaggacccactttctcccctccccttgaccctcccctgctgctccacccctccatctctcccagttggcagatctcctggactgttctatatttaactctctaaggctcattaactacccaatccccaacttcaccaccagacccattcaaaggagttctttttcggctacagttatttttcttttgagtattaatttcctttaacacttgccctattaatcactttaacaatgaaattaagaaaattattttaatgaggtaatgggtgataaagaggggacgatacacatttatttcacagcaggccagaacgtcttgataaaagtcagccttgtcaataatatattaggtgggaaagtgcttcaggagggccaggctgaggactgttctgtttcactgatttaaatgctcctgtttctatcaatgtggctgtgtccatgctttcaggccccataaagtgggatgccagttgctgagagtcacaggttgctattttcttccagaattcagtggccaaaaaaaaaaaaaaaaaattattgatttggctgtgatgggtcttcactgctgtgcttgggcttttctagctgcagtgagcaggtgcttctcttgtggtgtacgagcttctcattgcggtggcttctcgggtgtgcaggcttcaacagtttcggctcccaggctctagagcgtgggctcagtagctgtggtacaagggtttagttgcttcatggcatgtgggatcttcccagaccagggatcaaacccttgtctctgcattggcaggtggagctttaccactgggccatcagggaagccccacgccgcctttgtcttagagatgaagcatcatcctcttctacttctttggattccaccctctttatatacgccctctgccatccctctgcaccttcgcgctcccacactttgtgccctttcccttctcccctgattggctcctcctgtccttagcccattgagccacagtataaatatggttttcatctcattccccaccttgtgttttattgacaccaagatatctctttcaggtctggtatctcccacctgtttttgtttattttcattcccaccaacgagagtcattgtgctcatctaatagtggggtcactggccataggaatgggggcatctaggacacgatgaatggaactggcacaaaacccaagaatcctggcctcctgcaggatgctcctcctcagtcctgagtaattgactgggagcatctgttgcttccttgcctcacccaggccttccatgggctggaattcaggcaaaaattcttgcaaaaataagcagcccattcccttagcttaaaaccagaagtggattcaaccattctactcaaaggcataagccaaaagaactgaaaacaggaatccaaacagctattcattcagccatgttcatagcagcattattcacaatagccaaggtgtagaaacagctcaatactgacaaccaaaatatggtctgtgcatacaatggaatattattcagccataaaaagcaatgaaattcctgatacatgctatgatgtaaatgaactagaagatatgctccgtgaaataatcaaggcaaaaaagacaaatattgtaggattccactta

SEQ ID NO: 39376 - DNA, 2374 bp, Bovine  19866880586714
  misc_feature (1)..(1): n is a, c, g, or t
ncaggcaagaacactggaagtgggttgccatttcctttctccagtgcatgaaagtgaaaagtgaaagtgaaatcgctcagtcgtgtccaactatttgcgacccccatggactgcagctcccctaatccgctagaagaacttttacatcttttctatgttttccatcttttctgatccaactttttggatctttataacatcctcatatctaacctgtccataagctcatgtctaaataaggaaatagagcaacagcaacaatatctgagacttgcccagagttatccagatcatttccatcagggctgggtgaaactcagctctcctaaggctcgtttactgttcttgccaatggaccatggtctatttagctttctcctttggtgggttttatcctggaaagtttctcctttcttctgccttctcccctcctccctaccgcgttactgccagcacagaatctggcagatgaatgacctggctgatctcccaagttttcctctgaaatgtagacccccaacatccttcccatgtggaattccaaacacaatcactgctgtgtcagaaaactattaactgtttgagcagtagaccttgccaccagcccggagaatgataagcacgagaagggaagcaccgcactgcctttgttcaggtctaagggaagatgcatgacctagtttgggttggtgatgctgtttttaaaaaataaaatatagggattcagagacctgtgctgagagcttgagctctgtggggaaacagccttctctgagagaccaataaacgtgtgctgtggcttatttatttggttttcattggaggttgaagcagcaaccagtgggctggtcctgaggccagaacttctgcaaatgcagggccatttaggatgctggtagctttgttgtcattttttattccttggagtgaatcagtctgatagcctgacaaggctgctgagagacagcgcgaggcccttgttttgacagttgtcccatcagattgagtagcaggctgtgtcctcacaggcagggagaagaccgaggcatgatgtgggtacctgagcagagagctgcatgatagttcaagtgcgtgccactgccagggggctgtgtgcctctgcaggcactgcagagccactccccaggctggtttggaatcctctgacttgacccagcaggtaattttatggtttgcttccaaaacaccagaggaaaatacaggaaaatctctaggcttccatccatgaaaggtcagcctttgtaggtattccctaaaaggaatttcatatgtttggcaatggtagcatcactggaagataacccacagtcagatacatgcatatttaagtgcacttcctaagccccttctcttgctttatttttcccatggtacttaacatttgcagagtcatgagtctgtatactgtctgtcttcctcgctaaggaatccgcctccatgaggccagggctttgtctctcccggccgcagcccctttccataaaacagtgacaggcgcataggtcgttttcattaaatagctgttttttctcttgtggcctgaagcccttgtactgttgaagatttattaacttagttttcaaaagcttcaaagttattaaaatgcaagcatcctgagaatagcaccttacgtcttaataagagttctcagctaatacattttgagggtaggagactctgccatggcattaaggaacatagatactttctagaatcgtgctcaagtggaaaggatatgggtcagagggacctgaaacaggaggggagaaacagggagaagacggtgggtgaagcctcaaaggtggcctcttgatggcttttcctgtcggtcctgcctaggagtcatgtttgactctccagcctctcccagtccagcatcagctcccacaccatgtatcagtcagctctggtgcaatgactttttccctttcctctccattctcactattgaccccagagagtcagacctcatcacctatcccctgatgtcaatggccaccaaaccagttcactgcttcctgcctcccctatgagccatgcagacacttcctgtctcccctatgagccatgcaggccagctttctagaataccactttcatcttgcttccctgcactagccattaggactgcttatcagtatttctgcttctccgtttattgtcatatgatgggaactagttctgctcaatgaattggaagcggaagtgacgggtattgcttctggtcttgagcacttcactgctaatgtgagaccctcccacattctttctctccagcaccctgattatcaacatttgagattagcctgggtctctagtgatcaggatgagaagatcttttctgctaactcat

SEQ ID NO: 39377 - DNA, 1397 bp, Bovine  19866880642856
  misc_feature (1)..(1): n is a, c, g, or t
ngggctggagggtgtctaaaagctggcttccttcttgtgagtgtcctcttggcttgtcggatgccccactggcagccgctgctggcatcccccatgattcagactctgcatcacgttcccaatggccacccacccccaggcccactccaagaagaatctccccatgggatttccattacaaccccctcaggcatttgcagtggattcaggccagatctctctcccatcagtgcctatagggtccatacaaaacacccttgtctcttttgctctcataaaccccaacatacagtccagccccaatgcagtggcaacttcgttagcttcacaaagaatacagtggcctgtcgggccttcttgcctttgaagttttatgagcaggagccagacgccagtgtcctgggtcccctaactgtgggaaaataacaagcactccaagtggtgctttcctgtgacttgaggtacaggaaaggaacctctactgttcccccttgaggggaggggaagctccaagcatggcctccttcaggcatcctcatctaaaatcctcttggtttccaacaatcggataatatgtgatttcctcattgtgggtgagggattttgagagttgtgataatggatttccagatagctcttttataaattctgcatgtagcctagtgtgcttcgatcaatttaacactctgtaataaaagtgacagatgcttaatcaactcaagttgtttgaagcaaaatggaggatttaatgtaagaacattgggatgtcttctggaacccaagagcaggttcctaaaacccagctggagtttaggaatgactaaccaggggctcacatttcctcaggactctctctgcatcttgaatcactcttctttcttggtctctgcttcatgctgtcctctctctctgcaagttacttccttaacttctcccagtctggttataggaaacatggctacaggcagctcccaagatacatatctcattgtctagcctcaaaaagagagaacttccactctttcaggccaaagaacaaaaaaccagggcaaagacacatatttcattagtcaacatgctcacctcaaccaattagctccacttgggtgcaggaactcattgtcacatggcagctcctcaggcaacctggttgctgcctgagataaaaaaaatctcagaagaaggtggcaggtgctaggagccccctgggcacatttccaactgttcagtcatttgtgaacttgtgctattgtgcctggtggctcagactctagatctagtaggattggaaggtagtgatggggttctggtttatgcaaaagtccacaggaacagccaacatagtcaacaaaagggtccaaaatgcagtactttgatgcaatctcaaaatcaataga

SEQ ID NO: 39378 - DNA, 1079 bp, Bovine  19866880649871
  misc_feature (1)..(1): n is a, c, g, or t
naacacagaggatttttaggggtgaaagtgatctatatgatactatagtcgtggatgcacaccatcgtacatttgtccaaacccatacggtgtgaaacaccaagagtgaaccctggtgtaaaccatggtctttggttgatgatggtgtgtaaatgtaggttcaccaatcacaacaaatgtaccactctgggggaggcaggagtgaggacagagagtatatgagtcatttctgtaccaatcccctcaaatttgtggtaaactaaaacttctctaaaattcagtccattcaatattttttaaaagatatacaactaagttaagaatggggaaagttatttgccgactactgaagtctacttatgacaaatctaaataactgctctaaatattattgcaaattaaatgcaactgtcaaataatttttgaaagagaagatacaatgtaaaaataaaaatattttatagctaatattctgtatcataaaactccagtttaattaaaacagatggaaaagtagggagggaaggggaaaatagaattgtgatggcagaaaaaatgtaaaatgtctgtcaaattttttatcctacatgtatatagtcaaaaatgttattttgtttgctatttttatcctcaaaatatgcatattgacttctatttgtgagtttatgatgggctaaaaatttggagcaacactcctgctagaagcaacagaaaaattccggaaaggtatttattaagggtctttcaaagcagaggagttctgacagcataccaaggagttgctagaccaaagtgtaagggactggaaagaaccaggcattgtctgtctctgcaaacttgaattccacctttgacggcaaacttcagcgccttagctagacaaaaggggcaggtgtaactgcaacatttatccatacataaagctgggattcctaaaaggctgcaacttcacaagaagggttaattagtagaagtcaacctccctctctgtcccaaccgctcacaattcccatcccaaactgtcagtaggaagggtgttcgggtccggtcagaagatagaggggaaagtaaaacaaaaa

SEQ ID NO: 39379 - DNA, 1331 bp, Bovine  19866880690192
  misc_feature (1)..(1): n is a, c, g, or t
nctgtgtccctgtctaggctgttgtaaacaattctgcaaggaacaggatagtgaaaatcctgatttcatttcctttggtacctatacggcagtggtacagctggattatatggaacattggataatgacaaaccaacccagtaggaacctctttttttgctggatgtgttttaggagcacagagattggactctcaccccagctcaggctgtgttctggaggaccctgactgatgacaactctagatttcctgagaccactgcacatcctagcatggatgccttgggccgctgagggactatggagctgaagcagtgcctgttggtgtcccagggtcctggcaagcagacttttaactatgccccatgtcagaagggagcagacttaggaggagaacaacccccacacctcatcagaaatagaggggaaatgacttgtctcttctgcattagactctaacctactgactcaaggctcccacaggccacttttttctcttgtatcccccaacatccttctctaatgagttcccttgcctcccctttttctaaatttgtacaatccaacagctggagaggtttttatgtctcctaagggagccagctccaatcattcctttcccttggctggctctggaagtctccagagccccaggtccctgggcaaaacttccagatacctagcggcagacttccagcagaaacccacctgtggtgctgttgggctgagcagatctgtcagtgtgcaaactttcggcagcgtgggccttaccgagcagtcccatagaccctgctgaccccaggtccatccttctgagcaggacctgcagggcagggccagggctggatgctggagctggagagacatccacggtcagtgctcagctgcagctccccacctcctacccccatcccagggctttgaggcgcggcgtgcatgctgacttcccctcattcagcaggcagagctggctactttccaaacagtctcagccctggaatccagacttttcttctccccttcctctcctgcacctcagaggactttgatcaaagcgagaagagaggttaacaggtttcatggaagcacaatggtgcagaaagcctgggagacgtagttagctatctgtcagcaatttaaacctagaaggtttccagaaatgactgagctgggaaattgacccccaactttctggccttttgccagttagagggactatgaagaatggagccgcagcctctagttcagagcacaccctccaggtgaatctgctccactgctccagggcctacagtgagcacagccttcctcccaacatcaaggatcctgca

SEQ ID NO: 39380 - DNA, 1573 bp, Bovine  19866880799464
  misc_feature (1)..(1): n is a, c, g, or t
naatgctttggtttattaaatatccctgtaagtcaaataagagttggaatttgaggaacagatggagagaaagtctgagtactggtcatatccttgggtgctgggggtgaggttggacccctcctgccagagtgagggcttgtgatcccatatttctcctctggctctcatcagcctcttctatcaggtaggttgtaaacctggttccttaagtcttaaatgtaccccggggctcagaacagacaaggaggattggaagactggtcccttttctgtctttttcttttgtccacacatgcagtaaataggcttcttttcaatttttaattgcctcatgttacagagtgtttgactcagataagccatttgagtggaccgaggagaatagtaataggctataaacgattgaagttagcccaccaaagtcattctccagaccctccgtgatgatctatttcctcagtttcaggagcatatacaccatgtctctcacatcaagggattttaaaccactaatagaaaaaaagaatttgggtaataaaaatcaacagatacatgccaggcgtaaagattaaggcgactttctgaagttctcctctgtagctctttgatctgcatagacatgtaaatggactgcctgttgttttccagaaccctgtgtcagactcccttctcagaggacccagagaaacaggctccatctccctttatcactaaatcttcaggtggaggggaacttcttagggtgctcctcattccaggccatgggatcgctccttttcctctccaggccctggagaaactttgcgtagagcctcaggtatacaccatcttcaagctaaaaatgagcaatgggggatgggggggtcttttcgcaatatttggaaaacattgttagtggatagaaatttgtctactttaaatttcgttctcataagcctttgacaccagatcctccacttatttaaattagaatctagcattagatgctgtctgatagtgtgaaaattttatgttgagctattttaagtttaatatgtccatatttcatgatccacaaagagcaccaccactgatagctgtgtagccataaaggacaagcttgatcaacactggaatagatcatccacattctttttaacccaactggggcatttacatcttagaaagatggtgggtccattttaaggtatgtatttgtaaacatctgtttgcttctaaacaaagcataagcaaacttcagcagagggatgagacactcaacactctggcccctctgctccttgaccttctcacatccagccacagtattcttctagtcttcctcccacccctcactcctatgaccataatagtgcaattaacagaaactatatacctcttctcagggcttctccagtggctcaccagtaaagatttgcctgcaatgcagaagactcaggagccatgggttcgatccctgggttgggaagatcccctggaagaggacatggaaacccactcctgtattcttgcctggagaatcccatggacagaggagcttgggaaactatagtccatagggtcgcaaaga

SEQ ID NO: 39381 - DNA, 1082 bp, Bovine  19866880819845
  misc_feature (1)..(1): n is a, c, g, or t
naaaatatacttccaatgcatttggctattgcttgtattactctaccatgtgcaaatgaagagtcttctgtgcaatcaaaataaatctatgaaggtggcttgcctagtttcctcttctgcaccaggcaatgtaagctccctgaggacataagaagagcgaagaggaggcagctgcccactgctgtcacaggaaacctctgtcttagattggcagccctgtgcagcccactaccaggaccttctgtgctgccctgggtaccaagcaggagggtgtcacctgaagcctgctgcagttgcctctgtgctcctgggagaaacagaggggagaccaggcaccagagaacccagatacagaaagaagttctggcctgtaccatgtaggtcccacctcacaaggaatcagtgggtctatgtgagtctgtgcatcaaggaattcaccttgttgacatcaaggtctatcacgagaagccctaagcctggtataggctggtagccaagtcacaaacaacagcttaccccgtttctctctgctttctggcctgtggatgaaaaaaaatccagcgctttgcttttccaggccctcaccaactgccctcccaacccagaaaggagagaggctgagccctgctactccagaggaagcagacatgaggcaaaggccaggttactgccatagatagcctgacaacccagactgagcagcaggcagggaggcactgttcatgtaatgagtgtccaccacagctcacaggaacctcatggccttcataaacactcacccattcatccacccatcatgcggtcactggctatgttttttgttagaggaaccagcaggcagcccagccccaaaagacaactgatgacccccaggagaggtgggacacacaagtcctccacggatgtgtcccctcctcacctgtgagctgggatgtggtgttactataagtaaggtgtttgtctttgggattaaggcagagcccagcctttgaggacaaagtaagtatttgctatttggttcccacccagtggtgggagccagaggcccatcactgtccccacccccaggccagttgccttgt

SEQ ID NO: 39382 - DNA, 1477 bp, Bovine  19866880940467
  misc_feature (1)..(1): n is a, c, g, or t
nctgaagagatcgccctgggtgttctttggaagcaatgatgctaaagctgaaactccagtactttggccacctcatgcgaagagttgactcattggaaaagactctgatgctgggagggattgggggcaggaggagaaggggacgacagaggatgagatggctggatggcatcactgacttgatggacgtgagtctgagtgaactccaggagttggtgatggacagggaggcctggtgtgctgcgattcatggggtcgtgaagagtcagacatgactgagcgactgaactgaactgaaacatattcagcccataaaaccagttcaatccagtggcttccttacaaccctctttttgcaccctcttgcagaaaggcctctctctttgaaagttcatctggttcactgtcctttaactctcttgttcatctttgtcacccgttctccatcttcctttcactcccctcattcattacagattttattagctggctcagaaatatctcttgctctcagctcctgtcaccatgctgtttcacatctataccaactatccatccaaagtcttatctctaaagttccttgacatcatcaactccaacaacactcactagctccattccatattagcgtcaaccaaccctcctatggctacactctggatcttctcatcatataactctcccacctttagaaatgcaaataccagtagacgaatttttttcccctccctcatcctaccacgctgctgttagacctcattgagatcttcagtccttcaagtccaacctatgcatctgcctcccctactagaccctaagctccctgaagtcacggctgtgttatactctcatcacttatggcaatgcatggtccagggagtcatgcagaagatattcatgaaaaatgaatgagtgaagtggctgccactgcacacctggtaggtcctccccacagtctcttaaaggtgttgtttggtaaatgacattgtagattcccctcaagggtatttggacagaaaccacaaggttagaattctaattctggatccattgccactgatctacacagtcttggacaagtcccttgccttctccctgaatctcagcttccttttgtctttttctgctgaattattattaagaatcaaatgaaatcatgaacatgagagtgacttgaaaatgtgaagaactctatagaaatgtgagaaatattatgctaataccaatgagctttttatttctcagggtgtactgtgcagattcacattctactttagggaggaaaagctgtgaaaatgttgggggaaccaagtgcccagaaagccaaagatgaaccatcaggttttcagatcagcgcaacctgtttcttccagcttctgtgattccttcatttaccaaacattcatcaatttcctattattttcagttactcagtacaatacaggcctgccttcggggagctctgtcttttgcgggg

SEQ ID NO: 39383 - DNA, 804 bp, Bovine  19866880992949
  misc_feature (1)..(1): n is a, c, g, or t
nttactatcccagtgggcaaatactatattacccatttcgcggatagtggtccaaaggaagtgtacatcaaaagtgagagcaacaaagaactgctgcttgggggtttacatgctccaacttcaaaagatcctcattgctagatgaaaatatctccaggacttgactccagaacaagtctatatttctcatgcaccacattcggaatttaaccccttcccagctgccatttccttgagaccagcctttttcccaaagggtctcaatgcaatcttttcctcccattcccctgctgtccccactccctcccagaggtcactggttccaggacccagctcatctatttgacattggtatgccttgctgtagtggtcgacgggtttggcagcagcagaattgttctgagcagaattgttctggtgtatgcctccctggtaacttcaacccagggaggttaaaaagcaaacgagcaagacagccagcacttgttccttcctcctgcttcttctttgttacagactttcctgagtaggagttgggtctcccgtctccagattgcccagtgagaattcacgcccattaatattaatagaataagcatttgtaagtcagatatttctgagcatcagcaaagcacaggattttcctgataaaaggctgttcttcttggcttaccctgggtttgagatctttcttggttggcacagaatggcttctgctgtctcttcatgggtgtctgttgcctgtcctggaaagggtataaatattgacacataagccttgcagttcaggcttttcttatggca

SEQ ID NO: 39384 - DNA, 1416 bp, Bovine  19866881030167
  misc_feature (1)..(1): n is a, c, g, or t
nctttcccctaaacacatccttcttgctctgcaggtcttggttccaatattgtctcccacagagagcttccctgaccccctaactaacattgttctccacataccctgaccccacttactttgatcataattccctaattgatttaatctgacattaatttacttcttaaatcgtctttctcacccaagagaataagctcaaagagagtgggaacacctctgtctagtttgtaacatttctgcagcacccagaacatttctttgcccattgaaggagttcagtaaatatgtatggactgaaggaagataggctgccttatcagcgagcatccaatatttctccctgccacctgtttctcaccttgcacctgtcttcatgctatcttttcaaacagagcccacaggcagaatttatactcttctgagaataaggatacatgaggttaccatcctgcaccccattcctctctagcaagggcctcccctctgccaggtgaacagacagaaagtgcaggtgacttcaggacctccagatatgccttaggaaaaaaagggtgtttgcaggggcctccttagctgacaggatagcttggcctagcaggaagtaggtgcatcacagaatgagggtggacgaagtctgtgcgtttcaacatggacttggtggcatgtcattgtgtgcaaatctagcaccgatttgtctcagtccacgatcgggtccacagaggccccagagcctctgtttccagctgacaagggcccctccttgctctcaggcgcagcagagactgagtgccagcgtggcaggtgcatgccgggaatctgatcagcattcagcttaggcagcatcggggcctcattagttttaatgaattagcactttggaaaaggcggggatgatgttacagctagtgagtgcggatcagctgccttcgtttatgccccagtgaagagccatcttcttccttcattttcctttctcctcccaggtgtggaagcctgaaacttctctaaatgctggaatgaaagacctctgcattttctatcctaacccattctccaagctgtttatagaccaaaatcacggcaatttttgagtcagtgcaagatggaatcatcccagctggaaattctgacgtctggtgtgggacccagaggtgctggtgatcccactatcctgagcagccctgtctgtccccctacggccccagatcctgcccctgaagccagacaactgctccttgggtgggagtgcctggatccccgccctcaccagtgatgcggacaaaaaaattctttgggacagagttatctgaagtggaggaaatcaagaattggtgaaagtgaaggattttttttttttaaatctgtaaactcacattcttttcaacataagtggtgccactgcaggtgggaagt

SEQ ID NO: 39385 - DNA, 964 bp, Bovine  19866881037798
  misc_feature (1)..(1): n is a, c, g, or t
natatctttcttattatatcccagctgtgtactgggctgcccattcatagtatctgtcacccatagagcttgagtcaaggggtgggggcatgagacccaggcagcatcaggtgacagcctcctttggaattcatatacatggggaagctctctttctcctctagggttcccaagtcagcatgatgaatgactaaagttttctgaagacatatagaccaagggagaagcctgtctatagtagaaaaggaggaagcaatgtgtagagcaaagctgagtctcaagaaggaaagaaatacgatgattgaatttctgggtccaacccacctggagacacattccaccttcttcttcccagctatgtaaatcagccaagtgcccttcttccttcattgatcttgagttggcaaatctcattaaatttatggcaagtaggtgatatttaatagccctgtccttagattctggaaaggattctcatttgataggtaaacacatatctacttttgaaaaatcaatatggcacggccaaattttgaacttttctttcaatatcaggtatagattttggctatgataagcaatgaaactaagatgtaattgctcatgtttgctctcctttatagccaaagttgtttgatggacagcatctgaataaagcagtctttctgggcatgttttctcatcacccttagatttcactattgaacttcctgtggggggtggtggttgctctcattttcccaccagcctggaggaatctgtccatcacagttaaccagacattgaagtgaggtgggtacaatctctctatgcatgccaatccagttgcttctcaacaatgggttcatccatccattcaattcaatcatccattatacaattgtcttttagtacagacccagagacagtgaaaggtgttggggatgcaagtcaaacacatgctcatccccactaggcttataac

SEQ ID NO: 39386 - DNA, 1171 bp, Bovine  19866881058958
  misc_feature (1)..(1): n is a, c, g, or t
nccaggagaggtttacagcattatgcagaatgcataatgggaagccgtctccaggttgaaacttaaaaagaaagttatgcttcttgtcaaagaaagtttaggtatttccttcctctgggaacacttatgaagaccaaggggaatacagatgcataaacagtgactacaatggagaagaaaagtcgttcctaggattagcaaataaactcggcacccagcattttataaatcatttcgtagagaaaccaaatcttccaggtataccaactggtccttaaaggcccttctttgaaaatggcttacacaaagatgagaactttctctaataagaagcaggatccctgcagagtcagacattgctgctcagacaggatgggatatatggaagagaatgtagagagcatgaaataagaagcatttagatgggggcagacagaccctgttccattattcacacaaatgttttgaggaggaatcggagatggtagtgtgcatacatctatcataagcaatttggtttagaggtttaacaattcctttcatgattttaatgaaatcatttgttaaagaacgcttcaggtattatcatatgcttaattcaggtgaatcctattaaagtatcaaaaccaggtaaacagtagtgtgtactccacccaccctgacaaaactggttgaataaaatttcattttaaggaggtgggctgcatgttaggttctgctggactaggcagagagcccataaaggctagccctgattcttggaaatatttatctgaagcctataaatcttaaaaatctgttgtgctaaacttcatagacacctcagctgcctatgtttctttgcatcattaatttccactctctactcactgataagagagaaggctccagaaagatgaattttataataactatatataaagatataagtatacacataaatgttgttgctgtttagtctctcagtcgtgtccaactctttgagacccccataaactacagtacgccaggcctccctgtccatcatcaactcccagagcttgctcaaactcatgtccattgggtcagtgatgccatacaaccatcttttcttctgtcatccccctcccttcctgcccttgatctttcccagcatcagggtcttttcaaatgagtcacatcaggggccaaa

SEQ ID NO: 39387 - DNA, 900 bp, Bovine  19866881151324
  misc_feature (1)..(1): n is a, c, g, or t
ncttctctatattaattcaacgtataagaaaaatgtgtgatgactctagatagtaaggccgattacagtgtcagggaaatctactagtttacttatggatcttcaaaggctgccaaagcacaaatcaccgtgctggcaaatagtgatccaatttactgtttaaatcaggaatgagtgccatagtctaatccacagcggagcagtttagaacccattgagtactaacttagcataatctccagtacccaactgatgattccaattgataagtcaattggaataaaaagcatctgaaggagaaaagcattgtaaaggaggcaattgataaggcttcccaaccttcttaaaaaggaggcagtcttgagttgggccaaacacgtagactgtttttctctgtagtgacgaatatggaggagagagtactttaatctctcatattagaccagtatcacaaaggggctaggtggatgaggccagctgatgagttgcaaaggaagtcaatggttatgcaagcctctattttctcaaattaatttttattggaatatagttgctttacaatgtgtgttagtttttgcattgtagcaaagtgaatgtgtatatatacatatatctcctcttttttggatttccttcccatttgggtcaccacagagcactgagtagagttccctgagctacacagtggattctcatcagttatctattttatccacagtatgtatatgtcaatctcaattcatcccactcctccatttctcctcttggtgcccatacattgttctcaatagccaagatatggaatcaacctagatctccctcaatagaggaatagataaagatgtgatatgtatatacaatggaatatctcagccataaaaaggaatgtaattggatcat

SEQ ID NO: 39388 - DNA, 876 bp, Bovine  19866881265787
  misc_feature (1)..(1): n is a, c, g, or t
ntttatgaagacaatgttctgttgcattctaacctccctgtgaaactgattttagatagaatatttacccacccccacacccccgtgccatgtagctttttgagagcttttcttttagccttgatcgtctaagatttcaaaacttgtgtgaattagcattgtttttgacaactttactagacacaagttgtgactttttgatctagaaacttctatcctttattttgggaagttctaaaatattattttttaaaaatagctttatcttctctgcttttctgttctctctttttgaatattttgttgttgaacttcctggactgatcttacctctcctgaaattttttctttgtctcttggttctatcagttcagttcagttcagttgctcagtcatgttgactctttgcaaccccatggactgcagcacaccaggcctccctgtccatcaccaactcctggagcttattcaaactcatgtctattgtgtcggtgatgccatccaaccatctcatcctctgtcatccccttctcctcctgcccacaatctttctcagcatcagggccttttcaaatgagtcaggtgaccaaagtattggagtttcagcttcaaaatcagtccttccaatgaatattcaagactgatttcctttaggatggactggttggatctccttgcagtccaagggactctcaagagtcttctccaacaccacagctcaaaagcatcaattcttcggcactcagcttctatatttttggacaaatcctcaactttatctttcaatctttccattgatactctcttacttcagttactatattaactgaaaaattttagacctttttatttttctccattcctttttatagcaac

SEQ ID NO: 39389 - DNA, 1079 bp, Bovine  19866881359660
  misc_feature (1)..(1): n is a, c, g, or t
nccactcctatgggatgtgactcatcctaccagacccctgttctccattcacgtcctccatgaatccttctctgctccactcccacgaggagggcaaatcacaggtcagtttgtttgtagaaagtgtccatgaggggaaattcattctagagcacatctttttgctggttccggtttccgggagacccctcatctgggtaccccagccccttaccacggggatcagttgcccgtgtctctagtgaagagtagcgctggctcaggaggggtccctcatcagagtgctgaggattcttggggaccccgggcaccgtttgttctgggtcagaggctcgccgaaaggtcctggacccagccagccatctgcccatcctttagctgtgtcagggtctatttctacccggttcagtgtttcttcgccacgtctcagtatgactgagtttccattgtgcccatgtgctcatcttgctctccctctgctttatttttagtctgccccttctcccagatggattctaattctccagccctgagcaaatgcttagcaacaaagcccaggagcccagagccattttccaactctccaagcagcacctctttcaatggagaactaccttttcagtgctttgttccataaggaacaaacagagggggttactcctagttcttcaacactggctggtagctttcccccctcccactttcctcttttctgtctctctgctttttagggtaccgagatgactccggcacagaaaattgcctctttgggggcaacgaagatgttcagctcattttttcctatgtactggcttgcatcagatcaatagagattctttctacccctcgcagatatagaaagatttatatagcccacatggcatgcttataatatacacatgaggcctgataaattatacactatttattatgctacgaaaatgataccctttgcttaattaaagtagccatatgctgcagtgcaaatcattctcattcattaaaatcccaaaatatgttttttttttaaaaaaggacagccagcagcagttggaagaacacaaccagatcacacaatc

SEQ ID NO: 39390 - DNA, 1467 bp, Bovine  19866881587527
  misc_feature (1)..(1): n is a, c, g, or t
ntggtgggtatccgtcttgccagctaagggctgagcccagcccccagtccagaagagccggccttgaatgcctgaggcttccgttactggagtccggtctgaagtccttgccagtgaacttccaatgagcacggtggttggtgtgtgggcctggtccttccacccaactgattaaccagggaggatcccgcctgtcccttagtcctgccttggcatcgggactataatcaaccaagaatgtcgtggagggtgggtagcctagaggtggaggcccaatctgacatcttacgcagtctctccctcaaaatttgcaaagcctgaagcaaaggtacagagcgccctaccaagtgcctttatttttacactgctgactccaccccacaccactaggcatctcctgtacttatgcgtgggttccctgccgacagttcaagctctgtctgtgtctacctccatccccatcagtaaccattctttgaccaatcttcaagcctagaggtgcacacacccgcggtgaagtccacccttgggaggatggaccgccccagagaagaggccattataggtagctgaaaggcagtttcaggtctgtttggtctggggttccaaataccttgaatgttgtccagaaggggatgctggtatagagtaagcactattctccgcccatagcacccatgggagagcagatgttcttctggcttcttccaggggtatggataagaacagctatcattgacagaaagcttgctatgtagaaggcacagttctaagcgtgcttcttatatccacttacttgatggtcaaacaaccttgaaagtgaaaggcgctcagttgtgtctgactctttgcgaccccatggactttacacagtccatggaattctccaggccagagtcctggagtgggtagcctttcccttctccaggggatcttcccaacccaggaagtgaacccaggtctcctgcattgcaggcagattctttaccagctgagccacgagggaagctcaaatgaataaccctgagttatcatttcctattccacagatgaggagatgggaattgagacattaagtaacttgcccaggagcacacagcaagtaagtgcggcagcaaggttctaaccagggcagcatgactcccgggtctctgttataaccatctggtgacacagtctcagcagctgaagtggcagcagggctccctgcccacatcacacacaaggccgggctcagtggaggctcagaaaccactctcctctcatttcccttcctgtccgtagctctgagcataacaccccagtctcagccttgtctgccggggagcctcggcaggcaattcacagaagtgtggaacagaggctgtctgggggagggagtgtcaggaggcctcccccatctcagacagaggagggacgtgatcacagctaattcctgctctttggtgagtacctgctatgtgccag

SEQ ID NO: 39391 - DNA, 1186 bp, Bovine  19866881804036
  misc_feature (1)..(1): n is a, c, g, or t
nacaccgaatcagagccagaggcaaagcaagaaggaaaagagtctggatgagagaggtgaaagagaaggttccagcacaagtcattttcttctctttcaggagtttacatcagttcagttcagtcgctcagtcgtgtccgactctttgcgaccccatgaatccagcggcgccaggcccccctgtccatcaccaactcccagagttcattcaaactcatgtccatcgagtcggtgatgccatccaagccatctcatcctctgtcatccccttttcctcctgcccccaagtttacatcaagtaaagtaaattacattcaagtcatctctgaaacttttcacctttgtttggtttaatattctccagggaaaaccaagttgaccatgaacaacagcaaacttaagcactcaatctattttaatccttgagcaacatatttctgaaataatctctagaaggcgtttcagattttcaggaggaagaattgtatcttcagtgaattactatttattgaggctttaataaatgtttattttatttatgtttttgctggctggctgctttttgcagtccattaaagtgaagattatttttggaagaggaaaagtacagagtctagttttcagattgggtagaaacccaagaaaaaacttccacatgatcaaggttttaatctcacctgctgaggtggtttttgctacttaatgatacattttggtaatggatgtgacaccaaaggtcagccacaaatagagctcagagccaagggaatgaaaatcactgatcagactcccttgctgtattaggtagcgggaagtttccaatcatcattggatttgtgacacagagaatcaggcagtgattctagaacctgcttcatggggaggaaagctgggggaggctcagtctgtgttgtgtttgcttgtttttctctgtccagtcatgtgaagaaagttggctggcagtttttttctttattattgttgtccatgacacaattgccacattatactggagccttttgaaaagccggtgtacagctcaattgcccaattcccattgtgcttgaatggaacgtgggataggctttgcaagcacaggattctctccagtggcatgggagaatgtgtcttcagaaatttcagagaatatgccaaaatctgcccaggcaacagagaattacccagg

SEQ ID NO: 39392 - DNA, 1620 bp, Bovine  19866880705866
  misc_feature (1)..(1): n is a, c, g, or t
nataattcggataggcttttaaaaaatgacttatatgtcagtattcacatttcaacctcaaattcctgttcttaggactgcaagatcaaatattttgctgtgagataatgatgattatcaacaaatcatgaaaatgtttctgaggcatgcatgttttcttttatttatcccaatatgagttcttataggaaaacaccaaaagtatggagtctcacttaagtgcaaatagatttttttaaccatcttcagagctacaaaaatgattcactgattcctatttaatagatctgacatgatagtatatagtgtagaaagaatgaccttcaagttctctcagcaacgggattcagtgtacttccctaggcaagtactggaagctttcctttagatacatgaatgtgtgtgtgctagtctcttgggtgtgtcccactctttgcaaccccaaggaccatagccctccaggttcctctgtctatgggattctccaggcaagaatactggagtgggtagcccttcccttcttcaggggatcttcccaactcagggcttgaatccaggtctcccgcattacaggcagattctttaccatctgagccaccagggaagcccaagataagtgtataaacagaaataatctcattacccatgaaattttgtcctgggaaggcaagaaaaaaagttttgcaatgtcagccgagtggtggatactgtgtttctttcttttttaaaaatactaaggcatatttagtattcaggttctagatttttatgaaaaagtgagaaagtgacaaatgttagtcacttagtcatctccaagtctttgcaactccatcaattgtagcctaccagactcctctgtctgtgggattctccaggcaagaatcctggagtaggttgcctttcccttctccaggggatctttatgagtcagggattgaacctgcatctcctgcattgacaggtggatactttatcgtctaagccaccatcaagggaagcccgtagattcttttaggaattatcaatttttttatgattgttaaatacatatacttgttggggattttgatcagaattataaaaatatgtaaaaatggacaaggtttttgcccattagctaagcaaaccacttaatcaatcattatttgtttttatatattcttcctttttctcataaactttataatatgaagtatttatttttagacttaatatgtcccattccttaagggcatagattctacagacacaaaagagatggactgtgaagtagcttcttttcgtgacttagattgtatttcacagactgccctgctctgtggtattaaatgttttcagaaatggtggcaagctttcatgagtttagccagtctccctctttggaagatacctctcccagctctagctctcaatcctgttatcctagatattgtaattggattagccccagttcaccagtgagaatgaggttcaggcatggcatgaaaattgcctgaaatgtctttaaaagtagctatctacataatactctattactctcctgtgggtttcccatgaggcaatagaatgggattcagtttccactaatgcactcaaataggttctagtggtgttagggat

SEQ ID NO: 39393 - DNA, 1411 bp, Bovine  19866880820239
  misc_feature (1)..(1): n is a, c, g, or t
ntagaaataaggcaaaatgctgattttgttttgattcttttagtaattaatttttttaaaattgtcttagagtacctgtttagaggatataaaaataactatcctcagtctaactgccttaattatctaaaaagatccatgtccttgatatacttacaaaaattaattaacttatgcaagagagagtatagccagcaaacttatttttatgtatcataaagtcagaccattaatactgggaagtcctaaagggaaagaaaataaaatgaaaactaggaagccctgtggattgaaattccttattgaagaccattacttaataccacgataaaagtagttaacatgagtgcaatgcttgaaatatgctaagtactgtctaaagcctttgtaagtagcaacatattcaatcttcacagcaaccctttgagggacaagtattattgttcctgttttacagagggcagatattaagtaacttgtccaaattcacacacaaatcatgtggagacagaaactgaacccagacgatttatctgcggattcagtgcccttagtgactatgccatagcacacctcaagctgtagcaaagtgcttctttccaccctctccaaaagggaaaccagagtactgcagaatcagcctcggtgtgcaggttggtcagtgggccttaatcagtgtcccaggtctagcccaggaccttggactttgaccttgaaacaacatggaaggacctagaggacgttatgctgaatgaagtaagccagacacatgaagacaagcaccgcgtgatctagctcgacatggaatctaaagcagccaagcccagagaagcagagcaccgaccagggacctggaggtggggaaaagggaagacacgggcctaagggtcttgtaatctttccgttacaacatcagttctggatctaatatagacattagtgactggagttagcaagactgtactgtatacctgaaatttgctaaggtggttcatcctaagtgttcccaccacaaaataaagagaaacagacagaactatgtaaggcaagggtttattaaataattgtggtgatcatgtcaaaatacatatatatttcaaacattatgtcctatacttcaaatatataaagcttttatttgtcaaggatacttcaaggaagtcagaaaaaaaaataaaataaaatggggacctcagaagtcatcaacagcctgcctcttgcacactcaggaaggataaattatgtttacaattctttctgtctgtaatctcctttcttgcaaaggactcccagatccttcacccctgtgataaaataacagaaataattcatgtagaatttacatgccatcaataattacttaattggtttttttcctactgaaactttaaactgcctcttgtttaaagga

SEQ ID NO: 39394 - DNA, 1890 bp, Bovine  19866880844143
  misc_feature (1)..(1): n is a, c, g, or t
naacttcttactatctagccgtttttcaaactgaatttaaaggattacaaatcctgaaaatacctgtactaccacatatcttggtagtaaggtcttagctggagagtcccacccaaagtctgtgacagtatatttgatatacaatattgcaaaggcacgcaggatcgatggcatgcagtcagttaagtgttgtcatgtgtatcaaagtcaatccactttttatagagatcagtaatgcacttccctttaaggaactgaaaaaataaagtgcatcagtcattagtatgacattgagaagttacatacacataaaccaacacatttcaacctgtaacttcctttagcaccatcattctatacccaagcttgcattttggcataataaagttaagtgtaaggtggctataaaatacagcatctatgaaaaaaagccatgttatggctgccgtgggaccatcactagcgatttgcttttgcaaaaataaagaaattcaaaattagtgtttggctcaactagaaagtgtgatggcctcagataattgctgcctataaataactctacctcatcgggatgtctctatttacataggatatatttaggttctgcacttagtaatacctctcatataatcaagtgttggtcatctttgtaaggaggggaaatattaatcaaatgctctttgatgacaagacatagcagtggggccattcattttccagaagctatttgaggagcagactcatcaatttgcatagcacttgacaactccagatttttctagcttttgcagatggtttgaaaggtacaccaaaaagactgagctgtaataatgtgaaattaattatgaaagtaaaggtatgggtccacttgttatcatagggcttattttattttcttaaatttctcacaaatctgtttttggaatggtttattttgaatgaaaaaaaaatgaacaactgaagttttcagagaattaattgttattattaataattccagcatctaaaatctctgtactactctgcacattccatattaaggaatgataaggccacaaaatgtaagggttctctgtggatgataaagttacaatgagaagatcataaaaaataaggattcttaattgttagaatatatatccttcacttttcattcattgccttatgtctttaataactaaacagaaactagatggaaggttgactattaacattttcatgttgcaacttttatttatatgtatttctttatttaaatatttatttatatgcatttctttatgatcttggtaaaggaaaagcaggaaatgccattttcagatctgactcagctattgtactgttatgtgcccctggagaaataacttagcttctgtggacttctgtttactcaatcctgaagtatagtgctcctcttgaggagattaagagtgtctagcatgaagaagtgagaaaaatggatgtctttccaaaagtagatgtgtttttttaaaaaaaaggaaagaaaaaaaaatagaacaggctctttagtcagcattaccttggaggagcaattaggaaaatgatatccacaggagatactcttcagagacagaggtcgttgttttctggctctgtctgtgtgggaacaatgcctggagaattaagtaggtgattagatgcatgcagtatttgcagcaggactaagaactgagaaagagatttaatgtgaatttaagaaagtttgataaattgacgttttgtggaaagcttttcacttgaagtgaaagagtggccatttccctcttgctcagtcactaagtcgtgtacagctctatgatcccatggacttcagcacgccaggctcctctgtccttcactgtctcccagagttgctcaaattcatgtcca

SEQ ID NO: 39395 - DNA, 1497 bp, Bovine  19866880935835
  misc_feature (1)..(1): n is a, c, g, or t
nctctaggagacagtgtaggacagggaagcctgacatgctgcagtccacgtggtcgcagagagtcgaacctggcttagcgaatgaacaacaatgtggtttcttaggtaacttataatatcgctattgggaacagaacaaactgacatggaaagacccagcatgccgtatcttgcttttgctaagtggaaattttcccaacatcatttccaaagtcacttgttcaatccaggtgggagcacatcacgccctccccacccgggcacttacctctgcagaatggggctgggaagtcccaggaggccccgttcccagggctgacgatgcaggtcaggatggcgtggccctccaagacgtagccagagagacagctatatcggatcttgtctcctatgttgaatcgtgtcccgtggaggactcccttcaggatttccccaggatttccacatgtgtggctgggtaaaactattgggaagaaaaacaaaagagaaagaaacataagttaaaggaagattttctactgatatcagtctatatcacaaaacatagacctcatttgaattacttaagttatcaaatctagctatcttaattttgcctaaaatgcaagtagcgaaatggattcatgttgtataaaatctacaaattttgttctcctgtaaaaatatatgtgtatgcatgcacactcagttgtatctaattctgtgcaacccgatggactatagtccatcagatgcctctgtccatgggattctccaggcaagaatactggagtgggttgtcatttccttctatatctatatatatatagatagatagatatagatatatacacacacacatacacacacacacatatatatgatatataattaagtggattttgttaagaggaaaaaatacagttctgcttagattcaattttctatatgatgcctagattattttcctaataatgagattctacaatcctatagaattagcaattagataatatagcagaatatagatagctgaaaaaatcgttaacagaagcacatgaatggatatgcatgctatatttttccttattccccgagaccagcactgcctgacacacaccagtaataaatgttcaatcagtgtttgatggataaataactgaattaaagaataaattaaaaatctcatttgctaatctatcagactttcataaacattgtactgctattatattcccggccatctgtaaggctctatgcatttagagcaactgactgacaacaaagtttcaggtgtaggctctgacaaagcaggcactgtcttcatctgtgtttcaacaaggcagccctggttccggtcttgcctggccttctcactgttcccactgacagcactctctgtttaattcagctgctttccaaccacatggacatgatgctgtttcatactcatagaacgaaattttgaacttgactgaatagacaaagtggagaattgttggctattgttgccatatt

SEQ ID NO: 39396 - DNA, 710 bp, Bovine  19866881093055
  misc_feature (1)..(1): n is a, c, g, or t
ntaaatgagatgctggaagtactcagtatcaataatggccattattattgaaatcattattgctgacaagctagaatggaacaaaggtggaaaccaaaggaaagcagttcatcctctgaaactctcagaggctaaaatcgtagaacatagtacattttggttttatttttaagattggtattaagtgataaacatttcagttttaattgacagcattttcttctcaatatcctcaatattatacaaattaatagttctctctttccccataattgagcataatgagtgtttccagtatttgcttctacacataatgctataattagtgtctctgtatatatagcattgcctttgtttcttctgtttaattatttcctaaggaaagaattcttgggatgttatttatgctttgcaaacttgctgagcaaatttccatgccacacatatttttactacaattactcttggatttgatgttcgcatttccttttaatttgctgaggatttaatagcatgaaaatgatgccccaaagttggttttttttttttttttatttccagtagactatgcctgctgtctatttgtgtttgttcatttaagaaacatttatgcaggacagacaagatgtcagatatatttaacagtcaggtcagtagactctttctgtcaagggcaataaagtaaatgtttcatgtatttcaagccatat

SEQ ID NO: 39397 - DNA, 1356 bp, Bovine  19866881146719
  misc_feature (1)..(1): n is a, c, g, or t
ncggacacgactgaagtgacttagcagcagtagcagttgatacacagcactgggcagctgtttctgttggtcttggtcaatggagtccatgtccagactgaatcccatcttgggaagtcctcagggactgcttcctctaaggcgtgcccaatgagctgatgaaacatctccccccacattgctagcctccctcagataacataacctgcccaaaccttggaacagattctggggaaactgtggtcaccattttttaaaatatcttcacgatgataaaagcacagatagatcatcagacactgtctctcaggatggctgtggctggtgggtggtgtaacaggttggacttctccactggctctccattgactctgtcctgtcagaagcaatatggcagacatgtcctgagcttttcttgggtaggaacaaagtctgtccttatgaggagactgaatctgtatcactggatataatattacattttagacagatgtctaaggaatggtgtgcgaaattcattccatgtttagattctgattcccataggcagtagctaatcactccctctccccaatggtgaaatgtgcatagggggattacaatttgacattggtatattcagtaattatcataccaatattattgtgttaattgttagctattaattagagaatgatcctatttaaagaaaacacgcctccaattacacatttattttgacataacattttaaactaaagccatggttattcagtaatcaggtagtataactgcttctttaaagaacacagatcctatacacatcactattaatattttactttcttcatatgttataaattaggctgagaagcaagtcagctgctactgctaagtcacttcagtcgtgtccaactctgtgtgaccccatagacagaagcccactaggctcccccatccctgggattctccaggcaagaacactagagtgggttgccatttccttctccaatacatgaaagtgaaaagtgaaagggaagtccttcagtcgtgtccaactcttagcaaccccatggactgcagcctaccaggctcctctgtccataggattttccaggcaagagtactggagtggggtgccactgtcttctccaaagcaagtcagcagtgcctctgtaatcagcaaagaagagctctgctctaccaacagtatttctgtgaactttataacatttgtcacaggacattttattcatgtaactatagtgatctgtgaccatttggacatatttttgcatacacctctatttcatatataaatgtagaacaaaataaaatgcgagaaaatacttcaacagaataaattcactgaatgta

SEQ ID NO: 39398 - DNA, 1784 bp, Bovine  19866881318335
  misc_feature (1)..(1): n is a, c, g, or t
ncttagagtcatataaatggtttataataaaaaaaatactgtattgtatcttaattttcatttaatccttaacactttatgagtaagtcctttattcctatagagatacagcaattttccaagttttgacctctagaggtagagaagagctgggattaggtgtggtccctctaaagagaattggccaactttttatgtcaaaggccagatagtagatatttgtggctttgcagtttgatctgtgcccaactattcagttcttctgatacaatgtgagggtgattgtcacctgacacggcttgataacattaataaataaaactttattaacaaagataggcggccactgtgtaggaccctgaccctacagtcagagttctttcctctccttgggaagtcagcctttcttttcctgtgtcagttttgcttcttaaataactgattttctcaatgcccagtcaaaaatgtaagtggactctgcagaaggctgacaatcgatggatggaaccgatgagacaacttgattagttacctgagtccaacaccaggtgactcaggagtgagcgtcagtgaattcagtcattgttgagttagcagtcactgcattgtctgttgtttgtacacagagcttgtttacaaggtttacctttgtgtgtttaagacacagcagtaatagtgtcagcagttcctgcagtgtgaagtcccagctttccaagattcctttgcgtgtgaattttgtactcagaaactcctgtgttgacaggcttcatgctttgatttcaaccccaaaggtcttcctagtgtaaacttcttagtgtaaaatgtaatatcaaccatttcaagtccctacttccatcttatccatgcccagagaaattaatagaaaatttattagagatggctgctgatacacaactttcatgttgctgggaaaattgtttttttgtttcagaaataattttcttagaacatgcattgtcacatacatttccttaaactttgatgttttgaatgtggcaagttaaccaatggaggcctgatggtaaatagcctgtatgtctctcatggtgccctccaaggaaaagcatgggatgtgtgtcctggtaccctgggaaggtggggacacttgatggtgcaaatcggcgccagtgagaacatccgactcagcacagctaaattgtaatacgggcactgctctgctcactgccatctgacagctgtttggttcctctgtgaagtgaattagtgctgtcattttactaatagaccaaaaataaaatcgctggcattgtttccagccgccagttctcacagaagccggtcgagatgaattgccctctgcttggtcacagccatgccagttacggaacaggccagcagaacatgaggcatgattcagaatgctaatggaggacagcggagtgcttctccaagggcgctgcctagggggcccgaaaacaaccccagacgtttgtgaactccagggtgtctgcctttgcaggtgagtctctagacacccacccctcaggcctgcagcactcatgtgtgatcatgcaccaaactgaactcagacacacctaaagctttttttatgtgtctggtcttgtgcaaactctaaacatgattttgtgagaaacaggagagatgcgtcctgccgaatggagcttcccaatgagaagggttgtgtgtcctgtactgggatcatgcgatgccctgtggagctatgtctgtgtgcttctttttgatcatcatcatcagcaatggcaacaacaacaaaacccctg

SEQ ID NO: 39399 - DNA, 2771 bp, Bovine  19866880344876
  misc_feature (1)..(1): n is a, c, g, or t
natgagtgtgttaaaatagccagcagcctaaattccttagcaatttaaggatgtttgtttcttgttgtgtgttacctgctccacaaaacacatgatgccaatgtaaaatatggcttgtatacaatttttaatgcacagttacaattttcaatgagccatgtacaagggatatactggatcatgtcatttgcataaaatgtcactcagattggcagttagttcacccttttgctgtccttgacacaacacacagaatgctgaatcccacactgtcattagtgatgacaatcagaataaaaatcagtcacccaatttaactaaaagaatgaaaaattgaatcacctctgatttgtcaaatcatttcacagagtagtgataccataaataaactatattaggcctacaaagggattaaaattctcaccataacatttatgagcaagccattatatttgaggaagaagagattaaatcaaaaggtttggatacttttaaaatatattagtacttgaaaaggattaaataacttgatgtatcatctctccagtcaatcttcattgttcatttgcattttaatacccactgtggacaagatgcttttcataaggggaatgactgaacagtttttaaaaattgagttctgtatgctaagggatgggtaatttaccaagtttataagagaggtggaatatgatggtgaaggatcttgaaacatatggggaatggttgaggaaaatgcttttatttagcctcaagaaaattcagcagaggacatcctagatgctttcatttattaaaactgtcatatggaagtagattaatatacaaaacaaaggcaaatagaagacacaaggaagccagtttctactcatcataggagactttgtaaatattagagctatgcatgactgtccactctgcataccattggaaatacccaaacataagttggggttgagaacactatagggaaaaattattgtataaaagaaaaaaatctaggtagatggctggccagtaatgtttccttcagtgctaaatttctctgttctggagcttaaaaagacacagacatgaaattacccaagaataattttaaaagaatatgacagaaattaacaaatgcaaaagagaaaaatccacactgagtgtgaagtcttgtcacgggttgggtttctccagaacgtgactataagactgaatttagtttgctgaatgcttatccagggtgaggacaatctctgtagacaggagaaataggaaataggattgagggaagagaaaagttaagcaaagatttaggaccagtgacagcctcagcctactctgaaagttgctctgaaattcgaatatcctttcagagttgtccctgagttggaccgagatgggttagttcttcatacagatttatcagtcattcatttggttgtggatccaaggcagagaggtaaccttgcacaaggtcacttgtgcagcttgaggtcaaggctgctgaaagagctaatggctgaaggctttcagccagcagcactcccaacaattggggccataagtcctgcactgaagagaggtctgggggacacattatagtgtccaccaggtccactctgtgcaaattgaatctatttattgataaacaatttgtgaacaacttccatggattctagcagacttgtcttcttaaatgaattttacagaggaggaaagttagtggaacaaacttcagatactgcagccggtctcagaggcacagctgaccctcattgtctccccaccagaggaccagcactcttcattctagatgccaggtcagtaacaatatcaattcaatcaacaatggtgagtaaaaatccgtattcttcggcacaagcacagacccctttgcactatgcgtctcttccatcagatcctgtgaaccagactctttaaggagtcagggaaaaggggctgttgggaccaagagcacgcaggtgtttctcattcaggactcctatgcctacccccagcccccattatatctcctgagatcctgcaagacacggcttcctctgggaagagtgagctggcggaggcagcagttaaggcttgattctgcagttgtcagagcttcccaggcacctagcacagcccagcccgtcctttccctgcccatccaacggggcccctgctcattccttgcacccaccctgagccacagagcgcatgtgaaggctccagtttgtcttcctgggaagctccacaccccacgccccaaccaggacctgggtctggtcctcaggtgccactttggctactcaaaagaggggaacatttcctgacagaggggcatgggcgaagaagccagcaccccatcacagggtgtgggcatcagggctgagtcaaaagaaagatcggggctctgaggctgttctggagaaggctccggcagcaggcagcctcctgggagaattcctgacacgttgcatctgctgggaggaaaaattgccctgaggatactgtaaccctgtgctgagctgttggactgctcctgcgtttgacctgctagagctaagcctgtaatgcaattgactggtatgctggggcttgcctagaaggtgatggactccccagccagtgctggtgtttgccgtgaccaggtcgcggatgtgcctgcctttgacctacactgggaggaagccttgtgcttctctctctgcgggggctcccaggacagctgctgtctcagcgagactctggcctttgggtcaggggagggtgttgtggggaaacca

SEQ ID NO: 39400 - DNA, 1806 bp, Bovine  19866880367230
  misc_feature (1)..(1): n is a, c, g, or t
ntatgcatgtaggggttaagtgaatgactgaaataaagaagcaagaagagaaacaagttcaaataattataatgaattgatattatctaggaagttactaccaaaaatgtagtagcatcatcaacattatctaggagcatgttggaaattcaaactctcagaccctatcacagactgaatcagaatttgcctttaaataagacctctaaatgatctgacacagagtttgacaactggtctagggtatagctgaaaacaaagcaaagctaatttatgtagagcctagggttataactttcaattcttctttataaagctaacttgaataagattatgatatcaaggagtgggaaatagaactggagagggaaattttgtttattttggatataaaaaaactaatgcaatgatttgaccttagtgtggcatgtactggtacaaggtcagaggaagttatggtaaatgtctattgagggaatgcaagtcacataggaatgaatttacattgattcccattacggaatgtttgatctgaaatactttccctctgatgacagttagtgcttctcctttgttaagctggaaggaaatgaaactcactgatttgccaaagtccaggaatagcagtgatagatcaaaataaacattaaatgctagttcaaatatttgtgtgtgacagggattggaattgaaagcacacttggttgattagctagtgataaaaactcttaaatcctgagttttatcacacctaaaaaatgagaccagaatgaattgaaagtctaatatgacagctccctaaaatcttaccttcaaaacaatagtcaacattaaagatcaaaagttaaattgaaacttgaagttgcttctgcctacgtagctttgcacagtctgacaattttcttcctctgaattggccagggtaaaaaggtatttgcttacaattatggtttcttaatttcatatattctttcagttcacttcagttgctcagtcttgtctgactctctgcgaccccagggactgtggcacgccaggcttccctatccatcgccaactcccagagcctactcaaactcatgtccgtcgagttggtgatgccatccaaccatctcatcctctgtcgtccacttctcctcccatcttcaatctttccaagcatcagggtcttttcaaatgagtccattcttggcatcaggtggactaaatattggagtttcggcttcagcatccgtccttcccaatgaatatccaggactgatttcctttaggattgactggttggatctcctagcagtccaagggactctcaagagtcttctccaacatcatagttcaaaaacattagttcttcgaggctcaggtttcattatagtccaactctcacatccatacatgactactggaaaaatcatagctttgactagacagacctttgttggtaatgtctctgctttttaatatgctgtctgggttactcatgacttttcttcaaaggagcaagtgtcttttaatttcgtggctgcaatcaccatctgcagtgattttggagcccagaaaaataaagtctgccactgtttccactatttccccacctatttgccatgaagtgatgggactggatgccatgatcttagtttcctggtgctgagttttaagccaactttttcactttcctttttcactttcatcaagaggatctttagttcctcttcactttatgccataaaggtggtgtcatctgcatatctgagggtattgatatttctcccggcaatcttgatttcagcttgtgcttcatccagt

SEQ ID NO: 39401 - DNA, 878 bp, Bovine  19866880369361
  misc_feature (1)..(1): n is a, c, g, or t
nccttggacaacaagaagatcaaacccagtcaatcctaaaggaaatcagttctgaatattcattggaaggactgatgctgaagctgaggctccaatactttggctacctgtatgggaagaactgactccatttgaaaagaccctgatactgggaaagattgaaggcaggaggagaaggggacgacagaggatgagatggttggatggcatcactgactcaatgcacatgagtttgagcatgctccaggagttggtgatggacagggaagccaggcatgctgcagtccacggggtcactaagagtcagacatgactgagtctgagtgactgagctgactgactgactgacaggtatgaaaggtatctggagacagttttggcactaagaaggtgggacttgtatttccttgaaacccaaaatggttcagaaataatctgtgtaatgcttatatttttaaataagtttatttttgaaaatacattagaaaatgtgagtgttctcaaacatgaaaaatgagtattctccggttcacttctgtagttagtctccttgtttttgttccaaagaatatgcatgtagagacttgcaatggcttgctacagaggactgagtagtttgaatttttctcctggactcggaaatgatccagattatttggcagcctgacttcttccagcttgcgttgcatttgaattttaatatagtatcaatagacataactatctcctttgaatattttattcctttcctttacagagtagttattccaatcagaggataaaataacaacttaaaatgcagtctccaagtggaaatcaggccaaccaattgaaagtaaagtttaaaaagaaatcctacctcaagagtgtagtgtgta

SEQ ID NO: 39402 - DNA, 893 bp, Bovine  19866880465477
  misc_feature (1)..(1): n is a, c, g, or t
nttctaactgttgcttcctgacctgcatacagatttctcaagaggcaggtcaggtggtcttgtattcctgtctctttcagaattttccagtttattgtgatccacacagtcaaaggctttggcatagtcaataaagcagaaatagatgtttttctggaactctcttgctttttccatgatccagcgggtgttggcagtttgatctctggttcccctgcctattctaaaaccagcttgaacatctggaagttcacagttaccctggtgaatttttcaatgtccaggatgtgatcatcagttttacaatcttatacacatgaattttaattttcaacacaggtagagtcacagtaattagattagtcaaactgatgaataaatcagaatttgaacatattaatttaaaaagaaaagagacattttaaagacagtagcattcttatacaaacatttcttgaatgtcttcattacatcagcaggcaaatcaaaatctggcaggcttggtaagcacagaagcagaacaaacctgccatcatctctcacttttgcttcatcattaaattttcaatctaggctcttatatacttactcttccttcttcaatcatggtgaatccatgatggacttatttaaaaaatgcaaaagcgtactgtttttttttcctatgcaagattcttcaaatgcaggcagaaaacctaaaccctttacactgcctaaaagtctttgcatatctagacttcatttcaccctgagaaaatttaatctgagatacctaaattgaatatcagtagtttaacttataaaaacaccattattgaaattcctttcagaaaaatatttttattgtgactctgaaactgtctagctcatattcctacattccacatagaaaa

SEQ ID NO: 39403 - DNA, 1340 bp, Bovine  19866880501943
  misc_feature (1)..(1): n is a, c, g, or t
ntcctgggtggaacttggggatgccagtttttagaggtgaactctgttctctgactctgtgtgttagtcagtcttacaatcaagattattctacccagtactaacacgttttctagttcttgggtgatcagatataaataataaaggttcaagtgatagccaatgtctgtttctgacatctaagtttacacctactttgccctgacagtgaaatttgcttgtatgaattaccataatttggaaatattcttaattgtgttgaaatttactttcactctaatgataaagaaatggtttcttaagcaaattaatagagaaaaaccattgtgaacagaatgcttaaactttataactaattcaaagatgaaattactttcaagaaaacttgaatgctttacaagcatcatttacatttatatgtaatacctatatgtaataggctaattacagttgtttttctttattcattgagcctatttcccaaagcattctcttaaactgtgctctcatattctatcatctagcttccctgataaaacgagtagtttttaaaaatatacaatactttaggattcttccctaaatctgcttccacccaatcaatgaggtttgccaaaagtgaattcaccagccaagaagcaacatcaccaaattaaaatgtctaaagcccaatgctgtaagcttcaacatgaaagaaatttcaagttttatagccttgtttgaaaagaacaaataagtactgagagaatactatttaagccagaggctaagagcttccacattggccatagcacagtgaggggagccatagccatgtaaagcaatcctttggaggaaccttatgcctttagcgataaaggagcaaacagaagaatgactttcttgaagggtctcgttgtctgactattggtatttccatttcttatttcatactgcaaacactaatgtatttttgtcttgataattactggtgctgaaaggcatctcttctgaatattgtgtggctgtgttcctccctcaaaatatgattctgtttcagtgagaaattttccttacttatctactttgtatgagattgtttgaagaaagaacttgaaaaaacatgtctttagtttttgtcctagtaattagtgtgatgcctttagtttttgtgttttaactctacaatgtaattatatatgacattactcattggtgtatagattcaccgaatgaatttttctactaaaaatggttattcatactaatctttctttgctcacatttttctatttattctacaaggaaaatagttgcaagccaaagacagatgggaaatagaagggcatctgggacaatca

SEQ ID NO: 39404 - DNA, 940 bp, Bovine  19866880695686
  misc_feature (1)..(1): n is a, c, g, or t
ntggttgacacacatctttaattttcagaattatttgtatgtgttatctttgtctccgtgagcattttaatgaaaaaggtactgacatctttaaaatacaaactacaatttctgtttaaaactcttattagagctcctaaatacaataagaattctcacatgacctgaccttgcttattcattattcctatccaagtcaaaccaataccagcctcttaatttgcattgctgtgttgttcatttttgatctgtaccattgtgtcagtcattatgtaatggttctcatggctattaagttcacagaacagaacaaaagaatgacctcatggccatttcttatttttctcacactcttagttttgtccgataggcttcagaactatatgcccttgacatactttaataccaaggtaaattttaatgagcaattaatcatttttgctcagctctccatttgccctgcacattaattttatgtcaagaatttgtccatagtatataaaatctcatttttcttttctctttcattatttttggacttgatcaaaatctaaagttatacaatagcctgatagttaagataagcagtcctagaaaaaattttaaaacacaagctaaaaacttaattcaacagcttggcttgtctgacatcatgctgttagcaataaacttttccttctaagtgatttgtttttacttactaaattcaacaaatcagacagattgactagcattgaagtatagtagcaaaaaaaaaaaaaaaagcattctaggcagatataatttgaaatcatgcctctgtcatttcgttaaacctctattatctacaagcttcaccttcctcatgtatcatggaattgttatgaggtaaacttaattatgtgtgccaagttcctgacatagtattgcatcctcttccttcttttcaatacagagctag

SEQ ID NO: 39405 - DNA, 1681 bp, Bovine  19866880770888
  misc_feature (1)..(1): n is a, c, g, or t
ntgtaacagccgttctatgttctcactgcttgtgcatcacactctctattaaagaattcatgaaactgcctgtggacatctctcaatcattagcctttacatgtctcaaggttgaaaccatgtcctccattccatcaactctaaacatttctaacccttgtttcaacgttggaaatattctcaaaacttctggtgtgttaagatcaacctgtccttattattttaaataaataggttcaatctctgccctacctgaaaaaggaaagtcagcatctccctggaaggacttttgtggtcagggtggagcatgtctgttttcttaggatctctttttctgatactctctttctgttgagtttgccatctcttttctatctttctcctccagttcaagcaacccaattgcagcactacaccctactgggccctgctctgaccactttattccccaaagcatactgtttcagaactatgtgcagtcacttcaccaaataattgggggaaagaatactatatggcatcaaatgttaacatttgaatattttataaaactaattcacagttcctggatcattcccactacttccatagaaattccaccaatcatcctttctagtgaggtccaacctcctgccttaacgttgtatgccctttctttcttgatcatttcctatcattctgctgtcacaattgtcaccaaggtattttatgaaacaaaaatctccatctagttattctaaaatcatcttccatatgattttattaccccaataacacatgttatgagtatctaattatcagacactgtgctaggctcaaggaatgccataataaataaaatgatacacatcacaatgacttgataaccttgtaaagtcctgttcatttttgataattatagtaactggcatatagtagaagtatagtaaaaggcagtataggaaataagaaatgggatcctcttttcatatggttaaaattaatatggattttatctggaatcatatgaaatataactgaaggcaaaatagtgtggttaataaacttcacaaatctcatcctaacatgtaattcactgattcttttattcaccaatcctcctagacaaaaatgcaacctcatgaatatacagtagcttcagaattagagatattttcagtagtgaattatacattaatacaatggaactacagaaaagaatatctttgagaagcattttaaacatcttattaaccaattaactgaaatcattttaaaaattattttttgagattaaaggcatagataaacctgcctcataagaagatcatgaaagatggccatataaagcttaatctgatatttatattatctaataatatgtaaatcattacttgaaagcctttatatttttgaaaaaaagaccttattgaaaatgaattgcatattaaataagctgaatgggtttaggaaatttaataatttcagatatggttatatctttgagaaacgacatgtaactttccattttgtatatttcatgagttttcattattactgtcatcatactaattggctttttagtagctggcactctttataataattcgggatttttactcaaaactgcaggtatgctttgtccttgctgtttttgatcaccgaaggaatatggcatcaagctttcctaactctcctttat

SEQ ID NO: 39406 - DNA, 1671 bp, Bovine  19866880782398
  misc_feature (1)..(1): n is a, c, g, or t
naggtcattctattgatgtaaccagtggctgccaggtggattaagatatttattaatttgcttttgacagatgaacaatcacaacagccaatgagaatattgtgggaaaacatatccttgctccagtgaatgggtccttgaaattgcttttcgaatttgttgttcaaatacattagttctgttctaaaaggctgatatgaaatatgttatcaaaaaagaaataatttcttaaccaccttcactcacaagtgcatagataataagatggtaggaagtgtagaggaaaccatgttttgtcctttgggattcttcatgagtcagtgcttttctagcagtgtaagttttaagaattaactttttatatgtattacactaacaacattaacccaaatttgaaaggaagaaaatcaaccaataaacctggtaagcccaacagaccaggcagtttacctgtttccttcacgctttggaactaggtgtatataatacattttaatgcaaagagtataatgtagactcatttttgtagtctgcctttacaaaatggctcataagcacacttggattagaattatgttaacaatttgaatatacatggagaaagacagataaaatagcaaaaatgtataggaaggtgtaataatgagtgattttccctcatttttttcaaatatgctctaataatgttacatttaattgtcaataactatatactaacagctaacatatgtttagtttatcatagcactagacaatatttttaatgttttacataaaatatcttgtttaattcttacatttttgaagatgcagaaagtgagtcacagagaaacaaagtaatttgatttgaggtcatatatctaagagcaattttccttaagtgggataaataatagaatgtattaagttaatcaattgcatgttaatagttgaattttaataaatcatgatatatacagattttcctttctgtggatattagatgatcttctactctaaattatgatgagataggcacctgttgtgtcaaggtctgcatattatttggtgagtggtttttctgcatgtcacagacaatactctccaaaattaattcacctgaagattggcagaacctgtatagggttaaacacaggtttaatccctgggtcgggaagattccctggagaagggaatggtgacccactccagtattcttgcctggagaatcccatgggcagaggagcccagtaagctacagtgcatgggagtgtagagagagtcaggcatgactgaagtgactgagcatgagcatgtatagggttaataataataatgaataccatttattgagtatttacactgttacagccactgaaacacaatggcataggaatttttactacctttatttaactgaggaaggatatgaagctcagagaatttaagtaactagctcaaggtcatacagctagttagtgatgcagccaagcagaggaaaatcttttaagaggttttttttttgggggggggaccatttttttaaagttttattgaatttgttacaatattggttctgctttatgttttctttttctttttttggccacaaggcatatgagattttagctccccaaccagggattgaacccatatcccttgcatggaaggtgaggtcttaaacacggaggc

SEQ ID NO: 39407 - DNA, 796 bp, Bovine  19866880820778
  misc_feature (1)..(1): n is a, c, g, or t
nttttcttgcctgggaaatcccatggacagaggagcctgctgggtactgtccatgggggtcacaaagagttggacatgactgagtgagccctgatgcatagactgtagataatatactatattattaatatatagcagaactatggataatgaatattttggaatttgtacataatagtgttttaaataaagtaaaaaaaaagtcagttcataattaaaacaattaccaaaagaaaatcaaaatattaaaaaattttagcttcatctctatatgagaagaatatgctaattttttcttacactcattaacttttaaatcctggatcaagaatttaaagcctgcctttaaaatttctcacaaagaagatttagagagttttagaagtgaacagacgttacttcttgtgatttattcacctcccaaactgaaatcttccaaacctttttgtatccctgagttaaagtttctgatgacttaatttttcaggaaaagtagggcaaagtttgatcacaggacgttttcagaaatcaaatgaggtcagagatcactgaacagattcataccatctgggaggccagagccaacagagacagttaaatcttgaaaatgcaatttaccagccgctttgaaagttctctgagggtcacttacagctttagggatttccgtattaattttatcccaagttaaatgaagttactattattttaaattttaaaatatgtgcttgttttggaggatacaaaatatgggaaaagagaaagatgaataatgataacgtttttgctccatgaa

SEQ ID NO: 39408 - DNA, 1136 bp, Bovine  19866880862776
  misc_feature (1)..(1): n is a, c, g, or t
ngtggaaggcaccttaaagacctagtccactgcatgggaggttaggaggccctagattagaagccagtctcacattgtttttgaccatgttatactttcttcactatttatcctagattcgtttgatttatcattagttggaaaaaaacaaaagataatgtatttgggaatttatcatcttggctcaagatatgtgtgttcatttatgtcttttaaaattatttcctttgcaggtagttattggtggcagaaataaatatttaatcaatggagtaaatgcaaacaataccagagtatacgatctcttctgttctgttggccttaatgttaacaaccctcactttctcatcatgcaggtattttgtttgtggactttatatctttcataatagttttggcatctttttttaacttacaagagaaatacatctctttggatttttcattttttaatttgctgttaggctgatgtttgggcacctgttaataaatgtgggttagttatttgtacttacgtgttctggtatattgcatacatttgaattttgaagaatatctggaattaattttctttgacttatcttggagggccattgttctaaaaagtcaagagatgttcagtaattatgccaacatttatgtacatgcttacccattttagagttggagacttacacgtcattccctgtctcagaaataacagtcttggagttgtctttgtattatttatgtaacttatatcactagtaagaaagtagcaaaactctagaattataagctacccttgttctcaaatcttaaaaaagaaacatcttttcatgtaggtgggagaaataactgcccaaagattggtgtattaggatataacagctttagtacagataaacatgtatgcctttaggttattctttctgaatttattgttattacagtaagtttgtcattttattttcagggccgaattaccaaagtgatgaatatgaaacctccagaggtaagagcactctttaagcaccgtaaaaatactaattgtagatattgccttaatgttttaggtaatcaatttttaaacataatttttccattattaaaattttggggaacatttatttaagaatgattagggagaaaataat

SEQ ID NO: 39409 - DNA, 1029 bp, Bovine  19866880878088
  misc_feature (1)..(1): n is a, c, g, or t
nccagctgctcctcctgccatccctcctcttcttccccagcctctctgcacctttcttactgtattccaatcaccaacactagtgcccagttaggccctaattaaagatttgttgcctgcttgcctgagaaacagaaatagccatggagaacggacagttgtaaaattacaagaccctacgtcttgacctcccacttgttagtgtcttcggtggtctcatttgtgtcctgtcttctcgcagtctgcatggaggaggaacccacccatctgaaactgggtgtgtccattcagaacctgatgaaggtttaccgggatggcatgaaggtggctgtggatggcctggccttgaatttctacgaggggcagatcacctccttcctgggccacaatggagctggcaagaccaccaccatgtaagaagagggtgtggctggctgagaatcagccgcaggaagggtcttgcctatagtcagaaactcatacctaaggactgctgctgctactgctgctaagtcacttcagtcatgtccgactctgtgcgaccccatagacggcagcccaccaggcttccctgtccctgggattctccaggcaggaacactggagtgggttgccatttccttctccaatgcatgaaagtgaaaagtgaaagtgaagtcgctcagtcatgtccgactcttagcgaccccatggactgcagcccaccaggctcctctgtccatgggattttccaggcaagagtactggagtggggtgccattgccttctccatgcctaaggacattgtgttgcttacccaggcaagggcagagtgcataaggagttgatgagtataaaaatatcacctaatcacgagaatgttttccaaatgctggattttcctatcttcgggttaaaataggctggggaccttttgatgacctttcccatttggttctcaaaattctgcagtgttttagaacctgatgttgtgacagatctgagaaagggtttctttgggactggtttggtcaggattaggaggcaaga

SEQ ID NO: 39410 - DNA, 737 bp, Bovine  19866880890773
  misc_feature (1)..(1): n is a, c, g, or t
nttttggttttcctgtggattcctaaaaacgggcctgagcgttatagcaattttagctactatttctggttatcatataggagccctactgatgtgagcataaagtgaacctgaggtagacagtaccctcccttcacatctaaagctaaagcagcatggagttattgcccttccccagatgggtggacttggttaagccttagttggtcaggctctgctaaaatagtttcccttgaggagaagccttatgaagaaaaacagagagctcttgtcttatttcaaaatgattgctttttccctctccctgctggaagcacaaaaggatttttctcagatcttcacagtgagatgtgatagggcttctggaagcaaaactcaggaaagagtggaggcccccaagattggacccccttggatctagtccactctaagcctccaacaatttgtcagttacagcgtaataagtttctactgatacacgcttcagttttgggcttctgatgctgagctgcttctcacagtaagctgtgattatctgcctctgattgtctcttcagcttccagggctgcgttttacctacgagctcagttttctgatctaacaagagctgttgatttttagttcgttcagcttctttcttgttgtgaggaaggagtcatgacttccaagcttgtaacatgttggatcagaaaccaaaacttcaagtatcgcatctagaaatttctacccacaggaa

SEQ ID NO: 39411 - DNA, 1177 bp, Bovine  19866880942041
  misc_feature (1)..(1): n is a, c, g, or t
ncattttatatttatataaatgtatattccttttatctgatgctcagtgaccacttctagtcagaaggaagactgcactgatactaattgttatctccctttcaaaggttagtaatgttgcagcctaatggcattaacaatgaaagttctgtgatcttacagcctgagggtatcagaagtggtgtatggtacaccagccttattaatatttttttaaaatttagagttaaaaaattccatgcaaaaaggttctagcatttgaaagcaaataggctcttatccattattaattcacataagaaaaacagctatgatggcaaaggccagatacttatatgaaggttataaatatgaatgaataattcatttttctattaattttgaatttatggcctaactgttgaactttattttttcttttcctaaaagggcatgtaccaagcaaagtactgcactgtcagcagtcaggacacaaagtaccacagtatgcaaaataagatttactagacacatatttacttatgtgtaacacaaaaactgtggaaatttctgaaagagacaggaataccagaccacttgacctgcctcatgagaaacctgtatgcaggtcaggaagcaacagttagaactggacatggaaaaacagactgattccaagtaggaaaaggagagagttggattgtgaagaaagctgagtgccgaagaactgatgcttttgaactgtggtgttgaagaagactcttgagagtcccttggactgcaaggagattcagccagtccattctaaaggagatcagtcctgggtgttctttggaaggactgatgctaaagctgaaactccaatacttaggccacctcatatgaagagttgactcattggaaaagactctgatgctgggagggattgggggcaggaggagaaggggacgacagaggatgagatggctggatggcatcactgactcaatggacgtgagtttgattgaactccgggagttggtgatggacagggaggcctggtgtgctgcaattcatgaggtcgtaaagagttggacatgactgagtgactgaactgaactgaactgaactgaagtaagtgaaaatcactcagttgtgtctgactctttgttatcccatcaactgtacagttcatggaattctccaggccagaatattg

SEQ ID NO: 39412 - DNA, 1329 bp, Bovine  19866880965020
  misc_feature (1)..(1): n is a, c, g, or t
nttataaatacgaaatagcaatcctctctcaagaattatattgctaatttttccctcctgtcatttgtatttttaagctaattatattattattatatatttgtgtgtttgtgtttgttagtcgctcactcatgtctgattctttgtgaccccatggactgtaggcccaccagggctcctctgtccatggaattctctaggcaagaatactggaatgggttgccattcccctctccaggggatcttccctgacccaggtatcgaactcagggtctgctgcattgaaggctgactcttcaccatctcagtcaccaggaaaccccattttatattattcaccatttattttggtattgaaaagttttcagatatttgtattcgaatgtttccatattcccaatttatttattcttttactttttctgagattagaaatccctcaaacaaaaataagatatatttttatccacactttattctattaaatttggttctcaggctttcctgtcagtgcaataatatctctggaacctctttgactgtatgatatgagaaagtgatctaaattgtgtttccaaaattttaatgaaatgtgccagcacatttcttacacaatctattttttcttcatactttaaaaggacatttctatgtcctcccagttgctaacagcaaagtttgaatttcattctaaattgtttcctgttacccagcatctttccaaaaactcccacccaatctgtaactaagtattcttgtttaaacttctcttgatctactcccatatcagttggcctaaatcatcatcatttctcatctgacagttgcaaaagcctcatcaattgtttcctgtcaatttcctgctattattcaaggagtttcccacagatccatcaaggtgatcttttaaaaatgtaagttaaatcatcttacctctcttcctcacttaaaactcttcaatgactttaaatttatcttggaatcaaaatctagattcagtaccaggatatacaaggaccacatgtgccatgtcttaatcctaacttccacagatatttttaaaaatttaacgatagaactgattcattcaacacatttccaatactttatcctcagaaattcaataaacacttttacatacatatattgtttaattcttacaaattcctatgagaaggatacttgcctcattttacagatatataaacaggttgagagataaaattcagttttgagtttatactgtataaggtccagctaactccaagggtaggcaagtaaggagagattaaaaacagttacccttttatttttttctgggctgtacca

SEQ ID NO: 39413 - DNA, 1939 bp, Bovine  19866881098949
  misc_feature (1)..(1): n is a, c, g, or t
nagaacacaagagggaaattcactttcaagcaacaaaacacagatctcgcccaaacggacctggatctatgtcagaatcatttggatccatagcatcgtcttcagtaaaagggcgaagacagctctgcttgtccccaaagactcgtctgtttcgtcttgctggtaaggtgccatctggagacaaaaggaaggaactccacgttttatttgtaataaaaaaaaaattatctacatctttaaaagtctatacagtaaaagtaagaatgtcataaaacaatttgaagggaaaggcaaaaccctggtgagctaagagagcctacaagtggcacagcccagagggcatgcagtccctttggagagttacctgaggtctcggcatccactccactctcttcagccactttgagaaatatctgaaaaatgagaatgagaggattataataagcaccacagtatgagagcaactgtcatgattattacatgactgaacacactagcccctaaagacataacgtaaaagcttcatttattgataacactttgtcagagtcacttgggagagaagccatttatttataccagagaacatttccccagtggtgagagctatcaattcagaaagtcattttcaaattaaagttatgacatcaggacactgcataaggtggaatttgttctgaacctacagggaatgagccaagtggcttcaagtctttggcccgaaatctttgaacaagcaagcatgaaaataggctctccaagacaggatgatcaggagaagaggcgttccctgtcactagaaatgttatggcagggtttctaacaccagaaggcaacctgaactagacaggcgattcccaaactctgatctacagagatgctgcccaggaagcatgcaataaaagcacagacattaaggtcttacctccaggaattctgattcaaagaccctggagttgagccttgacatttttagaatattcgcagaagattctgctgcacaggctaacttggggactactgggacagacaacttttatatcccttccaaccctcaaggtttccctaaagagaggcactgcttacacagtaatagagtatgggctttggagctcaaaacccctgatctgaatccgctcagcatcccttcatgtcaattttctcatcttgttatgaggattaaatgagttacaatgactgaacacaacaaaacacacccaggttagcccaaggcataagtaggttttccataaatgttggacttttcctaggcatggccatgcctggtcataccaggatcaatcctcttatttctttcctaccatctcccactgaaatcttaaaggtctaactgggaccaacactgcccagatgccaatgacctaagggctcagtgcctacgtccatggtgatcctactcccagtggacatgcaggctgcctgtctggcgccaggactgcgggccctgctcagttctgacagtcggtcactgaacttacttcttccagagtagtctctgagatgccgtaactggagatgcctaggtctgagagccggtcgtcaatttcgtggaagagttccacaaaggctccctctctggcagcctcgtagggcagcacgtaggtcagctcatgcccaatgtcttccaccagccgggcctcagccacatgcttcctgatgaggttggagatcgcagagacatctgtagggaccacagcacagatatgatacggcttggccggctcagaggcccccttccttcaccctctgccagctcctcaaaagcccactgcctgcacaccacagctggcccagatactgaaatcattccacaggttcatctctggcccaagggttcctgggggcatggactgggtcttattcacctttgcatcaccaaagctgggcaccgtgcaggccctcagtttatggtgggtag

SEQ ID NO: 39414 - DNA, 943 bp, Bovine  19866881106286
  misc_feature (1)..(1): n is a, c, g, or t
naaaagatgaatcactataaatgctgcctaaacaagagacgaagcttcaaaatattggcaatctgaaaaaacatagagcttaacccatggacggaggaggctggtaggctgcagtccttggtgtcgctaagagtcggggacgactgaacgacatcattttcacttttcactttcatgtattggagaaggaaatggcaccccactccagtattcttgcctggagaatcccagggatgggggagcctggtgggctgctgtctatggggtcgcacagagtcggacacgactgaagtgacttagcagcagtagtagcaaccaaggggtggaaaacataccatgtatatgtgctatgtccttttaatcacaaatacattaagttgttaattcatcacacattatggtgtacatattctgtgcccaggattgtgtttggcactagagtaactcagtctaatagggaaaggtggtaagtgaactaactatattataagaatgatgaaagaagtaaactcccaggctaggtagagttactatagaaacacagaaaagactcaagaactgggaaaggcttcttgaaagagatattgcttgggaagcctgaaattcaggattttaaggatgattcagcaggaaaatccttggaaaagaatcaagagacctacattcctatatgaactttgtcattaatgaaacttgtgacttgaaaagccatgggaaatatgcatgaagggaagatacaggaaaagaaaggatgccataaacttaaagaatgcttgacacagcttggtggaaaagactgcaggccttgaggagagtggctacagccctatgaccagctatgcctgcaaattgctttatcctgggtttcctggacttgagaaaatgcagtgctggcaacttcagcatttttccttgcatgtcctctattttctataggcttttt

SEQ ID NO: 39415 - DNA, 1409 bp, Bovine  19866881120777
  misc_feature (1)..(1): n is a, c, g, or t
nccattcagttaagtccttcctttctatggggtgcatgagtgaggggtagaggacagaatattttctcctaatggtttcaagaggataatcatttctatttcatagtcagatgcagggatcatggagtgaggaagaaggctggttttcctataatcaggaattgaaggaaaatacttttaatattaaatattcaaaatgtctcaataagagaaaataccttctcgaaatctacggaactatacaccagtgagttggcagccatccagactgagctggaaattgcctactgccactgatggagatttaaaattttacaccctagtgttatgccacaatccttcctagacacacaggatgggctcccccaccactcctgctctcctgtgactctgaggcattgttgctcagctacttcatgcccaagtgcttcatacattcctttcagagtatcaaggaaagcagattcttggagactgtgttccactctgtggccaggctgggaaaagaagcacaactgttggtgatcacagtgttaaagtgttgcaggaagagactcttatctctgaggcaaagaagatgaaggcataacttggaaaaagaagtggcctcaagctcaaaactgcaaagtctacaaggccatctgatgctccttcttgagagcctgaagctaggttatactcatgcctcccctaggtgagaaagcacatatttccaaatgctagaagtgagttggaattcttgaggttccctctgacctatattttatgataattctttccagaatcaatccattaatcacatttctacatttttatcaaatatattactgcaagagtgcactgttatgtaccttgtttttcatttaacaatattatataggaatctctctcattcttttaaacaatagaatgccactttatagaaaacctattcctctattgatcgtacttagcttgtatttaatttttgtttttattcactcagtcagcaaatttttattgatttgctattaagtgcctaattcctgctaggtactctggctaataacaaacaaaacaaataaaagtttcagcacttcaagaactgagattcaagtcagggcaacagaaaaataaagtgaatcaataactaatgacataattacaaattgtgttaaatgtcataaagttaacaaagagggaaagagatagagaataatagatggacccatgttaaataaggtactcacaagagacttctgtgaagaagtaatatttgagatccaaaggacatggaagaatccatttgaaaagtagagcaaagagcctttcaagcaatgtggtagcatgtgcaaatgacctgtggcaggagtttgacatgtttaaaagaacaatgtcagtggtctaggggatgctgagagaggcagaga

SEQ ID NO: 39416 - DNA, 1275 bp, Bovine  19866881165071
  misc_feature (1)..(1): n is a, c, g, or t
naaactaagatcatggaatcctatcacttcatagcaaatagatggagaaacagtggaaacagtggcagactttgttttttgtgggggctccaaaatcactgcagatggtgattgcagccatgaaattaaaagacgcttattccttgaaagaaaagttatgaccaacctagactgcatattaaaaagcagaggcattactttgccaacaaaggtccgcctagtcaaggctatggtttttccagtagtcatgtatggttgtgagagttggattgtgaagaaagctgagagtcgaagaattgatgcttttgaactgtggtgttggagaagactcttgagagtcccttggactgcaaggagatccaaaaaatctattctaaaggaaatcagtcttgaatgttcattggaaggactgatgttgaagctgaaactccaaagctttggccacctgatgtaaagagctgactcattggaaaagactctgatgctgggaaagattgaaggcaggaggtgaaggggaagacagaggatgagatgattggatggcataactgactcagtgggcataagtttgggtaaactccgggagttggtgatggacagggaggcctggcgtgctgcagtccatgggattgcaaagagttggacatgactgagtgactgaactaaactgaactgaaggatagggaagcctggcatgctacagtccatggagtctcaaagagtcagatatgacttagcgaccaaacaacaattgatagttacatctactgtcagtttattgtgccattattatgtagacaattaataaatagcatttgattaaatgtgatatttttagatatgttataaatggctataatataggtttcttgaagaatcttgcttctgttggcatgtttgaagcaaaaaaaccattatacctggaaacttgattctaagtcctagtcagtttgaatttctcaatttttaatatatgaaatctgtaacccaagcttctaaggtttgaatttttaaaaatctaccatatacttcaaatttggttttatctagtgagaataaaatattgtgtacttctttagctgatagccatctgctacagaaacattcaaatgtcagctcatcagaatttaaaaggacttcctgaacagaagttcactgaaatttaagaaactttaatgaaacttctgttacaaaatgatgctgtcttggctttaggctaatcccctaaacacacctacaaattcatctcaccaaatgtctgccacagagaaggag

SEQ ID NO: 39417 - DNA, 1573 bp, Bovine  19866881214645
  misc_feature (1)..(1): n is a, c, g, or t
ntatgatggctatttcttgttagtgacttttgactgtgaatttggaggaaatttgtcatgaaacttgggtttataatgttcctccaggaagaatgtgtgtttgcctctgccagttgcctgtggttactatcaacctcaaaataaattacctttttgaggtttttaggaaaacgctgcttgaatttactgtgcagacatacttgtttctggttacaaaatctcagctaggatttcctgctgactgtgtgtggggtattatttttctaaattaccttttcagtaagaatgtaaacatttgtgtacacagctttatgcagaggttttccattatacattcaaactttggcagagtctgttctttcctgtcatctgcaactcttggttcttctctaactgaagatcaaggataccagttctgagcaacttgtggtatcagagctcacttccctctctggatttctacttttatttatggattgatttggcctctaagaattttactcattacctcttaagttgagatacatttacctatatttacttatagctagtattattttgttggagaaggcaattgcaccccactccaatactcttgcctggaaaatcccatggacagaggagcctggtgggctgcagtccatggggtcgctaagagtcggacaagactgagcgacttcactttcacttttcactttcatgcattggagaaggaaatggcaacccactccagtgttcttgcctggagcatcccagggacgggggagcctggtgggctgccgtctatggggttgcacagagttggacacgactgaagtgacttagcagcagcagcagtattgttactcctagtgggacagtgtgtcccactaggacaagatgtctagttcacaatattgccagaaattagtgattacgctttaagatttttataatagcttctcattcttctatataagctttttcatttaacaatatattcatccattttcacatattaatatgtatagatttgcctgttttattggaatagtgacataatattaaatattatagataaaccatcatttatttaataagttccttactaatggatatgtcaattgttttcagggtttttgttgttgttgttattagaaaaatccatgtatatatgtttgtagacttgtatatatagattaaaactctagagttagaattactgggttaaaagatgtgatacttaaattttgatgtttatttctgatttgcttttcagagtttgcaaaactaagagagacagtgtgcctgaattctcattgccttgtctatattgggttttattgagagcattatttattaatttgaggaaatagtttgtttcttaactttatcccagaatttattccatggagacaaaatatattacagaaatatgcgtggaatggttttaatagatatttttcatgccaaatgaggaactgatttgaatcaatttttctcacatatgactgtgaaatacaatctgttcatggagatgccattagatttctcatctgactgtgagtgtcctaactgcttggagaatatacag

SEQ ID NO: 39418 - DNA, 1269 bp, Bovine  19866881292949
  misc_feature (1)..(1): n is a, c, g, or t
naacatgttcataaattcagatctcagatatcacttgagatccactgattgagaatcttttacaaagatttcccatgtgactcatctgtatattaaagttttaaacactccactagatgggtggttttcttcctcagttgcacaatagaatcatctggtgagcactattttaaaagaggccttatttccactccttagacaactggcataattttgggagggcaataaccaggcaggtaaaaaaggagggatgtaaatcagaaaaggtagatatgaatagcaatttattacttattgtgtataaatgtgttaaaatatttttaaaatatattctatgaaatttattttcctcagagaattatagtgatgattaaataagtaatacatgtgagcatattaataaattacacaaccctaaaccaatgttactgttaatgactgacatgatacaaaaccaaataaatcaatattcttaagatattaagcatggtatttccaaaataacaattaacatagtatgtctgtggttcaactaagtctgaaataacaaacttttaaaaatgcaaatagttcttccctgattcagaacctctctatcacaatctcaggaaataaaacacaggagtttgtatttttaataaactaccaatgtaactattgtgtgtcttctactccataacttataagcaggaagaggaatataaaaagctaatttcacaactaaaaccaaccagctactttcccttcctccaatgatctcttacttcatatgataatactgtatagactccttaacaattacatctcttctgtaatactccaggtatgcaaaagtaaaatggaaagaaccaattcaacaggcattgagttcatttcttcagggactttctgagtacccaagagctgaaaaattcctttttgtgatactcttggtgatgtacctggtgatcctcttagtgaacagcactttgatcatcctcactctcctggattcccacttttacatccctatgtacttctttctcagtaacctttcctttcttgatattttgtgcacatcctcctttatcccctcaacaatgacacactttctatcagaggaaaaaaaaaatctccttcactggatgtattgttctgatgtctgtctccttcaccatggcatccacagagtgtgtgatcctagcagtgatggcacgtgactgttacatagccatctgcatgcctttgaaataccctatcatcatgagcaaggcactttgtattcaaatg

SEQ ID NO: 39419 - DNA, 731 bp, Bovine  19866881307906
  misc_feature (1)..(1): n is a, c, g, or t
nggtggacttgtaaatattcataaaaaatagattggatttagtataggtaaacgtcttgagcaggtataacaggaagaactgctgttgttagggttggttggtggaatcttctttttgtacaaagaaatgttgccagcaattcttcttggaagactaatttagaataatttttatttgctatattttttattagttaatgagatctaggagtgtaataacctggtgagaatttgtctgcaaatggcaatcaaattagtcttattcatgaaactcacaaataagctataattcagcattttatgtctaggggaattaaaatgggggtcatgctgtttaagaggataagggaatttaactatacactggggaattgagggcagatttatgatgaagacatatcctaactggaagcttgattgtgatttaaattacaggtcaagctgtgcaatgtgttttctttttaggggaaaatcttcggggagataaagtgtgcttgtttaaagaagaaacagaaagtaaatgaaaaggcagattgcatcttcagcttttctcttaaaatttcaagctgctgtaagtcgaatcactcctgagttcctgatgatggctgttgcgaaatttctttcttttagtttctttgtgttattcttgccctttattccagagcagttattttacttgacagtaacaaaaagatgtagccagcatatctgccagcaaactaatatggaaa

SEQ ID NO: 39420 - DNA, 1358 bp, Bovine  19866881329542
  misc_feature (1)..(1): n is a, c, g, or t
ngaactttcacttaatactccattgatggtaaatttgttactttactaggcagcctattctcccttagaccaactaactatatattatacactaaacataaatcatttctctttcactttagccacctgattctcactttgccttgcagacttacaccatactaaatccaatctccagaccacatgcctatactttaatttctgtgaagatgtgtagtatgtatggtggaaagaacaacactggactagaagtcaagagacttgggttactgtcgcagctctaccactaactagctttttcatctcaatatccctttctttttttctgatagctaaaattatagggtggtggtgataaactaaatgaatactgaacatccttgcatcttttttgtggggttttagcattgccaagtatcccaagaaatgttgagaggagtctttcatgtgttttaatggtgactttgtggtacagcagattgttgctcaccaatatttctgattctgaacagatggacagactatctttcccagccccttgcagttaataagggtttgtgactgaattccggacaaggaaatgtagatggagaaatgtgaggtaccactccaaatcctggtggccatttctaaaccttgaatgcttccctttctttatttctttctcacacatacatacactttctttatctcttgactatttattgagaacttaagaaaggacatcaaggccctcagagaagaagaacctgaagtaggacatactcacctggggacctaaatgaccacagagaacagaattctccatctgatgtgctctagattatgatataagtaagacataaatcttaattaagcctcaaataatgaagttgtttgctatagcagttagtctagcctttatctaaaaagaatgtataagaactaaaaagcccattttttccttactctgaaggcaatatagagttaataatttatacaccacttactcattttcagagagcccctcaattataattaagaaattgtcataatccctcatgaggaaagatgtacattccttctcattttagaatacagaattttgggcaatgaaaaatgaattgcagcataaaccaaaagcattaactattccatcagggtacggaattcatttgttacaaatcagaagatgaaactactatgttttatttgtataatgcccaaaagttcattagaaatgcacaaatcacagttttctctgtttactgtatttttaaaaatttactaaattaatgccacttctctttctattgtgccatgttcgaagatgaagcatgtgtctacagaaatagcataggcaagtttaaaacattaaa

SEQ ID NO: 39421 - DNA, 723 bp, Bovine  19866881332347
  misc_feature (1)..(1): n is a, c, g, or t
nttgtgcctggcaggccgcaccattatcctctcccgcaccacatggactgaggcggacatcctgggggacaggatcgccatcatttcccatgggaagctctgctgcgtgggctcctccctgttcctgaagaaccagctggggacaggctactacctgaccctggtcaagaaggatgtggagtcttccctcagctcatgcagaaatagcagtagcactgtgtcatacctgaaaaaggtgagttgcagtctcagtgcgtctggggaatcaggactctttagctatgactggtttgttcatacctgccccagtctgccaccttgaggccaccagctccctgctctgtgccctgtggagtcatgtacctcctacatggaaagctacagagacttctgttcccatcgtgttagctctgctgaatcccgtttcctttttctaatggagacacagtgagcgtaggaaaaggtccttagaggacttaatgttgttgaagaagagaggtttgccaagagttaagagccttggctgcagaatgccctgctgagtctgctcattacctttaaatcttctcgacttaaacttttaaactacaaaacagcaaatatttatcgaacactgatttcatgccaaacactcaatctagcagactctggacataaaagaaaatcatgataatagttgtagcattgttatcatttgtaggcctattttttttttttttttta

SEQ ID NO: 39422 - DNA, 1109 bp, Bovine  19866881370662
  misc_feature (1)..(1): n is a, c, g, or t
ngctcagatgaagttgaaacatgcccaacaagaattaaagactaaacaaacagaaattaagaagatggatagtggctataggaaggatcaagaagcattagaagctgtgaaaaaacttaaagaaaaacttgaaactgaaatgaaaaggctaaattatgaaggtttgcctttaaagacatgatgttaaatcattaggaagtagtgattattaatagaaacttaaaggaaatagcaagtaggaaatttttttcacctcattaatgttaatgtgaattagtataaaaattatttataaatataatcagaaaaataccagagtataaaacagtcctttgaattgaaaggatgaaaatggttttatgtgttgaaaatatgtctacttgacacttaatataaattcaaatgttaagtatgcttttctttaatattatcaggagtttgcattttacttttagaaatgctttggaaatagagattactaatattttccttaaaacagtagaatatttgagtttttaaaacttggtttcaatttacttacggcttactgttcagaaaacaaggaggaaagccttctggaaaggcgaaggcagctatctcgtgatatcagtagactgaaagaaacagaagaagctctcttggccagatttcccaatcttcgatttgcctataggtaagagttaaatcttgaaattgaacatggtagtaactaggatatatttttgtgtgaaagttaccgtaagctgcttttccttaattgttttttcttttttccttaaatctttattgaatgtttcagagttgtagacaagggaaattcttgtgaaatttaaggttactaatgccactaatgtcaaaaccaaaatgagtggaatttaatcttaccccaaaaagtttctttaaggttattttatcattaatgttaaatagctgtgttaacattttataatttgttttattaatgctatatggtttttttcttggaatacttaatatatgtattacaaagattagaacattaaagttatttttgttaccttgaaaacattatgtatactgaaagatcttttgattttaaaacaatagtcttttaagggtacaatagaata

SEQ ID NO: 39423 - DNA, 1750 bp, Bovine  19866881778598
  misc_feature (1)..(1): n is a, c, g, or t
nctgtggcctgggtaaagatttgggagtcataagcacactgagaaatgttcttgaaaatgaatgatgccacctggcactatagttacaaaaaaaagagtgttgcaggtcacacttctatagtactccaacaattagcaaaaaaaagatggcaaaagtactgaaaaagagcagacaatggtaaagggagaaaatgatcaattatcagaaagtgacaacaaagaataaaaagaaaacagtatttatagaatgcctactatttaccaatctgggcactttaaatactttgccacatccagttttcaaaataactctgtgcatgctgttgctcagtcgtgtccaacgctttgagacccatggactgtagcccaccaggctcctctgtccatgagatttcccaggcaagaatactggaatgggttgccatgccctcctccaggggatcttcccgacacagggatcgaacccacatctcttgcatctcctgcattagcaggcggcttctttaccactagcaccaataggtaggttttattactcacaatttgtaggagaaaaccacttagaggctaagtacttgcccttggtcacatttccaagaagtggtgggactaagagttgaatctagatcagaatatcatgtctttccactaagtcattcctgagataggtgcttaatatctatgtattctgaatatgtgatgttgctttgttatccttgaacaatcatatttatttttttttcagttactatgatacaatcacatatagaaaagtaccaggcagcaaaatgtgaaatgttatacctcaagaaatatcagatttcccagagaaacacattgaagacagtagatacttgactttctcacttaccttggcacattctgtgacttaacctgcatgctggagttcaccctgagtaaacatcataaattttatttggtgaaggaggaagccctagtcataagtaatgattatatcgcactaaaagtgtagtcaagcatgatgtttcttggatgactagcaactgaaattattaatcatttaattgatgaattcacttcagagaaacttgtgaacagagctcacgcaaatattgtcctgaaggtttcaattcattttctctaatagaagaaaagcaaaccattatttgtcatcataataaaaacatatcatattccaagatgtcagtaacagcaaggtagacttttaatataaaatgctgtgatattatcaacaaagcaattttcaaccacgcatactgcaaatgcccgtgcatgagtgattttaaagtggatgacagaatgactaaatatgttagaaatatctctgcagcatcgtcaaaattcatatacttatccctgaagccattcttgagctcatctacatgccctaatccaatttcccaaggcactcagatatgcctctattttgaaaacactacatatatgcatagtacatatgtaaaatgggagaaagcattaatattgtagttttttaagtctctgcttaaaatatatataatacttattgtaaatatataggtgctttacatatacatatttatgtgcataatgttaaagtcctacattatatttctgacctaatttatttctgaaagagcctcctaatgagtttctagtcatattgccctcaaatgtaccaagtgcagggctgccaaaatttgttttcataaatgcaaatatgcccatgccaccctgtctactcaaaacccttcaacacttgcctttt

SEQ ID NO: 39424 - DNA, 783 bp, Bovine  19866881880740
  misc_feature (1)..(1): n is a, c, g, or t
naggagcagttgagattatgaattggagaattttaaagctacctaggttagttgttttccactctaatttgtcctgctaattagaagacttctcacaatgcacatactcatggaggaatcatctagccccgtgggcattctgttctgtttaaggaatgaaaaggtaagctgtagcttttctttgaactagacatcgtgaaataggatgagaagttattccctttcaaagcacattttattttttgctctatttgtaaaatataatttacatggcctaaccatttttatttgcacatgtgattattggatattaagtaaagggcttccctggtggctcagctggtaaagaatccgcctgcaatgcaggagacatgggttcgatcccttggtcaggaaaatcccctggagaagggtagggtacccactccagtattctggcctggagaactccatttactgcataatccatggggttgcaaagagttggacacaactgagtgatcttcactttcactttcaagtaaaggcatgcattatttaagcagcatattgtatgccaggatgccagcactgaccagatgcatctagaatttactgattttagttaataactatcaaaagttaaaaattaccaaaagaaatataaatgttgactatatgatagtattgtagaaaaaaatgccataacttttttgtttcaatttctctttaaagcagcctacatatttattatgagatgtgatatgttatattgtgggaagactggaatcaggaagtgattaa

SEQ ID NO: 39425 - DNA, 611 bp, Bovine  19866882165710
  misc_feature (1)..(1): n is a, c, g, or t
ncttgcaggaggtggataatgaagttactgcataagctatagacacaaccttgtaagtcctttcttctatgggtgaccttccttcatttatatccaatgacaacagtgatatcacttgagatgtagagatggctgattctctaatggagctattataaagtggcaatcatgcaacaatgttcatgacataataaaaaatatataaggaaactgattcactctcattgtatttcttgttatgacttaaattatgttcatgggatgaaatacactaagcctggatgtgcaatgtattccacataatagtttaatcaagtatgtctgttctcagatgaaagatgcattgtcacatggtaaatttccaaaacccttttttgacccactaaggcaggtttcaatgagagttcctgtacaccaagacacctaaatcccagtgcctactttataacttggaagcttcaagatatgtatcaaatttagtatgtctcaaatagagcacttaatatatatttgggcaagttagtagtgatatactatgtttcattcttcatattggtgatttgagtctttctttttcctttgtcagtcttaactgtcaataatattgaact

SEQ ID NO: 39426 - DNA, 2312 bp, Bovine  19866880126345
  misc_feature (1)..(1): n is a, c, g, or t
ntacatatacccaatggagtattactcagccattaaaaagaatacatttgaatcagttctaatgaggtggatgaaactggagcctattatacagagtgaagtaagccagaaggaaaaacacccaatacagtatactaacgcatatatatggaatttagaaagatggtaacgataaccctgtatacgagacagcaaaagagacactgacgtataaaacagtcttatggactttgtgggagagggagagggtgggaagaattgggagaatggcattgaaacatgtaaaatatcatgtatgaaacgagatgccagtccaggttcaatgcacgatactggatgcttggggctagtgcactgggacgacccagagggatggtatggggagggaggagggaggagggttcaggatggggaacacatgtatacctgtggtggattcattttgatgtttggcaaagctaatacaattatgtggagtttgaaaataaaataaaattaaaaaaaaaaaattgtaaattgacagtggggcttaaaagtccaaaatccacaagacagtctgtaaattcagcaaacattaaaattgcaatctggaatcaaacgactggaagttgttgtttttctgtcattcagtcatgtccagttcttcatgatcccatagactgcagcataccaggcttccctgtccttcaccatctccctgagtttgctcaaacttatatccattaagtcgttgatgccacccaaccatctcatgctctgtcgcccccttcttctcctaccctcaatctttcctagcatcagggtcttttccaatgagctggctcttcacatccaggtggtcaaagtattagagcttcagcatcagtccttccaatgaatattcaggctggaaactgaggtataatttctaagaggaaattgagaggcagaattcctgcaaggtacctctttataagaccttttaagacctttaactgattagatgaggcccatctttactatggagtgcaatctgctttactcaattgatttaaatattagtcgcatatggaggataacttcacagcaataactagactagtgtttgactaaagaactagccaccatagcctataagttgacacataaaattagccatcacagtggacatattcaatgtcaaaaataaatttttattaagtataagcaagatatacattcaagataagagttatattttaaagtctgcattagtgtaaggatgacagaaactctaaaatttcctaagtgcatatacttaaagttgaatcatgtctgaacataaaggaggattaattttaacgttttatctgtcccctccaacaataagaaagtcatatgtgaatctaaggttcaccactttgcctggtttaacacaataggccaagggaaggcatgatctgcagcatttgtaaagctaatagaaaaacactgccggggaaggtctcaaagccacagagtatggtaaagactaggttgtaatctaattagaaaatgataatagaagccaatggaaaacaggcctcatgcccaagaactacaattcccttgggaaataaatgattgatcacttggagacaggaaacagataggggaaagcgtgttcttgcctttgacctgaaacatagatcacgacttccaccctgagtgaaaccatttataagaaaccaaatgctttacattccagcagtctgtcatttacagggaagacaggtgaagtcctccagcagaacaccagtgactcttgctataaaatccctaacttacctaagaaatgttgctagatgcagaattgtactagtaaagtggtatttttctcaatttgaaaattttaaaatgacctagtttcttaggccctcctttagtcccaccacttcatgggaaatagatggggaaacagtgtcagactttttttttttctgggctccaaaatcactacagatggtgactgcagccatgaaattaaaagacgcttactccttggaaggaaagttatgaccaacctagatagcatattcaaaagcagagacattactttgccaacaaaggtccgtctagtcaaggctatggtttttcctgtggtcatgtatggatgtgagagttggactgtgaagaaggctgagcgctgaagaattgatgcttttgaactgtggtgttggagaagactcttgagagtcccttggactgcaaggagatccaaccagtccattctgaaggagagcagccctgggatttctttggaaggaatgatgctaaagctgaaactccagtactttggccacctcatgcgaaga

SEQ ID NO: 39427 - DNA, 1866 bp, Bovine  19866880169184
  misc_feature (1)..(1): n is a, c, g, or t
ntagtctaactatgaggtggaagacaagaggaattcccaggaaagagttcattaacttcttggctctaatcgagcatctcattacaagtggtgtgttgggtaaatttgtgtagtgattttgaactgtcgtgttggagaagactcttgagagtgccttggactgcaaggagatccaaccagtccattctgaaggagatcagccctgggatttctttggaaggaatgatgctaaagtaattccagtactttggccacctcatgtgaagagttgactcattggaaaagactctgatgctgggagggattgggggcaggaggagaaggggacgacagaggatgagatggctggatggcatcactgactcgatggacatgagtctgggtgaactccgggagttggtgatggacagggaggcctggcgtgctgcgattcatggggtcgcaaagagtcggacacgactgagcaactgatctgatctgaaatgtaaaatgaagtcctcaacatacagatgagctggacaacaagattccaatttaattgagaacaaagaatgagaccaccagaacataatgatagtaccccaggattaaggaatttcccaggacaaaggtgctaaaactggaagatacgtgggaaaacaggaatgagtcagtcactataaatatcaggcaggaattatactgaatgttccataatactgagtaagcatccaggtgaggcagaagatctcctggagaaatctaggattttaggaatggggagaatttgtttaagtagaagaaaggtatttcaaggggaaaacacaacaagaatggaaaccaggcaaaattaagcctaatatgttaagaagacagcaggaagccctgctaatggggacaaccgatgtaggggtaggggaagtgtgatgcaagcgtggaaaggctgattgtggtcagatccaggaacttagattttattctattaacaataagaaccaatggattttgagcagggtcctgtcatgatctaaagaatgttttagttttagggtattaaaaaaagtcatatggaagataggacagactagaatctgagaaattagatattttactaattaaaacttcaggaaatgataacacgaattagtttgattgcagtagaagtaaaaagtagaacaaatatgagaaacatatcaaacaaatagttggcagaatcctataactgattaggaatagaagtggataaataaaacgggataccatcagattttctggagtcaaaatcactatgaaatcatggcaacttgggagcccattcccttttggggaaagttaatgctcttggatttctacctactccaggagatcttctgcctcacctggatgcttactcaatattatgtaacattcagtataattcctgcctgatatttatagttaatgctgtggatcacaataaactgtggaaaattctgaaagagattggaataccagaccacctgacctgactcttgagaaatttgcatgcaggtcaggaagcaacagttagaactggatatggaacgacagactggtttcaaataggaaaaggaatacatcaagtctgtatattgtcaccctgcttatttaacttatatgtagagtacatcatgagaaatgctgggttggaggaagcataagctggaataaagattgccaggagaaatatcaataacctcagatatgcagatgacaccacccttaaggcagaaagtgaagaggaactaaaaagcctcttgatgagagtgaaagaggagagtgaaaagtttggcttaaagctcaacattcagaaaccgaagatcatggcatctggtcccatcacttcatgggaaatagatgggggaaaca

SEQ ID NO: 39428 - DNA, 2244 bp, Bovine  19866880408432
  misc_feature (1)..(1): n is a, c, g, or t
nattgcaatcgcttccctccttttctaatttcaaaatctctcattaaaaatttatagtgggcagtcatccagctatttatgactatgtctagacaactgaaaaacagcagacggtggcagggtcgatccggggctttcacttgtcttggtgaccagttcagatcagggcagagttgatcagatcaattaagtggaaatcagatgttaatgccaccggagcaattgactgagggagaaaaactgatcatccactctgggagtggcaggggccactattacatatccactcttttgtttgcaagcatttgtcaacagtctcatgctgtttgtctgggctggcatcacagaatcccacagattgagcggcttaaacaaaggaaatgtattgtctcacaattctggaagctgcagattccagattaaggtgtgtcagggttagtttctagtgggaactctctccttggtttctgtacagctgacttctccctgtgtctcacatgatcttttctctctgcacaagtagaaagaaagatgtctctctgtatcttctttgtcttatcagataaggccccagtcttattagattagggtcccactcttgtggctttatttaagcttaattacctctctaaaggtcctatctctgaaaacagtcatacttggggctagggcttcacgtaagagttctgggtggacacaattcagtccccgtcagtccctgatgaagtagggcaaggcatgttgaaagctggctgttaaaataaggtgacacctcattgtttttagacaaggtgccttcattacttggtgacagtgagacctgttagtcacctttctttgggagggattattagctggcattcatagcttgctcagaaacagtcttgtcactgatattgttacagacaaaacacctggagacaggtagaaaacacttaggacatgggaagggaaagataagcaatgatgaattttgtggccactgcagaattcctgcttatataaacaaaagtgtcacctgatgtgaagaactgactcattaggaaagaccctgatactgggaaagattgaaggcaggaggaaaaggggatgacagaggatgagatggttggatggcatcactgactcaatggatgtgagcttgagcaagctccaggcaggagttggtggtggacagggaaacctggcgtgctgcagtccatggggttgcagacacaactgagctactgaactgactgaacagaatctgtgtcagtggatctaggctacagcaatgagagaatctatggttcagtgtccagattcttcctattacagagcatgcatttgtttgcttgtgggataatgggctgtgtgccattcttaatgacatggcagattggaggatggtggaagcacagggcttttttagcttgtgtgtgacaaggatacgggattcttgcattttagaaatggcagacttacaggatggaagaatactaacagtactttgtgggtttttttggagctttgcagccaaggagactcttacatacgattagtgcctagctgagattgacaccaggtgtgggcacctggacttagcaaggctggccagattctctctcctacagatgtggaactggaaccaaaagaaattggttaattgttgctgatgtctagacctaaatgtatataaacacaggagctatgaggaaattatatccaaatggacccagtgaaagctgtttggcagagatagaagattgaattagatatgcagaaaggaacagagatagattatggagaaggagagagagagggagagagctagagagatgagagatagaaaagcagagactgaggagtaatggttcagttccttatggattcaaaaattaaatgtgattcgcatggccttgtctgcaggtaggtagataggagaaattcatagaacagcaggaagactattgttgtgagttttggaaatctccaaatgatttttaattatgttacagtttagactcttgtctaatctttattttactaaacaatactgccttctagaacacatatgaagctatagactctgttgtttaatcctgaaagtgtattttagcataaaaaatattaacatttataatgaaatcctttcaaaatatctcaagatgtttctatataaatcccagaaatactttttaaaaatatctttatttttttctttctggtctactgttctcacatgccacagctgttcccatgcat

SEQ ID NO: 39429 - DNA, 3673 bp, Bovine  19866880594650
  misc_feature (1)..(1): n is a, c, g, or t
natcttgggttgccccacgggcatggcttagtttcattgagttagacaaggctgtggtcctagtgtgattagattgactagttttatgtgagtatgatttcagtgtgtttgccctctgatgctcttacaacacctactgtcttacttgggtttctcttaccttgggcgtagggtatctcttcatggctgctccagcaaaatgcagccattgctccttatcttggacgaggggtatctcctcactgctgcccttcctgaccttcaacgtgggatagttcctctagacccttctgcgcccgcgcccacgcagccacagctcttttggatgtgggggtcggtcctcccggccaccacccctggccttgggcttaggggcatggggtagcttctcccggccgcggttgcagccaccttggtcgccggttttgaaattagtacacacaaaaatgtaccttcaaactgctataaatatgctgtgtcagtccacattctgtccctatagatgtttgtttctttaccctccaccatttgttttataaataagtatgtttttccccaaaagatgtatctatattcactgctttcattgtttcatcatggtgtttggtcagtccaattatgactttccatgacatataatcaaatgataaaacactttttatatatgttgtatgcatcccaagtacagtcccatccttatgtggagcaatttattattgagttttcctcttgcactttctccctttgctttgatagactcacataaaagttttcagtaactttgtagcaatcaacaattaatcaaattgtagcttttcactacaacaggaaagctgagtaataaaaagtccatgtaactttatgggcaccaataacctctgaattaggcaggatgaagtagtgataatcctaatcagattgcttatttccaagtataaacagtttcctgagaggatcttgagtcatatcttcctggatctgacatggatggatggtagaagggaagcaggtaggtgagaaggaaatgcaattatgagatttatttctatgaaagaaaataaatgatgaaagaatgaagttttctatgccttctatagtctcaaaaaccttttgtctagctatctggaaaccttgtattaaactcagctgtccctccttcctacctgtgtgcagtgcaggcctggatgtgtgtttatgacatgtaaggggcagtatttgaagaaagtccgttgtgtgattgcccactgagctcttgttggctctgtgtgtggccagatcaacctctcatcaaaagagcctttgtcacaaatcccagtgatttcaatcatgaggttatttcccttattttaaatacaagtgtaaacataatttgaaaagtttcttctaaccttttagaagtggtatgagggctgatgtgagatagggttggacagtatttgtatatagaaaaagaatatcgatttgactttttaaattctaagacttttattacaaaaggctgctataacccatggtaattatattccaataattcatatagttattctgccttgatctaatatgcttccctgtttttcataaaagtctagattagccttgaagggcatatttatgaaaaatgtctgattgatacccataaacatgttttgttaaaaattgatttgagtaactcactccccatgtttattttttccccttagaccgtacaggtctataatttaaaactcaccttacctagcgttacttcttgagtcaagtcatacaagagaatggctccaggtgcgagaatcattaactaaggatattaaagccataaataagatcttccagaatgtgttttacccatgaagagtgtttcgtattgccaccaattagcgctaagaaaattaaacatcatttacaaacaagattaaagacatttctccttccacaaccaattaagaaaatcagagggaaatgttttgattcatgctcatcatatatatgtaaatatatcacataatggctcatatttagcaaatatgaaataccaaaatacaaatgaaaaatattttggcatctgtccggcccttgagctggctagcactaagtgtgatctgaaagtgtttgagtactgctgttaaacatttaatgacaggaataaattaattagagatatttttatcagaatcacagtgaacttttaaaaacatagagagggaggggcctgtcctggtcactgccatgcaacaaaagatgagaagaaaataattatcaaatagtggataaaactgaagacataaaatcaagaagattcaatcaaagacatgttctttgatcagcgacagaacaaggatatggactcacaagttctgagcaggaagaaaggagctttaaacctgctggcacccatatcaagaatccacgggtaagagaggtcaaaaagaacccatgctttagcttggaccagcaccagctcatgatgctatacaggaggctggggaagagctaaaataatatgcacattctccccaagactaccgcacatgtgaagttacatacctgcagaaagagtacaagagcacacagagaaacctagttcaataactgcatcttcagtattccattggaccggaactggatcttcagcatcagcatggcatggtaaccccaacccactaagacaagattcatactgacttgaaaatgaacgagatcaggtggagacaactacaaatgatgagacaggaataaattaggcagagacagaaaaacaacccctaatcaacaggataatacaaatgaaaattccaaagcaaatgatggaattaacactgagaaggacaataatgaggcactgggttagtatacccattttcctctgcaagaaatatattgatacccacccttgtggctcagctggtaaagaatctgcctgcgttgtgggagacctggtttgatccctgggtttggaagagcccctgaagaagggaaaggctacccactctggtattctggcctggagaattctgtggatagtccgtggggtctcaagagtcagacaggactgagtgacttccatatggagcatgtgtgcaactttcatggctagtttattaatttgagagtgtatgtatacattgtgtattttgagaaaacatgaaactatggtagcaagcccaaacacatgccatactgaattgcagtgatattaaaatatacactgttagcttcagagtcactgacgtgtgattcaatatgcggtttgccagaatttcaagataatttgcctggttatgtaagtacactaactgttcatcaagggtattaagaatgccccatcatgttaccatttataactggatactaatgagagacaagcaaactctacataaagagttaagtgattaaactcagtctacagcttgccagctaactgaatttgggcgaggtgagtagccatctcatttttttttttcatctgtaaaattgatcatgttatatgaatgccttaaagatgaggatataataaaagaatggataaaatactcctgtcttctgcttcaaatctcacaagaaggaaaataagaaagatgatataaattcacatcagtgcttgaaaacaaggaacgcatcattggtataccagagatactgacacatcctgagatgagacgctaataggctcatatta

SEQ ID NO: 39430 - DNA, 909 bp, Bovine  19866880606859
  misc_feature (1)..(1): n is a, c, g, or t
ntgctgctaaactcgggggagaaagagctcccctcctctgagaaggagttgttctcaccagcggtaggctcattcgaaagcatctcaactatgtgcaccaagtgtgtgtgtgtgtatatatgtatgacacacatacccaagagttatatatgttctaattcatatatctctatttttctcctttgaattcgcttaccatctcatagggctgttatagaaaaacaaactgttcttatcatctctaagcttctttaaagatggagtgttcttttattatactgtttaagataagaatcaatttggtatttcctagtcatctgagcactttacacaaaagtcttgtaaattatccttttgctttatgaacttttaagatctctagacaattccagaaactttgaattatgttcttcggtatgactttcactgctgcgaaaagaaagactgaatcattaaatattggcccaagagggttggttcttgaagccagacagtttcaaggaggatttctaacctgatacagtattagtcttctagatttctatatgatttgttctctgagggtaaagcaaagcatcatacttttttgatattcagttaaagaataaaataaaataccttataatcttaattggaaatgccaaggatttgattgaatttctaactcagggtgctattttctattattaagaatgagttgtgctactgttaatgcagcagaaaagaactcatcttcaaaatatcctgggacccatgaaatgcaaaacagaagtgagccacagcctatggtctgggtgtctgccagcaactctcacatctgctgtttggagtgccagcatttggcatgtgatttggagaccctttcttcagaacaagttctgtttggcgaacttccttcctacctttcca

SEQ ID NO: 39431 - DNA, 1557 bp, Bovine  19866880759413
  misc_feature (1)..(1): n is a, c, g, or t
ntgatgcctaattgggcttcctccataggtaatctgaatagaagaatgtatgcagacaaaaaaaggaagagaaaatgaacatcatacttgactcatcaatgtccataatggtaagtattttgggattggtctacaatcaagaatctttaaagaccctctccccacatcttccttcatggcatgcagtgtaacctcagtatgagcatcatccagagtaccttaaattttctgaatgaaggagctatgcctgcaaatatgcctggccagacaattgctgctgcctcaaagcctcaaacaccatcttcttcagaaaaagtcatcaacaaaaacgcaactatacatcacatattgatatttggaaatccttcagattttgaattttgaagctgttactccggagtttcctaatttctgctgtctcttgacagaaaatgtttcctggtcttttcttcttgcttcaaatacagtttctttaagactcctggtttcagtggctgagagaggcaaaggagttgtcactaccgtttatttgcatcatcttagaagagacctaatcccttagtcaagacttgttagactccaatcttagcacaaataaagggaaaacatagagaaaaaaaaaaaaaacaaaaacgtgaatatttggcaagtgttaactgtatgcatatacttaaatacatatacacatgtatgtgggtgttcatttatgtataggcataaaaatgcattaagctactttgaaagttttgcaatctatcattacccagtaacagcggggaagtaagtgggattgagtgggtagtgaatggggatttttaagatttattttatgtacagcagtatagtaattttttcaaaaagtatattcatgtgttgtttttaaatttttcatttttaaagagtagcacttacttacttctcccaattgctcattttccacttacttggaacccaactctgtgtgaccattcgatacaaacaacacacacaaatctcagcagtgacttactaattgttaaattcagtaaccccacttgaattttatttgtacatgatctcctgtagcacctgacactgttaagcatatgctgctctttgaaactgttgctttatgcgtccttaagttctgtggcttcactctctacttctctgtttatcccttattctcttcaatttaatgcaatgttcctcatttgttttttaattgaaagaatccatacaagttcttttaagccgtggattctttttgagtacttttaaacaatatttagagattcaacttccaaccttccaagcagaaaactcagaaatgggcatcgtagtctatcgtaattttctggactgaatttctaattataagatggcacactccaaatcaatttacagtgtataaattaagctctacatgtaaaacattgatcacaaaactgctctcctcacaactttctcccaatgccagctttcatatctcatttatatcatagattcatcatcaaaaagggaaatattagtaataataagttcttctaatggttcatgtaaggaaatttacaacat

SEQ ID NO: 39432 - DNA, 4234 bp, Bovine  19866880768664
  misc_feature (1)..(1): n is a, c, g, or t
nctggatgaaaacgaaatggcagcgtttttagaaaaggaatatataattgctctgtttcttaaactcaaatattcaaataaatactagaatctatggtctttttaaagttgtttcaaggctgcaaaaagaaacacaatacaatgtgaataagggattatgttatatagtcatccacataggcaaattgactggtaaatatagtatagtatgattatcataatgtagattacagacagtataaatttagggaatttcctgcattagagaactaagcctgtacattaagtgagttgcatcagatacttcatatggtttctacaggcaaaagagaggtctgtaaacagatgtcttgagatgacagggaaaagggggaagttccactttgcattgaattccaagggaacatatatttaatggtttattttatggaataacaatatctcttctctcatcttccccaactcaaaccactcccacaaatttattggcaatctttggttttgtgatgctactgacctggcatcacagatagcaaagacagatgagaattaaatgacagtgaaccaaagaaaacttgtgaagatttgagtaaataagcttggataaggcagagtaactcataaaataaaactcttaaggaaaaataatatacatgtatatgtatatgcatacatatatatcacatataaatgcatgatactaattctgaaagaatagcaatatatgtgtgtgtatatatataatagcaatatacatatgtatatatatatacacatacacacatatatatattttttattttaacattaaaaaccaatgagatacgcaattataacagagaaaatgataggcagtccacaatgacatttcagaatcttaatagacaaggatattgtttgactattgtgcttccaaaacttagaaataaggagttttttattgattaagtgtaaaatgtcaccaagtcttaagaataaaagattttgaataagaagactttctctgaaggaatgactaaaactctcaagcattttcagagaattatacttgtttctatacaatggatagacatgtggcttaaacaaacccctggagggaatcttgctaagtgttgtagtagtggagaagatctggcccctgtatgtttacatgatagaatttacttaatatatttacataggagctttccaggtggcccagtggtaaagaactcacctgccaatgcatgaaaagtacatttgatccctacatcaggaagatctcctggagaggaaaatggcaaccattccagtattcttgcctggaaaatttcatggacagaggagcctggcaggctacagtccacggggtcgtaaagagtgggacatgactgagcaactaacacaacacaacaaccccagcctccagcatccccaactcatcacacccctgagaggtcctgacagagcagactcctgatgtacagtgaaaacatcatccatctagcactacatgtatcactctacttacatgaattcatttattcctgggctgagggacttctgtcctcctgaatcccagctttctcactttccacttggtggtccccaaagatgtatccatcagacaaggagaggagacacacagagaggggagggtgatgtgacttgtggctggccacaagtgcagggcatcaaagatgctggcaactccaagagtgggaggaatcctggaccagattcacctgagttcccaggaggaacctgccctgcaacctctgagcctggaattccagcctccaggctgtgagaggataaactgctgtgttcagcccctagtttgtggtcatgtgtttcagccgccctaggtgaccagcccagctggatggacgtgggggaagatgggcggaaagcaggtacagccaggtccgggggatgggttgtggggtctgccctggaacattcttacagctactccacgggttcaaagattttcataacaaaatgttaggggaaaaaaaatgaaatgttagaaaaataaaaatctgtctcttcccacttaaatctgaataaacatttaaaggttaacaagtcaaagaacagcaaaactctgtgcgggctgtgcggggaatcatggccatccaaggtgtccccccgctccccacccccggctccacctcacctctgcctccctctcctgcccccagccctgcctgacccccactgggtcacccgtccttgtaaggcttcagcaggagcaccttattgccctccaagagtgaggctggacattcgtagtgatggagggccgggcaacccgcagcagccaccccgagagccctggagcagtacaactccaaggcagcagaacctccccatgtctggactctgcctgctgtcggtgcccaggacagggcctgacacagactacagtcagcatctgtccattcaagtggacaagcgaacaacagcatcggccaccacccgacagtctcctctgtcccggggacgccgtggtggacatgcggcctctcacagccatttagatgagtccctgtctcaggcagacgaaatatctcttcgctcttttcatgtcaatactggtgctattcaaccagaagaaatatgaccgaacaccagctggaggctggcctcctgcccaccgctcagcggagccactgggcctctgccaagggcggccctggctcctgtcccctcccctttgcgatacagcctggaaggaggacacaagcctctgtttggacttcagcaccaaaacctcctgccgagctatctcaagccagtcactttgcctctctggcccccatcttcagcgtgagatgggagcagcgcggccagccatgggggcatcaagagagccgcgaggtcgtgtggatgaagtgccatagagcgcctgcagtcggtcagacgtttctgttgttattctgatgaccacctggtgttagatgttttctcctggaacaaaggccatgtggggggttgctattgttcagtttgtaagtcgtgtccagctctttgggaccccatggactgcagcttgccagacttccctgtcctcctttatctcccagaatttgctcagactcatgtccatcgaatcagtgataccatccaaccatctcatcccctatcatccccttctcctcctgcgttcaatctttcccagcatcagggtcttttccaatgagtcgacactgcatcaggtggccaaagtattggagctttagcttcagcataagtccttccaatgaatattcaggactggtttcctataggatggaagggtttgatctccttgcagtccaagcgactttcaagagtgttttctaacaacacactttgaaagcatcaattctttggcactcagccttctttatggcccagctctcacatctgtggggggtgaaggaggggaaatacctgtcgagagacaggccacgcccacggagacagaaccaggtcctacttccaggccctgagtaaggagcaagatgctgggagggggcctgcacccttgagaagaagagggtgggaggagggctgggcagaggaggaagtccaggggagtatagctcagacacaggagagatataaccacaagccagagacacctggagccaccagcagctggaagaggcaagaagggtccttccctggagcctccagaatgaaggagtatggcccagcccacaccttgatttcagacttccagcttccggaatggaaagagaatgcattcctgctgtttccggtctgcagtgctttgtcacagcaggcccaggaaacaagtacaacaccccaaacctgcccctcctacagcgtcccccacttgagaaatgactactctttcctggttgcttaggccgataggagaaccttctcaccttcccatgttcttgtcttcccattcacatccagttcatcggcacgtgctggcatctcggggcaagtgcatttgaccaggaagaggactcagccggacgcacctcctcagccccacctctgctgcccagatttgcagtggcctcagctggcctcctgcttgtactcacgcattcattcattcattacaggaattggctcacgtgcttctggaggctgggaacccacaacctgccatctgccacccagcagcccaggtcagtggatcgagtaaatcagtccgagttctaagccctaaaaccagagcagctgatggtgtaaccccaatccaagggcaggaggagcggcaacg

SEQ ID NO: 39433 - DNA, 1137 bp, Bovine  19866880777984
  misc_feature (1)..(1): n is a, c, g, or t
nattattagtagtattcctaaaacctctttttaagtaatagatgttcacatcattaaaaatagaaaatatatataagcatgttaataaaaagaaaataagagctacctaagtgccaatatagaattatcctcttaatattttggtgtctgtctttttgaatttccccagacatctgtgctttttgaaaataataaaagacacatttcccttaatatttctcatattatgtggtctttccttctctatctctatgaaagccaagagaataatgaagttttaatggaggtgtatatttagctttatttatctttcaatcaatgctaaatctagattcctaatttaatttctcaggtccttagatttaatgcatttctatcacatttgattatgtgttaaaaataaatacagaacactgcaaaggaccaaatataataaacacctatctatttactactcaaaatgcataaatattaacccttttctaaatgcttcagatttaaaattattatttaaagctataaaaaaagaaatattgttatgaaattcaaggccctcatgtcaccttcccactcccatccttctctcttcctccctccctccacagagacgatctctgtcataaagtttactctgtaaagttcccatgtaacagcacataaacttctgaaggacagcagctacagactttgaccactggtgtattttaatggtaactgcaatatttgtagtcaaatatgtgttgaatgaatattcatccataaaccatattctaacacatatatagttttatctaatatgtaatacgtgtttgtgtagatgtaatatatataatggtatctattttatgtagtgatatttttgtgtatttttcaactctgtatagatggcatcatactccagatatgtagcaaattctttaggttacttttttcacttagatattaagtatcatataaatggagaaggcaatggcaacccattctctgtcctcttgcctggaaaatccaatggacggaggagtctggtaggcagcagtccatggggtcgctaggagttggatgcgactagcgatttccctttcccttttcactttcatgctttggagaaggaaatggcaacccactccagtgttcttg

SEQ ID NO: 39434 - DNA, 3163 bp, Bovine  19866880791854
  misc_feature (1)..(1): n is a, c, g, or t
ntactactgaacacagtcttaagcttgtagccatgtagcatttgtctaaattcttgagggaaatctggatactgcttcatatgccttcttagtccatgcttttggtaattcccaccaactgattcacactggcactgctattggccatctctgccttagaggcttttttcatgcagctttttgaagtactgcctcttaactataacttcagtaaaattggccctctgatttccttagtgggaaatataaccttcgcacccattaaaagacagtaaaatcaaatggtgctgtaatagcaataatatgtacccttaaaaataatttactaaataataatctgccagaatgtatctcttttaagactgaaaaaataagtttctccttccctttggcccataaaatcttaagtttaagcagtataattgtagggccacgccttcactctgaacaactctagctcttgaaggctgtggaaacctttgcctaggtgtgacttatctcagtcatgtgttgtgtaaggaaaatgatttccatatgtccctgctatttcacagccaaaactttactgcacaggttgggcaaatgcttcccatagggttcattcgcctggtttcaagtcatgagtagaaatgctttgtattggagaaaagaatttgactgtcattacagtgtgtatacacacacacacacacacacacacacacacaagcacactcatgtgtgcatgtatcctctttgtcttgcaatgatttaaagtggttttcagtcattaaccagttatatgtgttttaaggaaaaggccatcatcagtgtttaaatcagtgttgcatcagagacaaatattaaagggaaaatagctataaaaatttattttgatatgtgtcttagaaaacctcagcggtccaaatatgttgtttgccttcctgtatttccagcccccccagagcaacagcccattccaaagccaagcaattttgaaaatttaaaacatattttattaatagctcaaatacaggaagaacacaacagcccttcctggtgaggtaattggacttgatgatttgaattaagaatatgctaacatctggtagtaccccaaacacagcctattagaaatgaaataggctaatctctgaagtcattgtcatatttttttgttttttgtttttttaatttttatttatttattttattttattttttaactttacagtattgtattggttttgccatatatcaacatgaatccgccacaggtatacatgtgttccccatcctgaaccctcctccctcctccatccccgtaccatccctctgggtcgtcccagtgcaccatagtcatatttttaatatatgttttagaaacaagaagtctactcctccaacagaaatctatataattaaaaaaagtttgattataatgctgtacccaaacttacagagatggcagtcaggcacacgggcttctgaagagtcccatggccagtcatgaagtgaaaacagaaaatgtctttcttctgatgttatgtcaacatgtttcaaacaggtcagaaccaaagtactatatattttgcagcatgatagaatttgtgttaaagtacacagataagtagttagatgcaaagttaaacccagccaggaacttgaaacagttccttcatcatgttgttattaagacattgtcagatcttgaaaggagttaaattatattgttgcaacttaaaatgtttacctttacatgcacacaccaaaaaggaaaaaaaaaaaagaaagaaagaaatgaaaaagaaaacaatatacaaaatttctttcatttcaattatcacgaaaggcctcagcaggggttttcatttgataaatgcaaaaagacaacctaataacagcttgctttgttccaaaattaggaaaggaaaaaggtgggaatgagcatgtcacagagttcttagaaaaaggacagtttgttttcaggactgaaaattagagataatttgttgtccagagcatggaaaattactagtaagtttatagaaattattcctaaaagtggcttcagacatcactgtgcccactgctggttgtttttttacctcactcagcaaatcttctttaaaaggtgaaggctttctattttaggtttctcaagaacaaccatatctcaacaatgttcttcccagagaatgtgcctgaagcttctgttctttacctttctatcatggaaaaattcatcttttatctagctaagagaacacctctcagttgcaaaataaaataaatcaacattcatttgtacagcagagatttttgggggtaatttttcatctttgtatggtatcaaaatttcagaaaaaagtgcaagaaaaggaaaaaggaactcttgtatattattcaccaattgtttatattttgcttgttttgctttctaattctctctcctctttcttcatagacacacacacagaaatacacacacaagcatgctatattattttgggggaaacattttagagtaagttagagacatgtgtctccaggtccaaaacaacataacatcgtttttccatttcccatatttgtgactctcttctccaaaactaagaaacttgcttctattatccttaatataaatactgatttgctcaagtttagaacatatggaacagtctcagaattgttaattgtattactgcaaaacacagactcactagttagtgtttgcatttgtttatagttttttgatgtataaatccatacagtggtgtgaaaaaattttaagtatacaatttcatgagttttgacaaatgtatattatttatctatcctaccactaagatatagaagttttctatccctttgctccttgctaatcaatccccactccaaagcaaatttacctaaaacaaataagataaatgaaagaatgaaggtaagactagagaaaagtaagacaagaaatgacaaacaacagagaaaaatcatcaaaaccaacagctgaatctttgaataccacaataaaattgataaatccttaccaagactgatcattattagaaaaaaaaaaagaggagacatgagcataaatcttaaagatagtaaaagattgcaaggagatatcatgaataatgttattcaattttgttttaattggggtatagtgctttccaat

SEQ ID NO: 39435 - DNA, 1703 bp, Bovine  19866880821707
  misc_feature (1)..(1): n is a, c, g, or t
ncatatttgaatttcacattattttcataggtcataagatatttctttttcttttgatttttccaaacaacattttttaaaaaatatttttagctcaaggatggtacagaagtaagcagtaaaaatggttctttcaacctaatcaaatgtatgagtgatatttcccatatttccaatcacattacttattaagacattaagcaacttttgattctaaagttgacatattaaaatctctgaattaagggaagttagggagaaaatgtccttcagccacaatggactgacaaaaatctatggaaaacaatgatgatgactttgatgctgacaagaaaaatatatcatcattatatggaattaacttgaggcctctgtcagttatcaaccacttttacttcatagaaataattaggtagttttctcaaaaagaacaaggggaataacacatataaatgttctctgcctactctacagttttctttatccaggtttccctagaaaaaacaatttttccttctgtgccgcaaaagaggaatagaaaatattaattctttttcagccactgtaaggatatctgtcccctgtaaggataatcagtggacaatgcattgtcatttccattttcttctgaatcactaaaatatggatgaaatgatactaaaatatgaaaattaaagctaccaagaagagctttagagtcatgattacaattaatcagatattcctataaatcagaatgtacatcaaaatggccaatttggaacacttaaaaatggataacaatctcaaagaactttcaagctgaaatggtcatctcggaggaatgactttcttaaaatgatgcttccagctcagatggtgactcgcaggtgaggcagcctaactgtttgtgctattttgtctgacagagaaagcagtggctttagttttgtgtgctttcaattcacttgagtaaaaaaggcacacaaataaacacatgtttacctttgcaactaaatagaaatgattttccttttctgctttatagagtttagtaaaaataagttggggacttcacaactgcagctttcctcagctttctagaacagctttatcttcttcaatgtcttttaataggtttacagcatcaaagctagcaatgtttaataaagccaataaataactgcattataaacttgaatgtttatgttgcaaaaaaggtaacaaattcacccttggtgggaggaaacattttacagtacatgcctgaaagaaaggagatgaaaagcaactatctcttaacagttttaaggctagttgaattactaccattttctcaatcacatgaagcagtaagaatttataataaaagagtattgtctctgtgaaatgaattgcagattttgatcactgcctctagcttaaccacatattccctatctctacagatagcgtgcagtaaaatgagaaaatattgtagattctgaagaaaatgcatactaattttgacaaatatatatgggttacaaaataaaatttgattagtttccaagtctctaggcaaataaattggaaaatacataaacatgaagatacactgaagtttaagaacaagtgggatgagttgattcaaaggacgatgtattaaaacagtgacacaagaagaaggtgcccaggagagtagggatcaagaaggtccaaaatacatgaatgcagaggactga

SEQ ID NO: 39436 - DNA, 1565 bp, Bovine  19866880885687
  misc_feature (1)..(1): n is a, c, g, or t
ncgatggaaagtttagacatattaagttttccaagtgaagaatctgcttccaactgtacttcaaacagtgataaaatcactataataatatctttgtactataaaacatgctgaatgcggcttttagccattatctgcgttgttttactttgctcaaataaattaaaactcagccattgatctgagataaaaattaccattttaatatgcacttaatatttggtataattttagaaagcagtacagttagacttttgatctcaaatgagcaggtgataaaagtgtcatgtaagatttgcttatattttacaatttcattaaaagaggattaacttttcagagaaaatatgagaaaaaaactaattaaaattaagagcaccaataaatttaccttagcagtgtcacataacattttgcaaatgcaacagaattgtggtagcaaagtgaatcattctaggaagtcttaaaacaaatataggaaaatccattcttacacaagtcagagcaatcactctgatttgtcaggcacacagggaaacagtgaaagagaaacaaggagttgcctctaccagtagattctaaaatgactaggagtgcccatattgctaaagtaaagtgaaaacatgctttaatttcctttgacagttttgcccaaaccataaatcagacctattcctttcaatgtttctcaaaaaagtagggctgaaaaccagtagctcaagacacaagatattttagagacacaaagttgagaaatttcaggtttgaacagaatcttagaaacaagattatctttttgaacatactcatactaacactgacagtgacctattcggcctaagacacaaaattatttggcgagatttaaattggaacccagccacattggtttccacgtgtgttcctttatgggttacttgctggaagtttctgatgtacatgcttgttatctgtatagccccattcctctctttgtctgtctgtctctccctctgttttcattttattattattaatattattacatctggagactcctatgattctagaaagtctagtcccactctttgatttgggagtagaacgcgacttgcccaaaccattttgtttatttcatcctatcagccatggtgatacattcagagacaaacacatgtttcagtttctgcacatcaaaggcaactattagcaaggtgaaaagacagccttcagaatgggagaaaataatagcaaatgaagcaactgacaaacaactaatctcaaaattatacaagcaactcctacagctcaactccagaaaaataaacgacccaatcaaaaaatgggccaaagaactaaatagacatttctccaaagaagacatacagatggctaacaaacacatgaaaagatgctcaacatcactcattatcagagaaatgcaaatcaaaaccactatgaggtaccatctcacgccagtcagaatggctgcgatccaaaagtctacaaataataaatgctggagagggtgtggagaaaagggaaccctcttacactgttggtgggaatgcaaactagtacagcca

SEQ ID NO: 39437 - DNA, 1884 bp, Bovine  19866880887660
  misc_feature (1)..(1): n is a, c, g, or t
nctattgtttgcagctattgtattactcctgatctcatcacttattctctcctttgtctactagaatcagctgaggtgtttgtgtgtgatttttaaatagttttgttagtcttctttttgttgttgttttatttttatttttttcatgacagcaccttgtagggcttgaccaggccctcatcagtgaaactcagagtcctaaccactggactgccggggaattcccatctgaggaattttttttaactgatgctcaggccactaacccagaccaattaaattggaatttttggaggtaaggtccaggcatctgatttcaacatgttgtcaaacttgaaagccaattacctagatgatttgtcctctccaattctgtaaggccaagtggaaaacatggtctgaaagatataccagaaaagatcagtgaagggggggcaacatcttctctaagcccaagttaaagggatctttctgctcccttttgtgtgtctcttctcacaatatgcagaaatccaaagagccaatattaggtgctgacctagataaaagaagcaatgacaaaggccactgaaatctacctctggaccagaactttcagtaaaaaggctaggagtgccttctggctaagtagattcattccagcttctcagaggtaggaggttctagaggcatttgagcacagagtgctatctcataatagataatgtccttttctttgcagatttctctatgcctctattctccagggatctagcatacaaattaggatgggcatatggatatctggtcctgatcatctccatcacaactgaccatgagaccattcccacatcccttgtccatgcttgcttccctcgtgggtaaaccagtcattttgttcctgaagacacaaggtttctgtggttaccatgctgttagcagcatagctcttctcttccaatgcacacatcatgtcttcacaccagattcagtttgccaacatctttgcatgcatgtaccaatttattctaataggaataagtattatcatgcttactttcatgcctgcctatcattttctttttcctttttgataatagtaaaataaggaccccagattaattttctatcttagtgttttatctcctaaaatttttacccatgacctaggttacttagacttttgccgatctgccttatagttattttccataatcactaataagttctgcatattaaaattgtagactgttcaacattgccatcatgttgaaatacatctctatatgtcaatatagccagctgagtaaacattaaagcataattgaatttttcagcaatgacattttaattaagaaatgttcttgggcttttaagagttcaatatatttctttgtaagaatttgccccctcagaatttgcttgaaaaatatactttggcctgctactgaaatcacttaccactgttttatcccagtagtatggataaagcatatcagttagagtcaatgtaacctagagcatgaataaaaattttaggagataaaacacaaagatagaaaattaatctggggtccttattttactattatcaaaaaggaaaaagaaaatgataggcaggcataaaagtaagcatgataatacttattcctattagaataaattggtaaaggcattgatacctttagaattttgttggtcaatatttaatacaaaacagtaagcacaaaaatggaggccatgaagtaaaccaatactgcatactttacaagatcattttagttactttagctgtctagatctagaagtttaacttatatgtgtctaacagcaggtgaatctatttttagcctgagataaaatagcatctttttcctctaattatgctctttgggaggaaaaaaa

SEQ ID NO: 39438 - DNA, 2297 bp, Bovine  19866880895563
  misc_feature (1)..(1): n is a, c, g, or t
nattggagtttcagtttcagcatcagtccttccaatgaataatcaggactgatttcctttaggatggactggttggatctctttgtagtccaagggattctcaagaaacttctcccacactgcagttcaaaagcatcaattctttggcactcagctttctttatagtccaactcttatatccatacatgactactgaaaaaaccataactttgactagacagatcagtggccttcctttataaattacagggaggaaaaggaagaggaaggacccagtactgccatttgaagatcaaagacttctcatcccattcacttagtgcctatattagtgactccttaattaggttctagaaaactttagggcccaaagggcctatgagttaaaaataaagaagagtaatgaactaaaggatgaaggttaagataaagcaggcatgtcttagaagattttccacaggtggaacaaaggaagagcaggaatgattaacaagctctgtttttttgttattttacttccttcagtgaattcaagacttcatcacatgtatcatttgcttgaatgaacttagtagatttatgctgtgggtcctcatatacctgttaccaatttcagagttgcagctctagacagcttgacaggctcctccctttcagagcactgtcataaagcaagagtagttagcgtgaggctcttcagcagaagaaatgcacatgtaagagcttgcatttgtaggctttaatgaagaatggaagaacagaggtgacttcacaagactattttcccagcttattcccagctgtttatcacaataatttctgcctaagtttttattcaagcagggaggaaaaagtgaactgcagagctatgtcttcccctgttaaaaaatcagcattttctcttcacagtaataatggaaaatgagccatctagagagaacactcaaaataatctatttgctgttttttttttttaatttggtttgttttagtctatcttttatgatttctccacaatctatgttaaaagaaaatccaaacttgactgctaggaaactaatttacttcagtagatttcctttttataattgcttaatgaatattgatgaaatgtattgagaatcactcatttccttctattacttatcaattgaacttgctgtcttcaagttctattgacagtgtatgtccctcgagtttaaaggagatgtactgaaatatcatagtatttgggtgtttgttttttgttcttttagttttccctttttttttcttttgggtagtacaaaatcttcaactacatgccccaaaagatggatcactctaaaactatccagaatggtttgtaaatagcatcttaaggaatcggtctgcattgtgggagctatctgcaggtcagaaagagctttataaagatgaagggctgtgaggatcatactgctctgttctaccgttcagagatgtgtttattaagcacaaattcatggtcttatggaatatagggctgcaccaggccttagagattctctgcccttcattttatagaagatgggcccgtgacctagtaagggaaggtgactctgccagtactcatggtgaaattagcaaaaaaacaaaaacaaaaacaaaagccagaacaaagacccctgtctttgggagaaactatttgtggcaagtataactgacaaaatatttctatctaaaatatataaagaattctaggaaatcaattttaaaaaagtaaaacaagttcattaaaaatcagaacaagatacatttattcttcagatggaccttctgctatctcagaaacttaaggagagaggcttatgccagtataggttggttttctttgaaaagttaggtcagaaaagaacccattcaggtgactagagccacctgattatcaagaactcatcttcttttctgttcaatacactttgttcttacagtacaaactacctccctttcttcaggctttaagtctgagttccagaattcaaaaaaaaaaaacaaaaaaacaaaaaaaccagaagggaagttccagggactaaaataaaagatgtgcaaacatgctaagtcatttcagactctgtgtgaccctatggaccatagcccaccaggctcctctgtccatgggattctccaggcaagaatactggagtggattgccatgtcctcctccaggggatctccccaacccaaggatctagttcacatcttttctgtctccttcattggcaggtgggttctttacaattagtgccacctgggaagcccaaaataaaaaacacac

SEQ ID NO: 39439 - DNA, 937 bp, Bovine  19866881028017
  misc_feature (1)..(1): n is a, c, g, or t
natttggaaggttttgcctggcaagtggaatctgctattgaggaaaggagcccatatgttatgtgggaaagaatgtggatgagacttaaaagaacatatttgtgtaattacccaatcatataatacagattcagccttcactgtagggtgcctctatctccatctctatatcaaaggaagcagttcaagtagatgtttttaagtgtctgattcaactctaaatttcagtgatactgagtaggaaaaaaattgtaattttttgagggattaatattagaggttaaaaatatatatatttctaatggtagaatgtctctaacatagaccagtatcatccaggaatgctttaaaatttccttcatttctgaaaaaaaaaaaaaaaatgatgtaaaatcctatgttttagagtttaaattagttcttcttgaatgaagataatgaatttgatgaatggcttctagtatttcagaaaccagtataatatttttaatgaagtgacaaaaaattactttatttttggtgaaagatactaggaaacaaaaccaaccatcaataaaaatatcatgatgaaaattcctttaaagaaagaacattttagcataaaaattaggaagcacataattgtagggtaaaaagccaataatttatgctgaattctttatgaaagaactcattcattttcctaatttatttcatttggccattaactgtgaaaacattatctcggaccagcacagatcagaggattggctttcaaaagccggtggattagatgacctctcaatttctgtctcttaatcccatcatttccttaaatctgtttaattatcctgcaaaatagattcacagcggtggcttttgcaatttcttcttgatttgagcaatttccctgtcccttagtttaagtttattctatttgaccgaacattgtcattga

SEQ ID NO: 39440 - DNA, 1303 bp, Bovine  19866881095550
  misc_feature (1)..(1): n is a, c, g, or t
nggtccagtgtcggcgatccaatgctccgaccttcaggtgaactttaatatatccatatttcaactagggaatttcaaatgaagcttgctcttggcttggctttgtgtttccaagcggctcatagctctttgtctgaaagcactgggtatagcaatgaactcacaatggtatctcaataaatgctggcagaactaaagaagaagccaggagcttctccagttgacattctatcagagtgagcaatattgcctaaaatgctaccccttcgaacacgttcaaggactcacagctgggatgctactgcctgaaaaaagtacaatcacaaatatcaattttcattagttcttgaactgacatcttggtggctgagtagattagaccagtgtcaacttacagtgattttcataatccacaattattttttttcaagcaggatttttaagagattaaactgagatgaaactatacagagtagcataaatccataaaacaattatttttatcagaataagcagtccatttagggtacaaggaggacaaaagccaagatgagctaaatatccaaacatgaactaactttctaaagttctagtctcagtatatagtcttgctgctgctgctgctgctaagtcgcttcagtcgtgtccgactctgtgcgaccccatagacggcagcccaccaggcttccccgtccctgggattctccaggcaagaatactgggaggtggggttgccatttccttctccaatgcatgaagatgaaaagtgaaagtgaagtagctcagtcctgtctgactctgagcgaccccatggactgcagcctactgggctcctctgtccacgggattttccaggcaagagtactggagtggggtgccatcgccttctccgatatattaagctagaaggttgttaaagaaaatactacagttaacagaacattttgaagagttttacaaatctttatcttcataactggacacagtaaacttggcagaaatgaattaagtagacagtttctttcaaacccatgcatttgcaaagagcctcagtacagaaagtatttctggaaaccagtttcaggcacatggagttatgaaaaagacagagcttattttggcacatgggatcctgaggacatgagagaagtggaagttagggctgaactaaactgatgggtaacttagatttattgactccatcagcaggtatttgctagatgtgtgcgtgcatgctcagtcacttcagtcatgtccagttttttgtgaccccatggacgatagcctgctaggctcctctgtc

SEQ ID NO: 39441 - DNA, 990 bp, Bovine  19866881203233
  misc_feature (1)..(1): n is a, c, g, or t
ntttcctgaaaatttaaagtctggcacaatactgcactaaaagtccatttatcttgtctatttttataaagcctcactgcagcatctggcacaatgcccacttccagtaataaaggtccccaaggacacttggcaagagagacttttctcccaagaccctgaaaatgatcctgagcttcctaacacacgagttaaaagcttgactaagatttgtaatattatcttctgtgttatttttttaaagtcggaagtgggtgaaaattctgtggaggtgaagggaccacaaagacggcaggtctctgagctccacctctgcattgactaaaatcaggggcttactgagagctcaagatttctctgttattatgaaacataatggctaaagactgtctacatggggcagcgcaatgattcactcttgtttaatcaactacaacctgtgttaagctctatcctcatctcaatataaaccaggttaatctttccactttcctgcaggaaactgccatggcgcttgtttattcgactcccctgatcttgagtaaatccttcccttctcttccctcctcccccaccaatcattttgggggaaagatttccagcacttccaatctaagactgattgggctttcctgttgatgtcaagttgaagcattccactgaaaaagcaacctcaagacttgacttttctcgtggctctgagctgagcaagtgattacaccaagcgtatccctctttcattctaggagagagaaatagtctatgaagaattgtttgcttggaatgtttttctgaggaactaaacacttgtgtcaaagacactacagacgtgctccatccagtttgatatgatgttttcccttttgtgaccacagtttcacttaccagatccttcttttagcatggggtacactaatgggaaagtcacttcatcagttctgtgacattcaaatcaatgggctattttgcctcagtgatttacctcataaa

SEQ ID NO: 39442 - DNA, 720 bp, Bovine  19866881208780
  misc_feature (1)..(1): n is a, c, g, or t
ncgaagtaggtggtattcatggtacgttccggtgaggaatcagtctcagaaagattgaacacctcccagaggcccacctccaaatatcatcacatccagaactaagtctcaacacatgaattctgaagggacacaaacatttggtctccagcacccaggatcacatagcaattaaataatagactcaggaaaagaataggtgagcatctaaccctaggtcctatgcttactctgctctggtgggaatcatttccttttccaaagaaatccccacacaacatctgcaccacactggaaatatttcctcatttctaaagccttattttccccctctttttatacttaatactatgtttgaggtgggcaatcaataaacatttagcaaataagtgaggaaaaaagaaaccttgtacacaggtatatgtgcattcattctatgtcttctttgtacaaactgcaaaacttaatagtaagagcctgtgaatataaataatattcataaccaaaaaagagcttagcagttcaggaattgtgacctctgaaaggctgtgtcccctcaaagggcacggtgtgctaatcagcaaaatgaaatctgtggattctgaacaaattgaacatatgcatgaaaaatgtttctaatttttatattattaagattttataagatatgtaatgattctttggcatactttgttacaatgctcattataaaatctgcaa

SEQ ID NO: 39443 - DNA, 849 bp, Bovine  19866881237466
  misc_feature (1)..(1): n is a, c, g, or t
ntgcattctaggtggaagtttaggatggaggcttacagggtgaatttggcagttgtctttgttttatttagcctgcagaaagtttatgtaaacaaggagatattatggttgatcaaatcataactagattaacatctaatatcttacctagcagctttattgacttgtgtgtcctgtctggccttgaaaagcagttgagtttttgaatcccatgagcatctctttttgtaagtagaaatggaaaaagaacaatgacattgaaagagaatggacaggaacaatcttgaagcatagattacaatatttagtcatgatgcaatgaatagtccagaagtattttcaaaatgtttgagcttagtgcatattactatgcacaacatgatcaaacagaccccaaactaattccaaaactcatgatgtgtgttttacaagttgagtacagagtaaatattataacttgcatgtataccttgcatgaacaaaacagatggaattgtgtctttggttatgtctcagaaaagtttcaaactcttctaaggtaattaatttaaaaaaggaaaataaacttgaaatattcctaatgcaacaaagcaaaaaaatctaatctgtaatatttttccaaatgttggaagttaagtcttaacaaacccagcatcataaaactgaccccaaactatttctatggttcataatttgtgttccatgagtatggagtaaatgttaaaacctgcaggttatatctcaggtgaagtcgaacccatggtggtttggaacttttccacaagatcactttttacggaggggggaagtttaaggaatatatgaaagatatatgagggctagaaaatt

SEQ ID NO: 39444 - DNA, 1845 bp, Bovine  19866881269678
  misc_feature (1)..(1): n is a, c, g, or t
nttttgggtcatgttcaatttaaacacactcccatactctataacacatttgcaacatcaaaggataggaagcaggagagataatcaaatgtaatacttgaatagccaagttcaaatccttttaccgtttactacttataagcatttaggaagcccctgccaggtactaatttttacattaaacctttcctctgctatcctattttatccttttaacaaccttacaggatggctacactttgagcacttatttaacaaagaaagttaagaacccaagtcagagtcagcagctgaactttaaataagtcatttgttcctgtgaaatttaattttgtatttataaagcaaatatttttattatagcttggtagtttgttgttttgctttgtttgttctatttgttgtgagacatcattaaatgagatgtcagtgtgaacttgatgaactgttaaatacagatatcactataaaaacttgcatgaatccatgaatagaccctctcgatatttctctatagctaccctcggtggagaggtagaataaggtatattatgattatggactttttgaatttaggttgatttagaatcattagagaaggaaatggcaagccactccagtgttcttgcctggagaatcccagggacgggggagcctggtgggctgccgtctatggggttgcacagagtcagacacgaccgaagcgacttagcagcagcaggctcctctgcccttgggattctccaggtaacaatactggagggggttgccatcccctcctccagggcatcttcgcaacccagggatccaactcatgtctcttacatctcctgcattggtaggtgggttctttatcattagtgctacctgggaagcctgtgttgaaagatctcctggagaaagcaatggctacccactcgaatattcttgcctagagaattccatggaccctggagcctggtgggctatcgtccctgggctcacaaagagtcagacatgactgagtgactaacactaatcggctatcctccaatataaaacaaggaggttttttttttttgtttttgtttttaaagagctaaattgtcttgctgtgccttccacagccagctggagggcatacctttaaaggtgggagaaggaggtttccatgagattttcagaaagggaaagtggcatccacagagagcatcccaaactggttaagtgggagatgatgggtccccagtcccttccccaggactgacttcccctccccttccccttccctcttcactgcctgcctccaggaaatcacccctccatggccaaccactctgacccatgtcacggtactgttgggcagttatgtctctgcatctgtgaacgtcttgctggctcctctccctcgccgccggtccgtagctgagagtgttagattgagaaggggagcacgtccctgaacctgcactcctgctggcttcacttgctcaccgggaggtctgcgcccacgtgtgtgttgtttcagaggttcagggagaccttgattctcaaaatgcagactttttgtaattcactagttttattttactagtcccttgggacttcagtactaaaggacttcttgctgcttttttattcaaaggagtacataaaatgcagatatacaggttaaagaataataataaaataaagcatccatatattcagcattcagcttgagaaatagagcacttccaggacccagaagcccaggtggatttatccccaacacgttgtaccactgcttcctgagtttcatgctaattccttccttactgtttttttttttttttaaagaaggttttaacaggtgtgtatgcattc

SEQ ID NO: 39445 - DNA, 1845 bp, Bovine  19866881412060
  misc_feature (1)..(1): n is a, c, g, or t
naagaaaaagaggagcatgttacgactactcaatcatggtgatactttactttctatcatagttttctatcaccctggaaaatgggcagacagtactgccttcattctacaaggtgaaataatggagacttgggacagtaagagtgacatgaggaagataagccaattagtgctttatccaacctaaaccagagtgggagggagatttgactccaagggaccacagggcactgccactcagaagaaagttctgctgaaaccagacagccttgtgcctgtgccagacttagttaactccacccaagctttccctcccactagacttaattagtcatggctggtaccatgcacatttaagaatcatgtgtgtggaattcattacaatacaagatacactagctcagagatgcactgcttccctcagaaaggggaaagcattcccacaaatagcagagccttaagttgcagatgatggaaacccaagagcagggaggagccaggaatgaggaggtaggagcctcagtgagtgggttggatgtttacttgaactccttgcctcactccatccattttattactaaccggtgcaggacagtgatttttacctgcgcgatatttcccttggagatttagttcattgggcagctaataagttttgggggatctgagtgcccctgaagcttagacagattttgttagaaaaagattcatcttgcataattttacaatgtaaattaagcttaactttcagtatggtggctcagaacttttagtactgggagattgctggtctgatgtgaagaactgaatttactgtgtgctcagctgtgtgggggctttgcagcatgctgaaatgcctaaattgtttgtgactcaggaaaagaataagcccagaatcggaaccccaatatatatataccccatatatataaatctgaattctccattttccaaaatgtgttggacctccatttagaaactgaggaatcaaggtaggaacctaaatatataggaattccactgcatctataaataaggaacagagaaaatgaagttgtgtctttgaaaatatctagtctgtttttggagagctaaataaatggagcaaaaatgatgtattggcttatagaattctggagacctttaggagcccataggagatatagtgcgttttctcaggttaagtctctaccagttacaaagcatctaaaacctcactgctgtaggaacagaaccaaagtctagaaattgggacctacaatccaagatcgaaagaaatgatatcagtactaagtaacctggttgagtctagaaacattttactcattaattcttctttggcttccctcaatgttagaggaacaacattcttaaggcaaaacacctttgtgtaggtgaaataattaggtactaaacacattataattacaactcccacatatctggcttctgagtaagcaagtgaaacagaatggaatactaaaagatagttagtcagtgattgggatttcagctgaaaccctctattcagttcagttcgcttagtcatgttcgattctttgcaaccccatgaaccacagcatgccaggcctccctgtccatcaccaactcctggagttcacccaaattcatgtccattgatttggtgatgccatccaaccctctattaggacagctttgaataactttccaaagcataggtttcagggagtcctgtttaactgctaatccaaccatctgggtcactctggctattggtacctaggaaggaaatcacaggggagctaccagctatagggtagaggagaattaggggaaaatgacctggttagtctggggggaaat

SEQ ID NO: 39446 - DNA, 1096 bp, Bovine  19866881423062
  misc_feature (1)..(1): n is a, c, g, or t
ntaaagcactacataaaaacactcttttccaatgatgatgaaaacatacaataaaccaaggatagattacattataaaaatcacatcaaaagaccttcaatcaaagctagtgataaaatattcaggcacagaaaataggaaaggaccacaggttgttgttgatcaaaacgcaagagacagagggggaataaagaaacaaataaagtactgttgcatggctgccaagcataaataagagatcctcagattctgagagcaaatgagagggcctgggaaaccacaggcgtttgagcaccttgttctttttaaagcagtttacaagacaaaacaaggaaacaaatgtaaaaccttaactacagagaaagaaaaatcagaatatcacagagctagctaaagagtgacatagactttattttccgctagtagcagacttaaaagactgccagtcttattgaggataaggatagggaattaattaaaagctgatggagctggtcagatggaagaaggagaatttttttatgactctggctgagacatctgtctgtcactcattagtcccaggatggattgggcagacctggctggtttatctgtttcttcagtcacagccttcctgaggctgctgaattaaagaattacagaaatttgattttcaaacaagtttttataagcttcaggcctcctttgctagaacttataaagaactgtttaagaaatagtttgcaactccaagttaagcaaggttaatatcaaataatgacagccaataattgttctagaaaagttcttaaactagaagcccatggacaatgtggttttcaagaagaccaatccctcacccccgcaaaaaaatcatatgtataattttgtgtatggagtgaagtctgccataaaaaaattagtgtaaactgagtgacttcaaccgcagaaatttgcattctcacaatttgggaggctgaaagtaagtgctcgatcaagggtcaaggtgtaggcagcactgacctcctttgaggcctctctccttggtttacagatacgtatcctcttgctgcttcttcacggggtcttttctctctgtggatgtatacttgtt

SEQ ID NO: 39447 - DNA, 1707 bp, Bovine  19866881854671
  misc_feature (1)..(1): n is a, c, g, or t
ntgtactctaatctcttttaaattttagtcttatctcttacatttaagaactgaatgtcagttttggatctatgaacagtacaggtggatcctctatgtagtttggtcaccccagtgcatagtttcttctctttcttctgtatttatgaccaaagcacaggctcactttgtacccttatactgacaatttataaccagctcataaatgccccttatcttctgatttatggtggactgcctcccaccccccgacccccagccacttgctgtccctgacttctttctcctggttcccattcattgctcttctcaggcgaccagtggaaattcgttagcttatgtacctgttgatagaggaaagtcagcatttaaataatgcttatattatctccaagctcttgatgccagcatactgaaggatggaagataactacttgtgatagtttggcctgagaactgcttcaaacatcactgaactttgttgacaatttcaggtaacactcgccagaggaaaaataaaaggcaaaatgagttttggtaatgaaattaattgagggaaagctagtctaactgtcaaaagagaagaaccttgagaagaaaggcagcctctaaaggtcaatacacagcgtgctgtaatctttaccatctgtgttcaggctggtgaaattctgagactgtcatatgcagtctttttttctgaaaataacagacaaggaggaaaaaagacttgcccaacagggaacctggatgtacttagctggatagaaaacgaaaacactatatggtataaacttaggatgacccttaattttccttccccttgacctacatgggtccacagatagtttcagaaaagtagtaccgtggcgaattgaaataattccatcaccaatgaaatgtaatgttatatttacaagggtggaacaccagggcagcttgacaatgtgaacattctccatcgtctaactctgttctttgctgaaggttagaaaggctttctccattttttttctaatagaaaaaaaaaattaaaaagtaagtagaaaatggacttggtttctctttatataaagctttgacagatatattagaaatctgaaatgttgggactctgtatatagtgatgtgaatttctcctgttagaacaaaatgtagaggtttgatacagaattttgataagatttaccaaatataccaagtgtcataaataattccctacactcccttgtctatgaatatgtagtgcttttgcacaaatgagaaatgattgaaaaagaaaaaattaaattctatataatacttatacatgtggatatataagtttatatatttgaatgcatatatgtatttatatcaatacatgtatttgcatacatatatgtatatgtaaaaattacaaaacattgtacactattatttattagttatattattatgcatcaactataactgactttattgaaattttatgtattttgattaattaataaaatattaaatacttttcctcccattattatatataaagtcaaatgtgttcaatattgttcttagagtatcaattttctttttctaaaaatctaatcctttagagatttttaggtctagcttttccagggtatcacgtctgtttattatctcatccaaagacctcattttaatgcagatacctccgtttatccccacaacatccagaattcataaata

SEQ ID NO: 39448 - DNA, 1164 bp, Bovine  19866881884283
  misc_feature (1)..(1): n is a, c, g, or t
naatgcatcatgcaaaacgctgtgtggaagaagcacaagctggaatcaaattgctcacagaaatatcaataacctcagatatgcagatgacaccaccccttatggcagaaaatgaagaggaactgaagagcctcttgatgaaagtgaaagaggaaagtgacaaagctggcttaaaactcagcattcaaaaaactgagatcatggcatccagtcctatcacttcatggcaaatagataggggaacaatggaaacagtgacagactttgttttcttgggctccaaaattactgcagaaggtgactgcagcaatgaaattcaaagacaactgctgcttggaagaaaagctatgacaaacttagacagcatatttaaaagcagagacattactttgctgacaaaggtctgtctagtcaaagctatgatttttccagtagctatgtagagatgtgagagctcaactataaagaaatttgagtgtcaaagaattgatgcttttgaactgtggttttggagaagactcttgagagtcctttgggctgcaaggagatccaaccagtcaatcctaaaggaaatcagtcctgagtatttattggaaggactgatgctgaaactgaagctccaatactttggccacctgatgtgaagaaccgagtcattggaaaataccttgatgcttggaaagtttgaaggaaggaggaaaaggagacaacagaggatgagatgtttggatggcatcaccaacttgatggatatgtgtttgagcacgctgttagttggtgatggacagggaatcctagcatgctgcagttcatgaagtcacaaatggtcagacatgacggagcaactgaactgaactgattgtcatatacagcatactagggctatactagaatctcagatctctagagaggtaaaacgctcattactaccaagcaataacttgtgcactactgtcttacgaatgctgcaaacagtcttaatacattttggaagtgaggaaaaaaatgcacttggtgaagtggtgattatttagaaatccaacatcttcagtcccaaaagaaagacattagggtctttgtccttgacttgtctttttccttttgcaatcactctttaccactctcatttgatctgtcagtttcagtgattgcatctaggcagca

SEQ ID NO: 39449 - DNA, 1173 bp, Bovine  19866880017175
  misc_feature (1)..(1): n is a, c, g, or t
nttatgaccacctagatagcatattcaaagcagagacattactttgccacaaaggtccgtctagtccaggctatggtttttcctgtggtcatgtatggatgtgagagttggactgtgaagaaagctgaatgccaaagaattgatgcttttgaactgtggtgttggagaagactcctgagagtcccttggactgcaaggagatccaactagtcccttctgaaggagatcagccctggcatttctttggaaggaatgatgctaaagctgaaactccagtactttggccacctcatgtgaagagttgactcattggaaaatactctcatgctgggagggattgggggcaggaggagaaggggacgacaaaggatgagagagctggatggcatcactgactcgatggatgtgagtctgggtgaactcctggagttggtgatggacagggaggcctggcgtgctgctattcatggggtcgcaaagaatcggatatgactgagcaactgaactgaactgaactgagaagggtaggatgggggtaagggaagggaggctcaggagggaaaggatatatatataattatgattgattcacattgttttatagtagaaactaaaaattttaaaaaatgaatgagcctgtttatatatggataaaattaaaattgcaaagctttttcttttaaaattcccaggaatgctaaaaaaaaggctccaggatatccatatagatctttcattttgaaatgttgcctgaaaaaatatattctatgttcttaaatttttgtaatcatcattcactttgcaacagaggtcaaattcaatggctctgccaatagacaagacctccacagctctggcttctaagcccagttcattactgaatcattatatgaccttgcacatcgcacttcacctttcagaacttcaatttttttgcttgtcctatatggataatattgtcaagccaattcacaaggtagttgataggaatgtttaattaagtgagatttaaagcaattttaaaatgttatatatgttatatataatatatacagaaccactagatttaatgcaagtctttaacatagatttcaaaaggaacaattcatgtttacatctgcatgggatgacagtcaaggcaaataaacactttctttctatagcaggcactca

SEQ ID NO: 39450 - DNA, 1384 bp, Bovine  19866880071660
  misc_feature (1)..(1): n is a, c, g, or t
nggtgtatctgcatatctgaggttattgatatttctccgggcaatcttgattccagcttatgcttcttccagtccagtgtttctcatgatgtactctgcatataagttaaataagcagggtgacaatatacagccttgacgtactccttttcctatttggaaccagtctgttgttccatgtcctgttctaactgttgcttcctgacctgcatacagatttctcaagaggcagatcaggtggtctggtattcccatctctttcagaattttccacagtttattgtgatccacacagtcaaaggctttggcatagtcaataaagcagaaatagatgtttttctggaactctcttgctttttccatgatccaacagatgttggcaaagaagggccaaaaaaggcagcagatggaaaacacctcatggcagtggtggtggtttagccgctaagtcgcatccaattcttgtgaccccatggactgtagcccgccaggctcctctgtccatgggattctctaggcaagaatactagagtgggttgccatgtccttctccagaggatcttcctgacccagggatcgaacccaggtctcctgcattgcagacagatattttactgattgagctacaagggaagcccccaaaggcctcatgcatctccctaacttttagtctccccttctcataatctcattaaagtggtagaaatggattttaaaattcccaattctttgtcaaaaacaaagagttccatcagtggttgagagatctaaacttgtttatgaaagattcagtggacaaagactgaagagcatagaaacagaccatgctgcacaggaagacaggacttaatatagcagaaagtggatggcaataaaaaaggaagttcatctgcccggaaagactctttagaaacatagtggctgatctgatggaggatgggagtaagaagtgggacagaaaaaaatgcaggttatataaaacctttaaataatgaggagaggcataaaaatcgtgatacagttataaaaaaaagttgaacagtagtggaaaaaaatattcattgattacagaagaaagtcaatagatgatgtctaaagttaagaaaacaactagtgatgacatgtacatattatttatagatttggaggtaaccagagaagaactaaatacagatagagttcagaatgttctggaaggaggaagacagggaatggcatgtaggtctgttgcttctcactataggaagtcttttttgcattaattatttttgagaaaccatatgaatatataattttagtaaaagctcctttttttttttttttttggctccacttagtttgctggctatagaaatttccttctttgtatgattaggttcattag

SEQ ID NO: 39451 - DNA, 1111 bp, Bovine  19866880425799
  misc_feature (1)..(1): n is a, c, g, or t
nactgcaggagatccaaccagtctatcctaaaggaaatcagtcttgggtgttcattggaaggactgatgttgaaactgaaactccaatactttggccacgtgatgtgaagagctgactcatttgaaaagaccctgatgttgggaaagattgagggcaggaggagaaggggatggcagaggatgagatggttagatggcatcactgactcaatggacatgagtttgggtaaacgccgggagttggtgatagacagggaggcctggcgtgttgcagttcatggggtcacaaagaattggacatgactgaacgactgaattgaactaaactgaatgaatcaggataaagctaaaatacacagtatctaaaataatgaatggattgatatgaaaatttagtttccttataagttactttccaaatagtagaaactttcattgcatctgttttttacctgtttaatgctcttggttctataatgctcaattctgattgtctaaattagcacagtaaaaatatgtttggaatgaaacccaaacatatgaacatgatgtcattgacaaaatgagtctagattaaaataaactgagtttatatgttatccttttgcaaacaattgcacagaaactagttgaagaatccagcattaatttacctaatatactctttattgataacataattttcctatggctagaggaaccccaaaaggttaaaacaaatgcctgtttacggattccaatttttttttttacttttaagatgaaaaaaatgaaggagaaaaggaaaggaaaaatagcttagccttttggtaaggaatcttagcatgaaattccctatttttttttaatcaggagacttggttaacttttagatttttttttcttttatatatgctaaattcatccttccttaatttggaagatagttccttgttctttcaataacagagacagaaaacaatgagctcacattatctgcataatcttcagatgtaggaatgctcttcttccttctcaatcatacaccatcaaagaaaaatggcagtgagtcctttagaacctttaactgcttaatctatcctttccaacatttccaggcagacacactaaa

SEQ ID NO: 39452 - DNA, 2704 bp, Bovine  19866880502484
  misc_feature (1)..(1): n is a, c, g, or t
natgatacccccttatggcagaaagcaaagaagaactaaagagcctcttgatgaaagtgaaagaggagagtgaaaaagctggcttaaaactcaacattcaaaaaactaagatcatggcatccagtcccatcacttcatggcaaatagatggggaaaaaaatgaaaacagtgacagactttactttcctgggctccaaaatcactgcagatggtgactgcagccatgaaattaaaacacttgctccttggaagaaaagctatggcaaacctagacagcgtattaaaaagcagagacatcactttgctcacaaaggtctgtaaagtcaaagctacggtttttcagtagtcatgtacggatgttaagagttggactacaaagaaagctgagcgccgaagaattgatgctgtggactttgatgcttttgaactgtggtgttggagaagactcttgagagtcccttggactgcaaggagatcaaaccagtcaatcctaaaggaaatcagtcctgaatattcattggaaagattgatgctgaagctaaagcttcaatactttggccacctgatgtaaagagctgactcactggaaaagaccctgatgctggggaagactgagggcaggaggagaaggggtgacagaggatgagatggttggatggcatcaccaagtcaattgacatgagtttgagtaagctccaggagatggtgaaggacagggaggcctgacatgctgcagtccatcaggttgcaaagagtcagacatgactgaatgactgaacaataacaataaaaagtcagaaaagtagaaaaatagctgttgggttgataaacaagggaaatgaatgagtaggtgttttagcaaaagcggattcaggttggaagttagataaatggtcagagattgagcattatttctgaattgcagcctttagtactgcatcacaatgggcatttcagggtcattgaagcagccaaaagagtctggcttctgcaaatattttaactgccaaatttgaagcatctcccaagcagtacaagtgtagatgaggaagtgaaattgttggaaaattctgatgaaacatattttcttcctcctaaagctcaaaaacaattcattggtctaaaattggacttccagaaatagcaaatgcaatgcaattcaaacaataattataatctgagctaacatttattgaacccttccatgtaccaggaatcaagctgttttaaaggtaccatctcattcagtacttcccgtgaaaggagagaaaacgttgtaggtggccataaactatgattccagcctgcttgccctatccacatttatatatgaaattcaacactcctagtaagcaagacaattttaaaaagtcaggtgtgtagggcaaattctacccttcattagttgtcaccacaccagggaagaacgggtagaggtatcattaccacctcacacaggagaggccaaatgaatccatggcattaaaaagaactcaaagaaatgtcaaacgtgaaaaggacttcagtgcataaaagttaaatgaggcaatctaatagaacacatgctcttaaaaccttcagcctcccatttttattctgtaatgtaaacataatattactacctggagggtggatgagaaacaactgaggtcagtttagttctcaggaggagtgaaatagaagaacatcactcatatttataattaaccagattatttctgtaataactatgagagacactcaaaatgcaatggcttgctgaagtttcttcttataactaaaaataaaaaaataaaataagaacatctgcaaaggtatacctggtagttctctaattaatgatcaaaagtgcactgacttcacaatttcacatttttatgtaaagtcttatttgattgtaattagcccagactacagaacataattaggactaatgattccttaatgcaatcagaatcccagaagaacaatatcaacagacttttattggtattagtgatgcaaacttgtaaaatatagagccaattaacctataacaatgcttccaaaataaaaaataaaaataaattatgggtgcattacaaaacagcttcatgaatataccaggaacataaaaactgagttaatagtcaaacctcacaggatcagtctttcttaagtgctaaagatagtcacaattgtgaagaatgttaaaatatgctactcttaatgagattaagcatttaaaggctttccaagatactgcaggttctgtggtgtcaacacagctcccgagagttatgaatttcacaatttctagatcatgtaacaaaattcaattatagtggccataagttttgaaaaactaagtgtaggggaaaaagtaaaggggaggggaacttagtaaacatttttgctttgcgaccctcagagcataacaagcaagtgtaatgtcttgtccattacatcctaagtctgtaagattcatttttcagcctcatgaaatggttttgaacccctctggagaggaaaaaaaattgttttacagatatatatatatctgtattgagacattcctgttgcaatttctgaaaagtcagtaaatagaatttgtcttaacacagtaggactctccagtgaaatttctccaatggaattttgtaatccacccttaaaaagtgggactatttcacataattagattggaaatccaactgttctccat

SEQ ID NO: 39453 - DNA, 1054 bp, Bovine  19866880513152
  misc_feature (1)..(1): n is a, c, g, or t
ntgcttcatcagcctctcctcacagtctgcaacatgcacatgacaacctgtatttgtctctggaggacgtgtctaatggtcacaaccctcaagctatctcgtgcttttctttggctcagaactaaaagccagaggagaaagacgatagttttctgtgttctgattgcaaattctggttgcctctgttacactgatattggctcttgtcagaagccaataactcattactcagggacttgcggagtattttacccctgtgagcagtgagctttcataaaactcagaactattcttatttcctcaatcaaattaggtcctacaaaaataggtgtctcatttcatgcaggttagcagcaaatgacagtcctataaaagcagcctttgagctgcttcagtttttaaagtttaatatgtttgttatcactttttatacagtacaatttctttgactatcactattacctatttaaagtacaaaataaggtttccattgctctcaatctcttctctctctgactctctctctccctttctttctacctatctttacctatctctataatttataaaattatataataagccccctaaattaatcactcaacttcaatattgatcactcaatttcaatattgatcgctcagcttcaataattatgtacatgacagttttactcatttcttctctagttcttatcccttctcctgtaagtaagtaactttaatgtatatcccacacttcatctcatttcatctctaaatatttttatatatcttcctgagaaatatgactaattacaacaaaaacagaaagccacattattttttatactttctaggaggatggttttcaaaaacttaaaaacatgattctcatacgaagtgtcaaaaattaattaactcgttaataattaaagcagcatgattgtaaggttcagggattagagaggacagaaaactattagcaaggttggaatagcaattgttttatttgaaagagactgcatttatgctcccactgtaaacaaccaaagagcaaaatatgtaaaacagtt

SEQ ID NO: 39454 - DNA, 1434 bp, Bovine  19866880525726
  misc_feature (1)..(1): n is a, c, g, or t
ntatgtgtggactctaaaaatggatataaatgaacttatttaccaaacagaaacaaacttacccacatagaaaacaaacttatggctaccaaaagggaaaggtgggaaggagggataaattaaaaatttgggagtaagagatacacaccactatacataaaacagataaacagtaagaaccctctgtatagcacagggactactactcaatattttgtaatacttatatgggaaaagaatatgaaaaagaatatacatataactgaatcactttgctgaacacctgaaacttaacacaacattgcaaatcaaatatattctaataaaaaataaattttaaaaactacaaaaaaatagtcatctctcatctatcattgcatatccctcctcctttccttaccttttcttctaagccctcatcaccaaccaatacactccgtttaacttctggactgtgtttattaatctgttcatgaagatcaaggatttgtctcttttattctcaacttttttctaagaacacctggcacatagcaaggtctcatcaaggatcagaagaatgaagcaacctctcagaactagtactgaggaatttttaaagagatcactagttatcatagcttcagagaccataatgtgctcatctccaggaagcaagcagacagcaatagtatatgtttacttaagacaacaaacagcatcactccttatctggtatttttgctgacatgatccttctttcttggctgacagaagccaaacactaaatatagatcaatggatctcatcacaatgatgacaggcattcgatagccttgctggatcaatgaccccacagcctgtacctcaccagactctctcttagtagagaaaacatagcaacataatacatcactcacttattattcatcaatccattgtttttccacagccaagacacacttagaaatgcctctgatttggctgaggttgactaacacctaatctatgtatgccggaaaaacaatagataaagcaaagagcttaaatgactggcactacaatctaaatagggaggatggtttctaggtttctaaaataaggtatatttatctgggtctccatggaaatctgttcaaattccagattatactggacctgagttgttgggtttgataatatactccaaaaatgcagctaatttcaactgcaattgagtttttaattcaaataaaatataataaaccacacataagtaggtatagatgctaagcgggctaacttgtttcagtcatgtctgactctttgcaacgctatggaccgtagccttccaggctcctctgtccacagaattctccaggcaagaatattggagtgggtagccacgcccccctccaggggatcctcctgacccagggattgaatcaatgtctctggcacctcctacattggtag

SEQ ID NO: 39455 - DNA, 1726 bp, Bovine  19866880541009
  misc_feature (1)..(1): n is a, c, g, or t
ntctgtggtgacctaaatgggaagaaaattccacaaataggagatatatgtacaggtacagctgattcactttgctgtacagtagaaattaacagaacactgtgaagcaactatatgccaatgaaaattaataaaaataagtaaataaaacagtactagttgtgtttcatacctaatacactagattgctgacgtttaaagtttctttctggtttcttgtaaaaatttctatatttataagaaaatttcagagtaaaaaaatcaagaataaaagcataattaaagaaaaattagattaatggctctaaagtaagactgcctgaatatgagctgtgagtacaaataagaaatagttgattagttttgaggacttaattcaagtcttatgagtttaaaaacttctggattattagattaatactatggcaactgaaagtaatggacactaggagcactatcattattgttataaaccctcacttaatgtaaccctaaatatgtaagcatttcatataaaaataggaaatagctattctaaactttgcgtatattaaaattagaaaagagttcaatacagataggtggcaatgcaattaatacagagcttaatgtatttcttagtgattagaaaacaattattgatcaccaaactttggaaagctttaaatcaaagtttttactacaaaatagtttctggaaaaaattcaagaggagctagatgaaaggttttgaaactaatatttatttttctaactttgcttgctaatttgtggatttgctgctgctaagtcgttcagtcatgtccgactctgtgcgaccccatagatggcagcccaccaggctctgccgtccctgagaatctccaggcaagaacactggagtgggttgccattgtcttctctattgtgtgaaagtgaaaagtgaaagtgaagttgctcagtcacgtccaactcatagcgaccccatggactgcagccttccaggctcctccatccatgggattttctaggcaagagtactggagtggcttgccaccctaatttaattagactaatgccttttgtgtggactggcttgtagaaaaggctgcctgccaaactgaatttgtgtactgttgtatctcctaacagaagtaaagatattaagaagaggtagaaaaaatacaaaaggaactatacaaaaaagatcttcaggtcccagttaaagacaaaaaagatcttcatgtcccagttaatcatgatgctgtgaccactcacctagggccagacattcctcaatgcaaaatcaagtgggccttaggaaacatcactatgaagaaagataatggaggtgatggaattccagttgagctatttcaaatcctgaaagatgatgctgtgaaagtgctgcactcaatttgccagcaaatttggaaaactcagcagtggccacaggactggaaaaggtcagttttcattccaatcccaaagaaaggcaatgccaaagaatgttcaaactaatgcataaatgcactcatctcacacgctagcacagtaatgctcaaaattctccaagccaggtttcaatagtacataaactgtgaacttccagatgttagctggatttagaaaagtcagaggaatgagagatcaaattgcaagcattcattggatcatagaaaaagcaagagaattccagaagagcatcttcttctgcattattgattatgccaaagtctttgactggg

SEQ ID NO: 39456 - DNA, 1835 bp, Bovine  19866880601917
  misc_feature (1)..(1): n is a, c, g, or t
natattgtttccctaacctatacaggtcacaaaggaataaaataactgctttcaccaaaacccaacataataacttgtactctccagaatgctagagttcaaaaatattaccataaatattataactcaagggtgttactttaatgaacttaattatggaaaacaccaaatgcaataatgtgctaacaaaacagcaatttgaaacagatgggcaattacaacagcttactacagatggcatagcagtacaatatatttgtcaagtttggttctgatcagaaaagtaaattgaagacacttttctactggtacaataataacatgaatatgttgaagacagaaatccatttttacaaataattttggaaaatgatgaattgtgctttccatgtaatgaaaaacactgatttttaaaaacaccattataaaaaagtacagaaaaaataaaaacaaagttattggattggaaaaaattcattccagtctttctgtgtcatcttaaggaaaaacttgaatgaactttttggccaaccaaatatttaatctttaaattcaatctatttgccaaaataggatgtaaaattcaaaactaagtattccacgttgaaatgcaggaccacttcatattaaaagaacccaaatatgaggggtataaaaatggataagacattaactccagagaattaggtcagttaaggaagagcacagaattctgatagccagtacagacaagacatcatctactcctgtagaaaaatgaaaagactggtgacaatataaaggaggggaagaagaaagaaaccatacctcccaattataacctttgcacttcccaatattccttgccttgaggcatgggggtaaaactgtgagtgaccaggaaggcaagactgagacgagagaagattatgtagtgggaagtaatggttttaagaatcatataatttatactagtgacttaacaaatgttttaaatcatgattttttggagggggagggtaatgttctccttgcatccagtgattttcaaacctgcattggaagagttttcaaaacaaacacgtgtctttgaagctacctcaccccaaaagaagttttgatgcagttgctctggggtacagccctagtattgagatattataaaatattcactggaaggactgatgctgaagctgaagctccaatactttggccacctgatgcaaagagccgactctggaaaagaccccgatgctgggaaagattgaaggcaggaagagaagggggcaacagagaatgaaatggttggatggcatcaccaactcaatggaaatgagtttgaacaaactctgggagacagtgaaggacagggaggcagagttgcacaggacttaatgactgaacaacaacaagaaaatccctgcagatgatgcaaatgtgaataggaagcattcagaagtatgcagccaagttcagcattatgttggttacgtatccaacatttagccttgctctaagactctaagcccattgtgatggtcctttctccttgacagtgatagggttttaggtgcagacttataacgaatcctgtcatggagactgacacaaagggtttctgtgactgggaaaggtttcctagatcctaagaaagaggtttccacagagatgatcctctttctgtttctggactgttttgtaccatgataaacaatgccttatgtttgcttttctatggaatagttaattttcttggaatttaaaagtgtcacatttttcatttgcttagtttactttggtctatagctttttcttcttacacaatacataagtcattcgtgataatttttcacatg

SEQ ID NO: 39457 - DNA, 1589 bp, Bovine  19866880669007
  misc_feature (1)..(1): n is a, c, g, or t
nataatgaaaacctgattcagtggtgatggacttgaagcctttgttgtctggcaatgtcttggaagctatggtgagttggctgggctcctaggtttcagagacagcaaatagtaagaatctctgcatcaaaaaggagtcccacaaagcatatttaaagaaaggtgaattggcaaccttaaactcagcaaacacactcatccccagaggcttgcgagacatgacaatcccataattggtgttctctgaagaaagtcatgtttactttagaataacaatagaagcttagctggcagactcgaggggcttaaagatatttgggagggcagcactgtacataattatatccttgtaaagaaaatagataatccctccaggaatggagtattctcattcatccaaaatctggcctgtttgtcaaccttcatcttgcaatgacagcagggggagggaagttacaaatgggtctcatgccagtgccagtaagtaacagtccttccttccggcttctcttcaaactgctgaaatagagccacctcaacacaaagtccaagaattgccagccttggggagaggtcaaaccacagacacacattgtaactttgggattttcagaatttaaatcataccagaaagtcctcagaaaacaaaatcccctgactttggtggtttaaaatttctggagtgccatttgatggaataaacttggtggggtccaagtcagttcttctgtgtactagctattctgtgacttagggcaggtggcttaacctccatgaagtcgtcaatctctgcttcctccctcatgactttaataaaggcctgaaataggtaataaatggtaatcagctgggaagatcccctggagtaggaaatggcaacctgctccagtattcttgcctgggaaatcccatggacagaggagcctggcgggctatagtccatggggttgcaaagagtcggacatgactgcaactgagcacacacacacaagctccttgaaaagttataatgtctattgaatagcagattaatttcaaacctgaatccttcttgctgtgttcaaatccattttcttttctctttctttccatcctttaaaaaataagtatttgcataccatgtgaatggatattcagaggaaattcagaatggggagatccatagagacagaaaacagaatcatggttgctctgtgttggggggcagggaggatggggacacggtgggagattaagggtggcggatttcttcttgaggtgatgaaaatgttttaaactcagccgtggtggcaaatgattgcatatatctttgaacatactaaaaactgttggatggggcactttaaatgggtaaattgtatggtatgtgaattatatctcaataaagccttttttttttttttggtaaaaaaaaaataataataattatttgtatttcatgaaagagatttctttagaaagatgttttaagttgaaagcattagcccaatcgatattttttctgtttatataggatatataggctttaactaacatagcataatgattaagagcaagtattatggagccatgctccgggggattaaatc

SEQ ID NO: 39458 - DNA, 1143 bp, Bovine  19866880693845
  misc_feature (1)..(1): n is a, c, g, or t
nctcatcgtttgttgtccccttctgctcctgccttcaatttttcccagcatcagggtcttttccaatgagtcagttcttcgcattgggtggcaggactactttttgaaatcacttaagcttaatatattctagaacctcgtgacacattaacgttttctcttttttaccaacagaattgtaagaagataagacatcatgctttcctgatgtcctgaattccagggagtattgctaatgagcatagcagcagaaactcttgggggtttgtcaataaaacttctttataatagttttactgtcttattttatcatatcttggcttagtagggctaaatctaaggtcatgagtgacctaaaagaattctagtctttgaagggtttgctcagaacttcccagtattcacagtaggcaagaacaaaactggcttctaggaccaaatccaaaaggaaaatcccataattggcaagaaattacttttcacatatttcctatcatgcagtgggagctctgggcccaccatgctactgtctcttaatcactacaacaaacaaatctttcctactctaaaatgcattggttctcaaatatcacttactccaaagtctatcagggagttagagagaacagaacaaaagaacgagccatcagaaatggcctttcttctatctagtagaagaaaagagaaaagaatttcagtctacaaactttattcctattttggctaatttatacatgctcctgacatcacaaaaggcagaagaggagaggaacagtttatcttttcaactaagggaaaacaaaaaagataattattatttatatgtagtttgaggcaaaagagaaagaaaataaaaaatgctacaaaatatccctagagactttttgcacaaagatgttatgtgtgacacacacagacacacacacagagtagtctttcttctacagataaatgtgccaggaagcagttctaaggctgtattgcgctctaacacttttccttgttaaaatacaaggccaggcacagcacaaaatgactttttaaaatatgaactcttggtgtgagtccttccataacaaagcttaggtgtctaagacaaagttaaagtgaaacatagagccccaagtgatgttttataaccag

SEQ ID NO: 39459 - DNA, 2607 bp, Bovine  19866880742499
  misc_feature (1)..(1): n is a, c, g, or t
nagtctttgatacctatcgttcttttgattcttccttgaatttacatccctatgcttgtaatgcccatctttggttgcactttgtctatttgttttactttagagactttagcatattaatcatagttgtcttaaattcccatagttgtgataatgccaaaatttcactctatctgagtctgaatggtgtgcttcctatgtcttttagactgtattttatattttagtacaccttttgtttcctttcttttgtggaaagctagacttaatgtactgagtgtaaggaatggagataactagatttttagtgtgaagttttatacttacctagctaggagttaggtcatatttgctgatgctctaggtgttaaagtctaaaattttcctctggtgtccttgtttttcctcttccttctttttctaggggagattccttagataaatctccctaaatctaggacatgcaattctttctgttttaatctccttttattatgcaagagacttattgatgatatgtcagattttgaggagaggaggagtgttttctagtcctgtgattatatctcaatcttttattgaacttgtatcccggcaacatagtcttcacaaacattcctcagtccttcttccagaggtaaaacaggaaggctagagggtagagttgaagtttttccttccaataggctaattaggcttggtaaaatcccagctggttaggctttggtaaattagtttcctttgaggacaggcttttaaaaaaaattctctgggtgtatttcaaaatggctaggattcccatttcctgctgggagcatgaagagatttttatcttcactatgataacctggtaggacttctggaagtgaaacttatgaaaatgtagatagaatatctactaggactctccccaagtgccccagagattttaacggaaaagcttgtccatactcaaccaccagaaatttgtcaatttcagttcaagttttcctaccctggtactgactccagtggcagtttctgcttctggtctgctcttccaatagtaatttgtggtaccctgtatctgtctttgtctcttcaatgtttggagctgtcatctgccctgtgactacaattttctgatggatctaagatttttagtttgtccagtcctgttgtgaggactgaagtgatgccttccaagctgtttacatgctgaaatgggagccagaagtcaccctgttctcttttgagtgtgtgtgtgctctgtcaatcagtcatgtccaactcttgtggccccagggactgtaacccaccaggctcctgtgcccatgaagttttccagtcaagaatactagagtggggtgccatttcctactccaggggatcttcctgatcctgggatcaaaccatatctcttgcatctcctgcattggcaggcaaattctttaccaatagtgccacctgggaagccctctcttttgagtactatgcagtgtatcagactgaagcaacctttttaaaaccattattccatgaaattgattgtattcattccatttagtcattgaagcattataaattgactcacagactagggaaatatggtgttacttgacttactaggaaaatacagagttcagtggggacatttctgttttctctctcttccactgtaatcaacagaaatatcctggagagctgtgtggttgagttattgacaatattgtcttatttgtatcaaaggtgtatcaatcctgatccacaggatttttgccaaaaaggctcaaatccatttctaaaaagcatacatttttctttctgtgggtctggttcatttaagaaaatatcatcatttatatgtgacggttgacctctaggatgaactttgtttcccttaataggtacaagttttccttaagtacagatacctttcactcttttgttccacctttagatgagttttattttggtgttctctgtgatactgttgggacaaatgtcattttgcttcccctgttttgattatggcaacgtctggttgtcctggcatttagaataggaggacctcatctttacttccataatgcatgctcctgcttgtgccttgctggaatgtcattttcttcatctaggacaacacagagctttaagtaatgtcctttagtagctctctcattgatttctttaacttttgataatcacatcaagcaattttctcttcaaagttacgtgtgcaatgtgataggcagttgtattactcatggtgccactctgctccctcctcattgatttgcctcttgggtttaaagatcttttgtttttaactgtctcattacatatcctgttttgccttttagtttgacaggactttctctgaggtttcattattacattttaaaatagctgtcctatagcctattaaccattccttttctcaaatatcaatgatactgttattgagctttttataaagccttgacttaatgaaatgaagttgttttctctattgagttttttttttaatgattcactttgtttcttttactttattttttttaagtagaaggaatctgagttaggaatttgatctgtagactagacaatcgttcatagaataggaaa

SEQ ID NO: 39460 - DNA, 1072 bp, Bovine  19866880780723
  misc_feature (1)..(1): n is a, c, g, or t
nctggtgctctgtgacaacttggagggatggggtggggagggaggtaggagaggcttccagaggaggggacacatgtttaactatgaccgcttcatgttaatgtatggcagaggccatcacaatattgtaattatcctccaattaaaactttaaaaaatttgaggaaaaaaaaagcaatgtggtttgtgcagcgtacagcccactctatactttcccagatatcacatgctgatgttattttattacttcagttgtttttgttatttataaatatgataatacttaacatcatatttttaaaatttgccttcctgtgtgtacaaactagatagataagcttcaaatggtaaaattcgcaagcagaaacattaattgcattgttggcattgcagagttgcacataacttctgtttagcccttagctttctttcatattttgttcttttgaagtataaacgtttccttagctgagtagagccccagtccagaagtggctaggggctacttacatttaaggagataacatttaaatttaaaaaatgaaattaagtgcatatgaattccaggaaatttgctgtataccatccactgacatcttactagctgttggcaagcatttaatcaatgtttattggcattcttttcagatttaaataggacataaaattttatgacgtgtaaagtattttcaataactgcttcgttattttccatagatagtgtaatagtatacaagaggaaatattgatgaagtacccaatttgcattattttttgaaagagtaagatagtttaaattgtgtatgatgacaaaatgctagtctacttttaaatcagactgtagatttgtagctatctggtttctcattttatttctattttgtctatatcttttctcattttggatacatagtacaggtcagaaaaataagaaacatagctgtttgttctattattataaagagagatggtggcttataatattaaattctagttccttagtgttataaaacaaaggatgccacaggacataggatatagcataggtgtggctgaaacattaattttatgt

SEQ ID NO: 39461 - DNA, 1647 bp, Bovine  19866880785007
  misc_feature (1)..(1): n is a, c, g, or t
ntagggatgcagaaggccaatagcatttagtactttatagtgggaaaggacctgaattctgatcctggtggccatgaatcagtggtttcattctctagtgatggcatcgcacttctttgaattagaactcagggctcctaattaaatggataattagtgttatccagcctgttatagtcagcattattatgaggttgtcaaaataaatttcgtagaaatgactagaaaaatagcactcaaaattgaggctggtagtagcaatctcatacaagaagcaatttggataaaccatcaattagttgcatgaggaacgtttcaaatatactttgactttttccagatgatgaaagtacccattctcaaactttggagcagaacttttgaatttacatgaactctgtaggatggtagtattatcattccccactttattcctattcttctagttcttcttggtaaatggacatatatttgctgctacagtgtttttagatattctttagcttatggagatagcatatgttactaggctctttcatgtgggaatgacaaaggctgatggatgtctggttttgtctatggcctcccaaagccagctcttgtctaattgagtcagtgagtcagcttccatttattgagctctcagctgggagtagggtagaactaggcattttaaccagaattgagcatctgctcagtacttaagtagcctgagcctccagactctggctagcctaatggactctccactgtgtctctgccattgaacagtgattactatacagattggggcatatttggtttcagttcagtctgttcccacagatgaggcctgagtatgatcacatcgtataaattttttaaggtgcggcatctgtgtaacctgagccataagtaaaagttggccctccgtctgttctgtcgccctggaggactctttgttttccaaaggagatagtccatcttgtgaactgaccatcattagagtcataaaaattcaaatgtgccttgagcgatttctttactttggcataaagtctcaagtacaatatccaaaagcttaacatcctttcactgaaatacagtggtttaggtttgggtggaagaaatttctggaacactaattgtaatttcaaagcagtgttaccagttaccagttgtagtctgcagaaactcgaatctgtacgccattcatttttatggactctgaaaaatttttttttcaattgtaaaattagtttgattataaatatatttagtcacagattacttggaaaatgaaacagagcacagagattattctcccataatctctttaatttgattgtgaagaactctgggtctagaaacaaaatctacttgttgaaggtcacaccacaacctaagtcacctgatttctggaataacctttctgttacattgtgtcccactcacataatcttattttagaaaagatcaaagtctgggtctctttcatgtacatttctccactctttcagcaagttggaaatagaaaagtaaagaggaactaaatccagtctcccctttcctctgtttgaattacttgctaaagtgtaatcattacattctatctattcttatctttgtctgcataagacctgttcattgagcctgtgcttatgtttt

SEQ ID NO: 39462 - DNA, 1313 bp, Bovine  19866880793693
  misc_feature (1)..(1): n is a, c, g, or t
ntaagttccttctactcggggccaactggtactgtgtgaggccaaagaattgatgttgctgatgtgcagttaaaaaccagtcatatctgctttgcaaagtaccttagagatcaaaggtttagttcagaattcatacagctggtctctttatgtatttaaagaatttacggtaaatttaatcttactccatgcctgattttttttattaaatttctactgcctgagagtaagaacattaacttttttatgtgcaagaaaacatgtagtttttatattcttttctgctgcctcttatggatgaaatgctctcacttttgtcctacttttatattcacatcctttgtacacaacactctaagtaatttctatagaatttaaaatctgaaaaaaaatgatttaaaaaacacattctaaaactaattgatactgaaaaaattaagaaacctacagttttataggaactctgaggactgattctgtgactggatttcctgacacggcacatctgtttctctgagagtttcctttctaaggaacatgggaagctattattaacacatgggaagaatctatacagagtagattatgttagtcatatcaaatccaattcccttctggagtgaggctgatttagctaggtgattttctaaattaagttatgacaactggctattacaggctgaaacttactcagttaaagatcagagcaaacaatagctcttgaaatttccgtttatacatcagctctatcaaggtgacccaatatattccagctatttgagagtcaccttaaattgcacacaattctactgctaagtctttggtttcagaaaagggcagagtttcccaagtcaggactcaggttcaccagtgggtggtcctcatttccacaccagtaggatgactgatctcccccttcactccccatcatagtcttccggggtccctctgataaaaatcaatacaaacaggtggacttcattgaaggataaaaaaccactaagacagcaagattacaatctactgataaaaactaaaatggtttcactctagagcctgttcaaacatacaaagaaatgactgcaggcaaccatatgcaaatgttcaatcagaaactaaagatctggatactctagcgtgaaagctgagaacccagaaatgtattcctttactatctaatagaagatacaaggggaaaaaaaaaaaaaaacagaagacaaagaataggaaaccttttatgtaatgtcttaaaaacaaagtagagatactaacagtcaatatttcaaataagaggaaaattactagaaatcttc

SEQ ID NO: 39463 - DNA, 751 bp, Bovine  19866880794932
  misc_feature (1)..(1): n is a, c, g, or t
nccccccccacccatatcaccagcaaatatttttccctgagggaatgaggagtggagggtgggaagggatgtttttttttttttcctttgagaaatatagttattcactaaaccaggagcaataattttctcttatgacttgcatggctcttagttacaaaactatcttcccttcaggaatgttaatatgaatttcaaagtctactgcaagctgtgtaaatgtaataggattatgcttctcttgttcaggaccagaattcaaatagatatgaacctccaggcctccctaaactctcaggttactaaggtcaaggtattcatttctatttagcccagaagctattttggggttgtatcagaaggaggttaagtttacatttttatttgcatttctaaaggaaacagaaacctcagcattcctctagcagcagcaagaggagaatgagccctcacttacagaaaaggctctaaaaactaatagaagagcaacaaaactcagacaaacctctgctctggatttgaatacagttgactcttgaataagaagggtttgaaatgcatggctccacttatatgcagatacttttcaataagcataaaggtagctctccatattcatgggtttcatatccaaggattcaaccaactgtggatcaagtcttcatttgtgactggttgaatccacagattaggtattggttgatcagggatacagaggatcattttatataaggaactgagcattagggat

SEQ ID NO: 39464 - DNA, 1531 bp, Bovine  19866880796620
  misc_feature (1)..(1): n is a, c, g, or t
nacaagaaatgggagcatcacaggctcttgactcagtcaagttaggacactgtgaccctccatagagagggagggcaatagctgagcgagttctgtgctgtaactgcttcccacacccattgctacatgtagaccacggcgagaactcagacaccacacaatcccgtgggcaagggatgaggcacgcttgttccgtggggggctgaggggcaaagtgttcacatatctcattcacaaccatggttctgttcagcttctgaacacagtgcaccgtccgatgctgcaacccgtgctgggcggtcacacacgctgcagcccgaggcctggcggggcccagagcaggaggagcgagtacacagtggtgccagtcggaaacctcccactggaagaggtctctgtgccagtcacagactcggaagcagcttctttccttcggaggtctgttgtgctcatcacagttagacaggtggctcgtccacccctcagagtggaaacaccacagggcacgactctggcttccgcctggcccacaatttcctgtacaccttccccaggggcctgcgggcagaaaagacaaaggggtcaattactccaagatcccaggccacaatccacacagaaacaggtcaatctgtacaccttgagacacaagcagtgtgaaattgtgaaatacgagaaaaaaaaaaaaaacttagtggttaagaaagtggattctactctacatcagttggcccttcttgaaacctgcaatccatctcttacagcaatgtcaacttggatgagttacctcaactgcctaagtctcagttccccacctacaggaacagataattaaagtgctgacttgtagagtttttctgaggatcaataataaaatgtgattccaagtaacaatatacgtgtaataaatgattggtatcattataattattatgtctcaaagccctatatatctaactcaatattaatactttcaagttaggcagagtttcatctaaaagaatagccccaaatccaggattttaataaactaggatttttcatgtttccaattcttcagctcacaacctaagtatacgctcagaagaaaaagacatttaaaaaaataacttgcaaaagcatcctaaatatatatttgctttctaaatactgtcctcagttttggtttttacttacagaatgaaaaagaaaaatgtgatacaggggtaaaagtgaagttaattaaaaaacagcagcactgaactgtctgtggaaattctgcccctacaatccctgaaatatactggctgggtaaagcttccaagggcatccctggtggcacagtggtgaagaatcctccaatgtaggagacataggatgtgtgggtttggtccctgggtcaagaagatcctctggaagaggaagcatggcaacccactccagtattctggcctggaaaattgcaaggacagaaaagtctggtgggctacagtctatgaggtcgcagagtcagacatgacctagcagctaaacaacaataacttccaacata

SEQ ID NO: 39465 - DNA, 861 bp, Bovine  19866880814667
  misc_feature (1)..(1): n is a, c, g, or t
ncaacttcacagcagttagtatatcatccagtaaaagtaggaagagctcagtaggtatttcttgaacaaatgaatagaaacctctgcatctagtttcaccattcagtttcaggcatttattttcactttggaacagtttttctcttcattgcagttattcacatacacctgcacttcattaatgaacagttaagatctccattcagagtcgaagatcgtattttggggggaaaaaaaaaaaacatgttgagaccggtgcatttacaatctttagttaggtctctctctaaactgtcacctggattacattttcctcgaacaccaagccaagaggtaatgaggtttctcttggcagtgcagtttctgaaacaaagttgttccttccaaatctctctctccagtctttttgaatatctgaatgcaagtaggacattgaagacatatcaactttttgtccagctcttccttcatgaaagtttcataactttctcaccaacttattgtagtcattagctttcttctctgctcgaggtttgggcttcttgccagattctgtgtttaagatggaagagtcatttagatcttaatcataaggtctctgtgtatttaagaatggttagatgactctttatgtcttctgccattttctcaatactggagcagagaatcagtttccatgttagaaaaaactgaaaaaagaatagctgaatcatgataccccttctaattctaagagtctctgtgtttcagtgtggaataaataattgtagttcattttattctttcaagatctgcttttctaagacttaaatgttctttctgacttgatgaaatgtttctggagttgtcctagttatttta

SEQ ID NO: 39466 - DNA, 1547 bp, Bovine  19866880821852
  misc_feature (1)..(1): n is a, c, g, or t
nataaggtatctgggcattcttggcctccgttggctgcttcttggatgataatcctatatcgagactgttttattgtagcatttcctgaagtaaaggaaaaataaaataatagtgcccttttatgtggaggcaaagaaaagtccagggatagagagcaatttaataaagaaaaaaaagaaaaaagaagaacctatggaaagactacctgggaaatgagaataataagaaaagaccagagattaatactcaaccttacttctatgagaaagaaacatcacacttactaactgtgatttcaaatctgtatgttctaatatgggaagattgtttcccactgataatatattttaattaatcagaatctatattatattttgcatatacttcagcataatctgaaaggcccttgaaatactctttgatctcaaagcaacagctcagggggttaacattttactattagcaattctctccctcaggtggggtacttccttctttaggctactttttactatgcaaacacttattaaaattaatacattactaacatatttattaatgggaattagtttattagatttcttattcctcacaacctgaggtaatatgtgtacaattggaatttagagaagaggcagtaaaattacaacagaacaaacattatcttcctggttattttgctgacccacagaagtagtaataggcacctggataaaaagacagcctgatgttcactctaatgtgtggggcattcatttcataatctttagatgccttctaatcaacaactacttccaaaatcaatgacagtgcttagcaactatttcaattgccatgtgtaagatactgtgctcgatacacagatacaaagtcttgaatttgcaatgaaatggaaagaagaaggggcagacagacacacacctagtcatttgggctttgcagagtgagatgcgtcagacactggcacagtattaggagagtacagaagaaagcatagtcctgtggggaaaccaaagacagttcctagagaaggtggattttattctggcattggagggataagtagaaaaacaatttttttttccaaaaagcaaaacaaaaataccagatgatattgcttatatgtggactctaaaatatgacacaaagggacctctgtgaaacagacagactcacagacatagaaaacaggtttgtggtggtcaaggtggggtggcgggggagaaaaatcaggattttgggattagcagatgtatataggatggataaacaagaaggtcctcatatagcacacagaactatactcaatattctgtgataaaccataatgggaaaaatatatttttaaaaagaatatatatatatatatgaatcactttgcagaagaaattaacataactgtatttcaataaaaaaaaaagaaaaacataaagtctgaagccattgcaggtcaaagaaccagtgtgagaaaagacacaaagctgtaagagtgcatggacttcacagagaaagagaacagaactgcattcaggagggtgtatgtgtg

SEQ ID NO: 39467 - DNA, 1524 bp, Bovine  19866880828209
  misc_feature (1)..(1): n is a, c, g, or t
ntatagagcacagtggattagttatatatacatatatctatttttttcagattcttttccattttagattattataaaatattgattatagttctctgtgctatacagtagatacttgttggttatctattttatatattgtcctgagtgaatgaaataatgccatttgtagcaacgtgaatggacctagagattatcttgtgaagtaactcagataaagacagatatcatatgatatttggaatccttaatcatatttaaataacagtctgcatagaatttttcaaactcactctcattttgatgtagattactgagtcatcttggtcccctttatgtggttcacattttccaagaaataggctattgggaaacttgaatgttagtgctacctaaatgtgttaaagccagatgttttaagaatattttcatcattttcacacccaggacaccaaatgctttcttggatgtttaggtttgcacttgcccactgtccttcctggctttattttattttgttttgaaacaacttcagatagcatcgcacatttgcatcccttttccccaaaatgttgcacggtttgaacagaagcagatccctcacagtcactaatgagcttgttatggctgagaataaagtgagattattttggcttgggtttgataattgtggtcagcagtctcttaagttgatgtctggtgttatttgctttagcaggcagcagcttggaggagtagaaagccctcaaaaacagaattcatgtccagtgtctgggatttgcactggactatttctctgtgacttgtaaaatcaaagggatacagaaattaaagctactttcttagaaatggagaaaaagcaacatggaaattaaatctgagattatgttatttttaagttagtaattgtcaggagctaaatgtcctgaaaaaggcagaatagtactaaataaggaaatgaatttagtgaactcactaaggaaagaacttgtaagtaaccagctatctttgcctttccacacagatcagtaataattatcctcccatgttagcccaggtgttcctcctagttcctgtctcattatgagccaatgaccattgcattttatattcatctttttgatctctgtcatcagcagttttctctacatcctgttctagtttctcgtttggaggttgaaagtaaattacatcacccatctaaccaacctctttcccaaccaaccacttaagttgtcaaaagccaaggactggaattctttttcatgtttttactttataatgcctaatagagtacctggcacatagtaagccattaataaaggaaatgcatggctagctgtttctgcttttttcacaaagttggaagaaaaaaaaatctgccacgttttcatgctgttgtttttttgttgagaaagataagaaataaataggtagaatattaagagtatcaaaatatagacttatgctccattgtattttattggcaaaaggaagcaaattggaaagactttgtatgtattt

SEQ ID NO: 39468 - DNA, 1397 bp, Bovine  19866880858052
  misc_feature (1)..(1): n is a, c, g, or t
nattatatgaatcaatacactgccagggacacagcaggtaagggatatggagacttagcagcaaacattggcctaacaagtgaaaaacccttcaccagtacaatttctaatcaatctttcaactgctcaaaggaatctgtatttatacagtttagaacatctcatgcctctctcagttgggaggctctgaacaatcacaggtggctggaaaaacctattcaggcaggctagaggacttccgaaggagtttgtaggttgaaacactatcacacccaggaactttattaactggagctataagtcaactcttttttcagagcgaggtagtgggggacagtccccccccccttgtaaagtcagaggtgtaggtgaaagcacaaagcagaaagtaggcaggctctggtttgggggtagatgctcgagaatttccagggggactcctgaggctcaatcccgcctttgcgtatgccgagcctccttcctcatgacctttgccatgggcagagttcctcaccctggctcctggcagtgatagacttccagttgagctattccagatcctgaaagattatgctgtcaaagtgctgcactcaatatgcaatatgccgggagatggctcccagcactccgctttgttttttaattgaagtatagttgatttacaatgttgtgctaatttctgttgtatagcaaagtgactcagttgcacacatatatccctttgttttttatattctttcctgtaatagtttatcctgggaaattggatatagtttgctctatgctatagagtgggatgttgttgtttatccgttctaaatgtaatagtttgcatctgctaatccacactctcagttcattcctcttcctccccacttctcccttggtaatgacaagtctgtttcatcttgagtgcatctgtgctcagaaaaacataggaacttcagaaattcaatttgaaagttgaagcttttagaagaggatgtttttaaccatcaggagaatagcactgtccattagatatcacatttacttttcttgctgtggttgagatgagaggtgagaaaagagatgtgtgggcttagagtgtggccttctgactacatggcagcacttagagaagtgtcctgtcacacggttcaaatttgagtgacaagtagatgatcattcaattaacattaaaagggagaaaagtgccttttaagtagttcatggaaaaattaagtggaaaggagctttttaaaaaattttaacttctccctctaaatattgactgttaattgaaaaaattactgttagttatgcagcatgttctgtagtatacctgggaggattagcatttaaaactgcagatctgtaggaaaaaatcagaatcctactgggctttgcaattagtg

SEQ ID NO: 39469 - DNA, 1810 bp, Bovine  19866880905492
  misc_feature (1)..(1): n is a, c, g, or t
nagttgtccttccttattctaatgcaggcactgcttctaaccctttcattctgttcttatcagcattcacagcatgaaatgtgattcttctattacttaattccttcctttcctctcactcatttccactcctattttcccatctcctttcatttcaccctcacatatttttcactttgcagttttccttatcttcatatgctcgacatgagagagccaaatcgaaccccacagttaaaaatagtttctgacattatttgcgattcctaagatgtagcctcacaaattaccttttctcatctgatttccatctcacatgctgacagtgctccaatcttggtttctgattatcccattacatagtcctttcccttacatttagaggaaacttgcaagtaatggttctgtttggatagcactgcctagtcatcatttacaattttatggaactggaaaggccaggagaggaaagacatggggctcaagttcttgtttaaaagggaaagcattaaataactattttggtaatagttagaatcactactcatcatcgtgctacactggagccactttgtgattgagagtaacataccacattaccaagtcgtgtctgactctcttgctgtagcccaccaggcccctctgtctatgggatttcccaggcaggaattctggagtgagtttttattccctcctcaaggggatcttcctgacccagggattgaacctgcatctcctacattgcaggtagattctttactgctgaacactgggaaatcatactaaaacatattagtatcataggacaggataactgtttttcttaccaagggggaatgctgtgttctctgttgaggagtaatgcatttaaaattcattcttaaaaaggcaaatgcaattgcctacacaatgttataatatttcaggaaaaactcatcacaaataaatgcgtaggaattaacctaacaattcatttactgcattcattgtttttactatataatctgcatgtattcagtctgtcatcatgcacaccatttatcatgtgtgtgtgtttgtcttgtgtatgtgtgtgtctgtgttttagctatgttctgaaaacatcctataaatagctaaattcatgtaaagccacaatgcccagaaggctggatgattacctgttagcattgatcgtttgggtatagaaaaagaaatgtctaatacaaataataccatttttcttatgcattctaagaacctcttatattcaagagtaaattttccttacatatattcatttcagttgacctcgtaaagtacattggagagtacagtataccatgtaattgagagccggacctctaatagatgctatgtgagatctttgggggaatgaaaagataatggaattcctattcttggtgggagataatagtcattattatccttttttctcttctgcaaaggcacactatcgtattctagttgatggtccccatatgtttttttaggtacattagtaatttcaaagaagccaaatatatcttgctttgagggaatgcagtttagctcttggggccagactatagctcctggattatgttcagcagactttactaaaagataggctgtttttccatgacttgaatagttccacataattttcttctcctttcctgttcttgacaggtgcatgaggcagtcccatgttacagtgagtgcaatcagtattcctgggttgtagagcactggtctccatgcaaaatccacaatgagctgaggtccccgcgctgtggaggaggaacgcaatctaggaaaatcaggtgtg

SEQ ID NO: 39470 - DNA, 1892 bp, Bovine  19866880960917
  misc_feature (1)..(1): n is a, c, g, or t
nctggaaaattgcatggacagaggaacctggtgtgctgtagtccatgtggtcgctcagtccatgaactgagccgctaagcatgaacatgagagttgggtactacctgtaggtggtagtagagagtcatttagttatcaaatctaattcaggatcttcagtgattaattattcaatcataaaattgaaatattccccagtacttttaatctttgtgcttctaatcaactctgggatttttcagttcatctaaagtcagtattcgttaatattttgaaatagcctcttgatgaagttacaggcatatgataatataaattatcccaagcctgaggtcatgaacttgtctttttccttaaagggcttccatttttaagattaggagttttttttatttaatagtgatttagaattataaacttcttctatatctggggcatttacaaagaaacctgacttaaattttaaaagtgcttggcagaatattccattgtcagctttactggccaagatattaagatgctgtatttgataatctgcaaaaaaaagagaggtgaatattcatttgattttgtcaaaaagaagagcaagaataattactaataagtgaagtatctgggacatttttggtagaaatccaatttctgttcacataggagactttgaaaaaaagctgagtagtatgcctgtgaatcagtatattcagatcctggaggcagggtattgagagagcatgagaaattttctttctgggaaattatgctggtctccactagttggtttacatactcatcatttcctttccggacctgcgcccccctgccccccccccaccccgcccttcagtcaggggaaggatttaaattgccacatttttctagttctctcaagcccgtgagtcactaaaacatacacattaattatataacctctctacattttgaattaatggatttaaaaacaattccggggaacataagtctttctgtaggctacctcatcagcataaacaaactcagagcagacatctgcttagagaacactcactagtgcagagaaaagaccgtggagtagggcttatttgaaatgggcatgttcatgtgttgcatataaatatgacattgattacacatatcacacacacataatgattgtccgtgatctttttgagacaggtcagggggaaagcaatgcagttttgcacacattataatcattttttattgagtgtagttattttctgaacatttagaggaaacattttatggtttgcattttattcatctttccttttcggtcttagcattcaaacaaggtgtttagcctgatgatgtcaactgatactggtttcaaagcatgagtacattctcacaaagaaaatggcaactccaagtattcactaccgtatgtaaacacttaagagttaatgaagtaggaaatggaaacccactccagtattcttgcctggaaaattccatggacagagagcctggagggctacagcctatggggttgcggagggttggacgtgactgagtgcacacacacagagttattgaaaactagaacttcgtcatggggtattttgcatacctggaccaaatgggcttatgaattttgtcttgccatttactatatctgacttttacttggaggcagttatacacagggcaagccacatccttgcaaacactgctatgtaagatgattctgagagaacttaaagggctatcattactaaaattaaaagaacctaaaaaaattatgcatattaagtttatgtttattaaacttattatgttaattaagtttattaagttttgttctctactattatcttttctctatttcgtatggaatattatttcctgatcccctacctgaggctcaagga

SEQ ID NO: 39471 - DNA, 939 bp, Bovine  19866880994757
  misc_feature (1)..(1): n is a, c, g, or t
natttcctgccttgcctcatatatcataatgctcaaatgaattagggagtttcagtcatagaaggtgttttagacatcatcttggtcagcccttaaatgtgtacagcaacttgcatgaagtcacttgtgtgttgaagtccagtccaggttgccaggaaaaattgttcattccaaagcggggagtagcctacaattaagactggttgaagccttactctggctttgactgactagggaatctacccttttctgtggcctcagtatttcccatcattggtggacggagatgattttatgaaatttgcaagcttgaactgagggttataagtaaaacagtgtccatgtcaagtgttattcaaaatctgggcgtatcaggcacttactatattacagttcatatcagttgtttaccaattttcaattcttctgtgttgattgaaaactgaagcaaattgcctgagttggggcagcatatgatgtggcatcaacatcagaacatctgttcccagctgtctctgaggagggtgggggctgtggggttgctatggtgaaaaggattctgccagacccacctgcagcaaaggacttgctctttttctgaacccattgagtttgacgacacttggcaaaagcctccttgagtgtttatggcttcaatttgatttctgtactgcatggctttcctgattatccttttctgggctttcatgagtcagagtgacaacttcagcactgaatatcagacaaggctccattgggggctggttatgcatgtctaccacttgaattcatagaggaaatgagttgtagttcacactgtcaggaaatcacatttctgaaaaatgcaggctttttttcccctgggttttaaggggattgcaccttttccctcttgtgcagagtcgacgggtgcatgcccccatcagctgccactggtgc

SEQ ID NO: 39472 - DNA, 1260 bp, Bovine  19866880995772
  misc_feature (1)..(1): n is a, c, g, or t
ngcaattcatttctgagtgttagacaagaggcccagtttcgggccctggaaggggtcccccttcctgcaacacatgtacatgaatttctacaattttattccaaaccagattaaaagcaaatctccccatttactatacttagattaaacatgatgtgagatcttgaaagtgcttactcactctaaaattctaatttgtcagtgaacttgatattggaacttagctccacatcttctatccacagctctctcccaaagtgaaagtaaagtaaatgaaaattggaatagccattcaccagctttacaatgatttgtgtaataaatcgatcttgccacaaaatagtctctttaggtaaatctggtgggggaataacagtgcctgcaaatgattttattatttgtttataacttcaaaatcctttaccaggttttaaagataattcatggcttattaccttagggtcatttcatgacagcaaaggtggttttcctgacataaaaatgccacacagtaactaaatgaatacaaaaaggtgcctccacaaaaagaaatgaagttcagatcctacagcctgcattctgcagggaaaatgggcaagaaaggaaattgaactgacaaggtgatgtaagttgtaggtgaaagactgttacttcataactgagcaaaaggttctgacccctcacaatacctcaagtgaggtgcttagcatctctccttcaaaaagctattttccagcagagttttggaaatagcatttcaaagctaccccagtgtgaaacctgggacgagctaaaagcatgtgatgaaaatgccaagaatggactttaagaagctttgttgcttcctttaaatataaaaagaaaacacaacaaaaacagcaataatcccctaatcctgtctgtgtgggagcctgagctctcctgtaagcagatttctctctttgtcatcttcctcctgtaatcaccacccaatccccccacccccttaaaaaggcaaacagaaagggaccatggcaccatgcacactctcattgtcaagagaaagcacagaattctaaagactttcttttagcccagacacatagaggatgtgggctccaagataaatcacagcaaacatttgttgatcaattcttctatgccaagctcataggaaccttccatacccatcaccccttttatcctcccaacagcattagttccctcatattacaggttgagtaaaccaagggagacaagtaagtgactcgaggtcatgga

SEQ ID NO: 39473 - DNA, 2993 bp, Bovine  19866881154517
  misc_feature (1)..(1): n is a, c, g, or t
nacctggaacctaggagaatctgtttgggaaagaaatagcagtttcaaagaatctgtaaattgtttcagcagaaggagactgatgcctttttattgagtccatcttttactggtgtgtattttttcatgagtccctgttgtgccactttcagttctcctggatggaagatttgctcccctgttagtgtaagaaagttaacgtattgctaagtgctgtgcgtagtgatagaaatctattaataatgcatacatggagtttgactggcaaagtcatctgccgaagagcaaagagctttgcacttgagagtagcttaccataatcaatagtcccactctattcaataaaaaattactagagcgtaaaacacataaagctcgatcagttctctttattttggttgtctgttcagcaaaaaatgacaacttacttcttttctaaatgcatttacaattttaaaaggactacagacattatcataaattagtcatgctgcagtacacggatttttaatatacgcacatttaatttgaatatattgtgctagggtttcaattccaagagtgtttgcaaagctatatgtgcttagtcaaaacacgaccattcactaatgcaattattctttcaatctgtcattgttagatcactgaagattctattccatgttgctttgctttagatctaagcctttagaaggaggaaagaaatccacactctgtaagcaattctaagccttctgaaagtgacaaagcatgcattctaaagggcgagggttgctataaaactctgatggtcttgccatactactgctattaaaatcagtttatgtcaccttagtaggatgaaagtctttttaaaatagtcactaaatgtacgtacttttctaatttgactttgctaatttagaatgtctctattccttgcttcagagcaatgcattcattccttaccccttctagccttcccccataaatttggagaatagtttgagtacaggtttcctagggttagacaatagtactctcaggaagacaagctggctacccagaggataagatttccaggccttggggagctttttctaatccagaaattgtctcctctatttctttgtggaaatgtgtatgcccaccactagagatttctttctttggtttgatcttgatttcttcttgtaaattgcatataccttttcagaatgatgaaatatttaataataactcttaatatatggagcttcccaggtggcacagatggtaaagaattcgcctgtcatttcaggagacacaagagacctgagttcgatccctgggtcgggaagattccctggagtaggaaatggcaacccactccagtattcttgcctggaaaattctatgagtagaggagccaggaaggctacagtccatggggtggcaaagagttggacatgactgagcaagcacacatgtgtaacttaatagtatcctgtgaatacatttattgaccgtttcctaagagtagacttaaattatgggggacatatgaagaaattggctagtgagttccaggtgtgggagacagcttcagaaagcagagtatagcagtgaaattcaggttttattcatttacctgatatctgagttcttgtcccatttcctgggctgtttcaggtaagaattcagtgccaagaaattgtgctactagtacttggggcaaagtaatttggaatcattcttttttatttatttattttatatggctacacctggtctcacttgtggcatacagaatctttggtcatggcacacaaactcttagttgaggcatgaggaagccagttccctgaacaggggttgaacctggaacccctgcattgggagtacagatgtttagccactggaccacaaggcaggttcctgaaattgttccccactcctctctttctctcccactagtgcttagttgctcagtcgtgtccgactctttgcgatcccatgggactctagcctgccagactcctctgtccttgggatttttcaggcaagaatattggagcaggttgccatttccttctccaggggatcttcctgacccaggaatcaaacctgcatctcctgtgtctcctgctttgaaggcagattctttacccactgagccattggggaagtcttctcctacccacatctaatcatcagaaggctgtctccaccttcacagaatatccagagtctgatcacttcttgtattcactgtgagtgccccacctgaagccttagcagcatgtttcctagagtaacaaatgcctctaaatttatctccctttttccactgccctgtagtatgtccttcagtcagtggccaggatgactctttcaccctcctcaaaacttgacagtggtttcctagcacatttggaataacactcatagtcctccctctgtagcctggcccctgcctgcctctccctctttctccctcctaccttgacctgcttgttccaaccacactggctcctgagctttcctgcaaagcgcaaagcactcgccttccctgggaccttggagcatactctcctctagaatgcttcttgtccacctcttcttgtgcccactgctttattttattcagcattctgcaggctttcctgatacagcattgaactagctctcctcatccatctctctctgatggacatgttatctgatgccgaattctgttttggttcatttctgtctgtctaccaccctagaaggtcatctcttcagggtcaggggctttgtcttgatcattgttattcttttctattatctgaatccatccttgacatataattagagttcaagaattacttcttaaaagaaaaaaggaataaatgcatggttgattaagtgatttgcttactattgggcaggcttatttctgttcctagagagtcctacttttaattcctttctgccatccatctcgcatacataccttagcatgacgaaatattcttaacacaagttatttc

SEQ ID NO: 39474 - DNA, 791 bp, Bovine  19866881168781
  misc_feature (1)..(1): n is a, c, g, or t
ncatgggattttctaggcaagagtactggagtggggtgccattgccttctccataagggctcttaagacaggggattccaaggttctgacaactaggcagagtttagataaggagtggatgaggaatcatggcatccttgcttctgagaaggaacaggctggaaaggggccagagaagggtgctctaaggcaggggtccccaccctctaggatctaatgcttgatgaggtggagctgatgtaaataatagaaataaaatgcacaatgaatgcaacgtgctcgaattctccctaaactatactctctactttgtccacggaaaaatgtccctggtgccagaaggttggcaaccctgatctaaggcatggaggtcagctcttactgagactaagggcagaactgcattctactccaattatttcatcatacactgatgcaatctttcttaagagcacccttccttgtagataatcaggaaaggtgcaattgccaattaaagctatctcagatttggccattttaattagcctccttcctatttaaaataattattttcaggtaaatgtgcagtttctcttccagccacttccccctctcccctccaggaaggaatctaggtgcccaatagctatcaggggtctcagatctgtatgaaggtccttcagaagtgccccgagtcactgccagtgtctacagtgacagtggcccttgtccaccgggtggctgctcacccactaagggaagtcccctttcagggtgaaaatcacacgaacgctcccctctcagcctga

SEQ ID NO: 39475 - DNA, 1287 bp, Bovine  19866881247105
  misc_feature (1)..(1): n is a, c, g, or t
ncctgcagctcttgcactggcagacagattgttcaccactgtgtcacctgggaagccccgtgtctaaatatgcaatcttaatgaagactattgcacaatgactcgtttattctatttgtgcatagtggtaaataatccaaagtcacagtggatatgaacctgtggctaaaattatacactatgttgaaacaaatggtgaacgcaagcccccaattttcccaaatctataccccctttgatgaactactcaaaccaaaacacacagacacagacacacacacacacacacacacacacacatgataatggggaatgtagttttacaattaacagacacagccaaggggatcatttctaagttgctattctatatcacaaatgattataatgaatttttttttctaaactctcttttaggttatgtatccactacttttagaattcaaatattcctctttatagataacaattccactcttactatcccctccttcacagtcacctcatgaatacagaagacatgaacaatagtaaaaacatttatggtttgaagcaacaacatgaaatgtggaatggcaggtctaggagacaggcagtttcctctttgtgactttatgcccgtggaattctcctgtcataatctgacacaaaaagtaactgtgaaagggggctaatatttatgcagcatctcccttgtgcaaggcactgtcctcataagatggtcctagacacaggcgtgacccatcttgttttgtagatgaggtgtcagtggctctggaaggaagacttgctcagggtcacaaaacttgctcacaggcctgagtagggaagcaaatgaaaactttctgactccagaaattctggtttctccattaactatattgtgtctaattccaagagatagatagttctttttaaaggaagtaccaggttggccaaaaagttcattcagttttttacacccaatcttacagaaaaacctgaacaaactttttgaccaatcaaataaataaaacagctgccagtgagcaagactccctggacgagaagctagtgccctcctaaaatttgcattcatatttgtaaatgagaccaggctcactgcgcttgagggaaaataaaccttttcaagcatattataggaagtaatagagattctagcagataatcacgctgaaagaccagttccaatcactcttttttcagtctcaatctattttcttgttgaatctacactgtatactacatgtaaacacagacacacacacacacacacacacacacacc

SEQ ID NO: 39476 - DNA, 1104 bp, Bovine  19866881266894
  misc_feature (1)..(1): n is a, c, g, or t
nttttttgtgttgccctcctgaacttatctgttatatttaaatactcagagtttgaagagaaaatctctcctccttgcattgtctcctttggcaattgctacacaaacatcacagattgtgaagtccagggaataatgttcttttttttttttgtcccagtatcatatagagaaatagttgagcaactcgagaactatagatattcattagaaaaactcatcaaagaaatcagtggtgatttgagttttgccgaggagaaatgcacatagattgaacagaaaataaaatcagaataatcaccaagctaacatggatgataatgttataaacactggtcaagtgagtacaactaaaatgtgtatatttcctggccattaattagcatttaaccactaacattcaaaagatacccattaagttccaactaggagtagttggtaattgataggatggtgactttttagaaatttactttttttagatgttataacatttgaagtataaattttagttatttcatgttgataattcacagtttaagtacacaagatcatactcttaaaaattcattcctaatgatgttagaaagtaaagtaagttaaagattttaacaaggtgccagaacatttaaattgtttttgttgttgttttttggtccttcagaagattctaacagaagcattgttgttggaaagtaataagtaagctaattttctatatgaaaatttattcctctggagtctgaatatccccagaggataatgcacatagtctagacagcccataaatttttcaagagaactatgcaggcatgtgtttatgattattttaattacaaagagaattcttgtgaaaagaatacatttatgtattacttattctggcttattcatataaatactatatatgcaagcaagtgatatggttagttgaatcattttcacatttctgtttctgcacacactagtaacaagtaattaaatgatttattttgaatcttaacttgagatccataaactagtgatggttacagttgactctctctcttttttttttcttgtggtaagaacacttactgttcatggggttctcaaggcaagaat

SEQ ID NO: 39477 - DNA, 2473 bp, Bovine  19866881269611
  misc_feature (1)..(1): n is a, c, g, or t
ntgatacctatttcttgctgactttgcagatgatctcctgggcaatatggagttaatactgagagatctggttagtctctgttaataagttaaattggaacaagtgaacctagaagttgaggttatggcagtgcttatggcaccccacttcagtactcttgcctggaaaatcccatggacggaggagcctggtaggctgcagcccaggggtcgctaagagtcggacacgactgagcgacttcactttgacttttcactttcatgcattggaggaggaaatggcaacccactccagtgttcttgcctggagaacctcagggacgggggagcctggtgggctgctgtctatggggtcgcgcagagtcggacacgactgaagcgccttagcagcagcagcagcagcagctttgttgttactgttgttgaggctcagctgtagctatttgctgacttcaagttttagggaaaacttaggggttcttatattcactgtttacatttctccttgatttttctttcaacaaaacagactttagtactacaatatgtacaaaggttacatctcttgattgtaaagaagattttcaatattctcagaatgttaaggtgactggattgatccattcaacatctgttctgctatcaacatcattttagttttgaactgtgggcagcagcgaagaaaatcagatagaatgctgagcagtgcactcaaggtagacccacctcaaagctacctccctcaggaacacatccttaaatacaggcacagaatggcttctttttgacttttaaaacagcagatttcagatatttagctgttttgtccattaaaagaaagagattgattctaccccagatgttcccatgttaccatctgtatcgccatcttttcataaaataattatgctcacctcaaaagaattagaaaagatctttaccttagaattacttcaagttcttttaattaaatatttaactttatgaaaaatttctctacattttcctttttttccttatttcatgatcagttggtgccaaagccctggtctgatggtaatttttattcttcacttttagtacctgccagttcaaagcattatatttattatgtatctttctctgtcatccattaagtgttcttctcctgagacgtggaaaaaaagtgttgttcttatttattgttataatcctcatcatacccaggcagccccttgtacatgtctgatatacagtcagtgttcagtaataagttgctaaaggttgtgccatgcatgtgatccaggagaagctgatttaaaaaaaaaaaacaaaaactcagtgcatggttgagtgagaataaaatttgggcaaaccaagacttttttttacctaaaatgtcccaatctttactgtagagagagcacctagctccacaatgacacacacttaaaaaagtctcatttcaccaattatctctgctttatggatccagtgattacctaggggatatcttgagggccatccctaattacttagttttcctttttaaaggcattcctatttttctagcttaaacaatttcaacagctctggggtagacaataataagtgtcttagaaataaattataggctaaaggcattgtcgagccatttgcatttaagactcatttactgaaattatcaggctgggttataaaagactgtggctgaggcacctgctgcttaagactttcaaatctattttgacttagaaatgatttctaacataacaggaatcttttactactaacaatagttctgttaacctgttatcaaagataaagttcttgtatctaagacttttgttgttcagctgctcactcaagtccaactctttgcaaccccatggactgcaggaagccaggcttttctgtacttcactatcttctggagtttgctcagattcaatgtccattgaattggtgatgtcatccaaccatctcatcctcagtcgtccccttctcctcctgccttcaactttcctagcctcagggtcttttccaatgagtcagctctttgcatcagatggccaaaatattggagcttcagcttcagcatcagtccttccaatgaatattcagggttgatttcctttaggattgactggtttgatctccttcctatccaagggactctcaaaagttttctccagcaccacagttcaaaagcatcaattcttaggcactcagccatctttacggtccaactctcatgtctgtacatgattactggaaaatccttagctttgactacatagagtgaggtatttaacacagcagaaagaaaccacatacttttgccttcctgcagaagggacagtatatgacagaaaggtggagttctgttcctaccactcctaattctcaaactctggccaactctctggtttgacaaagaattagtcttagaagctgcagttcttcatgcagctgacctctgaggctgtcataa

SEQ ID NO: 39478 - DNA, 1245 bp, Bovine  19866881291791
  misc_feature (1)..(1): n is a, c, g, or t
nttcatttaaaggactgatcagaatgtttcccatataaataatacttcttatagcttatacacattgttaataattggttaactgcatgcttagtggtaaattcattacaaatgcattttaagctggagtcatgctaagcgcttttttaaagaatttgtggatccagaacacttcagactttacagttggaaggaggatggtaatatgacaatttcaaacctgcagactcataattaaattctgaaacacttgtgcagactgaaaaatttgagtactgtgccatcttatgagcaactttaccttgaaagtctgggtttggagatgatataaatatcattgtacttctcataaagaattgtttattctatgtttatattttagaacctgctaagtttaatttgtattggtattattttaatcatctaatctaccattaacacagtttgcatttaataagtactttttcttctttatgttgccagtaaaatgacttggtctctacaactgtttttatcttctaatgttttactaggctatttattcccttgtactaactacccatatttattgggtataaagaccctcacatttccctaactttcagcagcaattccataaacccagttatctctaattcctctaaaccatgactttgtcatgacccctgtgttggctgttatgtatgtagcatcacctgctcttcctttttttcatcttataggttaaatttctatattaacactctgtatctccacctgcaatctaataagagcaataaattttcttatgtcttggaagaactatcaatcaaattgcctaccctctttgccaaggtatagatggcataatttcccagccagtcattaagactttagtctcctaggttttcagtattaagttgaatgaaccaactgtagtaatttcagaagaatctccttgctagtcagacttaaaaactgctagtcagacttaaaaactggttttcattttatgatatggtatcactatttttttcttctatcattaaaatgatttatatccttcctttctccctacctttctctctgtttctctctcatctctttctctctttcactggccctttggcttaaattcagttcagttcagttcagttcagtcgctcagtcgtgtccgactctttgcgaccccatgaattgcagcacgccaggcctccctgtccatcaccaactcccagagttcactcagagtcacgtccatgagca

SEQ ID NO: 39479 - DNA, 1025 bp, Bovine  19866881332809
  misc_feature (1)..(1): n is a, c, g, or t
naatagcattcatattttaaaatgtgttttcatctacgaaaaagctttggagttgaaccatcagttttcacctaaccagtctattctgtaataagtcttatcaagaactctgtttacgcttttgcatagtgacttgactatggcaaggttaaagtatgtgcacatagggttagaacaatttacctggtctgtggaggtcttaaactttggcacaaattgtaattaagtgtattaatctgtttttcatattgattccaagtctgttattcaataacagattctgggcaagtgaaacctgaacccttctgagcaaaaactcttctgcttctatgccaataaagtatcatctcttgattatgatttcgtttatagcctttccatagctccttcaaatggtattctagatgggctataaagcagttaataagaataaattaaaatttgtacttagcactaaaatgtaaattaattgtatgttttctcccaaatctaaccattttaaacatctggtatatattttagtgcttcattcgctctaatggtgatgattttagaaagttgttaaaactgcttttcacttccgcatcatggcagtgcaagggatgtcagcactgaagcatctcttacaaaatcattagaaaaacaaccagtcctccttggtttatcataaagtaaaatagagcagaacattatcatctgcccactgccaaccagacaatgaaaccactggcctgaccgtgaagaaagcttaaagttttcaagaatcaagggcattaagtacagaaaattaatcttttcactgccatgttttattcttttgaatatcaattttcaccagctgtgatagcttgtgtagcatctgttagaaagtagggaaaaaatgcacagagattgtacttaagtacagcaatagttttatttattttttgcttatgactaaagccgacagaatcatgggaaattcatgacttgcaaatgatataaattacataaagattgaaaatgctcataacttacttttaatt

SEQ ID NO: 39480 - DNA, 1274 bp, Bovine  19866881359033
  misc_feature (1)..(1): n is a, c, g, or t
naatttttttttttcttaagtggccacacttacttatttagttattgtcatgaaaactttcaattgcatgtggaaaagaatcttaaaaaagattacagcagtagattgacctgaaacttgatagttgactataatatattaatatatgtttggctctctgtaaaattaaaaaaatctggagaagggaatggcagtccacttcagtattcttgcctggagaattccatggatagagaaacctggcgggctacagttcgtggggtctcaaagagtcgggcatgactgaatgactaacacacacacacaataaaaatcgcgtttcatgctgtatatgattctgataagatgttgaagtagctgtaagctgaaacttagaatctgagcaaaataacaaagtgttaataataaaagtggtgctaataacaattactatttgtggaaaagtttctctgtgccaggcacagtgctgaatactttacatacattatcctatttacttatcagagcaactcaaagaaataggtatcagtatcttcctttcctagatgaagatgcaaagttggaaactaagcaatttgctgtaggtcacacatagagagtgtggaaggcagcctcaggtctcttgtactttaatgttaccaccatgagctttctgagttatctcactaataaatgacagggctcggatcttctaattcaggatactattgtgttttggactatagtatactttgctacaaaagtatattatttttgagagttcacataagcagtctttattgggcgaatatggatctatttacatacatctgatgatgcaaatgagctaagctagttggcattcagcccgcagtgagtgaaattgcccagctatcattaaatcagttgatttacgagataagaaaaataatatggttcaataaaagtgtgtcttatgtaccatctttttctaatgtttaattacttttcctctctttgattaatatcctttccgaggtctcatactggcttcatcttgatgaatatgcaatgattttgtcccagtatgcctacatcagtgttgaaggaaaaatattgacctatgtgtcaaagaatctttcccttttattcttattcttaattaaaaccatttaacctgccctcagacccactgtgcctcattggagactgctgagcattcaaaccctttggattagccccacagtgtgaccacagagctcatgctggttggcaggttaatgatggatgcgtctcatttcccaagagaaggaaaa

SEQ ID NO: 39481 - DNA, 1060 bp, Bovine  19866881392555
  misc_feature (1)..(1): n is a, c, g, or t
ncaaggactatcctggcattggctggagaaggtgagtaataagaaaggtttctagtccctaaatctacgtaaacaatttgctttccaagcatttctctctccctagttgatctatgttgggttcccatgattaacattacttgttttagtaaaaaatctacctgccaatgcagaaaatgcaagagacgtgggtttgatccctgggtctggaagatcccctggagttggaaatggcaacccattccaatattcttgcctggaaaattccatggaaagaggattcttgtgggttacagtccaggggtctcaaagagtcggacacaactgagtgactgagcacacatgatatatcatagcactcatgcaaattcaggtcatggcaggcagatgggggttagttgttacacatttttagggaagaagacaagacttcattggtaaacatccagcttctgatagctcatgcagttgggaacataattggaatatgcctggtagaatgagttcaaaattaggaatcaagagatgtgacttcttgacctggagccgccactaacactggcaaagtacctgatctgcatgtcctcatttcctgctctgtcaggctggcacattgtgagagggaaaaagatgaaggctgtgaaaatggcactgaagaagctaaaatgtgctatgggaatgtaaacgggtgacttgaggacaaattagaggagcggctgtttctatcacttagagcaatggtctccatccccagacacacatgccatttcatttcttttaggccctcccttggctctgtctgccatcagctcagtgaggacaacagagcaatatggccacttgctttgaggagctccttttaagataagattctgtcctgtgatcataagaaatggggtcaggttcaagagaaatgaagattttcatgttctcaaagtgcagtggcttcctccttttgtctgttatttttatggaaggagaaaaaagtcaatagtgtttaatggggggaaaataacaagaataacaaaatcaaggtcacaaatcttctcaagcattggcc

SEQ ID NO: 39482 - DNA, 902 bp, Bovine  19866881421825
  misc_feature (1)..(1): n is a, c, g, or t
nctaagttcaaattccttccttcctttctgtcttccatcatccatctatccttttatctatctgcctgtctccccatccagctatcaaccaagcagtagaggagaaagaaaaaggaattaagcatttgcttagaaagaaatttggaatttaactaattctaatatatcagtaggatttggtggctgtaaagtgctcacttgtagtaggttcagcatggaatgcattattaaagaaacagtgctttcaatgagtatcaattttttcaaaacctaacaactggctttattcaagaaacccaggagatttgaagggatgtgtataatcttactacagaacgatcacgttactaagatatgaacattatatctgaaaggaaagacatgatcaacaattattcttttctttcagtaagaagaaagccaggtaggtgtatgtctaaacttccttttccttccttaatgaaactgctattgatttttcatgctactgaatcattgcctagaagcaatttcttttagctgcaggttctcacatttaatttggatgtatgcttaagggagagtttatcaatacaatctccagaggaacaccaaaaggtttatattataaagaaacaatgaaagcaattttatcaattttgttaaacacaaagatgatcaaagaattactaaagaatggtatttagaaagaaatttcaatgtgaatctgggtcatatcaacatagtcatcactctgaatgttctcagtgggcaaaaatattaaaaatttccatgagcaaaacataaacttgatactattagaggaaagggcaaatatattcattcaccaaaagctggccttcaagttgactttgcgacccaaaattaatatctccccatgttctttagcaccatcccttatt

SEQ ID NO: 39483 - DNA, 1742 bp, Bovine  19866881486630
  misc_feature (1)..(1): n is a, c, g, or t
ntagtcaaagctgtagattttccagtagtcatgtatggatgtaagagtcggaacataaagaagactgagtgctgaagacttgatacttttgaaccatggtgctgcagaagaatctcgagagtcccttggactgcaaaggagatcacacctgtcattcctaaaggaaatcaaccctgaatactcattggatggactgatgctaaagctgaagctccaatactttggccacctaatgtgaagagctgactcattggaaaagaccctgattctgggaaagattgagggcaggaggagaaggggatgacagaggatgaaatggttggatggcatcactgactcagtggacatgagtgtgagcaaactcagggaaatagtcaagggcagggaaacctagcatgcagcatttcatggggtcacaaagagttggacacaacttagggactgaacaataacaagtgctttcctggcagttccctaatcacagtagactcctgattttctctgcactgggatatgtatccatctctacatgtccggtgatagaacagaagtgacgctgatgttaccgtagcaataacttggagcatagtatctaactctgggtagatgtattgattagttggttaatttctgtatttatatcatttatgtatttatatctctttctctttgacaacagagtttctgacttctcttattaaaaggcagtgctgataaatagaaatctagtattagaaaaccagaacaagtggaggaaaagaaaacatgctaaatattagtgtggttaatgtagtttctgtgattaatgagcagatttggccttacagtcaaactatagcaaagagaatcatgagaagtcaccagtccctctggtaatgttaggtcagcttcagacttttccaggatttctgtcccaatttttctaaaaacttctcactgacttggactgttcagcataataaagtgttacaataatcaagatatttagaaaactcacatgtatggtattctgctgtcagacctatgtggatcagcatcctaggaaaaaaaagataagcaagtgttcttgaaacatgtagaacaaatatcatatattagcacatgtgtgtggaatctagaaaaatgtataaatgatcttatttgcaaagcagaaacagaggcacagatatagagaacaaatgtttggatacaaaggagatgtgggaggaattgggagattgggactgacacatatccactactgatactctgtataaaatagataactaatgagaaccgactgtatggcacagggaactctactctacgctctgtggtgacctgaagtggaaagaagaccaaaggtgagggaatataggtgtatgtatgactgattgatttactgtatagtagaaacgaactcaacatcgcaaaggaaccatacttcagtaaacattaaaaaaataaaatataggaaaaagagaacacggaacatgtgtggccttaaacagcaaggagagagaaactttagttcccccaatcaggtgaatgataacaattcctctgtacaccaaaggataaaaacagagtcttatttgaggaaagaatgttcctcggatggccagcctctgttgtcagcatgttgtcaccgttttgtggaggtggacagtgaagggggtgagtggcagaaaggacctcagagcctcagctgctaggtgggaaaacgtggacgctctcccactgctggggtgtgtgtcatggac

SEQ ID NO: 39484 - DNA, 1011 bp, Bovine  19866881802305
  misc_feature (1)..(1): n is a, c, g, or t
ngagatcagcccctgggatttctttggaaggaatgatgctgaagctgaaactccagtactttggccacctcatgagaagagttgactcattggaaaagactctgatgctgggagggattgggggcaagaggagaaggggacgacagaggatgagatggttggatggcatcactgactcaatggacatgagtctgggtgaactccaggagttggtgatggacagggaggcctggcatgctgcgattcatggggtcacaaagagttgtacacgactgagcgactgatctgatctgatctgatctgatagtataattgatgcacttttactgtacatctgaaatacaacattgtaaatcaactatattccagtaaaaatgaaaaaagaatattctagttcaaagtcaaatctgctactcacctccctgtgtgactcagtttcctcagatgtcattggagataataatctcataagatatttatgaagaatcaatgaaataaagcaactaaaagaaaccagggtgtaataactggtcaatcaatataaatattatcactgctattatttctagcacatctgtggaaatttttaaaagatttactttataggttattaattctgtgcatgacagtattttatgtagctctagagatttttaaatgagcctaggaagcaaattttggcatctctactcaacacttctctgcaaaataaaaaaattaaaactactaaaaagcatgaagtgttttaaatcaaagttgtcttataaactctctgaaaagattaaatgaaaactgaatcaatttttgagaactttaagacactaaattttcaggcaaatataaaaacttcagataaatgttttttcatcaaatatagctgcctgtgtcaaatttcctctactattagtgtcatacctatcacctaaaatactgcactaaagttgacatcccactgtttaacgttggtgacatttatttttaagaaggaaaaataagaaggaaaaacaaaaa

SEQ ID NO: 39485 - DNA, 1037 bp, Bovine  19866881840807
  misc_feature (1)..(1): n is a, c, g, or t
nctcattaatctcaactatatcaatctggccccattatgagggtcaaagataggttaattctaataagtggatgaataccagttcataaacaggcatgcgtttaacagatattatcttagcaagaaagcaataattagaacaattacttagtgaggtgatttcaggggaaaaaatgtcataaatacagctcctgttttctccctctggattatcaggaggatgaaaagtaagctatgttcttaaaattgacatttgaaagaggaatgcagagtaaattattttctctttgggaaaacattttttaaaaataataggcaaaatattttcactaagggagcaataatttcactcaaatcctcgtacagtgaaaatagaaaaatatgggaatttgacatcagattactttggttttgatcccataacttcactacttgactttgggtaagtaatttaattttaacaggtctctgtttctttttccatgaagtggggtgacatttcacaaagttgttttaaggattgtacaagaaaacatgtgaaagcttcaaacacaatccttcatgtactgcaattattcagtcagtgttctttatttcccctgaatgatgaactctaatcaaatctttgactggtctccctttccaaaaaatagctgttgtaattttgaagatgagcaaaataactgttcactcataccaaatggtttttctttttgctttacttggatccctactaagatcttgctttcttttctttcatatatcttaacagatttaaaagcactgtttatacttatattgtcaagagtaatcattcattttgaagtaaggcaatgtcccattgtttttattggtgcctgttggggggaaagttagaattttatcaagtctacttaaatcttacatttcttgcatttcccaagaggaattctagcttcatctaaagttatctctaatgattctcatgttaacgtgtttttcctcaaaacagaatcttattcctgaatgtcctgttcttttctcctgcatggtaacca

SEQ ID NO: 39486 - DNA, 1198 bp, Bovine  19866882017717
  misc_feature (1)..(1): n is a, c, g, or t
ntcgatctgcactaaatctctttagaagctccagaatagcttaactgtccagaaggcagttaagctttgggattggcaatgtagttagaaagaaactggggaacttgtcctaaaactgcatatgtcaaggacaatgcttttacagatattatgtttctttggcttatttcggagggctattgatgattttgaggaggtgagaggttaagtcctctaaggtcccttttgataaacacttaactgtcagtcaattgactgttggacattagggctaatggaaggtaaggagagacatggtatgctggtgaggaatgggggcatttccctggaggctactcagtggcataactggaggctcaggagtgtgagtgaggccatttgtcagagcatgcacgcagcttcagcacctgctgctttgaaagacagttgatcttaatccatatcaataaattcttccagtctcagagacatgtctaaaatgcttcatttaggctttgaatcaatgggtttcagtcaacctttctctatttcagccccccgggagacattttctctagaaataaatcatgagtaagtcacaaagcacttaccagcttcagaacacttaggtaatcatctccttgaaaatagtgaacacaggatattgctacgcctattgacttgtagagctagaagggagctttagagctaatttagtttaattcatcaatttcactgaaaagctgtactccaaagaccctaggtagtttctccaagttcattcagcaagtccaaggcagagtaagacctgagccttgtcacaggtggctggctcatttccacgtgtccctcttggcattccttcaatggaagagggcaaccgacagaacagatgaggtcttctggactgtttatgaattacagtgacctcagtggaggcaaccagtgacacaacagatcaaagatatctaccaaagttgaagactcagtttaaccctttaaacaaaatccaaattctgttcctacttcattgctacttcaaaacccctttaagccccatcccagatctccccaactaagcagaaggtaatgagaccaaatatctgctcactttaaacaactatacttttatttgtaacattcatgctgtgggaggtagtttaactttgccatcaaagatccatctagtcaaagctatggttttgccagtagtcatgta

SEQ ID NO: 39487 - DNA, 720 bp, Bovine  19866882159134
  misc_feature (1)..(1): n is a, c, g, or t
naatggatattcttctaaaaggttaaggacagcatcacctgcttgaagctaaagaataaaatgcacaacctacctgtgagctgtcgccttctacttcgagttgtttcacaattcgcggagcagggtgtaaacttggaccaagcagtgaaggtgcagtcattgcgacatgggactgtacattcttgcgtgaggggaggcatgctgttcatctgcttgaggcattccgtcatttctgctgattggttattatcagagatgcatgagacagctaaaaaaaaaaaaaaaaaaaaggatacttttgttgctattttaattaaatcaagctgctgctgattcttggacgaaatagcagaattccctaatgtttgaaaaattttgttatcactgtgattgcaaaaggtgttcaacatagctaaccttatttctctctggaaattaaatgtttattgttgccagtggaggtatttgataatttaattggtttcattattaatccaaaccctgcactgacagcaaccaaaataattgttcagtaattttctgtatgtcctgcttgtgagcatttgatctctagagatggtataaaactagaaaacagaatctacaacagaacaatacaaagatgaaaaaggaccaaaccatgaaaaaaatcatttgcatctttcatagatttgattttttgttaacttgctaaatagcacttatgtttaaatggtccta

SEQ ID NO: 39488 - DNA, 941 bp, Bovine  19866880232474
  misc_feature (1)..(1): n is a, c, g, or t
natgctgggaaagattgaaggcaggaggagaaggggacgacagaggatgaaatggttggatggcatcaccaactagatggacatgagtttgagcaacctccaggagttagtgatggacagggaagccttgtgtgctgcagtccatggggtctcaaagagtcatacatgactgagtgactgaactgaactgatctcctgcattgtaggcagattctttaccatctgagccaccaggaaagcccttgtgttgatggctgtcagaggaatgactgtggaaggcagtcaggcagaggccatggtatgcgggtgtaagctggaaagaagacccatgctcctgcttccggccttgagtggggctttccttctggctggacttgggttcatctttgtctgagaacatggctatctggaagtgcccacagggatccagggtggaaactttgttggcagccaccagcaggaagggaggtttctgtcttagaaggtgaagttttgtttttctgggtagcctagagtgaaaagacatttatgagctcctcatggtccaggagggcccctcgcgccagcggtgagcaaacatgggcgctgcaggttgataaatgcacggtcttttgttgggcacacctggctcaaacatcacacgggatgggagtgactccgtcagtccctactccctgcatagcagcacggagtgatttcagacattctcctttgggctctgacagctgtgtcagcttctggccacactcagaggcgaaaggcatgtcaaaagtgagttttcaacctgcagcctgccgccttcctgcccatccgagtcttgctgccccagccacacatctgtcctctctgcttgcctttgcgctggcatccaaggtccagcccgttgcctgtttctgataggccctaaacaaagaataaccttgtatgtcatacaccctttt

SEQ ID NO: 39489 - DNA, 2555 bp, Bovine  19866880380366
  misc_feature (1)..(1): n is a, c, g, or t
ntttttcagggcaagtctgtacatatataacttagacgaaccttcaagtgcctctcttcctccttcctgtcagactgcctacctgcctgtggtagcctttaataaagccccagctgtgagcaggacttctgcttggtgctaaggacataaagacacaggacccagctttgcacgtcatggagcttccagccaggtgtggatctgtgcttgtgaatcagtgcagagagtgggtggagatccatgccagggtgagtaagcaggacctgtgagtagaatgtactggaaaggctcctgaggctggctgtatcagggaaggcttcctggaagaggtaacacccaagaagaatcttgaaggaacaggaagagttgggaagtccaggaggctggggatttcaggcagaaagaacagctggaggggtgctcggctgaacgcaggggatgaagtgatcattgacacaaagagccctttgtctctgctgatacagctcctacagcacagggacgatctacccgcagtgcatactcccggaggtttatgatgatgaaatgtctcctccttggcgcagactgccatgcctaagtggaataagcttatcagagcacactgaggtttatgtgaaaacccccgggatccaagaagttagagtcacacgcactagagtaatagcaaatgagatttgcggggtccagaaaaaacactagagtgtgctaaacaccaatgggaagaacccagaaaggagagagagtgaagacacccgacaaaaaggagacaaaggatgcagcaaaatctctgctcccagatgggaggacagactggccttggatggggaggagggggcgctggcatagctttggtgagtgggcttctataactgcacctggggagctggaggagctgcattctggtagcttctgttttctttgggaagcaggagactgaaacattgtcagagaatatgggagagtatagcttgaagtctggagaaagtagggattggtgagaatattctccaggcaagaatactagagttggtagccaactctagtatttccttctccagtggatcttcccaacccagggatcgagcccagtctcctgcattgcaggcagattctttaccagcctagccacaggggaagcccataggcacttagtaactagttttttaaatgaataaatggaacatctttcatttcctatagtattctttctttaacagccttttctaatcttcctgatttacagtcagtgcatttgttttaaggcaaagtttcattgctgttatctctctgcctctttctactcctttccatcaatagaaatgcccaaaaccttatctctgaatttagtgttcatggagctaatattccagttgaaactgacaattacttgttaactctattctactaagtagctgtcttcaaattactaattttcttggttgatttgtgagctttgttattatacattatttaatttctctagctgtgggagaaatgaggatagttaaccaccattcatcgtttctcagcttttacagaatacttagatatttggttcttcatacttcatatgccttttttttggcatctgcaatgtaactttatccttcttgtcctgttatttagatttttatattactattgctttatgatagataggatgtttagatctatttcattgattaggaaggagatgccagagagattgaatgattttgccatggtcagataattaatttgtcaagacttttaggtaaggatatagccacagtttaatagatgtgtgtgactgattaagatatatttttgtaagaacaagtgacagtaaatttgttaatgctgtttgaagctattcttttaacagctgatatttgcaaaattttatatgtatttgttaaataccttttttctgatgggtatatttttttgttatagaaatcatttcagactgggacaaatgcacgtctagatgaacgcatttttgctatgtgtcaagtgaaaaatcagcccttggtttaccttatgctcacaactcatcccagtttgtatagagttgacaatctctcagatgaggtaagattgattcatttttttattcacttttacttgaacatttataaggctaattgtattgcatccattgaagaaatgaagaaaggtgttttctttcttaaagcttttcattttattcttatataaagaaattttggctttgggaagctcctgaaaatagtacttttatttaagttattaaagtaataaactttactgtttgtttcagatgaatctttagagagatctaaataaatgaagacattgtcaaattgactcgagcaacctatgatttatttatttaaacaggttgatctgaaaggagtatccagtgtgaaattacacttgaatgcccaggtcaatgtttactgtaataataatcttgaattgaaaagaaaatatttgtccaagttataacattattttcctttgtgggaagttttctagagttaaagctgcaaccatgaaaatgttaaaccataatctttctataatacatt

SEQ ID NO: 39490 - DNA, 1079 bp, Bovine  19866880412320
  misc_feature (1)..(1): n is a, c, g, or t
nctgtctttagaagcgaactggttttccatcatgtagggagcttttctgcccagaggagtgaggacagagagttattttgtaaaggaagaggctggggaggctgtggcgagaagaagcatcgggaagcttaggtgagcggctcagctcttctctccccaccccatccagtgtggggtccccatgcgagtgtgtggctggggaaggaagggcgtgccagatggggcctgagctgaatttaggtgtgggcctctgaatgagcagtgtgatgtttggcctaggctcctgagggtggcaggcccagctgaggcaccagctctgtttagtcagaggactgggcctaggggcagaggcctgcgtgctggtggcctgcctactcattggcaatagagtagttggaggtaccgtgggagaggcaaaggtcctctctgctctgtacccctctcatccccttctctaattttattctttctctcttgcttaagaaactgatgtcatgaagacatgatgtggcccagtaggccagaccccaatgtgaccctgtccagaccccaggtccagacatccctcccccactgctcaggtgtatctcaagggccgggtaccattgcttgtgaattctgggcatctcagacaggcagttttcctgccgacctggttatgccatctaacaaattcatttgggggcgagctcggagatgaggttcagaggagtgtgagaattgtctttttaactgtccccaggatgcctggagcaggcttggaggattcttactaatctaatccctgtcagaaaaagaacgataaaacaattcaggctttagaagccaaatccccttcctgcgctcacactcctcctagctttctcccggactattttccctcctttgtgatgaagtcgtggttcagctcctccataagggtttcagtggatttcatgtttcactcttccatttttcatatttaaatttgctttactctctggtttgacttttccactgacccttgaagaattggcgtattttaaggagggggaagagatctcattataggaaatgagaaaaatgggggcagagtttta

SEQ ID NO: 39491 - DNA, 829 bp, Bovine  19866880476068
  misc_feature (1)..(1): n is a, c, g, or t
nctgggatgtgaaagcccgaggatggtgcccctggcacccctgtggcccagggccactgtcagccgccccacgtgaccctgagcaaacaactcacttcaacctctggtttttcccatctgtaaagaaaagggaataatgaccctcctgcttccaagttttcatgtctagtatctcataattccaggagacagacaggcagggctggtaaggggcacaaagactgtaattattactgctacagataaaattaggtaagtaaataatactccctggactgtaaaagaaactaagtggctgcaaggatcatcccattcttcacaattttcattaaagcaggataggttgggcccctcaaaaggaaaaaccagagtctcagaatattcttgccactgagctccccatggaaggaggcatacaaggcattcactgactaggcaggggtgctgattgcctccagggtgctgacagtgcgtctcacaggcagcaacagtgagaaaggctcagaaacagcccccgaagaggtaaagagagggaacaacaggctcctcttcagctgagcatcagagaagatataaaaagggctgagtggcaggatgagggccaggacaattctctcctcctgctgtgaggtgggagctgtgaccctggagtcccaatagccccacctgcctctcggctgcccctgccggaaactccacggggcccgagcccagacagcaggagcccaggtaagccgccccaggtgccagaagtgaccttggctgcaggaagtcctgtctcctgcctgcagctaattgcagtcgctgcagaggagccgacctaattaca

SEQ ID NO: 39492 - DNA, 1520 bp, Bovine  19866880505701
  misc_feature (1)..(1): n is a, c, g, or t
ngggcttggctccagaacccagcccagccggccagtcttgctcgggctcacccagagtggcaggaagccatggggcagaaatgatcagaaccttctcctggtgtggccttgctgctccttcctggacatgcttttcagcccacaagccactcttgtggcaagtagtgaccgggacggtgggtggtcagcagttccacacaggacacagcccctggggtaccatgtgtgaatagttgtgtctgccactgggaaccccagagtggaggccccaactctgcagagtaagttaaccaggcaggacttgctagaggaggagggggaggaagagaatgcccatgggactcccacaaaattacctccagagggcccttccccagggcaccttcccttgggcctccctgctccttctcacaatgcaaagagtcggggactgggccaagggaattgttccagagagtgtttcagcctctctgtgttcccagcacaagttactatttttctgcccaaagcagaggaaaaaagtctccttcactgtagcaatgggagtggcctccattatgtgtgggaaatccccccgggtacgaagggaggaagatcagcaagagacgtgcagcagggaaagtaaaaatgcagacaggcctgggatgggaagtttgcagagcgctaatcccgcctgcaccaagggactgattttaacaaggcaggctgtttgcgaggcgctgcgggttgactcacatgcactgttgtggcaggctcttctgctttgttctgcgttcagaattctctcatttcagactttcttatccaaaaatgactgtgccgtgaaaaccattcccattttggacagctcctggattgaagggacatttctttacacatcacttctctgcagtgcgctgccaatcaaagaggcagggtagaaagggtgatttcaggctaactccctatctgcatctgcctctgcttctcgctgagctggggtgaggaccctggggaagaagctgtgctcctgggtggaggaaaaggctgggtaattgggctctgcagctacaaaaacccagcagcccacaggggagcccaggcaggtccctccctacaacgctatctctaacggctctagccggatttggacaatagctataatagcaggcattattgagcacaggcactgtgccaggcactttacatgcaccatttcatcctcacagcaactctgaggagggcacctttatcccctcttacagacaaagaaactgagacttggaggacttaggaagtgagtcaggggtctcatgactgaccacggatggagctggttcccagcacagtcctgactcccaaatgcccatccttccaccctcctgcctcatgggcagtacatccatctgctctgtcctgtagcttggactgagaggcactgggtgcagggagctgggctgggaagagctggtgagtacagagcaagaaacccaggtctgctgggtctccccactttcctggtaagccagtcccagcatgtt

SEQ ID NO: 39493 - DNA, 951 bp, Bovine  19866880521640
  misc_feature (1)..(1): n is a, c, g, or t
nctgagatgaaaggaatggaaggtacacatttgttgcatagttttacaaatctccagatagaatattttaaaaaaacttttttggtaatataacttacatttatgatttaggtagaaagaagtatgtgtgtgtgtgtgtgtgtgcatgctcagtcccttcagtcgtgtctgactccgtgtgaagctgtggactgtagccctccaggctccatggggttctccaggcaagaatactggagtgagtttccatgcccttctccaggggatcttcctgatctagggatcgaacccacatctcttacatctcctgcactggcagacaggttctttaccactagcgccacctgggaagccccagaatggactatattgctaggcaaaatattttcattgatgaaaaaaattattttccatagtgaaataaagggtaagacttaaaggagataattttaaagaagggttaagaaaattttaaaaataaaaattttattagctcaattttgttgaaatgttagaatagtatttgaggaagatgtttttggtttagtatatgacctagggtaattgcagtttcctctgtttttctgtgataacttgcccatgtaatagccggaatgatgtatgtgtgcttcagccattcaaggatttagtcaattaagattttataacatgtattgagctcataaaatgaaactcattttttttgcagtcttttctttgaagaacagtgacaccttgtgaaaagataatataatagcaagaaaatagtacttgcacagctcaagaggaattatctgatccatttaacagtaatactcagaattttaaaagtaaatgtcttctttatttagaggacagactggtagactatttgtaaaattatataacaaatcatttatgactgatattttataccattacagctcagattgtttagttcctttataataa

SEQ ID NO: 39494 - DNA, 793 bp, Bovine  19866880527611
  misc_feature (1)..(1): n is a, c, g, or t
nggagtggaggactgtggttgctgcgttattgctctatctgcacaggcaggcacatactcagaactcagcagatacttgctgagtgactggtcccacccatttcctcatccttcttctcctttaccccagtttcttcccttatttaatgtttatcctgctatagcagctgtgtttctgaaaccacctcagaccctctcttgtacaaggtggggtacaaatagatacatgagaaaaagaagacagaacaataacgaatccatgggtacatcagtcaaccgtgcggcttatgtaatgtggctctgctgacctttctcactccctcccagaggcagccccggagggaacaggcgcagaaggcggtggttctgaagttcagctttgtccttaggaggccctcctaccaggctgctcccagagattatgttacctccagacccagctgaagggttgcctagcaacactcacaggactcttcacctctaaatccctcgtttgtgtcttacgtgtacacagagcggtgtgagcctgacccagcgcaccatcctcctccacagctccccacctaaaacaggctgctctgcctgtgtcattggaaatgtcttctatgcctggcctgtgacttccagcctggacctgtgagctcccgtcaagcatgagcatggaggagggcaagcagatcacgctttgagaaccagagccaccatctcagatgagcacaagccagaaaaaaagcaagggagaaagaggagagatgagctgtgagcccacacatgtcctatcaagaccccatca

SEQ ID NO: 39495 - DNA, 1223 bp, Bovine  19866880541583
  misc_feature (1)..(1): n is a, c, g, or t
nactgttctgggtcccgccggctctggttctgggtggacaggtgggctcgaggctggcaggcagaggggagagaagtcagggacaactctgggggcctggtgtctggccaggacctgccctcagtcctgtgccaggctgaagtcaccaagtgtgagacccatcactgggcacaggggtgatgaggcggaaggaaggtctcgggaggccaggcagccattgttggctggcttacctggattaggcttttcatgtggagggaagaaagagatctgctttgtcgcagccgaggcatcaggctggaaacacggttggtgttcctggcaatccccggcactctccagagcttatttgttgccttcccgagacacgtccaaggtgctctctgttatgataacaagtggtgacacagagttagcttgaaatgggataaacaaacagactaaaaataactggatttggggtggcttggcaccaaatccagcttgcaggctgtcgctgctcagccaagggtgaaggcagggatcatcaaaggcaccacgaccctcagagccctgggggagctggggtagggtgtggctgagtccctctcccgtccccactcccgccaccatggagctgtgggctgcctgagggtggaggtgccagatggtgatgagaccccggcgggaggggtatggtgggcccggatgtgagcgaggcggtttatgtctgtttggaggaagctgggccaatgtttggacatctttatggtttggggagtttcttggcctcacccagaggagccacggttgcatcagaattggaggtcctgtccttggtggctcatgcagtgggagaaaagagccaagggagccactctggagtctgtggaaagatggggaagtatgactgctttctaatcccaggctgctgctccagaccaccttgtgcttcatgaagggatttgcgtgatgcgttggaagactgctctgggcgaggcggaggaggaggatgggagtcatacctgtgcggggttgcatacccaggatggatgtacatcttgcagaagacctggcctgaggaaaggcccatcacagggcacagaggaagagagttctggtgcaggacccacctcctctgccgtcactacctgtccatcagtgatgatgctcttagagatcacaggcttgcttcaccactgaccccaggattccctccagcaaacaaacgtccacccggcagt

SEQ ID NO: 39496 - DNA, 3167 bp, Bovine  19866880542766
  misc_feature (1)..(1): n is a, c, g, or t
nagcagacagattgataaattagacccatgaaacgtacaaacttctcttctcaaaacacaccatcaggaaagtgaaagtcagtctataggatggaagaaaacatgtatcctaccctgtaagtaacattctataaatgttatagaattctacttaaagaatacataagtaacattcgcaaattcataagaaaaagacagctcactagaaaaatgtccaaggaaggcctgaaaagatatttcataaaagaggatatccacatggccaaaaaggacatgaaatagtgtttagctttattagtcatcaaagaaacacaaattaaaaccacagtgagataacactatatttaccagaatgactgaggtagaataagcaaacaaacccagaaaatacccaagtgttgacaaggatattgaatactggaaatcacatacactttgtgtaactgtgtctgctgctaagtcacttcagtcgtttccgactctgtgtgaccccatagacagcagcccaccaggctcccccgtccctggggttctccaggcaagaacactggagtggattgccatttccttctccaatgcatgaaagtgaaaagtgaaagtgaagtcgctcagtcatgcctgactcttagcgaccccgtggactgcagcctaccaggttcctccgcccatgggattttctaggcaagagtactggagtggggtgccattgccttctctggtaactgtgtctaccaaggttaaaatatgccttccattctaggtgtatgcccaagaaaagcatgcatgtaaacctcaaaagacatgtattagaatgtcataacaacaccatttgtaacagctctgaactggaaaccacggacatacccatcaagagtatgaaggataaatgaattatggtataaattcacagagtggaatactatatattgcgattaaaatgaacagcctacttctatttccaacaatatggaatgagggtcataaacataaagttgtacttcaataaaaagttaaagcaggaataaaaacaaaaaactagaccaaacaacctaaaaactgatgctccaatgggaggtattcctggggttttgtattaatagtgagagcctccacgtttagaacaggttggatggcaaggccactgagctagttgggcccccagtcaactgaaggggccagcgtggccacctggccagcctctgagccacagttctgggacgtgacaggggaaaaaccttgataatgtcacaaactaaaaacaaggacagagtcttctcacccacaaaagttacagctttgagaattcctttgtttttaatcaatttttactcaggcaacgtagaaatacaattgccttcgtttacaacattacaggtgatagaatatcacagatttcctttaaaatagcgtgaggtgggagtggctgggggaccatggttaaaacatgattgctcattatctgatggttgttgagcctgagccgcagatacttggaaccttgctgtggtgttctctgcatttttgtttctgcttaaagtttttttactataaaaagcaaacacaacacatcattattgaaaaggcttaagtcactatagatctctaagcttctggtatttattcctcttttccctgccgcagctaactgtcaccagtttaggtctgtcttaggaggaaacagatggcatgttctaactaggatgatttgaggaggttttagtagagagaccctatgtaaagtcatgtcaagggaaggcccaaagcatcacacagtaccccagggaaagctttctcacctttaggcccaaggaaccgaacctgggagaagagagccaagcaacttgaaaggggccgggagctttggttgtggtcagtttttggagacactgtaggtagaaactgggagaataaatactctggtctccttctcctccattcctttgatcttgtattggtgctcagcactggctggaaggcaaggtcacccgctggtgcctcccagggcatggggtaggctggagcgtggtggagagtggatctgcaggggcacgtggaagatatccagtgtaggtctaaccatatgttttccagtgtgtttgtgtatgtatatttatgaatccagtgggttttcattgttgtctttttttttttaatatccttgggatcatatcacatgcctcattcagcaacttgtggttttcactcatcagtgtgctggtgttctttccatggcagtacttcaagatctacctcattctgccttgtgcctgatagtattccacaatgtggacgtagaatagtttatcttaccgttaacccttgacaaaaacttaagttgcttccttcttgagactttgttgtcttaaccctggagactctctggccatcttgggaacatctggaaagtggccacatgtaaaatgtcgtttgtttccatggagtctcatgattggttgaaggatttttgtgttgtaggatatacttgaactattcaaacagctctgacttttggccgctgagactgctggggagaaagataaggaaagtcatgaggactggatcaagagttggaagatggagtgtgagttccaggtttgcccctgccttgctgtgtgaccttgggcaagttgcttaacctctctgatctttggttttacctctgtaaactgcagatgatattccaacctgcttcacctgccccctgtagtagttgtgaaggtgttgggaaacaaagggtgagaaagagcttgaggtggaatccggtgacagttccctatcagaagacagggcttgtgcttctgttcgccaggcctctccctgcaggcaagatcatggcagaatttccaagaagggtgctgtttccctgctcccgtcaccccaaccacagccatggctcagatttggcttccctgagtattatccaaccttgtgctttttggttgttttttttccatggggctaatttgctatgggacttggactccttttttcctagaagcctgtatgtctcttgggattggaagacatggtccaaagaccagtagccagtccttctctcttctctgactttagatcagagaggctgcaggtgtcacagtcaccactccacaagggcaggagacaagctagaggatagatctgtgtccatacttataccagagcatcag

SEQ ID NO: 39497 - DNA, 1216 bp, Bovine  19866880591980
  misc_feature (1)..(1): n is a, c, g, or t
natcttaatggtctgctaataactgaacagagtattccttaaattcctgaaagccctaagtctcccagccttgccaaggggctctgtatgttggggcatgtatttaatgcctcagaagtttacaaccctgccttaacatttatttggtgctcgcacagaatctcaagattagttcgaggtgacacatcaggcccttctgtgtgctttcctcatatcttcactgggatccctaagactgttaataatttctcagttttatagataaccagggactttcatacatattattttcagtgatctcaatagctaccctggaaggtgtgtgttaatactattttacaaatgtagctgaaccacgtagaggttaaccagcttgcccaaattctcacatgtagtgagacagtagtaaagctagggcttgaacctaaatctgtgtaagtctgcatcctttccacagcacagaattcccttaggcttacaaacaaagatcactattgaagcatgtttaataatcattatggcttctggagaacaatcaggggattcagatccctcaactcatctcttccccaatctttacccaagccctatacttaacataatgctctacaatccgtgaccaaactctgggatgttggtgtggaatgtactgccataccaacacattcacagaagtggtgccaagtggacactgcacatttaagacactgattaggatattccatcacctccacctcctctgacatcacattatgttgagtgttaacccttttcatcaccaagaagcaatttgctatttaccgtaaatgaagataaaagtgcctctttaatgtttttttattgtagaataaaatacacatatagaaccacacaaatacatagcctaatggattgttccaaagctaacagccctgtaactaccacctaagtcaagagttagaaccttgccaactatcccagaaacctctccatatgctccatcccaaccacaactccctccccttcccccaaattaaccattgtccctgtatttatagtgatcactttcctgcatttctccatagaaactcatgtgtgcattcctagaatactttttttattaaaagctttttcaaaatttgatatgccttttaagtctcctattcatttttttcttcctttccttaaagtttatttgttgaagaaaccgggcaacttgacttgtagaatttcatca

SEQ ID NO: 39498 - DNA, 2058 bp, Bovine  19866880661103
  misc_feature (1)..(1): n is a, c, g, or t
ncaggaggggtggctgttggaatgaagtagctgatggaaagagggtcaagggatggaggggcataacacagcagagctgtggtcgtaggagaatctcactagggagtagctgggtggaaagggattagctcccatttccaggatcaactgtgttgactcacttttagtgacattgtgaaacaagtaatgatcaaccctcctcccccacccctaccccagccgatgattctgtgtagaacccatatattcagaggtgttacagctatggggaatctcttgcctgacccagaagcatttctatataaatactcctcatctcacctcaggatagctacagcctttttaaagaaggagaccagactctgggctgaaagtgggaacataacacagcctgaagctttaccctaagtcagctcccatctcccactccttgcccccgcaccacccccaccaagctgtgttggaatggggacagaaggagaagcaggcagaggctggcagtctgctccttgtatggggagagactgtgtgctcagaacagagataggggtggggtggccccaggctgttggaaattttagcaaaaggtgggattgtatgaacaattctcaagattccccagacaccttgcccacccctagggataagagagaatgaatcaagtgaagattctggaacctcctctgagttcataaggaaatgcttggggtggagaatagccttttcctccttgagttgggaataatacttcttcccacacctcccccagcaagatcaaattatttaatggggattcaattatgtgcttataaaccatttaacagtgtccgctgtgtagttagtagtgatgtcatgtcatgtctgactctttgtgaccccatggtctgtagcctgccaggctcctctgtccatggaattctccaggaaagggtactggagtggttagccattcccttctccagggactcttcccaacccaggtatccaacctgggtctcccgcattgcaggcagattctttactgtctgagccaccaaggaaaccccttttatgtgtatataaataaaaatccagggctaaggtgatattaacaataaataatccaccaattatcggaatgagctcctctttctcttgtttgagtttatcctctccactctttgaaaatcaggaaaaagcagaaagaaaaactttttttaatcataaatcttcttgttttcagaccagaagggacaccctttgaagatggtaagtcattctcaatatgttttctatagtgttaagaagcttctttttagtagaaaattataacaccaatctatctagttaaggctattttctattaatagatcggattaaaactaaataatgctactgagaatttatagtttacaaagaactttcttcccatgtcagcttgatcactttcattgctagttcttctgttacttttgtattggctcttgaactctaggcctacgtggtggggtctacattgagaatagttttaaatttaaatgacctcatagcatgctaaaggtgtccttgaggtaaacatcagaggagtatttatcatgcatttttaactttatatatgttgatcagtgctcttaattgtgtgtaactgccagtagattgacttaacagctatcttttgacacctgtaaatagttagcattctacagaatcttttgcatcttaaattcagtatttaaccaagagccagaaaaatggaaaacttgttctaatgtgtacttagagttgaacttattaaattgattttaaccagatacttaaagttttccctaatacagcatgaatttttaaaatgtgttaaatagatttgtcttagtttatcacagtggctccagaattaacccatcaaggttatttacacaaataatgattgcagaagtatttttaaggagaaaacctgaatgttcagtaggagaaatggttaagcaaattattaaatatctagactgtagagtattatgtacctattaaagaataaggtagatctgattgtatgtctgaggagacaaaaaagttgtagaa

SEQ ID NO: 39499 - DNA, 1433 bp, Bovine  19866880707587
  misc_feature (1)..(1): n is a, c, g, or t
nccctcccttggtaggcaaactgctagctacgacctcgagttaatacctggggccctcaggtgaagtccttcactggggtgtgatagttaatcccccaagggacaccctaggtccagaggagagaaacagtagagtggtcatgcctaggcatggcccaaaccaaagacagacaattgattccttgggaagggcaggggcaggccatacaaagccaagctgcctaggggtgagctccatcatgcagggcagcctgatgcaggggacgcttgtgatggacagagtctcttgaggctcaggacaccacctccatgaggaatcttggtgccaaaggctgtgggcagaggatggtgtcagtgtaggggcccagatgatgcagcaagaacaagcggcagctcccacttactgagcccttccgagtgcctggcaatgtgctgactactttgcatatctttcttctttgcatcttccccaaacccagtgaggtaggttctgttattatctccactttaccaggaaggaaactgagtctaagggaggaatgtgatggtggtcgcgaagctggcacgtgtacagacagaattggagcccagacagtctggctccagagcttgattggtttgtgttctcattatcttggtttgaccctttcaatccagtcttggttgcaggaagttaagagaccccccccacccccagcacattcctcacagattgtgagttgagttggggcctccaagtagactttgacctgtaagccaaaatattaccaaggaaaataaacaacagctatttcaggtaacaggtactgggctatggaattgggaggagaaaaaaagctatcaggatttcctcaaagtccatatttgcatgttcagcagaacaagcatcaccaggaagctgctctgtggccagtgttgcccctggagactgggcaggagcaggaacggtccttcctctctgacccgcaggcctcctggtagcccagggcttgcctcttactcagccctgacctggctctggctgaggccctgggaggtggggctcaggctcttccagtactctgaggagcactgctgcccttttcaggccccttgttgaggcagaacctgcttgtccgcacaccctgcccaaaggcatgcagagtggaagcagtagactagcaactctgttctacatgcttccaaagtgggcatctgaaaggctggcgaggctgggacatgggagcatttgtatttcaagtgactgctgcccatgaatcaccaatttcattctgtgctctcagctctgtgaagacatcatttccacccagtctcacatggagctggcggccagagcctcttagtggggctataaatagcagatcatcaactcacctcttctgagctcatcacaggctcctgggtttactgcgtgtcttcctgctgcctgcacg

SEQ ID NO: 39500 - DNA, 4178 bp, Bovine  19866880730020
  misc_feature (1)..(1): n is a, c, g, or t
ncctcaggcaaatggctgagggagaggccagctctgggagcgcctagagggcagccgcccgtggggcagggcctcacggtccccaggaacaacggcaccatatgccctgttcagtgggcgctccgctgggccatgctctatcatggggaaggagaaacgcatggaattccttctccatcaagcccttccaaagccctcggggccaggccatgagtggacacaccctcgtgctttggtttccttgtgagcacttgctcgctcagggggaaacttcttttcccaacgtcctatctgtggcccccccaaccccaaagcaacctccaagcccagccgcaggagcactggcagtgcctcatctgtcccagctgcttgtcctcacctgggccccacaaagggctgctgtaggacttggtggcagccctagacactatgtgacttgctttggtaccaactttcccagtgaacatcacaagttaaaggagagttcatatcacagagagaagagaaaccactacagggagtcctccaggtctcagacccaactccaagcccacgtccctccctggaagactcagcatccaccagccttccaggggtggtggccagtcagtggtaacctctgcctgcaggaagccccaactgctggtcatctgtctcacttcaatctaggagacaactgaaagggggcgccaaggggctcaaggcagggtcttgcagaaatctaattaacgtctgcttctagccagagagggcccttgcttgcaaaaggtcaagtttcttgaagactctatttgccaatataatttaattgttaagactaacaccctaacatttaattagggtgtcagtgtgaaaaaattaaaatgagattacgattaaatgctaattacacagaagatgaaatgtggcaaagatttcacaacccggataatttgcatatcttattagcaagtagcaagacaactgatataagaacataaactcaggtagtgggtgcttctgtgctgtccttcagcaccctccccactccgctggctggggcaaggttattccctctggggccccctattcaggacccggcaggggtaaactggacccacagcagactggtgactgtctcaaagttctcccaacgctggcaagccctacgtggtacaacacctaatgccctgttactctgaatgccatgaggaaccagccgccagggaaagcctgtcatcttgccccttccagagcccagtgtcactgtgtgcccctccaaaaaggcactggtgagtctgaaatctcctgctcttcccttttcctgagctatagttcaaatgctgcctcgtgggatcaccctgatcactgcaactcagggtggccagccacccaacagagccactttccagcccatggtcctgtctcacttccgagtacgtatactcctgaaaattaactggtgtatgcatgttccttgcttcttgtcatctctcttgccacacccgtcctgttctctgcaacattctcagggcttggcagggggactggcacagagtaggtgctcaataaatagtaactgagagaatgattaaatggatgagtgaataaaagggcccctctggggagttacctgataagtctgatgaccccagctggctccttggcagtgctttttgaacccccacgaactggagaaacacctcatggatacatccagagctgaaacaacccaagtacgtggaccgaatggcgcaagaggcagccctggtctgtaggtgcagacagagtgccaagccacaccagcaagggagaggtggctctgtcctaggaacaggcttggtgctgagaactcaagagcaggaaaggatcacatgctcaactcaggtaaggagattcaggagagaaaaagagtctggtcccaagagagttgcaagcttcatctggtatgactggatgccactggcccctttgggcagaggactgatggaagcacaggaacggcaccactatcttacaggtaccagtcaacacttaaaagaacacagtatgcccagcaccgatccaatggatgtccttgaattaactgttagtccctattccaactctgtgaggtggatgctgttatcatccctattctacattagagaaacctgggactcaggttagtttaataacctacacaaggtcctacatgttagaagtggcaaaggatcccagacagacaactctggagccatccagcactcctctgcaacctcgcccctcttggccaccggctcactgccagtgcccttgcattaacccaaagccaaatcaaggggtttccccaaaggctggaatatgcaaatcagatggtgacctctgcaagttccaagttctccagcggctttccactgtcttcttactgccctcaggatgagccatgactgcattagtagtcagtctccctcccgagcacgtctcacacttggcacaggggaggaccccactgggacacttctccctgccaaagtgggggcagtctgtttcacccttaggtgttactccagcccacagctgctctaggaaggcttccctgatgccaggctgggttctgggcttcctctggactcccacagcccctctactggtatcccttggtttcctgccaggccttccccactagaaggtaagctcagtgaggtctggccaggctacaggctgcaacagtgcacgcagggcctgacacatgctaggtgctaactaaggctgaatgattgaagagcctcccgtggatctgccaccatctttctgggtagctgcccgaggatacagctggggactctgtcccttccaaaggaacccctgaatactcatacaaaacctgtccacaaacagggcaacctaaacatctttctgtcttgaatcgccaaaggttaggcttccaaaaaacggctcagtctcctaaaatgcctctgaattatttatgaaaactaaataaataataaaacggacactgatgaactggaggccttgccatggcaaggaagttggaagctggaaaacaagcaattttctaagaatgtgaatgtttactatttttctcttttggcagaagttgacaaattgtctttaaaggtctgcagcctagcaaccaagttctgctgagctgcttgggagacgttaattgtagcttcttcaaacagtatgaagaatgtttaaaggtctaaaactctaacctggtaaccaatgtgagtgcgagaggtgccaacacagctctgaagacagctagagaccctgctctgcccagacacggggaaacggcatggggctcgccttctagttcctctttccaagactgagaccacaagcactgaaaagtctatctatctttctgagcctatcttcccaaggagaaccaaaaatgagctatgccagaaagcatgccatgtctaaagtctgacatgatctccaaaagcagatgaagacgatgacaacagacaactctcaactctgctatcctcagcattcctgtacacgatcatgagatttatgaatagtgtttggacatttcatcctgggaccttggtttctgcttccttttctcgagagtaaagtattatatatcagtgtatttcagcctaagaggcaccaaggggaagttccgttacttaaggaaaagctccagcacttatcataattacagaacacaattatctgtgtaattatttgtttaatgtccatctcctctaataatcaagctgagagaggcagagactatatgtcctgcttatcactgtgcctatttgtggcacagtgcctggcacacagcaggtacttaagacatgtttgtgaaactagtgagtgaatgaatgaatgaatgaaccccaggatttgcctaaatcctgtacgactaaactctgaaacttcctctcttgcctagcagggagagtgaaggcagagggctggcccaaaggattcttccaggcagaactcaggaaccagtcttggttgttgtcccaaagccagtgaaaatggctttggccaggacagcctctccttgccttctatccacatcagaaggccccgcgcaaagctaggagtggcccctctctctaatctcccaaaggatgtctgacagtctgtcttggaagagccatgtaaaatcactaccaaatgcctcatttaaatttctggtattctagcacctcatctca

SEQ ID NO: 39501 - DNA, 2055 bp, Bovine  19866880771915
  misc_feature (1)..(1): n is a, c, g, or t
ntcagccccgagtactaaggcctgcagtcccctctcaatcaggctgagggaagccacccactggttaagggccagaatgagaagctgggcctcaaggcctcggccctgtccagggtcctgactcctggtcagagcattctgttccagcctgaggcctcttcctctggtgtgcagggcactccttgatttgcaccctcaaagtgcacatatcatctcaggggcagccctgccagtctcgtctaaacccattccctgcccttttcataactggtggcttctctatgggccagtgctgctgtcatgctaaatactcctgatgctcaaatccccatttatcaatgtccatcttcaaagatgagaagatgaagagaactccgagtcctgtggctctgcatgcagccaccaagaagggactcctgcaccacacacatcaacttgcatgtactgaagctgggaacttgaaccagactgggagcagaccgtgtgtacagcctgaaaaccagcccccaggcttcttactctgggactgagcgagagggactccagaagccctttcaccagggtgtcggaagcccttagctcccagcaccagcagattaggaaggcctttctctccagcctgtgcatagaaagagaagggacagcccaatgaagagatttagcgcgagcattatctgccgccaaaccctcgctttcatctccgccttctctagagccaaatcatttggaagctttcatcgatggtttcctctctgccccacgaaaacttggaatttatgccggcttatggctcagcctcctcgcttaggggacgagggaaacctcacaggctgctctcccgcctgctgtgggaggaaaagcttgtccttggcaacagttcaagacagggaagacttcctcagccctccaggagcctaggacttgagggcgtcagaggctccccctgcccctgcagagacttctgggcttgaacccagggctgtgcacagccagtccccattcagcacccgtgcaatggttcgattctatttttaggtggagaaaggttcaaaggccctgcgcaggaaaatccaagagggaggggaattctcagcgccatgcaaatcacactttcccctcagcctctgcttgacacctgtttccccttagccagctggcctatcctgggtattgatagcagcctggtccccaggatctccacccagagcagaggcccctcctcctcctgctgcttaaagtgagagctaggggaaagaactaagccagccccaggggctccccggaacttcccctccattctccaatctgaatagcccatgaaggcagtgaggaggtgagattctcagaggcgggttcctcagtttcaaaacagcaggatgactactgcctttcaggaccagggagacacaaaaagtggctagggttttactaatccagcccaagtagtaactgcgagccgttgtagctctcaagatgagggtgggggtagagaaaggtagtcccagggactcccagggccctagcacactctgcctcctacttcccaacgcacaagaacacagcctgtccacacactgagcagggctactgttagttgctcagatgtgtcgactccttgcgaccccatacactgaagccccccaggctcctctgcccatggaattccccaggcaagaatactggagtggattgccatttccctctccaggggatcttctcgacccagggacagaaccctattaagaacctcaagaacaacatcttgccatgcccacctcactcccagtttttattccagtccttactgcattcctagagatatctccttctgtctccacccctccactgtagggccaagggaggacagctggttaagggatgggaacaggatgcttcagaactcaaaacggtgtccccacctccaatccccacaaaagatgagtcccagggtaggccagctccgtggggagtcctttttcaaatgcaaggttctgtggaagacacccctagggacggctaaggacagcagctccggatcaccactgctgcgaggag

SEQ ID NO: 39502 - DNA, 1896 bp, Bovine  19866880791112
  misc_feature (1)..(1): n is a, c, g, or t
ncagggagaatgaacgatgaggcgtgggagataagaccaacacccatgtcatggacgaagactgagatcacaagatgaggacctgcctgggagatggggcccagaaaacctgggaagccccactcctctgagccctcttcattcctgtttccaaggtggctcccctgctcctcctggacctggaagagcattcagggctggccctcagctgaggagcagaaacaggacaccctgggatgaacagaggcaggctggattcaagtagagtgctcaggggtgctgatggggcaactactccagccctggggcagcacgggcaatccccccatgggtgactgagcatggaggccgtgcactggtgaaccactgttagattgctccagccctcaatctggacactgctcccattcgttcattcaaccatttatggagcatctaccatgtgctaggcaaggcaccagataccggggcagctatggttgggacaggctgaaccgctgtcctctgagcccagcccggccggcagcctgacctagcccttgtgcttctgccttgcagacactcatcactgccatggggcagacagcctacaccgtggcctccgtgctcatcctattcttcgtcctgatgtacatctttgccatcctgggcttctgcctgtttggacttccagaagggggtgacatgaataactgggggaacctggctttggccttcttcactctcttcagcttggccacggtacccatgtttgggaacagtggtgggggtgggggtcaggcaggggccttgaaaggggactggcagctggtgcaagtgtgtggacatgctgggcctcacttggggtctttcccacactcagacacttagctggggttggggggaagctgaggaatggtctcccaggacaaggcacaggctagcaccctggccaagagtccatcactgactctaatcttgtgactccctacagcattcctatttgccccatggggtggtaaaacttttcaaaagttctcaaaagataattcatcctaattgaagtgtaatttaggaggaaaacccacatcacaaagccttttggggaataggctgtcacaaatccatgcagaataagtctgcaaaacctgtctcaaagtctagattctactgggttctggcaagattgaggtcttttccaaaggagggcctggcagaggggcagtgtctcttggggaaagctggaaggccttttggagaagagcccttagggcacattggacataagtgcccacacccagtggtgccctgcatctctgccagcctgtatgcactggagtcggtggattagggggtgtgatgtggaggggctgatgtggaagaagagccagcctgctcctcagtagggccagggctcccctagggcaggtgagcaggaggcctgcccccctgagccttggcacttgccctgcctgagtaggtcgatggctggacagacctgcaggagcagctggatgcccggaatttgattctgagccgttcattcaccatcatctttatcttgcttgcctcctttgtcttcctcagcatgtttgtgggtgtgatgatcatccacactgaggtgaggtggcgcttgtaaggattggtggggcgggggcgggtggtgttggttaagtgtggcaggtggatcatctctgagccgtctcgctctggaattggaagggaggggaccaggtgggcccatctctatgccggcgcaacccttctccctgagcccccctcatgatggtggccagcaggacaggtacttgggaggtcattgcagctgcagcgggcagcttgagttgggggctggccctgtgagggggtcctcctgctgaggggcctgagtggcagtgggagactggggaagagggg

SEQ ID NO: 39503 - DNA, 1077 bp, Bovine  19866880822417
  misc_feature (1)..(1): n is a, c, g, or t
ngaagaacagaacagggcccatgtccacttcttgtttgaaatgattttaaagaatttttttagatttacccaaagaacatcctagtttttaaaaacttgtacttgattaaatattccttggtaccacccaaggatctgtaacttccctggtggtgaaaaacagtctttaaataaaaataatctcacatggcaaaaaaagttttctaataaagtttctctttaaaataggaaagaagacatggttatacaggtgctgtgaactgatcccagaaagaatttagagtttatctttttgaggtattggttgttagggaaaatattcacctgtaacaatgtggatagtattaacttactcagtgttatattatgtggcctcaggaacagtttcatacaatacagtcaagtacttattaagcattgtataagatctggtctcttacttttttttttttggtctctttttgatgtgaaaataaaattagaagattttagagcaagaaggattttgagatgatttggtgacgtctctgcattttgttggttgaggagacagacccagagagtgacctgccctgtgtggcgctagctaggagcagcaccaggacagaaacccttatctcctaatctttccacagccccgttctgcccatccttatactgagatttcagctgtctttgaaatttagattttctgctctaggtctagatttcgaatagctattagtacatatttcctctgtttttcaacaaacatcatttcgaaattagtatcctcattttcccccttgaccacttgtaagaattggctttacttgttccctgttaaactgatttgacagtaaattgaaatctgtctttaacagtggtaataatttaggagcttctttcaacatgaggcacaaaccatgatctgaaatagaagttctacttggtcaaagactaaatgaaacgtgtcccctttgcaggcgttccagaagtagagagagagatagaagtcgagaacgaagaagatctcgaagtcgggacaggagacgttcaaggagtagaagccgaggccgaagatcccgatcttccagt

SEQ ID NO: 39504 - DNA, 1328 bp, Bovine  19866880826326
  misc_feature (1)..(1): n is a, c, g, or t
nacaaatccaaggactctgacacaaagcctcaaataagagcagactcataaaggaaaaacaaaattccgtttacaatcctgtggggattgtaaacaaaccattaaacaatctgcacatcgttctttcatctctgcccagcattgccaaccctggaaaccccgcaatgttcatactgtaatatctggtggccctaaggaagcatttcaggggatttcgctttgtatgggcctcagcattcagctgaggaaaacggacatcccttcacttttcctcaggtgccagatttgataagccattgagccaaccagaggggagttttaaatccaaattatttggggctttagagatttaagaagcaaaacaaactactgcttccgacacaatctcatcaatagctgttcgtagaacaaaatggagaaaaaacataaaagtgcataccagccctcagcctgtaaatttaactaccgggctgaaagacttggccgaaagttaaatccaggcgacgctctcacgtgatcggtcctaatggcgtcatagggacacgtggttctagatacttcgtcccctccccctcggaggtggattgttgacaacgccgccggcggtcacgtgatcttacgtcatcctacctcctttccctgaaatctctggccccggatgtgtccctctctccccacccggctgagcctaaactagtgaaagagggggagacgggttggtgtttcagtttcggtccttcttaatcacaacctccagtctgagcatagggaacaataattggtcgattcgttcaaggagacaaaagggataaggtccctgctgaagggctcccataactagctctcctacgtcccgttcccttctcccccacccctcactgcatggtaccggcggagggcggagggatctggaggcggcggagggagacgtcattgcagggttgtttgtgcaacctcggcggcggcggtgacccacagtgattcggccgccgcgccggggggtgggggggggctgcgcgggactcttttctttcagactgaccgcggggctgctggggagcatgtcgaccccggcccggaggaggcttatgcgggatttcaagcggtaagcgccttcattttcgcctgaatgacgactcctccccaaagctacggggctagggtggggatccgggacaccttcccctcttgaccctaagagggctgctgtgggcccagggggacagacggtagcccagttctagccccgttttagcactctcttctccttggttgttcacttgtcctacgtaagaaattttgatacttcctcaccaccaccctacccc

SEQ ID NO: 39505 - DNA, 1025 bp, Bovine  19866880865834
  misc_feature (1)..(1): n is a, c, g, or t
ncgctgccgaattctgtgtggcattcctctgagcctgttggctggcagcagggcgatgaggtagctgggttccttggttgcgggggctgggggtgtgggctgggtgtttaattagcccctttaccagcctgtgaatgaagcagctcctccccgggctgagcctgccagctctcccaggcggtggtgggtaagtgggctggagtggagcctgggttccagattgcactgtggaagtctggagaggcacagggaggagggcggtgacaggttaaagctcttcctcctgccctccctagacagtttgagatgcagccacagtgacaggcagagagggtggggctgagaagggagggtagcgcagtgatgaggaccaagggctctggggtcagcctggggcattctagtcccgtttctaccatgtagtagctgtgtgatcttgggcagataacttgccccctctgtgcctcaggtttctccttcgtaaaatcctacaccacgtggtcattgtgaagcacgtgcctggtcctaggaaggactcaataaatgaccataattgttatctttatgctcaatatttataattatttttaataaaagcacggcattcacagttttagaaaattaggtgtagggagaaggatgcctgctgcttctgtctgaccaacacgatccaggtcaggagccactggccacgtgatggccgctgagcccttgagatgtggctggtccaagttgggatgtacgtgaggcacacccagacttcccaatacttggtgtaaataaagtatctcagtaataatttaaaactattgattatatgttgaaatggtattctctgtgtctttgggttaatcagatatattattaaacttaatttcacatgtatcttttttttttttaaatgtggctggtaggaactgtacaactacatatgtggcttgtattggtggcctgcattgcattttgggttggacagctctgcctttctctgagcagggcaggccttgaagcccttggtctctcgt

SEQ ID NO: 39506 - DNA, 790 bp, Bovine  19866880892167
  misc_feature (1)..(1): n is a, c, g, or t
ntaacacgacactagtgcaacaaaaggactagattttacttctatctacttttaatacactgtatttaaacttaagtagacctacgtgactagtggctacctattggccagcacagctccaaaatatcttgattcgaccctttcccctcgtctgttcttcatttcactatcaaaaatacatttcatcataaagagcttaaattgctcttttgcttttttatgtgtgtaatgcttatgttttaacttttggctgaggtatagaggccagatggaggtaactggttttagacccagtacaagaaaacgtggctggctccttgagtaaagggaaaagagcggtgttttctatggacactcttgcagttgacagttgcctggtcgttaagctggagatgcagctagagaggccgtggtgaaatgtatccttgctggcagcgaggaggttgcctggcaaggttgcttggagcctgaagaaaggggtgattgcccacgtcaactcctctggcccacttttgggagtctatgagtttggactgctttgctccttttcttggcttctggaaagccacagatgaaatttgtgtcttacaaagctttgtgcgctcagtcgcttctttgcaaccctatggacagtagtccaccaggcccctctgtccatgggatttcccaggcaagaatatggaacaggttgccatttcctactcaagagcatcttccgacccagggatcaaacctgcgtctcctgcagctccctcactggcaggtggattctttcatcatgagccaccag

SEQ ID NO: 39507 - DNA, 3749 bp, Bovine  19866880916919
  misc_feature (1)..(1): n is a, c, g, or t
naaaaggtaggctcaccaagtctcatctgtgctacgaggttagttatgatagaaaggcactggttaaattaaacagggtctttctgttcaatggaatactctatataccccaccattaaaaatcatgaagcaaaatattttactgacaggaaaaaatgttcaccatgtatgaagtagaaaaaaagtgactgagaaaagtgtccacaatatgactcaaaatatatatatataaacatatgtacatacataggaaattccctcatagctcagttggtaaagaatctgcctgaaatacaggagacccaggttcaattcctgggtgggaaagatcccctggagaaggaaatggcaacccactcccatattcttgcctggagaatcccatggacagaggagcctggtgggctacagtccatgtggtcgcaagagtcggccacaacttagtgactaaaccaccaccatgtacatacatgtatactcacaaaatacgtgttcacgcatattgcttcgtaagtgggcaaaagacagatttttcttcttggtactttactgtgttttccaagttacaaaacatactatgcgatcaggaaaaaaaaaagtatttattaataagctaaacagaccacacaaacctaacagggtgctatcgttcccgtaagagagagtggcctggttaatctctgtgggatatgaggaatccacaaacgttaaacccttctatttaaagcttacagttttaaacaaataagaagatggaagagactcattttcaagcttacataacagaatcatagatgaagacatttagaattacaatggccctctcttctacacatctgtatccacagctgaatggtcagaaagctggcatctctcaatgcagaagtgtgtcttctctgtgcagagttctaatttacaaagttaagtttttagaggctctctgcagacgttctatctgaatgtgactttctcctccaagttagaagttgacccccaatctacaactgacttaggacaagtaactggtcaatcaactaatgctttcaggacagggcatgcagaaccatgtagcaatttacaggtcaaattcctatcagtagccacctaccctctcctttaaaatatgcaaagaacatatcgcctctttgaagccctccaaaacaaacaccattccttaaatataacaaagaaacagactcaattttgaacagttaagttgttcattcaaaggtctaggatgttcctaaatagaatagcatccatatcttgaattattccacaatccttcaaaacacagacttgggttagaaaagagctgtggccttagagtaagtaggaagcagggccttggaaggacggctcattgctgcttcctctgtgagtctgagcagcttccttcctaccactcctcaacttggcttcctaatacccaaactcacaaggctgctgggaagcttcaatgaaaccacctacgttatttcccaggtcacccaacaatgagctactaatgcctagaaaacactcactggttcgtaaaatactttgtgactctccaaactgtcagaaagaaaactgacttggctgcatttcaggtaaataatgcaatattagaattacctatcaatattaagaaagaccttaaagtaacatttttatatcaaaaaatgtttacattaaaaatatatcaaatttttagggctgggcggggattggctggaggggcggtaattcagcggtttcaaaataaataaataaataaaataaaataaaaacatatcaaatttttaaaacttttctatctggaagaccaccaagttacgatttaaaaaaaaaaaaagaaagaaagaaaagaaagtcagccaagagggctgaaccagtggctacagaaaaggaaagggatctgagattaaaagaactgtctggaaacagaaatgagtgcctaattgataacaggtaaaaggccttcagcagtgtgacatctgtagtcttggaagaacctgccatggtccctcaggacaccaagatttataaaagtctgggtgtgtgtggctgaactgtggagccaaaatatcaagtgccaaccccagccattcctcattggaggtgatttactagagatgccacaagtggcctgtttctttctccaacacttttaaactgcctgcagaacaaaggcacacatcagtgctgttctgctgggaagggcgccatggccctaaagagcatcccatcatacacagcaacttaggcgccaataagttggtcaccgttcagaaacatctgtgtctaggagtaaggaatgagaagtccctggtgagagttttaggtaataacccgtagaagacaaaaagataaaaaacactatgttcccctgaggctaagggcactgaccagggtcacctatatgagcccaatcaaggggcttcatggattcaaaatacctagacgatacagggaggacactgtgggagaagttcacaagcgcaccccaagccttggccctcaaggtacttacttacacgtgagacgcacagagacaaagctaagtcgtcgcattcttctgttacatgatctaagctgcacttacatcctaattctgccactggttctctgtcagcttcacccctaggcctcatttgcttcatccctttcagtgctaatgttcacaggttgaatatcaaacaaggctgaaagaaaatcacaaacaaataagaccatgcaagggctgaattacaaacagaaagaacagacaggagactaacatttgtggctacaaagacgtatataaggcacgtgggcttcacttcctctgcaggctggcctgcacccccccaccctatctgaatcatccttctgatggccatgaatgactccaggctgcttcatttgtgataatctttcagaactcaccttacttggagtgttggcagagcggattccactctcccttttaaaacaccgtcttcctttggattctgtgtacaacactggcctgactgtcttcctatttcactatgaagtctttctcagtgatctgcaagcacctcctcttctatccaaccccttaatggattgagttctgagtcctcccctcttctcacactacagtttctgcctgggtgacctcatctattatattggcttggttccatacacatctatgtctccccagttatctacaacccagacataaagctaccttcttggaggtgatttagggatgtctcatagcaacttacacttaacaatatccaaaccagaaaccttgatccccgcacccaaatcctgttcctttgccacacttacccaactatagtaaatgtcacttctgaccactcacttcctcaggtccttaacctgaaagtcattcttaaaatcccctgctcttcttcctcaccacccatcaccattcctccctactcagggaaacttgggttttctcttgatatttttatgccctgcaagagttgtgtatggcatcattggttcccgctcatgtaaagaatggaaagcagctccagcctccagacctttctgcttccctccatcactccccagtccaccatctcctgctgtgtccaccaagcgaagatgcctcacctggacgaatgcaacagcctccttgctgttcccctcgtgtgactcttgccgccttctgcgtccacttcaccctctaggtccccacagtctgcccactgtccattacactgcaccctcacccttcctgtcgcctttctgtgcggccacca

SEQ ID NO: 39508 - DNA, 2014 bp, Bovine  19866881139959
  misc_feature (1)..(1): n is a, c, g, or t
natgaaggagatgtgggctcgatcactgggtcaggaagatcccctggagtaggaaatggcaacctatggccatggaatggctgttccgcagacagaagggcctgggggctacagaccatggggtcacaaagagtcagacaggactgagcaccatgcaagagcatttcaggagactagttcctccctttgatcaggagaaaagagaggcttcccatgcttggtgactttactggtgacacagagggctggcggccaaaccagggttataatcctagcttcagtgtcgcttctctccccgtgtttcttgttctttcctggcaagacttgctgagcgattcaggtaatgcgcagcatgcagggtcccgctgtaaagaccctgtgaggctgtgtgggggaggcccgggagcaggggtagggaaccctcctgtctgcttggtgcctgtaatatatttgaattatctccacagatgagccctgatttagcaaacagtctagagtaaacctcagctcgaagacaaatccaattgacactgggcttgagtggttcaaaggttattggcacaaaactgtcggctttgtttagctgagggactgtatttatgacgggtgatacggcagtgccatccataactcgcctgcagcaaggctgacgtggggccagagacaggctatttacactgagcctggagtttagtttctctgctgggaaatgcaaaagccattcaactcttggccaagttgctttatgggttgccgtcttaggcctggtgtcataatttgggtcatcagttaaccttgttggggatggacagcatcctcaagagaattgtttcctgggtgtgtgcagcgaggggagctggggtaggagaggtcgctggggatgtttgcaaggacctgggtttcactttgacccctaatttaaggcccacatacacaggagtagctactctgagtccctgggttcttgattactttctgtgtctcctggatgctgtggttaatttaggaaaaaaggactgtggctaagtgttgcactgaacagatgcttttgtctgcagtgtcagacaagcaggggtttacgcaccaacttctttggaaagaaataatcccaggaatatgcaaactggatggaaggagccgtggccagagctgcatgggtggctttttggaaaagagatactctgtattaagatcctgaacgtgtgcttctcttgtgacccattcattctgctgctgggaatccatcctgaggagatcaacctcgatgtggacaaagattcatgtacctaggtgttcactgcagtgttatttataacagcacaaacgggtaaatcaacttcaacaataggggatttctttggcactctttctttggctgcactgggtctttgttgtggcacacgggggcttccctgcttgcggtgggcgggacttctcttgttgcagtgcaaaggcttcccactgagatgcgagggcttctcttgtcagagagcccggctcagtagttgcagcaaatgggctcagttgccctgcagcatgtagcacctaaattccctgaccaggactcgaacccatgctccctgcattggaaggtggattctcaaccactggaacaccagggaagtccggtttggcatattaataaaatgtaattctgtgcattgattcaaattgatgtgtgtaaagaatttttaatgatttgtcaaaatgattctaggtagaggaagggaatattttataaattgtagtgtgttttccgttgtgtaaaacagtctgcaaagaaggggggaaatatatgagaatcgtgggaagttagctcaggtgacgactgtggttttaaagtctcatctcttcatggaatatgttttaagtttctattggggatgtgtatcacttttcatcctcagtgacaattcctcaaggaataaacaaaaatccaagttctcacttctttagcgattctactcttttccagatctcagtttccctgggcgtaaaaggaccctggcctgct

SEQ ID NO: 39509 - DNA, 1617 bp, Bovine  19866881165194
  misc_feature (1)..(1): n is a, c, g, or t
ncagatggtcagggtggtgtcggcaatgttcgcagcatctctgccaggctagtgagatcagagcacggcttgagccgtggggggttctcaagtgtccgtaacacagaacatctcaacctgtgtttggggagaaatccactagccaggatccctgggccgagcggagcagaaaggggcaccttggaggggcgagggagaagggtgaggtgcccaaagtgctgaaaagtcagttctctggaattccagaaaccagcttgccatcaggattttccagtgcacggctaaaacttgtctctcagcccagttccatctgtcagctaaggacttgcgtggagacatggacatctccctgaaaggtcctggcggagggccccttctgatagcaggcagctgtgggtaccgtgtccttaaccagaatagctgggagtgtgtggagggtccctggggatgagaacttgagaatatctctgccaggaagaacgctcaagggcacatggagagcaggggagctgatgagtgaagacagggctgccattacctcctccctgtctgctgtctccagtcttgtgtcacctgctttgcaaatcaagccatctttctaaacccagctctgatttgtcactcctcctctgacatggctctgtaaaacccgggagtaaaaccaagtcccctgagtatggcattgaagacctttccccaacgtggcttcaacctattttcctgcttttatgcctgtaatcttcccgctctggctaaactatgtcctgtcccttctctatccttgaacacactataaatcctcagttcccttgggctggaatgcccttcatctcctttgcctcacttaatccctaactgtttgtggaacacctgcttcagaccgggtatgagtcaactgataaactcctattcaaccctcaaaacccgaatgtcttgtggtctaatatacctgcaccagcatggtctcccaggtcactcgttctcccctgctgatgatgtcctgtgtctcttattcttagagtattatatctgcttttctcactgtgccttggtaactttcctctatattcctggcacaaggcttaattctctgtaaatagctgttcagtgttttcatacagagaggagccattagtgaatgccaacaaagcaagtgggaggacctagtccctggggttgtaaggacctggaatgatgaaagcaagaagtgtcagctcatgtttaccaggcttgtaccacgtaccaggcactgtactgaatgcttcccatgcgttagcccattgaatcctcccacaatccaagagatgggtggcgttaccccttcctcttacagatgaggacactgaggcatgagaaagtcaatcacttgttcacggtcacacagcctgtaagcagctgagctaggatttgaaccttacacagaggctctcaagctccccacgcctgcttcctgcgtggcccccagccctgcgaaggcctggggagaggcaatatgatcaaagatgactgagggggtagaagtcttacctcttagaatggcacatgggatctggggaggaatccttttaagggatgaaagcagttttttaaaaagacattaatctcctcactcacttc

SEQ ID NO: 39510 - DNA, 1570 bp, Bovine  19866881169587
  misc_feature (1)..(1): n is a, c, g, or t
nattattgggtgccagcggctccttcccggtcgctgagtgggggaggtcacggggtgttactgacaggtgttactaacctcagtttttctaaactggaacaagaatgagctcaatgggctggagattttctgtcaagcatgatacaactgtgagggctgaagccctctgagctgcctggagtgccccgccaggtcctgaaccactgcccctctctccccgtgaggccagtgcccctctcctcagcctcctctccgaggtggagacgtcctcctgttttgtgtgtctgagacttgtccacaacagggtgaaacgctgagccgtgctcaggctatcccagttccttccatgtcaccggtcctcatgccaggtcagttgtcctcacgtcaggtgtagtggctcaccaggtggccccaggcaggggagtccaggcccagaaggggttggggtggcctgtgcttgtactcaggactcacctgggggccagggtcaggcctctgcctgtgctcctcgtggagggccccaggtctttgtgtagcaagactctcgtcgtgctgctctgtttatgctcctctctctagaaagatcttgaccacaagagtttcactgaactggtggagaagtttaagaagactttgcggcacactgaccccatggtcttggatgattttggcactagcctgcccttcattgacatctacttgtccaccctggacaaccaggatgctaccatctacaagtcagtcccagcccccctgaccctggcccacgggtcctggtggggtgctggctgatgtgcagggaaggcagagccaggtccttcctggggggtgtgtaggggctgggctgctgtatgggcaggcctgttgctggtggggggagcactgcccactggccctcctcagtttaaaaaactgacctgtttttaaacattgcttcctttgattctccaagagcacctcaccaagcccttctcagtggggcagaggcaagacctctggctgcaagtcagaagctgaagctcctgacctggttctgttactgcttcctgtgtgactctggccaagtctttgtccctttcccgcctgtcacaggaaggactgacactaggaaagcagtgtgtgtaaagctcggggctgtgctcagtgtgagttagctggggtcacactggccactactgcaggaagaagaggggcacaattagcctgatgtctcagcaaaagccccctggagggctttgtacactggagggggtctaggaatgcccagcgttggcccaagagtggatctggcagtgtccaggccgccctcaggcagtcacctcaactcagagcccaggagtctgctgtctccaacctaacatgggcagtgagagaacttcctcccagagcccagggagcctggccgacctggccttcccacccagcccagtctggttctcaggtccatgctctttcctgccccacacctgccaggtatggtggacatgcaggtgcgagcgtgcagtgggcagggccaggtggagcggagctcactgtgagtaaggccctcctcctccactcccaggcttca

SEQ ID NO: 39511 - DNA, 979 bp, Bovine  19866881179506
  misc_feature (1)..(1): n is a, c, g, or t
nctcctcagcgggctgtgctagtgagcatcaggtttaataggggattaggaggaggaattaaagttgcccaaggggtacatgcagagacttcaaacaccttttggaaaacaaattaacgtggttttcagaaagccttttccaagggcggcagagggtttcctcgggcttccccgctttcttttgaaatgtatttttaacacttgtgtaaacagtttgggcctgtgacacggggcttcctgggctcccttcattagctggtgtctctggaagaagaattcagctcattatctgggcgttttgatcttcctggcggtggccgttgcttctgggcccggcctgggcccacccttctctctttcctgtcgcctggtggtgtggaacccataggcatgtgtcctggcttgtttccacatctgcccactgaagcgtggcttcccagatgcgccttcagttcctggagaacgtcccgtctccttggcagagggcagtggtggggagggtggaggctggccttccctcgggttcatctgtgacattggcagaatcggcctttgccaccccggctcccctggcccctctgtttatttcctgttgccctctcctcgggcacatctgcagtggaatgcatgacctctgaaggtacagagttccccatcactggaggtattcaagcagtgtcctggcctaagtcttgaggaaatctgtgccctcctatggagtggacctaagtgggcgttaaagttccccacaaatctgggattctgtgatttacattttacaagcagagtctgagccagaccacgtgaaccttggcagccaccaggatccctgtgatagaagatacaacgccttactccagagagtcagcaccagtgacccttatcctgctgcccttgcctggggcaaaggagagggtgctctgtcctccagaggttccaggcttctgtacagtcatgaggacacctgtacagggactcg

SEQ ID NO: 39512 - DNA, 1278 bp, Bovine  19866881250875
  misc_feature (1)..(1): n is a, c, g, or t
nttagcacttcagtgtcctgagttcaccagcagattaagctcaggcaggcccactatcctatcttaccactatctccagtaccaagcacagtgatagggaatcctgccgtgactgactgttacactgctgtccccacatgaagtcctcagtatttatgcttagagataagcatgtaagagtgggtactaaataagaaagaggaacaggggcagagggtaagaaacatatatcaactgaaagagggaaattaatgataacttcaaaagcaaagcagcactgcactaagtatttcttgagggactgtacaaagcaattcaagtctagaaaaccaaacctcaggctccctccaggaagaaagaatatgggctttttactcagcagcctggaaggccttttagagaccaagctgtggaatcttgtttcattgagctttaaaataaggcttttttaaaaaaaataaggcttttttaaaaataaggctgcctctttccatgatctggtagataaacctgaagccctatgattttgattttcactcatctctaaaaaaggtgaaatgtgtgtgaaaacagggtatatggatggtgtaaacttcaggtagacataagggatatgatttgcctcagcagagaaaaaagactataaagcagaatcacaattaaaggtacactgttgaaaaatccaaagtgtataattcatacctgccattattacatcaacataaaaaaaataggcattttaaacatttcgaccaacaaaagagggcatgatttataaacacataaatatccatgcatacttttacaatgatggctactagaaaaatgagaactttaaaaatgccaatctagacaagattccctttcattctaattgcctctttcctacatgttgttaataccaagaatcttaagaggctgctgaggtcaatgttgcattcatgccagcctcctttccaagcctgtaactaatgatgaaagtgtgatgaatcttctgccttagctttgatgctaggaaaaaaaagaaaaagttagtagccgtgttagtctaatgaatcaaattcataagtaaaaatacagcagtgatacaaattttatgtcctacccagatggtatgtaggtagactcaaaaattattaagattttactatatacagaagatagagcaaaacactgaccataccatccatttggaagccagagtttttgttttgtcacctgtgatctgttaatgctcacaattcacaatgataacagaaatacttaaaaaataacttt

SEQ ID NO: 39513 - DNA, 2993 bp, Bovine  19866881273838
  misc_feature (1)..(1): n is a, c, g, or t
ntatctggctgctcctggtcgtaattgtggcatgtaaagtcttagttgctgcggcatgtgggatctattcccccaaccagagatgaagttaggtcctctgctttgggagcactgagttccagccactggaccaccagggaagtcccggtgtgtattacgttaatttacttctcatacagctcatttttaatagagggccaactccatgcaaaacagtattctaagaaccaggtcacaaaacagacagaagtaaagttgtttatcccaggaaagacaacaagatacttacttaaaagaagatttctaaagactagtttagaagggctctatattttccttccccgctaacaccaaaaaatcagtacaattctctccttactcaataattaacaagctggaaaataaatttactatgactgttacccatgtaaacagttacctaaaaaaaagaaatagagttaaaaccaatccttctctactttcaggagtcaactttttaagatgggagtcagcatcattagatccttctgtgcacaatcgtcatacacatgaacatacacagtggtaggtgcatgttgaatcggtatgtttgtacatagtatgtacacattcaagctttaattgtacacttaacaatgcctccctggtcccagctcagggctcaccagataactgttctttcttgactcttcggatactacagtagagagttcactgaaagcaatgcaggcctcatttcttaagagagttagaataactactactgtaactactacatttctagaaagtttgaactgaatgaaatccaagaagacagaaccagactgtgaagactagcaaataattttttaaaatagttcactgactacaagggaatcaactaagagcttctatatattttaacaatgactaaataagaattctcttttttcaaatatttgtttggctgttccaggtcttagttgtggcattcgagaactaattccctgcccagggatcgaaccgggcacgtggagttgagagcatggaatcttagccacgggaccacctaaatctgaattcctaaagcatatgctaaaacttgccatccctgaagttgttttactgtgcatttaacccccgaagtcttttcgtgagctattctttacaaacaattcattttccttctcctgaatgtagcagtcattattgccaacataaagaactacaactatttttagtaacttcagagcgtattcatttttaaacatggagaaactcgtcctttcaagaaatccaagttccgctctcttctcaagagcaaacacataattctcagaggtttatttcatgctatttggcttgtaacaaccatacagaatcatacgcgatttcataattctaaataaaagtacatttgtgagcgacttcactcagaaaatctattcagcaaaggctaaaacaaatgccagtagccatgcactctgccccaccacggaaagttttgatactagaacagaacataaataacggcctcctttgtcttctttctcctccttaattgtgccccactgcgcagtttccccggtgccggaatccttatttgacaagagacgtgtagaaatatattacctgttgtgcccgaaagcgtatttattagtgtatcagcaataacaactttgcaggagatatacgcccacactagagaaagggctgtgtagcctccgataatcaaaattgatagcccgccgtcgtgcacccggagttctgcaagctgcacaagtcacaggctactccatctagatgtccatctcgaagtcggcaagcattaattcaaagtggcggggagagaagtgattctgacctcccgaagaaaagaaagggtgacccctccccccgccgcaagaggaatttccccccaataatggcttcaagcccagggaagagcaggctacaaaccggggcccctcctctcgctccgagctaggccagagccccttctcaggcgcgggttggagacctcttctcaccagctagctaggccttcattctggccctctccttgccttctccatgagcacccgccgcccagactctgtccccggcccttctgacaaacccccgcgcgtctacttacctcagccgctactagcccggcccctcagcgtgcccaggggctgcccatcggctggaaacctcacgctggcgcagctcctttcccagcccgacgcctctatactgcgctgagagcccgagacggacggaaaagcagggagggcgttggcggcgaagtggacgctggtttccagctcccaccgcagccaccgctcacagatctgccccggacgcaggaggaagaggccaccacagccccgtagagcgaggtgcggcgtgcgcgagctcgcgagtaccgcgcacgcacacgcacgacgcgagacccaatctcccgccgaggaccagcacgcaaacctggggaagagtagcccagggagcctggctgcgcttgcgcggcaagaagacggcaggaggcggggcttaggctggagctacttaggctctggtgcagatcgcgctctcaaaaggctaaaaacttcgtggatttcatggcacttcagtgatactggatctattactgaccccatttttcaaattagaggactaataaatggtggagctaggatttgcacccagcatcctttggcaaaaagattgccttattgttctaggcgctgcccaaagtacattgacaggacaagcctaaaagttacttatggatgggcggggtgaggtctccacttggaaatattaataaaatggggaatattcaaataatgaggtgtttgagctctcagttttaggatcatgtaataatgaagtctcattttgtgaggctaactttaaaggttaataatgtttttatgtccatgatctcctctgaattaccatattcttcattccaccatcacaggaaggaataagacagctagttcgcttacaagatctccatttatgta

SEQ ID NO: 39514 - DNA, 727 bp, Bovine  19866881377799
  misc_feature (1)..(1): n is a, c, g, or t
natactgggcatggttcattgtgtagtaaaaggtccccagcttccagtgagaaagcgccacagcctcctatatactgaagctcctacacctttccttctgacctttggctgaagttccctgcgctatccatccacactctggggacttcccaggaaggaaggaatgagatgggctgggcagacccctctgctcagtataagaatgcccaggttggacaggctggcttgtcctccctttgttccactgtctcagggcagagcaccagcaccacatcagggggtcacagcccacaccccacactgtggctcttacagggcacacaccaaaccctttccagacaccactgccctatgaggccccagtgacaccctggaccttccattggtcccatggctgcctgagagaaaggatgccaggacaggaggcatcctgtgcattatattcctgggtgggttagctcaggggccacagatgggggcctgggaaacctcggagaaccagccgagggggcttcaggagagacctgcaggtcagccagtctgtgggccctggaccagtttgtgggccctggccagcacacagcggcggccgcagagaagtcattaacaatcctcccccggggttcggaagccaggcctggccggtcccaccagcgcggcttctcccggcgtcaccaccgcaggcggccaacaggtggcaggagagcttcggggagcgctcacctga

SEQ ID NO: 39515 - DNA, 1235 bp, Bovine  19866881379033
  misc_feature (1)..(1): n is a, c, g, or t
ncaatgtgttccccatcaacatttgaattatgggcataggccctgaaatgttagttttgtgctaagataaatattggaatcatattcactctgcttttttgaagtagtcaacatcacgatttgtgattgaagagcgaaggcaccacttgctttgttaagtaacaaaagcctaaccagcaaggctcttggggagagggatcacaaaggccttctagagctttctcactgcctttgtgacctttttatgtgctgacaacagaccagcacagcttctctgctggcactgggcaaatctcctgagcctctgagccgagccctgggaggataacagtgttcacgggggacccagcacctgccaccctcagccccagtgaggcaaggtgaagcccagcaccatcacacacccagctggggtttcctgataactttacatgtagttccagaaagagagagaaagagaaggaagaaagggagggagataaggaagggactatacacatgcccctgggaaacgggcccttctttgattccgaagggggccatgttggctgaaaaagcacaggtcctgtgttcacacacccctactcctccataggtggttgacctgaaggcctgcctttgtgggctgatgaaagtgaggggaaagctcagaaacgcagtaccttctgctctgccgtacacgatctgcatgagggccatatctggggaaagctacagggctcaaatccaggccacccacagtcagcagcccgcccctggttctggccactcttttcattctggtcatttcgagctcaaaatcatgcctgagtggggccaggaagcttttgtctctgcaggtaagggcactgtgggggtgacaattcaaagaccctggcagcactttgctgtgccccctcctctgcatgaattctcacagttgtcacacaccagtgctatgagggaatcagggcaggcggtagccccattttacagatgtggaaactgaggctgagagaggcctacccaagactgggtagctggtgagggagagctcctcatggaccctccagagcctgcgtatcctatctgttcaaagggtctgggtctatgaatcgcattactggaaacctccctctgtgctctggggactatagaaaactggatcaaggggtctgtcatcagcaccatatcttgggacctcagttcccacaaccatacagtaagtgggcatcctcatttaccgataatcactg

SEQ ID NO: 39516 - DNA, 1001 bp, Bovine  19866881386574
  misc_feature (1)..(1): n is a, c, g, or t
nttggagtgcttagactcagggtggggtcagcatttgtaaaggagttttgcttttctttctcttcgtgtagacacaaggagggagaggtctcgaagtgacatgtaaatgtattctgaggtgtttggcaactgcagggtgactgcattgaaagaacaaaatgtcagttagaaatgtgggtgtgagccttccataaagatacattttaataggcactgtcatgtggggacaagtgggaagcttacaaaatcaggaaattttatgctttgggagcaggtgccgagggtgaagctttggaacccaggcaccaactacccaagatgccagcaggtggagccctccagggcaggagccaggtggtcccggcagcatcagaggcctccccccgccacgggggaaggctgtctgatttctcactcatggatactggacctctggtgttcagcacagaaacaaacttgtatcagaaatagataaagagtggggatggggtggctgacctagtttggtacctttgagtgaatgaagagttctgggtgcaggagatacagagtttccacttggtgatggaatgcacttttgattcatgagctttgtgagaaagaactgtagttctctgcattcctggaggagctcctataccttgtctatggtttattgggtgggcctgcctgcagggcattcgattttgttagagggactcttaggaactggctgttgcccagccaggtttaacccacaaaaatggctcttttgttagtacatggttcagtctaacagctggtccaactagactatctctcgcagggcagggtccaagctctattcatgctatatcttgttcatcacattttggttaatgtaactgctgccattaaaagatttcaggcactggggtggtgagaggccttcagaatggcctaggctgtggcagcagcggcagtggggggaggtttctgtgcgtctagccgcagtagcaccatatgtgagtttggggtttgta

SEQ ID NO: 39517 - DNA, 724 bp, Bovine  19866881875548
  misc_feature (1)..(1): n is a, c, g, or t
ntaaatgtaaaccaaaaggacagactaaagggaaaaggtaaaattaatcaagatgaatttcaggatacttaatgcagcattgagaaaaaacaaggaattatttcatcagcattcagcccaaaacatttcatatgctgtacaagcacaatgacttatcaatatcagtatcactttaccaactttatgtagaattagaattaaatgaacacagaaatccaagcaaaatgctattagaaacatgcactactcaaagttttaaatactctactatatatatactgaatatacaatggaaacctttgaaagcattttcttcaaaaaaacagaaatgtgccaaaataaatgctttctaatatttaagtactccatactaacttctgcagccccaattagtttcgcacgattgggaacagctttaaattacctacctttgatggtttaagtctcggaagcccagttctataaatcttgaagggcctttctccacagaagttaaataatgtcaacagtttagtaacagttttgatagggaataatttaacaaagcacaatatttgagctaaaaacatgcaatatttacaaaagataaatgtccttgaagctgcaatatcttaatttatctagtattgtaagaaaatactagttcctaaggagaaaaaatttaaattgtacaattaaaaaaacacagtcccctaccctttcaaatgcaaaggtaggccaaaat

SEQ ID NO: 39518 - DNA, 1432 bp, Bovine  19866880359182
  misc_feature (1)..(1): n is a, c, g, or t
naatgcaaagaaaatatgtaagctaaaacattatttctaagacctgaggcttatagctctttgaatatatttaagtataaaaagaatagagtctcatgtgtacatgcagcactctaatagacaaaacacccccactgaaatgccccactatatgaaattggtggcatttctcatagctggcctctgcttcagagaaaaaaattggtaagttatcatacctttttttcctctaaatcatagattagcctgacatccttctataccaaaaagtggttactaaatactggcactctgtaaaactgcttaagaatcactattttcaaccctgaaaccccagaaacagaagcctgaaagcagtaggagagagaataagaccttcttagtcatcttagaaagtgaagtcgctcagtcatgtctgactctttgcgaccccatggactgtagcctaccaggctcctctgtccatgggattttccagccaagagtactggagtggtttgtcatttccttctccagaggatctcccccaaccagggattgaacccaagtctcctgcattgtaggcagactcttttactgtctgagccaccagggaagtcatcttaatcagaaattatcttatatgttgttaatgtggatattgtcattgtagatatggtcttgaggtctccaacactttgttccttaccttttattaggtcctctaaaagatatgatttatcctacataaacaagctgaattttcccctctatacatataagcattttctcactagacaaccaaatatactgtgccaatactgttcctttgcaatatcaattgatgctacttatttttaacaagacacataaattggccagatgagattttatacaagagaaccaaactttattgcaccttcgctggtttttacagtctctcatcaatgttgttcactcagtcagtgagccagctatggaaacaaccaagtatttattgaatgtgagtctgcaaattctctcttataatgtgctgcttccttcccttcttcctaaacttcattatgagttatcacattataatgaacagtttcattataatgatagtactcttctactaataccatctccatgtaccaccattcctaacccgtcttctcttcttttcctgtgtttgacttaaaaataaataaatgaactgaagacaacatatattatcaaagaaagtgaaagtcactcagtcctgtcgaactctttgtgaccagtggaattctccagggcagaacactggagtgggtaacctatcccttctccaggggatcttcctgacccaggaatcgaaccgaggtctcctgaattgcaggcagattctttaccaactgagctttcagggaagccctatattatcaaaactctaccaaaaatgttcaaggagagatagagcttaccagat

SEQ ID NO: 39519 - DNA, 1526 bp, Bovine  19866880400982
  misc_feature (1)..(1): n is a, c, g, or t
ntttaaagagcttggaaaaactagtacatataaagaactcaatatataccagtaccattctcattaaaaaaaagagagggagacaaagtattagggcaaaaggttaattccatttgaaggtgttgagtctgaggtcttgttaagacagtcaggtgaagacatccaaaagtgaagtgggaagcagagcaggagctccgggaaaacactgcagtggaaggcccactgctcatcagcaggaagctgagagctggagccagggaagcagagaaggctgcctgagcacacagtgggagtggtgaaacgagggccaagaacaggtcgtttggtaacgcctacaacttgctggtggcgagagcaagatgcaacagccaggagacagaaaagactaggaaagggtgtcggggccaggaagtcaagtacagagcatgattcttaggaagtggcgctagtggtaaagaatccacctgtcagtgcaggagacgcaagagaatcgggtttgatccttgggtggggaagatccactagaggaggaaatggcaacccactctagtattcttgcctgggaatttccatgaactgaggactctggcaggctatatccatagggttgcaaagagtcatacatgactgagtgcatgtgcgtgcgcacacacacacacaaacaaatctaatcacttaccttgtggaatagacgaaggttaaaagcataaagctcagttgaatagaacatactgaaaaaaaaaagattataaatctaaattagcactgcaaaaacagtatctgcagcctacttattggtatgcttagttttatctgaaagttatgggaactcaagtacaaaaacaaataaataagccaaacaaacacacattgctaaactgacagaatcatttaaactagtaggacttgatctgttcttaatgaaagatactcccagagataagctctgatatttgctactcaaggtagatctaagaccttctttgatttaaaatttggttatttaatttgttcagtttaggaaaaactggtttatccaatgaatattagcaaagagcacaaatgcagtagcatgtaacatatattttggaataactcatgttgattttaataacaaaagattctttgatattacaattaccaaaagttgtctttggtattacagggtatggaacaaaagcttagtttttgagcctagcagttatttgcattgtatagtctgctgcttcttaaaatgaaatgatattactttgggtttattttattaataatagaaaaaagtgacctaaatagtcacattttaaccaatgcagccaattactatactcagaaaacaacagtaccatatattataaatcccagttttaattcacaataaagggtaaaatgaacttcaagttaaaattttttaaatgggcaagaaaggggtcactttaacatttgaatttgatagctgtctcggcttctttcatcaactattatgaatcagacataaataaacaaaggagattaagtcataagtggat

SEQ ID NO: 39520 - DNA, 1646 bp, Bovine  19866880440331
  misc_feature (1)..(1): n is a, c, g, or t
nattattatgctcagttctagctatttctttttaaaaattatttatgagtacatgacacattactgtgtttatttgtggctatttcttttgattatatataattgtttccaccctgccattaggttataaattcctcccaagatatgtacagtgtgaaatttttctgtgttctacaaagacctaagcttctttggggtagaatggatatataatgcctacataatacattgcattatcatcactaataatcaacagtaattgctctaatgatgcattacatttttataacatctctagctgccagaaatttcagagatcattttatctttttcataatctgttgtgaagacaaacagaagacaataaaatgtcttcattttacaagcgggcattgtgaatttccgagacctttgggggctaattagagtcctgccaaaaccactggagagaagccaggaggcagatggctgagaacaggcaatcaaggaaaggcaagcttttcccaggtctgttctccaggctcggggtgtctgagttgggacagttctaggagacgaggtcagccagagagcaccatgatttctgcatggcccttggtctcagttactacccagaggttacttcatcaacacacagtggaactttctgccaagaatttcagctgaaacacgcttcccttctcttgtagggttctgtctccacaattctttatcttgggcatttctcataggcaaagatttgggtttttatgtcaagaggtattttcatatcctgtctgactcagggggaaaaaactgtccatcttgccagagtcatttgaatatttgtagagggactaaactcctcagagaggtgcaaaggtcttcctatctgattcggcatctccttatacactgtctccatgccctgcttcgttgcttcttcagagcactaaccatccctgacaggcatctcaggtccaactgtcctctgtttccctcagcagatttccagctccaaaagggcaggaatgacatcttgggtgatggccaaccctcaaaacagcctgggacatatggtagtcacccaatatttgttgttatgcaaactacagtcagctcttttgttctctaaaatgccatcattttgttctcttaaaatgacatcagggacttccctggtgctccagtggcttagactccacactcccaatgtaagagacctgggtttgatccttgatcaagtaactggagtccacatgtaactaagacccgatgcagccaaataaataaatattaacaaacaaacaaacatatcaaaccacagaagagaatctataaaacaccttactcagggctctaggaagccctcctaatcccctcaccctacctgatgctggggttagtagtctaaatgttagcagagtgccaaaatctgttactgaacacagggtcccgctgctcaccactcaaaagtcaataaagaagccaggtgagtgaaaagaaaggtttgctttattttcgacaccagcaacagtggaggtgggaggaggtgctgatgcctgtccagagaccaactgccccctgacaatctggggacaagagcttttatagatagagggagggggcgacaaagaagaaacagcccagtcggctctgacagtctt

SEQ ID NO: 39521 - DNA, 2809 bp, Bovine  19866880566884
  misc_feature (1)..(1): n is a, c, g, or t
ntcccagcttcttactgcttattggttggaggctgctcttactttctagaggcctccaaaagtcccttgccatatggatctttcagcaggtagcttacttgcaacatggcagtttgttttttcaaggccaatggagaatctctctagtgtgtgctagtaaggttagtaaggtggagattgtgtatatatatatatatatatatatatatatatatatatatatatggcttcccaggtggctcagtggtaaagaatctgcctgccaatgcaggagatccaggatacatgaggttgatccctggatcaggaagatcccctggaggcagaaatggcaacccatttcagtattcttgcctggagaattccttggacagaggagcctggcaggccatagtccatggggtcgcaatgagtcggacacaactgggtgactgagtacatgagcgcacacacacacacacacacacgcacacacacatacaagtcaggaaacaaacagatccaacctacactcaagggaggaaagttatacaggaattgcacactcaggttatttcaaaattttgcctgctacagttttcaacttgattacacatcacatttgcctggggagttgctaaaaaacattgatgtgtaggatttacttcagacaaattaaataagagtatttggagggttggaaacagacttaagtttttataaaactttccaggtaatttaattatacaaacaaatattgtcacaaggataatgtatgcctattaagtaattctggaagtagctgaccctcctcttttgcttgtcagaatgattgaaacattaaaaaattttttaaaaagctcttttcagtaggtggtacatatggtaagaatttttatacaagctcaatagtggctagcagtgggctaatatccttaggaggactactggtttaaatatgtttagtatgacacatttttgtctacaaattaacattagcaacttggagtgtaacggaaaaataataaaatgattgttggtagatttaaaaggaagagatagtagtacgaatccagttctttccagtcttctagctctacttgcttcccatcaaatgtggcttatagattttggcatgcaatgtatataccatgttcttcctaaacaactatgacgaaagcattgccaaccactaatctggactgccctcattttccttgacatttggaattcctccgtaaagaaaaggaagactcaaccatcctgaacttgcccaacagtaacctgtgaaacagtatttccaaacctgttgtttttttccattatgccatgctactttgcgataaactgtgcaaagagtacgttgggtcaggtaaggaacccggttggaattaaagagagattacaaggagcaaatggcaggtgggaatggccgtagtagagctgttctcttcattcccacatcagctggttctttcaggtcagtgagtcctagaactgtaaggctgtggctaggacctacagtctctgtagaaatctgtcacagatgccctccagataaccctatcattcatgcaccagcaatcccctacttgggcctctttttcctaacaaatgaattcatgggagagaaaaatcaaagctacaaaggaaaatcaatttaatgcatgaaagatgaaattatgtagaaaaatatcaccccttcatgcttaacgaatcaaagaaaatgtgtttgccagcatgaagcaattttatcagaaaatagcccaggtgaaagagttaaagggaagggcattaccaagcccaactctgtcacacatgacaaattgacagaagacagacattgcagacagactaaattgtgttcagaggtttgtaaaactgtagggttttacatatagagtacttttcatgaatctcttctcagtgcaccaaaattaacacgtggatgatttctaattaactgttccagtcaacttaatttttgaaatgaagagcaaaggtgtaaactcagaaaacaaccccatttacaatgacaaaaaaagaagaaagaagaaaatatctaggaataaatttaaccaagaaggtgaaagacctgtacaccgaaaactgcaagacactgttgaaaaaaactggaggtgacacaaagaaatgggaagatatgctgtgcttgtaaaatggaagaactaacattgttaaaatgtctatattacgtagagcaatctacagattcaacgtaagctccatcaacgtctcaatgacattattcacagaaatagaacaacaacaacaacaaaacccccaatttacatggaacttcaaaagaccctgagccaaaacaaccctgagaaaaaagaacaaagttagaggtttcacaatgttatatattcacagtatattagaaagctatagtaatcaaagcagtgtggtatttggccaaaaaacagacacatagacaaatgggccagaactgacagccctaaaataaatccagacatacgtggacaattaatttacaacaaaagggaaaagaacatgcaatggagaaaggatcagttcagtcagttcagtcactcagtcgtgtccgactctttgcaacctcatgaatggcagcacaccaggactccctgtccatcaccatctcccggagttcattcaaactcatgtccatcgagtcggtgatgccacccagccatctcatcctctgtcgcccccttttcctcctgcccccaatccctcccagcatcagaatcttttccaatgagtccactcttcgcaggagaggtcaaagtactggagttacagctttagcatcatcccttccaaagaa

SEQ ID NO: 39522 - DNA, 970 bp, Bovine  19866880581927
  misc_feature (1)..(1): n is a, c, g, or t
nagatagctcttgtaacttcagtgatagagaacacaagaggatattgaaaggaatcttgaccctttttgtacaggagctaaggatgaagacgcgaagttgggaagctggctccaggtttgaatccaattatccaaagcatggtagaagcaactcttcggatatgtatccgctagtaggaagcagggacatgaacttgctggagaagctgctggaggggaaaagaaagttgtagagaaaaaaatattttccaagctccctcatatgtcaccctggggcactgtgagaagcctgtgagagattttactgctcctgtcagcacctccgtggggcctcttcctcatcctgtgcttccatttctccttggggcagctgattttaggctgaaaatgaccgtcgtgggagttcagccaagtagaagttgcatccaagtcatgccagtcccaccctgacaggcctgtgggtgagtcaggctttccctggtactcagggaaccttctgtgaatccagagaaaatccctcaggaagtcacgcctaaccataaaggctgccgggccagcgtgcatctatcccaggggaggaaaaacactatctcccccgggatgaataagggtctgttccctcaccgcagtgtgtctgaagtgccacccagcgccattcctcagtggtgaagtgacccactttccgctgggctgcaggcgagctggagactctgcctctctttaggagacttaggccacacggtctggttcctctgttccttgattgaagtcactcccatgacctcccacaacatgaagcagtgcagacgtctcagaggagctgatacagctcacattcagcgcccctgccatctccgcctgctcgaggcaagcctggatagatacaggctccgtatctaagggactggtcagcatctcaggcaaaaaggatgaaaaaaagacctaggaatagccaaaaggaaagatcatt

SEQ ID NO: 39523 - DNA, 2782 bp, Bovine  19866880658206
  misc_feature (1)..(1): n is a, c, g, or t
nggggatcttccctccaggggccaacccggtctccttcttgtagccgattctttaccactgagccccagggaagcccatgtatttggatggcattcagcaaatcttgttttaaggtttggacagcttttatccgtttctatgtctaagtagttggcagagatatcctgtgaaaccagacagctgaacttgtcacttgtcttgtcttccaggaaagttctgagagcagtgattttcatccatcaactttagaatttcgtcagtttctggaaggagctgaacagaggaagcaagcgaacctaagcagttccctgtctttgctggggtttctgtttattgtgagttcatgcctgatgtttagtttaaagtgaaagaaatatcattcttatgttcttatacaacaactcaaacatgaaacgaaatgtcattaacatcctcccaaaggcctcagccatcatggaagctatgtccttcttttattatctagccccactgcctatctagatggagcttccttggtttattacaatatggcaaggcgcccaaagatacctgggacctttgagtgggcttggagtatcttgaagatgtccacagtagaaagctgaattgcccaaggaaagtctggaggtattccaggagggaacccttagtcaagttgctgcttgctgaggtagggaaattcttctctattgctgcctgggtgaggttcgttcttgctccaaggggataggagatgactcagcccagcgaaggggtcccatgcagtcctctgccaagaggccccgcatttctgtctatctcgacctttcaatcttgctcctaatgagccacgtgataaattgccaagaagcaggtttttgaaacccacctgagatcttctccagtgttttctctctgactcaagggaaatttcagagaaacaacaataacaaaaactttagctttgagagactatgtatccctttcctgatggtcgccaaccccaacaggtagctaccttaagtctattcaatcttaatggatgtaaggttggggaaattaaagccaggaaagtcagtaggctctttcctctgcttttcatttgttcctaaccatctctgatgtgacgaataacagctcacaattggctagaagaggttaaggcgagaatagagaggatccgtggagtacggacaagataaaagagttaatgctctgaaaaagactgtgtcctcacatttttggactgtccgtgactttgttggattgtccgtaactttgttcaccttctcaggctggataattgacagctcttgggacaaatgacagtttcccttccttcctgaagtctagctttaaaaaaaatctgagattgtttccatggattttgaaacctctagtgcagctcaatggatattttgtacctgaaaggcaattattacttctaacatatgtaccactggtttacttctttttaagaggttaattctcggagaaggcaatggtaacccactccagtactcttgcctggaaaatcccatggacagaggagcctgataagctgcagtccatggggtcgctaagagttggacacgactgagcaacttcactttcacttttcactttcatgccttggagaaggaaatggcaacccactccagtattcttgcctggagaatccaagggatgggggagcctggtgggctgccgtctatggggtcgcacagagtcggacacgactgaagcgacttagcagcagcagcagcagcaagaggttaattctaattgtcctattttctttgaatattattgtgaatataaaacaaagttattctcatttccattatttattaatttaattttgaaaaagcaataaaataaagttgatataaaatagtgaagaccaacctggttttggacacctgtttggaatagatctgggtgatccttaataacgtcaagacacagcataaaattatcttataaaatagcacctccacttacaaaaagacataaaagcatacttacatttatatgtcactttaatcttcaaaataaatttataccaattgaaattttacaaggcaccaacagtttatgtaaaatcaaccacaaaatgataaaatgtgacaatttcaaagatttgaggataattggtctaaagaatataaacacctattttattacttttttcccctagcttttccaattgcactctactgttgttattctcattagatattaaaaataatgaggcacagaactttaatgtgagtgccaaaattctcaaagatctatccagttctggcaaaacaaacctcaaggctcccagctctacatatttctgtcccataattctggttctgggttcagcttcataccacattatcttttccccagcaaataggtcatttccatacagagtcatttatgaacaaatttgcttttaccaagtaaattgagttatgtgattttttttttcaggtcgattgcatgctgactatgccacatgacaagttttgatcagtttctcattttgtaaaattattctgaagtagttagtaaagtattgacgtgaggatgtggtggtggtggtggtttagtctctatttgtgtccgactccttgcgaccccatggagccctcaaggctgctctgtctgtgggatttctcaggcaagaatactggagtgggttgtcgttttcttctccagatgatgatatagtacacggtaaatagtggctccttcaaggtctgaagaaatgaatcttcccggaaatgtgacctagtttatccccagcta

SEQ ID NO: 39524 - DNA, 1617 bp, Bovine  19866880737128
  misc_feature (1)..(1): n is a, c, g, or t
natagagtcgggtggaaatagattagtgaagcatataagcaagagtgagtttgaggtcaaggttatcagtaactgagaagagcatggggttgccacaggtggaaggttgtgctcttagagtcgtgggtgaaggaaaagagaattaggattgtcatcagatttggaagtgatggagaaagaaagttcggggttttagggaactgaaagtgatgacaaatctatatggtttgtaggtgagtgagaatctctggcagcagttgtcaaaaaggggaggatgagatttagtttcagaaacattctgttaaatgttcataatttggtaaggaagagtagatatgggatagatagttctttagggagtttgagattctcagatgatcaagattatgaaagagaaagcatcaaaaggagaaatcattcctggagactttgtggataatgctgtaaaagtttcagagtagaataattaatctcatgattcctattcattcattcattcacccacctattcagcaagtatttattaagtccccctttatgttttaggcactgtgttttatgctattagatcagtaagaaacagtttctattcttaaggaatttatgattagcaaaaaggtacagatatgggggactggaatgcaaaagtaggaagtcaagaaacacctggagtaacaggcaaatttggccttggagtacaaaatgaagcagggcaaaggctaatagagttttgccaagagaatgcactggtcatagcaaaccctgtcttccaacaacacaagagaagactctacacatggacatcaccagatagtcaacaccgcaatcagattgattacattctttgcagccaaacacggagaagctctacacagtcagcaaaaataagactgggagctgactgtggctcagatcatgaactctttattgccaaattcagacttaaattgaagaaaatagggaagaccacaagaccattcaagtatgacctaaatcaatcccttacaattatagagtggaagtgagaaatagatttaagggactagatctgatagacagagtgcctgatgaactatggactgaggttcatgacattgtacaggaagcagtgatcaagacaatccccaagaaaaataaattaaaaaaggcaaaatggttgtctggggaggccttacaaatagctgagaaaaaagagaagtgaaaggtaaaggagaaaaggaaaaatatacctattgtaatgcagaggttccaaagaacagcaaggagagataagaaagccttcctcagtgatcaatgcaaagaacatttcatgcaaagatgagcacaataaagaacagaaatggtatggaccttacagaagcagaagatataagaagtggtgacaataatacacagaactatacaaaaaagttcttcatgaaccaaatacccacaatggtgtgatcgctcacctagagccaaatatcctggaatgcgaagtcaagtggaccttagaaagcatcactaccaacaaagctagtagaggtaatggaattccacttgagctatttcaaatcctaaaagataatgctgtgaaagtgctgcactcaatatgccagcaaataggaaaacagcagg

SEQ ID NO: 39525 - DNA, 1939 bp, Bovine  19866880758070
  misc_feature (1)..(1): n is a, c, g, or t
nattttaacgaggaagcgaacgtgttgtgtaattccctgggtccagtgattcactccgcctgggagaaggatggtcggggagcgaggtctgcagagtcacgttcccatcaatcagtaaataagataagaggcaggaattttaaacacaactattagcaggcgactcccaacgcatcaacaaaccgcaactcattatgttaagcggtctctgcgggggaggaaggggggaggttggcgaggaaaaggaggaggcggcaacttgagggttttttacttgcatttttaaggagtgcgctgaactttaaagaacgctgcccaggtctaacaggcaactgaaattgggaccatttgtcccttcaaaactattacccctccctcaagtagagtatggcccaaagggaaggacgctcaaggcggattctattgatttctggaagactgggataggcagcattcaggatcctgaaggaatttgaagcaaaatcagggttcagtcacttaggtctccgtgaaacggcctcctttgtgtctgacaaatttctgtgcgtgatcttgagacttgtttgtaagttttaactggttactcaagacaatgaagttcttaaagtaacagacagtatttaacctttgcctagcatcaggaggctgctgtgtttttttaatgagaaaccacacaaaactgcctagatactctccaaaatctcagtcttcaatagccctcttgctgctcaggaagggatagccagtctgtctacataggacacattacatggtgattttgtgactcaggcccaccagggaggagggcaaggccacttatataatttgtgacctaatatgtgagtcgtagggtcatcgtaaagcagttctgtcaacagtcaatgagtcctggaaatcacagcaagaggacagaggggaatccaccttgagataacctgcagcccattaaaatgttggtaattaaagtctttatttaccagatcacatacagctttaactggattataaaagtcttcttgcagggtgaaccaaaagctgtgtccacacagctaacccttcactcacaaacgttcactcatccttgtggaatgactttaatttctctttttttcctgcacgtattttccacatcattgaaaaatataacattcttgagcagatgttctgaagcctccttcctgagtcagagtgcctggaagaattaggccaactgttgcctggtgtctaactgcttatctgtgacccacccaactccatgtccctccaaccacgccacgtagacaaagtggcccgcatctgtatctgaggggctgtttgcatcgcgggagaaggttgctgctgctgctaagtcgcttcagtcgtgtccgactctgtacgaccccacagacggcagcccaccaggctcccccatccctgggattctctaggcaagaatactggagtgggttgccacttccttctccaacaggagaaggtaaacaaccccaaagaaagtagtccagaaaaaataaaagcagatgaaacttttttttttaatttggaaacagtcgccttgtaatattaatagactttagtcacttgggagattagcacttgtgctgtgtaattggcaactttctctcatgcaattaacctctgccagaattaattgtgtgtgtgtgtgtgttgctaaagctttgtgtgtgcatacggagggtcttgaggctaaactatactatttggatacacacgagttggaagtttttctctctattggttgttaggtaaaacatccagaagctgaaactgagtcatagcgattaagacatgaagtagatgaaagcagatggaagctttacttcacaaacaatactgttttaaaaacaagtcacctacctcccgcctaacactgaccacagttctgaagacaggatttgggggccactacccgtctctctat

SEQ ID NO: 39526 - DNA, 1454 bp, Bovine  19866880811755
  misc_feature (1)..(1): n is a, c, g, or t
ntgtataatatcatatatgaaatgagtcgccagttcagggttcaatgcaggatacaggaagcttggggctgatgcagtgggacgaacccagagggatggtacagggagggaggtggaaggggggttcaagatggggagcacatgtatacccatggcggattcatgttattgtatggcaaaaccaatacaatattgtaaagtaattagcctccaattaaaataaataaatttatatttttttaaaaaagataaatcaattgaagatactcaaactgaaacataggggaaaaaaagattagaagaaatagagctgagcataaaaagaaatgtggtattagtaaaaatgttgaatttatatgtaattggaatcctagaaggagacaaaaatggaaaaagagaaaatggaacagaaacaatatttgaaaagataatatccaataatttttcaaagttggtaaaaatatcaactcacagattcaagagttttatcaaacctcaagcagggtaaatacaaagaaaaccacactgagacacagcatggtcacactgctgaaaatcaacaacaagaagagaaatttaaaatcagctgaagaaaaaaaaaatacaacgtttaaaggaatgacagtaaaactgagagctgacttttcaacagaaaccaggaaatatagaagaaaagaaaatgacatcttgaagctgctgaaaagaaaagaaaattagctaccaacctcaaagtgtatagccagtgaaaatatccttcaaacatgaagatataataaagatgtttttagataaacaaaagttgagagaatgtatttccagcaaaccttcactagaagaaatactaaaggaagttttcccaattggaggaaaattatttcaactgaaacacaggatatcaggaaagaataaagagacctggaaagagtacatgagtatttctaataaataaataaatatatatatatatgtgtgtgtgtgtatacaaataaacaatgacagtttaaaataaaagtaataataatgtcctgtacaggccaaaacatatggtaaaagtaaaatatgtgaaaacaaagtggacaagaaggaagtaaatggagtcaaagtacggaaataaacttacatctttcagaaagtgatgaagttactaatttaatgcagactgtaataagtcaagaatgtgcattttaatatttagggtaaccatagaaaaaatttgtaaacaatctaattaaatggtcaatagaaaactaaaagtggaataaagaaaaatttcattaattccaaagtggggaagaaaggagggatgaaggaatagagaagagatgggaccaacaaaaggaatagtaaagtgaaaacttgtactctactttgttaataatcacatgaactgggtaatgaactaaacatagaagactgtatgaagtggataagccctagtcatacactattaataa

SEQ ID NO: 39527 - DNA, 2108 bp, Bovine  19866880822450
  misc_feature (1)..(1): n is a, c, g, or t
nctgctgcccccactaagcctcttcgttacttttaaaattcctaatacttgttttgattggggaatttgtagtgggtatgtgactggattcttcaagttcacacacacacacacagattagtgaacaataccaagagttagaacaagaacccattggtttatacgtcattgagttctttgcttttcctattttttgttccttccttcttaaagttaataaaattggcctgtagcaggttttttcttttctttgacttaacagtccaataaaagtaaatcagagacagaaatctcagcagagaaatcagcctttttttgtacagtatgccactgacctctgatggtggaagtttagcataaaccaggagagacccagccaagaaaattcagcttcccttcaacactctgcttacctggttaatgtttcttaggtttacaaacttgacctattacctctgtagtgtgtgacatgggagcctcttctattaatactctgagtatttaaagtacatttgagagtacattctgtatcctcaattatcagttcacagaatagcatcagggttaaaaattccaactctggagtcagatggacttgagttttcattctgtttaataactttataacttttgtcagtgtcctcatttgtaaaatgaagacagtagtaatacctatctcatagggtcatttggagaattaaataatatgtacataaagccctcagcgtaatacctagtatacagtaagtgctctggaaaggttagctactgtaaaatatttgttatatcgcagtagtttatattatttctaaagctaattatggaagagagagaatcaccgtttctagttttgtaatacattctttttgacacttctctgtcacagttgctaggaatggggagttcattcatcaaaccaagagtcctttgtccacagtgacctaagctttctgtgacttttggaagcttcaaagttagaagaaaaatgttgaaaaagcttagaaaaagaaagcagtaatgggaaaccttttcaaaataagacagtttggtaggttgacaactagagtaatggaagcaaagaatgtctctagagtgacagaagaaaccataaagaaaggaaaagggagaaaacaaacatttaaatgtttgtactgggtgctttggtccttatcagtacattttctatgagatgtctcattcagcctcaggccacaacccagggagggaggggggggtcgcctgaagagtaggagaaggggagagccaaggcagggaggaagggaagatgaaccttatttttttttcagtttttgtgttttatttatttttttaattaatttattttaactggaggctaattactttacaatattgtggtgggttttgccctacattgacatgaatcagccatgggtgtacacgtgttccccatcctgaaccccctcccacctccctccccatcgcatccctctgggtcatcccagtgcaccagccctgagtgccctgcctcatgcatcgaacctggactggcgatctgtttcacattaatgggaagtctccttactattcagagatggggcgcttaagccagagttctgcttaacttgtttagtgccacagagctggggacagacgaggtctcctaaaaccggtgaagacaaaacactggtaccgaggttaacaaaggaaagttttcgcatggaaccttccccctgtaaaaacagtgggctcagatgggactatctcagaggaccctttctgctccacattctgtaattctgctagtaaaaccttctgacatgttttcctttgtgggtactgcaaaggcaggcaaaataaatattacggggaaaacactgattgaaagctttgtgagagaataaaaagaccagttgggaggcaaaggaaataaacatctcgagggaagccaaagtaatcaaaagaattataagaacgagataaaaaggaaatcaatattaaaaagagataaggtagaatcggaaaataaatagtaatgccgttccttttcaagaatgtgagcaggcacaatagagatgatgatcactgaaaataattacagtcgttactacttagtataatgtacagga

SEQ ID NO: 39528 - DNA, 1890 bp, Bovine  19866880835841
  misc_feature (1)..(1): n is a, c, g, or t
nctcttattctcctatccccatattgcctttccctcttccctctccccactggtaaccactagctaatttcaaaaacaagagtgttacttatttcaatgacacaaattgtaaaaacaaataaaatatgctcttttcagaaccaaaataggcatttccaatttccttaaacattttagaaacagcagtatataatctgatcatcatttttattttaagttatatatcttcagctttctagccaaccgtgggtacatccagaataaatacagatccttcctgtcttagtccagatttgttttagactctgtgctaccactttggagctaccttcccaacactgtttgtggactatcactttcccctataaaaagacaaagcgatattaccctgattttacctgctttattttacatatgctgtgtggtcatttactttacacttttataatttgctcctctgtttttctcctatagcaatggtaatcgctattcttgcgctgattgctggtatcattggaattaccatcggaagtgtcagcctttttttcatactgcaaatggtgaggactcagttttatttttaagttctggtataaatagctccaggagggtttaactctacggcttcaactaaactcaaaaggaaaacaaaccgcatgaaactccatctttttcaactggacacagagaagtcactgagttactctagcagaattttttatttggcatttgcctatgaagaatccccaaataccaatctacctgttttccaatgaaacatcctccaaggcttctaacttggtttagtatattttgatggatgtggatgaaagtcaaatgtctaattatagtatctagtttaatttgcatatgaaaaatctttaaaataacatgatatatttattaatgctgaaaatatttgcttttctattctatttcttgggacagatttgtcaaattccacctatgacttttcagccatgaatgatgtttttcatcactaaagatacttttgagtctgtatgacagcattccaaagaacatcacctttgctatataacctcctgtttaaggtagttcagacacaacatttgtgtgtgtgattataatgctagtaatttggaattataatcctaggtcattaagtgcctagtcacaaaagagtggtgcaattgagttcgcattcgccctctatttttatctttgtgatctccataccacagccattctatatatgtatatattctttataaaatgcttgttttcgagagctcacaaaactgcaatgttagggctataacaacaagattgatagtaaatctacatagagttcccttgcccttttctattttaactatttttgttaggtgactttgataatcattcaaatctatgattgtttagcattactccatgacaatttatcttctctaaataatattttcttaataaaagttaagtaatgagagaatctgctctaatatgagagattttgtaaagacttgaatgggagataactcctcttgtttgcagtttaaatgttggggacaaagtcatgccctggtctttgggcacagatgacaaatttagttgtcttctctcttggctgatgatctaaatctgaaaaagacaatgacatacttggttggcaaaattcagagaacatcttgcatacgaatatagtagaattgggtcatggttatcaattcagcttttcattacagcagggaactatgacacagtcaatgtttggggtaatagttcacctatggaaataacaaatattattttgaaataaaactttaaagcaaagtttgtaggttatctatgaaataatagctttttccacaaaagaactctacaacgtgaattttaattgaaagaaaacaa

SEQ ID NO: 39529 - DNA, 890 bp, Bovine  19866880903430
  misc_feature (1)..(1): n is a, c, g, or t
ntaaataaaaggcaatttccactgtgagaagaaaagccaaataatcagttagaaaagaattgtcttaatgaactgctaagcccaaattagacttcctgatataaactaaaataaaatgcccacagcttgtgataaatgaatgaatgactcctgcacatattaagcaaaagattatctagcctgtctatgagctttaaaaaaaaaaaaaaaaaggtaagatttcccaaccagaggccagaggaaatgggtttgggggataggcagattcacacaatgctgaagtgtgatggtcctctaagatttccttcaaatatattttagattaagtaccagggagtcattagatctatttaaagttcacagccacaggtattaaacatatcaggataagaaacaatctgccctcaccctgtagagcaaattgaaggaattaaaacagtctgcctagtggtagtcataatctaataggttaaaatatttcttccctagcttctttatgctcattctttctctcttattcagctttccccctaattagagtatactccacattgattttgaaaccaagtcagcatggttgcattttttatttttttaatttctatttttggctgtgccatgtggcgtatgggatcttagttcccaatcaggggttgaacccacatgccttcagcagtgaaagcctggagtcttaaccactgggccacaagggaagtccttgcatggttaccttttagttagcatattagtttagttttagattttatatcctccctactgtcccttaatgcctcccatctactcagaaagtagcctgtacatcctctatcataacaatgcataaaaattgcctttttacctgtttttccctgtctacatttgatacatat

SEQ ID NO: 39530 - DNA, 893 bp, Bovine  19866880987194
  misc_feature (1)..(1): n is a, c, g, or t
nactacaaatgagtgataagtgtacagtcacaaaaccttagtctccaggattcagaaatttcttttaagttatttaaaccaatttccaaaactttattaaaaatagaaactaggactggacagattaaagcatttaattgagaatacagggtaatctttttatatattcaactacatgtcaaatttgcatatcttattgcatttatcagagaaggcaatggcaccccactccagtactcttggctggaaaaacccatggatggaggagcctggtgggctacagtccatggggccgctaggagtcagacaccactgaacgacttcactttcacttttcgctttcctgcattggagaaggaaatggcaacccactccagtgttcttgcctggagaatcccagggacaggggagcctggtgggctgccctctatggggtcgcacagagtcggacacgactgaagcgacttagcagcattgcatttatagagttattcagaagtttctttttgtaagcaaagtcattaagtctttttctcaggatactctgcccactgacataattaaatattccagtggaacacatttcatgtctgtgccctgaatgagttaacacttaagactttcagacaagttatcataaatgagtcatttatacatgtgtagtatcccacttctttaataggaaaaaacttttgtgttgatttatgggtcaaaggatgaatgtgtatgccattttatatattatatctattccacttctttatctatgtatatgtacatatgtgtatgtatgtatgtaggtatgtatgaaaggcatttctaagcacaagatttattagtatgattaaaacatcatctttaatgtaacacataccttgcctgttcagcaatga

SEQ ID NO: 39531 - DNA, 1170 bp, Bovine  19866881002545
  misc_feature (1)..(1): n is a, c, g, or t
ntttgctcaaatcttaactcttgaaaaagtgtgtctcctctattcaatacatactgatagaatactggctatggggatacaaagatgattaagagcctgtgcagggcagataacaatttacagcagtacgattttctattgagtagaacacgatgttcttgataatctgcagcagatccgtgcgcaagacccacaggctgtgttgaggacagcggaaggcgtaactactggtgattattcgaaatatttcttaaggagaaagaaaagtacagcagtctgtacattttaatattcagtggttgagaaaaagatacagcccatggcctctcttatctatcgattactcatgactctaatttacatggtgatgggcagtttgcttatatttagcatgtaaattcagagaaaatatcgtttaactctgtaccaaagagaagtagaaggaatttagaaatgattcatatagctaacgtgtagacaaaaaaaaaattacactaacgggctcttttgcttagacaacaaaacataagagacgtcaactgggataactaaaccatcttcaacacattggcgtcacacctataagcggcggcagtgaaagtgttaaggcctgcacaggcctctatactgcagtaggcggcgcaaaacctgggcaagttttctgggagtgccgcggctccctgccatgcagagcagacgaagcgccggtggaccgtgagccgttaagaacccctggaagacagcgctcgcgtcatgccgggaagccgacgcacaaacctacgtctccaagctctccctcgaggccccgcccattccttacccaagagctctctggggcctcggaggaggcgtggcccagggcaaggaggggagaatgcgcatgcgcacttggagcctagtcatgtagccaactatcaatctcgcgagtgttgatagtcggtggcgtaggtagtagacctgaatgctggagagatagatgatatctaccagaggaagaggaggcagctaagccagttcccagtctctgtccctcttttgctttcctttcttttttccccaaccctccgccctcctgtgaatcagcccgccttccctgacctcagtacccgagtggccccgcccactctcgtcgacgtattcccgccgtgggtaaagcgccggtcgaacccg

SEQ ID NO: 39532 - DNA, 1796 bp, Bovine  19866881080727
  misc_feature (1)..(1): n is a, c, g, or t
ngagtaaaactaaagaaggttgtttaaaaaacagtttctttatgttttcagaattgcttctaaaccaagtgaaatcatagcaggttctataaaaattgttcttgcaaatgaataccccaaaatgcaaaattgtcttgaaaatactagtattagcaatacaaaaacacaattatagacccaactgacacattctcaaatatccaagagaatgggcaatagaaacacatcatgattttattcttatttcctttttactgaggatgcaatagttattcttgtttaaattcctttcaacaaatagttcgtgagtatccgagtgtttcaaccttggatagaagacctaacaccagctggattaagctgcctgtagaggaccatggtactgtgaagtgtgcataggtggaacctgggcatccttcttggatgcccacctcgtcatcccagagatcatacgtggagtagcacagttacagaattttaaattataaggttccatttttttgctattgcaactttagaaaaagttaaattcttattaacctcattattttttaaaaagttagatttgtgttcatttaatcatttttaaatttactaattgtagtattttcatgccctataaaaaacactgaagttcttatcatactcattttctctgtgccaacacggatatgtgtatgatgcttgctcttttgctagatgacattgatgagatgaggatctactatatcttgaatgaaggcagcaaggcaactaaagacatcttctacttctcggcagaagacaatggtaagtcagtattgagaccatacctggcagtcttggttaactaaagtcagtatgagatggaaaagaattaaatcatgtacatagtaatcacaatcagtaatgtcatactatcaccaaatgaattcctttggttttatttgtagtcttctgccaaagcatccttgacaaatcactttttaggaagggaaagcaatgaaaattttcaataattaatttgaagtattttacctgaccaaggttatgtgtgacatcctataggcaagtagatttcctcttcaagaggatctgagaatgtagctggtagtttgtcttactctaaaactaaaacaaacctacagaaggggaggttgggatgaattgaaagactagcattgacatatatgcactaccatgtgtaaaatagagagctggtaggaagctgctgcatagcacagggagctcagctacacgctctatgatgacccagatgagtaggatgggggtggggatgagaaggaggttaaagagggagcagatatatgtatatgtatagctgattcactttgctgtacagcagaaactaacacaatattgtaaagcaactatactccactaaataaaataaaagaaaaaatgaaaataaataaatctaaaaatcgatcattagatgttgttaggcattttagcctcagtactgaatcttagtgactccttgatcttagaagtgtaatattcctagatggggtgaatgaccggcccacaggaaagctttcatttaaaaacatgcctatttatgctgtgcctctgtgcatgtactctgtctttaaagtagcatactgggcagcaactagttaaccgaaggcactttctttactcagccaaggatgtactgattatgtggtcaagagcaatcattttgcagtaagacaggataattgcagaaattatgtccatgtaccacttgccactctataacctttttcagtataaatcattactcattctcagtaaataacatgaattttctg

SEQ ID NO: 39533 - DNA, 2016 bp, Bovine  19866881275829
  misc_feature (1)..(1): n is a, c, g, or t
ntgcccatagtggcggagctgctagggccaggggacccaggagctgagtcagaggagttgctgctccgagaacatttccagcttctggtgaggatccttgagggatccgagaacacggcgcccaggcccagcctcgcagctccgatgatgctggaggtccatcagttcctgcggacagccttgacgcccaacgtcctggctgcggaggacaaggagtctaatgccgatgacctggtcttcaacattctcaatgctcccatcaccacgccgggacaccagggctacgtggtcagcactgacgaccccctgggccttccaatgtccttcttcagccagcgggagctgcgggaactgaaaattgcttatcagctccctacggagaaattggatgcggagcacctcttccaactggagatggaggtggtggatgcagatggtgccacctcagacccctttgcctttatggtggtcgtgaaacccctgaacaccctggccccggtggctagctatgaccagggactactactttttgaaggtcagtcaaggcccctctccagcgccaacagccttcagatcagtgatagtgctcacctgggagaggtgaaagtggctgccatcaggggcttgagacatgggcagctggtcgtgcttggggcgccagcagggtgcaagcatttcacgccaacggacctggcagcagggcgagtggcgtaccaacatgatggcagcaacacctacagcgacatcgtcttccagatggaggatgggcaccaccaggtggaattcctcttccctctcgccatcatccctgttgatgatgaaccaccaatggtcactgccaacaccaggctcttggtgacaggaggtcaggcagtccagatctccccctttgtcctgagtgcaatggatattgactctgaggactcacccatccactttgtgctggaggaccagcctctggaaggagaagaggaagaaagagcaggggatctggctcccggttcctccagctcaaggcagcatctgagggagatgctactgcggcagtcagaaccacctttggggtcctgaagatgaaggctggtattacgtgggaaaggaaggactttatgagaaggtggtgactgagtggcttcgacaagacatagtggaagggagactcttctaccgccatcttggaccccttggccctcaatccataatggcccagataactttccatgtgcaggatgaccatgacccacccaatctatccaagcaacatttcttcaccatcagagtccaaccagtggatttgcagagtccagagctgtttgcaggaactaccctagaaatgactgtgcagcaataccaattcactcacttccagaagaaattcctccaatatattgaccaggactcagatgaccagcacctgtggtacaccctgctgatgcctcctactgacacagatgacaaccaccaagtccgggctggagacattgtgctcactgattcaccagacacacccactgtgcacttcacccaggcccaggtaaatcaccatgaagttgcctaccagcccctctgggagaagctgggaattgtaccacggattgtgcagctcacctaccaggtggaggatgctgcaggcaacagtgtacctggcacattcacattattcctgaggcctgtggacaaccagcctccccaagtcaccaacagaggctttactgtcttataaggagagagtttcagcctgagcagtaatgagctgcatgtttcagaccctgacacagacatcgaccagattgtcttcatattagtttggggtccccaacatggacatttgcagtacttaaaaaaaatgtgtggtcccaggggaatatttcatgcaagctgatattgttaatgggagtatctcttatcggaaccacagaaaccaggcgactagtgataccttccatctggaggtaagtgacaaggtgcatcacaaacccatcactgtccaaatgtctgtgcatcctgtagcagctg

SEQ ID NO: 39534 - DNA, 733 bp, Bovine  19866881281333
  misc_feature (1)..(1): n is a, c, g, or t
ngaggggtgaccgggcaccatgcaaccctgggctgcctgcctcggaccagccggtctggatactctccttcccgggcggctcaaagggattgtcctccagggcccgagacggtgaccattgccgggtcagttctgctcgtgtgagacactgcgctccagcggtccattcatccaggcaaaggtctttctgagagtggggagaaatcccatacctcttccttaccgctgacaagagtgcattttccagccaaaattgagtctcacttcggacatgaaagatgctagtcggagctattttacaaatatgattttctagctgtctgcctgataaagcagcttattccagatcctgtgattccttgcttacaaaataacccagacatttctccttctcagttatggggggaagagcactagcatccagactgctgaattcgaacagcttttgtttctagtcagtgggtttcacataccacacaactggatggaccggatggcttttattttcttagagcgtgatttccatatctgatcaacagtgactgcctgtgagtttattagatatgctttttcctaattactttctttgtagaaaaatatatcggtagccagaggggaggatgtcaagagaaacagtaacagagaaaataccacagttacttggatcaattttctgtgaattaacctatttaacatctgtaatggaatttggctttcacatctgcgatgccta

SEQ ID NO: 39535 - DNA, 1666 bp, Bovine  19866881303852
  misc_feature (1)..(1): n is a, c, g, or t
ntataattagttaagatttggacatatatttcaagccatataattgaaacaatccaaacagattaaatgtcttttctttttctagaaatgttgaaacattgatgctattgttgaagaaattaacaagggaatatgttaccatcagtgcagttgcagccatttggggaccatgaggtgaaccagtcttacaatgaatcctatgcagaaagacagaatgtaaaaaaaaaagatcctggatacataattgagtagctcagtcatgatttacccctctggcagttttaattacactagtcagtgaatcctcttttgtagtttaaacacatcgagacaaatgttctgctacattttactgaaagtaaagatgtaaagtatgaccaacaaccccagcaacattcttaacacagtataaaaatgttctactgccttaaacagataagaaaaattgccataataccgtagaattcgagaaaattgatgacgatgactgggctttccctcttgaagggactgtagctacaggacaccccataaccatattcatttgtattttagactattccattccaaactccaagcaatgaactagtagaaaacatacctatttattttgctttaaatcatagtgaaaatagtgttatttctaaataaacatttaatgatgttggtgacatttcacttaatgtttaatttcttctgctaactctaataaggcaactggtaattgatataatagaatcttctaggaaagtaaaataagagaaagaagttatttaggcttccctggtggctcagatggtaaagagtctgcctgcaaggcagggttcaataactgggtcgggaagatcccctggaggagtgcatggcaacccacttgagtattcttgcctggagatttccatggacagaggaacctatagtccacagggtcacaaggagttggacatgactgaagctatgtagcacacacacacacagtggaattaatgagtaagatactcatgttgtctagtgacctctggccatgaggggcccaggggagacatgataaaacagccaagataagcacagattttggtggccctgttgattttgttcactgtagtttttgtaaagcagttggctgaacccaaatttctcaaagaagattgcatttttttctagtgggatgtggcccaagaaagcagttcaaaatggttagtatggatctagaaaagaaagggtattttagtattctcatgtctctaatttaattccaaaatgtgagtctcttacccccagcacaggctaaatgctttctgtagcctatcgaaggggtgtaggagggaattcaacctgccagagctacacagatttatccctcataatagctaccaatgcgccgcagtaaaattttacgtttcagctaaattactaatgactttcaggcccgtgccagaaattttagggtaggcttataaagagagaggagagaatgtacagtcaagagttcttagcagtggggtgtgtgtgtgtgtgtgtgtccgtgtgcgcagatgtgtgtgtttctcatttgggattatgggacacgtgctcatcattttttgccatcttgattaaatgtaattaggttctggcaagccaccctttcctctcttggatgctggggctctttcgtgttttcaca

SEQ ID NO: 39536 - DNA, 952 bp, Bovine  19866881366592
  misc_feature (1)..(1): n is a, c, g, or t
ncatagttcatcaggcactctctctatcagacctagtcccttaaatctgtttctcacttccactgtataatcataaaggatttgatttaggtcatacctggatggtctaatggttttccctactttcttcaatttaagtctgaatttggcaataaggaattcatgatcagagccacagccagctcccggtcttgtttttgctgactgtatagagcttctccatctttggctgcaaagaatataatcaatctgactttggtattgaccatctggtgatgtccatgtgtagagtattctcttgtgttgttagaagagggtttttgctatactaaaaaactaaacttatagagaaaaatactcatagaattgaatttggtaggcaaataagttataataacttcatccaatgaaatacaatagcctgtcatttgaagtagaaactgtatgtcaaaatttataaacattaaagtaactgtactataaaaattttttgacgaagcttatcttaacgtataaaatgcatttgcaaagctgtatttgctttctctcttgctgtatagtttcaatcagattttagaaatatttcagcttttaagaaaactacttttcaaattaacctcctagtcctatattggcattgtatgctttctttaataaatctcattttttagaaatggtgggaaatcttttatcaaaatatccagtgatttggaagcaagaaaacttcagattttgcaataactacaaagggaaatttatccctacaaaagctgggagatgaacaaattaaataatgagaactcaaacagtgtacaagatttaattttaaaattctgtaaacgcctttggaatgacttgcagaaaaaatcttttgatcaaatttcattttttgtaattggattatatttttttcctggaatgggaaggaaattgaaaggacctcattttgctt

SEQ ID NO: 39537 - DNA, 892 bp, Bovine  19866881428861
  misc_feature (1)..(1): n is a, c, g, or t
nttggattattctttaatgggactttttaaagcgcattttaatagcctccatatttcagcagatatacattgaaaggcatttggaacacctcccagttgcaaaatttttgatcttctaatttcttagaattctgacaacctaccaggtaacagttagtatgatattatgctgacacattccagagttggcagttgttagatttgccagtgcagtttgttgcccagatcccatgggccagagatttactgacttttcctcttacctacctcttcatagaccctccccccacctcttttgttttaagctgaatacaccatgggtgtgtttttaggtacaccatgactatcagactataaatgtctgacctagtgtaaaatcagaattagctacagaaattttatattggaaaattttcactattatgtgtaatttaaagaatcagagataacacatatagagcaaatatatctgttgtcttcacccagagtcatgccattctcagaactttcccaagttcatagatgaattgtaggtgatctgcaaacgctctgaaaagctaaatctagcagagtaagcccgctgtggacaccactcagatttcttctttcccaaagaagaacatcaagcatggaaaggagtagagaagaatgaaatttaaaaacaattataaaataattatcagttcagttcagtcatccagtcacgtccgactctttgtgaccccatggacagcagcacgccattcctccctgtccatcatcaactccctgagcttactgaaactcatgtccatagagtcatgatgccatccaacccctcatcctctgtcctctccttttccttctgcctttaatctttcccagcatcagggtcttttcaaatggagtcagt

SEQ ID NO: 39538 - DNA, 1158 bp, Bovine  19866881669526
  misc_feature (1)..(1): n is a, c, g, or t
ncaggttctcccagactgcctttaacagagatgccctggccttggaacacctttaccctggacatgtgggcttcctgattaccagcaggtctctcaagacagaggattgggacagttcccacaggctccagaagtataaagtaaccagaggaccagtgcatggcttcattatcaacactggccttggaaatgagagcacgcaagtttttacacaaggttagtacacagtgtcccctgatgcctttgtcctgctctttaagtagataagatctcccagctctgcatgaaattgtcctgacctcagtcctttagcagaaagattctaattctaatgaaatacagtggaatgagaaattaacaaacaaagcaacaaatccattatcagccgtttcctcagcctgctctttaaactggagctctcagacattcaatcaggtttgtagttacacattaaaactgccaagtacaggtggacagcttctgcttctgaaatattataagattacaatgatgttgaaaagatcagtttaagtttgaatgttaagtaaaaaatgacatacctaggaatcattgcatagtttaccagtaagtctggatttctgaagatagtggtttggtgtcttgatttcagatataaaaattacactgcacattttattgtactatacaaattcaatttctatatctagaaaatgcatagaactaagtttgcctagggtcacttgcaatgcaggagacacaggagacatgggtttatccctgggtaacgaaaatcccctggagaaggaaatggcaacccagtattctgcctgggaaatcccatgggcagagaggcttggcaggctatagtccatagcaaagaggctgacaggactgagcagcttaacacgcacgcaggcacagaagtttgcctaactatgggagtatatgttttaatgatcatttttcttttatatttgttgttactactaatggtgagctaaaggctggtcctgctggcttcccaagtgatgatactggtacctttgactgctcttcacatagtcataaaactttttcatgtagctctatgcatgagatgtgaagagatacatggaattttacacatccgatatgcataaagctggatgcaattttagagtaaaactaaagaaggtt

SEQ ID NO: 39539 - DNA, 1402 bp, Bovine  19866881721533
  misc_feature (1)..(1): n is a, c, g, or t
nttagcatgaacactgctttggaaaaagttttagtgttcgagagtgattctggacagaatggtctctcattctgtgcaccagtcttcctgaaagacattctagccttatgggtttaatttaatgcctcttggtcaatcagcacaatgttagatacagtgttgccaaggaaagaaaattcagtgatgatttttagctgtgttgccggtgaaaatcttacatcgattgagcctcactttctttgttgagtctttgaatatggctgtggaatatggatttaataaaaagtgacctattacacaattttctgttttagtccgttggtaatgaggaatggattggccgtgatgatgtcaacggtgacacaactgcacaaaccttcattgagtagcttggagatcttcatgaatactagccgggaagtgaggttttttaaaacattgccaaggtccatgagaacaaaaccttcacgaacacaggaaccagtactgtcatcctctgtacttccatgtcaaccaagattatgtctatattgcattaagggcaaatctgccttgttcttttagaagtcgtgatgggtttcaaatcagaatgccaccagtaggaatcaagaggatgccttcagaaatcccgcatcattgtcttattctcttgtattgtgggaaagcctctgcagatacctagataatctaagaaaagcttttaaagcatagtacatgctctaggaggctttgttcttataattattattattgttgttgttttagtcactaagtcatttccgactcttttgtgaccctacagactgtagctagtcaggcttctctgtccgtgggattctccaggcaagaacagaggagtgggttgccatttccttttccaggggatcttcctgacccagggatagaacccatgtctcctacattggcaggcagattctttaccactaaaccaccagggaaaccctgtaaatgttattaccatttatcataaaatgcctcagcacatatgtatatcttaaggtttaagatcttgatcaatttttgcagatctgccttgagagtattttcctaaaatatgtttaaaacatggtagatggtaatttctttaaaccctagaaggttttatctgcaaaataagcatccatatttaggaaatctcttaagtttcgatagaaagaatatttccttctttgtccaaaatgagagtggtgccatcttcattatgacttctgaccgaacctgctgtttggtaatgaacatgcgtaggaggtttgacggaagtcttaacctgaaactctctgctctctgctttctaccacacgtgcttcttaacttcatgtcaccttgcaggtatttaggctgtttattttgccgtgatgcgagaaactttaagagctagaaa

SEQ ID NO: 39540 - DNA, 1295 bp, Bovine  19866880138216
  misc_feature (1)..(1): n is a, c, g, or t
natttttgcttgttataaactgtggatcatgtaccagtgatatatcggtatataatttcagtgactagataaaagttattggttaacacatgttccaaaaaatcacttttatatggggaaatagatttcaaatgaaaaaaatatatgtaaattatcaggtaaatataaaaaaatgatcttaattcattactgggagccaaagcaagaccaatataaatttaggatgccatagttaacagtgttaaatcttataagagaacaatcccaaaacagctgtttcaatatggttccaagacggctgacacttaaatgtcaccatacatttgcaatgtatgtgtaatctttaacagcagagaatttaaagtttattttataaacaagatcaaatgtaaaaacaaataaaagaagcttaaggaaaggaagaaagtagtcaaggttatgatgaaaagattttaaataatgaaagtcatcattaatttgaaggaaagtagttcttaagtagagcatgtaaagtaaaatatgtcaacatatttcaaatttattttaatagacacatatatatattatatctgcatataaatatctatacaaaattatatctatatatttacatataatctgtggaataaagggaaagataatgatccaaactcattttataagtctgatcaaatctaagaatgcttcaagaaaaagccatccaatgtctttcaacacatagattgtaaaaacattgatcagggtcatactaacagtatttggcaatatattatatttataatatctaaactataaaactgacagaaaaaagttatggacatattctagaggcaataacccagagaaattgatttcaacattatagacttttaaaaatatggccccttttctacaagatttttgtgctttcattctacttcatttcccctttctcgtcatagttcatgccattgcttagaactgtgtcatgactttatttccctcttgtgaaaattatgtaccagtcctgggtagatttttggtgttccctgtccttcatcgtttcttttggaaaataagctagacttctgctaccaggtcatgaggttaggggggatggcgggggtgggaaggctacagacaaactggcctttctgctccctgcacaggcattatagatgggctcacagcaagttcagcctagagagctatgatcaccctgctctcacactgagaacaaagtcaccttcgcagtatgcagagaacttctgccgctctctctgtccctctctgtggggagaaacctcactagtgag

SEQ ID NO: 39541 - DNA, 1826 bp, Bovine  19866880210235
  misc_feature (1)..(1): n is a, c, g, or t
nggaggcctggcgtgctgcgattcatggggtcgcaaagagtcgcacatgactgagcgattgaactgaactgaactgaactgaactgaatgcccctgaaaatcctacatttgaagtaaggtatatgtgaacacggaaggcacaagaggcattacaatataatgttatacagcaacaaaatctaatacaatttgaaacttcatatggagagcaatcatatcagggagtaggaaggtaatagttgctctttactaaattctagcaacagcattgggaatacattgcacattcaatactaggggtctctggaatgggaaaaaaaaaaagaaattcatcagctggaattggtgaaagaagaggaattgaagattggggtcttagaaggattgaggcattttgggaaaataagaaaataacttataacatctaattgacccaaaccatctggagtggcgaaattttcttcagttacatggagaatgtagtcacagaggacactgaagaaattacaagggcactacttcccaaaggttaccttgaaaacaatttccttaggaacctgagtggattcccagaagcagttcaaccttaaaattttttctcccaaatgatatttcttatcacttcctactcttaattttttatttaaaatttttgtactgtccagcgctttatcctttcattttttggaaactgtcacttcatataaaaattcatccaagttttgttcttcttcttattattacctttattattaacagtggaaagactggcagttttaaattttaggaaagttaaagatgcatacattcttaattagcagatgatgagtttgctaatccgattatgcaactaaaatatagacaatattggtgatgacatattaaattgttatgcatttaagtatgctttagagaaatctagaatataaaaatacattataaaatggcaggatgctgttccttaatacttaagtatttccaaatcctaaaataaatgcattaagccattggcttcattttcacagtcacaactctctgatggccatgtttatactgtagtttaatttatttcttctctttcctaaatatattcaatttttattatcaatcatacctcaacaaagcttgtaaaattttttaagcaaccaagaaatacacataatttttaaaaaatatttaaaaattattagaataccatacattgaatgggttgttatcagagtattttgtaaaatgcctaaaattactttaaaatgttcaattatttccctcatgctgtttgcatttaacacttggaacacttgttttattctcgcacgcttaatgagttcttcatcatgtcccttctgaaagaagtaagcctaccaacagggacttgcccttgtgaggatctttcaggtttctgtaaggtggataattcttgccttccagtctcctaatagagcactgtgtaatgcatgtctcccctataaagctcctccctcctcctcccaacttcctttacagctttattctttgaaagaagaagccattcaaaaatgttacctccttgcttgggcctttagagcaacgagtcatttctattgtatctcttgtgactgatgtgagagaagtgtaagaaattgaatcacagtctttcaagagcagaaggatttgcctgccacaagagggctaaatgataaccgtcaagtcctcttactgagcaattgcatttccattccataagtaggtaaaggctttttaaactgtatttttttaataacttattttcctttaagtcagttcatttttatcaataagagttcaaccatgccggggtccagccc

SEQ ID NO: 39542 - DNA, 1136 bp, Bovine  19866880441777
  misc_feature (1)..(1): n is a, c, g, or t
ncaaatgcatgcattatcattgggccatggcaagcattattagtctattaatataagtatgtcaaaattgacaagtagaaagataagttctatcaattattatgccttttctttgtgtcaccacaaaactaagtcaaacaggagtgcttgtgttctgggatgctaggagagcattcatgtttatttaaatatgatttcaatctttaggtgtttataagaatcatacttgaatacatttcatgataggaatttatatttacatcttcagtgtgacacagataagattgtttgatgcatgaaacagcaataattcgcaacccatgtcctaaaaataattctaatacaaatatgcaaataacacagaggacataatttaaaagataaccctgtggaaaatcataatttacttgaacaagatcaaatgaatcttttataatcacataaaattcactggataaatgaaaagaaaaaataattaattcagcaccagagcttacatgatgttagaaatgaatgcaataagtgaacacactctatgaactagtcaaataactagaaaaatatttaaaactatagtagaaacaaactcaccaatttctttgtcaactctctcaaaattggttcctggcctaataaatctgaagtttctttttgagcaatgtacataatattcatagacatatttttagagtaaaacaaaaacttcaaatatagtagtatttttctaagggctgctttaaaatcattaataatgacagtatgaaaactcaaggatataatacaaagtacactgtaatggaaaacactgaatatagaattgtcttttaaaactaaggtaaagagggcttagttctgaagaagaataaaaatctagcaatttttctcttaaattcatcaatttatacagtatatgtgtgtgctttgtgctcagtcatgtctgactctttgcaaccccgtggactgcacttcacttggctcctctgtccaaggaattttgctggcaagaaaactggaatgagttgccatttccttctacaggggatattcccaacccagggatcaaacccatgtctcccacgtctcctgcattggcaggcagattctttatctctgagccatgggaaaaccaactaagt

SEQ ID NO: 39543 - DNA, 1064 bp, Bovine  19866880556821
  misc_feature (1)..(1): n is a, c, g, or t
ntattaatatttatagaagatgtctgaagatcattgcttttgaaaagaagagagatgcttccttttgtgttgacatcagaaaaaaaatctctgtaacttcagaaaataagcatatttctatgtctagaattcctttttaaactgttttaagagaagaaaagtaattattaaaatacaaaccagtgagtcatccaaataaatccctgggactcaaacagtgtgttggaagaatgaaagaaaaacgtttatttcaaagcgttaccagtactttgtatctctaatagtggaaactaaaggtacatgactctttgtttgatacaatacgttcatcaccctttggttattaaaggaaaggcattgtctgcaacaaaaagtttgagataaaaaggagttgggctactttgcataaaatcataaaatggtgggtataatattattagaaccttaaatgattattggacttcctataggtatagaaaatattgttcaggtccttgagactcaaaagggaagaaagcttaaaggtgtattgggcaaagagtctatcttgcaacagaagaaagagacagggagtaaaaaatgttaaataaaatagctaaattttaatattttaatttcaacaggttaataacggtttttaatttttttattttaaaatccccttttttccccttttattaaacacaagtacctcctcttcagtaccaaattggtaccccatcctctttttaccctcccacattaaagctttgctgctgctgctgctaagttgcttcagtcatgtccgactctgtgcgaccccatagacagcagcccaccaggctcccctgtccctgggattctccaggcaagagtactggagtgggttgccatggccttctccacattaaagctttaggtaagcactatttttacctctatttgtttcagggctgccttgggaaatgaaaaatgatcatgtctttcctggagaaaaagaacagaagcaggaagataatactggcaaggttactacagtttaaccatggggataacttagtttttcacatactaggtgtaaatat

SEQ ID NO: 39544 - DNA, 1109 bp, Bovine  19866880796326
  misc_feature (1)..(1): n is a, c, g, or t
nctgagcatgatagagtctgagaaaaattgtgtttatgttctaattaaaaattatagtacagactgaatctctgaacaataaaaatctcagaaagcccccaaaatttgcttgagaaggccaacagttctcaggatcttactttttttaatgagtcagtattattaacttctgggagacttagaatttagtgtagaaatgcatttaaaaaatctataatattagtattgtttgtgttaagtttagaaatcatgtatattttctacttaaggatgtgtgatctatgttgaatctgacattttatcaaattgattaatcttataattccaattttaataagtgtaatttataaattaatatagatttttctaatcttatattcattactgttacatttaatagaatttatagcttagtttaccatactaaatttatgttatttaagtattcagaaaggttttatttgttaattagacaattggaatacttaaaaagaaattgaatatattaaagttacggatgctgtttaaaattttgaaggtatttaattaactaggtttgtaaatgggactaaacactgtttaaagacccattaaaataggtggtaaaattttattagacttagaaatataattttattatggagaacttaaaagcttaaggaagaactagttctgggatttgtaaatttaataaattgaatattagtttttgaaagctaagtaaacactaaatgatattcttaacatcaaaatatcatttgagattattaataaaatgaattttatagtgttacttaatttttagtgttttggggtaacacatgagatggtagctttgccttctggctagtatttacctctagttgctagtatgtacgcccattccatcaatgaaaaaaggcttccctgataactcagttatatgagaataccagaccaccatagtgttacttaattttgtagtgttttggggtaaaacatgacatggtagctttaccttctggctagtttttccctctagttgctagtatgtactcccattccatcaatgaaaaaaggcttccttgataactcagttatctgggaataccagaccacctgaactgcct

SEQ ID NO: 39545 - DNA, 1205 bp, Bovine  19866880810065
  misc_feature (1)..(1): n is a, c, g, or t
nctaaaatatatctaatgattatgcccacagtatttaaaaaaatggaagtacatttttcttttgattagcttctagtatatatgttggctatgctaaaccagattaaaatgggttctctttaggataaaatatttacttaggctttattgaaagaataatttaatatttggtatatttgtgtatgtgtatgaaacattcaacatggtgcttctactctacagtggggactagtccagatgtttctcaacaaagggattcatgttcaatgagccctctttcattgcctgtttatttctacaaatgttttcacttttcagaggtttaagaatgctgaagtatgaaatcagtggaatatttgttccaactggttttggacaaaataccattgttttaagaaatcagatgattaagcatgtttttcatgtcccttttctaaatcaagcatactacattagattatgatatgcatattagaactatgtcactaaaacactcaacttctctactgaagtatgattgcaattacgatttaacatttttctacagtattatcatacacattataatgcagtaagttttcttatcatcctatatgtttttccttcccatgcatttaaaaagtgttggcagctgagatgctcataatatctgaaggaccacatgacaaagcagcattccaacatcagactcaacaaagtgtagcaaaagggaagagataaaaacctaaggagaaagtgaaatagttttctattgaagtatgttagattgcagagtggtatcatgggaaatagcatacgttcttttactggaatcattttaaatctttcttagaatatttaagcatatattgtctggaataatctcaaattggaacagagagagacaagatgacctagaattcctttccttctctagtttctaataccttatgattctgtacatagcaaaagtatattaaagtccgaagtacagttttagacggcattaaattgtttgtatagttttacagttgtgtacagaaatgtcaagttgtggtgtataggcagtaatactgcagaagagcaccctgaaatttacaaatggattatgttaatgtattactaatgcaagtatctgctgaactgaacctttcatattcatgcaacccaatgtggtcctctaaaaacaaggtactgaaatttgtactctgttttgtgttcagtgt

SEQ ID NO: 39546 - DNA, 1217 bp, Bovine  19866880822488
  misc_feature (1)..(1): n is a, c, g, or t
ncctgcatgtccatccctgccctgcatataggttcatcagtaccctcctttctatattccatatatatgcgttagcaaatgagtcttgtttttctctttctgacttacttcattttgtatgataggctctagactcattcacctcataacaactgactcaaatatgtttctttttatggctgagtaatacttcatttcatatatgtatcacagcttctttattcattcatctgttgatggacatctaggctgcttccatgtcctagctattgtaaaaagtgctgcaatgaacattggggtacatgggtcttttatagttatggttttctcaagatttcttatatgtcaagtagtgggacattgggtcatatagtagttttatttctatttttttaaggaatctccatactgtcctccgtagtggctgtatcaatttgcattccaccaacggtataagaggattcccttggaaagcagctatgctcaccaccataccatcaacatgttaactgacctttgtagatgaatttggaatggtcctaggatgagtgtcaaagcaaactttaaattaacctgaatattttattttacaggtataaagaaaatagaagacagcacatataaattttaaataataagtataaatcataaatcatgaataaacatcattttggttattatctttttatttttctgtattttaaaagtttatctttgtaagaaaaaaacattcaaaaaattttctcaaaatatttacttgttaatttagggaagtatttttatgcaatacatgttgataccaaaggaaccctggctaaaattctccatgtaattatcaggcaaaaaaaataatgaccttggttaaagtgaaaagtattaacatattaaataaatccatttcaaagattctggtcaataagtagaagtttcaaggcacctctgtctaatgccacaggagatgtcaatcaggagaagtatgtattgaatttttgtatatttcaagagattaaggttattgaagttgtagcagtaaaactgggatgagcaaataagctgatttagtcttaccattagatgaaagaaactaatttagtatgaatagactctgtggattgaagtgtaatggaaggaaaatatttgggaaactttattttttaaagtaggttggagcgagagtatattaatgaagtcaaagaaaaaagaaatcgtcagtctta

SEQ ID NO: 39547 - DNA, 948 bp, Bovine  19866880835139
  misc_feature (1)..(1): n is a, c, g, or t
nttctttgggatagtatatcataaagtccccagatgtgatttttcattggaccagaggaggataatgtcaattagttaataaactcagctttatagaccacttggagataattatcctagaatgtgaaaatgtagtacatgctttcacaatatataatagtttatatataaataatcccaactctggtttctgttttgtgttctatttgcttattaatttctgaatctgcagttcctagacctagaaagtactcagtcaatgttagtaattgaatagatacttgcctatgagtatatttttggaagctacaacagttaactggtatactcagacccaaatggtatctctctttacttccttgttttgcttgtcataaccatttgtattaaaagccaattttttggggggggctggtggcagcgtttcaaactgaagagccctgcttggtgagatagttttaacacttcgtttcttgagcaaattttggaatacttcccagtactaccttgaaaacaggtgggacagggaaaagatgagtctgtcaacagggctctattactacttcagtttctgtcaaacagtccactggcacgtttacttttccttcttagctattcaagatccaaacatcaggctgttgcctgatgaactgctcccctgtcagtgtaggcagcagtctggacagaacaccagtacctcagcagcctactcagatgagaagcacacagcaatattccatgtaggaggaataattagtggcgaccatttgaaagggtcaaacttaatccacatggaagtagaatgagcttcccattgtgtctgaatccccagtttaaagtcaagttcacttttttaaagaatgcttactgttgtctgattgagtttggttgtatgacggaaacataaatctggcatataagaacagcatgctaaatatacagaaacca

SEQ ID NO: 39548 - DNA, 1884 bp, Bovine  19866880853370
  misc_feature (1)..(1): n is a, c, g, or t
nttgcattaaaatgtgataattccaaaatccctgttaccttttgtatcctagtaatttttaatttattgcttattattttttttaagtttgtggtttgtaaagtaaataaaagttaccattattagcttgattaatctttaagtagtaaagcatttgaatcaatatattatgtaattctagcctatgtgtatctgtgtttgtgtgtccatttattaaactgggaaccactaactatcaagtaggttctaacattcatcaacatctttctctccgtattgtttataatgcaaacacactgtcaatgtctgtttcaaaataaaaaccactaaaagatcaagataaggttttggaacacttgacttaatttattcttgttcctattaataccagataatgttttaaacaaaaacataattttttgtgtgtgtattttgttaggacattcccttggtttcaaagaaaattattctttattcctttatacccttgattatgcttatcttttgattataagaaaacagtgctaaaaacaaaaactctaaaattccaatctaagaacataaaatcaaaaaaaatcttcaaagccaacattttgtgaagcagatttgaaaacaaactatcatccctatggaaccattaaacatgtctctttttttttttcatgcttaaagagcaaagataatctctttcttggtaagcactattgagagtaatgactgtctggcaacttatttcattagaaaatctgtaatttgtttttctttatttttacagatgcccaagaagctttaatgaactatagcacttagatgtgctgatatgagaaattaaggtttatattgattccaaacatatgagacatttttattttcattttagtaggtaaagatttctttttctcctccttttatgccatctcatttagtggccaaacttctacccagatcaccattctttgtaaattaacactagtagatataggtacttagctacattattatctttcgtgttcactggattggctgtacttgctggttttgcctcagttagaaggcagtggcaccccattccagtactcgtgcctggaaaattccatggacggaggagcccggtaggctgcagttcatggggtctctaagagtcggacacgactgagcgacttcactttcacttttcactttcatgcactggagaaggaaatggaaacccactccagtattcttgcttggagaatcccaggaatggcagaacctggcgggctgctgtctatggggtcgcacagaggtcagacactactacagcgacttagcagcatacaaccacagacatgaaagtgtttcctattctggaacatcacttttccatttcataattttaaaccctctatatcagcttgcttttaaatttgaaaatagtgattatttctcacataatgtgtctgttcatgtgtacatatttttatttttaaaaattttttttcattttataatttttatgagctatgacagtggaggcaaatggaattcttagaacattacttaaaaatagatttttaaagacaaaggtcccatctcatttttatatacacacatgtgtacatatttttgcaaacataggcttctctggtggctcgggcagtagagaatcagcctgcaatgccggagacctggattcgatccctgggttaggaagatcccctggaggagggcatggcaacccactccaatattcttgcctggagaattccatggccaggggagcctggtgggctatagtgcatggggtcgcaaagagtcagacatgaatgagcaacaaagcatagcatatacaaatacaaatgcatatgcaatcaagaatttatattcaacttatatacttacata

SEQ ID NO: 39549 - DNA, 2598 bp, Bovine  19866880877450
  misc_feature (1)..(1): n is a, c, g, or t
ntgaaaaaaaagaatggagtctacctttccactttgcattcagtatctttcatttcagatatcgtcaataaccatttggttaatggattaatagataccttaaaactcttaattataatcaaataataagaaaaataacttacatggaattagaaaataaaattttggaataatatgttactggaatgctactataatatctaaattaacatttataaaaattacttaattttattataattgaaaacaatggataaaatattattaaataagatttttagttgcaatcattatatcttaactccttgactcttcacagctttactttaaatagttatagtgacacaaaatattataaatggaataaatttttttccacaaatattgcattttgtcttaagtcctgttccaggtatactgactttcagagtttattcttttttctttccttatgtagttcctcagctttatatatttcagaatgtcagtagatgtaaaatcatgacaaatactttcaatctaaatatttatatttcataaatattttgtaattgcctcccattatttactaaaaaattctagctaaataaggctttggatattcctttaggctatatgttttcaaatactggaggtaagaggcagttagaacagcaaaactaatttattcatttagtttatttaaaatgtacatattgcccaaagccagtagcacaatgtacagaacataaattacaacacttaaactgaatgtagcacccgaatagaagaatcacatgcaggaatggtgtatgtggaaagagtaggcaaaaaaaagaataacagtaaaagactattctgatataatgctcactttatcaagaaattggttaaattctagtgatagtttatctgctgaagttcagcactggacagtagatatgaatttttagcaaaaagaagtgcagttgatcttactgtgtaaggtgcttaaaaaatatggcgaaataggaaatactcatctatcaaattatatatatatatgaattaaaagaagtaattttcataaatagatttctaattataaagaataatgttaaatataatttattaaattatttaaataaaagattcaataaaaattggctgtttttagaaagagaattccatggagattttgctagctaatttttcccatgaaatctgcagtatttctcagagtatttactttctattcctttatattatatgtgtaattcctactgaaacattactttcaaatttctaatatgaagatgacatcacagacatccttaacaaaacaaactagcaattttttaagggtttttgacataaactttgtcaaaagttgaatgatgttccccaaacaatatgtcaaaccttcatatttgtgacctatgaaagttatgtgaacaaaaagtgtttatctctgtaattagttaaaaattttgagacaatgagataatcttaaattatgtgaatgaactcttaaatccaacgacatgtgttttcataaaagagaagcagactgagattataggagaggacatattgactcaggagaacatgatatgaagcaagaggtagagaccagcatcatgcaactaccagctaagaactccaaggatttcctgctgctatcagaagcagtgagaaaaaaaaaaaaacaagaaacaaactctcctccaaagcctctggtggggttatggccaatggacacattctgtttagacttctcagctctagaatgtgaaggaagacatctgctgtattaaaccatcagatttgtggtaatttcattacagtagccatttactcttttttatttgttatttaagttgctcatgtggatgaaaaattggaaagacttccaatttatccttaactgcatttccaaatcagtggaatactaaaacattttaatacatttaattcattgcttatgtactcctctcatctattcccattccctgtgcttattagaacagtctaatgaaattaaatagcacttatgattatttaagaacatcttttcatagtaaaatataaaagagacagattgaatgtaaagtgatggaaataaattccaggcagtcaaaaattaagataaaattttatagctatgttaacctcaaaaaaagtaaattgtaaggtctgaagacattagaataaagataacattgtaataacaagaagaaggaaactgaacttgaatgcacctagcaaaagagtctaaatatacatggaataatagttgaaagaattataagaaaacatgacaatcatccttagaaattttagaacactgcagtaaaaagttaatgtttagtaaggtctgtaccacggcttccctggtggctcagttagtaatgaatccgccagcaatgaaggagaccacctgcaatgcagtagacttggtttcgatccctggattgggaagatcccctggagaaggaaatggaaacccactccaatattcttgcctgggaaatcccatcaacagaggagtctgaagggctacagtccatgggatcaaaagagtcagagatgactttagagactaaaccaccaccacaaagtctgtatcaagcagagaga

SEQ ID NO: 39550 - DNA, 3450 bp, Bovine  19866880958532
  misc_feature (1)..(1): n is a, c, g, or t
nactctgcttctgtacatcccccaaaatgcactactccccatctttggtttgtaaagatgtctcctaccttattctctgaatcagaaagttctgatctaggccagttatgcaaagtttgcattgggtccttttctgattgttatcacatcctgcttgtgctaccatattcattcaaattttcccattgttgtcataattctcattactttgtgttctgcagtaacatgaaatttggtatcaacgtgctctactctagcgtcatgaaatggagggtgatcacctctcagtgaggctttttagaataatatataaaattagagagtgctactctttgttttcgttcaaagcaatgactgccttcattaaaattatgacagctaggtatttagagcttgtaaagtattcaaaggagataaggttcagaaatataaccccagataaattgactggacatatcacaaaattaacattccagatatttcttgatagaaaaattatttttgaagcaatctgtcagatatatatatgttcttgacctccaaattttcctcttctttagaattacttaacctgacattcctcctgtttagaggagacactgatcttctaaggctttgtcattttgttcttgaccgtctccagtgcagttcttcttgcctgttcagcttttccctcctcagtgattttcccttaatcaactcaaatattaatctttgctatgctaaagaaagaaagaaagaaaaagataacaaaaaaagcaaatccttcctttggaactatcttatccacaatgtcatgccctatttctttactttcaggataaaactcattgactgaaatagttactgtcaatatctctatttctacttaattccccagagcattaagcccggtccctatctctgcgagtacatagaaagagcttttgctacaattgctaatgaattcctcatcaataaattcaatcccttggttttgtgctcatcctacttaatcctgctacagtatttggcactgttaaatacactcttctttaaatcttctctttcactttagagaatttaatttttatgattctttttttttctttgactttaattttttaacttttagtttagattatgtgtttctgtctccttcaaaactttatatttcccatagatatattttgatatttaggtattcttttactatgcatccttccaactaggtaatctcatttattccaaagacttcattatcaatagaaaattttagagtaaaattaactgggaatagtctcactacatttactcacttgtatagtcccagtaactactttgagactattaaatgaaatattttatttaataaataatatgttgcttgaatttaaaatctctatagctccgtacttatatggaggtatgctgctgctggaggtatgggtaagtactattacgtctctattttcatgttccagaagtagctcaaagttaataatgaaatcatgtttttcctaaaattttttccttgtcctgaatatcacatgtcatgttgcatattaaaatttatttacatactacttaccaagccttgtacttttcatcagacacagctaatggcactttgcatattaatttatttatatactacttaccaagccttgtactttgtatcagacacagcttatggatagacaaaaaaaagtctattctaatggaatttacagtgtattgaagtagacctaagataaacagatacctaaaggatttagtatttatgagtatcaagaaatatataaagcagagatcagggatatcatatatacaaaggaaattgatttatataaaactcttaagtagaggcttaaatgaattaagggaatttcttttaactcccacataagccctgaggtgagaatttgcctatttgcatttgatgaatatcaaaggagtcaatgggacaggaacaaaaaaatctaaagagaaagtaagggaagttgaagtcagaaaggtaacataaaggagagttcctatagggctttataaatcatgggagtaagttatcaaggatgacagtgaaatttttgatctccccacctgggaaattaagtaggatttacattaatgatatggaggagtttgttggagaataaagttttgtgttacttatcaaatgctcagtttagaacacattaagtatgatgtgtataatatatatatatatatatatatatacacacacacacacacacacacaaaatattatacctatctatactggtcttaagtaaagtaatagtgatgtttttacattaagaataattttcaaagtcctcagtaaatatgtggtatttaaaaacattaaaatacataatactccaaaaggaatgtgaagaaataaaagatagacaagtctgagtacacagtcttagatttctccaaaattgagcagtggtaacaaatgtgaggcgccaataaaagagaatgaaataaatttaattaaatgtaatttgtttatttttgtttttattttcattattctaggaggtggatcaaaaaagatactgctgtgggttatgtctgagtgttctgcctatgttttcctctaagagatttatactgtctgaccttatatttaggtttttaattcattttgagttgagtttatttttctgtatggtggtaggtagtgttctaatttcattctttacaaagctgtaagatacttatgaaagaaatcaaagacaacacaaacatatggaaagatataccatcttctttgattggatgaatcaatattatcaaaatgattatactactcaaagtaatctacagaatcagtacaatccctatcaaatgcttaaggacatttttgataaaattaaaacaaaatttttaaatttgtttaaaattaaaacaaattttccataaaattcatatggaaacataaaagaccacaaatagccaaagcaatcttgagaaatacaaagctatagtcatcaagacagtatagtactggcataaaaacaaaaatatagatcaatgaaacagggcagaaagcccaggagataagcccatgcccccaagctcaccccatctatgacaaaggaggcaagaatatacgatgaagaaaagacagtctcttcagtaagtggtgctaagaaaacaggacagttattaacattatcgaaacatagtttttccccatctttggctagtggcagtttcttcaagttggcttcagaaacctttaaacttgaactctatatagtctttttttttttaagctttcatgaaaggaagtattttgtctaggctcatttcctaccccaattctggaatcagatatttcttccaaagccctttgttgtaaatgtattacaagaccacaatcagctacttggattcctctggttccattgttttgccatgttcaatggatacttttgggaggataaaagttgt

SEQ ID NO: 39551 - DNA, 1159 bp, Bovine  19866881004002
  misc_feature (1)..(1): n is a, c, g, or t
naactaatagggctgaacatgcagcacaatgatgcggatgataaaggaatctcaaggacatgcagagaactagggtaacatgatttagaagtgaggcagttatttcaaataaacatctatttaagtacataggaaaaacgctgatctgttgggaaaagcaagtttggaccagtaaggaaatttacatctatttttggagaaacttatatttttatggaaattactgttgaagattctgataatgtaccctgaggtcattctgtatatacttgttgattagcaattggctgacagtttgatatttaaaaacgcaaatctctgaactgttaaaaaaaaaagagatggcttattaaatctaaaactgcctgaaaggataacactaaaacataatcaagaaagccacctcctctggtgttgaaatagcaatggaaacaattactttaatcatcaattgtttatttaatggctgctcttagctcagttccgtgttaggtgctatgggctggaaaggaagttaagctattgctgtaatttctaagcaaacacattaaatgctttcagaactagatagagaagaatgaatttctaattgtgaagtaaatacagtatgcactaggacctaaagggacagatgattttatgttatagaaactatgtgaatatacgcctttattcctttgcaacccgatacattcaggtctaaattccaagccctccactaacatactgtgagatttttctgcaaactattctttttctttgcaattaagttttcttaactggaaaatgagaatacatagaacccacagagttgttaaaaagaggacataagagaaaatactttgaagtgtagcacatagtaggttttcaaagatattctcagtttatattgaataaaaatcttcccataatggcaagtgaggagggcacagaagcccactccagtgttcttgtctggagaatcccatggacagaggagcctggcaggctacagtcctgctgctgctgagtcacttcagttgtgtccgactctgtgcgaccccatagatggcagcccactaggctcccctgtgcctgggattctccaggcaagaacagtggagtgggttgccatttccttctccaatgcagaaagtaaaaggaaaggaagtcactcagt

SEQ ID NO: 39552 - DNA, 1041 bp, Bovine  19866881051909
  misc_feature (1)..(1): n is a, c, g, or t
ncatctagagagaatgcaaccccgactgacactgtgattggagatttctgactttcagaactctaagaaaataaatttgtgctgttttaagtcattaaatttgagataatttgttacagtagcaccaggaaactaatgtaatatgcaaagttggtcatgccctgaattacttaggagtcttttttctaggagtcttatattttggctgctgtgattgtcataattttgtgggcgattaattatggaactcatttgtcatatagtgtttgatgtggctgagctttcaatctgaaaatttaaattttaacttctgagggatatttttaacttgctgcttatataagctattttattttttatcatccatgtgtaaaactcagtgatataatgcagttacaggatgcaacattatttgaaatgtgaaaccaaataaattagataaaaatgattcatgtttgttattatgaaagcaagagatcagagtattatacagtaataccagcaaaacatttgctacttttgataggctaagaatttaattttcagcaaaagtacattcccgagtttcacttttgttttgtaataaaatctcaatttcaggagatactgaaatgtaaacaggaaataggtgtcagcctcaggtcagacctacattacacagtatatttacttgcaccaagtatttcacaattgttatctttaaactaaataatcatctcttggatttcttcttaggattagacacgacttttgtatgtgcaatacttttatatttcctttaagggatactaaatacaagtaaggagacatgtgccaaaagtgacggatgttggaaacaatcttgagctaggaagcagcatgaggaaattgaaatatttgaaagataggttatatcagatgatattggatgaagagagagaaaaggaatatattatattttagttagctatctccagtctctccccattttctgtccaatcaaatgcttggtatctttggaagaaaacaaaagaaacaggcaacaatagcaacatcaaaaag

SEQ ID NO: 39553 - DNA, 810 bp, Bovine  19866881090770
  misc_feature (1)..(1): n is a, c, g, or t
ncttccagcatgacaagacaatcttcaggataccatgctgcttagatggctgaagccactgcttcacactgttcagaatttcaccctttgacacactacactatctttaaaatctggaaatttagtcttaaaatggtcttggctttcttcaaattagttcaagttatgtcttttgcctttcttaactttaacggtagccagagtatttcatatctcagcagcatgattctcaatttaatagctaagaagatacatgactggcaaataacatatttcctcatccttctttctttttttttattttattttatttaactttacaatattgtattggttttgccataaatcaacatgaatctgccacaggtatacatgtgttcttaatattaaaaaaaaatacaactaaataaatatttgataccaatgaaaagacagtaacagaggttatatttatacttttccctgtaacaaacaaaaacaaacaataaaacagacaaaaacatttaattcaatggttttcaagacaatggacatcaaacaacagaagacattgaacacttggacactggaaagagatgaggtaagccctaacagtctatcttgggacagttttaaaaatgacaacaggaaaagaaatctaagtagaacccagaaattataatatttgaagagacagagtcaagagtgcagcgaaccaaagtagacagagttgcaggatatagtttcatttactaaaaagtggtacagagaaagaaatctgcaaatctgcagacattcagcagaatgtatgtcttaagtactcagcagaat

SEQ ID NO: 39554 - DNA, 768 bp, Bovine  19866881164689
  misc_feature (1)..(1): n is a, c, g, or t
natgatatttattttgctggctctcatatagtttacaccccatagttgagtcaagatgttaaaagaataaaatgctcagagaactctaagaaatcttattaattttgtaatggtgttgaaagcttaccaaaggtttttgttctctaaagctactgttttgagcaaatcagaggggatttctttttaactgctaaaaacaagcagggctttctctggtttgctgtttataaaatggcaaatgtggagtctatggaggtcttgtggaagcttttctgactagttgtgattttttagatacatacacctgtgttcacacacacgcacacatatacgtattgcacacatatgtgtacacatatacatgtatatgagatgcacatatatgtaaacacaaacatgtgtatgtgtttatatatgtatatgaaagtaaaaaagaaagtgttagtcactcagttgtgtccaacactttgtgaccccgcagattgtagcccaccctccaggatcctctggctatggaattattccaggcaagaatactggagtgggttgccattcccttctccaggagatcttcccaacccagggatcgaacctgggtttcccatggggcaccagggaagaacttcagcggtcaatgcaaagaaatagaggaaaacaacagaatgggaaagactagagatctcctcaagaaaattagagataccaagggaatatttcatacaaagatggacttggtaaaggacagaaatggtatggacctaacagaag

SEQ ID NO: 39555 - DNA, 857 bp, Bovine  19866881293769
  misc_feature (1)..(1): n is a, c, g, or t
nccgaaaaaatgccttgtcagtaatgatcaattctcagggatatttaaaggaaatattattgaaatactgttcatagggcacactcattaacgaatgcaggagactgtacctaatagataacaatggattattaaaatcctcaaaatgttatacacaaagtaagttataaaaacattccctgtcttttcatactgcatggttactaaacaactaataaaatatacacttcttaaaaaaaaactctgcatttaactggataaatatctaaactcaatttaaacttttaattttttattatgtaaaaatccgttttcatcaatttcctgaaagttttaatatagacaggattacagattaaaacattcttagaaatgtatcatttatttacaaagattatagaccctcccttaacttagaaaataatgattggaaaacactgggcctagataaattgctttctaagccatcatgattaagtcatttctggtgggcaggtatcaaagctggtcattttcctctgctcttttttcaaatagcctaaaatccaaacattccggacaacagtagtgattggtgtatgtttttcactctttcttgtgataaaatcttattttattaatgataattgatctctatcaggattttaactaatagccttgcccagttactttacaaagaataataataaaggaaaacatttaacaagttaaactcctaaattatttattttacaaaaattgaatagtcctatattccttaccaggatgtttgtttgcttaaatattttccctaaacaccagttttattggtaaatggtgtttcttaacattaacatattattttccctcatagtaga

SEQ ID NO: 39556 - DNA, 808 bp, Bovine  19866881542650
  misc_feature (1)..(1): n is a, c, g, or t
nagattttgaccttccatggcacaaaggcaaagatgaatgcaaaaaagctccactgctgttaaacattataacaatacaatctgtaggacctcaaaaaagaaacaaagaaagaaaaacagaaaagagggaaactgtttatcagctcagggaggatcaaagcaaatatagttttggtctgaaagaaagaaaaaccaaaagactaaaagaaaaaaaaaaaagaaatgcttttaaattgaaggtcaaggaagatactaagaatatggatataaagtgattggtaatcctgcatgatgttgtctgatactgtctcccatatatagttatactgttatttaaaatgctttctttattttgaaagccagaataattatcattccctaaataaaaacccatggacaggatatttttcagtttagttttaaaaagtatattctgatgggaaatagaacaagatttagccaataaaaagaaatagcaagtacaagaatattattaatttaattatattttgagcctaaattaagtatttgtgtgtggggggtggggggatattatttttaaaaagctagaaaaaacccacctggttccttaagctccatattgagcaaacaacgtttgtgtagtaagattacaaccagaaaaactctttagtttagttttaagtaaaagatattgtcacctctcttttaacttttattaaggaattgcactagaactagatcttcattagcacctcactgctttgccctaagcatctgcgtctcctatatagtctaatctaaagtggcttaattctcttttcaaatg

SEQ ID NO: 39557 - DNA, 2014 bp, Bovine  19866880382604
  misc_feature (1)..(1): n is a, c, g, or t
natttctcataacgacatctttaaaaccgtctcctctacctatttaatatccacaagccagaggggttgcaacccacctttggcctcaagaattgccctgtggtaggtaatcaaaaatgaattcaaaacagggccaacactccagaagccagtttcaagggctaaattgtcctcacattttcagcaaaatcccatgaaaagtttttcttgaccttggtagctgcttttctccacatctaatttgaaagcaatgtttaaagattagaaagagagattagggaaacaatcccatttaccattgcaacaaaaagaataaaacacctaggaataaacctacctaaggaggcaaaagacttgtactcagaaaactataaaacagtgatgaaatcagagatgacacaaacgaatagagatctaccgtgttcttggcctgaaagactccatactgtgaaatgactacatgccccaagaaagccacagactcgctgcaatccctgtcagactaccaaggacatcttcacagaactagaacgaaacattccacccttggaaacacagaagactccaattcacaaattactagagaaatgagaactacagtgaggtatcagcgggagaggaggatggaatgaattgggagattggaattgacatatatataatacagtgtataaatagataactaatgagaacctgctctgtagcacagggagctctactcagagctctgtggtgacctaaatgggaagaaagtgcaaaaaaaaaaaaatggatatgtgtatgactgattcactttgtcatgcagcagaaactaacacaacattgtcaagcaaccatactccaataaaaactgaagaaagcaaggacctgggtgatgattccccgctgtgacacataaccgcccctgttctggagaggcaaggaagacccccgaggtggcaggtacctgggcggcgtcccaggcctggtaccgcagggtccctgtgctgatatagtcactcaggtagaagatgaagaggctgatgattagcagcggggctcacgccgccccacatggccttccagtaccagttcagggcgcgtccagtcatggccttgagggtcgctttcaaatctgtttggagagcggggagaagaaagtctggattagtccgtgctgttggaggcaggcggtccaggccatggagccctctgtgctcaggaagcttttgtgctgggcactactggtgcttgaacacgaccatggggagaggggtcctgggggaggggagaagggcacaggctgccaccaagagggcagagcgaccgcccacaggtgagtggacatcagaggacatgcctctggtgccagcctccaggtagaggctgctgctgtagacaggagggcagcgcccagcaccagcaggcacagagggcctggtgagacgcccatgaagccgtcctcagccccggggggccccgagggcagccctgccccgtccctcccgccctgcagcccaccactgtggtgtccgtgtctgcggcccctctctttgtttctcatagcttgacccttgcctgaatttagacatagcctgacagtgtctgtcttacagtagactggagaggcttctccgggattctggaaactatacgtggagaaagtgctgggagtcgtggccttcgtgggtgcgtttcccgtgcagccctacctgctcagcccatacaggtagcacacggcaaccgtctccgccaggacgatgagcagcagggacagcgtggcagcgtagtcgttgaagatgtcgaaccagtagctgccagcctccatggtgaacagcatgccgatgggcgcagttggcgaggcacaccagacctgggaccacaggaccccctgctcacccgcctgttcccccagcttcccgtggggccaaggcggtgggaaggtgtgtcaacaggacttcctgacgctcattcacgggaggggtctggcagaggacacccgacccagtgtagaaggtaaaacggggcactgatg

SEQ ID NO: 39558 - DNA, 2645 bp, Bovine  19866880415255
  misc_feature (1)..(1): n is a, c, g, or t
natgaagcgagtttggggattatttggtagacatttacagtggcactaaacccactaggaaagccagtgctgcaaagaagactcagtcaaaccgccgtgctggcggggtcctactatagcgtctcatctccatgcaaaggccacacgaggcagaaccgtgcccacgatggcttccaggctggagccgggctcagtcactccactcagacaaacctggagaactttaacactgaatttcactgttttacacaaactctgctagatacagatggatctgaagatgcacaactaataaattaatttcattttatcatactcctgaaagatgtcaatgcaggaggcccagggttcgatccctgggtcgggaagatcccctggaggaagaaatggcagcccactctgtattcttgcctgggaaagcccatggacagaggtgcctggtgggctacagcccatgggattgcaaagcctctgacaggacttagtgactaaatcacaacaacaaatccaattaactaagaactcttccattcttctctctttcctattggaattggaatgggaaagtgaaagggaaaagaacttaaaaaaaaaaaaaattaggcaaatcttagatgccatgtgctctgggacacgcgaagcacgtgagccatgcatgtgccccctctgccctgagcaggcgctcacgcggcctttcctggacaaggctgtctcgatgcaggacagcagcggtggcctccttcttggggagtggccagtggtggggcatgatagcaactaagacttcatggaagtttctaacttgattctatctggaaaacatgaaaaagctaaaactgacttcaccttttgactcccgtgctcaagctgtaaatcttgcagtgctctctccagctttgacttctcatccaatgcatctgttgcctaaaatcaagagcaaacggaaaacatgcaatattcagtctgtaaggaatgctttcaataattttaggtatttctcagttacctgtgattcaatggtcttcagtcttgacttcaatttctcattctcttcttgaagtcttataatttcctttgtgagtaaattcaagttttactatgttagccaaagtacttttcatccttgaaattgtttcactcatactttgaatttttaaattacatagaaactccagagtctggatgctctggctactggtaatatcccagcttcacccagtccgccagcctcaacatttaggagtcatctctggctctaagacttctagttccttccttcacagtctctcagacttttttcagccttctattctcagccttttcccaaagtcccctcctctgccatctctcacctagctgatcctgaaactcttgttctgttcttggcctccacagcatggcacctgccacttatcctctaagcacaatcaccaccactccataccctgtgtccagcccctaagggtccctatgagcagaggcccacggccctcgctcgttaccagctccaccacgagcatcgcctgtcagcgcagtctcaccacactctagcacacacaccactgcccggaggagagcctgcactctgctccaaggcacgccagcctcgggcctgccttggactgctgcccactctgtcccctgctggcctttctcttctgacaattcactgtgtctttgcctttcagcccagcttgggcagcaccgtacccaacagccagtcctccacgactctcatccacatggcactgtgtcttctctgccaccctgtggtacaaaggttagcagtctcctgtctccatttctagaatgttagttatcccttctaaacaagaccgtaaggtcttgaaggcaaaaggccaggtattacttttctttttatgtaacaacatctagcataatgttgaaaacacaagagtcatgaaaaatagttgtatattggtaattattttttataaacctcttactaagtaccattaaggacaactactttgacggactaattacgctcagtggacagggccggaccttccaccccatgtccacctagagctgcgcaggcagccagcacacaccctgagagctgcatttctcacagtgacggcaacattaccttgttcaggagttctgccgctccaccttcatgaagtggagccagttttggcttcatgctgtctatgatggactgaaatgaagcaaaccaaactgaagtcaccaccaaataaagcacgtgtaatcactgagcccctgtactttctaagtgggagacactgtgcaaacctacccatgggatgtcagctagacttttactggtttgcttctctaccacgtgccagtgctgaggacagagcctggcccacagtgcccaaccaaaggtagatcaaaatgaaagccatcctccttgtatcttaaacaaacagacagatggaagagacgggtgggagggatggtagtcaaagccagagcagacaaagatcctaggacctagggactgaggttctaatactgtgggagctggaagcaacatttctgcacaaaccccccaaaattgcaataatgatgaggatttaggtaaactacattgcaggtgactaacttgacacaactcaatacatacattctactaaagcacaagacttcatgcc

SEQ ID NO: 39559 - DNA, 1256 bp, Bovine  19866880420940
  misc_feature (1)..(1): n is a, c, g, or t
ntgtgatgaagtgaagaacgggtcagaacaggaatcagcagactgcttccttcactgagaaagtcttgctaccaaaaatacgggcggttttactgggatgtgtgcttagtgacacgggcgaaggacctgctaagcttcctcaccttgtcctaagcgctgagagaccgttcccagacccagcctcaggcctgtggactccgaacggcagcggtgtcttactctgctgacctgcgcggctcagtccctgtgcagacgttgcgcatttgccgagcgtcctgtgctctactctttggtgctcttactgtaaccctgtgctgccggatgacaacctgggggaagggagggcccctcggggcctgagaaccaaagtggcatcggagatgtactcctgggccccgtgtggtccccgtgccctgggcttcccccgcttctaacgaacctgctctgtttccaacagacgtgcctcttggcagaagcagaaaggagcttcctgctggttcctcagaagggttcctattgagactcatatctaaatacaggacagaggtcacagaagggagataatcaggtctttattttagctggctgggccagcatggcttgtcctgtgacccagctgccatgggcagcgttccagagcctccacatggcagttgcacaggatgcctgggagacgaaaggaccctggacacaaatgttctgcacagaagctgttacaaattccacttaaaaaaaaatgaggaagcccagccttcctggagcaatcaggatgcttatttatagtggccggcggcccctgccaggaattccatatagatgggagaggggcccccacctccccaccccgccccgtcctgctcagcagggaggaacagaaactcacgaccccaggctctacgtcatgtttttgccttcctgctctttttagggaactaaaaatacctaccatttgcatggtaaatacaatgctttctttacgtgacacaggtcaggctgggagctggtgtttgggaagcacacggagaaagtctgaacatgggctgggaagcagcaaggctctgatacacaggccactgttcaaggccagctgtcgctctcagcccaccctcttcctgcccctccctggagagctgctgtcgctggccttcctgtgcaagaaccaaaatgcccttcttctcccgctccgagagctggtgaggtcgccatgccaccaaggcacctggagcgagagcaggtggtcgtggtgtctgtggatg

SEQ ID NO: 39560 - DNA, 1358 bp, Bovine  19866880527537
  misc_feature (1)..(1): n is a, c, g, or t
ngaacagtactactcgataagaatcccatttcagaactcacagaagcagcagcagctactgagatgggggttcaaagcacacatgattgatgcaggctaacttttgggggaagacttagtggagggggtgaacttgagctgtgcaagaaagggattgtgaaacagcagtagaatcgaaggcctttgtagagctgtaaattgcacgtggttggtggccttactcattgctgagtgttctaaactaccgccacctaacaggaagtctggggttgaatcaggggatggaacctaatcatatcccatccaagacctaccctgagggggaccggaacatctcttttacaacttcctactgtagattccagcccatcaccagtgtgctgggacctgcagagaaagttactgccacaccctctatctcctggcacacacaagaaatagcgttgcttatcgaaaccatgttttttccttacagccctcagatgcttttttgacaaagtgatttgaagaaacaccaacccagaaaacagatatttagccattcaagtcattcttatctgacagtttaacctagaaaatatgttgcttaaaagacatattccttctagtactttaatgcatcttataattagtaaaattaattaatatagccagccaagttgaacagtaaaggaagcccttgctgatgtggctttttttttttcccccctcatttggtattttgagtcaaagtaccggcacaatattgagagttctgaaggaaaagggtaaaagaaaaagagaaatctgattttcttgggtatgcgtgggaaatcatttttcctattgtcttcatttcacatacttccatgattaacattttctaagttatcgtctgttgccctccaagaataacagaaacaaaagtaaacaagatgaagtagggttttcaccatcttaccggcatgttacaaatggtttacattctgctgagccccacatggccagcacggtggcccagcgcgagcttgatgcggtcaggtaaacctgtgatcacgtctccatttgaagattgctctgagttcccccagaccccacaggactggagtaaatgactctcccccctcctcgtccatgaccacttctcgacagtctccattgcttgccatctgtcctcacccttcggggtctttcaagtccactctgacagtttatttgcttcgttacatgctttttgtcaataatctcagctggaacaaacaccacagagctttccgtcatgccgtggcattttctatcttaccaaggaggtttagaacccacaccctaaacattaaatcacccttgtagggcagcgttccaaagaggtgttcaggcga

SEQ ID NO: 39561 - DNA, 2131 bp, Bovine  19866880533008
  misc_feature (1)..(1): n is a, c, g, or t
nttttttttttttttttttttcaatgtcatagtgtttatttaaatcctgagattaaaaataagacattcccaaatggtgcagcagatgctatacggactatgttttgggatacaaaagttcctcacccccactgggcaggtggagagttggcatttgatgtgcttctggtaattatttggcagataaaaaagagatgggttcccagacccactaccctgtaaggctgcgagcattgaggattggtcaattaaagtgcaattctgatttggaagccacccaactgaggcttcactgttgctctgcagccatgggggaacaggagcatctctggacagcccttgtcctcaggctctgaggaagtctttttatcagaaatgcctccccaaatttaaagatgtactgtgttattttgaaaaagtgcttaagagagaaaaggctttcttttaaagacagactttttgaggcgattaagatcagcaatgtttaaagaattcttctatcatattcttagtttagtctaaatcatgtctcctagtcaaaaggagtatcataagcaagttggtttatatttgttttgtacggctaaaacatggccctagagattatgatcatgaaagacttcaatatatactgtattacagtatgtaagatatactgcattagcactattttagccaaaagccacagaaatctaaactcctatagctaaaaggagagtatataggtttatatatcttgaaccacttgactctgcatatcaaaattaagggacatatatcatattattgacattttctttgtcatctgtctctcctgtttccatctttcagctcttcttccttctacatgtaggttcaattctaagcctttctatctaagaaaaaaagaagcaggtttccccctcatcagtctccaaagagcaattatctggaaggcttatacttctttaggccatgtgtccattcttaacccaatcactgtaactagagacatggagtcctctgattgactggccttaatctcatgtgcatatttataactgagagctacaccaagaccacgtggaatgtgaaaacattgattctgagtagaaacagcattttcctgttaccagaagagtggagaatagcaaaagagatcagcactacaaattagcagaagcaggtaggttgaggctgtttctgtgtttctttttcaatctgttttgggagttgtgtgcacattcatgattggttcatgcatcatgaatggagatgcataatacccaaagaaccttatggcaaaagataattgctatttctatacctctcaactaggtttttaccttgtttgctgaggtactttatggaatttctcttaagacatactttattattttacccttcctaactcctcctccatcctatgtcaccatgcacaaaactgcttttgtggctaagtttgcacagctggttgaacaggctattagtaggtcagattaggtgttgataaaaatctatttgtgtgggatttgatctagtgtgttaaaaaaattagttctaagtttctttggaggtaacctctttctagagttaaaaaaaacaaaacaacaacaaaaaagaagcctaactgcaaaatctttcatcatatatcacacttatatctcagaatctagttcttcttcttcactctgtttctatggcatgatgcatgcccctgccaaagtccgaattatcagtggtatggagaaagagactaaatcagatttattgtagcatgtggataaagcacctccaaatcaggcagaaactgtcaatatcattgacctcaggggagatatgtgggttttgttacagtgtagctgtaggcccttcagccagcagcaaagcatcaaaacagcagcagagagggattatctcatgaccagaatgtaaagtgtcatctctgtacagatttaggaagagctgtaacggtatgaggccaaagaatctgaaattcttagccttggctctttctctgcatgtctgggagttcttgtttaaccactgaacctctttttgcatcactttacacttttatatatatatatatatatatatatatatatatatatgatgataatagttctcatggaatctggactagatattg

SEQ ID NO: 39562 - DNA, 2004 bp, Bovine  19866880536645
  misc_feature (1)..(1): n is a, c, g, or t
nacctgggttcgattcctcaatcggaagatcccctagagaaggaaatagcaacccactccggtattcctgcctggagaatcctatgaacagaggagcctggcaggctatagtccatggggttgcaagagttggacatgacttagcgactaaaccaccaccaccaccattcatgttaggcaggcctatcaaaagcataatctcagtccaggaaaaactctggcagctaccgcatttactagctgtttttctatatgggagatctttgatcagctggcaagtcttctggaaatgacacacacaggtcctgtttctctctctctctctgtgtctctgtccccaagatcaaaaccccaggtgcgccgcctcctacctgtgtccgatgccagatgacagacgccctggagtggcccagcttgttcctgcagggccctttatcataatggatcaggaggaagtcgtcctgcagagggagagaaagaacagaggtggatgggatggcacgctccactcagtgcgtcctgcctgctcctgaggtttgcagcagactgtcatattccctctttcctttcctaatatttagaactagagttcctatctcacatatccgattgagaagaaagaaaaccgactgactgattctggctggccatcccagactcctctctgctgagtgctccagagtctgagttcaagtgcggtgagaattctttacaggaaaggagctgcttatctttttgaattaatacaaagactaattaatacaaaaaattacttaatacaaaaatgaatacaaaaaactaattaatacaaaaatacaaaaaataattaatacaaaaatacaaagactacactttttcaataaatggtaaagaccatgttgtttatacctgtgcattccccagaataaaaatgtagaattattaaaacaaagaattaattaatacaaaaactaatacaaaaaactaattaatacaaaaattactacaaagactaaaccttttcaataaatggtgcagacagtgtcgtctatacctgtgcattccccagaataaaaatgtagaattattaaagaaagttattccaaataatggagggggaaatggcaacccacttcagtattcttgcctggagaatcccagggacagagcagcctggtgggctgccgtctatggggtcgcacagagtcggacacgacctgagtgcttagcaatagcagcaagagagtataaaaggaacgtgggtggtttatttttggtttttaataagcaaaaactatttggctttaactgtggaaagcaagcactcagaaaacacatagctccgtgtctgaaaccactagatgcaactaaactgacttaaaaatacaaataatacttatgaaatatgtgtgaacataggacagtcctctgcagctgtaagaaaattctaagaaacttcaaaaaatatacaatgaagattttttggttttctgagtaatcaatctccatgtgatttttaaaaatttttattcatttatttatttaggctgtactaggtattcatggagaaggtaatggcaccccactccagtactcttgcctggaaaatcccatggacggaggagcctggtaggctgcagtccatggggtctcgaagagtcggacacgactaagtgacttcaccttcacttttcactttcatgcgttggagaaggaagtggcaacccactccactgttcttgcctggagaatcccagggacgggggagcctggtgggctgctgtctatggggtcgcacagagtcggacacgacttaagcgacttagcagcagcaggtcttcattgctgtgcgtgggcttttctcttgttgcagtgagcaggggctacttgttgtttgcaggcttcttgttgaggtggcttctcttgttgtggagcacgggctgtaggcacgcaggcttcagtagtgtggcacacaggcttagttgctttgcaacatgtgaaatctttttggaccaggaatcgaac

SEQ ID NO: 39563 - DNA, 1524 bp, Bovine  19866880599434
  misc_feature (1)..(1): n is a, c, g, or t
ngggaggcgtcttttcgggtcttgagacctgtattggcaggggctcggccagcctcccacgggaagagtgagacggcagggtcagatgaccgcaggtgggcacctgcgtgaagacaggtggcccgtgggacaccaggctccctggatgcctccaaattgtttgtgtagatttattagattatttatgtatattatctgattaaacaactgcgtttcagtattcatttccagtatgtcttatcttttagaaccatttgtcctattagataaacttttggatcctgtagtcaatacttacaaaaacataattttgagtgaaattttgttacatttgtaaataagtttaggaagaattgataatgttacatgtcaggcttttatatttgggaacatactatatctgattactctgcttaccatagggctttaagtttttggtgttgcatgtttctttttacatttttatctacctttatattcctcaggttattgtgaatgacatatttttccctaacaaattttctaaacaattgttggtagtatgaaagaaaatacgtgttttaagctgactaccttaccgacttttaaaaataaattcctttaggactactaggtccataatcaaattatttgtgaagcactgacagaattatatcctcctttctggtatttctcatttgtttctctcaccttattgctttggtgggaacttccacagtgatgttaaataatagtggtgtttctggttcctgattgtagttagacatccaccctccaacctttcaaagtccccaaaggacaaaaaagatattattaatttgaaatctgttttattctaaaactttactaaagtggaaaagtgctatgcctgtgatgaagagtgctgatccttgacagtagtgggagtttggttgaactcagtcatgtctgaaaaagggccacgtgctgaatgatatcccagtttagtaacatcagtaatctggtgtgtgtgtgtgtgtgtgtgtgtgtgtgtgtgtgtatttaagtgttgagtctttctgaggaggatcagcctctcaggtgaacttgatgaatcttctgaagtatatataacagcaggggaaggagagggtgggacgatttgagagagtagcactgagatatgtacactagggtgagtgaaacagaaagctagcgggaagcatatgtgtagcacagggaactcagcttgctgctctgtgatgacctagagggctggaatggggtcggggaggctcaggagcgaggggatcaatgtatacttacagcacaaaccaatacaacattgtatagcaattatactccaatttaaaaatttaaaaaaaaaaaagaatatagagaagagaggaggttgtgaagtcactgcctaccatcctgaatctgcctgtccatctagaagagctctgcccacagactccaagtggtcagcattcctgcaggaccacctgctgttaagatcagattccaagcctaaggccctaaatacttttggtttcatggggtatt

SEQ ID NO: 39564 - DNA, 654 bp, Bovine  19866880685144
  misc_feature (1)..(1): n is a, c, g, or t
ntggcacgccgcccatggagtacgacggcaacttcacggactacttctgtgagaaaagccacgtcaggcagtttgcgggccacttcctcccacccctgtactggctcgtgttcatcgtgggcggcgtgggcaacagcctcgtcatcctggtctactggtactgcacgagagtgaagaccatgaccgacatgttccttctcaacttggccatcgctgaccttctctttctcgccacgctgcccttctgggccattgccgccgcggaccagtggaaattccagacctttatgtgcaaggtggtcaacagtatgtataagatgaacttctacagctgcgtgctgctcatcatgtgcatcagcgtggacaggtacatcgccatcgcacaggccatgagggcgcagatgtggaggcagaaaaggctcctgtacagcaagatggtctgctttaccatctgggtgacggcggccgcgctctgcctcccagaactcctgtacagccaagtcaaggaggaacacggcattgctatctgcaccatggtctactccagcgacgacagtaccaaactcaagtcggctgtcttgaccctgaaggtcatcctgggcttcttcctcccctttgtggtcaggcttgctgctacaccatcatcatccacac

SEQ ID NO: 39565 - DNA, 2850 bp, Bovine  19866880733519
  misc_feature (1)..(1): n is a, c, g, or t
nggctcatattcctgtcttatctttttgccttctcatacttttcaagggggtcattgaggcaagaatatggaatgggttgccattttctgctccaccggatcacgtttagtcagaactcttcacaataacccctttgtcttggatggcgctgcacagcatggcctatagcttcactgagttatgcaaatccctttatcatgacaaggctgtgattcattatggggaaacagacaaatagactggcattaaaaacaagaacttcttaagaatttgttctatttgtgtactatagcaagtatattgtgtcaattttaggctgagaaatgtttataagaatattaaagggtatgaatagcattaaaaggtagaatagaataaaagaataaagattttggagagtcagttataattttgatatttatagttgcttgacctgctagaattatttgtaaaattaaacaaaatgacctttaagaactgtaatcgagtcttagttaattcaattttagccaggaatctttggataaagttttctatttgagagttcttctcatcctatgaagatgaattaaaagcaaaatgtgcagattttcaccttaaaattttccaaaaggatgtcagaagaatatatgaaaattttcatgataaattttctttgatcctgacataaaaaagaatatgaggtatttttttaaaaaagaaaatgttggggagagaagggaaacattttgcttcattaatcaaactttgaaataatctacttcacaagaatgttttactaggagggagattcaagagggaggggacggatatataccgatggctgattcatgttaatatatggcagaaaccagcacaacattgtaaagcaattatcctccaattgaaaaataaggaaatttaaaaaggaatgttttgcaaaggcagaatctttgttttcaaaagacagttgaaaacagaggctaaaattgaaacaaaaagcttgtcaaaagtatttttagaggttcccaaacattttcagaagttgaagagtcttgaaatttgtccaggctatgaattctagatgcaaagatccttctagaaaatacggattactgatgatcctaaatgtgctggttttgtgtacaatgtacctgctatttggatatgcagagacaaccaggtatctttttttgaaacattttgtaaccacacaattctagtatgcctcttattttgtttgtcaagagatttctgggtctcacgcagataacaacttagtgaatctgaaggaaagaaaaaacatgtatggaatggaaaatcactagaatgttctgtaattgtcactgataatggaaaacacatggtgaacctgtgagtgatttagggatcacaagcatgcagtgttttgttcacaccttcagctgtgttttcagaaagtacctatgacactgcataatatagcagattgctggtcataagcacaaaggtagacggccacttgtgttattcagtgtttagcccaagataaaatgtgtgacatatacgggatagtgaaactgctttgatacacatttctccaaaatgcttagacaaatggaatagcatccttgatgtgttagaaaggctgcttgaccaaaagaaagtgaactaatacaccttacagttaacagtgctatcacaggaaaacttggtaacaatcaatagttgcttgtggaaaaataactgatatactggacccgttgaagaagtcatcttgaaagtacaagtatttctgactaggtacagctgtggagatcctgctgccctttctctccataggtgtgcctgtgatgacagctgaggtgcaggtggaatctgagatagttttttaaaaaatgtttagtgacatttggattacttatggcaccttattagattcaagacttaagaacaaccctttctcaagtgcttgtatgaaacaagcatgggaaaatattagatatttaaaatgaaagtgaagaaaataattgtcatctcttgtcttcacttgggtttcccacaaggcagagcctaggctcaagatttatgtgccagaacttcatcagtgtgtgtgattgcaggcagcagaggtgagggatggggtagtaggcagggaaatagtaagtgcattgtggccactaccacaggagctggatgctatgagatgcttctcaagattgtccatctcgaggggtggaggcagacacatttctctgtcagcttctgttttccattggacatcaagttgcctgcactcccagccttcatgtacacggtgctgagtgtcagtggaggagtcctggggtaggtgaggagaggcattgtaccagcccagaccaggcaccatcaggctacacctgttcaaagctgactggagccccagcagaaaaggctgagaggagtggaagtgactcccaagaggcgtccaaatagtcagcttttaagaacactcttcagaaggcatcctcttgaagctgtgcactaatagtgagattgcattagcaaccagtgatggtatctttaattccaggagttaaagaggagacaaactgttactttagttgattaccattagagataaggaaaggaaagcttagaaagtccacagcaaacatcactgtgagcactttccccacactggcatggtaagcccaagaccttggtcctcagccaccttcagcaatgaccacaggagctgctgaatgttgacagcgcagagacgtgattatctctgcaccacgatgtcagactttaaagatgagaacactcacttgtaagtgatacagttgaaattagtaattagtaatttaaagtaaggtttcagattgtatgtaaatcccagcagtttt

SEQ ID NO: 39566 - DNA, 775 bp, Bovine  19866880776866
  misc_feature (1)..(1): n is a, c, g, or t
ntgagtttcgggaggtggttaatgattttcttctccctctcaaggggcagcattttcaattcctaggaggacaccttcactgttagatgtgttccagctttgagatttatgcctcttaaatatcagatgactgaaaacaacccattcctggttgacagatcagaaagttctctctaccacttgcgtgtgtgatgtgtggctgttgataaaagtgaatattttggcagggtgaacaagtaacaaccggagtagggaccatcctgtttctgttcttctcacagcctcaagcacgcaacacagtccagccctccttggcctgaatcgagcttgaccatttggaatatcttgattgataggaaaatcagaaaggggccctattcttgcacccggggctgagagtaaacacacagcagatagctcagctggacaggctactttgtattaacaggcctcattgctgtgccttttgctaggcttattgactcctatcttagggcctctagaaaaacatgtaaagatactagtgtgtattgttttccttcagtagatatgagcatgagaaggtcagcacatctgtgcatgcctctgtgtgtgtgtatgtatagtggtaaacccagggtaaatgtatgttcctaggtgaaatgtatttggagaggaagatcagcttatgaggtattactaaagaaaaaatgattaattttcagtcactttctgaatatcttttgttttgttaggtacattgcctttgacttccataaggaatgtaaaaatatga

SEQ ID NO: 39567 - DNA, 1245 bp, Bovine  19866880806998
  misc_feature (1)..(1): n is a, c, g, or t
ngggaacaggaaaacacaggaaagtttcaggaacaggacacgtgtgaactggcacataacttcatctcaggtgcagaagaagtgtgtccagaggcctcacacatccaagcggaactgccccctcgtcttgaacggctgttaatttttaacatagaggtgtgtggttttaggatgggcccaagccgtcaatcacagagggctcctccgaggcagcgtttgcggcctaataggaaaaacaccagatgtgggtgccagctggggatgctggtgaatgtttaccagccagctctgcaaggcggggtggggtagggaaggcccgaggagaggtcccggagcaggggctcggcccggaggcgtgcactggctctccagacccccacactctgctccggatcccccggcaccccgactggttccccgcaggtctgctcagctcaggggcagccccatcccctccacgcctgacactgctcccagcctgctccccaccaccacggagcagggtgtggcgccagcgaccccgctgtaggcaggccgaggagcgggcagctgtgacgtctggcatcagtgacacgaggcgcgaatcccagctccaccgcttcatagcggcgtggcctcggggaagtgctgtgttggcttcccctctgcgaagtgggcctgaggtcgcgctgcagttgtcaggcccctagaagagcgccaccggcttcacggcccaggaggcggggagggcggcagaaggcgagaccgaccccttagagggcgctcgcgggtgccaggccccacagcgggccctgccgtggcgagcgggccctgcgggcgtgtcctggctccgggcgctcctcagggccccgcgtcctgtctccgcaggcgtggccagcgtggtggtgtccttcttcctctgcatgtactacaacgtggtcaacgcctgggccttctggtacctcttccactccttccaggtgagcggccgcgggcggcagcagggcccagggggcgggggcgaggggcgccggcctcaagggcgccgcgccaggccaggggcagccaggcaccccggaccgagcagagggcttccaagccagggatctgtggacccctgctgttgtgtgcaatgtgtgcgtacattttgggggagcaggcccccagatctcatcaggcgctgtgctgaaggatgtgaccccctccattaatatcaagacccgctgcctgctgggccgggggaacctgtagggacagctgatgggg

SEQ ID NO: 39568 - DNA, 2371 bp, Bovine  19866880823044
  misc_feature (1)..(1): n is a, c, g, or t
nagttcagttcagttcagtcgctcagtcgtgtccaactcttcacaaccccatgaatggcagcacgccaggcctccctgtccatcaccaactcctggagttcattcagactcacgtccatcgagtcagtgatgccatccagccatctcatcctctgtcgtccccttctcctccttctcccaacccctcccagcatcagagtcttttaaggagccctcaaacaagtgtgataaactaaaagattataatagcaataatgccagccacagtggcagtgcctgtgtgtgccacatcctggcacaagcagaggcctccatctgtcatcctctcctccccttcctgaccaccgtccttggcgcacacggagcaggaagccctgaactgtcacaggtgaggagacaaaggtctagggaggtcagatgcctctgtctgggccccactgatgctcaggtgggaagcagaaactggggttcaggtctcagaactcctaatgccaggtgctttcgcctggtggatggcatgtccttggtgctggcaaacatgcctctctgcagaaccacctgtggaatctaacaccagcgagcctggggcctcaccagaggcactgagtcagtgccggccctgttggtctgggctccctggagcttgtgacagcaaccagatggggggccttcgggccccttgtgccccttccaccccctcagcagggggaggaggacaggacagagagcaggactgagcacgtggagccgggagaggatgtcagattaggagcctgttagctgaacctctgtggctggcccggctgccctgcccacctctgctgcccttctacctctagagcttcttccagttaatcaaagagatgcttctgaataaaagaaaaactactggggggaatattttgtttcattttgtgtcacctttaagatttgtgtaaatgcgtatttctcttgtatgtgctaagctttgtgaattcatgtgagttgaaaacctttgcacatttgatttgaaggttgttgtgaggtttagtcacagctgtcataaactgacttaaagtgtctcccagttctcagaactcagccacatagctcattaaactcatcagtgttgtctctttaattcttactgtttcacatgaagtaaaacagccaccacctcaaagtggagatattttgttctttgacttttttaatacatgtctggacagaaattagcagcgagttcagtgtcctgtattgcattctccagaagggatagaagacaagattttcttatgaaaaggaagtgttctttcccttacaactgccctttcctggatggtaattcaaatttaaggtttctcacattctttgggggaatagataagatataaataataaacaaataagcatctagttcatttcagtgattccttgaagaagagtgagtttaagagttacatacttcagtggtgaaaatcacactgggatgtgtatctttctgtctgtctttaattaacttagtaccctgagttgcaagttaatgaggcaaagctgtgctaggaggatgactaaatgcactcttccattatccttattgttcctgtacttgacccctttccatatttttctgcagtgactggtactatgcaaggagcccctttctgaagccaaagctgagctctgacatcgtgggccaactttacgagctgactgacgtccagtttgacctggcatcgcggggctatgacctggatgctgcctggccaacgtttgccaggtactttgaagaattaactgcttggttgaaaagaggggaaagaggtgttcgattttgaagcttgccatcagtccgctcaaagcagttttgctaatgcagtaaatgaccttatgcttgctcattttacagacttggttgcatcgtgactagcgataacatctgaaggctccagccttaaacttaaccgagttggttaggcggtatgagtcagtggagatgcatatgcaaaacccagggttttcagatgtgttaaggaactcagtgtgggagcgaagtggaagcaagtgggcttttcccagttgtgttctcctagatacagttattatcatggacgccagtgagagggatagaaagctcatcgcataagggttgttggaaagtttgctttgctgtgttttcttttcctacaccagcacagcgcccacacaactgcattcacacaacacccatttcaggagtgaggtgctgaggaaacaggcgcagagagcggaggaacttgcccagtgccacacagctggcaagaacagggccagggcaccagactcgagttcaactcaagcccagcactcttcttttttttttttttttgctttctgtaaaaaaggtgtgttt

SEQ ID NO: 39569 - DNA, 1485 bp, Bovine  19866881061278
  misc_feature (1)..(1): n is a, c, g, or t
nacccactacacctgcagtcttcattttcctcctgaaagccatggaagaaagtggaagcagttcctggctctgaaactgaacatcttggggctgatattgcctctgttggtcatgattgtctgctatggacatataaagattataaagattatgctcagaacttggaataagaaggccaacataatacgtctgatttttgtcatcatgatcaccttctttctcttttggacgccctgcaatctgactgtgtttgtttctgctttccaagattccctgtgtgagcactgcagccagctggacttggccattgaagtgacagaggcaattgcctatgcacactgctgcatgaaccccatagtctatgtccttttctgcaggaggtaccgcagggttctatggtacttgctctatcagctgactaagtgtcgctgcttcctctacgaggaggcaggagagggtcaactccatgtccattacacaggcaaggaagaacgctgttctgtgtacagactcaggcccctcaggtccatcagggacaaagaaaccataagctgctaacatgctgacggggaggaggcagcttgggtctcccagccagattctgacacctgacctggaattgtagccacatggggttgagggagctccaaggtgttctagacaaaatcaccattacggttggatttttctcaatgaacttctctgtggtggaaaatgagatatatagatgagatggtggaaatgaataaatgaagtgggacatcccagaagactgggtcaaaggatgacagagaaaggcttggtaccaaagagaagttcagattgttgaacagtagcatttgtaaaccagtcactgagcatctgctaccctcacccccaagaccagtgatcttggagatagagatttccatagctgcctccactccgagcagagaagccaagcaggagccggcagccacctctcacctccctacccccactcctagggcagcatttaggctcctggaaaccctgagaaatctagaactcctgatggaagaacttgacacctaataggaagtaggattggggaactgcttttggcagtgaagctaagaaagcccttggatggaatgtttatagtcactaaaatcaacaaatacaggcagcgggctagacacagacaaaatgtatacactgctgtacttcttgaaattgccgtggaacggaagtagtcattacttccttttaccattcctgtcttctgaatagttttcagagtctcccttccctgtcagttgagggatgcagcagtaatttctgacagattcactgcagaaatcattaccaggcagaaggagacaggggttgatttttcttcctctggacctccatccagaccttgtagctgtatggattcagagttctggctgccaccttgggaccgatcagcaggacagtgaccctggtgtgccagggtttgaggctggcagggagggcaacat

SEQ ID NO: 39570 - DNA, 1102 bp, Bovine  19866881093269
  misc_feature (1)..(1): n is a, c, g, or t
nttcttgtgacattttgaattcgtactaattgttatagctttctgaaaagctggtggaaaatgcattaatacttaaaaagaaaccaattgatgaactttctttccttcttaggtgcaaaggagcagccacaagagagacagatacaatggatacctttgtggattctgcttggtactacttcagatatactgaccctcagaatactcagaggtacagaaagccctgctgaattcatgagcatgtgttggtctgggtcttccatgaagcaaacatcaagatagaattcaatgggcaagagatttatgggggcaggtgcctctggggaataaagaggtgagggagcgggagtcggcaggcaagccctggactaggatataggtctgacaccgatgaaagaaaaggatgaaggcaggaggattgggttgaagagcttcagaccgcagcacagcttgaaaattcttgagcaggccggatgggaaatgctgagagtcccaagtcaggaggcaatgcctgctctggtccgctcctcccaggagggcacaggctgccatcaaccccggtgggtccagagatgaaagagctggaagccatgggtcaactgtgctctttgaaacaggctcttatagtgagtgtgctcaattattaaattagattcttcagagccaagtaaatcccaggtataggaaaaatgaaaaagagtaaggaagagctttggtaataccctctttggccctgcagtgaactgcacttgtgcagtcacaaatatgtaaagttattaacttaaatgaaagtaatgatgcaagtgtacagggagggtagaagagagagagtcagtgagctgagggcatgacctcttagcatatacagtcactagataatttccaatactgataaatgaacaaagcatataaacatatttttaaataattgccaggaaaaaagcatctgaaagggttaaaagtggctaagtgacaggtaggaggtgtggggggagggtagtgaaggaatgggactagacaccactgttctacattataaacgtttcaggactgttttttcagctatgtgcatgtgcttctttgacaaaaataaatgagggaa

SEQ ID NO: 39571 - DNA, 1337 bp, Bovine  19866881115400
  misc_feature (1)..(1): n is a, c, g, or t
ncagttggttacaaaggtggctgtcaccaaaccctctcccacctagggaatgtgttgattggtgagcttttaaaggacagggtgattgtaaatgactttgaaggagcctcagatagaaacggtgatgaccaaaggaaccaaacccacatggctgggtgggctattttaacctcaggatcagcattgtcagagaacctccagcggtgatgggcaagttctacttgagtgctctccaatctcgtacccactcgccacacgtggccactgagtactcgaatgaggctagagccgctgagaggctgatttcaactaccttacgccgagatggagaccaatcttaaatcaagaatggatgcttttgaactgtggtgctggagaaggttcttgagagtgccctggacagcaaaagattaaaccagtcaatcctaaaaggacatcggaccctgaatattcattggaaggactgatgctgaagctccaatactctggccacctgatgcgaagagctgactcactggaaaagaccctgatgttgggcaagattgaaggcaggaaaagggggtgacagaggatgagatggttggatggcatcactgactcaatggacatgagtttgagcaaactctgggagacagtggacgacagggaagcctggtgtgctgcagtccatggggtggcaaagtcagatacgacttacccactgaacaacaacaacaaaacaaaattttagctagtgttaaaccaatttacacttaaatttgtaaatagcccttgtggctagggactgctgtactggccagcatagcttctggatgatgtttcttgttttgggtaagggggcaccagaaagattctgcaggctccacggctcagctggggagctcttggttacctctgaggcgggggagatggggcagaagaagctggtttcccatgtgttgaatgccctttggtgctaagtgctctgaatacacaaaactgccctcatcccctcaggcagacgccaatggttctgatttgaaccctggatcgagggtggcaaagacagtgccctttgccccaaggggtatcaaaataccccttgatttctgggctctgcctcttctcagaggcccttcagctcaggcccgtgcaggctcactgccccccttgaggtctggggcccaccaggtggcccaggcttacttgttcaagcagctctcgtagttgaaggtggccttgaagccatagatggagaaggtgacaatgctggcaaagatggaggtggagctgttgatgatggacacgatgatggcgtgcttttggcagttgttggagggctcgttgtagctggcaaa

SEQ ID NO: 39572 - DNA, 2614 bp, Bovine  19866881243305
  misc_feature (1)..(1): n is a, c, g, or t
ncataattacaaaaataagtcgaatggctttgtatttttttttactggggcatctcagcagtgttttaataattcctgaatagcagatggccataacaagcagaggcagagcgagacccaggatattcattctcagagcatggaatcgcttccaggcattttcattatcctctgggtaaagaggacatgcagaaagtctgtccagcctcctcttgggtctcatgaaagaaaaattcagggagggctgctagccctgccaggacccaggtgaagatgctggtaacaataccaaaagtgacttgtccgggctcgaagggcaaacacggcatggacgatggcaagataccggtctatggtcaagaggatgatgaaaaagatctcactgtacaagcccatgtaatagagcccggagagcaacttacacatgcggtggccaaacacccactcgttccacctaacatagtgaatccagaatggcagcgtgaataggaagagcacgtcagaaatggccaggttgagcaggtagatgttggtcatgatccggagccgcttgtactttgtgagtatcaccaccaccaccacgttgcccagcaggccggtcacaaacaccagggagtacagcgggggcaggaactgggccgccagctccttgacgttgctcttctcgcacggcagtgccgcctcatagtcgtagggtgtggtcccagcaacttcacccacagtttcaatcccatcagctgaggtcgccatttcccttgtccctgtgatagaagaaggcaaaagtaaccccacagttaacgatgatcgctccttgagacccacaccagtcagtttattcacttacccactaaaaccacacggaataaatagcctatacattcttcagcatatatttccaaaggtgtatcagatatgccatggggcggggagaaatgttaggagtgaaagatgcaatgttttgagagtcagcatgatccatcatgggaaaagaaacaaacattgtggatggtagtgaagagcggagatgttgatcctgaaagcatttggaagaagaaatacaaaacaggaagagataggttgggtaatgttaacaataatcttataataattatattatcactgtatttaaaatttttgttttatgttttatggtttatatatgaccttcaaaatcatccatttaaaaaccaaatgctaataatagtgattattatccttagaaataactacccatttccatggctccataacataaaatgcaaaatttaaaaatacagtaatggggaaattgaacctcaaagaaatttaataaggagtctaaaatcctttagtaagcaatttcaaaagttcaggctagatcttcagtatctatgctgaattctctcatcactggattcaagtacagtgatttttaacttataataattattataattagctgttgtagtagttattaactgttgtaacaattgtaagcagcgtccccttttcctgttcctgacaatgctgacataagccagtcatgtgcctacaacagaccccttagagtttctccctcataaagaggctgagcatgtaccaatgggactacttcttagattttggattttttagaccaggatccctagggtcagtgcctgcttttcttagaattacagccttggctggagaagaaggaaaaagagacaagggagtagtccatgaaaggcagctaacccctaccctgcttcctcaggagtcctgctaaccttctcttttctgtgaaagcacaagtgtgaggtcatgaacatacgtcagcaggtatttctcaaggcagggcttagaaatgcagtaattggagccgatggcaaggattgtctttgctttcctaagaaaatactgggaccctaaagtcagcacctgttggggttctgtgtggtccaagtgactgtagagaggagagacataggagcggttcctggccattctgcttgccagtgagaagactcagacaagcccttaactctgagcctcgtttattcatctccaaaataaggatcatggtagccacccatttgatgtggtgagcatcaaatcagagagtctacatgagatcatattttaaactagaaaaagaaaaaactgtatggtagaaagcagaagtgaaagaaaggcaatgagaagtggtttcacatgaaatcgggaaaaagtagaggctcttggatagaacttgatctattttcatagctctggcctggtccatcatctactaatcagtgacacattcaggctttcgaggttaaaaatggaattgagtagcaactgacttatatgatcttaccagctttttaaaaattcccaatggcataatacacagcagctgagaaaaagtacccatcatttggtctgttatgcattttcggtcatgagagtatctctctaaaccttaatgtttaaggcaagagtggaaagagcctctactcatcattaattatttatattttctttccttttctcacagactgatctgaaaacaagtcaaactttaaaaaagaatttcactgaagtgttttccaacttgaagatcatctttaattcatgtgtcatttccataaatcctacatgatgagtgtaa

SEQ ID NO: 39573 - DNA, 2188 bp, Bovine  19866881280974
  misc_feature (1)..(1): n is a, c, g, or t
ngactcccaacatgaccgccaaaaaaaataaaaataaaaaaacaaagtctcctaggaaagtcaggtgttacactattatgtaaggtaacacttggtccttggaagaaacgctatggcaaagctagacagtgtattaaaaagcagagacataacttcactgccaaaatccatatagtcaaaactatgactttcccagcagacatgtatggatgtgagagttggaccgtaaggaaggctgagtactgaaaaattgatgcctttaaactgtggtgctggagaagactcttgagagtcccttggacagcaagatcaaaccagtcaatcctaaaggaaatcatacctgaataatcattagaaggactgatgctgaagctccagtagcttggccacctgatgtaaaaagccaactcattggaaaagaccctgatgatgggaaagattgaaggctggaagagaaggaggtgacagaggatgagatggttggatgacatcatcaactcaatggacatgagtttgagcaaacttctgggagataatgaaggacagggaaacatggcgtgctgcatggggtggcaaagaatccgacaagacttaagagactgaacaaccagtgtgggttttagtcctggctcatcttttcctgtaggtggcgcgagtggcaaagacccctgcctgccaatgcaagagatgcaggttccatccctggattgggaagatccctgggatgaaggcatggcaacccgctctagtattcttgtctggagaatccccatggacagaggagcctggcacactacatttcatgaggttgcaaagaatcagatacgactgagtgacttagcacgcatgcacacacacgtggattaaaattagacaaatatcaatgaaaataaaatgtgcgcctctaatagcaaatgttacacaaatcagtacaatgatgtctgttatgctaatttttatttttacaatagatttataatggtctatatattctgtagctgagctatagaacagccatggcttatcttagagtttaaaaattcataaacatgtgctgcttttgtttaggttctagactggggaggagaatgccccaaccacatccgtcaaagataagcatgtcgttgttcagttgttaagtggtgtttgactctttgctgccccatggactgcaatgcgccaggcttccctgtcctttactgtctcccagagtttgctcagtttgatgtccattgagtcagtgatgccatctgaccatctcatcctcttgttaactttcttctttctctgaaaccttggctcactgagaatagagaagtgggtgaagcccatttcgtgaagttgagtcacgatgggcccatctgtataacctttgctgggcctctctgattggccagtgaaggagaaaagggtgaattcctgagcctcagtgaccccagttctcccaccagtcacttgctttgtcttaagcagtctgtagtttctacttttgcattctcctttcattcctacaggccatgcaggacgcgctggcaggccttccggaatggtacgggattaaaggcatgcaggcccactggattggcaactgtgtgggctgccatctggacttcatgttaaaggtgattgagcaggagcatctgcagcagttaatgctcacaaccccccttctgcctctttaggcctctttttagaaaagtgggtgcctgtattcatcacataaatcctggaggaaagtatagcgcctttcccaggacaaataacattgacagttattgattcgtggacagaggagccaggaactggggaaagcctctttctgggcatgctctgacatcctttgatggggacccccaagtaggcctgggggtaggccctggggaagcctcctgaaagaggaactgcggccctcttctctctccccctgtctgcccctgcctgggaccatctcaggcccccacatgcctgccggtgcctaggactgaggaggggtgggaacaggggatgtgggctggggagcacggcagcccagagtgcagactgagaactgaaacgaccctgcttcttgtcaggttgatgggcaagtcacaggagaaaagctgagcgcctacacagccacccccgaggccgtttatggcgcctcccacgtggccatctctcccagccacaggttcttgcacgggcacag

SEQ ID NO: 39574 - DNA, 1374 bp, Bovine  19866881599937
  misc_feature (1)..(1): n is a, c, g, or t
nctccttcacaggtgctttgtcgcttaggtgtgaccagaccagacatcctccacgttgtctctctctctgtcgttcactaacgtcacacgcagccgacgcgctccccggggtgctgagatggcagcagcgtctgtgggccttggtgactcgatttatcgaggccaggacgtctgggaaggcgcccaggcctcagctgttgagcgacaaggacaaagccgaggccaggaggctgtgggagtacaagaactcggtcatctctcaggtcagaacccttcccgggacactggttgattctgtgactgagccctcgtggtctgtgtggcctgcctgccctgggcggggcacaccgggtcttcctcctgtcttcatcctgctgctttgggtatttatttccccacggcggagcaacggtgcgcaagctctaagggcaagggacgctcttgagaaatggctccccctagtggtgatctgaggaggctgcccgctttccaggaggctgcccgctttccatgtttccatatttaacacatcctacccactccagtgttcttgcctggagaatcccagggacggaggggcctggtgggcttccatctatggggtcacacagagtcggacacgactgaagcgacttagcagcagcagcagcagcagcagcagcagcagggcttccctcggagaaggcaatggcaccccactccagtacttttgcctggaaaatcccatggacagaggagcctggtaggctgcagtccatggggtcgctaagagtcagacacgactgagcgacttcactttcacttttcactttcacacaatggagaaggcaatggcaacccactccagtgttcttgcctggagaatcccagggatgggggagcctggtgggctgctgtctatggggttgtacagagcccgacacgactgaagccacttagtagcagcagtaatcatgacaaaaaagcggaaagttacctcccagatgaagggacaagataaacccccccccccccaaaattaaatgaagtagagataggcaacttccagaaaaagaactcagaataatagtgaagatgatccaggatctaaggaaaaggatggaggcaaagattgagaagatgcaagaaatgtttaccaaagatctagaagaactaaagaacaaacagagatgaataatacactagaaggaatccatagtagagtaattgaggcagaagaacagataaatgacctggaggacagaatggtggaaatcactgccacaaaacagaatatagaaaaaagaataagaaatgaagacagcctaagagacctctgggacaacattaaatgcaacaacattcgcattacaggagaatgttgggtcccagaag

SEQ ID NO: 39575 - DNA, 634 bp, Bovine  19866881627820
  misc_feature (1)..(1): n is a, c, g, or t
ngacttgttttttccaatttctcctaattaagggaaagagaattatgatgtcagtggtagacaagaaactgaaacaccaggttgaaacagagtatctgcaactccgggatgattctgagagcaggaacctgggttgacctcctcctgtagaggatctcacggcctccctgagacatagctcagtcatggctttgtctttatgaagttgctggggtctgagcaccttagagtcttgacaatattgcatcaccctccacctacttctgttccagctcgggagacaccgccagtgggtcatgctagaggaggcgtcattgcttcagctgtatggagtacagcctagacaggcaggccactgaatattccagagtggcaggaagttagggaaggaaggaaggaaacctccccaccaccagacccaagcgggtgggggtactgagggtggggtacctgcgccttgctgagaagcttccagatcaagtcttccttgccatccacacttcgggccacgacagcatgagaagggacctgggccaggtggcactccttgaacgcatccactggcgcccgactgttgttcaggcagagaagctcatactggtccctgtcagcccttctctggcaagttctctgg

SEQ ID NO: 39576 - DNA, 722 bp, Bovine  19866881659903
  misc_feature (1)..(1): n is a, c, g, or t
nttctctcttctctaaggcaggactggacctggccggaccaccagctcacgactacccttccttctgctccctgacctgtggcctgctgggcccatagcacagggtcggggccacctaggagaggccggaggggcaggaagccttgctttcttagaagtggtcatgggctgtggtctgggatctggctcagagttgcatcactgggttccattctcacttgaatctttggttgtcttgacccccactgaggtctgcagtttaaatcctgctgtccatgggatggtggccaacgtcccaaagtatcactgaatcccttgtcctacccagtggaaggactggccactggcctagggggttcctgccctgctccccatgggtgtcgtggcaggaagaggctgggtgggccgagaagagtaactccaccccagcccctgcctttgagagacgggcactgtgtgtccacacagaaggaatctgagcacgtgtcctttcaggagggtgccatccaggcccaagtgggcagcatgtgagtgactgagacagatcaggggcggggctggggatacagggccaggatacaggcctcttgtgaaagagacacacagcttcagagctggctgctgggagctgtggaggggaggagcagagcgctgcgttctgcacccagcgctggtgtttggggggctgggggcggtgcgtctcagaaaacctctcagtggtg

SEQ ID NO: 39577 - DNA, 673 bp, Bovine  19866881863461
  misc_feature (1)..(1): n is a, c, g, or t
ntcccttttctcagtgaatgcgatgtgatttgatcatttctctgactgaaaaagatagagtctcccttcgaaagctaatgctgagtgcccgcgctggcagtccttttgtgatttgggcatttgcaaagaagacattttgtatttcttcgccttgaacaggaattcccagcaccagcttggaggactccgccttggcccaaaccctgggcctgtcctacttccgaagtcattgaagagacgccagatggcacagagaaactgagcggctccgcggaggttggtggggcctaagaatttacttctaaactcacggtcttcacgtgagcttcatgatgcgttttcccctcgatgcaagttacaacctaccatttaccactgcagtcatctccacacctaacagtcttgcagcctcgtttcgaaatctatgaaaccaaaataatgttcttttattactattatcatttacttttattcatttattggccgcacaggatctgaattgcagcatgtgaacccctagctgcgacacgtgggatctaactccctgaccagaggttgaacccaggtcccctgtattgggagcatggagccttagccactggaccaccagggaagcccacaataatgttctttttcaagcatctagaagcttctcaactccaagttgaacctg

SEQ ID NO: 39578 - DNA, 1335 bp, Bovine  19866881911510
  misc_feature (1)..(1): n is a, c, g, or t
ntcctgggtactcagcaccacgccggctgggtctactagaaaataactaaaacatatttgtataaacactctcataccaaagccagccaagcgatcttcccaacccagggatcgaacccaggtctcccatgctgcaggcaggttctttcccagctgagccacaagggaagcccaagaatactggggtgggtagcaggggatcttcccccacccagtaatcaaaccagggtcttctgcattgcaggcggattcttctctgagctatcagagaagccctcccactaaggacagtcctcttataacacaggtctatgtcagaaacattattaaagccggtaaattaaaggacagacaggaaatgtacagttcaggtatatttgattaccaaggaccaaaaggaagtttgaacagaacaggcaagacagactctatctcaaaacaattgcagcatcaaggtcacttcacccaacagatgtgaaaaaggaggtgggagtattgtaacagatgcaatgggcaacaccatgtctccccaaggccggaagagggcttcctttgacgtagcaactatgacccgctcctcagtccctgtgctgcatcacgactcccggagttgttcattagaaatgaacgtgcttgatcttcatttttagcaaacaactcagaaataaactgaataagaatctccgaagaaaggattggatattgtgcattaaaaacatttacaaatcccttcttcaaatggctaatatatgcaaatagtacatagtttatagggtataatagggtattacttgaaaaatctgctttactttctcccccgaaccacccagatgtctgcactggagccaaacacagttacaagttcctgtgggtctgtcatttttaacaatacattcagataattttatgaacccccaaattttacaacatatagtgtggtggtgaggagcatagactttgccagaaaagtttgctagccttagttcctaggcaagttactagctatgtaattttaagtaaataacctaatttctcagagcctgtattttttcatccacaaagtggagatggcagcaccactaacaggctgctctacagttcaatgagattgtgtataatgcatacaaagcgcttggcagagggtatgggacgaaaaatacgatgaatactaaacagtattaaattaaccacagttactccctaaaatcaaaaagtgaaggggaaatacagtagattcaccacaggctaaaaatcacgaccttaaaaaacatgggcttaagggatttccctggcagtccagtgggttaagactccatgtttccaatgcaggggaca

SEQ ID NO: 39579 - DNA, 944 bp, Bovine  19866880382724
  misc_feature (1)..(1): n is a, c, g, or t
naattctgcaaataattccactgagttcaagtgaaatctgtttgtgcccctcgcactaagcatgactatattagatgaccttttacatgggtcttctggactcaattcatatactatcttactcaaggcaatgcctgattatgtaacatggtctttactgaaaaggtgttagtataattttagcaattacactacttaattaaactaacactactccctttctttcctccgacctttacaaaatgaactctactttttctttcttataaattctgaagttcaacatatgcaatttttatattctatcaatgtccaaatctaatttaattagcacagaaatacttgttcacaccaaagtattataatagacactctgagaaattaggttctgttggctcctattcatttaaaatgatcaacaaggcttttagaaggattaagagaaatgatgtatgtaaatcatctagcactgtgtctggcacaggctggtgttcagtaaacacaatacgcctaccccctttaaaagaaaggaagaaagaaaatgatcaacatgggtgtgtatgtgagtgtagggaacatcttctattataaagaaaagcaatactgagcctttacattttactctgatggaaacatatcagtgtatcatgattcatggagaaaacagttccagaaagtagagagagagaggtggatcctgagtaacagctctgatttatttcaaggaaaccttggacttactctgggcatctttctctccaaattcaactgattaataggtgtggttaatgctacctcttaaatctctcttgaaactgtcacttgtattccatcttctttattatatgtttgtgtgtttgtttactgtctgtctttcccaacagattacaggcagaaatgtaatggcagatatcatattctgccactcaatacactcatacaca

SEQ ID NO: 39580 - DNA, 1378 bp, Bovine  19866880665854
  misc_feature (1)..(1): n is a, c, g, or t
natcttttgaataccagattcaaggagataaaaaaaaaggtatccaataaatctcttatattacattttttaaatcttataatttgctggttcctttactgttttacatggcaaataataatagtggggtaacatttccccaagtttacataaaacagaatttgagtctaaatatataccaacctgaaaactaaagattgtattaaatctggcaaaatttaggtaaacttaagaatcccaggggaaaaaaattcatatagtggacatgttttgatattttagatactgttttattagtgctgtgaatgtcagatctggctctttccatacggcagctactttaaatacacaggttataaacatttggcctcatgggtaaatatgaaagatctaggagtgaaagattataccctaaatctcatggtggccacaggcacatttattagctatctgtctgtcagtctacctacctatgtagtcagcctctatctatcatctatctatctacctacctatgtttttatctgcaaaattcttgtttctcactgcagcaggtttgggtttaagtactggtgctgttaaaatatcttacaacttgagctagagcagtgtgaactgaatacactggacacatacagaagttgtccaaattctctactcttggaagccaattatcagtgagagcttccctggtagctcagctggtaaagaatccgcctgcaatacaggagacctgggttccatccctggattgggaagatcccctggagaagggaacagctatccactctagtattttggcctggagaattccatggactgtaaggtccatggcgtagcaaagagactcgactgagcgactgtcacttcacttagcagagagaaggaaaagaaaaggtgcctagataagccactagcattaagtatccggctttgatggattgctaataagttttgcagtttatagcaaaactgcccccacactcattttttcggatgttgtaagttacttggctgccctgcattgattggcttattttgatttaactggtttgtcaatttctcactatgtgaattcaagcaggtaaaatgtaaaccagaaaataaggatatgcttgccttgtcttatgaaatgaaagtaacaggattgggccatgccaaaatcatgcctctttttctagactcattttaagttgtgaagtggcatgatgcaatgtgaatgtctggacaagcatcccttttgtagttctcaagggggttatgtcctggatttgttcctttgcaaactctttgcagtttacatagctgtagagacttaatgccttggcaggggcacaggttttatctgtgggttttcgcctctttgaatggcaggcag

SEQ ID NO: 39581 - DNA, 3104 bp, Bovine  19866880712329
  misc_feature (1)..(1): n is a, c, g, or t
nctggaatgttctacgatttgtgttttgaaaactatataataattatcacagattataatttaaggattcacctcaagccttcacaaaaaagaagtatatctactttttcatagtccattttcctgctgagttacattttattaaactgttgacaagaagctactcaattacagaaatcttgtactggttttattcacaattaaattatccaaataaaacttctttgactgaaacgaacagcactcagaaaacatgctggaaaggaactacttaaaaaatattcattttgtcaagctttggcagttgaggaagagggacaaaattgaggaaaagggaaaggttaatctatctatgtggtatttttaacttggcagtatcaaataaatggcaggggtattataagaaatgtcagctgtgctaatgctttcaaagccttagcacttttaaatgatcatcagtattcagttcaaacacattggactcatgagcactgatgaagacacatcctaatatttttttcttctaggtttaaaccatcacaaaggaggaagttttgaatcaaagtgtttattctttgtatctgacaagcatgttagaagtctgaactactaacttattgctatttccaaatatgggcctgacattatgccagagtgcatatagaaccctagcagcagcagactgccatcttaatattataattttaatgtattccccatatagccagaagttaaaactccacaacataccttattctcataaaagttatgaatttctttcaataaaagccacagcttcttagtctggttagtttaactacagacagctcttacaccaattcctgattatacgaagggtctaaataacagaaaaaatttacacagtattttgaaggagtctatttatatgcttcattaaggagccaaatctcaatgaaatattcaatattcagggaccagtgatatcaccacataacttgaatacaagaggaaacaaattcacattttaaaataccatagattatgaaatttaaaaaaatgtttctgctttcagagcatagagaaaatacttgattaagccaaatgtcacaatgccaactaataggtttggtggcttggtggaaatgcattaaaagtttctatcgcttatgtcttatttaataaacaaaagcaaagcctatgaatacaaaggataaataatccaaaactagtagtcaaatcatgtaagagacaacaaccaaacaaaaaaactggataagagttttgacagcctaaatcctgggttcaaattatgtcaacatcttattctcaagtgctgattattcaggtttgacacgtcacttaggcatacggaggagttagtgaaatcgagtctgaggattcatgtgaacaaaattttatcagacccaaagattctaactatgtcctgacttcagcaggctaaaaactaaaaacacattctttttttaatataaagtttcacaccctcacatttctaattccatgagacatgacacaatgttatttgatcagggcacattaaagacttattaaaggaatgaaaaggattggaatgtttttaaaacatctgtttgataatgttaactatccccttgatgcactcttaaattctatgttttattaaaatgacagtgccagagactcctagaatggctacagaactaattttttaagctttgctgatgaaaattaatttcagactaatccaagagttgataaacattatttaaaacatacaggtatgtcccattccaagaaattgatatacacaaaaccccttgcttacagaatagccaaaggagggacggacttgttaatattaatcacaaaaaaacctttttcactttgtaaagtgattcacttgggcatttgttgaaacagaatttggaatacaaaatcttgattagtgaattttctaggaaacatctagttcaagatttgaggtcacctacatctagatttggtatattaagggaaagaaagaaaatgggtatgcatgaagagtcaaagcaaatgacaaaaatcacaacagtacacgctaataaatgaagaaatcaagagacagtttcattaattaatatattttctgcattatagttaacatatgtactttcttcgtgtcaccttattttccgttacgtattgatattttgttatattcagacatgagtacatttcaacagtcttttgcaataaatatcataaaataatagagattcgcataataaatattctttacaataaaaaagtttaacagacttttgtcttaaaaatagtcagaattcaactttgtgatttatacataaaatatacaaaaagcaccacaatttgtggttaaggcaatgaaacagaaaagattagaactacccagctgttaactaacgaagtggccaaaaaccattaaggagccaagatcacttcaggcagcatagttctgtgacatctatagattgatcagatataaatatcaacttcagttatccaagtgccctcaatgacaagagtaatttggtgaaaagcaaggagttcggaagggcgggagtcgagtccttcacaaatatgaaagcttgaataaggatgagcaagatacaaccaaatatatctccaatgtgaagacttacattgtaaagcagacctaaaattacacagaaaaaaacaaaacaaaaccctggcgtctctaaaataagatacaccaaaactgaggggatagactgttgaggagcaaggagagggcagtggttaaaggggaattttaacgttgtaacaaaaacagatctcccatgctacttaagtgtctaatgctatgaagatagccctagttggagacagatttaatatatagcttatttaagcaattaaactgctgcttctttaaacaccaatttccctgttcccagagtacccaatcaaaaacagctctaaatcactgtagcctgggtgtacatgtgtggatatgttcacgtgtacaactttggaaagttgcttgcagaacaaaaaggctacacaaaagcccactggctctcaataccctctcgagtggatggcagaggctcttgtcataagggggagccagatgcatttca

SEQ ID NO: 39582 - DNA, 1230 bp, Bovine  19866880762859
  misc_feature (1)..(1): n is a, c, g, or t
ntccatatgcagaaaaattctagagctagaaatagatatcagaatatactttatgtgtctcaaccatatatgaaagtaaataggtcactagttaaaaagttaaaaatcagaagtctgtgtcatagttcagacctaccctatcagaagatatctccaggggaggagcttgatagtcttaatttcaaaaagcttcttgggtgagtttatcaggcaattttgtaattgcttttttagcttgatgtcttcatcttgagaatagagaaacaaaggcctggcttaaatgttcatgatagctagcatagcaccaggactccagatacagggctttcttcatttcttagcagcaagcctggtacctttatgttgcacattagcgtttaccatttcttttaaccagaaagtgtttccttcataattaatatatttgaccataatttaggaaatggaatgtttttctgcatatattatttacacttagctatcaggaataagtagcaaatgacttcattgccatgattatttttcatatgttattattaaagttaacaacttcatttgaaaactgagattgtgtgcttcctctggccaggtttatatggtaataatagaacaaattgcttttgatcagtttgtaaaggtaatagtaacctggcatctagatttaagaacttacgcgatggcacttagcattattctagttacatcagaattatagtgattaaaaagcagatttaaatgttctgttttgtactgataaaaagattggtgttaaagtcagatagctgaatcatactaggtatgccagtaactaacagtaaaacctagagactgttttgaactgggcaatttgggaaaacatactaaagcttatcattcactagcaagtatttcaagagcttgttttgataagataatcatagaatcatacttcaaatgatagaaacttggaggtcatctattggatcttctttagaatgagaaagccaggttcacagaggttacttacctaaagtcacgatctcgttgccaaactaaaataagctttattttaaaaactgcatgctgcatatgtacctgtggtaacagattggaagaaaggagaggttggttgggggaacaagaccagagtttaaaccaaaatttcaggttaatttgtaagttataaaatttaacaaatttgtgaaagcacaatagcagtagtatagtagtgaatactaatagtagtccaag

SEQ ID NO: 39583 - DNA, 1690 bp, Bovine  19866880812161
  misc_feature (1)..(1): n is a, c, g, or t
ntaacaggctaacttgtgagattataagtagggcgaaatcccatatcctgaatagttattgacacatatcaattatcttctttcttggtaaaagctgacatttcagacactgagacttaactaccagaaaatttattattagcatgacatgttaccaaagacaattttacaaagacttagccaataactttacaaaaataaaaagccttctgattcctgtgaacttttctgtgtgtgtgcaagtccagtgataatttcattgtctgtctgaagtactaacagtactaaatccagagctcggcgccatgcctcaatttttggtgtaacaacgtcataaactcttggaattggttccagcttatctgaaatgcctaaatttaaaattacactattaagtttactatattcattcaagatgtaagatgaaggagagccagagtctgcagcattttgtagatgacactgaatggatgtggcggcttcagagtctgatgagtaaacggcagtgttacgcaggagagttgagaggtacctgtgccatccatctgccaggcatttaagcaccgtaggtctatacagtgctgcagatgaggccagccaagaggaagtgttatgcagccaccctgaacagtcttgatttcctttattcacagactgtcccgcgagactctgaagatgggtaagacacaaaatttcaactgcgccacctccaaggaagaccttttgctctttcagagcataatacagacgagaggcacaagtccagaacctgtcttctttagtttgcatctgggcaatgactgggctagtcagcactactgtaaccaaattaattccttctgtttttaacacgactgccattctgctgatcccatctatagtgtcagagggaatgcttctccacgtggtcacagagaccccactgcccacacagttttcattcatgtgtgtgaggtaggccacctgcacggctcccgaagcctctgcgaaagcctgcagcacactgtcttgcaccgatccaattaccagccgcttactatcggtgcatttttcagctaagtgttcagacacatttcctcgtgccaggacaaggttcacgttgaacttgattaacacctgtaatacatgatctgtccacagttcttctgagctgtcttgttgaaccttcacgctttctgacactgttttaatatttgcaggcttattaaatcccagatggcggtaattctcagtgaggtcaccctcaacaagaactacacggaccggctgattctgcaattccttgaccagagtagcagtggacattgacacaacagtgatgtatcctggacagacacaagacaaagtgtcaggtaagcccggtaagcagcaggtgaagattcttgaaatgtcaaaggggaatagcccggtatggctgcctcgttgcctgcctgcattctgatgctgcagccgtactgcttcgtccactagcctcatgctgctggggtctccgtgactcaaacccacctccaactctgccagatcgctacagctgtaagtctttggagcagctgcactaagttgttctagaaatccacctggcttgcttatccaatgatgatctgtcctactaaaatgtctactgtgggtcaggactgactttcggcagtgggtgtctgcaagcaggttgtttttcagagtttgaggagtt

SEQ ID NO: 39584 - DNA, 1394 bp, Bovine  19866880823469
  misc_feature (1)..(1): n is a, c, g, or t
nagagtaacaatttaataaacttaaacccctacctttatagccaggaaattcagtccactctcattggccaaagcctttgcgatcattgttttagagcatccaggtggcccatacaaaagaactcctttgggtggctgaatacccatttgggtgaaagactcaggatgtttcaagggccattccacagcctgtttcagtttcagcttgacattttccagtcctcctatatctgaccaggatacctgcaaaacaaacaaaaaatttaaaacatatgtatacaagaaaggaaacagaactatttaaaaatcaataatttccttaaaaaattctcaacaagattaagaactaggagtttataaaatgtgagctgcgtattatagaaatactaaagaaaaccaaaatgttacttcttgcaagtcttacttgtataagtaactgtttaaacaactgaatatactgttaagtctatattctattctacatgcctttaaaaactagctttcatctgtttgaaaatagtttgaatcagtgattcaaggtcaaatctacatatctaatttcttatatttcttttcctgaaagcaaaattactttcaaatacacttctgtaggtccttatggaacatataaacttttctgcctttggtatattaataagaattctcaaaattttgttcttcccaaaatgttccccaaacaagagagctctttatgtttatgtacttaataaatatgcattacatatcatataaagtccacaggaaatagacgagacataaatccagatcctaaagaacttaacaaatatcagtaacacacacataaataaccatagtacaatgcaaagtttactaaccacaatgacaaagaaacagaaaaatcctttgggcgttcccaggaagaaaagattatttccagctggaaggtaaatctgagagccaactcttgaaacagggatgagatccataaatatgaaaataggaaaatggttaggtagaagccaaaaaattatgaaaggctcagaaggaaacatgaagaatatgagagaaaaaaagacttgagagggaaatcaaaaaagaaaagaaagttcttctttctaaaaaaggaaaagcaacttcaagccatctagtggagaacgctgaagactagatggagctcaagaatctctttattcataagaattctttgaaggtttttaatctagaaagcaatattctttgatctgtgcttcagaaagacttctctgacaagattcactgggagaggagagtgtcttcagagagaacaattaaagatctatcacaaacattctttaaaaaaaaaagtaaagcgaaaattaaagttgcttaggcctgtacaattctttgtgcatggactatacagtccatggaat

SEQ ID NO: 39585 - DNA, 2711 bp, Bovine  19866880881217
  misc_feature (1)..(1): n is a, c, g, or t
nacccaaattatgggccagacttcactaactgcttgagctttgactggtcacatagtctgtcctcatctgtgaaattagggaatgtactaaatgattctggataaagtcttctagttttacataaaacatcagaattaattcacttcaccagtcccaggttttaacaaactttcctaaaaatacagcttttagtttcaaattctcgatgtcaaattatttactcacctggcttaccaaccctattaaaatgtagagttttttaaaaaaggacaattgattagagcacagtttgtatgccgacaaaggctgaagatctatggcttggtggactagggcaaggcccatggaagagaggaacttaagaaaataatgaagggatagagccaggtctgactgtgacttgaggaaagggggcagaaagggtgggcaacccagctatatttatctcttttttggaaggtacaaaaactctaaataacacaccattaaaactgaaaaaaaattcccaatcactgtcccttttccctcaactttcaatcacccctcaatttactgcaatctagtagcgagccacaggaccccactctcttctaaggacctcatgaccttccaggtactaagcacttgatatccctgtggtctctatactgctgctggcttcactatttacttcctgtgtgatcttggtgaagttctgtaactaaatttctgcactaagtttcttcacctatacaatgaagataaacatataaaggatgctgtaagaaattattaacaagtgttaaggcacttcaaacaatggctgacacactaaatactcaactggtggtaactaataatatattatttctaattactttctccctggaatctaccctcattttagtcaccacttttttgggttctcttccccctctcttgccattcttcagtctcctaccacttttcccaacaattcaacctctgagtggtgatctgtcctcaggatcccttctttcctcattagcatgttaaaaccccctgatcattcacaaatacaacacaaatgtattataatctcacctgttacactgctgcacttccctgtgcaccctgagctctatgctgctgctgctgctaagttgcttcagtcgtgtccatccgactctgtgcgaccccatagatggcagcccaccaggctcccctgtccctgggattctccaggcaggaacactggagtgggttgccatgcccttctccaatacatgaaagtgaaaagtgcaagtgaagttgctcagtcgtgtctgactcttcacgaccccatggactgcagcccaccaggctcctccgtccatgggattttccaggcaagagtactgaagtggggtgtcattgccttctccagtgagctctatgaggagagtccaattctctcttacttgctgaggtagcctcggcacccagtgcagtgcctgactcaagaaatgaatgaatgaataaactttgctcattctaagtgatttcattcatttcaatggcttcagtcatcatctaactgttaagaacttgctgacccacgtatccaaccaaaactctcatctccaaaacctgcaatttaaagtcctgaagctaagacaatgtgaagaataaaaagtgatagaaggtggaggacagagtgtggaggacagagtgggcaggaagaaaaatctctacagtccagacaagagtaatcaaaacagttatgatgtttaaaaaaatcttttaaagttgaaactctgaataaatcttgaaaaagagctaactgggtttgataaagagtaacaaaaaaagcagtcaagaataactcttagaaataacttccatttagaaagactgattttgttttcgcaattgttttaattagaaagaaaacctttcctcaagttttctacttttatagccttggcaaggcaactcagaaaattttccattagtgaagtaaatggtatatatcacttagagcttaaccagaatttaaactaccacctgttttcctaaaacaaaccattcaactccagtcatttcaaatgaacagcaaacgtaatactaagatacccaaatcactgaccaaaaaaaattccacttcttacataatatccataatatttatgcagtaggaaaaattccaacatcacaaatataactatcactatatttcagagttataaaccagaggggaaaattcaatgcaatatgaaatattatactgcataattactgcctatttatccagttacagtaataagtaaagataggctcccttataaaatgctaattagagtgacaatcgtgattcatacatcaattttatttttttgctctaccgcaggcctacagtggactcacttgtgagacgaagtggggatgggagggaagagattgtgactctgattgtgtttgacaggagagctctcacattcagcaagaacatctgtcaaggaggcacccctccccgcccccaaaagccatatctaagtctagtctgcatatttctattgatgggcaagactttaactgatccagattcagtaaaaatcagtactctagaagagaatggaatgtgctatatttccctgagatttcttgtactagagtaacaaatacttcataaaatcaagaatactgtcaaaattcaaataaacatctaccagagaaatgcataaatacacacaaaacattttttttccaaaaa

SEQ ID NO: 39586 - DNA, 854 bp, Bovine  19866880904278
  misc_feature (1)..(1): n is a, c, g, or t
ntgaagtggaaaaaagagttgtagcttcactcttaacactgatggatggcattggttcagtaagtatagcaccagtattgatttctttagtaggggatattttcttaatagggagcaattgctcccttaatgtaggagcaaaaactatcaagtatgtctgagttttttgggatctctagggctgcagtccatggggtcgctaagagtcggacacgactgaacgacttcactttcactttccactttcatgcattggagaaggaaatggcaaccaactccagtgttcttgcctggagaatcccagggacgggggagcctggtgggctgccgtctatggggtcgcacagagtcggacacgactgaagtgacgcagcagcagcagcagcagcagcagggtaaaggaaaaaatattagctctaagaattagaggaccaagacccataaaataattttctccagtaatttcttagtaacagcaaggacagtataacctggcagtgtttttctagcatataaaattatttacattgataaatttttttttttaataaatggtgttaacctaaaaacctgaagtaaaaatcagtaaggaaaatttagcagttaaacttaaggggaatttactaagaaatttcatgagtaaatctcatataactcttgtaaaaattagtttggtgggagagctttaagttttgcaagtgaaaggacaaagtgagaatcatgggaaaggtacaacatttaaaaaaaaagtttactcatgttaccaaattctttgtatatagtgcatgcaatcttatattaataagaactatgtgctgattatgaaagggaagatcagtagaactaatagggaa

SEQ ID NO: 39587 - DNA, 2484 bp, Bovine  19866880931128
  misc_feature (1)..(1): n is a, c, g, or t
naaaataagcctatatggtttttccaaaaaggtgtaagaaagatagtcttccaatatattagtcagaacaaagccgaaaacagctctgtatacttcaaatggtaaaatcacctatttaaagtttaaaaatatggtcaaattgatctttcacatttgtaattcagtggtagtatttatactataacttgagcaaaattgttattagaagcatgggagtgaaatagcgtgtgagtacgtctaaattttttaaaaacttttatcatcctggctttacaaaagaagaagaattctcaggtgagtaaaatcactcattatcacatatcgtctatgtggtggaaacagatttgaactcatgttgaattaggaaaaatatatccctttttgtatacatacagacgatgccctaactgtccaagagccagctgcttccttaaaatataatgttttcttgtctaaataaatctctaacttggtggatctactttcttttcccaggtcagttcctttaacaccatcctaattctgaactcgtagattttccagggactccaagattttcacaaagaacagcaactgcagtgggagtggagcacccaggcggtctgcagcggtgtccatccatgtgactatttcctgcgccagcacagtgccataggtgggaaggcaaaaactctcattaaacagctataactaaagagaatcaaattcacacaattcacaatcagaactatacattaagtgagccatcaaagctgaaagcactggaagagaaaaattcatcacaaaggaagtactatcttttaaaaattagatttatctatgtatctaatctgaagtctattacctcccagcatctgctccatggtttcgtcatgaatccttggctggctcaaaagcctcaaattggtaacaatccaaatccattaacagtagaatggattaaaatttatggcatatttatactgtggaatattatgcaactactgacaataaaacagatgaatcttacgtaatgttgagcaaagacagaaaatcagaagaataattcattgtgatattcttgacacaaagttaaaagcaggcaaactaaacaatggaagagcaagaaagaaaagaaaggaaatgattaccatgaagttacaatggtgattgccctttggttgcaggaagaggattgcaattccataaggacacataggaggggtgggttgggggttcaggtgttggtaatgctccatttcttgagttgtttggtggttacacagaaagtcaatctttctccttttattaacacatacataggtgctatgctctttcatgaaagttattttatatttcacactgtaaattgcttaattttccaaactgcaggactgtcttcccataatttgattctacaaagctatggaaaggaaagaaaaagaagtacattactaaaaatattcccaaggcaaagataatgaactgtgtctctgttctctcccctagattctaagttgcatctgggcttttggttgcaattcttaacccacggtggacgttaaataaatatttgatgatgttgagtgcttaagtgatgatttatgtaaatatcaggacctgctgcacagcacatattctcgtggcatagttttaaattgaccagaggtatctcactctggtgtgtctgagatgaagtgtaaaatataagaaagtcccattaacttgtcaagttgacagagtttgggagtttatttagctgtggcaaagccacatatgtgcaaaatgagcatcctcctatatggtcagggtctgcaaataagcacatttaagaagggcaacttggaaatattcatcaaaagccttcacaattcatcaaaagcctcttagatattatgtttctaagaatcttaaaaagtggtcatggagtttgtatgccaacatttaactacaaggatgtttgggttagcgctgtttgccagagtcaaaaataggaagcaacagaagtgtccaatgatacggtagttgctaaacacattgtggttgccccttcaatggaattccatgcagctgttaaaactgacgtcacagagaataattttaaaacatgaaaatattcataatatactgttacttttaaaatcctgttacagagctctgtgaataattttagatagatgatagacggatgaatggatggatagatagatagaaccaaaccactcccaaatttagtagccaaaacaactagtgtattctgtttctttttcagtggttgcctgagatgacaggactaaagaagcaattcttgtgttactctcaatttggagaatactacatcccctggaggaggaaatggcacccactccagtattcttacctagaaaattccatggacagaggagcctggcagggctccacagggtctcaaagagctggacacgactgagcaaccgaatatgcatgcgtgcacacacacacacaggcaaccaactcatcttgctc

SEQ ID NO: 39588 - DNA, 714 bp, Bovine  19866880945005
  misc_feature (1)..(1): n is a, c, g, or t
ntgtattgttagtaatttattaataagagcatcatttgccttcatataattaataagagttttaaaaggtagttctcatcttcgaagtcttctaaggagttgctcaaggatttctagtgttttctctgtccacagtctcactatcctgtagcaaatagaggcaattcagctttccattcttctctgcttcaaaagaccacttgaaaatttgatgacagtctcacacttctttaaaaagacatacagataattatcagttcattgatacagactttcaaattagagtttccagttagtactagagaattggtaatacatgcataaagagtcacctatgaagaacttgtttataactaagtactatatattatggttaagatatgccataggagtttaggggatgagaaatctggaacttgaccagagttttgaagaataaccaggatttgaagtggccatagaggtcggaagatactgtaagacatttttctaaaaagatacagttttttagatgaagagaaaatagttgacattttttgttaaaagctacaagatgtagctggttaaggaattcagaacataccaccctcaaatatgccaaagtgaagacaattgagagagagcaggaagggctctctgcctgaccctttctacctaaaagcagggcataaatttttctaccataaagaggagaatattatcaccagagatggg

SEQ ID NO: 39589 - DNA, 815 bp, Bovine  19866880961710
  misc_feature (1)..(1): n is a, c, g, or t
ngaataggcaatcaactgacaggtcattgctgaatcaaggaattatacccttttctttggcatatcacagctcatgaaggctaacattttggtgactgtttcaggaaaagaaatactgtactgtatttcctctcttcccttcaatatctgttatacaaagcaaacaaacctgtttacagaacagccagccctttggttgagtaaatgacaggtaggaaattaagctgttaatacaggaggatgactaagtgaggaaatccgtcttttgtcaaccactcttacatttttatcattttcaagtagaatctgctttcggtttcagtgggggtgttagatgtatgtggcttaatggattttgtacttgaaattctggcttccctcttttgcttacaatccaacatcacagtagaaaataatgcaaatagtcttctaaatgattgataaacagtaatgatttaggcttatttattgagtcagagctccacacctgttctgtgtcataacaacttcctccaagaatgagtttttttttttttttaagccatcctttcttgcaatgccagaggcattaaaaatctctaaattgaataatactgaattaaatttgcttcttatttaaatctatttaaaggtaaccctttgcatactttctgggttttttagtacggattgttgattattacattgtatgtatacgtgtttatacataatttatatacatatatatatatgtatatgtatttcttttttataaattttgataagatattaatcttgacatttatcataacatgaagaacaatcctaacattatt

SEQ ID NO: 39590 - DNA, 833 bp, Bovine  19866880980642
  misc_feature (1)..(1): n is a, c, g, or t
ngcaagagcagtggctccttccattattttctttgatgaacttgatgccttagcagttgaaaggggcaggtaagaaatataagactgccactaataactgtatattagcaactacagtgtagaggaactagcactttttatacagattttatttattaatattattaatacatttggcttaaaagaaaactttcaattcacttttttttcttatatccttaaaattatttcatattaccactttattacttctgaggtgagatggaacaaaaggttacaaatagcttaagttcaccttgatgcaagggaagaataagaagccagagaagtttgctgaattagggtgatctgccacatttatgtgccatcagagacatctgtttttggagcctaaaaaggaacaggatgggaaacattgttaaatatgaaccagatggtaggtggaatatatagcagagttctcataaaatgcctttgaaatatgtgtgagaaaccagacaagatactcggtagaaataacctggttttgtaggcattttggctcaggaggaattggcatatgtattagagctgttaataatttgcagcctctagatatcattttctttaatcgtcttcatcattttgtgagtccttccttagtgactcattcaaataaattctatgtagtttcctttgcacagaaaaattttggtcaagttagttgacgctttgaaaacaaaggtaaggctgactacgcaatgtaatgttaatagtacaaatagaaaattgcagttgtactttagctacactaagtcttaatcagtttggtttttatagccataagaatctca

SEQ ID NO: 39591 - DNA, 1564 bp, Bovine  19866881007171
  misc_feature (1)..(1): n is a, c, g, or t
ncttcgaaaatttcctctcccacctctggcattttaatacctaaattaacaactcttctaacacactggcctcagttttctcctcttcatcctttactcagaaaaatctcttttctacctcaagctacccttgagcacagagaaactccaagatatcctcagcatttgacagtatggtatcaagacccttgaaggtggtatcgagaccaccttctaaggtcttgacttgaaacttctgttctcagctgtcctcctttgctatttccatactctctgtaagcctgtatctcatcctcattggaactttcaaccaattcttctggccagtcatttcggcaaatattcagactgctaccctatgattcctgacctctttcaaattcaccatttcttaagggtctcttattctctgccttaaatgaccctctaactagctctgaataatatgcttagtggctcccccaaagttccaggttcagtgtgagctgagctccctgcgctgctctttctttcatcagttcctactgaccacaagttagcctctccacctctagccgttccagaccgctctcaagaaccaatttcagtctcttaagcatcttaactttcaagagaagaccatcccccacttggtgtgcttctttgacttccctcttctccctcttggcgttccactgtgtcttttccttccttctcatcttttattctttcctctgggagaaccattcttgccaaggttaaagtgccctctttgcgctccctcttctatctcctcctccctcttccagaaggcctacaaaaaggcacagggttttccttattctaaaaattgtcctcagcttgttacttgccttgagttacttgcctattatatcgagacttctggaatagtctaaagctgttacttgcatgtacttaccacccactaaacccatgcaacctggttcttattacaatttcacctaaacaccacccaccaaatttagctgggagtatttgactgttactaattcctatcttgaaaatctcctttggctgctaacgcgtggtcaagaggaactgaagaagagcagtccagagagttgagctcagtctctcggtgcctgtccttctttgaccacccccctctattggtgccccacctgccctctaaatgtaggtacattcctcagggttcgaggctcagctggtaaagaatctgcctgcagtgtgggaggcctgggtttgatccctgggttgggaagatcccctggagaagggaaaggctacccactccagtattctggcctggagaattccatggactatatagtccatggggtcgcagagagtcggacatgactgagtgactttcactttcactttttcactttccttaaggttttagccctagcctgtttttaatttcattctttctcttgggaatctatgctacagattccctatcaccccaatatgggtgatgggccatcacccttctctaaaattctaggcttttttttttctcagtgagcttctggcaactcaccagcattgtaagagtttatcctaataggaatcataa

SEQ ID NO: 39592 - DNA, 1656 bp, Bovine  19866881038359
  misc_feature (1)..(1): n is a, c, g, or t
nttatgttatagtaatttagattcagtatttttactagacctacgtaagtgtaataatgacaaaacccattgtttaaataagagttttagctcttcctgttctgtgatggtatccttatcaaggcccaagcatttggtatgaatatgttgaaatgatgtgtaatcaacaaggatgcttaaagataaattcttagagatgtgaagcgaatgcttccttccactgtaaacaaaatgactgagtccatttcttgaagaaatcaagctctatttatattcactctcctgaaatggcacaggcagccttagaaggataagtttataataaatccctgcatttggaaaacattgttgctaagcatcctctaacattcaacagagtttatataattcatgtctctgctgcataattaacatctcatgttttctaaaaaagcatggtatgcttatctatgctgttaatttaaaatattataaattttgagggaattaataaaaggctatgcaactaattaattagaaaggcagcctaatcccaggacagatacaaacacagacattaaatgtcaagatgtgtcagagttgagcttttaaaacagcttgtctgcttgagataaaacgtttcaaaatgcagctgctctttgcttaaaaaggtgaactacaaaacattaggcttttggacaagtcaccacttatcaaaccacactctagctcaaaaattaattatacggaaaatataacatttgaaaatcagtttcacacccagcattcaacatcaaacactgtatctgctcagataaaacaagatacaagtgttgaaagcaacactacagtagtatttccaactttcttattcattacagacacaaagtttaaaaatatggataatattcaataacactagaatagaagagcagaaaagctgagagtatacacactgcaaaagatgcagtatcactctcacaaattctggaacagactgcaaatcttctgtcctctggaaaaccatgcacaaacatatatactacaaggattttgaccttttgtattaataaaccacaaataataaccttatgattaccaaagcaatcaggaacatagttcacttcagttttattaattctgaatcacttcaatgtatgcaatgactagatacccatgcaccacttttgttaaaaacagcagagtttccccaactaagaggccagctcagaaaaaaggaaaaccatcaggcagccaacacacaaaaaacgcaaagaacatgtatgtccgcaaggcataaacaagcagatgttctaggaaaaacacgtctatattcttctttgtattcttcattgttaaccctcaattatttccttaattgtggctttctagctttcagaattattttcattttacctgttactttaaattaatttgtattggagtacagccgctttacaatgttgttttagtttctgccgtagaacaaagtgaatcagctatatgtatacatatattccctcttttttgttatttccttcccatttagatcactgaagagaattcagtagagttccctgtgatatacagcaggttctcattagttatctgctttatacatagtagtctatacatgtcaatctcaattttctgattcattccacctcctctcccctc

SEQ ID NO: 39593 - DNA, 1895 bp, Bovine  19866881040854
  misc_feature (1)..(1): n is a, c, g, or t
naaaagcccctgatgaagggaaagattgagggcaggaggagaaggggatgacagaagatgagatgattggatggcatcatcaactcaaatggacatgaatttgagcaaactccaggagatggtgaaggacagggaagcctggcctgctgcagcccatgggtttgcagagtcagacatgactgagtgactgaacaacaacaatatgtttttgaagatctatgataataccatataactatcactcagttaaaacattgtttttactaaatacaataatatctcaaattgtacatggcacataatatttttgtaagtacctaggtgtacaaacttttggtatttcaacaaactcgtgagttaaggggggactgaattattcacctagttttataggtaaggaagtttgacatagggaggaaatatgattttccaatttcttgataaagttaggactagaacataacatccctgaccctgttagttcattctgtgacctttctgatgtggtggttggtggttgagtcgctaaattgtgtccgacttctagtgacccaaggacgaaagagcagataaaaccaaggagggtcttggaatgcaggaatggaaaaaccaggcccttatggtccttccctctcccatgttgtaactattaatggaacagtataacctgtctcccctcctaccccgtagggagaaggtatttgccctactcttccccacccagtatacatgcctcatccaatcagcaaatgacccgcaagacccctatcccactccttgtaccctgggtataaaagtggacttaggacccctgtttaatttcggttctcccttgagctggcccgctgttctaacagcatctcctactctaataaactttattctcctctcattctgcctcaggtctggaaattcttttccaacccgtgcccggaccacgacacgactttttacgacctcatggatatagcccgtcagggccctctgtccatgggatttcccaggtaaaaacagtggagtaggttgtcattcccttctccagggaatcttcctgacccaggaatcaaacctgagtctcctgcattgtaggcggattctgagccaccagagaagccccagcctttctgataaccattaagaaagaacaagtgggtgtgccacaccagccgatgatgaggcatccctgttctgctcatgacttgaactgtggtgaagtatccagttaaaaaaaaatcgctacttttatccttgagttttacatggagtctcatcataacttgtgctgtgctttatgaaagataatctgaccaatttcttaattgtgtttcattcccaaggtttagaaaaaatgtttttgcatttacaaggaatatgtatagcccaagtacacaaaagcaaatcttaagtgctttggattttgattattttagaatactagtttaccacaactcagctgtctgtagtgaacccttggcctctgattacattgtcccctcctactctagccctgctcaaatgattcagtggaaaggattctaattatgtaatctcattttggggaaaactgggaagagtaggtagaaacctaaatgatgcatgttagagctaggaaactggagccaggtctcatggtactctaattaaaacttttatttctgcagatttattctgtggtccttgctgaacagatctgccttgggtttctgctggtgagtttttcagcaggaatgcaggctttgtttctttgaatagttgagtgcagattagtggtatgccaatttcctgtggcctttcagagctgcaatttgagccctgtttgctcctggcccttgcacagcagaaaacaatggggacttcttttaggtttcacttcagggctctagaaacaggggaag

SEQ ID NO: 39594 - DNA, 1718 bp, Bovine  19866881083143
  misc_feature (1)..(1): n is a, c, g, or t
ncacctgagtgtaggatacccctgggtgagccctgggttagggtagtgatggggtcagggacagactgaatttacatttcaagtactttcaggaattatttgcaagcactcaggaatataaaatggtatcacagctgagagctttatttaacattccatttagctctaatctctacttaatctccactgtttttatttggttactaggtatttagcacagccccgttttgtggaaggctggccaaaagcacacttcaaattaatggtagtcaaagcttgctctactgaatctatattggagcatgagcaagaggttcattggttctaagttgttttatagggcttttttgtttttgttttaacaatctgcctcagcagtatatacagtataaagttataaatacagcacccgtgctaaggaataaattccacatttggtcaaaaatcaaattgttaggataaaagtcctaactttagttaacattaagtcaaatatcagacgtgtcctcattcattcaacatgtatttattgagcacctactattaagtaaattaccagtcactgatgcacaatagcaaacatactaaatgaaagtctatcaatttgtgggtccatttttgtgaggagaaagagcacatcaacaaaataagttaaaatgtaatatattagatgacaataacagaggaggagcaaaataaagcagagaaggaaaaaaggcctagagagtaggccataggttaaatacaggtggccagggagagcttaccaaaaaggtgatactggatcaaagcctgaggtaagtgaattgtacagtttgttatccaaaagaagagcattccagaaggggaacaacaagagcaaatgatctgaacaaaagtaagcctttcttgtttaaaagcagtcaggaagtcagtatagccggagtgaagagagtggggggtgttccagtgtccagctgaagaaagtgggaggggtgattgatagcaaatgatagatcaagttaattgaggactgaggactgaccattggattattgacagagcagttcagtggaaggtcaaaaatctcatttgaatgagtttaagggagaatagaaggagaggaagtggagaaaggcaaataaagatagctattcccaggagtttcactggtggtgggttaaagcagatgtggagggacttcctggtggtccagtgactaagactgtgcgatcccaatgtgggtggcaggggcgggggaggcgtggttcgatccctggtccaggaactagatcccacatgccgcaactaagacccagcatagcaagctaaatacatacatgacacatacttcattaaaaaaattaagcaaatgggaggtgattatgcttttaaaatgagtaattataacatattgttatgctgatgggggaaattgattatgcatggggaagcaattacagcagcaaatcttgacttaggaaaaagcgaatggaatccagtgattaaataggaggtctactcttaggaacccaggtagtacaactgttgaaacagaaaggccagttaagcatgcgagtacaagtaaagggaatactgtagacttgatgatggtagcatactgaaagttcttctctaccatgtaagcaaactttcttcccagtatttgaataagatctacaatattcctgtcacgggtcagagtttgagcaagctccaggagtgggaggacagggaag

SEQ ID NO: 39595 - DNA, 1530 bp, Bovine  19866881146721
  misc_feature (1)..(1): n is a, c, g, or t
nctgcatgcaggcctgtggagctggcctggagctgctcacctcccaacagggacgctgaaatcgtaaggcaactgtcaccactaaactgccaaactacctctcagagattatctgtatcctccaaaagtggaagagtaacacatttctgacagtggcctaaacaaccaactcaagttctgtttgcttcccatcaccccaacctgtgggcccagagtgtgtactcaggtctgtggagaaactttgtcagtgattttaaatgcgggggaagaggaggcttatttatagggtgacctcagataatgagaaaagcggctctgcagcgctgagttcctttacctgatttaatcagcgcctgtcagggttgcttttctaaaagtttagagggaaactacacctgcgtcctggggacagtaatttatgggtgcaaggagatggccatgcagcagtttcttgcctgagtaggtgaactgcacggtgcagagctgactactgtgggggaacccgggctgccggagacgcccctccagccctttttcgggcaactacccgccgagtccacgctgaggcggcgctcccctctcccccggctcctgctgtttggaaccaagaaagcttgccttccagtgaggcctaaatgtgcttttcagcttctttgtatttcaagtgtactaaatagctttaaagaatccaccaaaagaaatgggctgcagtgctttaaaacgacgtcttaggtattttcaagaaagtggttttgttaaaagcatcgtctgtgtggaacacctgtgacctgttgagcttaattgggctgcagctggcgctgactgtggcgcgggcggcagggggacattgtgtgcactcggctccccgccccctcgcttttcttttcactttcagagtccgcgacctccttcccctgtgtgtctgagggattaggaacccagtagagagtggtgtcccgctgttcgcgaatagcctgccactggaggtgcttcaaggaggaggctacctgggagattatgtactactgcaaggcccagggccattctcccgggtccattgagacgcggtgaaaggtggctgaatggccgcgcctgaaaaatgtgactgaagggcacgcagcgggctcctggccgcggagcagcagatggagtctgactgtcacaggcacaaacggccaggggtgccccaaacggccaagaacgcagatcagagccgaaaacggggccagtcgaggaagggaattccagggaagccggtggcattgatttaaagttcttcacaattcacctcacagataaacttttacttgcagatgctagaggtgagaattttggagggccaatttcagatttaaggaatcgtacaatcccttggattgtatgcaaaataggctttatgatgcaacttcatctggaactgttaaagtgaaaactatctagactgccttgcagagtactgaatcaaaagaaaatgaggtctgtaaggacatgtaaaaagtctaatgatattagaagcaggggggaaaactc

SEQ ID NO: 39596 - DNA, 1205 bp, Bovine  19866881195619
  misc_feature (1)..(1): n is a, c, g, or t
nccagtcctaggctttgcgtcagaccctgtggctttcacatggccctgtacccgtctgtcctctcctgcgttatcgaaaaattctctctaatagcttgatgtgttttaacctcctgtccctcagttttactggaactttctagatggcaaggattttaaaaaatttaaacattacccagtagtcctttgctctcttttctactctgaggactgagactgactttaggcactccagaattccctggactcaaatgaatgaccatgctgaggcccatgaagaggttcgatgtgtattgttgaatgagctagaactttaaataaataagcatatacacttcagcatgaagtgcgcagagcagataagttgaacgtagcatcactgtggttccttctgtggacacctttcacattattcaaaggaagcaataaaggtaaaacacaatcatttcgttaggattaatttttattgtggaagtttttcttttcagctaatgaataacatgtcaacatttctagccaatttcagaactagctgtaatcttttaattaaaaaccatagatctgagagttcatacttgagtcatatttaatccttaaatccctttctttccctctgtctctttctctctttctaaaagctgtgaatcattttataaattaggattaagaactgtctggtaccattgttaatatcccttttggctgtgaggaaatggcacaaataatttcatcctaatattcattcagatttatgagccagtattcatcacaacaatcttaaaactcttgaaaggatagaaactgtatgacaaagtgagtcatagtctttgtgatgtgatgtctgcaagggtgggtgggagagactactgaatgaccagtctcattctgctttctgagctgaatcattttgcaaatagaaaacaattcatagatttatagatggtcataacataaataggaaatggaagagagtaacagagtcaaataatacctctatttaaaaaattactttttgaaacataacacttgatgaacagtctttattttgaattagaaatgaaattaatctactgcctaataatacatatattttgatacttgctgtatgtctttatatattttcattttttcctattggttatgtttcttttaaaaaattctctcatgtaatttgacctttatcttcatagctatttctagctttg

SEQ ID NO: 39597 - DNA, 875 bp, Bovine  19866881233949
  misc_feature (1)..(1): n is a, c, g, or t
ngcagaagtctgaggagatttgtgctaacagattttgtgtcctgtatggatgttatataaaaaaggaaatacactgctcttttgcaggtttctgtgatctcctggtccacagctctaaaggcaaccctaaagagctaatggtcaggaaaatcaggctcagctctaagcctgtgcttaaccaggacttgtagtataaggcaaccagtgctgagacagtagaattccattgtgacctattgtccggagatgagaaaacacccatgttactgggttccagcgtcacaatgagagagctcactttacacgcctgcagcccctggggatgtgatttaatctgcaatattactgaatccctggaaaagtcagttgtggttctcatatggacttttactatatttatttcaaataaaagcaacaaaaattcataagacttttatagattgtcaaaagaagagctagtcaagtgtcagcgttgtataatcacattcttctcaaagtatgtatgtggcctttgaacactggaaaggcagcattacaatgagaggggtggagggggagtttgttgttttggaaagagtgagtagaggccagatcataaatggcaatgaaaactttcagctcagagatgcacagatgggctttctgctgaaatgactaacagctcttgtcagatcagcaagtagtaaccacaaaacacatgttctgtgtgtttaaattcacatttattaagttaaataattgctaatttacataacaaaaatttaattctcatatttttcagaattgatacaaggcttaacatagtcaagaactatagttagttgagtagcatatatctttattaaaagtaaacatcaaatgctatcatatccata

SEQ ID NO: 39598 - DNA, 775 bp, Bovine  19866881236806
  misc_feature (1)..(1): n is a, c, g, or t
nttgtaaagtaaaataaataaattaatttttaaaaaataaataaaagtttatattactagtaggtccttgtgctttaaaatactgtgacccattactggtacagactatctagatggtgttactgatctgagcagagaagtcagacccctccctaccctcaccctaaaccacccacacacacctccccagtcactgctctcaacaacaggtttttcattttctgagatgaagtccaaggaaggcactcctgtgctcggatgctccggggctttgttcagtaatcagctttgtggtttcaggaggcccaaaagtacttcagggctttccactccgagcactttgttcaggaagcttgagagacttgttgtggtttcagaaatgacacacttgaagttctggagttggcataaactactgctcctgctcaaaggtaggaagagcggcagccagaggggctggtagcctgaaaaccgaagctgtggttgtctccacagacaactgctcttcagcaagcttgcaattgctccacacccctttcatgtgggcaaagaaagaactttatcagacattaagtctctctcctcttgaaatatcggggtgagaggagaggaagttgggcagtaaatcggggcagaatttacaagagtgaaaatcacgtttttgttgcgttctcccctttcacacaggtgactccagctgctctagatgcttgtgtactggcccccagactacgacatgaggcccccaaagaggggaaggcagcactcgctgcag

SEQ ID NO: 39599 - DNA, 1578 bp, Bovine  19866881236983
  misc_feature (1)..(1): n is a, c, g, or t
nccatttccctctcccttgcgtgaaagtgaaaagtgaaagtgaagtcactcagttgcgtcggactggtagcgacccccatggactgaagcctaagtcttaggaagatgcttattttttgtaatcaccttaattatgcaaaaataattacagccaataattattgaccactttctatgtcccaggcacttgatgtgttagattaattctactactggaaattcctgtgggagatatactatctattcatgtctataagaggctttagtatttaggacttcaaggttttttacagatctttaaaaaaaaataggatagattcttacttgttggggatgctttaaacattgtgctactagaagacatagagtaaataaattgatcacccaaagtcctgatcagctcttcagttctacaagttgattataattagccctgagaaatcctctactgaaaaactttctatttcctgtcaaactgagaaatgtttccagtacattcatggattgaacaggctatatctgatcataatggttcacttttcccatgagttctttgagttatatttttagcacttttctgaaagccagagaaaaagtcatgcaaaaatcccaacaagccccaaagtactattttcaaaagggagttttttggccacaaatagtgaactactttccaagtgattgcttggaataaaacttagttaaagttaaatttaagatattctttttctctccaaacagattaagaacatttaaaaatgtctagataaactagaaatacttaattctgagaataattgcttcttttaaaaaacttgaatctttgaacataattttaataaagaaaaagacaaaggcacgtgtataaattcaagagtaaaatctaaaataatgaaagttcgcaacacactccaaagttttcttgagtgttctttaatataaaaatgtttctttaatttagtaagcatttccctagactttgagatgtgccagagtaatgttaggcactggttaaaaatggagatgaatacgatagggctctgctcttgagaagctttaattatacttctcattttatattactgggttaaattgtgtcatattctgccaattcacctctttattaaactaaaaaaggacaatttcacatggtttaatctaagagctactagattatattgcattgatgtattatcagaaggataagtaggcatcctcatgagaagtggagtggaagatgataagacgacttcctcttgcctatgctggtatgtgtgttagttgctaagtcatgtccgactctttgcgacaccatggactgtagcctgccaggctcctccatccatgggattttccaggcaagaatactggagtggattgccatttccttcttcaggggatcttcctgagcctcggattgaactcaggtctcccaaattgctggcagactctttaccatctgagccaccagggaagccctactgagatcatactgaatcctacagcctagaaaaacccctggaggttgccacagtgctctggcaaggggatggtgatagaaaacactatctatctgtg

SEQ ID NO: 39600 - DNA, 1326 bp, Bovine  19866881336921
  misc_feature (1)..(1): n is a, c, g, or t
ntaatctctgtaaatttctttctctttataataatagtccatgctatggcaaagagtcagatgtgacagagtgactttcactttcacttcactttcttaataaatgatttagcattttaaagcatttaataaggctgaagtatttagtatacttttgtttcttaataaaaatgtgggaaatacagaattttatttcattaacatttaaaccagacttgacgtctttaaaatatgcctcaaaatttagaagtatagaaatgtcatcacttacacaaataagaaaaaactaacacatgtatactccatctcagtcattcctgaaaacagactacacaacaaatttacatttttaagccaagaagactttaaaatataaagcggaggaaaggaaacttaatggcctcagaactaatgtcttctgtgtattgaaaggaaagttctagtgtaatagggcaagtattcttctgtcagcctctcagtttactttccactgatttttagagtgagaaagtaattcattctctgtactttattgaatcataaggctatattaaacaacttgaaatagcatataaaatgtcttatgtggacttcagtctttgagggacaaactaatcatcaaatttctttgtacaagtttacaggattgtactttttccatgttaatacataacattatgctgctttattttctattttaccatgttgtataagtggctcttagaaattttaaaggatttgtgcaattcagtatttgttcttgggtagctctgggaaatggaagtcaggataatgccagaggaaatcatctgcttttcttccagaaggaatacaagtatttgcagggaaaatacaagttcagatataagggctagagaaaaattcattgacacctcagtcccactttttgtaataatttttcttagggataccctaagactgagccattttaaaaatatatattttctctataagaaagggcaaatctgtcttattgaataatataaaatctaagagatttggaaaattcgaaaaattattaagaaaatttatcagtattttgattgcatttcaattacgaagtatatttatgaataatgtttaaatttttaaataattcaaaattgatgatcagtgcatgactttaaacatgagatttcctagctttgtggtgatgatagaatcgaagtcctaggcttgtgggaggcagatgcttgtgggaaagactggtacttattagcagtagtagaagtagtaataaaaataatgatttcttagaataatactccttacttaattgccatctatttaccaattttcttttaa

SEQ ID NO: 39601 - DNA, 977 bp, Bovine  19866881350393
  misc_feature (1)..(1): n is a, c, g, or t
ntggaaaagatgagcttagacacaagatcagtggtaccaaactaggcccatgtattacagtcacatgtctctttcaagcatgttgaaagagatgttcaacatgaaccatttaacttattaatttggcttgacttaatttctctctactaggtttatggtgaaagtaatacggtaaagaaatatttctggggaatttcaatatttggaaataataaattgctatgtttttatttgctgtgacaaacaatcaatcaaaatgtttatcgagtgccgtatgttgtgaaatctacatcatagtctggaacggcaatctaagataactcacttggttgtcttgtagattcgtttattctgtaatgtaaagacctatcccttccttcaggtttagcatattgtaagcaatcgtgattggagcatgtcatatggggcacagaaataatcttactttctagagattaatataaaaagctgaatttccagtcaccatagtgaaggaacatagggttggcacaagggaaatagtttcaaatagaagagttcaaatatgacaaagtagaagagttgctacgttaagaaagtcagatggttgtctgtcaggtggcctcacaaggtgggatttactttcatgaattcataatgatgtgaacttgtagggtcagaaagttgactttatcactgagttgaaaatgtgttctttttggaacacattttggaagctgattcatcttagtcaatctcatagaaactgatgtaaaatcacaatgtcagtttattaatttggattaagaaataattggcagagagacccagattcaaattcatccatttaaagttgttcaacataatgatttttggtaaatttatgaaattgtacaaatatcatgatggtagttttagaacatttctccttaaaatatctttctagcccatgtgccagtgatccctgtttccatacttattgatcttcatccaccatt

SEQ ID NO: 39602 - DNA, 894 bp, Bovine  19866881428968
  misc_feature (1)..(1): n is a, c, g, or t
naaatcagtccctgatgctgaaaaggtgggggctgctgatctagaagacatttaataaaacctgcccccttttctgattgcctacaactcttaagtctgtggaaattctaaaatttttgcttaaaatagacattgttatttatttagaaagtttaatacagtgtaccatggctagaaatagacagctagtatatgatgttttcctgaaaaggaaaaacaatgtaaatatccatgagaaattgtaccataattttcagtttactatattaagatctaaaagaataaggcagaatggaaagtgaactcatttattcttcattttcatgcgaaaacaagattcgctatttcttctactgatttgacttttgagaaaataacaaagtaaaatgaaaaaaagtgtctggtaactcttggcaactgctagtgatttaaaaaagaagaaaaaagtgtagtactaaggcttaacttattcatttatctactttatttgccaaaatagctgaaccataatatgttccaagctcttgaaaaataatatcttattaatctttccaatgtttctgtgaactcatgataataaatataatgtttgattttactgagaaacaaacaaaataataacagaaactggtgagttaccccgtaagtgtctaataaattaacaaagaaacaagaatggaaagtctttactttccttttaagggcaatagtcactatattactatacttcccaagaaaagctggcaaggataagccattttattttcagtttcctttcgtaaacaatctttgtagttgacagaaatagaccaacctattctgtgaattttccataaacattcttttcattttcgtaagtataattctcatccttccgccctatttgaaatacta

SEQ ID NO: 39603 - DNA, 704 bp, Bovine  19866882123313
  misc_feature (1)..(1): n is a, c, g, or t
ntgggagcgagggagatgaggatgcgggaggatgcgatgacgctgtgctgaaatgaaagcgatgacaaaagctcgcgaggcctgagcgccccggcgggtcccatcccgcgcccgcagaggcccccgggcggccgggccaccgcgcggcggggcgggcggccgggcgcgtcaatgggcccattcaggccggcgcggcgcgggggttgagaagttaaggggcgggaggtggcgcgccggggccgcggccgcgccatttgcatttcaataaaacccgcctgttgactcagtgcccggcgcttccgcagctcccaccagaatctgcctttgttggttttagctccggtcaagtccacttcttgcaacgggggagccgcgcgcattgagtttgtgtagtcaggcagaacactcgacaggaaggaaggaggaaggggtgctccgcgcggccattgtctgggcaaccgggcttaagcagccgagtgactatttaatctataaggtgcacttgaatcccttgcaaatcctctcagtgtggagtagggagcacccagacagggacagatggtgcagaacccctttgtttaaaaatatggaaatgcgttttctttcatttacctaaagtggccccgctcttttaactgttattattcccccgtgttgcatcgcccaggagagacccgaagatgctcttaggtcggtcagcccgg

SEQ ID NO: 39604 - DNA, 1413 bp, Bovine  19866880593591
  misc_feature (1)..(1): n is a, c, g, or t
nccatttctttccttggtcatacaagttgcgaaaaccaaattcaaaggaagtggaatattttctctcagtaacaagaataacaaaagattgtgaccatatttaatttgccagtcttccccatcttgatggatggagcatctgtcttttttaactgctagttctcaaaaacccagacattgcttgggactctccaaacctatgtctcattattataagagaccattattataagagacctatgtctcttattattgttcctgatatattccattactctacttattttttgcaccaataccatacattttacttgaattaatcccacttatttgtatatacacagaaaattgaaatcaagctcttagaaagatatctactaagattctcagtagctaagatatgggaacaatggaaatatccactgacagacaaatggatacagactgtgttatatacatataattgaatactattcagccttaaaaaagagataagccataccactttattggtccacaagggtggacctgaaagatattatgctaagtaaaataagtaagtgactggtgggcacatacactatgatctcctttataagggatatctaaaatagtcaaacttacaagtggttttgagaggatgggggagagaggcaaatggaaagttgagttcaagtttttactataaagttatagttatacaagataaatagattctagagatccgctgtacaacatagtgcttatagttggcaatatattattgaacactcaaaatttcatgaagtgggtatgcctcaaaaaaatggaaaaaggcacaagaaaaaaatttaagtggtgaaagcttatcaccttgattgtggagatgatattatgggtatttacatctgtccaaactgatcagattgtacacatttaacatgtgaagtttttgtatatcaattatacctcaataaagttgtaaaaatactctagttttataatatggtttagtatctgacagggctgtgtgtatatattttattgatctacatgaacatgattctacaagaaagactctttatttccaatctgtatcttattttgagaataatttgttgattgggggtgttaacgatgagaaaaagttttattttctaatttggcaagttctggattgtatatgccatcaaaattctgcttaccaacttatttttgagcctgtctcttagttttagttttcattttgcgcagcaaaaaaagcaaagcccaagttgtcaacattctattttccctggagttcttcttgtgcagttccaaaaattcattaggtttattttcaatcttctaagtaaccttacatgagagttttaccaaatacttcatcactacaaaacacatgtctccaatttctcatcctcctaaaacagttcc

SEQ ID NO: 39605 - DNA, 1655 bp, Bovine  19866880593895
  misc_feature (1)..(1): n is a, c, g, or t
ntttaaaatgtttaaatctgtaattgctttttatctggaattatttatataatttggaagttgaaaattccagtggggatttatggagacaaagttaatagttatagttagaacactatcatacaaagctatgactaaggctttttgttttggggaggggagtatttggcaaagatttttggaaagttgtaaataacaggagatatttattagtctttgcagattcaagcaaagaacaaaatgctcagtgtgggaggcagtgatcttggttggtcctttcagctgagtctaaatccattgtttaaaatcactgttaggatcaatgccttaccaaacatatatttataatataaaatattcttgaagaaaaacatctgattcatttcatagcttcagaacaagtgaaaatttcagtaaatctttcgtatttcttcccctgtgttttctctgatatgtacaatatcaggagactgaacttctcattgagttaatactttaatggaaattacatataattaaaagaacatatactttttctagtggggataaaatgttttctttccctttaatacaaatgattataggaaaggagtgcgctagtgtatgtgcatgtatgtgtgtgtgtgaatgtgtaaaaggaaggtgaagcagcaggaggcaaagggcctaagaaaacagctgttatcaaagaaaaatgtcaaaaggtttagaaattatcaaccattttacccaaacagcaaaaatacatttatgcatttactatctattacctttcgtgtatctcttctttaccatttttataaataaggtattacagcttgaaattactgattgaaggaacacattactgaccattgaaattttaggaatttggttctcctatttcagtgcagtgtggtcactctaacaaatgcctcctatgtaggtttcagtggtcctttgagattagaaaaagctttggcagacaaacatcaaatgaaacatgatatccaggcagtcagaatcttgtctgaccttcattcccacatggtcatgataattattaaacaattagaccattgttttacaacaaagcattttcttaaaaaatgcaagtttactgtgtctctatattagtcaaactttaaactatttatcattgacattttgactttcatattttggtcagaatctagtctaccacagttttctttctctggctgtctctctctcttcctctccctctctaatggtagattacagttctcaaaattcttctagattgactaaaatcacaagcccaagatgtcagttcagataagtcagtcaatgttttactctttgatatgtattgttagtttgaagcaagtattttcactgaattttatgttctggggtattataaatcagaaacagtacaaagaaaatgacagcattacagggaaccaattatattagaaaaatagagaaattaatgtaagtttagattgcaacagatattaatatggtatgaagtaattaaattggctatattgcccacttggagtagcccacttcccactaaattttcatgattctgataatatgttcactctactgcatagtctgagaaatttgaatataagatgtgagaatcactaatttagataaacactttgatattgaaatactgagga

SEQ ID NO: 39606 - DNA, 2682 bp, Bovine  19866880602361
  misc_feature (1)..(1): n is a, c, g, or t
nccggtttcagtataataagcattcacaatatctaccatagggttgcagagagtcagacaggcccaaatgactgaacaacaacaattatttaaaactcttatcattagcttcacacttttttctgatatgttggccctgaattaatatcacatattgtttttggaaacttagatatttgattccatttcataaactttacatatgcacatttataattttcttcatgagaattgtcaagtaattcttgtaatagggaatagattgtaaagtattcaaaattttatgagttataaattttcattctgaaatttctagcaaaataatttacaggacacaaattttcatcttttttaagaaacttgaccagattagctaagtgtaccaatatctcaaatggtttcagaaaaaaaaatttgtgtccttccaaattactggaccaaataaagcaaaaaaagccatcattttttgtatctgtttctcatagcaaaattttacaagtgaacattactctttattataattttatcttttatattcatttacgactctagggaataactttcccatatacaaaactgcctataacaagattggcatgaattgctggctgctcctttcaattccaaatgactgagattttccaacagaatattataaaatgaaaattagtttacaataaaaattcaaccataaagagacctgaaaagtgctttttcatctttagaaaaaaatgtttcaagttagaaagttgaagttaaatatatttaactgtggcatttttttcccttccaaatgctgacattctaataaacatgctgtgtcagaaatcatcaaaagctaactactagttaagagttacaagacagatgcctaacactgttagttgaaattagtttgcaatctagtctcatttgtttatttctatttaatatatatgcttcctacattcttaatcatttagtaagaagacttcttaggcctaaaaaatgtgaataaaaatttataaaacattttgaaatatgcatctattttaccatgatgatttttacttgcaagtattttttctatcacagttaatgacatttttatcacatttgggacaatatgttagcattataacaaaacattcaccatgcaattacatttcataaagtccttgagttccacaccttgagtttaatttctcatctttcctaattctaagcattcactggtttacatgctcatagctcagttggtaaagaatcctcctgcagtgcaggagacccctgttcgattcctgggttggaaatatccactggagaagggataagctacccactccagtattcttgggcttccctagtagctcagctggtaaagaattcacctgcaatgtgatcgatccctaggttgagaagatcccctggagaagggaaaggctagctactccagtattctagcctggagaattccatggactgtatagtccatggggttgcaaagagttggacacggctgagcatttttcactttcacttttatgtatatataacttgaaaatttaaaaatagatgttaaaaataggaacgtaaaatgtaacttgctctttgaaagcagaaaataatgtattccattaaacatctgggtaattttcatgctttatgcaaattagttcaaaagtaacaaaagtagagaaaatgtgagtagatgactatttcaaagtgcaaatgaatgcagtttttttacacattaaggaatgtgtgcatacacttattttaaaaacctattacacaatctttaacagaaaacaggattttcatattttttgctacataactataggagatccaacaataaaatactttcacctggaaacaggatgaaaaatatgacctaaatcatttcaaacatacaaaataaagagcagtatgggatcaaagcagaaacaaaatccagatttaagaattctacatagtattttaatattgcagagaatataaataccattttattttccattttaatatttgatcctttcttcaccaaccatctctcactccaaaaggaaataactttgaggagttccactgatcactataactttactttgtaaaataagtgttaaattccttatatcctacattaagtcttatatatcgtttttattttattctataaatgtgaaaacaatgcagttatgatgcattttgaatgactttaaaactgatatccccaaatgatattcaacatgtacattctaaattatctacatcttaaccttatgtgatacatatgtatcacaaccagaataaccgcatacattagactatatcattataatcttaatgttcattttttattgatttagaacttaatgtttccaatattgacttttcttggggtaagttttcataaaaagaatattgccttgaaaatcagagaaggcaatggcaccccactccagtactctcgcctggaaaatcccatggacggaggagcctggtaggctgcagtccatggggtcgctgagggtcgaacacgactgagcgacttcttttcgcttttatgcattggagaaggaactggcaacacactccagtgttcttgcctggagaatcccagggacgggggagcctggtgggctgccgtcttctggggtcgcacagagtcggacacaatgaagagatttagcagcagca

SEQ ID NO: 39607 - DNA, 749 bp, Bovine  19866880823542
  misc_feature (1)..(1): n is a, c, g, or t
nagccataaagcttttcgctgcaaaattacttttggccacatttgccataccattttctcttctttctgtccatgccaatctcttccttttgattcttagataactttccacattagagaaatattctaatttgtttcataaaaatgaattcccagaaaaatggaaatcatagaacacagaaataagcttactaaagtttactgcaataatttgagttggcacagacatcagtcattcttggtccttaaacagtgagatggggaatcaaccaagggattggatgagctccagtttccatggcagggcaaaagttgaaagtgatctggttatagagatgccaaggaatggggactacttaaacaccatgtctgtagcagtgcattactggccatactttttttctaatccatgatggacagaagcatttgtaaaattgaacggaaatcaattactaaaaaaaaatggtcatgcatttaaatgtaatggcaatgtcaaaatgctctaaacttttccaaatacttatattcatctgctgtgcttaatcccgaggtagaaatcagtacaatgtcctgcattagttcatgaaccacaacttgagtagtattggtctataaaacatattagtctgaatcagtgataagtagataagaaagctcttttaaaaaaagtgaacaaaaaaacaaaacaaaatttttgattttgtagtgcttgccaatttttcataacaacctccatccatggctgattt

SEQ ID NO: 39608 - DNA, 1413 bp, Bovine  19866880964065
  misc_feature (1)..(1): n is a, c, g, or t
nagttggtgatggacagagaagcctggtgtgctgcaatcctagggtcacaaagagttgaacatgactgaatgactgaactgaactgaagtgatgaggtatctgaaatactgtcttttcccttattgtatcttcatttactgtatcaatccagttcataatcacttcattgatgatctatctcctagttcactttagtcaatgtttaagcagatgttaggttactagttataactatgtttctttatatagcaattgtcactcctcaaactgctacccctactcttgcttaaatagtgtttccactgatgagaagactatcatagtgaagagtcctcagcatcacaacaggatcttcagtgtttccattaataattatctaagtaatttacttaatatttccaagactaaaggtcttcaactttaaaatagcataagtgatatttcattcattcatttttcaaaccatctagtctttcaaacatacatacattcaataaatatctattgttcactgaagtccagagtctcaactataagtaagagataaaataaataacaataaaacttcatttacaaagaacactattctcaccattcgtatttttgtttatatttcaaagcaaatcaaacacagacaaatgagtttaaatatagtagttcaagaaaagtatattatcaaaatcagattttcttagatacccatttaaacctttatcctttgtccatctaaaaacagtatttttctgacatagcaattaaaatttttttcgtttattagataaaaacaataaaaatgtactcattatggtttctccagacttacttccctagaatagttttgtaggaaacattaaagaaaggatcatttgggggtgcttaattttcaggtgtgacaatgactaatacaatctttgttttaaacaaatttttcttgtccttgccaatgcatactttaattaaattgatatcaatgaaggtaatacagcataaaacattacagtggatttaatgttcactaacttaatgttcactatactatttagattgggataattaaacctggcatttttattaaagaaaaaacacatcaatttaagatttatctttaatgaatttatttggtagtaaaatctttatcattaaatatttaaaagagcttatgaatatattttattccctcaaatatactaatgaatttttaatactaaacaaatgttctgttttatttcttttttctcttcttgctctgtgtatgttttatttcatctttccaatactctttattaatgtttaaaattgatttcaacagactgtttataactcataagaaaccttaatgtggacatcttttcttttttttttctgtatagatgaaatagtaaatcctggcttcacagactttaagactaaag

SEQ ID NO: 39609 - DNA, 1295 bp, Bovine  19866881310321
  misc_feature (1)..(1): n is a, c, g, or t
natgaatctagattcctaactatgtaactgtttctcaagcattccttttagaaacatttttttggagttatagacaggaaaacattttgaaacaaatgccatcattttactcacagagcatctaaagcttctatgatacatgtccgtgtgaacttgaatttattctccttggcagctgagagtggaaataattttaatatatattacaaagttattcctcagagctcataaaacaaaggacagaagatttttttctaccagtcctttcatttataactttcaattttctgcatttctattatgattatgatgatcaattcttctataaagaataaaatgattattaaaccttctaaatgaaatctcaaaaattaacatgcctcttaaaaactcttaacttcacattatttgtttttcccaattcttcttgcatacatttcattgcagcctactcctaaaacacactttcagtaaaatgtattttttctaccatgaacttaattttaaaagtttgcatttaaaagaagacaaattaaatacagcagaatgttaatggtgattcttctttcttgttgatatttttgacctcttctcattcttttgttttctaagttctctataataaatatgtattactgttattatcatgaaattcaattattaaaatgaatctacgtcatcactataatgctcaacttgaataattgaataaacttgaaaatttttctgttccttactattttaagcattctttttccttaaataggttatattcaacttatctcttttacttcatgtcctctcatacaggcaccaagagtgagttaaatttgtcagttttttattagggagatatctatgcaaagtgaaataggacagagtcagtagaagttggatagctctgggacctcaaagcagatccaatcccaagtgaagagggtgggagagattgttgggtgcaagcatcctagactgtggagtactctaaagacaagccaggaaagtcattagggattatttggattctgtcttcctttttcttcccaaatgaaatgtacattaatatcccttccacactgtcattggggggttgcctggtggctcagtggtaaagaattcacctgcagtgcaggagacagagacccgggttcaatccctgggtcaggaagatcccctggaaaggaaatggcaacccactccagtattctttcttggaaaatcccactgagagagaagcttggtgggctacagtccttggggtcgcaaagagtcaggcacaaggagcaacaagacaa

SEQ ID NO: 39610 - DNA, 793 bp, Bovine  19866881449261
  misc_feature (1)..(1): n is a, c, g, or t
ntgagccctttgcattttatttacattggaaacactcatattttgaatacattagaagtatttttaaacattacacaaattaaaatttgattttattaggaatgttgatgttatataactttaagtacaaaaaccttattttagtattttaaatctttccccaaactgaaaattttaaaatagtacaacttcatttagtagaagaataaaataaaacatttttaatatttaaaataaaaatatattttgtctctgctacttatttttaagatttaactgctcttttttccacaagagaaattcagcgagaagtcatgaaaagtcataccaaaaatcaatatctctttttaattaatcagtagaaaattagttaactgaatttggggaaaatactgttgagggtttttatcctctctctttgtcattgccatatttttaatgttacagatgaaattaagattttttatataaatgtttagttttgacagatttgttttatttagcacattttattcactctggtaaattttcctttcactctcctaacgtagtccatgcaaagccccataaataaagtggttgctattttcactggcataaaaaggtattgccttgaagtggttaatcaaggtttcaacataaaaccacatacacaaaattttcagaatgtgaaaaaatatgctgtcagaagtgaataaagaaagaagtattgtaaagggatgtttacttttatgtctactgcatacagagcaacatgtttgagtaaagttttgaaggtaaactgaattggaat

SEQ ID NO: 39611 - DNA, 1597 bp, Bovine  19866881674580
  misc_feature (1)..(1): n is a, c, g, or t
ntcaggatttgaaatagctcacctggaatgcaatcacctccactagctttgttcatagtgatgctttctaaggcccacttcacttcacattccaggatgtctggctctaggtcgggtgatcacacccatcatgattatctgggtcatgaaaatcttttttgtacagttcttcggtgtattctttccacctcttcttagtatcttctgcttcttttaggtccataccatttctgtcctttatcgagcccatctttgcatgaaatgttcccttggtatctctaattttcttgaagagatctctagtctttcccattctgttgttttcctctatttctttgcactgatcactgaggaaggctttcttatctcttcttgctctttggaattctgcattcagatgcctatatctttccttttctcctttgctttttgcttctcttcttttcacagctatttgtaaggcctctccagacagccattttgctttattgcatttcttttctatgggaatggtcttgatccctgtctcctgtacaatgtcatattaggagataccaaatgaatgaatgttacctaggataggtcaattactgttaaatattttaatcaactgattgagaagtagagggaaatatgttgattaccttaacagatgaggaaaagtaaaggaaattgcctattctttgaataggattatgatactgtactttcttgaaatcagagctctcttttcacctataaaaatcagatttttctaaagaaaagaaaaaattgttaatgaaatgaccagcaaatctatattttaagtaactattttttcttttctcccatacacatatccgtgctccctctagctctaacagtctgaaataaagtattgaattggacaaatatttcttaaaataaaaatacctagaatgattaaatattttgggaaatatagaaactatataaaatatgttatatcttacaaaaacaaagcctatgtaacatattttagaactagattttctccagagaaataaggcccaagattcctttttattaggcaattaaaattgaaagtttttgaagcacatttctggattacagtgaagaagagaaagaagaaggttgaagctaagccaggtacagtgatttataaatatcctatcgtacttcagttttgcaacaaaatgaaaactaaggagacattacaccagaaattgttctgagaatatgagcctttgtgtctcaaagtaagtgaagtatgtattttcataagatttttagtgctctgttaggtatagagaatcagactgtttaaattgttttaaaatgtgggaaaacaagttcatatattttactttgtgacagatttcaaacatatttataaataaaaatatactaaatttgagtagaatatcatttttttctagaattctagttgataaacatgtggtttgataatgggaaagtatcataaaagagtcattagtaatattccaataagtttacatttgtataagaggacattatttagacactggaaagacttgactcatttcatttcattattccatattatatatctgtcaagaagacataagatataact

SEQ ID NO: 39612 - DNA, 1808 bp, Bovine  19866880384695
  misc_feature (1)..(1): n is a, c, g, or t
naacaaatgtcacacttttcctactcccatgaatatactcatacaatcctaaccctagactgtccctttcccattgttcttatttagaggaatgaatgaactacgtggccatcagatagtctactgattaaactttggttcagcattggactgcaagaatgacttcatcctaacagataataactgatacagctagttagggattactatgggcttgctttacagatggcaaaactgagcatcagcagaataaataactcatccaaggtcatagagcttgttgatgggctgatgacctctttgtgatacttatttaaatgaaaattgtctttctcaaaaagactgtgattttttaaaaaaatcttttgactgtgctactgggcatgtgggatcttagttccccgactagggattgaactggcaccccctgaaacggaaatgcaggatcttaaccactggatcaccagggaaatccccagactgtgatttttgacattcgtgattttgatatttttggatatctgatgatactctctacacagagttcacaagaggttacattggtcgttttctgatgctcacagtgacaagtgaggtagaaagagaggagaggaggggagatgctttgctcttgacccttggaaagtaaagacaaaagaagtgaaaaatggtccaggtcttaagatggaagatatttggataaattaagaaaacttcatctgaaactgtacataacagcaactcctgaaacaaatagtctctgttttaataagcaacacaaaaaagcagtgtgaagaactagacgtttaacaaacctcccatctgtaatgaaccttcactgtaaaaggcttatagtcattatcggttttacccactagaggtcagcaaatccgcataatactttgccttgaggtctgcatgcaagtgtcagatttacaatctggtgagaatagcatttttataaagcatatcagagttactgatccttgtactagaagcaaaacacaaaacattgtaaaggaatttcccctgcttattcctcactcatcttttagaaaaaaattccagatagaaaggcatcagatgggacaggaacctttttaacatcttttttaacactttttaacataagctttcttctttccgagcagattttgataaaaaggaattcaagtttgctccagtcccacaggataaatgaaaaaccactgacccgattcattccagaggctgtaagaagggagtggattttctccggggtgtagccaattcctgtcctgtttccatttctctccagctacattccagtccaaccactcacagaaatagaggaagcagtgggtgaacaaagggtttgagaatatcctagctgtgtttttagaatttcaggcacagtactagttttctgtatatccctcagtttacccaccttttccatgagctacctccataaaagctttattaaggacttatgaatgttttctgagaaggaatcttatggagacattttcatcagctcttacaatatttctgctcaacaagcatcacaaagtcataaaataggactggaccttaaccggcccaaagaaaggaatttggatttgtagttgtgctagtgctgggacttcccaggtggctctagtgacagagaatctgcctgaaatgcaggaaacatgggttcgatccctgggttgggaagatcccttggaagagggaatggatgcccactccagtattcttgcgtgggaaatccaatggacagaggagcctggcgggctacagtccatagggtcacacagagtcaggca

SEQ ID NO: 39613 - DNA, 790 bp, Bovine  19866880398502
  misc_feature (1)..(1): n is a, c, g, or t
ngacagaggggtctggcgggctgcagtccatgaggtcgcagcaaagagctgaacacagcacagcacgcatggatatcataaccagaaaccaagatcagtggaattttagctggtagccacaagtcttgaagtttgattttaacagctccttaccccctgcagagagaaaggcaggatgagaaaactggctcttgactaagtagaggattctgaatgttactgaacagaagactgaatttgctgttccccttcttggttctcagaatcacacactgcccacctccccaacaaggagactccagcatcggggggtaaggataagagaaggtgagagaaaacaaggcagacagagcaagaaaaacatcagccatgttgccaaactaacaactaaatccatgacacgaaagaaggaaactaatagctaaccaagacagaatggaataaacaaaagatcacgtcaaaacagaataggcctcctccctttgacacaccaaccaaacaatataaaagaaatttaaactataactaccttacaactatatgagagcctttcattacgaaagttagaaaatgaatggtgactctccatgactgaaatttcagaggctgtttttaatccaaatgaatattttaaagtgtgtggacaatcaactgatttttcaacgaccttgaaactatgcgatgttatcaaagtgaggtttaaaataaataatatttacattttaatggttagttaaaagttaagtcttccagaaacataatcaacctatcaagcccacaaaaagaaaat

SEQ ID NO: 39614 - DNA, 1764 bp, Bovine  19866880489388
  misc_feature (1)..(1): n is a, c, g, or t
ntggacagactcctctcccgagtagctgtgagaacacaagaattcagctacaaattcgcctgcagaaatgaatattttgttgctcttgtgcatggcgggtggggtgggagggaagcaactggactggaggcctaagtgaatctcagactgtgagtcttcaggtgaggctgtacaagtatgggaaaagtgtgtgtctgaggattgggggaggcggtatgtgtgtaaacatatctgtaagacagcccagtgccctccgaatctgtgagaatattcatccttatggtttgtcaggacaagcaggaaaggagtgagcacaaaccaaactaacatcaagatgtgcctttctgttggtgtggccctgccctgtctgcactgcacaaatgtgaagacgtgtggatttgttttgaatgattgtatacaattgtttaagaatccagacaaagaaaaacgttctcatatttccattaaaccttcttggcttgagacttctgtttattcttgccacctctgcttaatctcttctgcttctgttaggtccttgctctttctgtcctttattgtgcccatctttgtgtgaaatgttcccttggtatctccagttttcttgaagagatctctagtctttcccattctattgctttcctccatttctttgcattgttcacttaagaaggctttcttatctttccttactattctctggcttgagacttaggttcattagaaattatctgagtctgggatttcccttggtggtccagtggctaaaagtctagctcgaaatgcaggtagtctggttttgatccctggtcagggaactagatcccacattttgcaactaaagggcccacatgccacaactaagacccagtacagtcaaattaattaatttaaaacaattatctgagtctgggctctctcctgactccacactgtatatatataatcttgttatacctttgaggtatcacttacccaacaggaaacagatcccacagccaagtctctggaaagtactggcgaacctgagactcttccggctgaactggctggaatggagctggcttgaaagccattggacgagcttcattcactgctaaggagaccaggaataagggaaaaagcagaggtgtcactcaattgtgtcacgcaataagtcaaagtagagggaagacattcagagggaagcggaaaacatgcaagtcatagatgaggtggaaggaccactgaggaactgactagtcacaaggctattggggaaagtgacaggtggggatgtttgcccagagaatgaatagataagaacttcaggcgttcaaaagccctccccatagaaagagagtgaaatccttggggaaacgtgcctgcatctataacccacaatccattatcatcctggctagaggctcagagcaagaagaggaggcaaagagggagctttcagagttccatgattctaaatatttcagtgaatcagaggcagcttacctccagccatcgtatggctgtatcttaaattctggtgactgcaatctattggcctcttgattttggcattggacagtattttcaggcccatgttctgataggcaccaaagggaccagagaatgaagtgttagagggggtcctctcccttactacaagggctactgcttagaaatttcaccctcaaagggttgaaccaacacattctttgcctactaattgtgagacctataccaaccaccaagactggttcacttctattccagccagcatgaaag

SEQ ID NO: 39615 - DNA, 1291 bp, Bovine  19866880560622
  misc_feature (1)..(1): n is a, c, g, or t
ncacagggaactatatccaatctcctgggataacccataatggaaaagaatattaaaaaaagaatgtatatatgtgtataactgagtcactcggctgtccagcagagattggcacaacattataaatcaactgtacttcagtagaaaaaaatgttttttaaaaaaggttgtaaggatggattttagtggacattatgttacagggatcataaaagaataaaacctagaggtcttcaagaaatggtgtcagctatctgttgtgaagaatggtttctggttccaaagccatggtggcctgtgtctcctcccacccaccccctggtcctttgcagacccccaactggaggaagagtcatcaggattctgggtaccatccaacatttgacaaactgaaggatgctccacaaagtacttacctggactcttgaactatgaaagaagcctctccttacagagagatgtaaggattggaccaaggctaaactcctctaacttctatgttgttgatgatttttattttttctcttctttagttaatagggaaaggaaatttggagatggaggggcagaaacacctgaagtccgggatgaaaagtgagtgttcatgaatctcttgggagacttaaactttaaatttccagttgagttggtttataatgcttttcagatctcctttgtggtagtttccttctacttttttgtatattcattctattaatttttgagagtttgatattgaaactccaactgaaaatcttcatttatctacttaaaaatacttgcaatatatagtggaactacatgtaacttcgttctgtgttttccaagtctcctgtaaatttacattacatttgtaatgtaaaattgtttttacattaattcaacaaacaaaaaagaaagaaagaaaaaaaaagagagacaagaaaaaactttaaacttctagaaaacagttcttatactagaagcaagagcaggagtagcaagaacagaacaataaccacagatcagaaaaatgaggaacaacttgcccgtggctggctcagggagaagtgcagacacaggttggatgtcattggtacacataagagcgtgtactcttatgcctgaagatcccctcttctctttcaggactgaaaggctccttctctctcccactggtcttcaactctagattagcccctgatccttccctggtggtctacgctgtttttcccaatggaggtgtcatagcagacaaaatccagttctcagtggagatgtgctttgacaatcaggtaaaaggcagttaagg

SEQ ID NO: 39616 - DNA, 2714 bp, Bovine  19866880570124
  misc_feature (1)..(1): n is a, c, g, or t
naacttgagttatgttgataatatttctcaaaaatcataaaatcattgctggaaaggactatgtgaacaactatggtttattttgtacccttaagtagataaataagtgcagattgttgttgctgtaaataacataataaaaaacaaggtcaagagtttggggctggggtcagaagactagatttttgatccagctcatattttcttatcctgtgactttgaaaaatcatttgactttttgttttctcatatgcaaaattggaagcagaatccttaccttggtcacctcgcatgattattaatcaaatgatattttgcaaaagaaatttgaacaagtaaatactgaagaaggaaaagtgtccccagtcttcaaagtcatccactttgaatttatctgtggttaagatcttaggctttcccttgtcacccagtaattgaatggagcctcttgatgttagcaggtgttcagaaaatgtgagtcatgactaagtacggatcataattgtatttgcactatcggttgcctacctttagtgtgggaaatcaagattattcttgtatgcatatgtggttcttagttgtcctaacaagggaacacaagctgttataaaggggtgggttttagttggtatttctggtataccagagctcatcctgcggggttaactaaaaccaacttcactgaacttggttccatgcttccacagtgcccaggtctgtctctgcttttcccccaccccaaagctccttttcccttgtccatcctcaggtaattggatcatgctgatctataaagggggtgatgaatatgacaaccactgtggcagggagcagcggcgggcagtggtgatgatctcctgcaatcgacacaccctagcggtgaggcacctcggggcctgggagcctagagaggagatgaaaggactgacctgaggtgggacagaatgtccagagggaatgagataactggggtggatgagagaaaaccagacatccagggacttccctggcagtccggtggttaagactccccacttccagtacaggggacatgagttcgacccctggttggggaactaagatcccacatgccatttggtagcagccaaaaaatttaaaaaaccagaagttcagtttttccctgagtcataggcgtccatcttccatcatacatggaaaataagttcttaaaccaggaggaagcaaatgtttaggggggttttgtgggtttgtgctccttttcagacaagcgtcagaagcaaacaccttaccacataaatgttgtgtctgtcctcttatcgtcaggacaactttaaccctgtgtctgaggagcgaggcaaagtccaagattgtttctacctctttgagatggacagcagcctggcgtgttccccagagatctcccaccttagcgtgggttctatcttacttgtcacgtgagtccttcttcctttatcagtccaagcctttttttttaactcatcaatcacttggaagtatatgggtccaaatagcgtgtgtgcatttgtatgctatattataattggaggggaaagaagtctgtgaatatcctctttaaactctgcaagtttaaaaaaatgagacttaatgttttatccccaataaatatatgcatttggagatagggttttttccctactggaagactagacagtttttattactctcccattattagattattagaacttttaaagaaattggactgtttatctaatggtgactgttctcaaccctaaatgagtcacacactgtcttgcttttttctgatccaaaggttttctcaggcaggcagcactctaactggttttctcaggctctaccggcccccttttttttttcaactgactactccttttttgtttttccatttttatggaacagagcttaggaaacaggtaacaatgagctttactgattctcagtttttgagtatggatgtctttctccctcacaggcttgcatcactggtcgcagtctatatcatcggggggttcctgtaccagcgactggtggtaggagccaaaggaatgggagcagtttcctcacttggccttctggcaggatcttggaaacctggtagcagtaagtaacagggcagctgggagacaaagcagatgaccaaccatccgtcctggtttgcccagaccgagggtttcctgagacacaggacttttgggtgctaaaaccaccccaacttccagcaaaccaagacaactggttgccccaatacagggtaataagcaacatagcaccttaatgtctgaccttccagactgactggaagaacggtactgttgctttgatttatgaatctgatccagctatttgggggcctacatgaggagagcgtgtttccccaaattcagtttaggccaatcactggagctttggggttttctcttcattatccctggagaaaactagttcttgccaccttctcagaccataaacactgtgcccacctgaaagttgctgatttcacacgatcacttttgttcttctctctataggatggctgtgactttgtatgccgctctaaaccccgaaatgtgcctgctgcctatcgtggtgtgggggatgatcagctgggggaggagtcagaagaaagggatgatcacttgttaccaatgtgattgcactttagatgtccagcttcttcagcccccaaaccaaagcgtcctccggcagat

SEQ ID NO: 39617 - DNA, 844 bp, Bovine  19866880584033
  misc_feature (1)..(1): n is a, c, g, or t
natcattgctaaacaatgctattaaggtgatgcctttaaatttgttctggtccctgagaagagtgaaatgtatgagttgtgatgctcctatggattcctcaagtcctggtgatataactttgagaaggacagcagaagcaaaagcttttgaaacctaacgataaattaggtgtttcttatggttaagaaaatagcatgtccaaaaaactccactatgtcactaaaaatgagggaaagttatttgggacagatttcagaatttgggggtgaaggaggaagcagaggaaacaataatattgccctagaaaagatacattctggtgaagattaaccaagggggaagttagagttagctgactctgggtgatggctactggagtgtttgagtgtctctgcctctgatcctacagggtggggtcgatgatgaggtaacgctctctgcctatatcaccatcgctctactggagatgccgctgcttgtcaccgtatgtaccgccactcccaacctgtacttccctctaatgtaaggatgaaactcgtggagctatgaatctctgaggaaaatgagttgttattttcacattatttaatattagtatatttcactggcgcataaaggacgatagatcccttgggaagctgcaaagaaaattaccctctggtcaggactgtggtgttgtgcaagcacattggggcattatatctgtggctagccaggggacagttcattagcctggttcagctagcctaaggtcttccttcattttcagtaagtcagaaacagaaaaacaaatttcatatattaatgcatatatgtggaatctagaaaagtggtacagatgaa

SEQ ID NO: 39618 - DNA, 2280 bp, Bovine  19866880628813
  misc_feature (1)..(1): n is a, c, g, or t
nagaaatatgggtggagtcaatatttacaaagtcctcaaaggaaactgacatggtgtatgacatatagggtgccaggctcatacacaaagaaaattgtttcctggcaggccaaggatcttgggaatttgggcgggggaggcttctagaggagaggaattcctctgactttgtagttactgcaggtaataacacaagttttcagttcagtcgttcagtcgtgtccagctctttgtgacccagtggactgcagcatgccaggcttccctgtccatcagtaacttctggagcttgcgcaaactcatgtccgtagagtcagtgatgccatccaaccatctcattctctgttgttcccttctcctcctgccttcaatctttctcagcagaagagtcttttccagtgagtcagttctgcgcatcaggtggccaaaatattggagcttcagtttcagcatcagtccttccaatgaaaattcagtactgatttcctttaggattgactggtttgatctccttgcagtccaagggattcttgaaagtcttctccaacaccacagttcaagagcatcagttcttctgtgctcagccttctttatggtccaactctcacacccatatatgactactagaaaaaccatagctttgactagacggacctttgtcaacaaagaaatgtctctactttttaatatgcttttaatctgtttttaaatacgtcatagcttttctttcttccaaggagcaagagtcttttaatttcatggctgcagtcaccatctgcagtgattttagagcccaagaaaataaactctgtcactgttttcaaattctagaggttcttaaaagtttaaaccaaaatactaatttgaaaagatatatccaccttcatgttcacttcagcattatttacaatagctaaattatggattcaatctaaatgtccattgatagataaatggctaaagaatggcatattacttggctaaaagaaaaaatgaaatcttgccattttgacaacacgagtgaacttagatgtattatgctaagtgaaataaatcagacagagaaagacaaacactgtatgatcttatatgtgtgtgtttgttgttcagttgtgtccaactctttgtgaccccgtggacttaaccctacgaggctcctctgtccatgggtattctcctggcaaacccactggagtgggttgccaattccttctccagggcatcttcgtgacccaggaatcaaacccaggtctcccacattgcaggcagattccttattgtctgagccaccagggccaatccaacttgtatgaggaatctaaaaactcataaatacagagagcaaactggtggttgccagaagggtgggtggggggttgggtgaaacaggtgaaggaggttaagaggtacaaaactggttataaaataaatgtcatggggacgtaatacatagcataaggaacatagtcaataatactgtaataattttgtatggtaacagatggttatgagacttactgtggtgatcattttatatttaaatgccaaatcattattatgtatacctgaaactaacataatattgcacatcaattatacttcaattaaaaaaggaagattttcagcaatacttctgctttgtattaaatactaataaacgttctttgaaaggctgtactagaacagattaaaatttataaatcagtctgtttacccacatttgcattgaagtctagcaatattcatgactcatagatttattaatttatatcatgaattattttattttctagagtgggttgccatttcctcttccatgggattttcctgacccagggatcgaacccgtgtctccttcgtgtcctgcattagcagatgaattcttaccactgagtcacctgggaagctggcaaattttacctcaagtcctaataaataaccaaaattccttcttcttatttctctgactttggaaaagtatgaaaatctgttttatgtgtttgtgaaacagtaagcaattcaagtcaggtttgagtgaaaatgatctttctggctcatgttctctactggtatgtcctaaaacctttgcattattccatttctcctctatctctctgcttgagggaatatgctcactcagcactgacccatttttttcactgtcttctatattcccagaactgtgttcggtgaacaggtggcagacatgattaagatacaggtctggctttcaaagagctctgactgtacagaagatggggaaaaaacaattttttaagg

SEQ ID NO: 39619 - DNA, 1430 bp, Bovine  19866880629848
  misc_feature (1)..(1): n is a, c, g, or t
ngcacttgagagcagactagtgacttggggcatttgcatatgaagtacagagtactttacttgtgctgggattagtttttcctctgtgcctcaaacctaggatggggggggagagggagatctcatgacacttatgatctcactgtttttcctgtagggtcaagaggactctagccggggttcagataattccagttacgatgaagcactctctccaacatctcctgggcctttatccgtgagagcagggcatggagaacgtgatctggggaatcccaacacagctcccacccaccccagaattacatggcatcaaccctgtgttcctatccagtaatcctagccgctggagcgtagaggaagtctatgagttcattgcttctctacaaggtatcaagggcctgtctgccagaacctgggtcatctgtattgctttgttttcctatggtttttttgaggccatcccacagggctttgtagatggaaatgtagaggcctaagtatggtatgatgaaggtcccccagagaaggaaatggcaatgtactccactgttcttgcctggagaatcccgtggacagaggagcctggtgggctatggtccatggggtcagatgggactgagcatgtatacacgcacgcacttgacaagggatagttttctccagaaaggaaaaccatcctacccttctcgctattttgtctgaattttgggcccttagagatggcatgaacgctgattttcttggcagtgtcaaagaaaacactgtattttgctctctcctttcccttcctcaagttatctgagttgaacagcttagttggtggaacaccttagttcttttatcttggctctttttttaaaaaaatagctagttgctctggtttcattttgcttccatatcttgacatcttgggccactgtatcactggatttaggacaagtacttttggtgctaccatgtagcttctcatacataccccaccgtttcctcctaggctgccaagagattgcagaagagtttcgttcccaggagatcgatggacaggccctcttattacttaaagaggaacatctcatgagtgccatgaacatcaagctgggtcctgccctcaagatctgtgctaagataaatgtcctcaaggagacctaaggtggccctcttgcacaaaccagcctaaggcagacactccccaccgtccaggttataacctggtgccagcagagactccatgaggaagacagagctgtgctgtcttctgcaggaggggatcaccgagacagggaagaaccgtgcaagaactggtcgctggtgctacatggtggcagctttgacgtttctctgggttttattttttaaatcttctcaattctcacctaccctaatccaatctttggaaagaggcagtctagagaactaggactgctcag

SEQ ID NO: 39620 - DNA, 1637 bp, Bovine  19866880657094
  misc_feature (1)..(1): n is a, c, g, or t
nttttgacagtttatttatttagtgtatctttctagtttgcgtaactgagaatttttcaagagtaagtttaattgtgtgacaatcaagtaccagtaacaagaatcaacaactctcttgagccagggtactgttttaaatgaggattttgcacaatggccatgccagaaaatattgttatcagcagattcttgctttctctggccctcctccaacaccaaaaacagactccaagcctgtttatacagataataataattctagatagatattaggagacttaccaactcattcagggggtgaaagctttcgtccaacaagacaatacgaaatttcactgaaacagaaatattttccgtgagtcccagaaaccttatgccaggtccgtaggttagtaagacaagctattaaggaaccagaattcctttgactgggaaacacgcaagagaggaagatctttcttttgggaagttgtcctgactacaggcctctgtacctgtctgctctggtttatagatgggtttgtctgtctggacaaagaccaggctctcttcgtttttaaccaacactgtggtccgcttcttgaattcttgggttggtcctttcacttggatggtaaggaacattacctcttgactggttggagatcttgggagctgaaatagaagagagaccctgaaaacccactcatttcccaagtttcctctccaagtccctctcctacttctccctaggggtcttgccccttttaatttcactggcccattctcatcggagaaagctgtcatggacagaaattcatggacaggatgacctctgtcacttgtgaatgggaagacagaacaaaaggtggaggaaaacataacagtgagtgaggtcataaatgagattcacatctccttgtagatcagccagaacagtttttaaaaaatatttttgctcaatttattgtttttaatttttatttatattggagtatagttgatcaacaattttgtgttagttttgggtgtacagcaaagtgattcagttattcatatacatgtatctattctttttcaagttctttttccatttaggttattgcaggatattgagcagacttccttatgctatacagtagatccttattggttatctattttaaatatggcagtgtgtacatgtcagtctcaaactcccaatctatccctctgccggtaagtctgtgagtctgtttctgttttgaaaatacgtttatttgtatgattttttttttaagattccacatgtaagcgatattatatgatatttgtcttcctctgtctgattttcttcacttacgctattagaaaggaaactgcaatattttattggctggatgctgtaaggattctatacaactctgaagagatactggctgtacattcatggtgatttccacagtttcacgcttagaaagagtatgggatgatgtgttctgtgttccagtcagcccaccactggggcttatgttgaacattggcctagtatgttttattagtcttttttccattttcattttaaggagaagtcacactttccctttgtctagtttttactgtttttttttgttttgttttgttttgttaagaggaattttcttcaatcattaagctca

SEQ ID NO: 39621 - DNA, 995 bp, Bovine  19866880665538
  misc_feature (1)..(1): n is a, c, g, or t
natccccaaaggtgctgtaagaaccatcactgtgcttatagttcaactgtctttggtaacctgaagaagaagaatgtttgcatagatttaggaaataacagagacactggagaaggaatcaggcttttccttaaaactcattgagaaatcacagggaagctactattttactacaaagtctccaagatttgagtgatgccatttaattctgtggttgtattgtgaaacatcttgttggatgtcacagcaaaggtaattgctaaatcttaattgaagggacgtagatttgagttcaatggaggagatatttaggaaatcaactaatgtttttcctttgggggtaatctctcaccactgatgaggtagctgatggctttggacttgatcttctcagtgagctgtcctgtctcatttagatagttcagaacgtagatgttaggggtgaaaaggaccatattctgttctccacaaccatagggcatccggagaagattctgaagattttgcattgcagagcctagtatatcacctgaggaatgaaatacagaaaaaaaatttagaggaactcagttgattgatgttagggtaggaaaataaatgactagctaagtgagaagccaaatcatgtataaaggggaggatcagaaagcataagaggtgaagaaaaacaagaatagaaagagaaatgtgggaacaataaagtagatgttcaaagatgggaaaaatagtaaaagaccaaaatggcaggatatacttttctgatgagtcacacatctggtaaaaaaggattagtttcatctctagtagaaagcaccattatctagccaatatcttgaaggtgagagcacaaagagatgactctccttactctttagagtatatcaaggtttaagatgtagcacagcatcgattcagcccctctttcccactaatacacagtgtggttcttggtgctttctctcagtccaatgcctagacacagggacttcattagg

SEQ ID NO: 39622 - DNA, 1626 bp, Bovine  19866880699018
  misc_feature (1)..(1): n is a, c, g, or t
naaaattttgatagtaaaaaaaccttcagtaagaggtattccaattggcctcattgaaaatttgaagaaatgggcaaactactattaggacatattaagtagtttcttgttattacactcagcacattcttttgttatttttcctattagcccaatattttatttcatttaatttatttatctatgtattattttcttttttagtatttatttggctgcattgggtcttagttgcgcatgagggaatctagtttcctgaccagggatcaaaccccagacccctgctttgggaggttggagtttagccactggaccaccagggaagtcccctaactcaatattttaaaaggtttcacttattaatgtcgtttgtcacacagcaattaatttttcctaatttgtattcatcagagaaaatatagctcttccttcagaaactgtgttcatcttggaaaatgcaatgttacaacagatacaattcttttttttaaatttaaatttatttattttaattggaggctaattacaatattgtattggttctgccacacatcaacatgaatccgccacgggtgtacacgtgttccccattccgaaccccccctcccacctccctccccgtaccatccctccgggtcatcccagtgcaccagccccaaggatcctgtgatacaattcttataaaaatttgatatttcatttagcctgtgcagtcttagtgcccgtatatgtaccacttatgttaagactttttgaaatattgaaactagtttgaaaattcttattattgggttcataaagctcttcaatatcagggattttggagtacatcatttatacctatatattcatatgtattatcttccttaccaaaaaaaaaaaaggtgcacatgaaagagctcaaaatgattaactcctagataaatataagtttaatagaacccaccccactctccttgctctgagttgcccgtggggcccttcctggcccctggggctcacagaactcaccgtggctgctgagagctcagcttcgggcctcatgagcagcacactttggtccacggcgcggagggcgcagagggactgaggggaagcggtgactcgaaggtgggcctgggaggccgggaaactttgtccggggctgaagttcaaacccacctgtggaattggggacaaagtcagaagaagaaatttcctgattgatccatggattcaccagcctttcctggctgttcctcaaatttggtgcaaaatcactttgactttgttgatgtttggcgccacgtgagtcttgaggcctttgattccctatgtgtcactctgatattcatcagttgagccattatagtgatatctatttttataagttattaaatttgagactccactgtccacctttgatacatgatgaggtgttcattaactgtggctagaatgcaaatggttctagacactcttgtatttttctttggctcttttgtagtcttaaaacttggttgcatatttcccaacacttcaccataaaagaagggaacaaggtactgtgaactgggtaagagataatgcatggggattttgtgctaggagtcaagtgacatggcttctttctttctttttttaaat

SEQ ID NO: 39623 - DNA, 1457 bp, Bovine  19866880740877
  misc_feature (1)..(1): n is a, c, g, or t
nttttattgcttctttgtagcaacgtagaaagcgctacagtagacttagagaagcttaatgtaacttctaacaaatctatttgctaagctaagccacttcagttgtgtccaactctgtgcgaccccatagatggcagcccagcaggcttccccgtccctgggattctccaggcaagaacactggagtgggttgccatttccttctccagtgcatgaaagtgaaaagtgaaagtgaagtcactcagtcgtgtctgaccctcagcgaccccatggactgcagctttccaggctcctccatccatgggattttctaggcaggagtactggagtggggtgccattgccttctccagacaaatctatgtatgtgtcaaaaaacaactttcaaaggagctcagtactcctcttaagaagaaaaaatagaatatttggttcatagaaagttagaggatataagggtaaacacaatgcattaaactcttactattatatctcacaacttcaagttctatttccttctccactgtgaagtctagatcaaatggaagccaagcagatgtctccacatccttagataacatcagaattttatacagatgaactcaagcttaactcaagcttaaacctggggagaaatcatcttgtgattttcagagacgagaagactttgataaagtttttttaagccagagttcttagaggtagtcatccatttattgcatctactatttcttatatctggtacatctactgggcttccctggtgactctgtggtaaagaaatcacctgccaaacaggagacttgttttcaatcccagggtcaggaagatcccctggagaaggaaatatcaaccccctccagtattcttgcctgggaactcccatggacagagaagcctggtgggaccaagttcatggggttgcagtgagtcagacaggacttagcgactaaataacgttactaatagtcattagccaaaccaggcttctaaaatgactttgtactgatacaacagaaaagcattattttagccttgaattctcacccatgatcacttccttattgtctctgtgctccagtgcaaggccatttttccatgtcagtccccgtggagtcagacattgctcctgtcgctaggctgctcatctatgccattttacctgatggagaagtggtaggggattctgcaagatatgaaattgaacactgtctggccaacaaggtgagtgtttcatatggtaaaattttcaacatttaaaactagaagttactatcactatcaattattttctacacttgcgcattggggtcaaaggggttaaatgaattctccagaaattttcagcaaggtaatggcagatcacactaagaagccacgtcaagagaaaaacaaatatcatatattaacacatatttttgaaatctaggaaaatggtacagatgaactatttgcagg

SEQ ID NO: 39624 - DNA, 745 bp, Bovine  19866880787138
  misc_feature (1)..(1): n is a, c, g, or t
nactgcttctgcataaagtacctgcacatccctgctgaacactgggctaagcacgtgctctccatcatagaggaacgtgagacagcatggccaaataaggccaatattgttaaagtacagattagaaccatctctcagaggaggttatgatacatgtatcccctctatattcagtagtaatataaaaaaaaattaatacaattagtaagaggagattctttaataaagttgttttctcaaggcctttaagtttcttctcatttaccttttgttaaatagcggtgtcagcctcttcaggagagccaactctttctctgattctttacccttttctcccaccaggtcgcatgttttctcttctgtctgccaagattctctgactgccacagagaagagcagcagcagcagcaggccggtcctccaggagctgtggaggggggacatccttttgggacaaggagtgtgtgtttcggggaaagagggagaggatcggggaaagaaatagagcacatgaatgtgtaataaatgaataacactttttttttaaacctgttaatcttccacccaccacctattactttatactagccagttttcttcattatgatgatgctgggctttattttcttgtctctatttcaagtttttttccccattatctaatatacaggattggatgcttaagtcaggtttctttttcttttcaaaacttttattatcttttaaaaataatttcatttatttt

SEQ ID NO: 39625 - DNA, 1058 bp, Bovine  19866880804687
  misc_feature (1)..(1): n is a, c, g, or t
nttgttccctgtttggttttccctcctcagagatacagctgcaggacagagataatagggccaatcacagtagaggctgttgcactgtcttcataccagaaagtacaagtagaagagttactgtgagcaaaagggtgcggcaggctccctctcttttttaaacacattttcataagtttttgagacactggatttaattaaaaaaacaaaccaagaaacattatttataggtttgattgctttcatgctgttactctgccctacagtagtctccatgagagtctggatggaacttgctgctgggaactgttctgcagtgattatttggtcacaaggactgccatttggtctcagcctggagaggttgtacacttacttctcccacctcgggtcaggatggaaactgtgaaatttcccaggattacaaggtaccaaacattggctggcactggagtgacctcacagctggaactgggccctgggtcgtcatcttggttactggtccatctgcagctaatatacctaatccagaagtgcagtccattggaagggacactgaaatggacctcctgtgccaccagggttccagaagcgcgaagtctgtttaccttgtagtgggatatccttggcggcttgcttctcccacttgcagtcaaagctggcagagcttttctaactcctaaaatgttccctctaccagtatttctaaacatgttgcactttccttcacaggcatttggggtttttttggtgccctcctatctcctggaaagggaatggaagcagaagtgggacatgcagggctctgccatcttcggccctgggtgcaggctcctgccacacctgtccttgcttctggctcagggatgtgtcttcttgcccagcctatctccatggggagaggggcttaaacctctgatgcttccgcccttccatttaggccatgtgcccagaaacctggcctgatctttgtgtgacagggagcctgggccactgaagaggaacgtggctcccctggccacatgaggacggaatcaataagcagggggctttttagc

SEQ ID NO: 39626 - DNA, 1573 bp, Bovine  19866880823656
  misc_feature (1)..(1): n is a, c, g, or t
ncccccaggagcctggccgcctcctccaggacccatggaccctgggatgctagtcccactgcctccaccagcttgactgaggttgagggactggcctgaggccccagaggaagcctgagccaccgcaagggcctggctagaggcctgggagaggctggagacaggggaggccccaggagggatggccttctgggcagagccttgcatttggggtccttgggcagaggcctgctggttcctgacggccaagttctgcacctgaaagataggaagcaaaaggcagattgagaaacttggggatcaagggcactaaagtgaaagactaccatgactgagtcagaagcagtgacaacagctacagatattccacggccccctcagctgtaccctcacctgtacacacagagaaggtcttcccagagaggggctctcaagtcatatctgattctcagtctccttcattctgtacaaaatctgtcatcaagttcagttattttattccttcaagatgtctcagactttccctttcttccccattcattcaacatctaccaactactgcactggatactgggaatgcagagatgaaagacacaagcccctgcttttaatgagtactttctactcgagaagacaagaaaaccaagttacaccatgcacagatatgcacccagtgctaggggagtgcagaggaggaagagtagtaactcagacaaagcgcatgagggaagacatgctaacacaggcgatgtctgagctgagaaccaacagggtttgaagacacaggtaacaacaatgcaagaccactgagccaagaaagagcaccgtgtttttggaaatgataaatatttcattatgtttggggaaggctggagggagtggcaagaaatgaagctatgcaggtaggctgaggctagaaagaggccagatcttgaagggcttggaatgttaaaatgagaaattcccagcaccgagcacagtgcctgacagacagcaagtggtccagtgtatcaacggagagaagggatgacaagctcttaatgaatcacaggaagccactgaagaatactcatcagaaagaccacgatcaactctattgtcaaaaccattctttgagcacagccactctggaaaacagtttggcattttgtcctaaagttgaaatattcacacatgctgtaacccaggagtcccacaagagaagtgctcactgtagacaatgggaggcatgtgtaagaatggtcacagcagcacgagtcatcctaacaaaagcctaaaaaccaaccaaatggccaccatcagaagagaggatgaatgaactctagtatattcacacagtggaatattacatggaaatcaaaacaaagtacaatgacatgcaacaatacagatggattttgacaataagtcatttaatgaaggtattccccaaaggattatatacaaggtaagtaccttatagatttaaatacaaatttatattttttatatatatatatccacatggtatctggaacttgcttctaaatatccacagagaagggaaagggccggagaaatgaccacatgtcaa

SEQ ID NO: 39627 - DNA, 1210 bp, Bovine  19866880839071
  misc_feature (1)..(1): n is a, c, g, or t
ntttttccccaaaagagggtgaatacttaaactcactcaaagaagagagacggaagctccctggagggtcatttaattcctttttgctttataggtgacaaatgagaccctgaccttgaccttcacagttctgcaagacatcccagtaagggatctgaaacctgccatagtgaaagtctatgactattatgagacaggtgagtgagagcaacgttcacacagaaattaaattcttgatcagagatttatatttgaaagatgtgttgggccagttcattaaactaactgctctcatcagttcattttgtctccaccaagtctgattctcctgtctttatcttctacacaaacattgtagaaattacctattgtataattgtactattcctaatacaaagcacctgtaggatatctagttcttttttcttcagttaaaatcaactataggacaatatgaaatttaaataagtatgatatctaaactgctgcccttcaagagtttagggtaaaggaaagcataacataaagtataaagtatttgaagacacaaggcagtgagaacacatcaaatgaatgatgctggtgtttctgatacaattcttcccacaataaagattctctcactaacctatatcccatcgatgtttgctttccctctcactttgtttgactgtttttgtttttattcagatgagtttgcagttgctgagtacagtgctccttgcagcaaaggtaagcaaacctccttccagatggaatgagaaccactttgtctcccctcaaatctcctccataaaattctggctaaatatttttcatggatatcatactgctcaaggtgcaacttattgttaaaaaaaaaacctttattgaaaaggggcccctgatagtcaaatctcagacggttcatagaactgcaagttgaatcattttaagtaatgaatctcatttccactatactaactggatttcctctggcaatatgccacccagatctcagggaaggaatttccactgctccagaaacccatgtccatctgaactttctgtcctttccactatcacagatattggaaatgcttaaagaccatgtcaatgaaaactgctttgctggattccctgttccacagactcagatctccgtggaagaaagacaatttttaacatctctgaaggcttgttgaataaaccttttttttttttttttttc

SEQ ID NO: 39628 - DNA, 1268 bp, Bovine  19866880941444
  misc_feature (1)..(1): n is a, c, g, or t
ncacagacacagaagttttcaaaagcaggagaggggaaatgtaaacaagactccttaacatatatcacagaatctaaaataaggagaactggaaattaagaaacagcctatttcatattatcctttgaaaaatatatccttatagtaaataatccaacagatcagcttgataaaattccccttaaccctatgggaacaacttctgtgtgattctaggtatactgatgtagatggacttcacataattcccacttgaaagagctaattgctattttacgctaagtcctcaaacacatctccatcagcctcattcctagatgggtctctaaatgaatactcaccagcagatgggctgtccccacccaagggaccacccgactgattctcattcagtcctgtggtgaggccagtctgcaggggcttctcagactctttcaataactgagaacagcccacctgttccagaaaaaggtgagttatattagcctaactcctttctatagctttccccaccacttctcaccaccatgtctttgcctcgatctcagagttaatggcaaagtcacgcagacagaaccattttcaatatagcaatctagagtctctaactggcttttttcagattagctgctggagaagggcctcctaccccagctccctatcttgtccttttccttcctaaactgcagggaacacacttggaagcaagagacctgtgttctaagtcctgcttctgcaactcatggtatccagaaaagtctctcaacttctccaccacaattttcttcactatgaaacaacctaattagagacttccctggtggtctagtggttgagactccaagctcccaatgcagggggcccaggttagtacctggtcagggaactaggatcccaaatgctgtacaatgcccgaatgctatacaaaggggcccaaaaacaaacaaataaaaaacaaccatgacagccttaaaggtcacttttttcctttgcttctcctctccccactattttcagttcctggtctacatagtctttcttcttcttttcccttccttcttcatagctaatcctacaaacaacagaactgaaccgttctctaataattaaatagttctgagccttctgagtctctggagtttgaaaagacagcccaacagaccaagtccccatgtgaaagccccaccttctggccctgccctcaccgggaaaggctctgctccttcctggataacgaagccttcaatgatgtgagtgaggatctgggg

SEQ ID NO: 39629 - DNA, 1727 bp, Bovine  19866880951948
  misc_feature (1)..(1): n is a, c, g, or t
ntagtgttggagaagactcttgagagtcccttgggactgcaaggagatccaaccagtccattctgaaggagatcagcccagggatttctttggaaggaatgatgctaaagctgaaactccagtactttggccacctcatgcgaagagttgactcattggaaaagactctgatgctgggagggattgggggcaggaggagaagaggatgacagaggatgagatggctggatggcatcaccaactcaatggacatgagtttgggtgaactccaggagttggtgatggacacggaggcctggcgtgttgcaattcatggggtcgcaaagagtcggacacaactgagtgactgaactgaactgaactgaatcaccatctgcagtgactctggagccccaaaaaataaagtctgatactgtttccactgtttccccatctatttgccgtgaagtgatgggaccagatgccatgatcttagttttctgaatgttgagctttaagccaactttttcactctcctctttcactttcatcaagaggcttttgcttacacttaaacaatttgtttatataatacatttgaaaatcagttccaatacttttcttcatgaagaaacctttagttcccctatgtcctgaaagtcgctcatttctaactttttttctttccacctaaagcctgaaggactagagaaggaagtaatattcaactccctgctttgtccatcaggtaagactcattcatcataattaaaatgacattgactagagtataatatttgaagttcaaagtattttatataaacccttcctacactgtccctatgaggtaagacccgaagaaccatcaacccatttggtaagtgaggaaactgcttcttaaagaggccaagtaatttgatcaggggactattcttatcccatgaattctgagtctttatttcttaagcacctatgcaactatcaaaatgaccttctgactagtgtatgatgtggttataggttttaatagaaagtgggtagattcaaaacgaatattgccaaaggggatattttcttggatatttactaatacaacatgggatgcatatatataatacaattataatatacaatacaatacaagtagctgaattgctgaattcaagccactgcaacaccgagttttgcatagctaaccacattagagaatgaggctacggtacttcctgagaaaaggtttccatagcctgtaccatttgtcctgtcaatatttttttggtgtcgattctgacatcctatcagtcattccaaggaggaactaaagaagcttacagtaaaagatatagctttatccttgtggagaattccctagtttaaataaaaacatttatagaaacttagtacataagaaatttatcaatgcaatgtgttcttatctcaaactaatgtctaatcaacatcatttcttgcctttctcttcatactcacttccctttattttttgtcatgtcaagacttaatatattaataaatgaaatgtattctaaaaaacataattgccttattatttagccttgtttatacatttaagtgaacttactgcttactaccaaatccatcatagattttcctctatttctgagcttttcattttgatttctctctcatgtgtctagggataatcatcagagttttattaaaattaattttaattactcacataatgcaaaaaatactttctccttaaa

SEQ ID NO: 39630 - DNA, 1212 bp, Bovine  19866881096175
  misc_feature (1)..(1): n is a, c, g, or t
nctgaatcagacccttgcccgggagcattaagcctcctctccttgccacccctccagggagcacctgccttccccctccatacctggctgatgaaccaggcctcagcatccttccggttcttctcagcaatgacctcatattggcttctcatgtcactcaggatcttggctaggtcgatgcccggagcagaatccacctccacactgacctggccacccacctggcccttcagcacactcatttcctggaaagatacagcagagatgggcatgtcagggcccagagcctgctggccctgagccaggtcactccccagtaccccaggccatggcgggagaggctggttttcaggtgcagacctaggacccagcactgggggacagacagagtcaccaccatctgctgttagaactcttgagagccacaatccacactcagggtcaggtcaagagggccacaaatgtggccacagtcagaggatacaggctaaaaatgtccttatctggggaactgggctagggtggatgggatgcccagcatgaaacccacctcctcgtggttcttcttcaggtaggccagctcctccttcaggccttcaatctgcatctccaggtcagtcctggccagggtcagctcatccagcacccggcgcaggccattgatgtcagcctccacactcatgcgcaaagcttgctccgtctcaaacctttcagagaaaatagtcatagtcatgccagcatttcctctgcacctctgaagatctcccccacctcccctgggctcaaggtcccatgggggatggagagtgctttagaccagctagggttggtgagggaggcatccatttccctccatggctctgagcccccgaagggactgcctcccctcccctgctctggcttctgcagcccccaaagtagagacactcacttggtgcggaagtcatctgcagccagacgggcattgtcgatctgcaggactatcttggagttctcaatggtggcaccgagaatctgggaggcagaatgcaagaggttggcaccagctcagcatatgggcaatgcccacccactttcttcccagagaagcaaaggagtgtgtgtgtccccgggcccctggagaccaaagctccagcaaccccaggctgcctgctctctgggcagccttaaaatcagtccaggcctgagagctggaacaggacaaaattacta

SEQ ID NO: 39631 - DNA, 1584 bp, Bovine  19866881381052
  misc_feature (1)..(1): n is a, c, g, or t
nttaattaacagatatcaatggatatttatgattcagaaaacccagaaggaaagtatgatctaaaagagagaggcaggaatacaagtgagagccttgaagatggtgtgttgctagcatttaagacagaagaggccataaactaaggaacgcaggtctttagaagctgcaaaaggtgaggaaacaggtaagcctctagagttccagaaggaatttcattctgctgacaccttgatgttagcccagtaagacttctttctacagaactacaagatagtaaatttgtgtggtttttagccagccagcttcctacagaagcaataagaaactaatacaaaatcatacagagtaaaatatttctttggtgattattttcatttttcagttattttctgaattaaaaaatttaataataaaatgaatatattttactttagaaataaaatttaaaatatagaaacactataaaaaggattttaaaaattactaaaatgaacctagtattcttatttttaaaattagcttctccatctttggttgatggaagaaagttagtagccatttgctctgatgtaagaaatagctaaagtgtttagggcaatttaagagaaaaaaaataagaaatcctgaaaatacttacactctccttgtttaatggataacacatgggtttctgattgagcgatgcttcctcttgctttgatctgaagacagagggaaatacgtttattatcattttaaagggtagtcattaaacttacatatttataatatacaaataacatatttataatttacaaacaacaagaatcttactacttcaaccccaaagttacttttgtttactaaatttctcttccaatattttccaatttgtgtagtttaagtaataaacttcaaacaatatactttaaataacaaacatgtaattttacaatgttttagaattttcttactatttactacttatcttagatattgatattttaaatttacatattctttcaacatttattttaagcatctattatatgcaaagcaatatatagtgaagggaggtataaaatattggagaaggcaatggcaccccactccagtactcttgcttggaaaatcccatggacagaggagcctgttaggctgcaatccatggggtcgctaagagtcggacacgattgagtgacttcactttcacttttcgctttcatgcattgggagaaggaaatggcaacccactccagtgttcttgctggagaatcccagggacgggggagcctggtgggctgccgtctctggggtcgcacagagttggacatgactgaagtgacttagcatagcatagcattatctattgctgcctttatttaaaaaaaaaaaaaaacagaaaaaaattaaaagtacttacactctccatgtgtctggtactgaactaaataattttaagatttttctttttttctggcaataactctaagttgttattattcagttgctcagttgtgtctgactatttgcaaccccacgaactgcagcacaccgggcttccctgtccttcaccatctcacagagtttgctcaaactcacgt

SEQ ID NO: 39632 - DNA, 1565 bp, Bovine  19866881451003
  misc_feature (1)..(1): n is a, c, g, or t
ntgaaggacagggaagcttggcatgctgcagtctatggggtcgcaaagagtcggacataatttagtgactgaacaacaacaacaactcagacgactcaagactcgccttcatcagtgcttagaagggactccgttctaagttcacagtcaatgggaaatgtcagatttcatctgctatccattccctacttccccaaaagtttgggaaggaggagttggtttagatctttggtcagaatgatagtcatcttctcacttcctgtggcaccatcctttcaggtagtcttaaacatgaagatgaggatgttaggtatttagatcatcatacacctggtttccctctgcaggagtggaggccaacaccactcgggatatatacatttcttcacaaatgggatccatgacctttgaagacaccaatgattattattaccccaatttccccttcagtggaaaggtatgttgaaactcatctctgctcagacaaaaaacgcttaaccaccctgtcaactccttcctgaacacatattaacttagcatttttctaagtactctgtatgtattcactttaatctgtacaacagtcctgagttagacattattattggccccatttgacagacaaaaaggctgagacacagagaggttagtgaggttaggtgattttcccaaggttatacagctcgtaagtggtaattatggtcggagctgggcagcctgcctctagagcgacagtccccaaccttttttgcttcagggaccacttgtggaagatgttggggggatggttttaggatgattcaagtgcattacatttattgtgcactttgtttctattattagtacatcagctctacttcagatcagcaggcgttagatcctggaggttggagacccctgctctagagtatgtgcttaattcctggcactgtgtgtccttaatctcacatgagatgtgcctaaaatactaatgtgacttcaatgaccctccgaatgccaggggttcacctcctcctgtgtcagtctttgaattttagagctgcaagttacctggtgagatcctcaagtctgagtttctgcatctaggcaaggttaatatcaaacttcctgccacagcgagccactgatggctccttaagcatcgtctttagagatttaaaaaattgaagtgtcttctctctgattcctagcattccacccctctctctagcttatcttcttcacttcccaagtaattgttgaacactatagtattgtacatattcagatctgttattccttggtcatctcttctttagaccaagagtagatccagactgtcttagagcctaaggattatacaatttaggagtggaagaggatgctctgtaggaaaatgaaagcaaaaaaatatacagagttttggcagtggggtatgaaaatgaggggccctgatgtggcgtgctgcgattcatgaggtcgcaaagagtcggacacgactgagcgactgatctgatctgatctgatgtttcctaagccatgtggcaaatctacttctttttgatcattcattgtttttttagcat

SEQ ID NO: 39633 - DNA, 913 bp, Bovine  19866881467671
  misc_feature (1)..(1): n is a, c, g, or t
ncgaagctccttttgtggcaactaacatggattttgggtttccctggtaatgcagctggtaaagaatcctcctgcaatgcaggagaccctggttctatccctgggttgggaagttccccaggagaagggataggctacccactccagtattcttgggcttccctggtggctcagacagtaaagaatctgcctgcaatgcgggagacctgggttcaatccctgggttaggaagataccctggagaagggaaaggctaactactgcagtattcttgcctggagaattccatggacagaggagcctggcgggctacagtccatggggtcgcaaagagtcagacatgactgagtgactttcacctattaacaacatggacttatgggtctttcaagggctgtcatgcctaagtgggtcctctcacctgtctcttccaggacacagtggtagctctccacgccttgtccagatacggagcagccactttcaccagcgctaggaaggctgcacaggtgaccatccagtcttcagggacattttccacaaaattccaagtggaaaacagcaaccgcctgttactacagcaggtttcattgccagaggtgcctggagagtacagcatgtcagtcacaggagaaggatgtgtttacctccaggtgagattctgggcacagaagatccagagtcaccacggtcaatgaaaagttgtaactcagtgaacgatggcgcaaatgagagaaagggttgaggtatctgggaggagtcctggagaaggaaaaatcacagatttttctctgttccacagacatctttgaaatacaatattctcccgaaaaaagatgagttcccatttgctttggaggtgcagactctgccccaaacttgtgaggacccaaagcccacaccagcttccaga

SEQ ID NO: 39634 - DNA, 1842 bp, Bovine  19866881521342
  misc_feature (1)..(1): n is a, c, g, or t
ncaaaagtattgcagcttcagcatcagtcctttcaatgaatattcaaggttgattttctttaggatcgactggtttgatctcccttgcagtccaagggactctccaagagtcttctcccagcacccaccgtttgaaatcatcaattctttggcactcagccttctttatggtccaactttcacatccatacatgactactggaaaaaccatagctttgactatacagggtctctctcttggccaactcttttcctttcccttttcttaatgaaccgaggagcatcccacttacctgtcccttcctccaccacagtagccatgatattgatgtcttgtctgtaaaaatacccagtgaggttgaacatggacatggccacagaagttgaaatgcatcctgctttgtcaatctagtgaggcaatcagagagagagaggggggaagaaagagggtgaataacctaatctctacttctttttaaatttatttatttacttggctgcactggccttaggtgtgacataggagatctttcattgcagcgcacaggctatctgttgtgattatacaggctccagggcacacgggctctctagttgtggtgcagggtttcaatagttacagctcccaggcttagctgctgagcagcatgtggaatctctagttccctgatcagggattgaacccacatactctgcattggaaggcaaattcttaaccactggaccaccagggaagaccctaatctctacttctaactcatgatgtcctgtagaagaaaattatttcttatctctatacttcagtttctcaattttgtgtgtgtgtgtgccacatggcttatgggatcttagttccccaactggagattgaacctgggcctttggcaatgaaagcatggagttctaaccactggaccaccaggaaattcccagtttctccatctttaagatagaaaagtattccacaacatgaagcatacacccatacatgacttggaagttccaagatatgagaaggagaaaagaaccaccttcagaacaggaaaattgtatcttccaagggtttaggttaatctcttgatcccaaggcagattctaaaagagctttatctttgaggggataaaaagacttctgtgttctttaggaatgaggtactaatcacatgaaattatttctactctgggtgtttttaaccacttttctatattggtgcttacttactctttaggacataagaataaggttcctttcctacatcctgttttactcacctgtccagagactttcttgcatctgtcaggtaaatgttcccgttctggatccggataccggtaagtatatggcttttgacacactgatacgtgtgctactccttgcatgggctttccataggtgtacctaacccagaaaaacacgaggaatcagagaggggcaagtccacctgtgatccaggccctcctcccctaaacattttcctttcttccgcatgcccatctctgaaagcgctttgacagtcccacctttctccagctctcattcacatctctgctttactcaaagctttagagtattgccattgcacaataaataccacccaaaggacaacagtgtctttctttttccttactcctacttcccatgggattcaatactgtgctctgcacaaagtagactctaaaccaataatgccagctgagaaagcagaggcaagtaagcacaaaaatgcagttagataatgtgtccctgggatttccctggtggttcagtggttaagacttcactttcccatgcagaggatgcggattaaatccctggtccaggaactaagatcccacatgctt

SEQ ID NO: 39635 - DNA, 1085 bp, Bovine  19866882203397
  misc_feature (1)..(1): n is a, c, g, or t
ngcaagaacactggagtgggttgccatttccttctccagtgcatcaaagtgaaaagtgaaagtgaagtcgctcagtcgtgcctgactctcagcaaccccatgacgtagcccaccaggctcctccgtccatggctcctccgtccatgggattttccaggcaagagtactggagtggggtgccattgccttctccggcgaaacagctagtatattacaagtgtggtctttaggcgggacttgtttcttcactgcctgttctttctgttactgctgctgctgggctggctactggagatgggagcataagatcctagtaacattaattctcaaggttggaaaagcctgactgagagaccatgtccagttctcatcagtgacaatggcagtgccaagaagtatgtgacctgccttaggtagatggatgagttagatgagattttctgtaacacgcttatctttacaaattctgaatctaagttatttttccactatgtctgcaaggtcaggtaaatgatctgttgatgattgactttcctgtaccaacctggtagagtgaaagtcacttcccttcaacacttctgttatttgtgtgcatgtgtgcgcgagtagctttattactttcagaatcaaccctactaagcatagcttcctctagaaacagttgcctatcccatgatagttacaataattctggtaaggacaggaaagaaattaagaaggaaaatagaaaagcaacaggaaagttctagagatgggaatgttcccatgtatttaaggtgtttgtgaagcactcctcatagacaaactagcaagatatcccaaagggtgagtctcttttaaataatacagccaccccaaaagaagatttttggaaagtataaactcacaggccgcacacggacacttgcacctcttcttccaagatggtgattatctttggcattcttacttgtacttcaaacttaggaagcactgttgattggagaaaaggaagttgatgattggttttcaacttttggggaattggcatttccagattctcaatagtaattccctgataatattttagggcccgaaaaggtagc

SEQ ID NO: 39636 - DNA, 1635 bp, Bovine  19866880367671
  misc_feature (1)..(1): n is a, c, g, or t
nacgcctcacattccaaatgagtcagtgtcatcatcgcccttgctgtgtattcacagggctggaggaagggatctggctggaacatagaaggccccttaacacatgaatctggcccaaaatgcaccccaaatgcttcatcctttgcagctgtctgcacccacaggattctaagagctagaatgtctctccattggttgttcactactgacttccatgttcaacaaacattattgggtagcaggtaccttgctagacatgaagagtgtcgcaacttgaaggtcccagtcttttgggagagcacagcctggtgggcctgcaaggcaagtcaacgaacagctttgacttcgtgagatagattggatgggaggcaaacactgtttaggtctgcactgaacttagttggagggtgagtggtgggtgggaggagtctgtggcagtctcgggctggccacattcctctaagaaccagactgtaccccaaggatcactcgacagtacccaggtgtggcctttatcctcatgacacaagacagctaatagagctccagccatcgccttttcattttataatgtaagcatgaacagcgaactcagtgggcctcattctatttgatagtcttagtgtcttctttcatgcttgtctttatcagcatttattcgttcattcccccaaatttagtgtttcttcaatgccctattctgaatattctaaatgtggagctttatattgtactaggacttccctggtggctcagatggtaaagcatattgtgttattggatccatccattgtattggatccatcaactctcgtggtccattatcattgtagaaaagaatttctgtcatatttgaacccaatccactcccacctctcaactcacacagatgcacacagacacaaacatttgttgaattatactgagggaccatggagatttgaagctcaaagacatcataaagccatttgcagagtttttagcttgttgaaaatccagcttgaccatgggattagacagtaaagtgactgcagaggaggctgagtgacaggggaggggcctgaggtcccctacttcggccctggcacttccctcatctgatgacttgacatcagactcgattatggtcatgggctttgaaaagatctagtccaacttgaggatttacctacagatttatactctttttccattctgctactgtgtctctctgcttggtgagagtgagcatccagcctgaaaggttatattgtccaagtgctaaatgtgaatccaggcattcagcaaccctgagccaggcccttataaagttgtgtgatttgagataaggcccttcactgttgagcctgctttttataaaaacagagatggtgagaatccctgcctccaggtttttatgaacattaaatgcaaataagtctggcagagccatgcaataaaatgatggtttcctttctttccctttaaaggggttttctcttccaaaatacttgcatcctaggaaatggggatcctctgataaaagaggaagtaactcaaccacaaaatcttggtgccggcctggatttgaggaagcctccataactaacagctcaaatttccttctctcttggctgacagagttggaggccagag

SEQ ID NO: 39637 - DNA, 3129 bp, Bovine  19866880373347
  misc_feature (1)..(1): n is a, c, g, or t
natccttttgggactatgcactgcagcttaaaggttttgaaattgtcttaaaaatgtaaaatccaaaatgggtcttaagagtcacagacatgtctacactctctgtgcgtgctcggttgcttagtcatgtccagctctttggtaccccatgaactgcagcccatcaggctcctctgtccatagaattttccaggcaagaatactaagtgggttaccatttccctcctccaacatgctcactttactgaggggaaaatgtgatctcgaagacaggtcccccaaaccggtccagaatcacacagagttttgttcagtggacatttacaagagtatctatttctatttactctgcttccagctacaaacaacccttgggattatttgtgccttggttcttgtttccagatcataacactgtaggcttgctgggttgaatgctatttggagtgatttactggctgatcatttcaacgcaaaatggagatcatagatggagacttcctaaatgttcagtacacccccaccaaagtgcatttgaacaatcaaggttatcctaatattaattattcatgggcagagactgacaaatgaattctaattgcaaataagtgcaattgctttcgattgcataatttatgattccatttgttaaactaagacaacaggaattgatgaaaggcattaagtggccccaaattaaaggtaatttgggttcaaaagcttatatctatgtgggtgtagcttgaatttttcagcttgtctgagattcccctttcttcactggtgataaatacgccaggtaatctgtgttccactgggccccatgtctggctggagatgcatcagtctgggatttctggagagagacctgtggtcaagctcatgatgagagcatctcttgtccgtgggcagctcagtagccgctatctttccctgtggcttggggtctgtcctctggggcttggctgtatgaaagctgggcagggtagttttgtctgcattgcactctgacactctgctgaagagagtgcgaatgagagaccaaaatgggcagtagagagatccactggaaattgttttctaaaaaataagtaaaatacttttctttccattagacagacaatcccacggaccagcatctcacagaggttaagtgcaacccctgaaaaattgctcagtgcttttcctatatgttacatgagacagagactctactgaagaaggaatctttcacataataaatttcaagataactttgttaaagaaaaaaatggatcttagatttatggtgtgtgcaatgaggcatttggggtttaaaatatgcactgttagcatccattcctgggttttgacttcccttaatctgaagaaatagagctattactgggaaatatttgacttttgaatctcacaaatttgttctctaaaggcaaaatttcatctaagcacaagggaaggatttggaaacaatatgctttcatataactgtgtttactttaggctctgtgtttaattaatgaacaagataattgttttattgacttttgattacatatcgtggactgaagaagagaaacagtggacccgggctggagacagtcttgccacacctcgtgggactggtggctacacaggaagtctgttccctgccaggccaggggccgggtggttgctgagcagttctgtgacacccaggacaggccaagcagcatgagtccaccaggaagttggggagatacaagagaacccagcacagctagaactgaggaacagagtggagggtagacactcaaagggaaggctgtttgcaaatggagaactggaggcccgccctgatggctctctgtgcgtttctagagaaaggttacatatgccctacggcctggttgtttttacggcttgttttacggttgttttacggctgggtgaggatggattcagatgaaagaagagatgcctgagaatggaattaggagggagggtagccccccataaagttagccagcccagtcctggctaactgggctgtgctgggctctctggcttcagtgcctatgggggtgacactaagtccgccatccatggctggtgcctagagagttctgttcagttctagaaaatgcaatttcatgctaatccctggggagacaagacactaggcagggtcctaaggctcaggaaacagcctcatgagtgatagtttctatctgctgagctcctgtggtgccagacacttggcagtgttatcttacttagtgttcataaggcagggctgttcatagtcgtgactgttccttaagtggagggttggaatggctttgctcacagcttgtaagggtgaggctggacacagctctgtcttctggctttgaaaagtgaaagtggggaaggactgggaaggtggtggagcctgagctgcttattagtgagcttttacaacagggcaaggaggcgctgtctggaagtgtatgtgcttgagagggctacaggtgaagccatatgtcagctccaccacccgctagctggataaatttgaatgcatcatccgtcttctttgagcttcagtttctcccactctgaaagggattgggacaaatgcacctttgggagagctgttgtgaagaccagggaagataatttaaagtgcggacatggtgggtggtcaaaattgacacagcagatgttggtccctttccttgtccttttattttggatatggaccgttttaaaagtctttattgaatttgttataatattgccttatttatttctatttttaaattttatttattttttatcgaaggataattgctttacagaattttgctgttttctgtcacacctcaacatgaatcagccacaggcatacatatatcccctcccttttgaacctccctccctatgccacccttctaggttttatggtttgatcttttggccatgaggcatgtgggatcttagctccccacctagggatcaaacccacaccccttgcattgaaaagtgaagtcttaaccactggaccaccagggaagtcccacattccttgtctttaaagagttcttcctcaggccccttcagtaacatgggcattggaaggtgtataagagagggagctaaagaaggtcg

SEQ ID NO: 39638 - DNA, 1311 bp, Bovine  19866880403912
  misc_feature (1)..(1): n is a, c, g, or t
ntaaggacccttgcctaagtcagacctgaaaattgacatatatgccattggccagaattcaatcatattgaacaaaaccccctgctataaactaggagttttattattaaggaagaaggacattgattttgaaggaagctggaaacttctgccgtgctagtaataataaaattttagaataaatattttaatttagattatcaatttttatgtgtaatattaaaaaatcaacacacacacaaaaatacatctaaagttctaatcaacaaaatttttattaaaaacattgtcccaggggtcataaaactttggtatttttgcctgggctttactcctagttctttgtcttggtcaaatcactttctcttgctgggcctcagttcatatgtagaataagtagggttaaactaggatatctctaagatctttccatccctacctactgttatcaaatgtaataggtaaatctcaaggtcttaccagaatattaaagtgttatagagcaaaaatcttgcaatgagccacttttctcagaaatagacacagatttattactgtatatttatacttgggggcttccctgctggcttacatggtagagaatctgcctgcagtgcaggagacccaggttcaatcccttggttgggaaaattccctagagaaggaaatggcaatctattccagtattctcgccaggagaattccatggacagtggagcctggcagactacagtccatggggtcacaaagagttgacatgactgagtgactaacactttcattttcatttataccttgtcttcactcagaaaaaaattaaagattcatattgttctttatttgtgcaaaagcaatatgatgacaaaataagcagaataaacactgagaaagagattaagttatcaattttttttgagggggggctcagcttaaagtgaaagtgaaagtcactcagtcgtgtccaatgctctgcaaccccatgaactatacagtccatggaattttccaggccagaatactggagtgggtagcctttctcttctccaggggatcttcctaacccagcgatcgaacccaggtctcccacattgcaggtggattctttgccagctgagccacaagagaagcccaagaataccggagtgggtagcctctcccttcagcagatcttcccgacccaggaatcgaaccagggtctcctgcattgcaggagaatgctttatcaactgagctgtcatggaagccttactgagcttatttagagaaaatccaaagtttcaagtagagacaaaaattagtaaatattaggag

SEQ ID NO: 39639 - DNA, 939 bp, Bovine  19866880586729
  misc_feature (1)..(1): n is a, c, g, or t
nctgcctttgaagtgatactaagtagctatggtaagactgtaaagcatttaaagttccaaaaagggacagaatgtaacaattgttaagatatccaagtacaactacatttaaagatagaactgatggttcttgcatgaggtcatgatcaaccataaaaggttacttgaaaataagctcagcattaagtaaaatttaaaaacactgcacatagcacatagcaaactcaccctaaactgtgtataattttatgttccacttttatttaaatagggtgaaatttgaaatgttttgtggtgtaggatttgatgaatctctactcatattttataacataatgacttcattgacatcaatctgctcatgcaatcaatgtatttatataaaaagaatctcctaaaatactcttaattcttaagaattaatatgatgcaagaacacttatgtgaatgtcagagaaacccatagcaaataattttatagccttactagtggcttcaatttatttgctttagtgaaaaagcattggacttgggatagaaaacatagaattttgatcttggatatacattaactatatatgtaaccttgggaagacatttaacccatctacaaaataagaggtgttaaaacagatgaattacaagattctgacattctttgaatctcatcatcaattttgatagcctggtatttaaactctatttcagattattatcacttggtggaaaaaacatggatttctagtttaaagaagagcttaagaatccccttcagattaaaacaaaaccaaatcctttgatgtaaccatatggtgcccataaatcagtttatgctcctaaaacttccttaaaagctaataagcttttattggttaattataaaactgaatgaggtgagaaaagcacagaaccttgctaattccactaatgaatcaaatt

SEQ ID NO: 39640 - DNA, 878 bp, Bovine  19866880589897
  misc_feature (1)..(1): n is a, c, g, or t
ncttgctgctcccctggaaactgctgtagggagcactcctctctccctcatctaatcattgctccctcaccaccccctaacccaggtccctgtggagacctgaatgcccctggctgaagctgggaaagcatttttcacacctttaaataaaatgtgcagattgagggtggaagggttattttccattacaatatgaagcattctggcccctttcccagagtttataatagcccttggaagaggccttctcccctgaagtatggtcccagaaaccagctagaaatgaactgggaagtctgaaccagacttgctggggagggagaagccacgcctatggaaatcttggaacattggccttgctactgcctccgtaccatcgtcatggaagtctgtgcacctctgcggaatccacccacgcctttaccctcgtcctcagagccccatgggatcaatgtgctaactgggggttaactctaggatcctggggatctcaaggacagctgaacacgacgatgagaaaggtctccatcgattgacccaatccttcttgttatcactgatacccgtaaaaaatttaattctcctacagactaactaaagtaaaaaaaaaaaaaatcccagtggattaacacgctataaatatttacgtcttgctcaccccatggtaagactgattgtgtgttgggcatcctttcacagtgtggcttaggaacccaggatcctgccatcaatcagggccttgccatcttctaccagatcctcttgttctgcctggagacaattagttctgtctgaaggacctggtagaggacttgaggagccagtcatggaagtggggcagtttactagatcagctccaccggccagcactcggtgac

SEQ ID NO: 39641 - DNA, 3756 bp, Bovine  19866880635137
  misc_feature (1)..(1): n is a, c, g, or t
nttcttggtcaccacagagcaccaagctgagctccctgcactactcagcagcttcccactggctatccgtcttatacatggcagtacacatacatcaatcccaatctcccagttcatcccacctgtccacctgtcctcatgtccgcctgtttgttctctatgtctgcgtctttattcctgccctgcaaataggttcatttgttccataattttttgagaaggcagttggctctagttttcatatgaagaaagagagacaaagcatattgggcattaaagagtatggtaggttcacactgtgatgcaaagtattagtgaatcttgggagaagagaaatgacatatactgttcatttactgttatgtctgcccactttactgattcttcaaattcctcctatatgctccatggaaacttaaaggcaggcacttttaccttcatttatatatgaggctaagaggagctaaggaatttatccaaggtcaacatctattaaacagcaacaccaggatttgaattcagagctagtataacttcagagcttctttggaagatataaggcttctgtatgctccagatttacttgggtttgtggcacttttaaagaaactacccatcagggagatacaataacctcaactaatcttatttacaggaaactggccactaagtcagagtagcttagagtcccagaaatgcagtattgtgaatattcaagaaatgatcaccaaagctactttaattttcagaattaaaaaattattcagttaacacttggggagggttggggattttggtttgtaaggaaaagggtgtgatggacagacaggacacaaaatatcccagaagtttcatctccttttttcaaagctaaccacaagggccagatgtcctcaaaacgagtttgttctcaacttctcagtagagcattaattgtgtctcgtttttagctttcatatctgacttgaatcacctttgcagagtgcccacaatgagccagaggccccataataattgaattcgtcaagcacattgttcattaatcttgaaagcaaccctaagaagcaaggcagcactcccatcgtcacaccatcagtatgaacgtctccttccagctgtattgctgcctccaaagggcagggacaagcatctgttgcaagaactcctaagagcgccttctaactgatctcgttgtttcaaagctctcaagcccttcgttgtgcacacgtcagccagataaatcaaatgtaaatcactttctaacagcaccctcgaaaaaacttcccatccctctcagtctaaattgcaaagtcctggacagagcctgtgaggtcctctgtggctgagccctgcttgtctccctaactgtatctcctgcctcttcccccttgctcacctttctccggaggcactgactttctttcacctccttaaacacacagaactcattccacattctagctcttaaacttgctgttccctctgcctggacttctggcagatctccagatagtaaactccttcacaccattcatctagaacttctgtgaccacgccagctgagtggcctccttgtctcccgactctaacccccattattttcttcacaaataattggattttgtctcatgtcattacagtaacaacacaagagaagacactttgtctgcttctttgttatattcccagagcttgcagcagcatctaacgtgcatttaatacatcatggctgaatgaatgtgtggccgaaggtaacctttgaacccaaattttcctgaagccaaagctcaagctttgaccatcaacatgctgcaattttacattgaaaaattgaattcatcttgaggtggatccagcctaggtgaggcatggtgcagagcacacaggatacctgtttcttctcttcatgtttataacttagctgtaataccagatgtttataacttagctatagtaccagactaatctgctcttgaaataacggatactatgaataaatggtgggtgaagggagtggcaccagagggcatcaaaaggctaaagagagtggtcagcgaggacccaggtgaccctcagaggctccctagtgcttagggacttgatagaaggctcgaatggcagatgcagtttagggatggggaagaaaggctctcaggttcttggatatgatgaagtcaggtgagcttgtccacgaagagtctcataaatgacatgtgttttagggctttccacactggacacatgtatcagattcttttgtttttggggaaaaaaaaataaaacccagtcacccattatgtataagtacaatctcatgagcaaaacaaggccagcaagggaagaagagaggaggaaagggagtggggtaccctgtttctgactcagggtggtggggggaggggcaggggcaaggggaacctggacccttggcatatggtgtcatgtatgattgcttctcttacccctgaaggtctcctctgtaagattcgcctggaattccatgcttgctcacagataaatcaccaacagggactcatgtgaggaggccacctctttggggcacacagagggcagagctgctctgtagcatcacgtctgtccaggaaggggcagcacagagttcaggccactggcagacacaccagccatccaagggtttctcaggaggacacagatgcccctcagaggggactctcaacacctctaaccatggctcccaacccagtgttgataaggagatcccagaggaccaggtcatcaactggtgaagatgacttaacgatgctcagaattaacatctgttcatccatccatccatccattccgttcattcattcaacaagcaggtcctctataccgtgccgattgcaggggctattgtaagggttagacagtttccttgagaaactcatggttgatccacagagaagaccatatggagttactgtctgaactctactcgtgctttaagctcagagttgaataaaatcctggcttggccacaaaaatcacaccaaaccaaagcaaaacacttcatgaagggaaaaactatgctttaccattttttttcccctctcaggctcttcccagaaaggtgataatggaagatttggtcccaacagagccacagacaaggaatttgcattttaaagtttgacagatatttataggccttttgatcttctttccctactctacacacccacccgcagtcttgcctacctcctccttccccagctcccatatttctacattgtaccaggtacagacttgagaaatgatggctccaggtccagaactttctaggatatgtgccctgggtgctatgctcacagtcatacagctcctatttattaataccaactctatagcaaatacttttctttatttctgactcccacaggctcactgcaagtttcattatttacctttttagtcattgttaagggaggaggaaaatgaggctcaaggagggtaagtaaccttgccccaaatcacagataagacataatgggggcacagtgaaaactcaggtctgtgtatcttcaaacctatgaccttttcacaaagccagtctgactccagtcaccaagcctggttgttgcaggctacttagctgaggtccctcttagaaaaagatgatcccgcattccagttttcttgctggtgttattctggaaatagcccaataaacgtcacaattcgatttactcgggaccaacttgcagctgtcttcctttgcaactcttactcagg

SEQ ID NO: 39642 - DNA, 2779 bp, Bovine  19866880638016
  misc_feature (1)..(1): n is a, c, g, or t
ntgcatccgtagtctgtttctaaacatatgtctagatgtggttaccagctacatacaggctagttggataccattttgtgagatgtctaggatgaaattcttaacagttttgacgcatgtcacaaaatcatcttaggcaattaagcccaaataagatgaccatttgaagcataatgcacagattgatttgaagaggactcagaaaagctggtcccagagtggactctgccaacaggtatctacaggacctgggacaaatcacttttcccatctgaacttcagtttctgtatatgaagataaatatgataattacccagcttatttctggattctaaagtaataacaaatgtgatattttggaaaaaatgtaaatataagtaattttgagtgtcttattttggcaattattaaggaaatacagaatatcagacttcatattcattttcttgccaaagtcaagacttttatggagtaaaagttgaaaaatattagacacatatcagtctattttccaaaaccatgcaaagtaacttttcaatttaattattattcatgcccaagaaacacttgccttaattatccaagttgtgatctggctgtaatcagcagaatttttctccatagagttgccatttattggcctaggataggtctgttatgggtctcgacttggagataaatatgttacctccatcaagatatttaccctagaagagagttttgcttctctattcttcttctcagcaagggtctattgctgagaccttggcactttctttttgttcacttctcctgcatagcttcttgctgcaagagtcactccatttcttcatgttctttggcaaattttattaacagggcaaatcacagaaattctactttgccaaagtaatttttcagtataagaactgcctttccacatctcttttttttttttattttcaccacaaatgaatggttttcgatctaatcctttctaaagataacaaaaagctgctcagagaggttaagaagtggttatagtggcacagctaggctgggtggggcatggcctcagacccaagactctcctcttctccaagtcctgcatcttaccccggcagcacatgctgatgttgaaagagcttggccctcgctggattttaaacaggcattattacattaatatctttaagtaccttaattaggtcttacaggaaggaaaagaattatttggtcaccaaaacagcccgaggattccaacttgaaagagtgagtctgtttcagatcactagatagggtggtggctctgtttggccagaaaacttcaatataaacgatgagccatgtggagcaggggatgttcgcccaaagcccctggcccgggaggaaatgggaccgtatgtggtatgtggacccaacacctacttgcaaacactcccacggccaccagtgttggattcaattaaacattaaattcatcatctttagcaaggaaagagaacagcaaacagttgctctctcatggctaaacaccccttggatttgctggcctttgatttattggaagaaacctgctgggaagaacatactgtgtagctgattaatgtcagcttctgtcatcagtttccacttagattcttggccagccctgacatctcctccctgaaggatccagaagaatttgagggctgatccaagagctttactggcatgggatttgcagaatgtggtgtttgcaaaataaggaagatgaatggaagtggaatcccatgttctccactggacttgttgctttaattcatttctccagaggccccgctccatgccaggaccacaccagcaaggggaccggggaaagtgtgttcccaggctccagtacagatgtcttgcatttcctgtaccgctttatgtgctgcttcctcggagcttgtcaaactgggaagtggtccgaggaggaatgcggttcacatttaccgtcggaacctccctgggaaccctgggacaaagcctgtgggagagtgggcacgtgagaaggaggtgtctccagctgcccagccaagtccaggacctgcacatacatgacaggtttcgcagggtcctacagcatcgtttttttttttttccttttctcttttttctcaatgataagccatgattcaatgacattatacttagagcaagcagcattttctgtttttcttctgttggggtaaaaacccactctttgaattcttacaggtaagaatcagtgtgccaacgctctagaaagaggtggtagttttaataagactctaagccttctcctttctgaactcattcctgtgtacagaaaaaaaagagagagtaaagaaagattccgattgagaaataaaaatctgttctggttatctcttcgtgtttaacaaatcatcacgaaacctagtagcataaaataacaacacccattttattatatctcacagttttcaaaggtcaggaatttggggagagatgggttagacagtcctggcaaggggaagttagaggcaggagctgggaaagcaggagctggtccaaagccagtgggggcttactagagcatctctgtcgctctgtctctgtctctctctctcactttctctctccatccctcactccctcctttcttcccacctcctcctctctccatatagtctcagggcctttcagtgggcctttccacctgtataggctctgtaaagtcaaagtgcttacatggtgacccaaggcttcaagaggaagtatattattgggtccaattgtgctctttttcataag

SEQ ID NO: 39643 - DNA, 1057 bp, Bovine  19866880666578
  misc_feature (1)..(1): n is a, c, g, or t
nacagattctggactgctgaaccacccaggggagcctgatactgttcctactgacacaaaataagtaataaagatacattgactactgtgattgcttaactgatgaatgatggagttgtcctgggtttttccctttattttcaaaaccacaactttattccatgtgccccagataccggccctgagagcagggccactccaatgtggtctgaggtcccagagactgtcatctatgtcccatcaatttcctggaataggagacactgtattctttcttgcccattctgatcagtaatatttgctttgtccctgccaaaagagttatgtttcaatcagctgcttttcttggttttggcaaatcctgttcgctatttctcaattataaactaatgattcagattgcagcattctccgatttaacatgagcacagcagattggatttgttaaatcaaagagggtgggaaagcaaagtcaatacttcagagtccgtgacaatctctgacttacgtttgtggtgccaaggataagtgtaaagagaaaggcagagggacctagaagaaaagggtttttaatccatttggagtagagtgggttagcttgagttgagtgagtaattacattttgtaaaaattctatggaatggtcattgcacttgtcaaagcagttttaaattttgcagtagtaacaaaaccctcaaatctcagggctttttacaacaaaggtgtgttgttctgctcagctggcttgttcaactcgagacagaaggggaccgtgaccttttgtatttgtggtagcaaagaagagagactggatacttctccgtgggctttttctctgcttcagctgagaaaggacagttgcgacttctgcccatatttctttggtcagaaatggtcacatggccctcttctgttgcaaggaggatgatacaactcccaatgtgggcttggaaggagaaaaggaccacgtattggtcaatactaacaatatcaatcacatccgcccttctactcatgcaatgattgcttcacttttgtttccacatggaaagcactt

SEQ ID NO: 39644 - DNA, 1406 bp, Bovine  19866880689253
  misc_feature (1)..(1): n is a, c, g, or t
nggaaaaaaaatggatggatcgctctggagtgtctaaaggaactggagctatgattaatgagggtcaactttaaaacccgagcacacacagataggattatttcacacagagagcggagtctgtctgacccaggctatcccaacatagtcccctgaggtacgtcgttcacaaatcttgttagtttcagggatgcactgacatcaaaaagagatacaaagaagatctcctttggccatgagcagatggtacttctaaaagtaccatgcaaatgcaacgatgatggccattaaaggaaatcagcaagtgtttctagaaagtcagggttgaagcgttctgctagggtatctttaacttaagcccatcatgcttttccaaatattagtcatggctagcacattttttggttggcttgttccttatttctttaggtaagagcttgagagttagctactggatggatttctctgtgatatgtaagaggcttagaagtggagccaggaaatcagagggagagggagacctgcttatactaggtatcttagacagggccccggtctgagttcattgaaggataaacagaccctcttcacacaaacggccttatctctgtgaataaacagcaaaggacagtagaccagggatagagcttctgaaacatgagagacccaaagtgtattcagcagaaaacctagaacaccgttccttcttccccttgacaaagcagctaaacacgtatttatgtttgttaacaattgtgttagagtgtgtatgaagaacatgggtgccttctctcatagagtttacattattaaagggcacagttattatatttaagcattcagaataatagacagccttgcattcattattcagtcattgagcaaatatttgttgagagtctacagcatgcttaagactgatctagacatggagattcaatgagggaaacacagataaggtcccggttcttgtgaaatttatgttctagtgggaggagatagaccatacaagtagtaacaaattgaagatgattttagttcttcaacagcaatggagaaactagagcagacagatctgattgagggcaaatgaaggtgtgcttcccaggtggcacattggtaaaggatatgcctgccgatttaggagacacaagagacttgggttgatccttgggtcagaaagatcccctggagaaagaaatggcaacccactcctatattcttgcctggaacattccatggacagaggagcttggcgggctgtagtccatggggtagtaaagagtcagaatcgactgaataaacacgaactgaaattgaaagttaagtcactcagtcgtgtccgactctttgcgaccccgtggactgtagctcaccaggctcctctgtccctgggattctccagg

SEQ ID NO: 39645 - DNA, 995 bp, Bovine  19866880693632
  misc_feature (1)..(1): n is a, c, g, or t
natttaacttatcttagagtgagactgctatggagacaagtgctaataaaagggactgggggatacgagtcgtctgtcccgcatccaagtagcctcattgaaagtgctttgtgccgtgtttcaagccttagagttaccgtgtgcagagcaggcatccttgggcaatgagagcagggcatccctcacctgggctccctgctaccctgtgcctggagcgctcttggctgcagctgcttcgttgagcttgaggaatccaaagctgtgtgcagggaccaggagcgatgcagatgaaatagcacaaaacagaaaggttaacacattctgtcagctcccactttacattcacagtgaaaacaacaatagaaacgttctcaagcataaaagaattttctactccaactgctccgagaagaaaaatgcctcacaaacagcatcttcactcagacatcaaactgcttggctgacagcattttaatcaaaaactccaaagaaagatgagtggaatttacaaagaaacaccgagagaaaataaatgaagacattcactgcacttctgtaggtgaagagtcagcagagccttatgcttctgccctggaggctcacagccctgtcatcggaccaattactctgagttcgtggatagtgacccaagcagcaccagggtcccttgggacatgtactgtcaccaggaagattccaactgagtggacttgtcggtcaaaaaaagtgtgaagtcagaaggggacagtgaccaagaagtgctggacctggaactgccaccctgattcctcaggtgcctttaatactatggagaatcacacaagtcctggattcccaatcataactaaggtaaatcactgttgagaaaattaatagtaatacaggttccatccctggaggaggaaatggcaactcattccagtactcttgcctgaaaaattccatggacagaggagcctggtgggctacagtccatggggtcacaaagagtcaga

SEQ ID NO: 39646 - DNA, 1107 bp, Bovine  19866880715107
  misc_feature (1)..(1): n is a, c, g, or t
ntcttgagtaacctagcaagagaagagaaagtaagcatggaacattcaaacttttataaaaaccttctgagataaacacatagttgaattattactcattacctcatggaatgggaatccctcacaactgcaagcttttctgaaaataagttatatacaggttattaatataatcaggcaattttagatagactttaaaatcatgtatggatgtagaaagtttgactataaagaaagctgagtgctgaaaaattgatgcttttgaactgtggtgttgtagaagactcttgagaatcccttggactgcaaggagatccaaccagtccatcctaaaggaaatcagtccttgggtgttcattggaaggactgatgttgaagctgaaactccaatactttggccacctgatgcaaagagctgactcatttgaaaagaccctgatgctgggaaagactgagagcaggaggagaaggggacgacagaggatgagatggctggatggcatcaccgactcaatggacatgggcttgggtggactctgggagttggtgatggacagggaggtctggcatgctgaggttcatggggttgcaaagagtcggacacaactgagcgactgaactgaactgaaaattatcacctctaatctccttttctgaaaagtgtccttgcatagtataccagttatcaaccttctcactgaaatattattaaattactatcttataagatggccaaacttttgaacagaatcaagaaagggattttgtgaaacattaatctacacacgaggggaagttatgtggaaataattcaaccaaaggtatataaataggtcacacagcagaaaacactgagtacaaaaatataaccttacttcttaatattgttttctacagcattcagttgcctctcatgttctgtacggtgccattcacaaggacaacggtattcataatcatgtggttcacagtatcgatcagtttgacataatttgcatccattacgttcatgatcctttagatgaacctttacggagacacaaaaagtataattttcactgccttttagaattatcttctatatacattttttctttgccttaccta

SEQ ID NO: 39647 - DNA, 1290 bp, Bovine  19866880742947
  misc_feature (1)..(1): n is a, c, g, or t
nattggcatctttattgtggttagagctatgttttgagtaataagaatagttgagtgatgcatttttccaatggtcacagaaggatatgaactcttaacactggcctcttcaagcagcataatcctgtccactttattacttgtcagtttatacctaagctgataattttttaaagcaatcttttccttatagattattttggttttatttaaacaggatgaattaaaccttgctgattctgaagtggataaccaaaagcgagggaaacggcattatgaagacaagcagaaagaacacttggatactttaaataaaaagaaacgagaactagatatgaaagaaaaagagctagaggttatccatgattttttaaaaccttttatttacaaccttagtcatgattattaaagtgcgttttccttaatgtcatatttccaaacagagacaagttgtctgatggatatctgttttctttggagtaatagctgtttcagtgaatcaacagagggaaagacttagggactctcaaaatgtggggacttcatagaccaacacgaagagtactttaggcaggactgccatagccccttattgtgcctccaggtgatttggaaaatggcactccctgctctgaaatagttccttacatgcctaacttggcaagtgcatagcagctttatgtcagaaaaatactccctgcctctgagttaactcaggagtgagttgggctacagtccagctcctccttactaataaccctggttgacagtggaaagcggaagccctatttttagaggaaagtaagttgaaggcaaccatggtttaacctaaaagaagtggattccagctttgtttttacatgtcttaggaaaatggtttcaactctgaaacccattgcctgatttgtttgacttaatatacgaatgtcatgaatggaaatgctatgtgtgcaagtgctttgggtttttaatattttacaaacagaagggtctttatgttttcagtaccatttggtatttagaatccctcttaaaagtcacagaaagctatgtctgacctcagcatctggggtgccagaccttcataacatctacttgaaatttgttttactagaaggttatggagctcctctaaattgttaaagttgtgtacactaatgcaattttcttttgaaaatttatgatgactctgaactgtattctcagtataaagcttagaaaaataacattgatattaagtgtaattaaaatacatttcttaaatataagttcagaattttactttgcata

SEQ ID NO: 39648 - DNA, 1119 bp, Bovine  19866880746750
  misc_feature (1)..(1): n is a, c, g, or t
nataagaatatactgaagtttgcaaactgtgctgttttgttttgagctttcaaaacgaatctatcaattatatttccttgatgagggcaatgttttataaaaaatgaatattgatgataataaagcatagaatgaatagaaggaaaggaaccaggacactgagacagttaaaataatcttggcctccagtaggtatgagatagtgagtaaatgaaaagaagcatcaagtggtagaaatgaagattggaatgaccatgagtaagatttcagatattcatgctctttcctaagatgcctctctttccactgtaaggctaatgatagatctaagactttaataaactcattattaacatcagcgattactattttccaaagcaggaaagcaaaggtgtactttggcatggggatgagttaaggaacgatttgggaattgtgaagaataaaaaaggaaaagcaaacaaatatgactcttggctaactataaatcgttcttattgagacagtttcagcaaaggcgaacttttggcagtattttatgtttgtcttcacagttgaaaataatgagattatattttcttgtaataatccgtcattctaatttttattagtttagactaaccttcccctgagttttaaatttttttatgtttttatgttcccaggctaggacagcaactttactgccaaagggaaagtaagtaggcaagtggaaaggagcagaatagcctgacctttgagaacatggcagtttggtgaccttagtatttgtttgttgttttttttttaaccattttcttttgaaggtttaatcagtggagtgaaaaatcttgttactctaattcacaaccagtactcgttaacaaactggctcattgctctgtgtgttcccatccaggtaagcggacataaggaatgatatctctagaacactgctgtcaagctacctatgtttagtatatacctatgtttcatctctattcctttggtattttttacttacctaccttccttaccagattgggaacccgcagagtcaggagttgtgtcacatagatacagtagacactcagtaaatacttacagaatgaagtaatgtcatatcaatgatagatatag

SEQ ID NO: 39649 - DNA, 1803 bp, Bovine  19866880775051
  misc_feature (1)..(1): n is a, c, g, or t
nccagtgcagcaaggaagcgggtgcttcaggaagcaggctttgtgcatgtggcttgtggacgttgggccactcgaggccctgctggtggagtggctctcggatgagcatgtctgaaaagtctttggtgaaagtgagtgaacgtcactgccggcagaagttggagagcatgggccttcgcaaacatgacgttggcgtatacccacatcttgatgtctccttagcctacacacatttatttggagaggctgtgggaccttgggcagcctacttcccttcctggcttggtgtcctccctgagaaacaaggaacttggatgagcctccctttcaaacccctccctccccaggggctccacgcaggtcggctggcctctgaccccaggagctttcaattgaaggagaactgtcaagtagccaaagtcctgggagctcagctgcagggcaatttccactagcgctcaactttcagagccctgggaccagaggatgagcagagcgtgataacatttgcaggcagagactgaagggctcccttcaggtcacgtgacttctcaatttttacacttcatcatctgctgtcccacctgccatcactcagtgagtctccgggttgtcgtgcgtgtcgaagttacctggagagctgttaaacgtgcaactctttgagccttccttgctcccaaggattcacattcaataaggtctaggctgtggccaggaaatggcacacttaacaactacccccctggatccgccttgtgctttgagcaccactgttctaattgctctgaatttggggttcatctcctgttcaggccaggaccccatctgaccttgcagcataacagggagcaaagcgaaaagaacatgccaggtattcaaccaaaattcaaggaggaactgaattgatgtgtaaggaaagcacgcatcagaggaaacgtcatcatcaccctgaactaccaaacaaagccatgcagagctttccaggcgaagcttgaggagccagcgtgtgggagaggagtgcagggcagactccaaaggtgggtccccttcgggccaccagaaacagtaggctgctggcaaatggaggctgcttcttcggcaaacacttctgtccagagggagtccctaagcccgtgctgtattttaagctgcgaccctcaaaatgtcaaaagagagattaaagtgtaaatgattgtcaattcgcttctgtcctcctggtcccgggctgagtgttacaggccttctggggacgcagggcagcaggggaggggaggggctggggacggtcttaaaatgtaaccgaatagaatgagctccactccgtcttggggggataaagcagttcacaggctgctactttttgtgacatagcttttatggggggagagccagaatattaagctcattgcttccagatgggaaggttggacaagacagaggggccttggctctgaaagcctggatgctgtggtgcgatagggatgtgacatattgaagtaatcgagatagaagatctggctttagccaaggctgtcagatagatactttttaaaacattacattgtttgtaacaaggtattgtgtatcctcccagaaaccctgccgcctgggtctctgggaaggcagtgagggaaaaagtgtgcttattttgcttgagttactaaagctccttttatatatgaggaatttggcatctcctggctgggagcggctgagccaacagtccgatgcacttgtaatgtagatcatgctagtgactcgctaagtaagtccaggtgcttgcataagaggcagagtcctaag

SEQ ID NO: 39650 - DNA, 1621 bp, Bovine  19866880824128
  misc_feature (1)..(1): n is a, c, g, or t
ntttgggctaaaaaatactttcttttctttctactcagctttttaatattgaaatatagtcaacatccaatactatattatccataataatagtaatagtttcagcatagtgatttgacatatatatcatgaaatggttatcacaataatttgaatgaacatccatcatctcacatagctatggaatcaaagaaatggattttctttgtgtgtggtgaggactcaagatttactctcctaaaaacttttgtatttaatatagagcagtgttaattttacatattttgttgaagagaaagtcccaggtcatcacagttttaatatgcactttataactggaaatttaagtactgtttgacagtcttcattcatttcctcctccctttactccctgtctctggtaaccagaaatttgcttcatttttttctttgtttttgaagtgtaattggtctgtactatgttagttcctgttatacaacctagtgagttttttttctgtgcattttgaaatgatcaccacaaaaggtctagggtgctcaagggaggaggtgagatcagtgtcttcctactccactatcttgatcacacttttgtaatcattccactcagaaagcatgttgtataccttttcagctagatcctctagcatttttatcctaggaattttcaagagtcagtctgacatttcatcatctagactatctctggttctgctttcattgactctttccttattgttcacaggttacattttcttgattcttatttttctttttatcatatgcaggcatttgctgttaaaaacatgctaatgcaaacaatatttacttaagaaaagaacaaaatcctcctctgtctggcttttagagtgagaacctaagtcattctgatctgtcgctggtcgcaccagggctgtgtagtggctttagtttgaatcagttggctcgctgcaagtttgagttgttttgagggtgacctgggactttctcttcagcgagatttatgccctgcacctgccacagttctggagatctttttatggattacaactgacttaaccgctttctgaactttgtgaaaactctctttacagtctggcagtaagatttatggattgctaggggtttctttttggtctctagattaatccctgtggttttgtggcttagagagacttttttttttctctgctagtttgttcaagcctcctgagggcagccttattccccttgatgaagctttggaatgccatgtgtttttctcaggtgtcttgcattttctcaacatctggtgcctgagaaactgtagtgcctgcagtgaatttcctgtagttctctggtcctagttcttgcctttggagagtggcttctttgtgcttgtagaaggctctgtgggtgatctttctcagttctcctgccttgctctaagcctttggcatactgcatctgagcactcagtaaagacccattagaaagatttggccggtgaatttggtctctgtgcctggggtttctcagaatattaatctgtcgtgccagcccacatacagccttaaatttttgttaaaatttcagctggttctccttatccccaactattttttcctcatcactctgccag

SEQ ID NO: 39651 - DNA, 1666 bp, Bovine  19866880936614
  misc_feature (1)..(1): n is a, c, g, or t
ncaagttccgaaagtttcagagatgatcaaagtcttcctccaaaacctctagaaggcaccatggcatcgctccaagtgcaacagaagcagttctttgctggagaacaccgttaccttgcttgggtaccaggtgcaatggttggctttccctgagaggccatgttttacagaaaacaaggatctttacaaccacagcttgggacttccctggtggtccagaggttagaactttgccttccaatgtgggggtggtggtggtacaggtttgaaccctagttggggagctaagatccgacaaaccctggggccaaaataccaaaatataaaacagaaacaataccgtaacaaaattttaaagactttaaaaatagtccacatccaaaaaatctttttaaaaagcagggctcacgtccacatgtaagatgtgctcactgtgagccggggcaggaagcacacattcacatccccagggtcatgctctctcagggccattaaactcacttgagtctagaaccacccgaggttcacattattttctccctatctcctctccctatttaatttttaaaatagagcctagaaagttaaattcacataaagcagacacgaagtaggagcgtggtagagatgcgagtttgatccctgggtcaggaagatcccctggtaaaggaaatgacaatccaatccagtattcttgcctgggaaattccatggacaaaggagcctggtgggctacagaccatggggtcataggagtcaggcatgactgagcgactgagtatgcatacatgcactggactctacctagatgccagcagtatacctccttcctgccccccagggtgtgacaatcaaaataactccagatactgccaactgtcccctcaagagcaaaatcagcaagcagagtgaaaaacacctcagacacctatatgggagctggaagttcagaaagatcagaaagacagattgtactaatacttcatctgctgtcaggggctggggaaatttccccaaaacacatattcttttagaattcagtgctggcatttctggtgtcagacaagcaaaatttttcaaatgaggaaagataaaagcaaggttaaccttttgttgaaagtcaaagcatgcgtcacacaacttgcgtcttgagtctagtgtaaagattagtgattttctcagtgagtcggtcttctgtttgctaacattttcagtactagaataatacccagggccacacattcatacagtttcaaagatgtggcctacttcctgagggccgggggctcctgctggccacacccactactaatcaaagctgccaatcttgtggaaactctgatctgccacaaaatatcgggtttggtagtcttgcccctattcatcatttacagaccaatttcccataaaatctaagagtaatgatgcgatacaaggacaaagaaaaggtaaacgctgaccctacctctagcttgcttcattagtaagaactgtggtcaagggttttgcttaaataaagttaaactaatgcaatcaggccaccatagtagaatttaatgtgccagtaaaatcatatttaaatcctataatccaaagcaatcagaataatacaaccctgtctagttaattcagaaagtagtttactaagaatatctatctccaaatg

SEQ ID NO: 39652 - DNA, 1344 bp, Bovine  19866880974910
  misc_feature (1)..(1): n is a, c, g, or t
nactaacccttgtgtcttgtgtaaagggtaggcaacaatttgattgacaaaactggagcagtattaccagcagaggacctttcagtggatgagtgaataacttcaagaaacctcaacatggacttcccaggtggcatgggtgttgggggggtgggcagggggaatccacctgccgagcaggagatactggtttgatccctggagaaggaaatgacaacccatttcagtattcttcccatgaacagagaagcctggcaggctacagtcactggagtcttttttggaactccaggctccacagaataaatcactatgcagacaaaggaatcaccagttgtagagaagtagtgaggaatttgcagcagaaagcaaactaggatatcttagggcaaagggaaagaagaaatgtagcaaagaaactgacctagatgctaaaggattctgaaaatataaaccacatatgaaagtttatgtgtgagtgcataaattcacacatttaagtatcaaagttgcacccaacctggtcatagagaagaaggaaaacaaggaattttaaaccactgggcaagggagaaaactaacatttcttgagtatctactatgcatgtgcaaatgagggttcttgacaagagtttttatcctgtcaacatctctgtaaggactgtattgcaatactgtgcacccagaatgttgcacagagtttgattctttggttcactaattatctaccaatcaagacagtgtaaacatagtttctctaagaaggaactatatggcttcttatggatctctgctagtccctacagacatctacgatattagctataagtagttttgtgtcgattgacttgcatttttgtctcaggcacaagctgtaagcatcttgtatttctgaatctgtagcacctagcagaggggctggcacagaaagcattccgtgaatgggtgctgattgctggtaatgaattcaggatcttagttcttccactctctggagaaagatcaaatccgtttggatggttccttgatcactagtctgctttagtcattttaaggtgccatggcgagatgtcttgctttctgaaggtgaaggggctcaatcacctgctgactgttcctgttgtgctggtagcacttagggtaaaacagcttaaataatattactgaagtcaactgcctttcatctgcagatcaacatggcaacttttatcaccttctcagccaggaaaagcttttatcgggctcagctaacagctcgtattagtctcttgcaaggacttgccacatagcctttaaactgagatgctgcagagtcagccccagaagtaatccaaaaatgtggaa

SEQ ID NO: 39653 - DNA, 1357 bp, Bovine  19866881010131
  misc_feature (1)..(1): n is a, c, g, or t
ntccttcagctgtgctgcagctgcgggcactggtgacctagcagagtgagggagttgcagtgtcaacacacagcaggcgctgccagctcgcctctggctcctagaaggcagaacccaaatccaagatgcctagctgtctccagccttcatggaaatccaccagacaaagccacctgcagagagagggactgaaggctgggcgggaagactgaaggaagacacctgactgttcttcctgaagtcggcgctatagaggagaggagagcagctttttaaagcctttagagcttttaaagcgcagtcttgctggacagggactgcaaagcaggcaataattatacctgcctaatttgccctcttctttccttctttttttaatctcttttccactcatttgctttctctatttctccttcatattctccctttcataaaaatttcttgagtatctgtgccatgaagctctaggccttttaaagataattcagtcatccctgtcccttctccccaggcactcaggaactatcacaaatgtcccctttggggaaatgccaggaattcttacctgaaaaagctgagaagttgggggaggcttgagaaagacaaagtctgagactcttcctcatttgagagataagctaaatacacttgacaagtgttgaagctcagaaagcaaggtagtgagtttctcaacacatttcccaattaacaatttaacttaaccatttccctcatggtaaacttttactgagttgggatgagctctgtcttggagagagtctgtccctaacacatactcttgggtcaaatgtcacctggccttgctgttctgttctgaaaacagccatgtccaagctattctatacaccacataccttatacagaggtcagagatttgtagctactaaagatgctttgctttgctgcggtataaatctcattctgtaataagacagcatgattagaaatgtcctgagcaagctatagatttttctatttctttttttcaagcaaacatccagttctctttattgggatgcaaataaatctcctagcactacaaaagtacgagtcatatgagaggtttacaatggtccctagtactgtatgtaggaggattttaaataagacagctatcgataattaaaagcgaattagttcaatcaagttacagtatcatccttcagattaaagtgctctgatattaactaatgtggcagcaaacgtgatcctgagaaggaatcccactgccaatcatcttgcctcttaacttcaaaacaacaagaatgaacacagttcgtgtaataaccattctctcctcaagccctgcccacccccttggcttgtgacattgtct

SEQ ID NO: 39654 - DNA, 1860 bp, Bovine  19866881091166
  misc_feature (1)..(1): n is a, c, g, or t
ncatgactcacaattctctactttacagcctgtgccagtgtcttaattttcttatcagactgtcaacttcttgagttaatagattgcctcttctttaaattttatcacccctctcccaacgcttagaaaaatgactagcacaggtaaatatttgaaaaataaagcatttagtgactgaatgtacaaatgtaagaatgatggaatgcagggataaactgagtgggtgactttggattatttggggaagcctctatattgggaaagattttctccttttatctcttttgcctgccccaatgcccactagcacacactcttggtaacttaagtctgaaatcccaccagtagaagaccatgatttccatttattactttgatttgtgcaaaatgttgatgtcctaagaatcagaagcccacatttctcagagaaatgcttcatcatctacgacaagggtccccaacctcagggatctaatgtctgatgatctgaggtagagctgatgtagtaaaaatgaaataaagtacacaatatatgtaatgcacttgaatcatccgcaaaccatcccctccaccccatttcatataaaaattgtcttccatgaaactggaccctgatgccagaaaggtggttgtctatgatgaatcaaagttttgagaaggggaatttccccaaagcctagggacggttgcatacggaatggaatagcaagcctcataaaggccacagaagagaagcagaaggaaaaattgggccagtttggaggaattggccattaatacaagtctgtcttctttccaaccctgtggcttggtttacagccctcagagttccgcataggaaccttttcttctttatgtctcaccccttacctgtgacagctcagctgccctctggggagctaaggtttagggtctgctaggctgcccttgaaacagcacagcctgtcacacaccctactgcccctctggcccagggaagtcctcgttcccaacagggacatcatgtctcagagaggagaggaacagccgtgggacacgtggaaaggatggtatgttcaaaaagaaaactggccaacaacaccctctcaccccaaaggcaaggcatcactttagagagggctgagtgccaatttgttagaattgaataaatcagatttctaatgtttagtaacagatgttctggctacaagtcatgaaatcatttaatattgctttatgctccggttaaaaaaaaaaaaaaaaaaaaaagtcatctggctccacttggcccaggttacatatcttcctcaaagggtcaaaatgatttgatgcaactcttggatcaaaaggcctaatgctctctgtttgttacaggctgtggacggggtttgctcagaaaacagggcagatgctggcatcatgtatccaatggcctgagatgtgcccttgataacccccaaaacttgctctaattctgggtcttgaagaatctgaatgctctccagaaggctcactttttccatcctccacatatctcacacctggcagtgtgaacatcccaggaaggtaaaaataggttgaccagctatcctggatgtgactggcaaaatgccagagctttatctctatagccctgaaggggagcaaataactaggaatgatttggccttcttagaacaggctttgcagatgggtttggactcatctcctgagatggggagcaagggggaaatgtgcctgatgaagcctgataataaatcaggcttcaacatagataaacggtgaaattgccaagatgactcaaatgttgaaataaccaagttaatcaaaaagatctaaagaaaagtgtgataaataacaatacagtgattccttacccta

SEQ ID NO: 39655 - DNA, 1690 bp, Bovine  19866881170897
  misc_feature (1)..(1): n is a, c, g, or t
ntggactccaagacagtttttctcaatggggacactgggagcattttcagaaagataacagaattctccggcaaatggcttagttttcctagcttcagtacatcaaatgtccagtctcccctgctcaaccttgagcagttacaatgaatatgtcccatgtatagtacttgcctccatgaaaaccatggctgtatttagccattccttatcaatggacatttgggttgtttgccaagttttataaagtattgacaatgctgcaactactaataacatcctttgtatatctctctttgcatacttggaggtgttctgaggcttactaacagtgaacattctggttcaaggcaatacatatcacatgacatttcataatacataattgaaactgatttagaagtaaaccatgtgaaacaaatcaagttcttagagaaatccacgtttaaaagagaatgaaccatgcagtagtggtatttttaatatgagtaagcattttatttagcaattgctgtgtaccaagcattatggtaaagaattcccccttgcaatgcaggagatgccggtcctatccctgggttgggaagatctcctggagaagaaaatggcaaccgactccagtgttcttgcaaggagaatcccatggacagaggagccctggcgggctgtagcccgtagggttgcaaagagtcagacaagacttcgagatcatgtgcacacacacacaaaaacacaagcattatggtaagcattttatatattttagtttatcttctaataatccccttaaaaaaattagtttttaaaacaaatgctgaaaaagagaaagaaaaaatcccttggtgttcatagtgaaattcctataaacagtctgggccccataaaggaaagcgtctccatcattggtgaggcagccatccacataaccactggcggttgaggtatgcacacatggcttcagcttcaccagcagcttggacccagggaattcctaagcattccagcatatcaagacactgaaaagaaaaagtaggtgcaacaaatctaagaacatttgcattgctgctttttacggtgtttaacttactgttatattacaaatactaatagctttttaggtgtgttttaaattatgatatttaagaaataattggaaatgtgaacactgaatactttacagcattaaggaatgattgctgaacttttatgtacattaataaatactgtattgagtcatgtttttattttttaagagccgtatcttttagagaaaggtactgacctgttaagagaaacaatattatgtgtgggatttgcttcaaaatattgtggaagtagggaagcgggtgggagtatacgtgaaacaaaattgcttgagttgataatttttaaagattagtgatgggttacttttgtatttatttaaaattttctgtaatgaaaagctaaaaattttgatgtcaattaaaaaataatctatatccaattaaatattaatttaaaatttattttttttaagtaatgaatattcaattttcactattcattgttatctcaagattttggaaatatctttaaattataataattaatcacattaacatttacatttgtaaaaccatagcaatccttttcacatgatgaccaacccaatatgagctctttcaaagaagttgcaagtacacaattttgg

SEQ ID NO: 39656 - DNA, 1249 bp, Bovine  19866881285735
  misc_feature (1)..(1): n is a, c, g, or t
naaatgcttctgtttgagaaaaggacctgaggatcagcaacaatgacctccggagtttctctacttattttcgctcttaatttcaagttccaagtctcttattagcaactgtctcttaattataagtttctgtgggattccacagctgggtatggaaatcaagtgggtattcaggtgtcagatttaattaatctgggtaagaaaactgtaattcagggttttcttgataatcaaaagatgtattacccaacctttcactacttctctttgctcttttcagtagagaagtacaaattgtcatttttgaactagaatctcacctaataatagctactgaaccctgacagtggctggggggtagacagtatgttgaacacttcataaacttgacctctagccccatgacaactgagcaagtgattagagtggccttcttgtacaagtcatacaaccagagctagaatttgaacctggaactgtaaggaagatatcagtgcacaactacccagagataggtggtccgaagatatttcagcagaaggaacaggagcagaagcaggaaggtttgagaggctgaatcagtcctttggtgctgaaagaagggatgagagagcaatcactttgccaggctcttgtttggaaaagcctgttagatttgccaaaaccacaatctcagaagtgagtttatgtgaatgatgggaaaatggattaagcattattaaaaacctcctctcccaagggccattagaaggtcaacagtgtgtcagcttctctcttgagctaggaaacttgcattctccaaggatcactgtgatgccttaaactgttcagttgacccaggagaggatggcctcttatacataaggggaacaccattagcaccatgaatcacagttttggagactcaaatacataacctcatgcaacctagttatgggtcatcgtcagtatcatcactcaggtgtgccaggaaatgagtgactcatatagaaaatcaagttctggcctggatctgagcagcctgccactgcccttcttaggttttgcctggattagtaatcctcactgggttctctaactgtagcctggcttctgcatggctgcttgatggcatttctgaagtgcaaacctcaacatctgatcttctccctaaaaccctcagcagctctccattgtctacaggatgtagccccagcttgctgacatggcacagtcctgcctattcataaactcactttctgccaacctg

SEQ ID NO: 39657 - DNA, 907 bp, Bovine  19866881318344
  misc_feature (1)..(1): n is a, c, g, or t
nttctaaggatttgatgtcaggatcctagtaggtcattgcaataccagtctacttaggaaagtgctatttccaaatgcttcttgttctagaggtgttcagaaatttgagtgtttgaaattctttagaaaggcatgagagaagtcagtggtaagtataagtccactgaaagtgctgcttctgaaagagttagctgtgtatgggctgagtggtgtccaactctctgcaaccccctggactgtagctctccatgcttctcttccatggaattttccaggctagaatactgaagtgggtttgcatttcctactccagggaatcttcccaacccagggatcaaacccgagtctcttgagtctcctgcagtggcaagtaggttctttaccactctaccacctgggaagcctggaagagttagctacttggcattaatgacagtagtggatatgacacctgtcatgttcactagtatgaaactgtcatctgatcagaatgttccctttccctccaattctcttgaagtatcacaactttcaggctgtggtccactctttgctggaagactggggggaaatgtatggaaatctctagcttatctctcagggtctgcaacagttaaatccattccaatttcaagcaaaataattccttatggtgggaggaaggttttagttctcagatcaggtagtcattagctaagctattgtccatctgctaacttcaaacttactgacttcttttgggaaatgaaaataaaacccagaaatttaaaaaagagacctgaataagtttcatgtgctgccaaccataaaagataccatttgaatttatgaataacgaataaaagggctttcaattggactcaattttcttggctgctaccaaacttccctatcaaacaaatatcca

SEQ ID NO: 39658 - DNA, 979 bp, Bovine  19866881329554
  misc_feature (1)..(1): n is a, c, g, or t
naattgttaatatgtaaaagaggaacactgaataataatgacaggaaaatctgataagatctaacaattataaacactatcttttaaataagcaaatcagaaataactactcagtagttccccacagaatctttagaatattattaaaacaataaaaattagtgggcattgagttattcagtcaacaaattgaagatttccaaataactcgtgcaattagaccccattagatgtgtggtttttttttttttttcagaatcgttaaaaaccgaatcagaaatggagttcattgttttgaaatagaatgggaaaagcctggtatgtacatactgtaagcaaaatttataacatttagtcatgtatgtttagcagatatcatatgtaaaacgtgtatataaaaaagaaatgaatcacatacaccagtgtacctgtgctatatgtaactcataataaattttaaatgtcttaaattgatattccttttgtagttaatgtttacaaaaacaatatggaaatggttttgatgtctatttctaaggaaaatactactacaaatagtctggtcattggatttcactgtatagtcagttctcaagaaacgaaggttgctgatagcacctgtggtgcttcctttccttttttcctttctttctttccttccttttctttctttattgtatttagttttcatgggaatttatagtgtcaagtgactctatattttctgtagacagaaatacagtgagctctgaattagctccaaaactgaaggcaggggaagaactgagcacttaaaatggaaaataatcccaaattcatttctgtttggctttgaaattggattgtatgactacatgtgactgagtgagagaatagatttgtcaataagttctagttgatgaacgataaagaattacataagctgttcaagggaataataaaaaagtagctaaagaattttaaaaccgtgtagaaacag

SEQ ID NO: 39659 - DNA, 764 bp, Bovine  19866881392295
  misc_feature (1)..(1): n is a, c, g, or t
nttattttttaatatgtgtgatttgagcatgtccgtataaggatgtatgtgatataaaatagtacttcctttatttgtccttgacttacccttttataactacaaaagtccagtcttctattgcctggttggcagattatcctacaagaagcaagttgttcttattaaaaccacatgctcctggggtgtagcatggagtgaggtgctttatatgtctatgaagatagtgctgtgagcttcagattttatcaatattaaaggcagctttgctgttttaataggtaagcagcaaagccttcaaacgggtaattctgcattttaaaagcagcagtacccatgtagtgatttcttatgtgtttttactcattccattgtaagctgtccatttccttgtttaaatcatttgccaggtgaaatctgtgtgatgatcatatcaaccagcatcacttcttctacattctgagttagtgtgcttttattggttgtatgccatatgtcaatttttctatttacttttttgtatttgttatgctataacttgattcataacttgtgtgtgttagaacttatctattttgtctttgatgtaaaactattaaggaaaaaaatgtatctcccatctgcactggctgataagtaagcttcttttcatctgtggtgaccacagtttcaaaagcatattttgtgtgatttttctttcctcccagtgggcaatagagactttcaaattcgacatggtgggaagcagccagtagccaagaaat

SEQ ID NO: 39660 - DNA, 1516 bp, Bovine  19866881531081
  misc_feature (1)..(1): n is a, c, g, or t
ntcttctttaccgatgctgtcaaagtctgaactctgtttggtgttttgattgaacaattactcttcttgttcagaaatttcttgacttatctctggaataaaacacattcctttacattttaaaaaaaatgaccatttttcttttggggtggaaaaccactagagttgaaacaaactggctacttggagttataattccatgtgaagctatagttgatgaagacaaggttttctggcctgaaaaaatttttaaaaaggttgaaaaacaacttaccttcacatagagctgctgaaattcctcgagattcagtctcccgcttggacagtccttgagaaatcctttgtaccactgcttgagttcatgctcattaaactctgtgctcttcaccaggtcctccatcacttcaggggccagtttgctattctgtttccccattctgcctgaagaaaagcaaattaatgcaattagtgctgtgcctgtgatcatttcaagcttgattaggagccaagctagagttctgagcagtcccttggttggaagtccctctagcgtgtctgatcagtcttcccaaatctgtttccttctatttgatattctagaaaagagatgcatgaaaaagatttctcaaaaggctactgactttatcttccttcgtcatgtgtcatcttttacacacattgactcccacaaggaaagccaatcatctccttttatgctattcaggtaaagtatatggaaactgtttataatctcattttatgaattatgattccttagcacttactgcccagatacctaattctgcatttagtttgcagggttactaagtggggctattgacaagaacaataagaaggctttatcggcaaatcatcaaaaaatggctttgaaaacatgatcagcaatggtggttgttctaattctaaagtttctgctgttttttctttttcaaatggaaacagctcatttttactggtcacattagctctctatttctcttttcatcttcagagacttcctacaacattgccttcagtgttgacaacctctggggtggcttttttttttaagattggttagtgaatttcagttgatataatttcattattttattattactgctagtaagtaaaaataagtgcataaaataaaatataaaatatatcaatcatgggccaggttgtgtgaccaacatcactctcaagtgtaggtgggcagagcataggtttagagttatccctgatttggccagccatttatcttgtgtgctgcttagagaaatattaattatctgctttatcgtcaatttctttcccaataaagcacacattaaaaaaagaaaaactaaaaaactctttcagatttactgtgatggctaattaagaaataagtaggtaaacaaagaccaaaaattattccaaaatttaagcttttcccctttaatgttgttgttttgtaacaaaacggaagaaaacaaaacaaattaaccacagggtatttaaaaatcaagttaga

SEQ ID NO: 39661 - DNA, 1247 bp, Bovine  19866880369449
  misc_feature (1)..(1): n is a, c, g, or t
ncattcctcagagtctctggtgtccgagcaggctgtagggccggagatgggaccagtggtttgtcccagttaaaaagcccaggagctgatctgcagccttgccacttggtgcccagacaaatgcagcagctgcgaagggtccccctgccccgagcctgcccacagcctgcccacctccaacccacccacccatccttcctcacttctgtctgtacagactcagtgttcaaaagtcactggtggccagactcctgccccacccatcccgttatcccacacctccgaggctgcatcagatcagttcatttcagttcagtcaatcagtcatgcctgactctttgtcaccccatggactgcagcatgtcaggcttccctgtccatcaccaactcctggagcctactcaaactcatgcatcagaacagctatgagcacgctgagctcgactccctagggcttagcctctcagcccatgctggtccatctccccttcctcaccagctgccactgcccagcctcagtttctccaacagcccctcctctgaaaagccttccctgccaccccccccccccgcctgccccctccccactccctatggcatgggttagaagtgcttcctgctgctgctgcttctgttgcagcacatacaccctgtactgtaaccatctgtgtataaagctgtaaccctgagagagcaggccctattgctcacatgtctcagggcctgggacagagtgggactggggagtatgcacaatggcaggagttgggacagtgaatcaagcttcacagtccagagctgtgagtaggtctccagactcacttccctggcatctagggcacactggacctgaatcccatgcctggctgctttccacatgccctttctataactgggagatcccaggcctgggaggcaagaggctcacagtatggatccagctctgtactagcttgctgtgtgatcccaagccgtgtctaactctctctgggacgcagttttcctgtcagcccagggggggctctggcccatttgagctctgcctccccagtacatgttctaacatcagccaagctgatgtccctcctcctctaatcaatggtgtcttgataatgtttagtaactggttctctggggagaaagaaaaaaaaaaaaaggctctgatctttgcttctgtcaatttccatggtattactataaatactgccactgggctgattccaagctactaacttggcatcatggaa

SEQ ID NO: 39662 - DNA, 4035 bp, Bovine  19866880455243
  misc_feature (1)..(1): n is a, c, g, or t
ncaccgaattagggcccaccttaattcagtatgatctcgttttaattggatcacatctgcaaagattctattgtccaattaagtcatgttcacaggttttgggtggacacaagtgggggccgctattcaacccagtacagggaggaaaaggaaagccaataagccctgagagcctggctgacattcggggttgtgaatttgggtggggttccagcatgaatttggagttgtaccagctcccaggacacacagatgagttcatccagagctgggggtggttgggtggacacagtggaaggtcaaggggccaagagaatctgccgtttaaacaactggcctcggagtccaggctagtgggtcaggaaaggggtcataatacaagaagattaagaacttggaggggagggtcccagtgtagtccaaaggggctctgtaggaacaagaacaggtggggtatcatctcagagtggctcctgtgaaatgtagaaagacagaaatggaggaaggctgacgtaggggtgggagtatatagctgtcctaagggtgatgctgatgggagtgacagaggatcccgcagacaacattaaacatagattctttatggcggaggatgcagaaacctctgcccagagccccctgcatgaggcagaagcagtgcagtgagctctaacatgcagagactgcatcctgggctccctaaagcctcatagcccataatgtggtccaggctggcagcatcggcttgagagaaatgcaaagtctcaggccccatcccagccccactgaaccagagtctgcttttcagcaagaccccagcgagttgtttgctctttttcgtccattaaaaaatattttattggagtataatcactttacaatgttgtgttagtttctgctaaaccacaaaatgagtcaactgtgtgtatatggtatgtcccctccctcttggacctccctcccaccccatcccacccatctaggtcatcacagagcaccgagctgagctccctgggctttgtagcagattctcactagctatctattttacacatggtaacagatacgtgggcttcccaggtggctcagtggtaaagcatccacctgccaatgcagaagacacaagagacatgggtttgatccctgggtcgggatgatcccctggagaaggaaatggcaacccactccagtatccttgcctgggaaatcccatggacagaggagtctgatgggctacagtccccgaggtcacagagtcagacatggctgagtaactgggcacacacacagtatatatgtgtccatcctaatcctaagtatacatctctccaaagaagacacacagatagccacagaggcacatgtaaagatgctcaacattactaattattagagaattgcaaatcaaaactgcaatgaggtatcaactcacactggtcagaatggccatcttcaaaaaatcaaacaatacatgccagagagggtgtggagaaaagggaacccctcttggactatggttggtgggaatggaaatttgagtcgtgtgctctccaagtctgagaattgctgctgaaagattacttagggggctgcacccacatagagcccagcatccaacctgagaacacgctcactcttcttgcccagacccgggcaccttggttcctcctgacccatccagctagggcctgcctcctcaccagggacgactagctggcccaaaacaggagctgcacggtcctgtttcacaagatcccgggagactggaaggcgggtttcccagagatactggccgcagtaggagtaagctgccaggattttgaaggcgctcagttaggtgcccaggcagacagggagggagctgtgagggccttggggagacactgtgctctggaggtcagtggatgccagcaacagggtgggaggaggtagcctggctaatacctgggggaaggtggtcgaaaagaggtgaggcggttgtccagttgctggtctgagtctctgcaagctgctcagtgaccaaggtggcgttatggttataggcacgtgcatttcagatttgttctttccacggatgtttgtggccagattatgacagtcgtgttgaatttgggctagggagccaggttagaacagatttcagccagcattaaaaatttgttttctaacttttggtacctctcagttattgagttcctaagattgtttggctggtaggagactggatagtggggcaggagggggaaggtaatgacatggccccttgcctttaagatgcttctagtctggctgggggcaaagagtccactcttgggagaccaaccaggcctaagacctgctgctctgtcatccgggtcaagtacatggtgccatcgcctgggtcacaagtatgcatcgaggacaaggcaccctccctcccagagaaggtgggcatcccaaataaggagaggcacacagtgggtcatcccagaacacaggctgacacccctggcaggagaaataatgaagggctctgggttagtttcctagggcagccataattaccacaaactgggagacaggaaaacagaaaccgactgtcccacagtcctggaggctagaggtcaagctgttggaaaaatatggttctttctgtctgctccaggcctctctccttggcttgtaggaggcagtcttcatgttcggctggagttctctctgtgtgcagggctgtgcacaaatttccgcttttcatgaaaacaccaatcatactgaattaggattcaccctcatgttaacctcattacccctatccgattctttgtgaccccatggactgtagccctccagtctcctctgtcctagaattctccaggcaagaatactagagtggacagccattccttttccaagggatcttcccaacccaggaatcgaacccaggtctcctgcattacaggcagattctttaccatctgagccaccagggaagccctgtagagaccctgtctctgaataaattctgaggtattgggggttaggaataacctgtcggttgttccccgcaggccttggtgacatggcggtctctaacaccataggaagcaacgtgtttgacatccttcgtgggactcggcataccgtgggggctgcagaccatggttgttaattatgggtccacggtaagttcgtctcacttccttagtgagatgatgctgggcacttgtgcttcacagggagcgagcatggtgttggccctgcagctaggagctccagggggggcgctgccccgtctcctccgcaggctggcagccgctttgtgcaaaggagtccagagcagcctgggggtgcctgcaagaggccgcccgtgtttgcctggaactcacaggtgcttcagctgtgaacacccacctgttgcttccagaggagggaaaggataagcccaagtgcagtgggctcccagaacagatgggcctctgagcagcccagaggttcagggcgtgtgtgtttatttctccaggtgaagatcaacagtcggggtctggtctactccgtggcattgctgctgggctccgtcgctctcaccgtgagtttttacaattctagaatggtagtttgacacacacgtggtttccttcaattctgcacagtctctgaattcttccccttggccgtgagggataaagctgaaaaaacgtataaattcacagatacccccagacacagtttgtgccaagaatgttggcatccaccactacacttttccctaagctggtgagaagtccccagaaggagggactttcctctcttcttcctgcctggtctgtctccctacaatgatgcaagtaggagacacgttccccccacccccagtctattggagctgccctgggggcatgatggtcagggctcggggatggtacatggtgacacggaggtctccttattccacaggccccgaactgtggtaaacaatgcctcggcttagtttattccatccttacaagcacctgatgattttctactttacagaagaaattaaggctcgggaattaagta

SEQ ID NO: 39663 - DNA, 1094 bp, Bovine  19866880522300
  misc_feature (1)..(1): n is a, c, g, or t
nggctgctgtccatggggtcgcacatagtcggacacaactgaagcgacttagcatagcatgctgccctcctttgcctggaaaacaatttttcctgcacgaccctgcagacatatcaggtacctggtgaaaccgttctcactctgtggcaggttgagtcgcctgtgtctaataggactttgtggctctctctctgacagctctcttttatttgtccttatattactagcatgtgtggtaccttccttggtgcatagtacatgctcagtaaagattttgctaagtattaaaaatcggtttttattgttttgtctttgtattaaaataggacttgcttaacatccagtttattgattttataaatcatttaaaaatagagtcagaatgcagttcatttattcattcaacaagtgtttattgagtgtctaccctgtgccagcaacgaacaaggtaacagttcagaatagcactattgatacaacttgaaaattgtctatagttacaatatcagaaagttgctgttctaccaagcactatactgatttaggagcttgggcttttaaatcagacatggattgaaattccacatccatgggttacagattgtgggggtcttcagcaaattattaaatacttaacctttaaaaagcaaagttttcttatctgttaaaaagagataattctacctatcatgaagttgggaggattaaatgaaataatgaaggtaacatgcctaacctaacactgtgccgaacaaatagtaagcattaataaatgatggttgttatttttgttttccctcattgaggaaaacttttttggtctgcataacatctcccctttatcttaaaaaggccatattctggggagagggatatggagggaggtcttcatgaccttgtttttctttaatctctctttgaaacagttgcggcttctaacagtgaccttcctaaacagattagattataatttgttctcttctgagtagcaattagacagtcttgtcagagtttcaagcaatttgtataaacaaccatacaagcatccccacctagtgatttttcaaaacaagaagagcaggtttgtcattatt

SEQ ID NO: 39664 - DNA, 1744 bp, Bovine  19866880685204
  misc_feature (1)..(1): n is a, c, g, or t
ncggcctccctcccggaagcagtgcctggggccgtctggccaggacctgcagagggggcaacagagccgggaccacgaggtgtctcggggccctggctggtggggccagtcagtgcctcagccccgccgaagctcctccagctggtgggccaccttctccagctctgcctcgatggctgacaagctctccagctcctggtcctaggagagaacccccagagtcagccgggcactggagcgtggagcgcacagtcagcctggtggctcccagcttagctgtgtgaccttggatgggtggctttgcctcactgagcctcatctatttcatggggacagtgaagctgccctgctgcactgctctgagaagccggcgtgcaggagtgtgtgccctgaccccataccttccccagtggactcattcaggcccacctcctcctcaacggctctgggcagacatgtgggaaaccaagcctctggtgcctttcagagctgcttcgagtcccccaaccccaggctaaggctttgacagtggcttccagggtaaggccgtgcctgggtgtcctgtctgctgcaggcctccctacccgaggggcaggggaccaggacacaggcttgaggacgtgagcactgtctggacggggcctccatcctctgtccctgtcactgggtccccaagctctggctgccagggtggtccagggcagccggggaccctctgggactgacgcccacaagagcatgccctcagattcacagcaggagtcagccataccccagctttgaccgagaggggtgattttccaggagtccctgcctggggcccagtgagaagagacggacaatggttgccaatgaaatggggaccctagtggctcccatcttagagtaacaccccaggcaggagttctgtgattctgggctcattttttctaaaacctttgggctgagtcggggggccctgccctgtccagtcctcaggactcgggtccccatttctcctgcctgtagtccaaggtcccctctgcccgtggagaagggaagccagtcagtccctcagggcccctggctctccccagtttctgtgggtggggaaggcagtgatgaaaggtgccagccttggggaggggtgagaggcaagcagctgcttcctgaaggcctgtcccctcagcccctggggacacaggcagatgaactctcagcgccagctgccaaggaagagtcttctccccctcagactgctgagacccagtcccaggtccagagaatgggttggggacccgaggaaagggccgtattgtcttctgggtgggcagagaagagcactggggccacagcttcagacacatcccagcccccataaggccctgatgccccccggagaactaaagcctgaaccatggacccccccaaggcctcccccagctccaaggtgctgttgccagcccgccccaaagtcccatcccatcccctcccatggtatatgtcttcacacccctctgagtttcccaagtagcctgggcatagctagggtttcaaagctcatgtgcattctgatcatgataatgaggtgggcagagaggacttcttacccccatttcacaaatgagggaaccgatgaggctcagagaaggggagtgacctccccaaggtcacccagctaggaggaggtagaccccgggtcttctggcacatgcccatgcctccccaacccgtcaccaccagaccctccccactttgccatcag

SEQ ID NO: 39665 - DNA, 2567 bp, Bovine  19866880701408
  misc_feature (1)..(1): n is a, c, g, or t
ntattgagcccatctttgcatgaaatgttccaatggtatctctgattttcttgaagagatctctagtctttcccattctgttgttttcctctatttctttgcattgatcactgaagaaggctttcttatctcttcttgctattctttggaactctgcattcagatgcttatctctttcctttgcttttcgcttctcttcttttcacagctatttgcgaagagttgactcattggaaaagactctgatgctgggagggattgggggcaggaggagaaggggatgacagaggatgagatggctggatggcatcactgactcgatggacgtgagtctgggtgaactctgggagttggtgatggacagggaggccctggcgtgctgcgattcatggggtcgcaaagagtcggacacgactgagcgactgaactgaactgaagagaagggaagtatgaagcctcagagcttcagctgaagcagcaaactactagctacagacatcagttacgccagaaagacacagaaatcaggcttctgacagcaagacaggtagcaatgaaggatcagtggctaaagctacaatcagtcatccactcagtaaatcttcaggatagctttcagccctcaactcctgcaccctcttcactgggttatgatgtctatcagcatgctttagctttccagaatgatgatatggacttcgctgatctaatttggtcacaacaagaaataaatagattgtcaaatgaagttttaagacttgaggctgatgtcagccattggagacattttgctcaaacttctacagcatgtggagcagatagttttaatctaaaggaaatctataaactgcaaaatactatcaaggaacttgaacagaatcgaaataaggaaattgatgaccatcaacttgaaatggcagtactgcaggaaattcatcagcagaaactggcagaaataagtggcaggcatcgaaaacaattaaaggattacgaggagatgattcatgataagcaaaaagctatccaagtcctagccactgaaaaagtagcatctaccaagaaaatcaaaggacttgagattagagtaaaatacctttaaaaaaaaattatcttcggtagaaaaggaaatggatgctttagttagagaacaagaccagataaatgaaacgaataaaagatttaaaaaaggtgagttgaagccttctactaagaagcatagtgatgctgtgacagaaaaggaaaaagttcttccacagagaacatccctggaagaagcatccagacaacaagagccattgtctgatgctgaaaattaaatgatgagattaagtagcttgaagcagaataaaaatctcattgaagagaacctgaagcttcaaaaacgagcccaagttttagaaaaagagaattcgttattaaatagagaaaaggaacttcaactatcacttgtcagattgagcaatgaatatgaacccattaaaagctcaactataggacacacgaacttggaggaaaactcaatgagagcactgctgaaaagaaattactgatccctgagttaggagagctagacaggcagaaacaaaaaacgacaatgtgtgtggttttgatgaaagatcagaaataaaaaaaaaaatgaaggagacatcatcatcagtaaactaaaacaagatctagaatgtgaaaaaaaagagcgttcatcaacttgaagatgataaaatgaacattactaaagagttggatcggcaaaaagaaaagttaattcattaaaaaatgcaaaaaggacagaagcagaattgtgtcaggcggaacagaggctattggaagaaaggaggaagtctgagcaagctattaaagagctgtcaagtacagagaacccagacagctctgcctattagctggagtgtgagggtttggttaaactcggtcaagagaaatactgttgagcagatgattgctgaccacaaagaaaccaaagaaattttgtctagtttagaagagcagaagcagttgaaacaacataagggagaaagacatttttttattgaaaaacttcaaggaggttcacagcttcaggaggagttaaatcagtatgctcaagccttaagaaaaatggaaaatttgcagcaaaccatagtggaaaaagccaaagtcttgcatccatgagagaagaaaataatcatctgaaagaagaattggaacaactgagggaagaacacagtcaaaccgcaaacaatgattaaccctaaaactgttccagaaatagaatctgaggactctccatggagcacagttgaagataatcttgaaattaaatctcatcaaaagaaatagaaagatctcagataccaacgagagcaaatgaatattaaacacaatcagctcttttccgcccaaggggaggaaatcgggaatttgcaaaatgcagcagaacaaatcaaaacccagttgcctgaagaatcccagtacatgccagtagaatgctgtgacatttttcgagtaacagaaagaagttcagagccttcacatagaaaacggaaggaaaagcagacgatctaaagccgaaa

SEQ ID NO: 39666 - DNA, 1189 bp, Bovine  19866880714873
  misc_feature (1)..(1): n is a, c, g, or t
nctataaaaatgacttgcttcatcaattaagtaattgaagctttgattctaataatattgaacacctaataattccacatcatgtccccatatatcttcctgcatgggtgaaaccaatctaacaaaatactataaacatcatgggttccaaaatctactctctgggtcccagataatatcaattgatactaggctccaagagaatagagagaaaaacacagaatgagtaactgctacttttctttgtcagtgtggtgttcaagagccagaagaaggacagaagccccaccaattcctgccccagcccagatgtgtggcgtgagttgatggaactttctctagccccctcgttacacaatcagcaaagtgacgtgatcagcagagagctgggtgctctgcccccactcccctctgctttttggtcaagtgagtcgcgatggtcagcaagcctgcccttcctgggcagttattacagttcagataatagacccacaggcgtcagccctgcatttatccgctcacaatggctcagttctgcaccacagcattattccaagcccactttgaaacaaacgcgccttgaaacacacacagatgcgtccccctgcccccacgtctgctggaatcttgaaaagacacctcagcgaaaccaagctgggctataatgagaaaggactgttcctgagcacgagccccatggccggcagaactttaatcaataaactcaaatgccaggtgagattgagatgcaggggcagagtgagatgccaggccctgcctggcttgcagagttccagctgatatagggcttctcccagatttggtcacaaacagatgcggaggacatgggtgacctgagatgtttcatgatgtcctgtttagatgaaaatgccatcttccgcctctctatctcctttcatgcctgaggtgtccaatggcaagccagtcttttacattattggaggcactgggtccctaaagcttctctctaaataccggaagtaggagatgcacttattgtcactaccatccatatcactgtccccatggtcatcaggtgtgctctgattagttttcacagttacggagggctcctgttggtttgccatttaaccctcacaataccccgattgaggtatatgaggcagagactcccacatttatagaataagaaacgagactcatacag

SEQ ID NO: 39667 - DNA, 1227 bp, Bovine  19866880750358
  misc_feature (1)..(1): n is a, c, g, or t
ngctcgtcttggtttgcctggccccagacatcccaagtactaggataaaaagcctcaccacaggtgaggaaaatacatgttcagtgtcccaggcaaccccgctggccacttgggaagccacagtattatgcctgtcccatcaacttttcctttctgcccaaactatttaaggaagcagtcagaagtgaaaccttctggaaagttctgtagaaatggactagtgacttctatgattttgtgtgcgcgtgtgtccatctccctggatatcaaggatctgcctgcaatgcaggagacagaggatatgcgaattcaatccctgggttgggaagatgccctggagaaggaaatggcaacccactccagtattcttgcctggacagaagtctggggggtctacagaccatggggttgcaaagaatcaaacacgactgagcaattaaaccaccaccagtgcaaagaatcagacacgactgagcagttaaaccaccaccatttctctagatctgttaggaatccgtgaatagtttgcattgcttttattggcagtcccaagtctgttacatacattctgttgtgctttttgctgtctcggccttggtttacacagtggaaactttcagggaactcgcccgcagtggaacttcccctcttgagatgtttctttaatgtagtcgttgtttgcagttcaagactgccctgggaagcccccaggtgagactcagttcttcaatactagaccctacccttgaaatcttatatagcctttggccccagctactggggaaactcccttgtaccagactgtgtactagactctctgtgtaccaggcatgaggccgtcttcatggaagccattcctcgtgtctttaccacagccctacgaagcaggtgctaggcccccattttgcagcggagggaattgtgcccaaggatgaaactgggactgaagccaggctctcaactccatgttcaaagcaccttcatctgagcaggttgcttcttgtcttgcctccgtggtcctcatgtgcatggggcttcaagttagggctggtggggggcacagagagcggggtgtcgagcagaccatcatggcgtatacatgagaactttgaaactaccctccgagtatgtgaatattgttcagttgtgtccaactccttgcagtctgtccaactctatacagtccatggaattctccaggccagaatactggagtgggtagcctat

SEQ ID NO: 39668 - DNA, 1112 bp, Bovine  19866880760102
  misc_feature (1)..(1): n is a, c, g, or t
naggagcccattaccagaaagaagtggaccctcttctggagacctggaggagtgtcgatagaggtgattaatggagtagatagaacgacttagaagcagagattagagcggctaagtcactctggtttattaagcctctgtcaaagcagactgtgttgagaggaggcgcttgacatggtttggcagtgatttcacctggttgcaggaggctgtacctggggaatcctcagacccctgcaggaggggaagagcctcttaaaggaaaccttggctcatcaaacagcctcctcaggaaaatggaagccccatcacctgggctctttaaattagatggggcagcgtgctggagggtttataaaggaactggtagcagaatgaactggctgtgctgttgcatcttttctctaatttctgagtaattcttctatgggcctcagagggggcaaacccttgaaagaattgctttgaaacctctttggtcacttaaaaaccttgcttgtttttccttcactggcaaaaatcccaatgtagcgtggtgtgacaagtatctaaatggcttgagggctttgggtggcccgtatgcatttggaagaagaaaggaagaagtggaagggattggtatctaatttgtagaccacaggcactgggcaggcattgctgctgcttccacagcctctgagctccaagctcacagtgaatatttagacgcacacaatgaagtcagaagggccccgagagatcatggcggtgcacgtgttagagcacagagccgtgcgtctccatcgttaatgtgctcacggtcacctggggacttggttaaaatgcagacgcaggagatctgggggatgcctgaggctctgcattcctaacaagctcaggggagatatcagcattgctgctttggagtataataagtctcctacctacgaaacttcaagtttcaaacgttcaaagatgcaaacgtgtgttccataaacatcaggcatgagtgacattgcagcttgccctccgtctcctattgctgacgatccttcagctctaccatcttctccagctctaccatcttccacctcctctccctcctgccatcagaacctcttcctgcctgttca

SEQ ID NO: 39669 - DNA, 1051 bp, Bovine  19866880824160
  misc_feature (1)..(1): n is a, c, g, or t
ncgccactcaccagccacaccatcaggtaggagaagacagcgatccacagcgtggcgatgacgaaggtgagcatgaagaacttctccccagcggggcttgctgcagttggggatggtgatgcacaggaggaagatgagcggccaggtgaacacccacttgactttgtcccctcttgcctctgcagaggggtggggtggagccagaagggggagaaacactaggttacacaccatcagtctacctgcaggtttactttccatgccaaacaagaaaatgctacgaatatgactcccagcaacggactccacagaacgccacgcctccggattgtcaacctggaagtgatcgcagcaaaacggttgagtgcttgttgactgaataaccactgtcagtccaaatccttcatttgacagggtgaggaaaatgagacccagagctggaaaaatttgtacaggacagctggaatgggatgttgagtatgaataggctttggagtcaaacgtgcattggaattcaaatgaccttgagcaatcccctcaactccacttcctcctctgataataacagatgtaagtgacaacccaatagttgatgcagggaatatttgctacgtgaagcaggcataatgctaagcattttgcattttagtagttttcttcatctgttaaaaggaaacaatgcctctttcttggctgttgcaaaaatgacatgatacaatgtatataaaacagccagcacaaagaacttggccaaaaaggtgctctagaaatctcagctcatttgctccaaggtcataaactccaccagtggcagatgcaagactaaaaagtggtgttctgctgacaggtatgacctcactgacccctaccaagggaatccacaaacaatttaactgaggagaagtggccactgagtacaagcatagtgtaattatccttaataggtggcttatccttaataagccactgggtattttgagcacatgcacgctccaaagcaggcttgtgggtaatgccaaagatttggtggaggaagggacctctgaaaatt

SEQ ID NO: 39670 - DNA, 1282 bp, Bovine  19866880848604
  misc_feature (1)..(1): n is a, c, g, or t
ncttactatacggaataatggtaagtttacatctattaaaatgagttatttctgaggatttaaactgaagttttcatcagttctaaacttctttttattgtgggtttgtgatttgtaggaaaccaaaagataaacctgattatttcaaagtgagagaaaaaaaggaaaaattttgaaaatttaccacctaccctccaaggtacccaacaaagcagcaagtgagccaggcatgagtatagacaaaaagtgaacgatctgtagtgggcaagtgtggactggtgcccagagcagcactgcagaaacaggaaatggccagcgctgagcccactcaggcccctgctctgggcccggcagcagctgttacctgtaaccacccacagtgaagccctggctgcaaatgctggtgaccgacgagtccaggaggactgaacaggggaacacatacagagatatctgcaggtcccccaagagaggttctaaagaactctggatccacctcacaggtgttaggaatggaatgaaagagccacagatgaaagaatcaatctcacaagtgtcatatatatattcacccacagaattcaaggggagcgataagttcacaaaaagggagaagacgaaagccacagaccataatgaaggaattcaatcctggtaggctgatttaaatgcaaggttagcaaagggttcccctctgtccatgggatttcccaggaaagaatactggagtgggctgtcatttccttctccaggagatcttcctgacccagagcaaacctgcgtctccttcattggcaggaagattctctactactgatccatgagggaagcctttgaaatactgtgaattactggaattacagttattagcatacagattcaaattaacaacctcctttgaaaaaggccttctctaaaatgaagaatctactgtcctaattttcatgtttatctatatagaaaactagtattctaaaggataatcttatactcttatactcaacctactggaagaacttctgaaggtcacatcaatacagtgactatgaaaggctgtgaaaagcatacgctgagtttagtgcctgggatataaacaacacttagcacatgcttgtgactacttacttgaatagagaaaaagccactgtcatccatatttccagaaggctgctgttgaatttggagaaggtggttggggcgtacattgagggtggggagagaagggccaagtgtcattagtgtgtgtatttaaaataacatcttgtgcattcccatctacaaa

SEQ ID NO: 39671 - DNA, 860 bp, Bovine  19866880926257
  misc_feature (1)..(1): n is a, c, g, or t
natctatgcatttattgtagctaggaaactatatatatgtcgtaggtgaagaagtctcttttgtaactaaatattttttccatttcaagtttaaagaattgcttgattaattaggccttcatttgaaaaataatgctttcgtcactgagcaggattacttcctttattttattccagaagctaattagcacagagtaattactctgctatgaaaataggcaatctgaaaaataaacttggctctttgaattgggggcagaaaaatgaacccattgtactcagatagaaaacatctataaaagcagaagcaggaggctcctggcatctctggtctggattttcctttgccagccgagtgtagtcaaggggaaggtatgcagtgtcctgagagcctggccctagaggaaggctctaggtcagctgcagtgagagactgatgttaaaggcagatcagaatggtctcattcccattcttcctgtaacccatggtctcccgacctctgtgttcaccgtccataagcaccgaccttgtgagttttcctctgttcattacctgctcctcctcccctcatcccacctattaggactcgttcttgctcctccagatggtgcctagtggtaaagaaccagcctgccaacgcagaagacatgagacactccctgggtcgggaagatcccctggagaagggaatggcaacccactccagtattcttgcctggagaatcccatgaacacagaggagcctggtggactacagtccatgggcttgcaaagaggttggacacaacagcgatagggcacattgcttctccttgtcaatcttttccttttacacacccaatcagctgaaaagaataac

SEQ ID NO: 39672 - DNA, 1580 bp, Bovine  19866880962466
  misc_feature (1)..(1): n is a, c, g, or t
ntgccaggttataaagagaggaagctaccagtcagattctgccacgtgtgaatgtacaatcactagtgagaaatgaggctctaacacactgtccttatgctgagcacaacttggagggaagttcaaggtagaattgataacatattcatgtgtcaggattcagtgaaccttatagtcaggatcagactatcagaacccatcctgagccaacagtcaggttaagaccatttggtgatcaggcagcatccttaaggatgcaggcttcactttctggtttccctggatggggatgaccttcaaaatatctcagcctatccacgcatctccaaggtcactgatttaatcaatgggagtccatttctaacacccagtatgttggtcatcaaattaggattctgtttaccagtatatccaagtcattatgcagattatcagagtccctgagttgatggggaagagaggcagctgaaggacctggggtttggccattaattatgctaactcgctaccccaggggtgggaattctagattagggcactggcatcctctagggcaggggtccccaacttcaggatctaatgcctgatgatctgaggtggagctaatgtaataataacagggaaaaaagtacacaataaatgtagtgcacttgaatcatcctaaaaccatccctgcccctctttcctggtctgtggaaaaatcgtcttccataacacacatgccggagaaggcaatggcaccccactctagtacttttgcctagaaaatcccatggatggaggagcctggtaggctgcagtccatggggtcgctagagtcaggcacgactgagtgacttcactttcacttttcactttcatgcactggagaaggaaatggcaacccaccccagtgttcttgactggagaatcccagggatgggaagcctggttggctgtagtctctggggtcgcacagagtcggacacgactgaagcgacacagcagcaccagcagcagcagcataacacacacacacactatctatactgaaagctctgagtaaattacacatcttttaaaaagtggtcgcaggacagactgaaaatacagaatgccacctttaacacttatagactgtgggactcagatttgtttaactgccctgtttccccatccatgaagtgaggataagatctaccttaaggcttgctggtagagcttaagaaatgttagctgctgttgttaagtgaaaagaaatgcttctgagcttttcttctgtctccactgatatgaacaagacacgtgccctttagaatcattctttagtgctccttctctgatagaaaagctataggcttcattatagctggagagatgggaacaagaatggcagggactgggggagtagaggaaagaaaatggcattccagcacctgctctttgatcagcactgttgtgggtgacagtgaacaagaatcctgagccccagggagaagtgggggctttcctggggaggagaggccttgaacaaaaattcaagaatgacatgagctgtgaacaggtgcaagaggcagtcagagcagtcaaggggctgatct

SEQ ID NO: 39673 - DNA, 1367 bp, Bovine  19866880966266
  misc_feature (1)..(1): n is a, c, g, or t
nacacaagcctctgggtagtcccatggcttaacttgttgggtcatctgagaaatgtgtcctgaagacctactaagtgcccaacatgagctgcagtcatcttggggagctcttcctctgctgacagagcccagagcccagcagaacgacaaaggggtttgtcgatgatctgaccaccccctcagaattccatctacaggtgaggaagaggagacccaaaagaaagagactttctggctcacaggtggggtagacccagaaccagcatgctctggtcccaaagcatgcagctgctcacgtcaggcctcatgaatacattcccacaaataatcacatacaggaaacagatctcaatcactgtcaacgaagagaatgtttttatggcttgtggaaaatattgggttggccaaaaagtttgcttgggtttttaccataacgtgttatggaaaatacaatgtgatggtgaagctccaatactttggccacctgatttgaagagctaactcattggaaaagacgctgatgctggggaaaattgagggtaagaggtgaagggggcgactggatgagacagttggatggcatcactgactcaatggacatgagtttgagaaaactcagggagatagtgatggacagataagcctggagtgctatagtccatggggttgcaaagagtcagacatgacttagtgactgaacaacaacaataacatcatgtggaaaatctgaatgaactctggccaacccaatacattcatgccttaaaggttagagtggaaatatcaaccttctctttagaagtttgtgccttttgtatcttaattaagaaatcatttccaacctcagagtcataaagatgaattctatattctaccctaaaacgctttaattttgctttttgcagcaaaatcttgaattcctctgggatttattcttatataaggtgtgagggattctacatggattccttgttttcgcagcacctgagggctgcccccctccccatccccatctctctgccttgtcatgatgccccagcccagaactgggcccattactgcattcctcggttccatattccacattggcccatgtttattcctgtgcaaaacatcatactgtcttcattattttagctttataaaatatcttgctatctggcagggtgggaatattaaggaaaacactctttgtcactttgaaaggatagataaaggtatgactgcttagaatgataccctttaggggacgtccctggtggtccagtggttaagaagtcaccttccaatgcaggggttgtaggttccattcattgttggggaactaagatcccacacgtcacaggcaattcagcccatgcaccaca

SEQ ID NO: 39674 - DNA, 1728 bp, Bovine  19866880969236
  misc_feature (1)..(1): n is a, c, g, or t
ntgcttcccaagttgctagatattctcagtacccaagataaaccttagagaggatgatctggtagtccatcttattcctaaaagattatagttcctaaactttatatgtgttagaataacctgagaaatttggtgatactgtagctccactgttactaaccagagtttcaaggttagtattttgtaggctgttttagggtgatggaaaatatagtcaaataagtactcaggggatactgatgctctgaggaacacattctaagaaacattgccaaggtaagagttcgtgtggaaaaagatgaattttttgtacatttacttcagcatatcttgaatgccttctgtaagacagacctgtactggggtattatggtgaaaaaggtaaaattgggtccatttcagggggcttaattttctagtaaggcataataaaaattaatatttatatcatactttaatttttatgtttccctatatactaatctaatacagtctttaataactatgtgaggtatttattacctttgttttgcagataagcaaagtaaaggtttaagtaatacactcattgtcacagtgatttaaattgtgctttaaacacacatctttcaactccaagccctgtattctttttaatgtattgtgttccttcttttgatcggagagcaatttttggttccttaacatgctgtggtaaatgttaataaagataaatgagcaatacacagctttgaatgaaaagaaaatcatccaaaagccaatacattaatattagcattagtagtattaatattagcattaatattgggtaacatttccattttagaaactacctgttaggaagctgcttgattatcatcaaatttaaattttgttgagcaaagaaaaacattctgcggtattttctttcttattttgtaaaggtatggccttccttaattagttaacagactcttgaacagtatcgtttatttattgtgtattattactcactgtccgactaggttctttaaaaggtgcttggcagtctttagtaagaatttgtctgagaaacgccccccattttttcttacttgcgttttttttctgtttttactgaagtgtagttggtttacagtatgttagtttcaggtgtacaacatagtgatgcagtatttttatagatggtactcctttaaagttactataaaatattggctgcgttccctatgtaaatgcccctgttttaaaaaaaatatcttttattaaagttagtttttgatattctcttttataagaaaatcagtacagttactttctaattctgtttttctgatctagacttctaaagcacaaggatcagttagctctgatcaaagtgatatctgcaaactgcaaaatatcattaaggtaaggtggattgctgaaacaatggctattatacatctaaaatttgcttattaaaagtatacgcctaaattaataaaagactcatttataaaagtgttttatagattatgatattctttttttgccatttttatatcttctctattctttatgacacttttaagagtataaaaatatctctttccaaagtcatttggttttgctgctaagtcgcttcagtcgtgtctgactctgtgcgacccccatagactgcagcccaccaggctcccctgtccctgggattctcaaggcaagaacactggagtgggttgccgtttccttctccaatgcacgaaagtg

SEQ ID NO: 39675 - DNA, 1633 bp, Bovine  19866880988423
  misc_feature (1)..(1): n is a, c, g, or t
nccgttgtgctgaggtcaacccgtacgtggagagggcagccctaattctctcctgtgtgtcttgggttgggcttgctggaagcctagagatacagtgactaagatctgaaattgggcccgggggagatccgatctggtcctcagggcctgactttgctctgttgtttctgtagaggtgacagaagaggtgtcctccaaggatgctgcagaaaaaagagacgattctaaagaggtggagaagagtgatgaagactcggacggagacaggcctcaggcctccccagggcttgggccggggcccaaggttgaggaggacaacccaggcccctggggaggaggaggaggcccctctccaacgcccaccccctagccagcctccccagcccgaaatacccaggcccacaggccaaggaggacagcgagggtccctcccagggtccagccagcagggagaagggcctgagtgcagagcaagggaggcagacagagagagaagaggaggaggagaagtgggaggaggcggaggctagagagaaggccgtcccggaggaagaaagcccgcccaccgcagcgtttaaacccccaccgagcctcggcaacaaggagacgcagaggggtgagactgtgtctgatgtctgagacttcagcagatgtgttggggagagggggatgggtgggaggggggtcccctgatccataatctcattccaccttctcaacaaccctgaaaggtaggtattattcccatctgccagatgggaaaccaaggctcagagaggttaagtaatttgcccatggtcacacagctgatttgtagtacacgcggagattccatcccaggtttgtctggttccaaaaccctgcatcttccactagtccacatagcccctctccacccccaggaggggagaggggctttgcagggtgagtgggtgggatttgggaaccgaacagcagcatgattggagggaacaggctggtctggggacgctgctagcttcagccagggcttaggaagaggtcctggctcctcctgagggcctgatcagggtctttccttcctccccagccgggcgatccctgggttggggcttctgggatgagagggctaaggaagaggtgacttggagctttagagggtcttgtaaagcatggcgtcaaggtgacctttccctccaaggggagtctgttgtgagaggctgagctggatctggcgtacagggtctgtggtcacaacagtggccacagagagacctaagggagtggcagggacccagaaaggtggcagccgctcccttattctcccgctcttatctaccagctgctccaggttggcccgaggatggagccgggaagatgggggctgaggaggccaagccccctgaggggaagggggagtgggcacactcccggcaggaggaagaggagatggcaagggcccctcaagtcctcttccgtggtgggaagagcggggagcccgagcaggaggagcagctctccaaggagtgggaggacgccaagcgatggagcaagatggaccagctggccaaggagctgacggccgagaagcggctggagggggaggaggaggaaaaggaggaccccgaccgctccatgaggctctccttccggg

SEQ ID NO: 39676 - DNA, 3232 bp, Bovine  19866881061899
  misc_feature (1)..(1): n is a, c, g, or t
nttataaatcaaaagtatttttgcacagttttaataaatacttaattgtctagtgagttagctatcatgcaagtggagagggatgactgtacttgggctcagtttaggattttatcaggagtcattcacaatttcagaaaattccatcatcaaatgtcaacacccactcatgggtggccagtccaagcatatcagcctgcactggcacccacagggcctggagacttcctgtgtgagggcaacagattacatcactcagcgttccagcatcttcctgcccaaacagttacacactagatgtattcttttatatgcattacttgtgccttttatgatatgctttcgggcattatgctgatttggtaaaatcgtatataggtaaattgttttacctctaactttcatttttgggagtgtggtgggcagtctctcagatacctgacattcaagctccccttggcatgtggcctgatcgtagggatctgctcctaacagaatatggcaaaagtgagggctgtcacgtccgagattcggttacaaacagactgtggcttccatctcggcacctccttgcccttgctgggaggggaagcagtccccagtgatgtgagctgttctatggacaagcctgaggcctgcccaccacctcatgcgggatcttgaaagcagattgttgcccaggggagccttgacgtaactgttttctggacggtgagtacacagatgagagatcctcagccagagggcttggctaagccactcccagatttgatccatagaaaaagagggcaataaaagtttgctgtcttaagctgctgagtatgagggaaatttgttacatggcgacagctaactaatacaaagatcacggttatcaaatccagttggctctagatgtccttagggggagaactattctagaatacatttcatactctgagatctgggcatgccacatgcatctgccctcttgatgtgacctgccctcattcagtcacttgaaagcgccttttggatggaaactgctcccctgtgggtgacacggtcctcagcagtaaactgtgtcacgggcttcactgccgtgtcactgtcacatggtatgcatgatgtcaccccaggcctcaggggtccctgtttcaggccctctgctttttctgcccacatcctcgctcccagctgcctaacctgagggctcgcagctggtctctctcttcccagctctgcagtgagctaggcaaccagaaactctgctccttgggaaactggctctaagtgaggatctgaaggcctctgatgagcacattcttaagcttaactgcatcaaccatatgatgcctgctttagttttttcaaggccgttctgccctcaaggtggtaccttggatgtgcttgataaccaaggcattgggtatgaggtttttgggacagggaagcaccgtggaggggaataggtcaactcgaccacagtgagtggccagcacaccccagggccggggtgccgtgggttctctggtcatagtgccagggacaggacagtggggcgggggagggtgtgttaactcacggcaatgagcacgatgacagacagggtgtagtacacggagtctcggcacacgggcccaccatgtcagacggaccacctgccgagcaaagggccgttagcgtcaccagctggggggtgtcccattgcccccagacccctgcagctgcagacacatgccctcggagctcatcttaactgtccaccaggaccacagtgtgtctggctgctccaggccaccttgctctcttggtcatatttggggacagaaggatagtgtgttcacattcataagtaatggcaaagctgccccctgctccttcacggtgaccacatggcatgtataccaggagaagccatgtggctgggggaggccagagacactcactcttctctcagcgctagaactttctgggggtgactggctgcctccctctacctccctggccagaaagagctttccatgagaccgactctctgaggccaagtctaatgtccccctgtggctccaaggatcaggaagatgtgataggaaatcaacaagccagcttcatgcacccatagggaggcagaagacaggccccaagtaagtccagagtctagttcatggtcagggttacaggaaacgcttcttaaatatttactgctgtcaaataaatgtcccacaacccacccccgagaccagccaagggggcagctgatgctctttctgctctcagacccatgggtggaaggaacacaggacacccctgttacacgcaaggaaaggggcttggaggggacacccccgctcaaagccacagggagttacaggcatggctaaggatgggccttggatctctcccacgctatccctatgtcatttcatgagaagagagacaccactgacctgccctgcgaataatccacaaactccgattatacacaggatgttgaacacagcagagcccacgatggttccgaccccaacatctccgtgggtgatgaacacgcctgggaagaaagaggcacaaacctcatgtgcaagcccaggcctgcccttcctcagaccctggccggttccgtgtcccccaccccatgaatggacaggacttgttcttactaccagggaacacctgagatgctggtgagaacaacaaaaccagaggtggaagagtcctcagggacccgctacaccaatcctcccattttgggaacagctttatcgataattcacatgctgtaaaattcacccatttaaaatatcactttagcattttctggtatagtcagaattatacaatcatcactgcaatctaattttagaacgttttcatcacctcaaaaaacacccatacctgtgagtaccctactccactccacaccccaggagtggagtaattcactttctctccacgtctcccattttacagatgagaaaactgacactcagagctgaaaaaacatgcccacaagagtctgggcacccaacctgggttcttcgtatatcccatgtctcaagccgatgggatttcttaccaataacagaggcaaacagctctggtgttgagcttcccgcagccatgaaggtggctccagccacatcttcgctcagatggagtttctgaaacagaagtgaccgcagaccctcaggctgtactgcaggtgcagtaagcatgcctactggccacttacggagagcgcggggcacag

SEQ ID NO: 39677 - DNA, 3006 bp, Bovine  19866881119039
  misc_feature (1)..(1): n is a, c, g, or t
ntgtgtgtgtgtgtgtgtgtgtgtgtgcaaagtcgcttcagtcatgtccaaccttttgtgacccccatgtaaaccaaagcccaccaggctcctctgtccatgggattctccaggcaagaagactggagtgggttgtcatgcacaaggtaggtattcaggaaacgcctgctgagtcacgagtatttggccttccacttctcttctgatatgaacccaggagctgctaggatgggctctgcctggagggatgaccagaagatggtgtggctcactggtctcctttcccagttcctggctttccaaactgctgcctggatgctgagccatgatccttcctggtggagcgtgttggacaaagatgtgcttccataagatgttgatctttcttaaacctcctaattagtgtattcccttttgggaagagaaactgtgaattgaatttttcaaaaggaaaaaaaattgcctcaaaacatgccattctctcttcactttctatcctggttaaaaataaccccatattctaagccctgacgtttatgctgaaactatgaaagctagacgggcagtctggggagtaactgaaagagcttcaaatttctatcattccaacttctgtgttttagatatcacccatgtgccagaaaccaaaagcaaaaaaaaagaaaaggaaagtcgtgattccctccaatgctatggtttaaaataatgttgcaaagaattgcatatttttcaaggacaacagttgaaatggataggttttatagcatcactcccatgtcccaaacaggagtaaaaataattagattaaatcattggcttaactagcatgaaaatgagtctaaaatctgctctctcatttcagtacattccgaaagagattaagcaccatgaaaaataaaaatatgattggaaggtccagtggaagtattgttctctccaggagaaaccactgtggaattttatggttggaagaagttccagatgccacgtgacccagctgttctccactcaagaggggacatgggcttaccaaaatcacctgagaaacattttctaagccatccttgccatctccacctctctccctgcccttatgctgagcatccttgtcctgcccactgacaatgccttaacctcccattttcaagggaagagagaacatggatttccagacaggtcaagagctttcctagcatcactgctggttggcagcagcaggacaaagagcccaaacatacaaacagatactggccaggccatacgggacaacaaaacgttgactcatgtcctctgtaatagccaatccaggaagcccaaccataagccacagtgactggcccactagccagagtaatggtccagatggtcaagacatgatcagcgagggccagcctctctactgcttgtcctgatttccaactcaatccaactgaatccaacaagagcattttccagaaaggccaataaaatatctgaaggggatcagtcatcagactcctgttcgttacacagcaacgcaactctgaaccgctcaccagtgggcaccatgtagcactattaagttatgaaaaagacagacagctttttcataggcacacttttctcagcatgacttatttcatgtattaaacaaaaatagcatgttgtctgatcaatatgcagaaacaattattgtctggctgtatatacagaaaccagaagtttgtgccaagtcccagggacagagctctatatggtgagccctcatgggattgggccatgttgactggaggtccctgatgtaaccctggcacgtccactagatcctggcacataggaggtacccagattcgtttcctagggtttatgtatgaaagtaccacacgttaggtgacctaaaatgacagcaatttattcccctgtggttctgaaggctggaaatggggaaaaccaaggtgtggatggggttggttccttccagagactcagggaaatgtatttctgactctcttctggcttccagtgacagccagcaacccctggagttccttgacttatagacacatcactccagtctctgtttcatcatcatacagcttctcctctgggtgtttctgtgtcttcacatggccttcttgtaagggaccagtcattggatttagggcctgccccctattctgggatgaccccatcttgactaattatatctgcaaaggccctatttccaaatgagatcccagtcacaatgctgggcttccctggtggctcagatggtaaagaattcacctgcaatgcaggagaccagagtttgatccctgggttgggaagatcccctggagaatggaatggctacccactctagtattcttgcctgagaaatcccatggacagaggagcctggcaggctacagttcatggagtctcaaagagtaggacatgactgagtgaccaacactttcacagatgccagggtctaggacttcgatacctctttgaggggacacagctcaacaccataattgtttttattatttattgacttgattaacctttatctacagaacacagaagactactctgcattaatgagttcttaagaacaatataataatggttgttattcagtcttttatatgctcccaaaccatcttattcacatctgctgccccaaatgattaatatgtccccctcactctcccaagtgtaccagtttgatgataaactttagggctattctattcgttagaagttaagtgccctttagtaaatactcattatcaactagtcaagagagttcaagttaacccctgcctatgtgccaggaaagacttccaccatttccgacatagacattcagtacatccccttcctagacgtgctaaatcgcttcagtcatgtctgactctttgtgaccctatggactatagccatccaggctcctctgtccttgggattttccaggcaagaatattggagtgggttaccattcccttcttccaggggatcttcccaacccagggaatcaaa

SEQ ID NO: 39678 - DNA, 993 bp, Bovine  19866881179887
  misc_feature (1)..(1): n is a, c, g, or t
ncccatgtactgtagcccaccaggttcctctgtctatggaattccccaggcaagaatactagagtgggttgccatttccttctccagggggccttcccaacccagggatcgaacccatgtctcctgcattacaggcggattgtttacccactgagccacctaggaagccccaaatgcttattataaacttccaggataaaagtccctcctctgtgaatataatttggctctaaaagtgatgggttttcctttaaaacaaacaaaaaaaatctgctttttaagataagtctcccaataaaacctagaaaacattattagctcccctagacattcagaaaatgttcccactttaaaacaagcagcatttaatgaaatatagattctttcacttttttcccctgtaatcaaacttctttaatagaattgctgctgtcagttcaagggcaggagtctgcttcaaggctcagctcagagatggagaattatagagggaataacttggcattcttgtgtccaggatcttgtttccaggagaaatggaactgtctgggatataagggcagatcaaacagacatttctgccatgaaaatgagtcagtttttgattctccaaaccaatgatttgtgagctggtgatttatcgaatcctgggcactctttgagaattagaaacaagtaaggttgcctttctgctataaggacatatcgtctgggctccagtggggagggggatggtgggttataaatgaccttgtccttggtgagaaatggcttctactggttcagctgcagcaccgtgctctgtgaccccgtgcatatgctggagggctgtggaggggagcaaatgccatcatggcctgagttctgccagcagagacagagtaaccggcagagccaccagctgctcatgacccatcaccctctgtacctacccaagtcttctggacacaccccgagcccatgaggtaggcgccacagccacaaatgtccctg

SEQ ID NO: 39679 - DNA, 1067 bp, Bovine  19866881199496
  misc_feature (1)..(1): n is a, c, g, or t
nagtccttcctgctcaccacagccaagtgtaacagagcctcagcacctttgtacacagtgccctacaattaggtgcatatttcgcttactttcccaagtagatgaactgaaaactcctagatgtccaaccaatatttgctgaatggatgggtatggggggggaacagatggtgggataaagggatggagagatggagagctggctgcatggatggatgggtgagaatggctgagatttcactggtttccccgatagtttcattggggaaaaaaaaacctgaatatatcttagacagttgctctgtcaaaatgacatgaacagaaaaaagcaagcataacaaatgctgtcatcaggtgccactggtagagagctaagtctttgctttgaaccgcaacgcgtgcgttctaagctgcatcagttgtctgactcttggtgactctatgcactgtagcccaccaggacgccaggctcctctgtccctggggattctccaggcaagaatactggagcaggttgccaggccctcctccaggggctcttcctgacccagggattaaaccggcatcgcttatgtctcctgctttggtgggttctttaccgctagcaccacctaggaagcccttgaactgcagcatccccagggaaacgtacagtatccatctctgtcactgattgagattaagggggctggggctacggtgggtggggaaagaaatccccagtgtattccttcttgagcgctttctcctttagccagagatcgtcagattgtgaatttcagatgcaaagtcctttacttccttagtccctggaggtgggtgaagatgcacatttattaacccaggaaacaacccaaccctgggaaaatccgtgcaggaggggaatgtatctctgctacccctggggtctcctcttcttctgggctgtccctctccatcccccttacttctctttctgccttgaggaaacaggccctttcatcagccctgacacctcgtactgaatgttgttagtcaaggagttgggatggggtctggcattttgaagtcccatgtcttaactaggg

SEQ ID NO: 39680 - DNA, 3574 bp, Bovine  19866881200518
  misc_feature (1)..(1): n is a, c, g, or t
ntgaaaaagcagcacccaagggaggggagggtgcagaggggacggagagagatggcagatttattcagaggtggcagaagtcacttccccccccacatctcattggccaaaacaggtcgaatggccagactggacacagtgggatggaaagtatgatcctcctgccagtgtgtgactggcacggaggggtggcggctgttttgaacaactgttgtcagctattgcactcctgattcccctctgtgctgctccaaggtgacacgcgtgtcaccacttaagcttcatcagggacactcagaggccagacgtgtatgtgtggcaggtggtggctgagaactggcagaaaagacattggctcgggggatataggaggcgaagggacaggacacaggatggaggtctgaccggcctccaggtgcagccttgcccctttatggctgaaattaactagctggctgggggacacgagctgtctttttcattaatctgcacccttgaagatggcagcagtgacaccttcatgtgatggcattttctcctggctgatatataacagaaagtcagttggccccatctgcagaagcagaatcatgagacagcagcggatggtgtggtctggcccctacaggaagtgactgcccggtactcagtctgagccacttggcctcgtttcggggcagccccacttcccttcttgcctatcccctagtccacactgacccctggcattagaaaggctggcctgttgaactcagttaagatttcttcttgtttttgagcagatctcccacccttggacctgtgatttggggccaactagttgaatgagataaatacacttgtgcttgggaacaaagcccacctcggtggtgaatgttgtgctgattggtgctgatgattatcaccactggattgggggacctttcaaaccaaggaggggagcagttctagatgagtcctcccaggcagtagagatctgtatgtattggagggcagagtgtcacacaaattgcctttgaggtccgcactgaagatttgctttggtgctcttgggtttgaccctttcaccaactgagccattatcctagaatgagatttcacctgtgtttcggccaaaacatattaagtccataaaaaggtaaggaatgattatgttaaagtcagggttggtatgaagaaggcaagctcttgatattttatcaggcagggggcattgtatcatggtgagtcttgtgcttttgtcaaggcaaacctcttttgagatcatgagctttggaaagactgacagttctaggtttttattctgtccctggcatcttctgacattagacaagtatcttaacatctctgtgcttcaattttctcgtctgcaaaatgggaacatctgtagcatggctgttggaggattgatgagtgaacacagtagggatgagaggcagtgctgcctggcacataggaagtactcagcctcggacctgtgatattgtgacctacaattagaaatatacacggttttcattcccattcctggcacagagctccctcagaattttctaagtaataagagccataactgtaacttgagacacgtaacaaagcctttcaaccacacctgagtttatgtcaatgtggtgactttgggaaagtacctaaggatgggggttggttgccaggaaaccaatcattctattggaatgttggaaatttcagttccactcccaacctctgggaaagggagaggagctggaggttgagtatctctgatggccaatgatttgatcaatcatgtctgtgaaatgaagcctccataaaaatccaaagggaccgggttcagagagcttcctggtttgtgaacacaatggagattggggagagtggtgtgctcagagagcagagaagctctggccccttcctgcatacgttgtcctgtgtgtctcttccatttggctgttcctgagttatatcttttaatacaaaccagtgatcttgtgagtaaatgggtttcctgagttctgcaacccactctagcagattaattgaacccaagtcatcagaacttccgatcccataggtgattggtcacaagcacgggtaacaacctagacttgtgattagtgtctgaagtggggtgggatctgacgctggctctgggtacatagtgtcagcattgagttagactgggaacttccctagaggtccattgattaagactctgcactttcaatgcaggggggtgtgagtttggtcagggaaactaagatttcacatgctgcatggctcagccaaaaaaaatatgttgttacatttttgaaaataaagaactgagttaaattgtaggacacccagtgggcgctggagaatagcttggtggtttggaaagcacagactctgggcttggtgtcagaacagaggtaactataatatcctagtgctgtctcctgacaaaatgaagtcatgtatgggggaaagctgtcacagtgtctgagtgtagtaagcactcaataaattctagcagttataattagctgtggggttgagtaacatgcagctcagacctcaaaaccatcacttcctgcagtgccgtgctcttgcaggactcctctaagaagttaattcattcttcttatctcatattggttattacctgtgcaggttttggcaaaaaaaaagtaaccgcagtttgtatctttctattttcagtaattcctctttcagcttccagaattgaggttggtctaggaaaaaatacatcatcagataattgaactccgagaaccttactgtaaatctttgactttgtttctttcttttttttttaatagatttttgaatcatagtggtgcatattttttagccttcttttttcacttaaacattttattatgagctttctctgtgttattaaacatttcaaagactttgcatccaatgaactgtgtgctgaatgacacttaggaaggctctgtaagacacggcgcctgacattggccaatgctgagcggacccacacgcacttaaccagaaatggaagtcagatggtcataagagctagaatgttagtgtgcactttgagggcaccaggagttttatctggctctgtggaaatggaacaccaggggaggttttgacagagaggggagaaagatccagggccacgtggccttggaggcaagagaagagggaagtggtttgtggggtgaagggaagtatcacactgtcaccaggccccagagagtggcctcagcctgtgtgtacagtgactgccaccttcaggggctttgcagcttcagaagatgtgtctgagagagaagacagtccaactcagcagcttcagagagccaggggcctctgcatagctacaacccctctttttggggtgactccagagggatcgggccccagtgcctcctgggcttcctgtcacaagaaaactatgggtttggattatcaacatttgtgtctggggctcccaccttctttccagctgtttctgcctccctctgccaccttccatgaaaaactgctctcaaaattctctagccagtaaacagattcatactaacgtgtaaagact

SEQ ID NO: 39681 - DNA, 1604 bp, Bovine  19866881256451
  misc_feature (1)..(1): n is a, c, g, or t
ntcgttctgactctttccgactctttgtgaccccatggcactgtagcataccagacatccgtgtccttcattgtctcccagagtttgctcaaacgcattccattaagtcggtgatgacacccaaccatctcatcctctgctgcccccttctccttttgccttcagtctttcccagcatcagggtcttctccagagagccagctctttgcatcaggtggccaaagtactggagcttctgcttcagcatcagtccttccaatgaatattcagggttgatttcctttaggatggactggtttggtcccttgcagtccaagggactctcaagagccttctccagcaccacagtttgaaagcatcagttcttcaatgctcagctttttttatggtctaacttttacatttgtactggaaaagtcatagctttgactatacataagtctttctaaatgaaggctagactgtccagccccagattttattcccttattggggctataaaactaaccagggtagacctagttccacacttgaatgaaacccatacttttcctttgaagtttttgttctgcagcaagagaaatgggtgggttttagcaagcatgaagtctagagcaaggggaaatttccttataataagaaaataatcctattttccaactgacagccataacacaaagcagtacattgagaaggcaaaaaaattcagctctcacacaacgcttttaagtaggtcaaggaggttttgtgttatctgaggataagtgagtggaagacttttaaaaatcccctagtgtgttagtggtcaagaatactgaaactgaaactcaattaaagatttaagcaactgcagaaaaataatctcggaaacactttgtcaaactatttccaaagccaagaatgtgtaaaaactcaacaaaagatttagagctgccccaacaaaagccaggagcacacgcggagacgggaagtctggccacgcacgatgatgaagcatgcggcgttttccacttcaagcatgtaacctggttttaatctttttccagaaatgtttccaaattagaagaggaaaaaaaaaaaactttaaaagatattaataagtctaaactgtactctgacatcagacttgactttccagctcagactgataggctatgacatctgaataagaaccaggacatatagatttaataacacatctctaccccaccctccaaaatctcatatccacttttagatggcatggaactcttttttattcatggttgggaaaaaagcccgaacacacctaacatgacctttaaaacttcattctgataaaaaataagaaaatatccacagctagtatatcaaaacctttgaagaatttataggacatttaaagtcatagtatcaatatcattaagaatagaactggtcagatttttggttaggcactggcaggctactgcaaaggcagtgacattcctgataggaagcactatacctgtgcccagcccaggatctccatatgctacttacgtacagagagaccaccagtgcttagcgtggacaaaatgagaattcagacatgtacacaggaagaaaagccaaaacagacatat

SEQ ID NO: 39682 - DNA, 1664 bp, Bovine  19866881526683
  misc_feature (1)..(1): n is a, c, g, or t
ntcctgttcctgctatgtcccgcaacatttactaaattaattgttaggagattatttccagagaaaaattgtacaagtaattgttttgtgaataataaaattcacaagagtaaattatttcaaccaacctgtaatgacacaagttttccttccagattttctgcttttttcttccattcagcaacaagctgtttgtgcttttctagttcagcagaatacatagctttttcctctaaagaggagaaaaaagttacattagcattttataattgtgtgataaaattatataattatattatataatatatatattatataatatatatataatataataattatataatataaaatataaaaagtgtgataaaattataattttaaaccacttgaaactttaataatacaacaaaaacattaatagctcaaatgtctcaacaagaaaattatatatgccttagtagtgatgttaaccggaattaaattaatgagatcagtttcctctgcttaaatctttctccagatcttgcaaactttccttcccttcagaactctattcaaatatcagtatttcctctttagcaaagctttctctatggcctcagccactatcacactatcttgtacatttaaaattcaaaactcttacatttaacccttacatttaaaattcaaaatttcaaccacaggagtaaccctgatatgtacatatgtacaaatgtaaaggtttgctcagttacaaaactatgactttcgttatttcagtagcatcacatcctctaagcacctcctccctactagcagttcattcattctcagtaattactgaatgtatgaactaacaaatggatgggtgaatgatctaaagggagtaaatctagggatgggaagtagatgtgaaaaagtgtatttggttatcagggtaccattcacagtaccaggtcctattactactatgtgtctagaaaagtactttccacccaaatgagaaaatgcagttaaagtatagatgaacagttaagaacaaattaaccaatagttcaaaggacagtaattattgatgattaactcttcaaagtggattcaacctccaactgacaaaggaccatatagtcaaagctatggtttttccaggagtcatgtacggatgtgagagcaggaccataaagaaggctgaatgctgaagaattgatgctttagaactgtggtgctagagaagactcctgagagtctcttggacaccagggaaatcaaagcagtcaatccgaaaggaaatcaaccctgaatattcattggaaggactgatgctgaagctgaagctccaatattttggccactgatgcaaatagctgactcactggaaaagaccctgaggctgggaaagactggaggcaggagaagggggtgacagaggatgagatggttggatggcatcaccaactcagtggacatgagtttgaatcaactccaggacatagtaaaggatagggaagcctcatgtgctgcagtctatggggtcacaaagagtcagacacgacttagcaactgaacaacaagtctatcataacacaggcagaaggtgagtgataattaatataaatttaatgtgttagtgttcttagtgttctataactttgcttccaaagaatcacaataccataagg

SEQ ID NO: 39683 - DNA, 1166 bp, Bovine  19866881674872
  misc_feature (1)..(1): n is a, c, g, or t
naggataacttacttaaagaaagggaagctgaagtcagaaacttaaagcaaaatctttcagaaatagaacgcctcaatgaaaatttaaaggaagttgcttttgatctcaaagtggaaaatgaaaagttgaatttagcatgtgaagatgttagacatcagttggaagagtctcttgcaggtaacagtctgattgctgtgggaaaaaatgccattgtggaggctctaaagctggagaaagaacaattagaagcagaattgtgtcaggctgaaaagaggttgttggaagaagcaagcaagtatgagcaaaccattgaagaactatcccatgcacgtcattcgagcacctctgcattacagttagaccatgaacgtttaattaaactcaatcaagagaaggactttgaaatagcagaacttaaaaagaatattgagcagatggcaactgatcataaggaaactaagaaaattttatcatctagtttagaagagcagaagcaattgacccaacttgtaaatgagaaagaaatttttattgaaaagcttaaagaaagaagttcagagcttcaggaggaattaaataaatatactcaggccctaagaaaaaatgaaattttaaggcaaaccatagaggaaaaagacagaagtcttggctccatgaaagaagaaaacagtcatctgaaagaagagctggaacgactgagggaacagcagagccgagctgcacctgtggctgaaccgaaaacccttgatagtattacagagctagaatctgagataaatcagctgaatataataaaggataatcttgaagaggaaataaagaatcatcaaaagataattgaagatcaaaaccagagtaaaatacaactgcttcaatctttacaggagcagaagaaagaaatggatgagtttagataccagcatgagcaaatgaacaccacacacacccagctctttttagagaaagatgagcaaattaagaatttgcaaaagacaattgaacaaatcaaaacccagttgcatgaagaaagaccggacgttcaaacagagaattctgatatttttcaagaaacaaaagttcaaggccttaatatagaaaatggaagtgagaagcacgatttatctaaagctgaaactgaaagattagtgaaaggaataaaagaacg

SEQ ID NO: 39684 - DNA, 919 bp, Bovine  19866881992901
  misc_feature (1)..(1): n is a, c, g, or t
ngaaaactgaggtgctgctgtctcttgcctcttttctttttatcaggaaaaggcagcttagaaagcaggtcttcaaattcctcacaattgggggatttcctcacgtgggagaagttagacaacttccacctgagtgactgagtggcgagcgggcatggctgtgatggctgttgtcacggaggcgcaaagcaagcaaggaagaggggcgtctctggaaccccccggggtccccggcctggcggggaaggtcctgccaccctgccccgctggagagccaacgtcaccccacccccaggctcggcgggaaggacataccgcggtcaggaccgacgaggactctggcttcgacacgttgtggctgttgaagaagatggactcgcggtctgaaaagcaaagacgggaaggagccagagttagaagctcgaggcagacagcaactccaccacctgacaccagggggcagcaccaccccggccacaggccgtgatgccttagggctcagggtccagcagcagccacccgggccccctcccaccccgaagagacaggacaccacggagcgacacacgccgagtcagggctcctgtttccacttttcttcccatataaaaatgaatggcttgatgagcccacctcccctccactctcatcttacagtaccatacctggtttttccctgatacctaggccccctccccagagtgtgtccagcgtatcttacggacatggcgccagaaagaggggctgagtgagaaaggggaaatgctgcatatgggaacatcaaaggcccagagtaaagaggtcgactgatgccacttaatccagcatccccaacccctcctggttctgcccatggaatgccttttcaggcacatttaggctgccacagggcacatgaatgtttaaaacacaaaagctt

SEQ ID NO: 39685 - DNA, 1695 bp, Bovine  19866880111803
  misc_feature (1)..(1): n is a, c, g, or t
ncatgctatctgcttttgtgtactctggcactgtcttatttgaaattatccaagaatgaaaatatgagctaagctgtttgcttttttaaacaccgaacgtgtcaatcctgaaattccactgggcaggcttttactccccgcaaagataagagttcctgctgaccttgaattattcagatgtctagcaacacaataccctccaatgtattcactctgaacagatagaatttgagccaaattatctcacaatcaaagtcggtctgttataactcattaaataacatggaatttaaaagagtttttaggaaagctttaagatctggggctctgaaatccagcaacctgagtttgagtgttagcagtaacaagtgaagtatccttgggtaaggaaactccataactagagatgaagctgtatcttcaactacaaaatgaagataaagtacttcattaagatcttgtcagacctaaatatgccaatgcatgtggaatattttcaatagtagcttccttaatacatattagggcttccctgatagctcagttggtaaagaatctgtctgcaatgcaggagaccctggttaaattcctgggttgggaagatcccctggagaagggataggctacccactccagtattcttgggcttcccttgtggctcagctggtaaagaatctgcctgtgatgtgggagacctggatttgatccctgggttgggaagatcctctggagaagggcaaggctacccactccagtattcaggcctggagaattccatggactgtacagtacatgggattgcagagtggaacacgactgagcaacttacactttcattggaacaaagcaccacctgctggcctaagggaagtggacagtttaaaggggaaaaaggcctctggactcccaacttgctaaaggcaggcatagtttaagacagctgctcaaagggcacattttccaaagtgaccaaaaagatgctggaaaaggagggatatccaggagggcagatacgaaagtcttgttgggttacagcttggggaacactcccagtaagtggaacttgctgactcagggaacacttcctgtccctgtgtgccctgtggtcatttccctggtgatttcagaactgctgcggaccagcaattgctctgagcatccctttcccccccttgtcaaatggaagcatttatcctggttagccttcctccttttgctgctatattttgggcatgtgggacagaccactcctgtctgtagtctgcaggtctctggaccaagaggagccacacctaaggaccagcatctgacctagtatagatcacgataccctggactttaaacctagtgctgggacccagatgagaccttgggggatcttgggcggagatgagacttcttcagttgcaggcatgtggacaactgaggccatagagtggactgtggcagatttgactgacaactggccttggtcctccactcttccctctgtccaggctcttgtgatgtggctttgcagcccctctcctcaggacggggattcatccctcccaccccttggatcttgctgcccttgtgacttgctgtgtccaacagaatatcagaagtaacagtgtggcagcttcagctctgggccttgtgaggctttatgggccttttctccattggacctgccgcatagaaagccccagtgtt

SEQ ID NO: 39686 - DNA, 1279 bp, Bovine  19866880244416
  misc_feature (1)..(1): n is a, c, g, or t
ncaaagtctattaagtgacttacagactcttgcaaaagctaatcttgaagttacattctgggtatgtactggtgcaggccgctgtggcatgaagaccatatttggcttcccccacctgcaatgtgagaaattccttctactataataatattaagggaggctgtgtccagccaagcagggttcactttcttaaatcatagaggtttatcaggtcaggtaaggtttcatgatcatttaatcttacctttcatcacccattaaggtggagcctaaactatatacttctagatttatgtgtctgtaatttttgcatgtttctccaaaatgaggagtaagtttacaccccagataaagccaggtttctgaaatatagaagttgttgttgttgtttaaactgatgcaatatagtctcttgagcagatattatgaagcaattcagagattgtcacccttttataggatgaagactatcgaataaattgttctgcttcctgcagctcagctgcccctctgaggccagagtcttccttgagcccctgcccgtgtttctgcccacctcccccacgcagcttgggtctcttagctgctggggctttctgcatccatctcttggccataccgagagttcagagggctgccttcagagccagcagcagctgttgctgccagtcccgtgaccagaagctgaagactcccctccagccttctttagcttctccctcaccatgtaccccttggctggcactgcaagctggccagtgttcagggtaatttaatagtttcacctcggtcacagtttatgacatattgaacgttgaaacatttattctccagttaggtttcaggtttctagtactaagattagagcaagtcttaagcaaagagacagtatcccttttctaaaaaagatgtgccaagactctggcccgttttcctgagaggagacgattcttagcttagtgtgtactgcagccatcctccttgactgaaattgctgtcgctccagctcagctgcatattctggtcgcctcacattgcttgttctcagcgtcacaaatgtcccatggaaataaagagcagactcaactcactcgtttatccatcccaacttttgacaaataattactgaggatctgttaagagtagtggaagattactaacatcttatcgtctagtagaaagacaagtacacacataaatataaccaaggttttcatatgaaaagtgtcataagaaagatataaaacaaattctacagccacccagagatcttttccaa

SEQ ID NO: 39687 - DNA, 1862 bp, Bovine  19866880410516
  misc_feature (1)..(1): n is a, c, g, or t
ntcaatccattatcagtgtttacattatcaaacatataataagagtttgacatggcagtatatctaaccggacactatcttgtaaagtcctttggatacataattacatcggaaaataaatatgcaaaagtaatataaatttattacacttacattatagattaataccaaaattactgtgatgtcaacaactaatttcttgtttccctcctcagtggttatgtctttgactatgactactacagagatgatttctacaatcggtatgtaaatttctcatccttgtttccctttgatttaaattatcttttaactcttctgtacctttcattcacagatattattgattaaatgatattttacagtaaaaaagtaagtttcagtaaaatataagatggacagattttcatcttgtgattgtacctactacaagtatagaagatcttgggcttttagactttggtggtgcttaagcctaaaatttggtttctgatatttggatgatattttaaagatttattaaccaatattattttccagatcttgaaattggaattcttgacttggaattcttcaagactgagagatttataaattcagacaatgagtccaaccttctaaaatacatctacttccacacaacacgcacattcagtaaaaattgcgcacacgtctcgctctgcacggtagtgtgggaccggaaaggaaaccacgcagagtgacgttaatagtcaataggagaaatagggttgtccgtgacctttaaaaaatttttgtcaaaacattaaaaactctatgttataaatgtatatattatacatgtatgcatatatacatacatatatagaaattcctcatgcatacatataggaaaatacagtgaaacggttatttagtatactaatttaaaattggaacattttaatgtaaaaatactaagagttaatgtacttttttcttgtaaaaatgacctatcaaaagtaatttgactagtactagccttcttcttttattatgatatgaggcaagcacctcttctacccctcagtgaattgttatgctactaatactgggtcagctttgacattttatcaatgttgtgaactacctctaagatttcctcaagatgattccttttctttgccaatttcacttcctctgggacatcttcttcccttttcagcacatcacaaccacttacctcatttatgtcagtatgttttattttactaaattcctctgtctccatctctagagtctcttgagtggaagagtgtccacatccttacaaacagctatttctcctataattccatttacatttaattttaattttactcccagtttccctcctcggttctctgctataccaattccctcttttgattacctattcttacaaaatcccacgtggactcatcaccaggaagcaaagagatctgtgtgtgaactaacaaatacacaatgacaaatccctgacagactttgaaagaggtgacctgatcgtcaggaacgtctgttaattaggtagagatttgtggactgaaaaaccagtagcaaagcttggactttatgaaattactcacagttaatatatgtggtaaaactgaaatttgactttttctgttggggggattggtgtcatttaacttaggattggcaaatgaaattctgatagtagaggtatgcgaaacaagaattatctgtgctaggtcaatggaccatacacacacatacaaaaacaaagtaaatattgtttaaaattctattcaaacaaacaaacaaatatgccaaggcataaaaatgcaaagcttgaaaaacagaacattttatatagggaagaaactacataatccctcata

SEQ ID NO: 39688 - DNA, 2611 bp, Bovine  19866880455128
  misc_feature (1)..(1): n is a, c, g, or t
naatggtccatcctgacacctgtctacagacactttaaagatagagtggtcgtcctaaaatgtctctgaaataactgaacagtgagtatcatcctcagacatacacaagggaatgttttaatatcctgttcttatgtaaatgccaggactaggttggttgaaggccattggagaggacacagagctggcttagaggatctgatctgggcaatctgtgaaagccatggacaatgatgctacctaggggtgggggcaatgtgctggcctgggattgaggcgacactcaaaagagggaaaaggtagaaggccaagacactgggagtcagcagtggtgtggaagtgaattcccaaatttactttaactgatctacagcctgaaatctcctttatgacaaagcagattactgatcaatttatcactgaaaatgaaaaagaatactctgaatcattccagtgattttatccatattttttcttctatcagtgacatccttatttcttaaagggaacagttgtgctcactgaaatccatctttacgtgactttgtttaaattttagaatacaaattcagatatatacccagcctctttatcagaggttaacagacacaggcaacaagcatattaaaaatttaatctataaataactgagatgcagaagccgccatggtggctcagtgggaaggaatgtgcctgttaacgcaggagacagtctgatccctgattcaggaagatcccacgtgctggggagcaactaagtctgcatgcggcaaccgctgagcctgggctctagagcctgggagtcgcagctgctgagctcgcgccacagctcctgaccgggcaccctggagcctgtgctcggcaacaagggggagggccccagtgagaagcctctgcaccccaacccggactagccctgctctccacaactagagaaacgcccagcaagcaacgcagatacagctcagccgaaaatacataaacatttaagagctgaaaacagtcacgttcaacttcttttctttttaaaaataataagcatcatgctttccctgtttcctcattctccctgcagcttttactagctggggccagcagccaggtgaaaacaacaggagtggagacacaaaatctagataatttgtaaattctacttagaagtaaagcttttttcactctagtttagaattatttaggaatactttaggggaaatttagcttatatttttattattatagtatttaaaaatatgttattatggaaaaaaatactggttgattgaatcagctctcaggtttgagtcacactaacgctaagcatcatttctctgtatgtaagaaaacactcccaaaaatcaaaatattctcgataaactctggaagacaggaagacgtgattgttctaaatcaccattgcaaaagctgccaagtctgcaaagtggaacgatcagtcaatcttgtggttagattcagtgccatgactctgtagaattcaaacatagctatttctggtcttagattttaatgggccatttggaacaatcactcaagatccatcactctgatgttaaagtctaagaatccttattgtcaatgctgacatttctctcagcagactagtgactccacctgaaatttagtctgccttgatgctatatttaaagtccagggtcatcaccatcactgactttctttgatcatcttaccttatctaaaaaagagtggttataaacaccagctatgtggggtgcttgtaaagcttaaataagataatgttttaaagtactaacacagtgctagaatctgctgctaagtcgcttcagtcgtgtccgactctgcgaccctatagatggcagcccaccaggcttccccgtccctgggattctccaggcaagaatactggagtgggttgccatttccttctccaatgcatgaaagtgaaaagtgaaagtgaagttgcttagtcgtgtcggactcttagcgaccccatggactgtagcccaccaggctcctccatccatgggattttccaggcgagagtactggagtggggtgccattgccctctccacctagaatctagacagtctcaataaactttagcttctatgttctgaaaaaatatattgactgtatatttgtatgcgtgatttttgtgctgagctagttttttatctagcatttttgtttagaatgacttttttccataaataaccatgacttcaaggtcagagtctatttaaaggttaaagactgcctgttttgattctgttcatttgtaaatttagggattcttacacaagttttcccttctttcaccaaatcttctgaaatttactatgctatatataaacaacatactctatagttccagtttaagtacttggcaagcattgcaattttaactataattctaagataggcaatgccaaaaaatgctcaaactaccacacaattacactcatctcacacgctagtaaagtaatgcttaaaattctccaagccaagcttcagcaatatgtgaaccgtgaactttcagaagttttagaaaaggtagaggaaccagagatcaaattgccaacatgctgctggatcaggaaaaagcaagagag

SEQ ID NO: 39689 - DNA, 1915 bp, Bovine  19866880482973
  misc_feature (1)..(1): n is a, c, g, or t
naacggataaacccattcccttgagggtactaaatcctctctgtaacagctagaagggtgatctgtgcaagaaacccttcacaggcgtttgctccctgagcgccagaagggctcctttgacggaggtcttacctgaagccatgcttcagggagggtccctgctgagcagggctgagctgtgaccgtggccgagtcaggtgggtgcctcgcggccctctggcttctgcctcagtttgtccttcgcttagccaggaatgaagatcctccaggaagggttttccgccttgctgtcactctacaacccttcacacttgtttgtgagttggggattctgcactgcgccccacggtgggacacggagcacacctctggagtttgcagtcagccgctgctgcgggggagctgcaagtgggtgaagcctgtcttctagagtgccaggccctccacctgcttgtctccccgattttccttttccccttgtcagtggcagcagctgcctctcattttcttcctgagatgcctctgtttggaacagcctgaggcctctttttcctgttaaaacttcctctcagcaaagaatttgaacattcatagaaagtagaatatatgtaactattgctgaaaacaattattaaggtgaatttgcattttcaagccataaatagtcttaaacttttaagacttaaaacttttcatggacaactgagcactgcccttagtagcaggattgtgcccgatcaccttcttcacagggttgacttccccacccatctgtgagtgtgagcttgtgtgctggactcagccaccagcgggggtctgacggaaggctgcacaattgtagttccatctgtggacgtgggtgttttgaactgtggtgttggagaagactcttgagagtcccttggactgcaaggagatccaatcagtccatcctaaaggagatcagccctgggtgttcattggagggactgatgctgaagctgaaactccaatactttggccacctgatgtgaagaactgactctttggaaaagaccctgatgctgggaaagattgagggaaggaggagaaggggatgacagaggatgagatggtcggatggcctcatcgactcgacggacatgggtttgggtgaactccaggagttggtgatggacagggaggccttggcgtgctgcaattcatggggtcgcaaagagtcggacatgactgagcgatgggacagaactgtggacgtgggggagccccaagtcttttggaagcaatggttggagattttgggggctagagaggcttggcaggatgctccagaaccttctatgatgtagacctcagcacaggacaccacagaccagctaagcgacagggtccttcccttgtgtagttttcagaccaaagtaaataggaggattctgtccaaggttctcgtgcataggacaggaagatatatagaaatgttttatttgcatttatgtttttaaaggtgtctaaaaaataatgtttgaattatgtcctgttcctccctttcagctccacgttgttcactggaattcagacaaataccccagctttgttgaggcagctcatgagccagatggactagctgtcttgggaatatttttacaggtgaaaaaaatccattgatttcgttttgaataactagtcagtcgtgttggataaagagtttcattgtggagtagatagtctaccactttttattcaataatagtaaacttgttctaggcttactgttttccttttgaagtgaatattcacattttatgttagtttatggtccatctaagggcccagaactaccctaggagggttgtcttatgattcatcttattgtccacggatcagttttatgtagctgcaataacaataatatcagaagtattacctaatagcagaa

SEQ ID NO: 39690 - DNA, 1017 bp, Bovine  19866880484171
  misc_feature (1)..(1): n is a, c, g, or t
nttgaaactgaaagccttttgagtgaagccatccatgaatttcacagtcttctggcttcttggggtatagcattacatgctatacagtgatttttgagccaaaatcactgcagatggtgactgcagccatgaaattaaaagacgcttactccttggaaggaaagctatgacaaacctagacagtatatttaaaaacagagataccactttgctgacaaaaacctgtatagtcaaagctatgatttttctagtaatcatgtacagatgtgacagttggaccattaagaaggctaagcaccaaagaattgatcaaaccagaaaagaccctgatgctggtaacgactgaaggcaaaataagaaaggggctgcggaggacgtgatggttagacaatattaccaactcaatggatgcgaatctgagcaaactgggagatagtggaggatagggaagcctggtgtgctgcagtccatgggatctcaaaaactcagacaaaacttagctactgaacagcaaaaccaaccatttttaaagtttagaaagaacagccccattcagggctacttattcgtctctcaacttcagttctctctgtttacccccaaacaaacagacaaaaagagcatccaagttcggcttttgctgtcaattttctgttccagtgaaagaaactttgatgtaaaaatcctctctggagtcataatttgcctttatgcattgtgttctgtttatgttatttttagatatattcaaaattctagttttacccttacgcttgggagaaagtattattaactttttaatgattttgtttgttaggctttaaggctgaaagcaccttttctttacagataaatagaaaaaagtctgtgtagaaaactagccttctctttagccttcctgaattatttttctaatgcattaaattccttcctgacaactgtaggcttcaaagcaagtcaaatgagattagttcattgtagttaatataaaaggcttatcttttaaaaaggtcaaaa

SEQ ID NO: 39691 - DNA, 1996 bp, Bovine  19866880491474
  misc_feature (1)..(1): n is a, c, g, or t
ncaatgagtcaactcttcacatgaggtggccaaagtactggagttgcagctttagcatcattccttccaaagaaatcccagggctgatctccttcagaatggactggttggatctccttgcagtccaagggactctcaagagtcttctccaacaccacagttcaaaagcatcaatccttctacgctcagctttcttcacagtccaactctcacatccatacatgaccactggaaaaaccatagccttgactagacagatctttgttggcaaaataatgtctctgcttttcaatatgctatctaggttggtcataagttttcttccaaggagtaagagccaattctaaaatatatttttaagtcttagtgtttcttaactgagtttttttctcctagtctcttaaacaaacattttcctctgattcctactttcatattttaaaactgagaacatgaagtattatgaaggcaagtaaattatgatgagttccaagtttaaatttataattaaaaatagttctttggtagagaaggaactaagaatatgaaagaatgatgtctcattatggtagaaatctgtaaatgccactgaaaagaaattccaaaagacagtagcagttctataatcttagtattccataggatacgtggatttcctgggacccatattttccctaaaataaggaaatatacatagtgaaaatcaagtgttatgtttattaaattggcataactctcacatcgcttcttaatgtccctgcttctccagaattgatattgtttagggtgacaagagaaagcttaattctagtgaagtgggacatggaaaatggtaatattagctcggacatttctgcagtaagacaattggaaattctgctgaatcaatttaaatggctggattatttcttccaaactggtctttctctccccttgtaaccagctgttttaccagcttcatcctttccaaggaggtctgtgtccacccccaccacagggttcccattttagggctttgcacttgctctcccctctgtctggatttctctgtgtccaggtctttccacaggctcagatatcaccttctcagagacaggtttcctgacctccaaactgaacatattgcccagctctcagtcactctattacttccttccatcttaggtctttcattatctttgttgcatcttgaaattattcattcttttccattctgaaatttatttgtttacttgcttgatacctataaccatctctatagtgacaccttgataacaatgggctattttattgtttttttatttcactatgttaactttaattataacatgcatggtaaattgtggtgttcaataaacagtttagagagaactattaagtggtcattttgaactttaattattgtatttttataaagacttggaagaatagaaccttcatcgggaactgctgctgctactgctaagtcgcttcagtcgtgtccgattgtgtgcgaccccatagacggcagcccaccaggctccccccatcactgggattctccaggcaagaacactggagtgggttgccatttccttctccaattcatgaaagggaaaagtgaaagtgaagtcgatcagttgtgtccgacctctatcgaccccatggactgcagcccaccaagcgcctccatccatgggattctccaggcaagagaactggagtgggggccactgccttctccatcatcaggaactacgcccacccaaatgcactggtctgaactcaggtgtgaatgagctttgctggaggtaaactcatgttcatattcggaactcagaaaacagagctttcccttttcagttctattaatggaggaacgaagggacccgtgtgtgtctgtcagtcactgctgggagagtgagaatgttggtctttataagtgtcaaatttttagataccttgtaagtgtcaaaacttaactcttgaaatgggtttaagttttacatacaaattt

SEQ ID NO: 39692 - DNA, 887 bp, Bovine  19866880595733
  misc_feature (1)..(1): n is a, c, g, or t
natctgttgcttgaggcaggacacctgtcctgtcagtctttgctccatccaaatggaaacatgggtgatctaggattaccctccccaatgccgatggtcaacgcactgaaaggtcacgtctattacggttggcgttgctctccctgctgagctgctttctgagtggacgtcatactcatctcatgcagaaggcatgttctccatgccagaacgctgctgctaatatttgatctaataaaagacaccctatcttttcttcaagcttcatgatgactagctgctgttagatgatcattcctttcttcctcatcattccaactttgtgttctaaggacttgaatccttcagcaaagttttatttgccacctctcatgttaaagtgattcttttaaaaacatggcaaccaaaataaacagctttatttgcagaagtaactttatgtgaatactcggtgtgcctttggaaggagccactggcctttactaatactatcagcttccccagcaaaccacacggtgctgtttgtgtaggattgtaagcggggaaaggaaggactggaaacacagtcttcaccaaaaaacaggatcgaaacgtgcagcaacagctggaaccagctgggagcaactgcacagtggaatcctgtccaactctgccgacggagatctgagcactcttgaagcctggaacaagaggaacaacagaccgctttgtaagaatgtcacacgtaaacccagccagctagcacccccagaaatcggcaacaggaggaattcatcttcttagatccaatcactgggtaaaatcagccctgtttgttctaggaggtccacgcacatgaacttcatgctaactggagcttggttctcagccactggggcccttaagga

SEQ ID NO: 39693 - DNA, 1495 bp, Bovine  19866880622652
  misc_feature (1)..(1): n is a, c, g, or t
nactttgcatcctgacttcaaacgatgccagtgtttggccctttgatcagagtctggagtctgctgattggttgaatgcaaatgtttaatatccgtttatacatgtatgcatgctcagttgtgttcaactctgtgcaaccccatggactatagcctgccagtctcctctgtccatgggattctccaggcaagagtactggagtgggttgccattcccttctccaggggatcttcctgagccagggatcaaacacaggtctcctgcattgcaggcagatctttactgtctgagccaccagggaagccctaatatttgttaaatagtctacaactgtaatcataccaaagtttcccaaataccattatgaatacaagccattgctctttaacctattgattatattttgatgtaggttttcgtacaatacaaagtatcagtgagcaggcattttctgccattttctgttatatcttttatgtcctttgtctccttactattttccttggcaatcttcacttgccctaacatctgttctctgcaattaacttgatcatttctgttttaaatactttctgaagagaaaattctccataatggcagtggcattgttctgagaattgaactgaatgataagttaacctccccactgtccaataactagttaagtgaggtagtgaagttgaaagaaaattatatgccaaatgttcaaagaaatataaagtctagatatgagaatccttctgtgacacataatgggagttggaagaaaataaatattactaactttttgcagtgttctaaccccaaacactaacactgtttatggcctttttataatttttcatccacatcattttattaatgtcttaactgatcccactttatgatgcatttgctgctaacactttcctacagacttgtggtcatatcactttgtctagagcacaacttctaattatccttcttttgagtcctgtgttcatttatcttgcaagccatttttaaacacttattatgtgctgagaaactgttaggcactgtattttagggaaagtcaccaataaatatattctatatactgtgaaagatgtacccttgaactgcatggagaaaggaactttaccaaggagtccaggaaaaattgccctggagaaatgatagctaaactgaattttaaaccagtcaacctagatagcatattcaaaagcagagacattactttgccaacaagggttcgtctagtcaaggctatggtttttcctctggtcgtgtatggatgtgagagttggactgtgaaaaaggctgagcaccgaagaattgatgcttttgaactgtggtgttggagaagactcttgagagtcccttggactgcaaggagatccaaccagtccattcggaaggagatcagccctgggtattccttggaaggaatgatgctaaagctgaaactccagtactttggccacctcatgtgaagagttgactcattggaaa

SEQ ID NO: 39694 - DNA, 1734 bp, Bovine  19866880636708
  misc_feature (1)..(1): n is a, c, g, or t
ncatactttaaagaaatagtctttattctgacagaaatcttttttgaattgagattataataaataaatatagataatctgtatttctataaaagcaaaaaagttaaaagaaaatgtgagtaatggaagctatataacattttatggaaaagcagttctcatgagcaggaataatctatatttttgtcaccactaatcatgtttactgagtaattattcaaccatccactttttataagcaatgtgaatacatctggcttttacaaatcccttattacaactgggattcaattcaatccaaatttctaaataatataaacagaatcccagcagtgattgtttattataaatcaaatgttaccttcgattgataaactctggggccaaaattgcattatacttcagagtgaaagaaccacagcagaagattcacaatcatatgaaaaccaagagggcagtgactcactgctgcgtctacaaatgaacgcagctgctctactatgtgagtcttagaggctgacagcctctaatcctggtgaccggggctgagtaggataattaaatagtaaactcagaaatcccactaggggattaaaggcagaaagggagtctgaagggagcttgagagatgttacaagctggtacagttattctggtgggagttctgcttcagttgtctaactaccggcaagcatttaagttgggtgcaactgatgaccgacctatagctcacattaactccagtgattctcggtaagtcaggactccgctggccaaccgtcttctggccatgctacctggtcactcttacggcttctttcctgtctccatcccatttccttcctccttacttgtttttacctccaattcctcacagttcagctttataatccacactcattattctgtccatattcccatatctttatcttatgctccatctgtctttcaacattcctcaaataagtatgaccatgagacaaaaccctagctgtttatattatagtagttcacaaatatccagatccgtaggctttatttcatgccaaatggaaagatgaaaagagtagaaaaatcaatcattttctataaaatcattggatttactacaaaggtaatgctcagatgtttgatgtcctctcttataaaatgaagaaaaatagaaagcaatattataaaaccatcagaaaaggaaaaagaaaacaagattaatattaatttaaatttaccaaatccaaataacttgtgttcttacaaatattataaagtgactgccaaacttatgacattcatattttagtttatgacactgatggcatagataaaatatagtttttgatattgagttgaaaataatgtgctaatgtaaaatgacaattaaaaatgccattttctttatggatatttgatttgggacatggcttactgtatgtgatttctaaaaaactctcttcagagttaattgcatcgttttgtatctaattgctgctgtctctaacaaatatattagcgcagtaatggtttttacatctagacacacagatcatttgtgtttctagagtccacgtcatttaattgaaatcacaaataatgttcaaataagaggcagatctagtcttcttttggattcattaattcattgtttaccacagtaaacaatttgtttagtgtgataagatgcaacattatcaggagccatacagttcttctcgagggtcaccccagaagcatagt

SEQ ID NO: 39695 - DNA, 1744 bp, Bovine  19866880749361
  misc_feature (1)..(1): n is a, c, g, or t
nataaataaataataaatattaaaaaaaaaaaaaaaaagaacagaattcaccggagtacttcaaaatggttactcccccctcccagtggaagctctgtgggatttttctctggtattcactgtgagaacctagtagagctcctgttggtaaaacaaaagtatggggcagagtctcccctgactgtttccgcctggattttgaattctcagatttgtccactatgagcctccagctattcatcagttacagttcaggttttctaatgtcagggctggttttcatggaggcttctgctcatggatttctgctcagacaaattatagttctctgtatctgttagttcttccaatctgaggggcagtggtgtgccctgtgacttcatttttctgaaggaactagaggagctgtcgatgtttcagtttgttcaacattttgcttgtttttgggatggactagcaacttccaagctccctatatcttatattgggaatcagaagtcccctatagtgtttaattttcacagtgagaatccaaggagattggtattattatttagtagaagaagcaaaagatgttttgggtcttgctaagagtcttgaagatagtggagtcagaatctgaatccagatagcctgaccttggagtgactcaaaagcttatcctctttatcagaacacatttcttttacatactcagtgttctgttcaattgttgaaactttctagtgggggaggatttctctgccttctttacaaatgcattctagtgtgtgacatctttgggcttcccaagtagcgctcatgggaaagaacccacctgcaatgcaggaaacataagagatgcagattcagtccttgggttgggaagatccactgaagggggggcatggcaacccactccagtattcttgcctggagaattccatggacagaggagtctggtgggctacgtctgtagggtcgcaaagagttggacacaactgaagagagtgaatacgcaggcacatgggacatctttagaggccaagaagtgccttctgatgtttcatatgtatccctccatgtaactgaggccattctgttgtccacacttctggttcattggacactctctttataacatctttgcccatatccctttgaatcttagatccatccctctgagtccagaaggaaaagcaactcaaaaaataacacatacatgtgtccaggaccaaaaaagagtacagttatcacccaagtagaagtgcccagggagaacttacatcagattctctcataaagtaagttaactccattatctgcacaccaaattaccttcatgccatatgctattatgatttatttctctcttaccccaaactggatgactcagtcaagatcccagcggtgatttcaggacagaagagacttcctggccatcatgcctacttagaaggggtagtagacagcataccctgtaataagtacagttattacagagaaacttggctaattttactgcatgttcatcagccagcaagataatcttagcatgaaaataaaaaatttgatttatgagattgtgggtgaggtggctaggggagttgggatgttctcttaccagtgatttctctggtgtcaaaccttactgtcaaggctgcctatttattcttttagaccacaaaggacagtgtggtactgtgatattctcatttggtttctgacataagagaatcatgagaccagagtcacagacttaaca

SEQ ID NO: 39696 - DNA, 3535 bp, Bovine  19866880817931
  misc_feature (1)..(1): n is a, c, g, or t
nccagtagtcttgcctggagaatcccatggacagaggagcctggcgggctacagtccatggggtcacaaagcattggacatggctgagcgactaacacacatccacatggtataagggtgctacttctgggagggctctgtgtagctctccctcacgtactacgctacattacctctgcagaaaatttggctccatccactaagtgctcagagccacagtcatctgtgatgccccagtgaaaatggaactgccgcagcctgtagctttcagatagaggaccccctttcagcactagaagaaaaaggaaactgctattagtgttacagtcatgagctccagcttgtctttgcatttaatacaaattaacattaaattggggcgagtagaaatgaaaataaacagtagtctaaagtttccgtcttgttggtttttccccgtgtccacaatgatgggcttcagaggtgcggagcaccttcagatggtgcgtgagttacatggttctcagcacatgggctataattttatcttttcctgttttcaggaaaacatattggaagatgagtgaattctaggattagagctctttccttgattctgctttagtttataagttcattcattctttcaacagacagtaatggacagtatgcattaagatatctagcaatttatttttagtaacaaatcactctgcatgtatcttgtaactgatcaagatacaagagggtattctgacagctttactcagaatcctagccagggaccaaaagaaagttccagcaggatggtagagtcacttttaaaattctaacactgaaggatcattttgctttagagagtctgtccaaccatatgagtaataaaacacacatagtaccagacctaatccaatattaacaaaggacgtagcaccaagatgtctaaaacttaggctcagaaccttgaaggaaagtgctatgactaactttgccttttgacagtagagctgatttatgaaattgtcatttagtaaattattcagtaaacagttttgagatttttcctgtgagcgaggaagtatgttagattctgggagatgaagataattcagatactatgatttaatagggagaggggaagctagacaaaaatacttatgcacagaatgattccatgcaagatacacccaagaccagtttttttgtgttttttttttttggttctggtacccaagcacttcacgagctggtgatggacagggaggcctggcatgctatgattcatggggttgcaaagagtcggacatgactgagcgactgaactcaactgaactgaagcaattcattgttatggagccattttcctggccacaaaaaataaatatactcatccgggatctgtatttcttccctaatgcactcctccaacctcatctcaattagaaaatatttgcctttttcagtttttatattcatgatgattccagaattttgtgaaaaagtactgtttattcagagggtgtaaagttagcataaagatattggaaaccagaaaagatggaatagagtcactgagaaggagaagggctgaaaaaagaccgagctgggagtccccagaatcacctttaacacttggaaatattttaaaacttcaagatacctcagtagatggcatcaatgctacccgtgtgcacccactgcatatgggtgttcatgtttctgaaagccctgctgtttacatttccccagtaaagtcaaagacacaaattagaaggaccttttggctcacctgatctattatcactgtcctcaaagtttacatgaaaggaatgtcccacgttgacgatttctttggctgtggctggattgtaggagacactgaggggtttcagagagggatcacgcttggtttcactggttttgatgtcgataggagattggttatttccatttgcgatggggtacagcttgccccagtgttcaggacctaccaggacgaacatgattacaatcaaaactgatctaatgcttgagtccaagttttaggaatatagttttactagattaggatttattcaggtatctcaaatggtattccggttagcttaatggaaatcccaggtgtgagaatgccccttttctgtgccacactggcaagtagtgtctttgtcaacagaagtctcatagtctatgggatcagactgtacatattttgctgttagtaatagacctgtctatacatagggagggagagaggttgagaggcagagaggagaaaagaggcagaatacattttgtagacatcatgggccctaaggacgactgttgaaaacgtatgcaaatctggtgtaagtcaaaggcacttcaaaccattaatctatgactttaccattattttaagtgctcaatatctcttttcctggaaaagggaagaagccgttatttgatctacatgagcagaagaatgcttaccgttttcaccatcatatccccagtcaggacttgccatgatcttctacttagttttcttttcctgaaaacaaagacaatacctggaataactgactgtaactgagtgtgcgatagacaactgaaaccgcagttcgcagggtttttatagaaagtctctgcctttgtgcatgtgtgttagtcactcagcccactatttcatcatctttatctatcaggaagtatatgcatgttaaaaaaaaggtattgtttataaaagctcacaaaggtaaggtcaattccaattgctttattctcttatattgttaaagagaaatatcaaaatcttagcttctgcaaaaccaagccctgtcattctcatgttagtagaagatatggctgagttatcacacatgatgctttgaatttccagttaaaaaggactgtgcatttgagattcccagcttttacccttgctggacacttaagcaatactagcaacaggaattgagtcaggagaataatttgcatatttacaggcagatcagaaccaatatcatgatgttaatttaaaatcagataagagaaccactcatcatttgtaatacattgggtttgccgtttgtagtatattgtaaaatcttagggaaaaacgcaaacttttaggccaactcaatatattattgatgacagtacattttgaagacatacaagatgagagtcaagttcctcgtttttgagcagtattggaattcacaaatggagatttgttttatgtgtgagcacggttgtgtccaactctgcaacctcctggactatagtccattccccgcccttctgttgcctcacaggctgccagctgtgagctgtgtgcactcagtcatgcattcaacaaatcattgtgtgtgctcagtcatgtgtgactctatgcaaccctatggactgtagcccgccaggcacctctgtatggaattcttccaggcaagaatactggagtgggttgccatttccaactccaggggatcttcctggcccaggggttgaacctgtgtctcttgcatcttctacattggcaggtggattctttaccactgctgctgctgctaag

SEQ ID NO: 39697 - DNA, 1308 bp, Bovine  19866880824479
  misc_feature (1)..(1): n is a, c, g, or t
natatagattgtttctggttggtcagcttgtatgcaattttattgcccattttcttaatctctttcttcaacaaacacactgcttagaaaagcaggaaaaatactcacttcactgagaagctgtaaaatttgatcatctaatttctgcagtttcatctcattctgaagatcattttcatgattcactttctctggctcagaagagggacacacagacatgagcgatgtcaaaccggtgtctgtcggtgtgcttggaaactgatccaagggcactgtgtcgccgacggggggcgccactggcatcccgtcagtgatctgggacacggaggcaaaccagaaccctttacatttatatttattaaaatgtgaaaacaccctttacattagaataaacaaaacagtactatacctcatcttcacttatatttaggggagactcagaagaaactaaattatccaaaagaccttcgaagcactgtaggtgcgatgagtttatttctgccatatttattggctcaccaaatatgttcttacaatctaggattctgagctgtggcaaagtctggagcataactgctctgtatccttggaaacaaatcattcaaatgaaaactcaagcataaaaaaaaggttagttacgtttagaataaagtaaacttatcagctaccacatatatcacctgaatgataaaattagtcctggaatggaactaataaactaacaaaatctactcatcttctccagtgtgcaatcattaaatatagaacaaacaaaacattatgcccaaatccctctaaacaatcatcctgatgaaatcagaaagttaatatcatttctgcattgttcataaaactgccttaaaggtataaatgcacgaaacaagtggcaatgtattctagacaggaggccaaacatacctcttccttatctgtaatacaactagtacacatgtaaatcaggatgttaagaataacaatcagagatcaaaattttgctagtgagtctataagtattaactaccttaaacatttccactttctcctcttacatataactaggatgaaaatagtcaatctattgagtatttaagaatatgatcatcttccttaagtacaattaaataggagaaatctggcaaatgaacattaatttggtttttaggctaacaaaaatgctttaattaattttgctcaactgcaagtaaagtggtttggaaaaactccaaaagaaagaagtctagcaaattaacattagaaattttaaggaaagaaaagtaatttcagtaacaaataactctgggggagtgg

SEQ ID NO: 39698 - DNA, 976 bp, Bovine  19866880841980
  misc_feature (1)..(1): n is a, c, g, or t
ntatttgcaatgggaggaaagtgtgaaaagcaagagtcaaaatatatcttttcttttttttttttttacagagccacgaaaatgcaagagatggcaacattttttcctgtacttaatttctaataactatcataggaagtgctgatgtaagtttggctaagtgtctgtttcccactggaatgtgatcacacaaaaataatgcaggatctcaagggctattcccacttttccaagggagaaagttgataagtactgcaatggttagggattgtttcaaacttgcgtaactgttacaggcaaagaaaagatcgtaatcatgtaggaagttcccgtgttcccgaatcctgaatgcagccacgtcttggcgcactggaggtaaaatagtttgtgaattgaaaaacctgtagacaaaataaaatgcttttctttttcaggtgtttgtaccctaactctcaaacgctgttaaagtctcaaaaatcaactcagaactcattaaacattttgatcctccaaaacaaacacaaaatctgagacatattgttgcaaatcacaatcaagctttgtataacttcaaacacactcaaaatgtaacgtttcaccttaacccaaagataaccaattttcccagtatatgtatcacgatctattgattcatacactcacctcttcgtaataccaaggatgaactgaccaccagtttcttcttttaaaggaaatactatcattcaaatatttgttaagatgacagtttgatcagacttcctgaaaagtaccctaaggggagtctttatttagtagctgatggaataaagcctctgctttttagttctctcttaaaaaaaaaaaaaaaaaacattatttgacttttttgagtgaatcaaaaacattgtaaggaataactctctaagggatttaataaaatgctaaacaaaacttagttcgcattttaatcctgaacaaaacaaaaagtagcaga

SEQ ID NO: 39699 - DNA, 991 bp, Bovine  19866880899313
  misc_feature (1)..(1): n is a, c, g, or t
natttcttttaggatggactggttggatctccttgcagtccaagggactctgaagagtcttctccaacaccacagtttgaaggcatcagttcttggtgttcagccttttgtattgtccaactctcacatccatacatgactactggaaaaaccgtagctttgactatgtggaactttgttggcaaagtgatgtctctgctttttaatatgctgtctaggttggtcatagcttttcttctaaggagcaagtgtcttaatttcatggctgcagtcaccataagcagtgattttggagcccaaaaaaatagtgtgtcactgtttccattgctttcccatctatttgctatgaggtgatgggaccagatgccatgaccttagtcttttcagcttttccgtctccgctttcaccctcatcaagaggctcttgcgttccctttaagcatatatatttgcgtgtgatgtgcatgtatgtatttttttaagctatgaggaacagagcggggtgggcagtactatgacgtatgcagtgaatctcttagagctgtattttctgtcaaaagttcactttttagatttctagtaaagcttcaatggcaacccactgcagtaatcttgcctggagagtcccatggagggaggaacctggtgggctgccgtctatggggttgcacagtgtcggacatttctgacgacttagcagcagcaataaagcttcactgctgtatagaagggaaggaaggaaggaagggggaggcagggagggagggaggaaaagaaacaaagaaagggagagagaaaatgtgaaagtatccttagagcagcaggggagcgctggctggctctgttgctgctcttttcagtctgccctgcttctgtcagactgggtcagagctgaatgccaggggcaagagggtgtccttggcaaaagcaagatagtgtaatagggatgctttgtgaaagctgcacttaaaatctcagagtatgtaatggg

SEQ ID NO: 39700 - DNA, 1443 bp, Bovine  19866880944088
  misc_feature (1)..(1): n is a, c, g, or t
ncccccagagtggccaaaattgactggtaggatcaaatgctggcatgttggcaaagatgcagagtgctgaaactgtccaacgtgcttaggcagattcgatgcaatgtatctagaatattagaatgtctgggaatttcttataaaactagacataactgaggcagcagttcaactcctaagcattcaaaagaaatgaaattatgtgtctaggaagtacttgaataagaaccttttagcagttctactcatagtatcccaaaactagaaacagttcatcaataggacaatggatatataaagtggggtctattcacacaatggacactacttagtaataaaagagagcaaactattgagaagtgaaacaatgtgggcacattttagaaacattatgcttagtgaaagagaccttgtacaaaagagtagtgtgtgattgccttcatgtaaatagaagttgcctgaaatttaagttaggagtagagactgactttcctgaaatggcattctcttccttgttctggtgaaaatccatttttatttcaataaaaataaattcctaatgccataccctctagaaaccttcctgatactcgcagagttaattgagtcctcagtaacctgtgcagaaccttattcagacagtcacttcattgctgctgctacttttttaaaatgtccatttccaccccttgcaggctggatggtttcttctggtttgggatttctcatgcataacccagccttcatcatctggcagggcatagggatgagtgaggtgggtggaatagagggatgctggattacttgacaaaatctgacgcattatatcccacttctgggtatacgctgtccctccctccttgaatatccttcccctctcttttttccatctgtctggtcaacacatgctgtctctttaagacctgtgttgcatgtcatgactccgtcctggcacaaggtcccagcctgctctggacaccactggatttgcttctttcttagaccccactgtatgtgcttcctcacactttacttgctttattgtgattagcaatttcctttctttctggctcactgatttgtgaatttctcagggcctgttttctttggtgttgttccttagtgtggtgcttagcacgtgttaatgttaatgaatatttcttaaagaaagagagaaacatatcttcagactacctcaaactgggagtgctcttatcatttttaagtacattttattgttttgtgttctaaataacatgtgtgtggtgccctctgtgatttagagcaatattatacaaagcagaggaacaaatagttttcattataacttacacactaggtcgttcaggcagcaacctgcactgtcgaggcactgaggaggaacgacagcaggaggcttaaaaccacacgtcacagtcagcagggcagtgttcactctgttgt

SEQ ID NO: 39701 - DNA, 1161 bp, Bovine  19866880967619
  misc_feature (1)..(1): n is a, c, g, or t
naacatgcctctttttaagccctgcggctagaaggaaaaggaaattcactgaagttcccactggtattttctacagtagtggttcctcttcgaggttttgggtgtttagtgggactaactaaaaaatgggattaacacaagattgactatttttaattttgccaagtaaggatgttaaaaataacaacaaacattctactatcaatgataacaattattttataaagtgatagacttaagaaaaggtcagtttcctatttaaggacaattgtttcaatgaaaaatgcttatgtttatgaaaaattcactgccttgttcttattttctcatttctctgagaactactggaaactctgtcatgaaccctcagtaataagatcaaagatttttaaaactataactctagaagagctatacttgtctatgagctttcattaagtgagtttttgggtacccatgcctcaagtggagagctgtgcctcaatatctggtgtgaggattttgatgtcagtctactatccacctctttcacttttcctttcaagtttataataatcttggttggatattcctgaagaaattgagtgtttgagtctttagtcttcctgaatttttgtaagtaataaaaaaactgaatgcaacatatgtttgcttaaaatagagctatctgtcaactaaggcatatcatataagctgtatgataaagtaggcatcaatatatgttaattgctcaccagactttctccaatataaacatgaaaaaaacattttctattataaaataagaaaatttccataacaagcaaatttttatttatgatataaagtagtttgcaaaataaaaactgcaagaataagtgaccccatagagagtttctattatgaagaaccagattgaaaggagaacacagtttaaaatagagaattactcctacatcaattatttccaagacatcaaagtgccattgttgaatctcaactaaatttgaaaatcatcatcgtcataattgcaaattgactctgctttgaagaatgattttaatttcctttgatggaagcatgtcatgtagttttacttaaatctatcaaacgtgatagaaactattttgtcttaaaacattagatgttgggctaagagaaataggactgtggctggagatt

SEQ ID NO: 39702 - DNA, 1988 bp, Bovine  19866881009605
  misc_feature (1)..(1): n is a, c, g, or t
nttttagtttctaattcaataaatatcaatagatataatccacataaacaaaagctcataaacaaaacctctttgaacgtccttgagaatttgttagagtccaagaattttgagaacctccaaatcacaggaggatggatttcagagcaaatggaatcagcatctccagagctgcttagttagcagtcagccagcaggaaaggcccaactggtcgcacctcacctcacaccttaactggggatatttctttgagtgacacagccattcaccaccacgtggggcagtggatagcagagctttggaccgagagcaccgaccccaggctctcaggtccaactcttgatcagatctggaatccatagcctgagaccttggatcagttacttaagtctacacaaaacacataacatgggtgaacactgctatttacagcacaagagtgcagaggaaggctcggtgcttgataaatgttagctgctgttgtcaccacaatcacaacacactgagagcctctctcggccaccaagcaagacagccaccacgtagtctgcccgagaaaagcacccttgctctcaacgttcatcttcagggaccccaggagggctgggctgcacccagtggggcttcctgagcgcaaatgaacttggacaggagcagagtcctgggctcccgggcctctctgaggtcagacagtagccttgagtgcagtcgctgtggtatcactcccctaagtcataatcaggaaacgcggaacagcctgtttctcccacaaggcagtcatgacagggctatatcaaatgtcagacacaaacctggcacctggaaagcaaacccctccacttgtgtacctgccacgagtgggcagcacctctactgaatgagacaaaaccagcaggtggagaactgctgacctgccttcccttctgccagtccccacctcctcgtgtatcgaattctgcttttgagaagcttagtaactacggtccttccctttaataagatggggattttatttatttgaggggactgctgccgttccaggctgaacttttagctcgctataaagttaatgtgctattcaatgttcattccaggcaaggctgtggggctgtgtattctctgccacccccagaaggccattatctgtaattgcccattaccatgcgtaattatttctcctggcatggtctacaacctccaggactgcacgcgggtatagttaactgctccctcttaccaaatctgtgaaggaatctttactgaccctccatacactgaatggtatattccaaagccgacacaagacccttttacaggcaaactcatctcaaatcacgaacattcagatcccctccagatgtccctttcccactttcatggagtcttccctcccctcaaataacaagaaaataaagcacaatcaactcttcattatgtgggggctgataaccaaactgggaattatctagagtcctttatcctcccttcttttggatttggctgcttaattgtatcatgctttttaaagactactgggagaaggtggagatagtggaggggagagagagagagggtgaaacctaaaaattttaattcaatacgtgtgttcccacttctagcgttttttgaggaggaggaggaactatgtccaaatcagtgattacgatgggatttggggattccaggtgcatttaaagtattaattctagaactgacatttgctgacacagcccaaaatgtcaccttatatttacctcacttttcaacgttagctgggaaagaggagaggggtgggggactactggctgtacacgcagatgccgaaatacccagccacccctggcatttctgtgtcttttctgctgcatcactcaggtatgagggcatgagacgtactctaagctattataattttcacgcacgaaaagctaggaaggagccaccccatctctgtatggtcactaactacaactgcaccaagaccctc

SEQ ID NO: 39703 - DNA, 1683 bp, Bovine  19866881027849
  misc_feature (1)..(1): n is a, c, g, or t
ntttgtggtctccattatattatatggtctccataatatttttgtgttacgaaatctgtgaacatttggtactgtaaacatgtgttatttaaagtaatttagtctattaatgtgacagccatatgattttgtcttagaattttttagtttaatttgcagttaaaaattgagacttaatatttcagttttgtgatctgtcttatatccatatcttatattcaagtgtgatactggacagtctaagaaaactttaggacatcatatatttaacttattagattttaagaattatttaattctcagaaaaattttatttgttaaaccagacaattaaagtacttaaaaacacgataaacaatatgttaaatttacaagtgtcatttacaacatttaattaatcagggacaatcatttttcaaagaattcttagacgtactttgtaaaatttgctctacttataatcctaataattaatgcctaacaattttcattttaaagctttcataaattaaacaactaaaaataacaaaatatatacccttaataatcttttctccagtcaaagcatagaaaaaacttatatcaccaggaaagaaactgcacgggttaggcttaagtgcattttaatgttttgacattctctctctctctgcttctttcctttagtcccactttctttttcttcttatcttcttcctcacacaatatacattatatccttactgataaaatatacatgtattttaaaaaattaagacatcattctacatgttctttatgtagttccaggctgtgtgcatttacatgaaaagagacaatgaaatcttgaacttaaggatcaaactcaatgtgctactttttgtgtggtgtaaagacattttgtacatttcttatatacatgtatcaaaaattatcccttataaatgtggaatgaataccttaataaataaatttaaacttagcctatagaaggataaaagtgaaaagtgaaagctgctcagtcctctccgactctttgagaccacatggattatacagtccatggaattctccaggccagaataggagggggtagcctttcccttctccaggggatcttccctgacccagggatggaacctaggtctcctgcattgcaggcggattctttagcagctgagccacaagggaagcccaagaatactggggtgggtagcctatcccttctccagtggatcttcctgacccaggaatcgaactggggtttcctgcattgcaggcagattcttttacaactgagctatggctgacttgcaagcttaaggcattgtggtttgggggttttgacggatgatttctgtgtgcatgaggctatatgcttgcactgcactctttcctccaagacctccattgatcacttcattattacagatggaagttgcttaaaatgctgcagtagctgtgtatgcaaagtttactaatcgtgcttcttcaggttaagtgatggcagattacatgaagaaggtgttattaaccatatggatacaaggcatgaatataattctccttatctaaaccaacagcaaaatatagttcaccctgcttcccatagaactgtagtctgagaaaagactagttgtttgcttctaaagacatgggagaaagggagcaactatgatattcttgcggcctttttctcaaaaa

SEQ ID NO: 39704 - DNA, 772 bp, Bovine  19866881042588
  misc_feature (1)..(1): n is a, c, g, or t
nagtcggacacgagtgaagcgcttaacacgcacatgcttgctttgcagtgtgcctccttgagacatttttgctttcaaacctgggcaggagccagggccctttgcttctagcccttgctggacccgcagctggattcaactcctcggcaggaaaagaagagactgcttcaggaccgccatccctctgagagcaaggcgagagggcacctgacccaaaatgcggggtcccacatgcagctgaggaacacctggagggctacccgacagtttttctgtcttacagggaacatttcatctccacgtgtatgaaaataaatgaaaagagagagagagagaaaaaaaaaacattatgtagtgacgtttggagctgtgaagtagaacattctgaactgtgggaagaaagctcatataaccttcaaaccaacctcctttccactgcttggcaaagtgttaaagacattgtttttcttttccaaggacttttacaagtggattgatgtttgactaaatcagactctggactgtgctgccagtttccgctgcctactcattgtagggggtgtgcagtgattctaataaaaaagactgtctattgagaaataagtttacaaaaaccattttgaaaaattgatcatgcattagaaaaaagcctagtttaatgtattttttaaccacacagagagaaaggagtcccttttagtctagtggaggaggaaaccactctgagcatggacttcagaagtctggacatgaacctgagtttctgccttta

SEQ ID NO: 39705 - DNA, 769 bp, Bovine  19866881081459
  misc_feature (1)..(1): n is a, c, g, or t
ntttccctctctcctagttaatcggcatagacccttattgggtccccattggagacaacattctcacaagtttcttcttaatcaggacaaactttaaaaagctagtggaacttgaattacttctgttaaaatgatcccatctgtaccgtaaatggtgagacttggaaaattaattacatatattcagatgtatttatatatcccagaaatacatattagatatgttttacattcaccaccctaacagatacagaaggtaaacaacccctaagaaatgatccctgggtttcatcactttatacaattttggcttagattaatgaaaattatagtttccatttctttacctttgatctacaaaagtataggaaagtaccaggtttagttcgtctccagaaaatggtttaggcaattacaattaacaaggagttgctactttaaagtagatcttatgtaagaaaactgctctttcatttttggtagctgcttatcaactaagatgagtcactagtaatgtttacttctttgtgaattgacaggaaaaccataaacaaatctcaaaggagacagatgaataaggtttcaaggacattactgctcctgcctgaaactttagccaactgaaagcctgaaaatatgcaactcagaatttcactgcttcctcaaattgcaggtggacaaacgtgaaagatatcaggactttagcctgactgctcacaaaacaacttaaagcatgacagtcagtatataacgaatcttgaaagcaaaa

SEQ ID NO: 39706 - DNA, 964 bp, Bovine  19866881083630
  misc_feature (1)..(1): n is a, c, g, or t
naatgaattcagaaatttgtgaattttccaagtgcactttgttatcaataaattattaagtatctaccaaatgccagttactatgagaaatgctgtggctgtgtggataagctaaatagatgtggtctcttctacatggaatttcctggcaacaagaattcagaagcaaaatgaataactgaaaatgatatattgcacagtttcaaataagtaaagctttgtgaaaagatataaggtgctattggaatacataggggatacctagtgtagcctgggtcaaggaagtctctctgaggaagagaggcccaagctgaagtctgcaggatgagcagactgctgtagaagctggctggaaagactcggtctccaggctgagcaatggcataaccaaggcctcagtgacatgagagagaatgtggaactgagagaaggccaagctgccacctcaggaacagaagttggggggcagggtagtgggacgagatgaggctggtgagttccacgggggtcaagtcagggagagtcttgggttttaatcctgaggcaggaagctatgcagtgtttgaagcatagcacttcagttcagttcagtgcagttcagtagctcagtcgtgcagactctttgagacctcatggactgcagcacgccaggcctccctgtccatcaccaactcccggcgtttactcagacccatgtccatcgagtcggtgatgccatccaaccatctcatcctctgttgttcccttctcctcctgccctcaatctttcccattaccagggtcttttcaaatgagtcagtttttcaatgaccttagaaatcgtcatccatactactgtgggaaggtatgtttggggagtgtcacggagcacatgaagctattcattatttccatttcaatttaagatgtgatgaatgtcttttctctgtttctttggcatcaaaaatgtgattttaatatagga

SEQ ID NO: 39707 - DNA, 926 bp, Bovine  19866881153334
  misc_feature (1)..(1): n is a, c, g, or t
nattagctattatttatgtgaagaaataaggctctaagaacctaatttgcttacgatcctataggcagcatgcaaatacagctagaattctaaaatgtagtcctcttatcaaatcataacttgctgattctgttttcaataaaaagctagatgccagttcttacatctttaaatcttctggcttcaacagttaaagcaatacggaattcattttctaaatccatatactgttgatttaatgcatcaattttgtcttgatattcttttataacttgctcatgctttctctcttctttagcaatttctttagctaaggcttcctggaactcagcttcactaaaaaactcccttgtttcaatgtctttcctggaatgaaaaacaaaaatcaaaggatgctgtttacatggaaagaaaactttaaaggcctttaggtactaaatattctatattccctattgttaaagatcagctccttactttcaaacacaaaataagggacaggatggtatatgcagaaagaacaaaagtttatttgactgttcattcagtggtgacagggatatgccaagtcttaacttcactgagatagttcacagtcattttatggtttctaatatcctttgggtgtattcataggagtcaggttctgcttcactgcatcttctatgttgcttgactctttaatatacagtaaatacagtctaccgggcaaaactacagcccttggaccaaatctggcctggtgcccttcttgtggggaaataaacttttattggaacacagcacatccatttgcttacacactgtctatggttacttttgggctacaaagagacagttaggcatgacctgaaaagcctgaaatattttctatctggacctccacaggaaaaagtctgctgaatctgcttcaaaggaataaagta

SEQ ID NO: 39708 - DNA, 1452 bp, Bovine  19866881180534
  misc_feature (1)..(1): n is a, c, g, or t
natagcacatggaaatgtgtgtgttgttgagccagccttggtttagagaggacttagtgtcattaacacatgagtttagtggtaacatgatctagattttaagccagaggtgaaaatctggcttctttctttttgaatgacctaatttgttttatgttctgaattcactgggtccttttcagcgcttgagcacaacactacaggaagtggagtgggtctgagcagaaagacaataggtttagttttaggtacattgagtcctcttagctgcaattatattaaaaagaaaagcagaatgacttcacagagaaggtcaaggacatagatgtaaatcaacatgtaattttgtggttttgtatttcagagacccagagtccaagtttagttcagaaaatacctaccctaaaatttcgggggagggatgaacttatgtttttgcttcatgcaatatattctggcagatttataaacactggttgtagatggatggattaaaatcagcttttaagacaatcctaaattatggagaagagaaaattataatcgttagttttctttctctttctctctcccttttttatttttttacagataggacgtgagaaaggcgagttccagcttctccttgatgcactggacaaaattaagacgaaggtaaaaaatatcattttccctcgtagaacataaagtcaggttatatcgatttttttctttttacatttttcaagtgtgcttctttcacctaaaatctgttagtaaattgttcaatgaatatgctgctgctgctaagtcacgtcagtcgtgtccgactctgtgcgaccccatagacggcagcccaccaggatgccccgtccctgggattctccaggcaagaacactggagtgggttgccatttccttctccaatgcatgaaagtgaaaagtgaaagtgaagttgctcagtcatgtctgaccctcagggatcccatggactgcagccttccaggctcctccatccatgggattttccaggcaagagtactggagtggggtgccattgccttctccgaatgaatatgctaggcagacctataaaagcaaatgctgttgtgtttgtatatttttgtggtttgttggttttagagcagtttcacatacataagcttatttaaccctcatagtcaacctgtcagataattacatttttaatgaaatgtttgagagagaagttgagtggtgtttccctgcccaacacacacacacacacacacacactcttacacacttgcagaggcactaaatatttgggtcctagtgttcccctttctctcctggattgcacctgtatattttaaatcttaacagttaattcttctacttaacagactcactttaattctttgagactgttttagtcatcactttagttttaccactaggtaaagtattctgaggatgacatgtgataaaaat

SEQ ID NO: 39709 - DNA, 867 bp, Bovine  19866881204334
  misc_feature (1)..(1): n is a, c, g, or t
ncacgtggtcgaagcaagaggagaattcagccaaggacaaaccagcctttctactaaaatatttgtacttattgatggaggtatgtttggggtagggtgggtcagatgagagggtcaggatggaggtagcacatgagccaggaaatccagtttatgtcagggataaaaatagaggagacagttcagaatagcaagtggactgcagagtggactgttactaaataaagatcgaacaggtgcccgcagctcttgggctagctggaatgagtgaccttgctggaaaggtgagcctcccccgccatgctccaagggggatctcagtctcatcacatttgcacaacaggaaaacgtcctcatctgagagccgggctggctgggaatcctgactccccgtcaggtgcccttctcactttgaaaggcctgctgactagcgtctgacatgagtgaccatctgtcgctgcctaagctttatcagggaagtgcatgccgttcccaggctctggccttcttgctggattccttaactgatgaagatcacatggcatctcagcggagtctctggaggtcacctggatccctgtgagtttcatgcaaacagccaccaatcctctacactctcagacaattacctagagacttgctgaaggagtcttcaaaagcatgcttttcaccaagaccctgccttcctctctaggaatccctggctggcaatggtggctttccgggatggtttcattttatacctggaaactgaccaatattaaaaagactgagagaggattctgataaaacatttagggtaattgggacctgctttgtaaagacttttttcccccttttaggctaaagattgtgttatccttagct

SEQ ID NO: 39710 - DNA, 1807 bp, Bovine  19866881249589
  misc_feature (1)..(1): n is a, c, g, or t
naaactaaatgctcactagaggaattataaattacgtattttaaaagaaaaaattaaaacaaaagggaaaaatgaaatagaaaaagaagatgttcttaggagtatcgtttataacaataaaaaaacagctaatctgaatgctcactagaggaattataagctatgatatagttagtttaaacttggttggatatcttcattgaaacattatacgtaagctaaataggcaagttgatggaagatatttttgaataccaactggtctgagtgaagcaggaggaaggggaggacccaaggccttcctgctggtgcccccacccaccctccactctgcacagggccccagaccacctctgaggcagccacagagcaccgtggagctggggcaaaaccaccactgcaccgtacctgttgtcactaaaataagtgtacagccacacaagcaaaacgtgtctgagataacgctacaaagtaatgataaatgagtagagaggagctcagccacatgatgcacacgcagatacatgcagctgcataaaatgcatgcaattaagacgattggaaagatggtaggtggggaacataactggtcttatcttgtgcttagtcactcagtcgtgtcctactctttgcgaccacatggactgtagcccccaggctcctctgtccatgggattctccaggcaagaatactggagtggttgccattcccttctccgggtctactcttacacggttgttttagacttaatggaaatgtattttatcaatgtctctgaggagccctaacgctttaggcaattaacgtggtttccctcagcattctcatctgtacaatgacaatcatggggttactgtgagcctcagatgggttgatttgtgtacagagcataaagcaatggcttgatagatattaaccaccattagtgatatcctcagtcccttacatgcaagtggtgtaagggactgatggctcagctggtaaagaatccgcctgccatgcgggagccctgggttcgacccctgggtggggaagatcccctggagcaaggcatggcaacccactccagtactctggccgggagagtcaagcacagcacactccagtgggcccttaaagagctggacatgacttggcgactgaacaacattcaggtgtaaaacttttgaggtaaagtgatagcaaaagagaagcgttcagatttagccagctgcccatctcccttctctttcgctaaatgcagtaaatgtcagccacgctctctatggaaggccaccgctgatctaagactctccaccactgcagaagcttctagatttccaagcacctctctttttaatacttgattaaaattgtttttccctctcaaacctctaatgcaattaacaaaatcagcacaacatgaaacttctttcttcttgggtgtatactgaatcacggaatttttgctttagattattttcatttaatctgatgttctacacacatacagaccagagaaggtactcgaaacaaggcttcgatatttaagtacattgactacatttttagtggaaagaggaagatctatatttatatgacatctgttatataaatacaatcagtaggatgttttatgtcttgttgtttttctaacttctgtttttcatctgtttgctaacattccccctccatcgtctcatccaagcctctaatttctgaggctgattcccttgctttaagcttacatcagaagcagtggcatcttaaatatagtatcagtatttattcttgtaccaacttgaattggttaatcagcaaaccata

SEQ ID NO: 39711 - DNA, 1392 bp, Bovine  19866881250879
  misc_feature (1)..(1): n is a, c, g, or t
nattgtaatatttttaaattctatatctaatatcatatggatcccactatagtttttctcttaagtctctatttcaaaaacatattcatctttaagaatgtatctctacatctcttctaaaaaccaaaaattattttctcaaggtcatctggaatttcagcaaaggagaatacaggtgtaccttattttatgcataataaagatttttgaaaattaaacataagccacatacttcagtaaatggattgattcaatatgtataaaaattcaatatttaaatgctaaaagaaaaatttatactggtgatgattaccgccccaccctaatttgtacaaacaggcttatatatgttaagagttccttaaagtggtttctacctgcttggctctcacaaaatacatctctgacacagggaaatgtttttaataccacttgaaaaatcctgtatctaattaaaagtcctcatgcagttatgcacaggtaagatctgccatctgaatgaacactgaagcagtttccttttctaaaacaattgctccattttgagggagcaaggaaagggagactcttccctctctctcctccttttctaccgggaattataaataaccaatctagacatgattaaggagtgggtttcacagtcccccatggatttctaaggacttggtgcagtgtatacttgaaaatgtcttttccaggattttcactctcctgcttcttttcaaacccctggcataatcttctgcactttcctgtttctcctcttggagcttctaaaagaaagttgcattatttttactaaaggacattatattagattgctggggaatgaggacattagaaactttacttatgtaatgttccaattcaaaaaaaaatcataagaacactttctttcccacattggaatttgataagtgtgcaattattgctttaattggattacaattgcctctaggttagtttatgttcttcacatgatcaaaaacacataaaagacatgatttaaaatggaaatgcactgtattttggtgataggataattcagatattttcagatagcaaataattgcattacattccactttggcaagtgttattagtataagaaacaacttcatttaaggattctatttgcttttattgctaagcttcctatatactttcttatattcttgctctccaatattttatatggttagaatatagaaagttaattcaatgtaatacagctaactgatacaattaaacataagtaacacattagttttttttttttaaactaaaccattcagtacatcctactcttctaacttgtctcatgtaattcacaatttcttcctgctgcttaatcgcagacttcagcaagcacattttaggaggagagat

SEQ ID NO: 39712 - DNA, 732 bp, Bovine  19866881258441
  misc_feature (1)..(1): n is a, c, g, or t
nttcatcactgaaaacagccagactcagtctcagctccaggaacgaactgtgaccatgccacaggccaggctcatgagctaaaagaactaacgtctcggagaaagcggtctagtgaagaaagggtgtcgttctttcaaatgttcttcccacttctcttcattcactgtatccctgggtatcaccaaggcctcaatttaatttcctgtaaataatgtgcaacagacaaactaaggaaatatataaatttttcacatagtataatccatataaaatgactccaccatatcaggaaatataatatggttggttttctgcaatagagtcaagtaacaatttatttctctttctatattccagaaggtccttccacggttgttttgccaatactacatttgagttcccacccaaggaacaactgtcatcccagttctgcatttatagtcaaaattgcattaagttcccaaattaagcatgtttggtaaattgaggtgaaccaaaatcaacagcaagacgcaacttcaaataagctccaagctagcctccagactttacaggttagaggttcttctcaccttctctcctctgcctgcaattcgcacaacctctaccaggccagtagaaaaggctgctgactaagcttttccctgctcactaagcaacttacttgatttttctaaaactcaagtacttactaaaatgacacagcatgacaatgaattaagcatttgcta

SEQ ID NO: 39713 - DNA, 693 bp, Bovine  19866881260670
  misc_feature (1)..(1): n is a, c, g, or t
naacatgggtcaggcaaacgtgttctttccagccacggtaaccggatcgctggagtgaaatcaacccgcagaagcatccagagactcagccagccagacaggcagcgttgaaagcatctaccaagcaaggctgcaagcgccagcccgcggggcgcagctttcagttcggaggcgaagcgcaacggccgtgccccccccaaaaaaggtggggggccttggaggaggggggccgagagcgccggcctctgcacttcggctctaggttaggggggcctggcgctttgggagccgcgagggagccccccttccagggccaaggggcgggggccgtctcccccccatcccgacagctgtccagcccgcggaattcattggcttcccccagcccgcctcccgagcaccaccccggtctctttagccccccgccccaccctcgctgacctaataaggccatgtgggagtgaggggcccggcataaaaggggcgccggcgggccgcgcacggcgggagccgaggcagcgccgcgcaccgccatggccaaggagtggggctacgccgaccacaacggtgagtgtccggcggcccgctgccggggtgcgggggtcgggggcgctcccgccaagcccttccctaggaccccgcacggccggccggctcaccttatcgctttcatctctccctctcctggggcag

SEQ ID NO: 39714 - DNA, 874 bp, Bovine  19866881271994
  misc_feature (1)..(1): n is a, c, g, or t
nagtaatactgagtgatccttttgtgcttatactgaatggtggcaagggtgagctactctgaaggatgaggtacccactccagccagacatgaatcaccaaagggaacactgcacagagctggctcccaaggatcaattattatattctggttgggttgactgtggactcactgatgtctagcaagtcagcaagtcccagaatgctgtttcaaccctcttactaggactccattctcattctcttcccttttatctagtttaagcacaacctatacatatggcttcattttagatgctgtgaagactgcctttcacaccagatttaaaccgctcgtactcatacttaatgaataaaacatggttatcaaaaatctatcaataattccactactgtaattatgaaaaatgtttctgtcattaaattgcaccacactctagattttattatcttattaatgtcatcagtaaagctcatttatcatctatacaatgaactagagtttcgtttcactatataatcaacaaaactggccctttacaaaagttagggtgactgtgaaatattaaattttctttctcatgtgccaattgaattgtcatttttattttttatatgtaatttaaattgagcatttattgaccacctgttgaatgtcgatccctacctaacagaagaatactacaaagtaattcaaaccagaattcaagttatagcctcaagcaaaaataaaataaataagaatgactttttccaatttgacttctagaataaaagcttccctttctatgcctgaagagtagaagagccaaggatataaatgtttgataacctgaaataaatctgtcaggaaagaaatctagctgctacttaca

SEQ ID NO: 39715 - DNA, 1405 bp, Bovine  19866881274143
  misc_feature (1)..(1): n is a, c, g, or t
nttgcatttttcacttaacaaaagatcaatatctttattatccgcttagagtgtgacaatgaccttttgaagcaatagctcaagtttcaaggaagcttaaacactaatgagaaaaggagaggacgacaggggagctattcgatcccagctttggttaatcaaaggagaagggattgtattcagctaagaagatcaggaaagtcagcttggattccaaagataactgaatcatattgttatgtaaagccaaatgagaattacacagctcctagacctggtcctgcatagattctgtgacagattttctagagtcggcggggaactatatatatatataaactttcaatatcaaaaagtggcgatttttaaagaacaagtatttctgatatcattagagaagaaagagagatgccagattaaatgaatttccaatagaatgtgaattttaaccagaagcccatttatgtatgataacaaaagaataaacacaatgatttaaaataagaaagtttagcacttggaaaagttgtaaggttgggaacattttttaataaaatactagttatccaatgccaaaccattttctttctttctttttttttttttttttggtcttaaaatgccgacaccaggatttgagagccggagcatttgaacaagcatcgtagtgacccaaagtggctagaaggaagggcatcaagtgataagtacaaacttaggagaaagagtagaagatcggaccagagtagcaaatccacgtgccctccaagggatcgtgatatagacgcagcagagtagagcatatgacacgattaatgccggaggagtccaagcttttctgtgctctctctagtctgcccatcctagctttttttaaaatttaaaatatagtttattttcatattgtgttatctccaagtctacagcaaaatgattcatacttttttttctattcttttccattataggttattgcaagatattgaatatagtcctttgtgctatacagtaaatcctggttgtttatctgttttaaatatgacaacttatatctgctaatcccctagtcctgatttattcctcccctcccctcccttctggagaccacagatttttctgtgagtttgtttctctatttgtattgggctggacaaaaagttcaggttttcccataagatgttactggaaaacctgagcaaacttcttgtctaacccaatacataagttcctctgtactgttcttcgatttcaaatataagtgatatcgtatgacatttgtctttctttatcgactttcagcacttagtctgataatctctaggtccatccatgttgctgcaagaggcattatttcattctttttatggtcaagtgtattgcattttgtgtgtgtgtgtgtgtgtgt

SEQ ID NO: 39716 - DNA, 1065 bp, Bovine  19866881317465
  misc_feature (1)..(1): n is a, c, g, or t
nagtgggttgccgagcccttttccaggggatcttcctgacccagggatcgaactcaagtctcccgcattggcaggcgggttctttaccactagcgccaccttgtattcagctatgaagtggtatcgccagaattggagccaagcaggtccaagaatcattgccctatccccggagttgggggtgtgcccttccccacattgtggggggttcacacatctctgctcaatcccaggccccgaacactggcataaggactttcccattgccaacggagagcgccagtcacccgttgacatcgacaccaaggccgtcgttcaggatcctgctttgaagcctctggcccttgtctatggggaagcaacttcgcggagaatggtcaacaatggtcactcttttaacgtggagtatgacgactcccaggacaaagcaggtcagtgtttataaaataacttgtgtgtcagtagcagctcttttcccagcttaacaggcgcaggacccccccttaatgctacactctgatcatcttcgttggatttcagcctctgggaagcaggctaatttctttgcagtggcaggggctgtttctccctgtcggattccccgtttctaggtagggcattgaataactgtgctgtgcctgagaaaagtcaaaaaaaggcagggccccttggcgatagagatcagcaatgaggagacttgcaaaaactgaactttttaggattggtcttcaaggtagcatgcagaagagcgatgaaaacctgctactttaaaatcttgaaattctcagaaacactgtgtttgtgaatattttctcagccttgggccagtgtgataaaggtggctgtgtatctcggtatccacccagaagttcattccataaatgaagatgttttagagttggtggacatacctggtccctggctgacaaaaccaattagcataatgtatttgtagtcgtgctgtttacagaacactcttgactgctgcttctttttattgtttttttcttgcttagaagtcggagaacaatccccttcagacacagtagcagccttctacgccca

SEQ ID NO: 39717 - DNA, 567 bp, Bovine  19866881327162
  misc_feature (1)..(1): n is a, c, g, or t
ntattgcaaagttccttgttctttcctgcctttataaaagtgagttcatatggagtcagattttaatgttcagaaagcatagactatactagcatcccattcctgtagtgaaaatggatcttcctgattacagtattaaaaaacgtgttgacgttttttcaaggccattctcttaatcatctcagacgtttggtagaacgcgcaggtgtgagccacagctctcagccgcgtttgtgtttcgtgaaggttgttcgattaccacggccgtgtgcctccgccgccccgcgcggtcatcccgctgaagcggccccgagcggcagtgacgaccacgcgcaggggaaaaggagttttctccatgaaaggaggatcgaggtctgctgtcaccggctcttcttcgtcgggctcgaaatgtaagtaatcttcttcgcttccccgtaaagaagggtgggggtgtggaccattgcatgaatgtctgtactcagtaaatgaatcaagaattatggcagggttgctacgtacgatgtatgagcgaaatatcaaaggataagaaacggtctctgctttcca

SEQ ID NO: 39718 - DNA, 1009 bp, Bovine  19866881339640
  misc_feature (1)..(1): n is a, c, g, or t
natggtgcatgaaggatcttagttccccaagcaggaatgaacctgtgcccctgcagtggaagtgcagtcttaatcactgcactgtcagggaggtccacaaatagaattaaatcatatgacctgatttgagtgtatgtggttcatagggtatcaggttgtttgccaattaaaatacctggggttgaagttggaacttcagcactggcctataaggacttcagtcaataataatgtatcaataataacaaacaaccaggtcctactatagagcacaggaaactatattcgattactgtgataaaccataatggaaaagaaaatgaaaagaatacacacacatatacacacatatataaatgaatcactgttatacagcagaaattaacacaacattgtaaatcaactacaagttttttaaaagcaccttaaaaaggattgtgatatttcaaactcccctttgacagcttttataacaaccaaactgaaagaaaagtttagttaaaaaaaaaaaaatccttgtatcacccaggacttgaaagcagcaataatctctgaaattcctccatgagtgagtgttgcctcaggcttattatcttaaggaacagttctagaagcagctctttgacctttccccaacaatatacctcaaaatatgttaggagaccaaaatggttattttagtgataagtaaatgtatctatagattctctggttgctcagtgtaaggaatccacctgccaatgaaggagacataggttccaggcctgggtcaagaagatcccctggagaaggaaatggcaacctattccagtattcttgcctggagaatcccatggacagaggagtctggtgggctatagtccatggggtcgcaaaaaagtcagacataactgagcgactaaacaacaacaaactgcaagaccttagtaatggcttcacttctgccttccaaatctcacatcaataggcttcgggtatatttggacacagaatcataaagggaagggat

SEQ ID NO: 39719 - DNA, 1113 bp, Bovine  19866881369626
  misc_feature (1)..(1): n is a, c, g, or t
nctctgaccttttgccttttttagtattgagacaatgaccctctagtgcatcttgcttttatcaagttttgatagtttgttttactttttatagatcggataatgcagtggaaaattgaagggatcagataaattgattgtgactccatgcttgtaagttccagatttgcagaaacttacaatgtattttataatgtgaaggataaaggctattttttttttttttaaatccaaaagctctggtttactttcctcagtgaaacagaaaccctccagctggcatctctgcctgctagctcagcagagaggacgggaggaaaaattgttctatttcctcacctccacatgacatcatccatggcaggatagtggcaaatggttgaagcatgttgcacagtgccctgtggtgctaatctctcttctcataaagcagagatatgcagtctatggtgtcacacagaggcaggattaagggtggagcaaacaaggaaagaacatgccttttttgttacataggtgtgcaaagagtcaccaggactttgactggcaaaagtcatgcgtttgccgttttgcacagagaactccgttttaagtttggctctgtgggatgcagtggggagtggagcagtggggctgttgagtgcctgccattcacaacttcacccagagccgcaggctgggacacgtgtgtgcttcaggtcagcacttgatggtcctcaccgccccttctcttgccctcggcccaagagcttcccctctgtactgatcgcttctctgccacgcagacctgctggttcttccccagctgcacacctcttatggggcgacacagctcacagagtgaagtcttagcatcaagggttttcgccttcaaaggctgcactttctgcctccaaccccctttccagcctcatttcctgccactcagtggcaagcacctgtcccccactcccagcgtctggactttccagacaacttgccaagttctaagcaagccctgttctttgctccttttgttcgggctcatgctttttttctttgccactagattccttttctccattcctttgtcctttaaggaccagcacaagcaacctcctctcagaatccttc

SEQ ID NO: 39720 - DNA, 3217 bp, Bovine  19866881421275
  misc_feature (1)..(1): n is a, c, g, or t
nataagactgaaaggtatcctgtgggatgtgacagagtgttgaggaaatgtagggtgtctgtgggttacattctaatcgggtcacggtgcatttgacattctattgcattctttcccttctcccctttccagtgaaatcagatgagttacagacaatcaagaaagaattaacccagatcaaaactaaaattgactccttgctagggcgcctggagaagattgagaagcagcagaaggcggaggctggtaagtgaaaaagagctgtggccacagacgtgttggaatcaaaccactcacaccctgtcagtcaccaagacagagcaggttcgggcacactggctgagtctaacagcgtttagcacagatacacaaacatcatctttaaacttagaactgcaatgatggaatctgattttttactttttaaagaagatgagccaagctgcctaaaattcatattttttaaaagaggaaaaggaaaagtattttggatgctaataagtaacagttggattatattaaaggtttatatctcaatatcaagtgacctttaagaaaatatatcagtaaatggaatattctatcagggctaagcttatattcatatttcattaaattaactgcagcaaaattgaacagatttcagaagccatgattgtaaagtcccactcttgaactgctgcaactccacaaaacttcagaactcagtttcaggatgtcagtatcaatgatatgcctggccacccaaggccatttcatttgacttaattctttagcttaatgtcctctctttgaaatatcggccctgaccctagttccatgctaatactctttatttatttatttgtaattggaggataattgctttacaatattgtgttggctttgccacacattaacatgaatcagccacaggtacacatgtgtcccctccatctggaacctccctcccaccccatcccacccctctagctagttacagaatgccaatttgagttccctggtctaatacccttttttacagcaaccgagagttgtaaaattatgcattttaaacagaactggcataaacttagagaagagctagtgcgtaaattgcaaattgcattctgctgggtctttgatgtctcagaagctccttgaaaatgagctgagggctgaaaggagacctgggagatggaggaactcatgactcctccaaacccggccctttctccaaataatgtggctccacctgtgtctattttatatgttgaaattcatcacaagatttccctggctgaaagagcttcacttttcaaaattaagcaagacagttttgaaacctgctcgtcaaatccagctttctcattttgcagatgagaaaaggaaggcccaaggaagtaaactgacttttccatgaccacatgaatggttcgtgacagacctagagtctcaaagccagctctggcgagggaaagcagtgcctcctctgaggtatcagcctcaggttccgctcagggtctgcctgcagtgagtctccctgggtagcaaccgatgatgagatccagcctgtctgttgcccgggtcactgggcagggcaccagcagtgaccttccggtgatgagtgacacggggttcagaaacgaagccggtgttgagggggtgtcgagcctagtggatgagagacgtgccctgtggttcaaatcctcacacgccacctagcctccgttttctcgtttaccaaatgagaacagcagtggctacctgaccttgtgagaagtgagtcaagtggcaaatgtaagttacttactagcccagaataaatgcttcacaattggagccatttagtgtccataggaatgtaagcatatatagacaaatacttcctacgacttccatgacaccagctttttaaatcaaaagccatatacctagattctcattaacttttattgagttggtgtggaggagagatgataaataaataatagacaaaatgagatcatttttattacaaatttcagtcacattttccattgagaaaagatatgctgcctatacttcttaatggagaaatttagatttcagaaagttttttatgcgctgtctatggcactaatctaaactgttgccagaactcaaatatcctgtgatgttgcctgaatcaatgtttccctttgaggaacttctgtgaaattcgttattatgtaaaacaacccttacagcaaaggactttgataaccaatttgcacttcagtttaaaggattatggagaactcatttaaatataaatcacctcaaagagaaaaatgtgatccttattccatcatattataacttccagtttcctgcaatgaaaaatgccttccacatatcttcttagaagatcatctataaacatgccactaaaattcaaagcttgcattttcttttcatgaaaggctgtcaccttatttttgtatgtttttcgactttcccagtcacaaggcagttatctttaagatgatgggcttaagcctttgatatttatgtctttcctacttgaacatgtaggaagaaaatggaattatttaatttgtcatttcattctctcagtaattgtctcctgaacaatattcatatttatggagttaagacgatcactttctaaattttctttatgaaaagaaatcagggttgcacggtgtctgtactacatggtagaaagtggagagaaatattttaaatctttttaagtgcccgatacctccttattgaatttaaggggatactcattttattgttcatttggttgcaggccagttattcagtagttaacattcactcttcactattgctcttttatagacctctcatttccaacttagtccatctgatgacaaaaatgtccagcttaggatagtgacagcaaagagatggagggttacaagcaggataaagccacacagcgtggaacttgtcctgagttcaaatgtcacaggatcatttttttcttttttgtatgaaatcctaagctatcaggagtaattgtaatgaggttataatgacatcattttggatttttttatgtgttaaattgctgctaataagatgtttgcatagtatcttgtctcttcctttgagatatgaacttcctcagaacaaggtcatgttttcactaatttttctaaatcttcaaacactgtgtgctgtgcatgaggcatgacttagcaagtcatttaacttctctaggtct

SEQ ID NO: 39721 - DNA, 2498 bp, Bovine  19866881484890
  misc_feature (1)..(1): n is a, c, g, or t
nacttgttgggccatgtttgctgctaaggctccatatcccttacctactgtgtccctggcagtgtattgattaatataattggtgtataggaatgtaagtagtacctttaatgtttgtaacattggacccttgagttaatttttttcttgttatagcccaccacacctttgccctataggaatgcaattttatctaatgcctttggaaggtggcgcctgactttagaataatcacttttagagaaaaataagttttctgaagaaaggatcttgaaatgttaacagccctcttggccagaagatgatgtaattcacataaacttttgcatatgataagtttgcaggaagaaagcctggcttactgctaactctaccccttcccccattatcttctatgcacaacttaaggtataaaaactactttggaaaataaagtgcgggccttgttcaatgaaacttggtctccccatgttgttatttctctcaccttctggctgaattcccactttgagcgtggaggctcgtcaagcctactaattttgcctgggtttctaagatctgacgggggaggccttagtgtctcctctccttcgggagaatgggaggacacctgcagcctacataggtaatgtaaattccttgctttggaattttattagctttccacgtaaaccaagttattcagcctcttttctccactgaattttctcactgagctatccttatttgatcactctttatatctttaattctatcgtatcctgatcaccgaagcgatctcccctttgaattccctggatccaccggggctggaccccagtaaatctcaaagaaggacaatgccaaagaatgtttaaactaccacacaactgcacttatgtctcatgctagtgaaataatgctcaaaatcctccaagctaggctttaacggtacgtgaactgagaacttccagatgtacaaattatatttagaaaaggcagaggaatcagagatcaaattgccaccatttgttggatcatagaaaaagcaagagaattccaggaatacatatacttctgcttcattgactctgccaaagcccctttgactgtgtggatcacaacaaactggcaaattcttcaagagatgggtataccagcccacctgacctgcctcctgagaaatctgtatgcagttcaagaagaaacagttagaaatggacatggaacaacaaatttccaaactgggaaaggagtacattaaggctgtatattggtcaccctgcttatttaacttatacgcagagtacatcatgggaaatgatgggctggatgaagcacaagttggaatcaagattctcaggagaaatatcaataaccttatggcagaaagtgaagaggaactaaggagcctcttgatgaagccagctttttcatctcctctttcacttttaaaatccagcattcaaaaagctaagatcatggcatccagtcccatcacttcatagcaaatagatggggaaaaaatggaaacactgacagactttatttctttggtccccagaatcactgcagagggtgactgcagccatgaaattaaaagacgcttactcctagagaggaaagctatgataaacttagacagcatattaaaaagcagagacatcactttgccaacaaaggtccatctagtcaaagctatggtttttccagtagtcacgtacccatggtgagagttggaccataaagaagtctgagcaccaaagaactgatgcttttgaactgtagtgttggagaagactcttgagagtcccttggactgcaaggagatccaaccagtccatcctaaaagagatcagtcctgaatgttcattggaaggactgatgctgaagctgaaactctgatagtttggccacctgatgtgaagaactgacttatttgaaaagagcctgatgctgggaaagatttaaggtgggaggagaaggggatgacagaggatgagatgagatgtttggatggcatcacaagaatttcagaaaactctgggagatagtgaaggacaggcaagcctggcatgctgcagtccatggggtcacaatgagtgggacatgactgagtgactgaacaaaaaaatcataaaatagtacttgcgtactcacctgtaaagcgcagaaatgggcctcttatttccaggttttggtctgtatggttttggttctcctgccatattgatatctgaaaacataaaatagcactgattaagaaagtattaaaccatttgtgaaaataaatcttgaagttgcattatcttttttttttttttttgtctgtaaaatgttatatgacattcatttattcctaagtgttttctgagcacctactctaggccaggctctgtttgaggtatttcatgtaccaaatgtattagatccatgcccttgtgggacttgtcttctatggggagggagggcatagatagttaaccacaaacataacaaataggaaaacgatgtaacat

SEQ ID NO: 39722 - DNA, 1024 bp, Bovine  19866881548076
  misc_feature (1)..(1): n is a, c, g, or t
ncaagcccaccaaggctcctcccgtccatggggttttccaggcaagagtactggaggggggtcccattgccttctcccaaaaaagaaggttaaggtggttgaattttaagtttactgcctttataaggcaaaataaaaacaaataattatttattcgaacagaggtgtactccattttgtatatgaagatgtcacaagcaatgtggcacaaatattatatatatataaaagtatatgaaggagacattgcagttctgatggctgtgttttggccctagcctggtctgtcttcctcatttcatccgtgttatcttgcaaggaggtcattctttgaaggatggctgggcagggtgaccacatggtccctgacccagtaaaggggttacgccatctaggccatagaaagctcaaatctgtgaccttggagccttcagcttggtgttttaaccaactcaggtaagacatttgaaatacgtttatcaagcacataatattttactttctatattgagttccttattgctcctctaacaattttatccttttttcaattaccaagtccagaaagtaaaatgacttgtcagtaaaaattcttagaaatctcaattatacttaaaaaataaaaaaacatgtagcatgcagatcttttcagggtctctgcgctactctaacagcttcttttcagctgttccattctaagcatttatgtcagaaatttgccaattctgagaaaaaattttgtgctctaaccattcaggtcaatttaatgtgcagtattcattattgacacggattgtacatccacatatttgaaacattgaaagcccttgacagagcttttagctgcaataactttaagtgctttggaaatgaggtcacttttagttacaattcaagaatttctagttgatatcactactgaatagtgaaaataatagaaaggacattgaaagaaaagaagaaaaacgtaggcagtgaaatgactttatctgatcactctaattatatcccatagttgaaaagt

SEQ ID NO: 39723 - DNA, 1224 bp, Bovine  19866881564955
  misc_feature (1)..(1): n is a, c, g, or t
nctaatagtgtgcctaaaaatgatgcccaggccttcttctcttttcttatactcatcttccttaatttagtctcaaaacacccccaagtagttgaagctgactcttgcttatttgacatcaaaattcttgaaagcttgttcctccgcaggagggtttaacttttttcactctaagatatcttctctaactatttcacacggacagaaaagaaaacccatcttcttccatctattgccctgatttcctcctgctgctgggatcctggttatgaactttctgctcaggatcagttctaacatttttcccctgagaagacacctaaataacttcaaagatatgttttgcctttattcttttcctgtataaggaattactcgtaactctttctgccaagccttcagtgcgttttgtccacaatgcatataaacctattaacaatggctcactgtaccattcctttagaagacactttgggaaaggaacatcatggattacttatctttctttgtgagatgattgccaaaaatgtgagaattttaataatctcacaataatctcagctcctctcaccaagaagttctgatttctaaaaatgtgttcttctaattgtgttggacaaatttgcaaagattttgctttactaacttgactatggtttaaaaaaaaagagttactgaattttcagaattggaagagacggtaggttgagtttcactctctcatttttcgggtgattgccccgaggcccagagaaaggtgggcactgctagattctgcaggcttcaggaggatcaggttaggcctggacttcctgctccctgcccgctctctctgttcatcacactcttcagcatcactcctgatgtcagctcctctcgggggatcctctggcctcttcttgcacagacccatttgtatagtcaggatgatcatacaagacttttaagtatcaaaaaggtagtttttcttatatcttcaagactgaataatcctggtagacaggataattttctttatgctttagcatattttagcatatactagacactcaataaaaatccagtgtacaaaacaactctcatatgcgtattagtgtggtccattcttgcttactaagtaacacaagaagtacaaccttacagaatattttagagtaatgccttcaaaggaaacagaggttaatttaaacatggtccttagatttgatcttacttacttttaca

SEQ ID NO: 39724 - DNA, 734 bp, Bovine  19866881721675
  misc_feature (1)..(1): n is a, c, g, or t
ncacacaacatatgccgctttactaaaatgtacatccgatgctaaacgtgtcacaaatagagtgaacagatgcagctctgctttttcagcatgagatcatacctggccaacactggaagttttgtaatccttgtctggggggaaacaacagaactattgatgaacagtgcagttctaaaacattattgaattgcactgtcattaaagtagtagtgagtatgatgtcttcacctgacctgacatccagtatagcactgttacaccattttatatttcagttgtgctttagagagtttcttaactcagtgtgtagattagtttatttcatgaacctgctaaatggcattttgacgtcctggggaaatgattcctccacaagagcttccctttcgtctccagcagccacttccagcctggaggagatgggtcagttgtcacgtttctgctctttcggtaactttgcgggcggtagctcacgagaagcgccttttgtgttgtggttcactgacttaggttgctctgtgaattcaacgtataaataaataatgtaggtcctgttttgtgattgaaatgaggggcaggcttagttgacccttctgattttcgagcccctagtggtatgaaaatggtccacggcgcctttcggcttcatcgtcctgtaccctttgaagtcagctataatgtgtgggcacccgtgacctgttctttgctggcagctcctcggctctaatgga

SEQ ID NO: 39725 - DNA, 1682 bp, Bovine  19866880402824
  misc_feature (1)..(1): n is a, c, g, or t
ntgggtgcaggctgggggttgcagggagcagccgggcagccccaaagggtctgcagtccccgctgactcgtcttctggaaacgccgcgtctgcagtcaggaccgcagaggcgcctcagccccgctccccggcctgatgggccgtgactttctggttcgtaacacagaggcgcgcttctcatcaagaggctcatggtctccagatgactccaggcttcacagagcgagcccaaggccttcagttctttaaccccacacgagtattcccgcaacctgtgatgtcgtaaagcacagccgggggtgaggcagggtggacggtgggatggaggctggagagtgaggggacacgtgtgtacctatggctggttcctgctgatgtgtggcagagaccatcacgatactataaagcaattatcttccaattaaaaaaaaagaatagccccgggactggggtggctctgggtgctaacccccaggtggaccccgcgtggctgtctgggggaggggacgcagccccgcggctcccggctctactgtggtgcctgcgtgactggggacgagggaccgggcctccaggagactcaggctccctgtcactctgagtgaccgtaatacccagagttggggctgccgtcccctgagcctgctctgcgcctggcgccagactggacaccacaggggagtcgagtcgcctcgctcaccggctcaaggccgggcgcgggggcgctgtgcccatctttcaggggcagctccacggcaccaggtgggctgctggccctcggcagtgctggggagctgagaagtggcccgggggggcctggacaccaagcacgcaagcctccctctgggacacgagcctgcagaggctgctacacccgacatgtgtacacgcccatcttccccagagcaaaccagaaagcgcctcatgaactgctggggtgcatggctccccctgggttgtgtctcagggaacacaggcccgattggtaaccagttcgaacccgggcagagcccagccccaggctcccagtgggcgccaccccccagcggatgtggacgggcagggaccccgcaggcttcaaaaagttgctcttggaggcatttctgcttttccatttataaagcagagcgaggctataaatcagaaaagtatttataaggactcagagcggcaataacaggttggagtggccagtgcgtctctgtgactattccatcttccacgctaacttaaacacgagagaaaaaggctttccagcccagggcccgccacacggccgcggagatggagtgcgtttgtaataattcatagacttctcactttcatttttctgctgccccggaatcacattccactattaaaatgcactctgaccgctggccgagagggccctcctcgtgttcagacgcgtacagggaggcctgggggataggaggaggcgggagcgggcagggctgggccccgccgccacagccacaagccccccggctggggctggcggaagtcctcctggggccgccctgaggacccagcactggaccccgacaggacctccccatgcaaaaagaggcccacctgcgccagatggcggaaagggtgcccggtggggggagcaagcgtgacaggcttgagtctggaggggaaatgactcggggacaagggaggggacggcccggcatttg

SEQ ID NO: 39726 - DNA, 1276 bp, Bovine  19866880423415
  misc_feature (1)..(1): n is a, c, g, or t
ntgcagaccttggtcagcaaagtgatgtctctgctttttaatacactgtgtaggtttgtcacagtttttcttccaagtatccttaagttttggttaaggatcctaataaaattctaccgaactgtgtgaatattggtgtacaaacaaacatgaaactgaattaatgccttgagaacactagatagcccttagagaagaaaaggaagttagaagactggcatctcagaaagaaagaccttacctcctgtgccttatctcagagttcctgggtatatgactataatctcagataaaatgaggaggtttacaaacttgcccaaggccacagggctaaaaaaaacaactcagcctgcaattaacacaaaaattctttgccctccagtcaggtttaagtgtatttatacttatgttttctcagttgcttaaatacctccccaggaagaccattcagggcccattgctgcaggcatgaaccaggaaggggcgtgggctctgatacagctcagtggcaccaatgccagaacacagcgaattctcacctctttgttgtgtcagcctccactgaggtcattttaatgccatagcttgtcttttcttccatgttccccaatgggtcatttacagagcctcctattaaaaatacgcacatttttccagtcaaaccccaccatgtacttttagttgagaaaaatgaaaaggagaatgtaaattttccagactagcatttctctaggacacatttacttatttttttttccctgtttgcctcactatttttccatattacactaagccctaaatgccagcagtattctggtatatgtcactattcacctgatgctttcctctggtggggatattctattcgcatgtacttgtgttatttccctgttggtatctcgatcagattccgcaaatgttaatgttgtctctttcacagtaacattcaaatcgcagaagtaagtattggtggttggaaacttcaaaagtattataatcatagagataatgttgcaggaaggtggaccccttccagggcccaaaactgggctcttgtctaacactcagaaatgaattgtcggaggagacacatgtgttgacaaaacaagagattttattgggaaaggggccccgagtggagagcagtagggtaagggaacacaggagaaccgctctgctgcatggctcgcagtctcgggttttatggtgatgggattagtttccgggtggtctttggccaatcattctaattcagagtctttcctggtggcgcacg

SEQ ID NO: 39727 - DNA, 911 bp, Bovine  19866880429502
  misc_feature (1)..(1): n is a, c, g, or t
ntgttttgatcaactaaacctacacatttttcttaccttgggttaaatcacagttctgctttgctttcaacaagcttgcttatttataaatcagaactaatccaggtaaaatgatgacataaataaatgtcagtaggaaggagctaattgggtatgccacaagggtaggactagtactctgaaagtaacagcactttggaatatgaaagatgacgtcgatgcagaatttatactttagtccccttatccgccccccgcccccaatcacatttcttgtgcaagggtgcctattggccaaaggaaagttgagtgaatcaggccttaaattactgcacctagtaattgttgacatatgtgtactttacagtgctaatttatctcaccatggacccagtgtttacgaacacacaaaagcagatttatagtatgtgagattaagaacatttaaattctttatttttagatttttacgttagatacatttaaacatgcaaaatacattagaaaatgaccaaatctgcccacgtgaagtacagtgaactgtaaagttcctgaggaattgagaaagaaaatcatttcatttaaaggacattataccatatgtttgaaatactaagatgatttgaagatcttagatctaaggtcatgttaacagataagatcttgagggatcacaggattaagttatgttttgaataatgaggccatctcacatttactgagccctcatgcttcgcctggcactgtgctaagcctttcacatagattatctcatttagtcatcataacagccatgtgaactgggcactgttaatattccaagagaatagatgaagcactccaagtcaaaaaagctaactgacttccccagtgtcgtaagttaataggggaatccaggaatcagccccaca

SEQ ID NO: 39728 - DNA, 2285 bp, Bovine  19866880562320
  misc_feature (1)..(1): n is a, c, g, or t
ngagtagcgctatgccagttacctgtcactaatggaaaactccatgggatgtttggaataaaagggagaatttgttggaattggtatatccataaatctattttaaacctagcttatcttatgtctgtgattcctctctatcttaaaaaaatggggggaatggtgaaataattgccaagccagctataatcagcagtctctaattagatgttagagaggaaagtatggcatcttccttattcttaacctttgaaagttagatgacaacagtgatctttccctttagcaagactactcttgatatcactgaatttgtatattaagacaagagatttagaaatcatttgttaaaagaatacatgtcatacctcactgcactgtttacattgatgacttcttcatgtgctacattcattatggtacagcctaatatttatattatgattattcttttctaagcattttaaatcatcttacttgatccttaaaacaagtctgtgaggtggtgatttgtaagtccaaatccagaagtcattgagttcttgggtttttttttttttttaaagaaaggtgcattttccaggttaagtgattaggttcaagtcacccaaaccagttagtgaaaagctagaagtagactgtggtcttttgaccctgagaaagctggtctatcagacttaaaggattgaaatgggcttatcagtcaatcaacatgtcagccaagtattttcttaagcctctgcagggtccttaacattgtcctaacccctgccacttgagatccagaaaaaacatttaacatgatcgctgcctacaaatatcttacttttcaaattattccctatgtaaagggcctgaatggaacataaagtggggaaagagtagaggaaggaaggaaaaggcaaaagatctcatttttggagaaaaagtaagaaaagagatgattaacagtaggtcctgtccactcctcaggtgtgaaatatacaaaaacttagacttaaaaataatgttgaaaaaaataataatagcagtaacaacaaaagctagggaatagtacagtatgccaggaaatggtacctggaatgtgcaatgagtctaaccacgggcattcctcagaggatacatctgcattctacttcttgggacttgggaatgtgaccttatttggggaaaggctcttcacagatgtatgtctgaaaacacggatcccactctgtttttgcttatactatgaccctgtgatttcagattatttttatttaaatatattaagattggtgtgtctgttgatcatacctaaaataaaaattgcagttggccaatcaaaagccttttctttatgaacatataatgaacaccctcacctttgatgagatgtgtcaatatctcaagatttcttttcagtctatcatgaagggcttgttttatactcctttttctgcatgttagcattttggattatagctgttgatatcctttgactctttcaataagacccattcagaattttttaaattaaagttttatactagaaatcctaggttttattcatccttcttctctcctttaaaaatatatctttattaacgctacatgtttcattgtatttgtcctttcactcataattttaatcaactgccttcaaccacatactacttaaagacatggtgctaaggactaaaaggaatgcaaagataaatcaggtatggactttgtcttttagagattttgatctgataagcatctttaagtacaaatatttgagaaaaatcttccaaacatagcagtaaaacaagttagagagttataagtaccataagtctttccaaatcaattactgggagagttagacaaccccacagagctcccaggcagcaatggccttcagtggagaagtcttgtgggatcagagagggatctatgtaagagaaagagtgtgcccaaaacactggtaatagacatctctgagggatcagatggaggaacatgttccatttttagcagcttcaaacggcccatttcctttcttgagcattgatgtctgctgctgaatggtttgttttctcattcattgactggcagatggataaagcctatgccatttcttgatgcacttgttctcccactcttcccccttgccatccacctcaagatcaccctgccttaacttctgcagtgtcagctgcaactctctctttctccacatccaagggataagctgctttcttcccagcaggtgtcattgcttataaaggaagctgacttgacaggcagaactctgttat

SEQ ID NO: 39729 - DNA, 1176 bp, Bovine  19866880579847
  misc_feature (1)..(1): n is a, c, g, or t
ntgagatgaacctgggctcaagattacatagattagcattctaatatttaaaatagtagctgaaataattcacccaggaattctcatccagtatagtaacttaggtataggactaacttgaactgtttaactttcttgcttgtcagaaaatatctaaagccactacagattgtatgttaggtaataaaaattatcatctagccatagcttccacactctacaaaatctacccttagtctttgaaccattcatttgagtcacagcctctcctcgtatccaaatacttcaaaaattcaagtataattttaaacaccagagtgtgattatctccaaattaattatcctgtttgtttattgggagaacataataacttgttttcatagtgcgagaggagaggaaatcttttatctcaaaattgagacgtccataattacagcatatttcactttttttttatttgaggcagaccttttccagtctacccaacctagagaatgtgtatggggctctgtaactctgcaacaacaatgtttttgctacgtttctggattctggctttcagtgtggactatgcaggccaagctgcctctccaagagaagaacaatttggagagaaattcatctcatttattgtaaaacatgaaaatgcaattatgtaatttgcaattaaaatgaggctttcagtctttaaatttaaattgctgaatcacttagcttggtgcttacatattgccttatatattttgtatttcctgtgattatgtctcctcttcccagagatggcagaaaccccacattaaacttttcaaatcttccacagctatttctgtggtaccttatgcagagtaacggctattgcctattgacttaaactgggcacaaagcacttacattttaattgcattttttagattaaattgaatcttccaaccgaacactgaagacataaacacaatgctatttatcattctttattttgcaacagtctattttgaatgatctttataaaacgctaaacttccagcttcctactacatttaaaatattttaagtaaaaaggaagacaaaattatgccatgcctccaagtaaaagttgcagtcagcaatcctcagggttctgtcgccagcttcatctgaacttatcctctcctctgaaaccatttttcctaatcgga

SEQ ID NO: 39730 - DNA, 2045 bp, Bovine  19866880630384
  misc_feature (1)..(1): n is a, c, g, or t
ngcagactgatgtgtgtgtgttagtcgtctgtccaactctttgagaccccatggactgtagcctgccaggctcctctgaccatggaattctccaggcaagaatactggagtgggctgccattcccttctccaggggatcttcctgacccaaggattgaacctgtgtctcctgcactgtgggcagattctttaccacatgagccacctgggaagccctgtacatacacataaatagatcaccacaattcactgagatggtgcttggatagtatggaagacctagagtaggagtgacttctctctatgtgtttctgtgtctaaactgcaataggtaggcctgttaagcactatttacaaggaaatataaatggttatcaggcccattgttgtatttctcccagatacaggatttcaatggacatgaatccataattataaaattttggtctttttgctggtcataagagatatgattttttgagaagtagaactgaaacagaaggaaaatgggcaggacaacctttaaaaaagtgacatggcccaaggacacgatgtaaactggttagaaccaaataggtccaagatggcaaatgagttgacttccactagaccttgaaactcagtatacactctgtgacacactcacaggaactatgacagttttcagctgaccataatggtcaaaaagtagatggggcctaattcctagaaatcccactcccttatcaaaataactggaatactcttctgactccagactatgaaacaacccagccctataaaaactgacaaccccataccctggcggtgctctcaccttctgagatgacccacaatctctttgtggagtgtatttctctctaaatgtatccaattcttacctatcgctttgtgtctcactcaattcttcctgctcagaacctgagcctcattaagtcctgagaccaggtgtaatgtcagctaaaagagcataggttcaagtcccaatctgagttagataatttcagaactctttttgtgcccttaaatagctgaaattcagtaacctatgattttgccttttgtgtgactaatatttttttttttacctctttgtctagaacttgttatttcctctgcaaggttggtgagaagccattctggtagaaccttagcaaatatctagtgagtatcactctgtgccagcttcagcacagtcactgggaattcatccatcaacgagtgagacaggttcccatcctccctgcagcttgctgtcttggaggaaaaaaaggaactgcttccctgaattacttgggtcctccttcaaagtttcaaggctctgctagagttgatattgctagagctttcagccattttaagattattctacaacaccctcaataatggtttaaaagggaagcattctgcttgtttttgtctatttaaattaagcgagcacttagcctgaggtactcctcctacctccaacagaatttaaaccaagcaaagaacttggtctagtgtatagatatttgtacctttgtagctgccaaaaaaaagagacccccaattaaatgctcaaaagcctttaattactttcctttgagactttaactttaaccctgtttattactcttaagccactccagagggcaatattttttattggtgacagattgcccaaactgttgccagtgacctaatctctctctccgcagacatgactgcattttactgagaagtgttctctgcaaggacaagaaggtgtgtgtctatattaaggcaacttctctgctctttgtttttccaaatctggatgtggttttgtacagatccattatgtagacattaccattttcacttgaaatctaagcactggatatagtgaaacactcatcgttgtatgcttaattctctgcatcagatcctccttgtgttagtagattggtatttggtatctgaagttaattgtaatgtgatttttggagcctaggaggaaaggtctgtttggggtggtagtggtgatttagtcgctaagttgtgtctgactctttaaaacccca

SEQ ID NO: 39731 - DNA, 1086 bp, Bovine  19866880718764
  misc_feature (1)..(1): n is a, c, g, or t
ncccataaattgaacagttaattttctattactttattttcttttagggattaagaatgggcacatactttaaaattatttttaacagttgtttaaaagaaaactaatacaattatgtaaagtttaaaaataaaattagaaaaaaaaaaagaaaatatcctttatatggcaaataaagaaagagaagaaatgtatttttctcttatgactacttattaagtcctttatctcttctttgtaagggataggtgggatacctctcagatcccttactgagattctttagttctgaagacagagaagcagatttcattcattaccagcttatctctactctattaagaagcaaatgagtagatgcttctaggttactttatccataacaaatgcatgaatattgcctgtttctcccagagagtcacaaagataggagatggctttgaaaagaaaagtgctggtctctggggatcagaatccttgtacctgtcagaaagttaaatatgtctcagctgacagcagctgttcacttagactttcaaaacgaaaacccttctgatggattaaaaaaaaaaaaaaaacacctatatacacacacacagatattgcaaaatgtcaagggtgtgtgcaaatcaaggacatatatatggcttgctttagcaaaaatggagaaatggttataaaaaaaattagatttcctcccagcatcagcgtgttatttcagctatattagtctggtgaaactcaatattcccatatcagttttgactgaaagtgttagtcgctcagtcatgtcagactccttgtgaccccaaggactatagcccaccaggctactctgtccatggaattctccaggcatgaatattggagtaggttgccattcagaacccactccaggggatcttcctgacctaaggattgaacctgggtctctggcattgcaggcatttccttactgtctgagcctccagggttttgactgaggccatgccctcaactctggaagatgtgaagggtgtgaacagatagcaactcctggataagtggagtaagaggcagggtcttgggcgatttaatatacaatgg

SEQ ID NO: 39732 - DNA, 1895 bp, Bovine  19866880721721
  misc_feature (1)..(1): n is a, c, g, or t
nttttaaaaaatgttaattttgtcctttcaagatatttggaatagaaaactatgtcgagagaagatgaaatagtccttaataacactccagtatgagcacatatgcttttgaatgttttatgtatgtatgaatctatctacctacttattaatctaaaaaatactagaaatgtgctgtgaccaattggttttaaactgtgtattattcttagcatatcaccttgcatgaaatttgcttagtatatgaagtatttgttaatttagtctccctcagtaaaattggaatacatactagagctgctgaactagtgatatttaattatccacattaggtgtcatgatttcattctaacccttcaaaattctctctgtgaagaattgtattaagaaagacccttgctcttattattcaaaagtagcctctttaatcagggcaagatttttccagtggaagatacacacacactcatacaacatcctgaactcagaaggcaatgctaacaatattcttgaaccaccccatccccacaaatgcatactttaaaaatattagagtgatcacgtgattgattagtctaattattatgacaaagtttttatacatattttgtgcatacttgccccctcaaaagacttttttaaaaaaagttgattatgtctgaaatatatacaactaggaaagattaattaaagatgaataaacagacactgctcacaatgctagcaaacttctttgtcctagatacattttcaacctcccaaggtgttagatttacataaggtgttctgatttcctgtatttttcaaatatacttttaactagtcccctggataaaagaaaaagttggaatacaaatttattcttgtattctttcctttggctcatttgtctgatagctcttttgttcattctttaaatagctgtatgttaagctcttgctggaagctctgctcatgctagtcaatggcctatcaagataagtaagacacaaccctgccatttgaagtagaattgcaacccaagatcccattcctttgacagtaagctttggtggaagtgaaagtcattcagtcatgtccgactctttgtgaccccatggactatactgtccatggaattctccaggccagaatactggagtgagtagcctttcccttctccaggggatcaaacccaggtctcccgcattgcaggcagattcttcaccagctgagccacaagggaagcccttgtggaagacggtcctacagccatattctgtaaaactagttaacacagaatttaatggtcagaaagtcatatttctatagatttggaaagagatggggaaatttactcttcaaaccatgctcttttaggtcagatcctatacgtagaataccactctgctgtgtttattttccttgacttacctactttctctgatgagctactagctgtctttcagggtgatctgactagacctttcaagcaaggaggttttgaccaagataaccccttaaaatattccaacgctgtgatcaaagtcttgattccacttttattttaatccactcaaaagcaccatttctgtatattcagactatctcctttgtttctgtctgccttggataatctaggtcactcttccatttctgtattctgaggataccagattgaggccaaacatgaagaagtgtggcagctcctcctctttctcctcctttttaaacatgttttatctgacagctgattaaagattgggcatctagacaactctccataaagagttggtagaaaacaatgaatgctgctttgttcccaacctagaaaaacccctgtgtattcacaagtgctcctacggaagaattccagaagttcccctcacttacatcaaggcttttcatcacagtaa

SEQ ID NO: 39733 - DNA, 883 bp, Bovine  19866880774674
  misc_feature (1)..(1): n is a, c, g, or t
ncaaagaaaaaaagtacatttttttttaaaacagcacatcatttattcattctctctgctttagcttcctcatctgtgatattagagaaacagtagtccctgtcctccttactttacacactttctatgagcatgaaatgcagtggtatttctgtgagcaccatgtaaatggcaacaaattatatatatgttcactcttacccctgtcactgtcaagaggcggtactgaactacaggagcacacatgtgggcatcggcgaaggcctagtggctctacctacaacaaatgaagtggaggttctgaagatccccatatgcaaacaaggtcaaatggaattacgtgataaagaaaggatgggactttttcagacaactttaggtgatggtatctaaatcaattaatttgtatttactaagcacttgagtgaatgaaacctatttttaaacacataataaaactgacacaacataataagttttatgggagcagaggttgggccggtctttgcttaccattgtctctggttgtctagctttaagtaaatgaataacactgtgtttgctgttttgagagatatactgaaaagcaggacatagtccctccctgcctatctctcttcctcaaacatttattgagaagttattatatgataggcactctgcagactagggaaacaagcaaacaagaactagaccatcgcactgacaagctaacagcccggagagagatttacatgtagaaagatgagatgaatatgatacaatgtgacaagtgatataacaaagcaggaacaagtgctgtgggagacccaggggtagaacacttctctctgcccagatcagactagttccttctacgtaaaacatcggagaacaacacaag

SEQ ID NO: 39734 - DNA, 3040 bp, Bovine  19866880824818
  misc_feature (1)..(1): n is a, c, g, or t
nacagaagcaggagaatcaatgtgctgcagaggacattacaaacatccaaacccaagatctgctgatgaatgacatgcttcagtgtagagtaagttgtaccgtagcaaccaacatcctcaagcactaactggcttaacatacagaaaggatttatatctcactcacattacctgtgtactgtggaatcagaagaggagagagaacactattcactagtcgccaaggggctcagagagtggtggagtcctgaagatatgggaacttgcacactagcactttggctcatatatcactggccaacacgaggttgcatgtccactgctgatgttataatagctagggaaatgcaatcctgccatcttcgagaagaggagagccagatttgttaagctattttaccaacccactacttatggaaatccagagacatttacagtggaccactctgatttatgtggcttttcctttcattttctttctttctctctcttccaggagatatatgtttgggtggtgggcctgcatatagtagtatagcttcctcaaaccttaaaaacatcttctgcatgccctgtcctccaaaacagcaataccaaaattactcattcatttcaaacacacaatcatccaaccacaaaaaaaatgatcaaaatgcagaatagtcacaatcttgtaatcttccaacctactttaagcattagtcacaatcaaaaggttagaatattactcagatgccttcaattttttaaatggatgatggatggctatgaagcaccggatattttatttgggataaaactttcaaaatcataagcaaattatcagcatcatttcagtcctgagcaaatgagaattttgtgacttgtaattccgtactttctaaaaatattaatctcaaattgttttcaatgacactgatcaatttttttatgaatactgattataggagtaaatttataatgaaaacataaaagaacctcattcttttattgattcatgatgaaacacattcacactgattagagggttgatcgtgttcctccagagacctaactcatttcctttacaacagttatgaattaaaattgtcatcaatgtttacaagtatggttcaacccaatcagaatgctgttttagaatgatttggtcaagtagaactaaaactacctacttaagtaataaatttatcatcagtcatttttgctaaagcctccttcacctactttaagagggttttgcctcaattgaggtaatctctgttattttcatctcttacagagaacttagatgtggttagctgcctttctcattagatgtcacataaaaaaaaatgataccaaatagcctattatgcatattgaggtacttttgctcttcaaactccattaagttcttataaacctcaattaagtaaaagaacagctaattagaacagtctgttttcaatagacttagaactttgcaaagaagatgactccaagaccttaggcctaactactccttctcccatgtatccaagccacggtattttagaccagacagtaaattcattcttatttattttaagtaaatcaaactagtcctgctgtgattcacttatatcatggggcctctgggagcttatttattctggaaacatcctctgtagttggagaaaatctagagcagacaagaacatgacttgcattcattaagatttaaattggatcaaacttgtaagtgaaagaggcaagaggaaaacaatcaaaaccacttatgactttagacacttcacttgaatgaaattccgtatagtaatctaatttaaacagtccataaattatcactattttattaataatggaaagtactaatagaaataagtacttagtaaatgcttgctgaagaaagtaaaaaatattcacacataaacaatggtacgattgaggcctagatagcatggtgtgtgtgtgatactcagttgctaagtccaactctttgtgaccccatgaactgtagccagccagactcttctatccatccatgggatttcccagacaagaatactggagtgggttgccctttcctcctccaggggatcttcccaacccagggatcaaacctgcatctcctacactgcaggcagatcctttaccaaagatagccagaaatatgtgtttaaaaaaaaaaacaaaactaattttaaaagcaatcaaaatgtgtggtaaagtgattctctaaacaaagatacatactttagatgaaaagtaattaaattctatgctgtgttgagtgatcaacttacccaggtggtgctagtggtaaagaacccgtggctaaccatatacagacttctttgtatatgggagagagggttaactttctatgattaaagttttaagatttcaagcaaagttcaactaaagagaaaagaaaaaatcagtcattgtttcagactatttatttttttaggcagcttgtgggatcttagttccctgaccaggcttcgaacgcgggccctcagcagtgaaagcgtggagtcttaaccaccagggaatccctgaacaatttatggataatctctattgctttcttcatagtcaaagactttggcatagtcaataaagcagaaatagatgtttttctggaactctcatgcttttttgatgatccagcgaatgttaccaacttgatctctggttcctctgccttttctaaaaccagcttgaacatcaggaagttcacagttcacgtattgctgaagcctggcttggagaattttaagcattaactttactagcatataagatgagtgcaattgtgaagtagtctgagcattctttggcattgcctttctttggcattggaatgaacactgaccttttccagtcctgtggctactgctgagtttcccaaatttgctggaatattaagtgcagcattttcacagcatcatcttcatctttcaggatttgaaatagctccactggaattccatcacctccactagctttgttcatagtgatacttcctaaggcccacttgacttcacattccagg

SEQ ID NO: 39735 - DNA, 1361 bp, Bovine  19866880959853
  misc_feature (1)..(1): n is a, c, g, or t
natttcagagctgtactcttttctttaggatcctggtttcaatttgaattaccaaaaactccaaaggaagtttgtgcagtaaataagcaaacacaggagctctttcccagcttagtgtttgtcgttaccgttgttctatgacttgggttaatcaattaacgaggcagtaactttatagccacccctgtcttctgaatactgtctaagcatctgtgacaactattcaggctctaaaagaggattgctactcaccaggagctcaaaatttaatggatgaacagacgaataagagcactggaaggtttgtggaatactaatgggaggcaaaactggaggagaatttctattgccggtagtgttattaaatctttcttttaaaattaaattcttgtcctaagaagtctgtataatgtttttttcttcttttgtttttatctgatacatatcagagtgagccaaaatcccatcatcactatccttaaaataaggctgttatctatgccacccacattatggattagcaaattttatgaagtcagccttagccagcttacattttttagtttcagtcttcactttcccaagcttctgttttcctcctgaacttcctatgaccattcaggaaatggccaagacttttctatatgccctgccctcaaggcatggttgacattgcaaaactgctgaataattgctcactgtgagtctcagaataaacttgtgacaaggacaacagaacctatagctttgaaataaatgaacctgggtattttgaatgccaaaagtctgaactttacatcatagaggaaaaatagatgaagagatccaaatgttcccagtcagctctgggagaacgcctaattgctaccatgtcaagcaccacctttgccaattctaggaagcctggtgggagtcacgttggcttgtagatggttcagtgaccattcaaggctgcaccaaatattaattatgctagaaaaactttctcatggctaccctgaaaagtagtctccaaaaaagttgatcgagacattgtccaaagaaagtagaattcatttgtacatggtttctgatgttagaacataattagtgcatgtgactttgaaatgggaggactcacctgtcccagagtgtaccattttttaaagctaaaaagaacatcatgcataggcagacagcatattagggaagatagaggaatggggctaaacttgctggataaaattaacaattgtgggatgttcacctatattcttttacttattaagtcaaattaccaaactgtaaggcttccccaatgggctcagtggataaggaatctgcctgaaatgcaggagacacaggagatgcagatttgatcc

SEQ ID NO: 39736 - DNA, 2855 bp, Bovine  19866880962894
  misc_feature (1)..(1): n is a, c, g, or t
ncatgcaattcaggagacccgggtttgatccctgggttgggaagatcccctggagaagaaaatggcaatccactccagtactcttgcctggaaaattccatggatggaggagcctggtaggctacagtccatggggtcgcaaagagtcggacacgacttaaagcaccttcacttcacttcccaagaaaaccaaaagcaatggtcctggtagatcaatttttgcaaaagaatttatttctttacatttctgctattatatctgatgttccagctagggtccaataacctgatgagtaatggatggagttgagtgtttcccaagatatttaaaacaactgagagaaggaaaggctcatagcagaatgattttagattatggcatcagccttactgggctcccgatgacgtctcggtccctaaataactgtatgatgttgtccaagttataaaatttcccgagtcacaatttcttgaatgtcaagtgggcatgtaagagtatctgctctcaccaggccttgtgaggattaagtatgacaatgtatcaaaatgcttgcctcatgttagttatttaataaagtctacatatttattttctctcttaaggaatattcccaactatgttgaggtacttcaaggaatgtctctaaaacatctcttttaccaaagcctctgtgtcaaaaattcctagttataatattctgccttcagatggagaaaaatcccttagagaagtaacaaggtccaaaggtgggcagatgctaacagtggagcacagcagacgaagtggaagtggtcaagctgtggctcgcaggtgactagctctctgttttaaacacaaagactgtctagttaactttatctggattcaaggtcataaccttgacagagagactgaattctccctggatccttgaaaaagagatttactcctttctggtcagttgtggggaggtggaaggtaggcgtagttcgagttaaataggcttctggagtgaaaacatggctgcccaagttcatgtctggctggaggtggagtgggtgtcattcccccccaaacattactattgctacacacacattaatacacactcacattctcttctttatttctcttatgttatcagaaaaattcttataaaatgacagaaaaattatggatgcttgttattttgcttaaacattacagatgagaggttttctttttcaagcaccatgaaaaataagttttttgaactaagttgccaagaatactgtgaaagtcttaaatatcaacaagacttcaaaagcaagtcccttgatcaaactggtacttatttactaggaaaaaattcaccaggctgggaagcacaacacagataaaccagtcctgaagtcactatcatgaatgaagtaggggctgtgaacgatttcagagctgtgtctttgaaatgttccttcttatggtaaccttagaaaattcacctcttatgatgaagaacacctctattttacatggttaatgatttattttactacataaaaaaatcaatatgaatgttcatgtaactatagatcacctaaatgtaatactatgttatgattcttggtgagaatagataaagtgggaaccccacattctgttgctgtttataattttttctgtttctttttagatattttatctctagttgcttcctcccaatggggcatccttctgttgttactaataatgtcagacttctctgctaaaatttccatcagtgatattgctctgactcttgagaagggaaacttagaaaaagtttcaaagattttatacaaagacattttatacagaatgggcaatcacaaatcttggctcactatttggtcagaggctccaaagtcagctgtttattccctcctttatatcaatttatttgtgaagatcattacaaaactgtcaaaaatagtatttttggattgcaagactgggggttacattggatgaatgggggtaataataagttatctaattttatcttggtatattaacggtatattttccttaagatatatgtgtcatttttggggggtgggtaccatgaaagcatttctagctatcttgtgactacagaaaagaccacatctcaggactcagcattttcagtaatagttgttgtttcagagaatgaatagaataatgatacatatatcaactttttcattgaaataacactgttttgttaagtgagttttaaattaacaaagtctagaaagtgccttaaaattacctagtgatattactccatttattgttgagaaaattgagatacagaatgattaacagatttgtccaaattgagacagcaacttactgcagtgcagacaccagaatccagactctagctgtgagccaattgctatttctagcctttctcacaattacaatttgatactaacattattattttcattattgaagctctacctgtgtttaccccaagaaaggaagaaactaataacatagtctcaaaaatcttaaattatttcaagatacaacctgccattaaaattctgagcaaggttctccaataaattgaaaaaaatccgttgaataacatctcccaagtagcctggggtaatgatgagccatggttttctaagcagaatcagtagctatctatcaaaggatgtatatcaaagttgtgttaaaccaatcaactttttcacgtgcactctaactagtaattattttggaaagaaccagaaattttcaaatattggttctctaccctgactgcatattaaattatctggggtgggggtgggggaaagtgcctgagttccacctaaactcaatgtatccgaatccctgaagaattcagactgcccaa

SEQ ID NO: 39737 - DNA, 1323 bp, Bovine  19866880998253
  misc_feature (1)..(1): n is a, c, g, or t
nttaaatccagtaagtcttggcaaggttgataatagggtcctttgttataaacaactcttccttcagatacatcaaaaatcatccccttcaggtattggaacacaaaaaatattattaatacttcattttcaaagaagaaatatgttatacttaggctaaattcattagtaatcaaagataaattaaaattaaatatcaggttcagaaacacaaaaaattaaacctaagggcaactctcagtatagttactgagtgttttattatatgcacaattctcttttaggtttcgttgtttttcttccacagcaacgcatcagcttctgaaaacgataacacgaaatgtatgcttctgtttacataagttatgttggtgatacggcacctctgttaggatgcaagtatgtttaaaaagcattatcaagatagtctcaattatgttcagaattacccaatgaaccatattgtacttcatgcacaatgcacaactgatgaatatgcaaaacaacaggaaaacgaaactcacctgggccattcaaatactgtgtaagagaacagtgtaatcggacaattataggttctgttcgaatcacttcccatgccacagcaatctcctcctgtgcaaatatttgcaagatgaattagtaatcttttagagttcttgatttttttccaaaataaaaaatatatgtttctaaaacttattttgaagaagtacttatcattaaggcctacaaattatctcaaaaacttacaggtctgtgaaattgaagtcaaagtacttttaatctttgccttcatttgaaaattcaaccgaaaacttaacaaataaggacatactatactactgatacaaactcataattttcagaaaatattaaaagaactgatggaagaaaacatatgcaacatctctgctttttcaaccagtcgtagcatttcttcataaatcactttaacaaagtcattatgtttctaatcgtattataagagaaactaaaattaaatttcttccaagaaaaaaagtgttttttaaatgcagcaatcgtataagtcgatactcacatcaagaaagctaacatcaatatgcagatcaatatctacatcatcaatggctccatattccctgaaagcaaagattaacattattgtttcattttcattaaaagacagtgtgtccgaggttattttaaattaaaatttagtcatgaattctcatccctgatgcccatagatagttcagaaatgactgttagttaataaattaactaactcaatttagttggattgtggtctcatgtgacctctgtataccatatatatac

SEQ ID NO: 39738 - DNA, 823 bp, Bovine  19866881007699
  misc_feature (1)..(1): n is a, c, g, or t
nttttctggttgatttactggaagttcttaaaaataagtttttctctgttttgatagtcttattttaattaaaaacaggcatatccactgtcacttctgctgcatcctaccacatctggaattgtgctttagagcagtctgagttttttaataaatgttttctaggaaaaaaagttgctgggaaagtctttagcctaattcctgcactaagtgatagtatttctcaccagaattttgcagatgagctagacaagacccaagaggttaaaagtcttctcaaaaagctcagagctactaagtggataaatgcagactgtagctaagctcgtgtctctccactagcacttggagatcttcccttatggatgacactgcatactgaggaagatggaatatttgggtttcttgatctgaggagtctgggggtgtgactgtgagtgtgtgtgtatgtgtgtgtgtgtgtgtgtgtgtgtgtggtagcagtggtggtggtagtttgatgcagaaggctacccagcctgccacgagccaggctactggttaggtgtcatttaaagcatctatctgcctcatgatgaccctggaaatgtattagaacagaagaattacccaaattccttaggcaaaaccaaatttcttattttctaggaaaaaagcatccaacaggtttcttggatatcaaatcactttgcaaaataatattttgatgacttaagtgtgaacaaatcagaaacacatgttttcagtttcctggggaataatgattgctttaaaattaacctaaaggtgccaggggagtttagattttattaagtctctaaca

SEQ ID NO: 39739 - DNA, 776 bp, Bovine  19866881339486
  misc_feature (1)..(1): n is a, c, g, or t
ngagcacacagtaatgccgaagaaacacttgtagattgcaaagtgatatttaaagaaaaatgcagacctgataagcatttccatgttttgtatatttgcttttcaagaaaagatgttgaataggccatttgataggttagctgaatgcagctgtttagatatgtgttgggtctgctattgaatttttcattaaaaatatgtggttaacagcagccaacctgatttgcatgtgtgtgtttctgatttgttcaccgctatgcctcccgtctcctacatcttaatcacacccaggcgcccgccccattacattaccagaagggaagtgatggacatcctttgactctcttcatgaccccctgataatcctgtttcacacacaggctccctgctgtaggaaacacaaaagctgccactgtagttctttacttccagtcgatattctgacagacttgatctagcaaattagtatgctgtggtaggggcatgacaaaagacccttttgacacactctgaatcaataccaaggccgacagagagccatttcactgtagttctgttatttttccccttttgatgaccctttgctttttttttttttaccagcttatatgaccttgtcagatttaaaaacataatgttgggaaaagtcatccttgcacacacatgtgcatgagtgcatgtgcacacacacacgtacacacacaaagaccgctgagagcatgctggaatgcctaataaaagcataaaacagaaatgcagctggggaggaaattcaa

SEQ ID NO: 39740 - DNA, 770 bp, Bovine  19866881402605
  misc_feature (1)..(1): n is a, c, g, or t
nattcaggctcatcatctcccctattcttagagattattccatcatggccaccaagacaaaaagagagggaaagggcatcaaaaatcatcaaaatcatgtgtcctgaaagaaatactcaacgtgacccagaatttttttatctaattgacttgatgtacaagaggacttctaccaaatacttagcaatcaaatgcagatggttataagaaatcagaaattgaatgttgcggctgtggtgatggcggtggtggtggtttgctgtttactttggtttccattcatgataaattccaacctcacctttgtattgcgaggccatttctctaaccttcaataaatccattatttatttaaacctcatgctaagaaaacagtggcttcagaaacaatcagtgttgctctactcataatatgcccaacaagctttttcactctaaggctgacattgatttaatcatcttgtgaaaaattatttatcacctgccaattgatttttgcaataacgggaatcatctggtattttgctatgcttatcaaattgcaaaggaatggaatgacaaatcacttattataatcattttcattatatttatgagatatttgttaaacactgtaatgcttgtgataatgtcaggagtaattactgcaaacatcttactgtactgagctcatgatgatcaattcttattacctaatatgtgaaacagtatttttgtcaaagaaggtaaaatctttgaaatgtttctataaagaattacttttatctcat

SEQ ID NO: 39741 - DNA, 1042 bp, Bovine  19866881407577
  misc_feature (1)..(1): n is a, c, g, or t
natttgagaactgaagcagatttcccatatatgagaagaacaaccaattggtaaatagaatataaatcctagaatctgctagagtattccacagacatgagaaatgtgagttaacttgggtgggagcctgttctgcaccaacacagatgcccactgcctgtcagtggtggttgtttgatcagtactcaatcataggctcccctttctctgtacattttctgtggaggaatcacttaacctctaaatgcctcagtttactcatctgcacaatgggaagaatctagtaactacctcaggtctttgtaaggcttaagtgtgttaatgtgcacataagtattttaaaaagtgactggaatttaggagttattaactatttctattattgctgtgtagatagtctgccttggttttgtccctcatttctattacaaaacatctgttcaaagttcacttggggaaaagaactccacatatccacaaatcaatattatatgtatcatccatggtattatattcaaagtgacgttaatcttatctacaatatcgtaaaacttttacacagagaataattgtatgtattacttacacaggatacaattttacaattgtttctactctctacttgtaattttagttgaatgctgaaatacaagtttatcttgccaggatatttatctttttttttttccagatcaattacagatataatcaatatatcctttctcccacacggctgtatttaacatccattcatttgtcattcatccagtcactcatttctttagtcttcagttactgagttctgaccctctaccaacatcgattctgattatttggatatcagttatagtttgatgttcacaaccagcagatgggtgaaagaaaacaaaaatatggtgtgtatgcacctagaagtatctcagcaggaaatcagtattttagtaaaaattacaagacttgtaagaaacacaaatgatgattatcatatatgcagaaagaataggtaaagtcctgatgatagcaccacctgagcaatttgaaa

SEQ ID NO: 39742 - DNA, 1707 bp, Bovine  19866881498945
  misc_feature (1)..(1): n is a, c, g, or t
ntattcttgagtggagagtcccatggacagaggaacctggcaggctagagtccgtggggtcacaaagagtcggacacaactaagtgactcactttcactttctttcactttttttagttaaaagtatctttaatttctaatactatcaatttctttcaaaaaaaaaaaaaaaaaaaaacacaggaacaaaagggttacaagtgctctttcaccacagcagagcaggagtatagaattttaaggaagcagagacattaaaggtttgcaattaactggattctgcagctgtagatctgtaaatagttatactgtttgtttttatgccacacttcaaagaactcacaacaacactgtgtgtatgcaaaccaatttctgttgtgatgccctttttatataatgccattcatttcacgtttcccactgcaagattacaaagtgtgattacagtctgcccagatgcaatgacccagtctcaggattgcttctgtatctgaatatctttcagtagccccaatctcatgaatagcaaatgcagaatcaaggcaaatgcttgaaatatgaatgcaacctgaagtgtgaagcctgatatctgattgaatactgaatgctgtgttgggtttataataatccaaaataattccgtgccctgcctgcatttattcattgtgaaaagatcacatcaaattgaacttgaatacttttttaagagaagggaagcgacacaaattatctgatgcagttgcttcacttaaggactgaggtcttgagaaatgctccataaatttctttccagacatctgagtgaagtcttagaatagacagatcttgaaatccagccattgattttgaatatttacatgtgatctagttcatacgtataaagaacatatgtatgaaatatttgctttctataaacaggcattttttagggcactatgtatgtgttagaacacttagcaattcattctcccattttttaacggagcttattaagataacatcctcattaatgacaccacatatacacttacaatatattaaatacttgaccgtctatgttggtcctccttctctataaaaccacagcttgtttattatactgttatgatgttttataatactatctgatcaaaattagcagggactgttctggttataaaaaatatagctttctcttatccactgtcgagcaaatcacatgtataatacacatacatgaaactcaaccacaagtttttgagaaataaacttctattgctatttagttactgctttcaataattggacagttatattttgagaagaaatatattctgcgaagaaatatacacctccttctgacatctgaaactcaacagcttgcgtgtctgtctccgcatgcctactcagtgtgtgtttcatgctcagtgtgggagagatgcctgtgaatgggccaagattattcaaactcagtagtcaggaagaaatcttggcatttttgcaagactgtattcacggtagctatatatttctctaaaggacaataggactgagacgaatttaaaaattagatccgggtaagaaaggaaacccatctaaactaagagtgtagaagaagtacagtgtaaacagttgctgaaactctgccccccatttaaaactccttggttttgcttgaggaaagcacagatgctgcaagcagaggtgactgttgggggatctgacatt

SEQ ID NO: 39743 - DNA, 1927 bp, Bovine  19866881507185
  misc_feature (1)..(1): n is a, c, g, or t
nttgaatttgtattaaattaagggttattaacttgacagaaatacctcaaagcatcataaaataatttgtatctctctgtctattgtgaattcactctataagcaatcataaccgaaaaccatttttggttctaaggatcaagcttaacattttccactgagatttgctagagtaaaattttgctgttcatgtaagttgcttataaaaggatttagctctaagcccttttgaatgtctttagagattccttagagttctgaaaaagatccttggaggattttcttggctttccatttgtttgtatcaaaataagaatcagagaaatgacccttaattactcagccgtcaggcagtcagggcacatttcaacatgtctgtgatcagttgtagaatcagaaaaaatatctttgacatgccctctctgcctcaactgccataaaaacttgattttcccttctatttatccaagactcaggggcggcattactgagagagagttcaagagcagtaatacctttaaactttttctaggacagttagagattcagattatcattagcacatagcaacgtattggcattagatgcttaaaaggagttagaggaagaaaagactattgccaattgtgttgagtatagaattcttcataaaacaggaaatatttgtgttaaatcattaaagatgtatattttattagtagtaattctattgttttatttataagataagaggaattattgaaagtgcaactgtaagcaagagcactggagtgagtaaatataaataagtataagaagcatgcgggggacagaaactgactaaaacagttgaagtagaagctcatttgtaaaggattagtcaaaaatatttgatcatatagactgaaatcaaataggtacagtaattgaatattttgaattagagtgtgacaagaatattggtcgttctgtaggactttaaaagtatcatgcaaaatggagtaaggcagcagactagggctcttgtaatggtctgtgtatgaggtaatgtaggtctgaattggtctaggtacagtaagagcttgaatgggaagaaagcatcaaataagaaacaggttataaaagaattaataaaattcaggcagatacagatggttttaatttcaaccctcttaatactttagttaagccatgtagactgttcattattatgttaatttattttcagtatagatgagttttctctttcttaactatgttttgtgaatgtaatattctggaaccattcccaaatttcataagctattagcaaaaatcaacaaaaacgattacataatttactttgcctgaaatctttgtcttctttcaggaatgctgtaagctaattacattgacaatgcaaatattgattgtttaattgtgtgaataaaagcttcagttgctatagggcttgcaaagagataaaaattacatcactaaactcaaaagggtgataatgacttcaccctcttttacctctatgatgtacatatactacgttaggccttactgttaagagcatagcaaaaaataaataaacaaacaagcttatataatggtcttatataaagaaaccaaaattctttctcaaagaagtagaaggggtgcatatgttttgagggcaagaaacctatagttttgactttataagttccccaattacactgcagtaattatttataaatttttataaaataataattcacttataaactagataaactaacacctagtaaaaccatattatatttgtctattttaaattttaatcagagatacctctccaaagtcagtgaagagctggttgaaactagactaaaacacaaaacctcaatttcagacttcttaggagtacccagtattctggctacaatgtgaaagtaaataaaaaatttaaaataagtcaacc

SEQ ID NO: 39744 - DNA, 1448 bp, Bovine  19866881663796
  misc_feature (1)..(1): n is a, c, g, or t
ncctgtttgaattaatacaaattccaaggtagtggttccagtttctataatgggattttactatatattatttcctttgcagaactcctggaaattgatgagattgtttatataaaggacttggagtaattttgctcaaagttctgaggaataactaagagatctttcatctcatgggacctttggggcatagggccctggctaaggctcatattctattagcctattaagttgtggatggttatctaaggaaaataggctggagaaacaaactcagagagacacacaggactaaaaggaggcaaaatcttaacataattaaggtttgtacttcatttcctttttcacaaacctacttccgtgatgagtcagtgctcatcttacaccctgggaactccatgcttagcacgggccatgacaactttactaacttccttacactaaaaaagcatgaaagttttctttcaattggagttttcctggtgactcaaatggtaaagaatctgcctgcaatgcaggacactcaggtttgatccctgggttattaagatcccctggagaaaggaatggctacccactccagtaatcttgcttggagaattccatggacagaggagcatggcaggctaccgtccatggggttgcaaaaagtcagacatgactaagcgactaacacaaggcttcaatgagaaaaatgtggaaaacttaaaaaaaaattgcttgggaataacttttacttctttattcttcattttgttggtctaattaaagtttatatgctaattcatttagactctaaaaattgcttaattaaaatttaactatttccactcttttctggaaggcagattgctagcctattgctacaaaattagtggtgcatcttgactgataagaattctcaatttcttagcagagttttgtccacaactactttagagacggaaaacttgaacatacgtatttaagagatacttaaatcaaacataagtttcctaattttgtttatatgattggtcatgcatgcgtaagctagaaatataaactagtgaataagttcaaaaatatccaggtaacgctagctgaaatgttcccaaactaagataatgatcttgatcataagtttagcttggcaggcgaagctccttatgtcccatttcttatttaaatatttgatttcttagaggattgcttagaacagggccactataacctgggggagagaaaacactcactcaaaatgtagttactagaacaaagacagacttctttgtaaagaaatcctattttgggtatgtttgagttgtcagtggttgaggtacgctagagtgaaggcattactgtgtttgatcttgtgattcactgtttagccaacagaaactatgtccctatcattgaagcattatagaaaaatagcattagattgagaaaacaagctatagaaaaat

SEQ ID NO: 39745 - DNA, 1012 bp, Bovine  19866881825116
  misc_feature (1)..(1): n is a, c, g, or t
ntggagtgggttgccattttcctttctcccaatgcataaagtgaaaagtgaaagggaagtcgctcagtcgtgtccgactcttagcgaccccatggactgcaggcctaccaggctcctccatccatgggattttccaggcaagagtacactatacacacatattatatataatgtatatataatatataattaacatctctttacattatatacatatctttatatatgtgttataaggttcataattttcttaatgatgaaacacttttatctatgggaagtcccgtgttagttggtccacatgtgaatcagaagtttcaaaatgcgtgtgaattctccctgactctgccttcacctgatgggctaagtgaactgtcacaaagctaacagcattatttcagtcagcctggcaattgataccaatcatcacagctgacttttccacctagcaatctgtgccaattgttaccgcgagcgaagtgagccaattgcttgagaccaggttttattaatttatattaaaatttagccttagacagattggggaattaaaagggcaagccgaaaatgccacaaggaatctagaatattttgaagccagtgctttcattttaaaacagaaacctttattcagaatgattggaaatcaaaagcctattcgagtgcacatcatttctggcaattgtataattcataaatagacaaatggcttatgaaatgcgatgaaaaaaacatactcctaaggaggtatcatccatgccaagtttaccgctgagatcataaaccagtgacaataggggttaataatagaaatgttggtagtcctctacttataatagaacaaacagcgctactataattacaattttctttctccccctgttatatagaaatgaatcaatatccaagtagagaaaggataaaaatgtcttcaataatttaaactgctcttcaaaggaattggcttcttaggtctgcaaagtcaattgtatcattcaaaattattacaagg

SEQ ID NO: 39746 - DNA, 902 bp, Bovine  19866881851810
  misc_feature (1)..(1): n is a, c, g, or t
ntatattgtttctgatgttgatttttttttaaataatattctcttcttgttttatggctatagtatctggaatctctctgcatatattaattagagcttgaaaatatctttcctaaattatctgttatctttgggattaatcactctatttattttgaacttacgtttttacaacgttgattttcctcaaattttgttcatcttagctctcttttttgttagggacttctgttcagtgacttttagttatctgtcctatatagaatggagacataggctaattcataaaggtaaatggtttacactctcttctctactatatatgtagctctgttttcaccaggctgttctctaaagggaagtggccacctgggagctctgtgtgtgaacaaacaatgtcacttcataagcttatgtttagggagtgctgacacagagaaagtccttttaatgctagaatgagtttcttctctgggttctaacaccctcatcataagtaccagcttttcccagacagatggttgaatttctttagaaaacagttgtccagttcctgcctgggggtatacacagggcagccagttggtttgggtcaaaggaggtggaagaaaggatagggagctgaccagagcagatgctctgaaactagtctttcaatgaatcactgccttctgcccactacccattcacgatttccattacttgctgaggaatactgtggatcttctgtgatcctgttggaaagatgtatttccaggtgatgggacaagacaaattttttgcatattctagacttcagattcctccagcttcttttatttaataagttgttctcatacactggatttttctagagtaaacttgccggcacttctcctaacaaaggctcctaccccatttct

SEQ ID NO: 39747 - DNA, 1472 bp, Bovine  19866881987113
  misc_feature (1)..(1): n is a, c, g, or t
ncccctatagaatgcttcctgtttctgaaataccccttcctcttgcttgcagtgctctgtatccacataatcaactgtcaatgtcctacccattttcaaaattcagttcatttattaactcctttctgaagcctttaaagacaccacagatagcattattctttccctttcttatagaacattctaacttatgttgtgcatgttaagtcgcttcagtcatgtccaactatttgtgaccctatggactgtggttctaattaatactaaatgtatctttctcaagtcattccttattttgtattacatagtgtagtcatccaaaatatttgctcactggtcttgttcttttgtaggcatgatgtctgagaaagatgaaaaatgtgagcaaaacatatctgaggaaacaagctgaatactctagttgtcataattctttctctccctctctccctaagttatttccataatgcagcctctccacctcttcctgctgaatctaactttactctttcagttgctatgtctggaatttggacaagatggcagagtagaaggactttaagcttctctcataagcacagcaaaatcacaacttaactgctgaacaaccatggataaaaaaagacaagaacctatcaagaaagatatccacactgaagacataaataagaaactacaacaagatggtaggaggcgtacactcatgatataatcagttgttatgtcctgctttttcttttcttgtcaatcacactaaatttcacctaaatgtgtaggctatatttctctagaatctattgatgtcttctcaccaaggaatattctctggtttcttgcttttctttggtttataaaaacatttgctgaaggaaaatacacccacactaggtttttgtgtgttttgttttgctttgtaattttttaattgaaatataactgaaatataacattatatacattttaggtataaatataataattcagcatttatatgcattgaaaaatgatcaccataataaaatctagtgaacacacatcaccatacacagttaaaaacattttgtgtgtgtgtgtgtgtgaggagaactactgtgatttactctcttagcaacttggcaactcttctgttggtggtgtttttaaagttcctagataccatctccactaagacttcatcatccttggattctacttacaggagaagtcaaggcacggtagaatattctgtagtaatttgatgataggcaccagaagcgagcaccttcgtttttaggaaactttgctcctgaccaaataggattaaggctgtttaaaaatgtaattcttttggatttcccttttctttgatacatgtgccctatggtgcttattttgtctaggtgaaaaacatatgacttgctgtaggaaaaaaattacttagtttatgtctggtgtagttttttttttttttttaagggttagactttctcaat

SEQ ID NO: 39748 - DNA, 1375 bp, Bovine  19866880390222
  misc_feature (1)..(1): n is a, c, g, or t
nctgtccatcaccaactccccggagttcacccagactcacgtccattgagtcagtgatgccatccagccatctcatcctctgtcatccccttctcctcctgcccccaatccctcccagcatcaagagtcttttccagtgagtcacctctttgcatgaggtggccaaagtactggagtttcagctttagcatcattccttccaaagaaatcccagggctgatctccttcagaatggactggttggatctccttgcagtccaagggactctcaagagtcttctccaacaccacagttcaaaagcatcatttcttcggcgctcagccttcttcacagtccaactctcacatccatccatgaccactggaaaaaccatagccttgactagacagacctttgttggcaaagtaatgtctctgcttttgagtatgctgtctaggttggtcataactttccttccaaggagtaagcatcttttaatttcatggctgcagtcaccatcttcagtgatactttaaatgtgtttaaacatattttttctttatccacatgtgtaccctttccagtgctcttcattcttttgtgtccatcctactttccatctagaagcatcttatttctctgtaaagaactacttaaaattttttagtaaaggtggtaagcttcctcagctcttatttctctgaaaaatccctttgttttgtcttcaattttgaaggatttttttgtttttttgctttctgaatgatatgacatccccgcccccaacccccagcactttaaatacatctttctgttgtgttttgacttggatgattccttcttttttcaagtttttacttagaaataatttcaaactgacaaaagtttacaaaaatagtaatgtttccatagacctttcatggtgcttccacatatcacatacccgtaggacaaggatcaaaaccagaaaattgcatcagcacagtattacattgatattactcaatgtatcggtcgtccccctcttcccgttcaaccacacttgtcaccagtagcaatgacagtgatttattacaagaggggaacctggggaggattagggggagccctcccacccctttctgtggggtctgggtgcccgagtcagacgcagcttggctcctgggagtgcacccttaggtcggattcacaaccttgcccaggaagaggctgctccacgtgaagtcgtcgaagatcatgatgatgaagggccggttgaagcggagggtgagctgcccgggcgctgcgctcaggctgacccgggtcggggcatctgcctccaagcccttctcatcgacctgcagcgctgccttatggaccacctggtgggaacagacccggcgtggaggatgagca

SEQ ID NO: 39749 - DNA, 1836 bp, Bovine  19866880455457
  misc_feature (1)..(1): n is a, c, g, or t
nggcgggatgagaaaaaggagaggagcattcaggagtcagactccacagtgatatctaggtggctgcctgctgaagccagaggagtgagtgatccctgcctattgcatgtggagcagaagaaccacccagcttgaaccctgcctgaattcctgtctcacagaattatgaaaaataacaaattgagacttttttttgagtgccacattttatggtgttttattatacagcaatagatcattgaaacagaaatgctgataatcttgcaggttttgttttcctcttaagcttttaactttataaggaataattgcaaataattgacaaatgcaactgtacatatttaaacagtacactctgatgatttgacacacactgacgttgcagactgattaaccaagaccaagatagttatatatatatctatatatatctccagtgaagtcgctcagtcgtgtcagactctttgcgaccccgtggactgtagcctaccaggcttctccgtccatgggattctccaggcaagaatactggagtgggttaccatttccttctccaggggatcttcccgacccagggatcaaacctgggtctctggcattggaggcaggtgctttaacctctgagccaccagggaagccctatgtatatgtgtgtgtgtatatatatatatagccatatatatatatatatatctctcctcacatagttaactttttgtgtgtgtgatgagaatgctgacgaactctcagcaactttgagtattcactaccgtattattagctgtagtcaccatggtatacattagagcctcagaacttattcttataactttgtaccccttgacttacatcacatttctacctccttctaaattcttactgtgttttgtgcttgatgagctggtcctgctggagcttgactccctttcactctttaaaaatgtactttctttttccttttaaaagtgttgctgtatcccagctgtgacttatttatataccagtggaaacatctgagtcagcctgtgtataagtcacttaccttggatgttgcagcagactgcaacttgggccttccgtacatgaatggttttatacacgaatagggaatgatgctttaaagaggtggaggggttcactttatatttgccttttgtatgctatttaacatttaaatagcattttctggatataaaactaatatatactcactgtagaacatttataaaatgcagaaaatataaataaataagtagattggaagggatcacttctaatcttataccattctagtataagtaagtgtcatcagtttggtatatttcccttctcacctttttttctaaagattggacactcacacgtgaatgttcatttattttatacagttgaaattctgaatgcagttttgtgtccctctgtacatttttcttcacattataccataagtatttttcctgtttccttaaaaattctttacagatgtcaattttaacagctgcctcatattggattaccatgctttgcttaactaaccctccaacatataggatgctttcattgttttgccattatgaactctgtaatgaatttcctcacacataaatgaaactccggctctaagatggggagtacaaagtcagacggacacgactgagcgacttcgctttcacctttcactttgcattggagaaggatatggcagcccactccggtgttcttgcctggagaatcccagagatggctgagcctggtgggctgccatctatggggtcgcacagagtcggacacgactgaatcgacttagcagcagcagcagcaagaggtattaggaaa

SEQ ID NO: 39750 - DNA, 1792 bp, Bovine  19866880516219
  misc_feature (1)..(1): n is a, c, g, or t
naccaacggagataaaaggacttggggcttaaactggagctcagcatccatactgggcgtcccttactgggtcctgggctggtggacggagacctcgttccctcttcattttgccagtaaatacgagggttcgatttatgcaaaaggtttgtacccactctgtaggggaaagggtcatctgtgacttctcaaacatccctagttataatcaaaattagaagatattctcaagccagtaaaactcttgagtggcttgtattaaaagccttggacagatcagaactggctgattaaataacactacctatgggataggatggcttccctggtggctcagtggtaaagaatctgcctgccaatgcaggagatgcaggtttgatccctgggtggggaagagcccctggagaagaaaatggcaacccactccagtattcttgcctggagaatcccgtgggcagaggaacctagcgggctccatggggctgcaaggggtcagacataacttagcaagtaaacaacagcaacgaagggacaggactctcctggatggagcagctgggaatcagaggctcagcgcactctgtaacgagccccacatggctagggagaagctgagctggactaggaacccctgcagtgtgtcctgggaatgtgaggttttgagtcatatgttattctatttactgcctctgtgaccttcactctcccagagattcctcctctgagaaactggggttgcagccaccttgtaaggaggtagcagtttgactgagtccttcacacacaggcaatgttgagcgcacaccatgtgccagacatcacagtggtcaagatctgtgagcgtgagggcaggggctactctcactctcctgtcccctctctctctttttttttttgtcatccataggatggtaagatcctgtgagggcagggccttgtctgaggcatccctagtatctagcacaggtgggggcacatggaacatgttcagtaatattttctgagcgacagaacctaaagctgaagggtggcgattcagtgtgatctcatgcagacccttccttttgctggcagtcctgccgtgatgactttgtcttccgcagagcccctctgtgtggcctggcagaacaggtggacgctggactgtgctactgctttgtctccagcttcctgtgtgaccttagggaggtcacgttcttgctgagcctccgtttagcctgttgtaaactggaggcttggagaagacctctcagcctgggctctagtgacctgttcatggatgggctctgtgttgcttattattgtttgtactgtgaattttggtagagggggaaggaggggctgtaaagacacctacctttgacaccttcggcagggcctcttgggtgatgcctgagaaatgtgtccggttgctgagcaagtctgcaatgcccatgtcctccatgatgcccccaaggtcgtaggctccagagatggagatctttgggatgtacaggtccacctggctgctcgggtaagcagatggggttagactttcctgggctgggcctggtcagccagactcccctttcccctgggatgccctgcctccctgatggacctgctctttggggacaggggaggggacagggcaggcagcagcatctgcctctccctgcaacacacaagcagcttcttctttgggcctctgaattggcaaagtcctttcttctcagctctttcttggagctgattccactcaatccagctaaatcctttccctgaaggagagaatccctaaagaagtccttgt

SEQ ID NO: 39751 - DNA, 1852 bp, Bovine  19866880608745
  misc_feature (1)..(1): n is a, c, g, or t
ntgggtgatgccttagggggcaaaaggtgaaagtctaaacctaaaaatcaaaatgaaaaacctgtggttaacagtgaaacaacagaattcttttgactgttagccttgtgcatttattgacacttagccggcaaatatagtacagatagaagtgggtacaacttgaggaaggcttgttgtgagcctgcgtgttcttccaagtagttacacagctgaaaagagggagtttctttttttggcttggatatgtaatggatggtaatgctgtagtgaatttattgtggtattgacgacttctgtttctgatgttaaagatatacttctcagccatgtgagattgtggtagactgtggaccatttactgacagaagtgggctttatgaaagactgctgatggagttagaagaagcacttaattttatcaatgactgtaacatatctgtacattcaaaagaaagagattctactttaatttctaaacaggtaagcctatgtgaagtaagtacagagtataataaaaggctttgatacatttttaatgttgaaatgaattttcttttaatgaggctgttttatatacattttcgcttaaggccttaccttcttgtatctttggacatttttcattgagtgtatcatattgggttgagtttagtgttagctgaccgacatttctattaagtggagacctccctggtttaaggaggtgtcatgattgtttgaatataagaagtgagtcccagtttttttttcttagtcaaatgagttagttcctgatcaaaccctgagctgaaagaattcttctgttgtttctttgtatgtaattggacatgagcccatcatctccgagtagggcagctttgagaagcgattccttaggacagtggtcctcaaagtgtggatgctgctggacgagcagcatcagcttccctctggaacttgcttggcatgcacgtgagaggccccacccttgacctgctggatctgaagctctggggtgggagccagctgtctgagattggaagcccctcagtgaatcctgttgcctttaaaacttgagaaccattgtcccaggacaatttgtcagttgtcccagccagccgtgaatgttactaccgtgttggatcgaatccttaattctctcttgctgattttctctggagcagcaatgcccagactctgttcagcatctgtcttctcattaagtccacgttcaacccagtgggtctttcatttgcctgcagaactggcagttacagccccactgtgggtttacatttccagtctgagctagggttgtaagttgtggcactctggggcacagatacagttcaaggaaaatcatcttgcttttctttgatacctaaaataaaatgacatactctgctgcatgtgtacacacatttatatattctgctatgtagttcttgcatatttacctggaagtaaatgacttagttgtacttctgaccacagctctgaggttgctttattaaccgtatacagttgcctcttttaatttctgtcatttgattattttcactggggaaaacagaagggtggttctgggcatgtgtatgaaaaagtagagcttggaaagactgctgacccctctccctaaccttttaaggaatgaaccccagtgttgatattagtggggtaagtttattttgaaggggcagattgaagacaactgaaaccctagttggactccacgtgaagattctgcaggagtattgtttcgcattggagtctttacctttttttgtagatactctcagactgccgtgcggtcctggttgtcctgggaccctggtgtgccgataaagtagctggaatgatggtcagagag

SEQ ID NO: 39752 - DNA, 3850 bp, Bovine  19866880614041
  misc_feature (1)..(1): n is a, c, g, or t
ntgtgtgtgtgtagttctaagagtaatggtcattaaaaagttcatagtggtgatccctgggtgtaatgagatttcaagaggtttgagatctatttctctgtgctttcctatattgttttaatttttttttatataaagggcatataattttcctcaacagataaagtcatcaggtctttcgcatgggcagggaagagcagactattatagaggaaatatttactgtgtgggaagtagacttgggggaaatgtggacctacggcaagaaggccacaagtgtgaatgagtccgttttaattcccagagcctgcatccctctttctatggcgtccaactcctgagcctgccatcgagaaggaaggaatgtcacacctcctgttttcaaatggcccgttcttggcaaagctggggccaaagtcatgcccgggaattttggacggtgggcttgagagagaaggctgagccgcccctcctgtccctgtctctggatccccaccttgcccctccgccctgctctgcatacgggcaccctggccggccaggcagaaccaagatggtgattttacagcactgttacgactctgttgctgtccagtaaacccacacggggccccacaaacgctcctcgagaaggccagacccttcttgagaaatggtttcctacacctttacaacgtgataggtgccgtggaaaaaaggggccgttggatttatggaaactatataaagtttatagagtcttggcaagccagaaggagaaaaagcctatgggatgggggtgggtacttggaaatggagaaggccctgaaagggcgtcagacctctgtgtccagacaccagacgcaatacctcgaagggcatgcggtggggggagggccgcggcccttctggaacagctgctgggggcgccctgcaggcagaccctatttggtcttcagggcgtccctgtgagggaggcacggttgcccccatcctgcagaggtgacgctgagacagaggtgctcggaaagttctgaccttgcccaaggtcacacagcgaatggtctgagggcgtgtggctctcaggtgggccttctggggcaggctcagttctcgcactccgtctcctgtgtaccgagtggcgtgtcttggtttcaggtacagaaaatatggtctccgtaccctgtttcgtgtcgggaccgtttgctatttgcgactgcgtttcttggtcccctggtgtcttctgtcaccacggtgctgtcctgtgactccactttgctctgaaagatgagttgtgcccgcatccccaccggccttggctggaaccggagtgaagccacccagaggttggctgtggatcggggtggggctaaaatgctgtctttgcctttcgggatcccctccgtgtcccagttctatgggggatcctcttagggcccccagaggagtcccccaaggagtctgaaattacctcctccaaacccgtcagcccgtgaaatttctaattcatttttccttgcttatgtgccttgcggcacccatgttttctctcctccttggctgtaattcttggagtgcagattccatgaatgcttaattcttcatctgtgattttgcccacagggttgggcatggttcccagcaagtagtaatcactgaataagtatcagctgggaggctggctggctggatgaatagatggatgagtggatggctggctggctggcctggtgggtgggtgggtggagggatggacggacagaccaactgatgggtggatgggtgaatggatggacagataggtgggtgggcgggcagaatgatagccgtatatatagactaacagacacccacttcctcatttgcacccttccgcgcagttaaactaacagcctacgcctggttctcttaggctttcactgaatgcacttctgtttcaggagacagactttgctctctctgaagccatatggagaaaccagcctgagtgtttgaatgtgtgtgtaaatactttacagtccccataaacttgtttaaagacaggtgggggtgaaggtataaactggggcagccttttgggagggccatttggaagtagctattaaatttttaaatgtgcctactactaagacacagcagctccacttggagtcatcaagcataaggaatatattcacacgtttgtgcacagagactcacgtaccagggtgcttgtgcccagtgctggctacagccctgctccatacagtgaaaaaccggaaactgcccatgttcatccacagcgagacagacacaaaactatgggagacccacactatgggaaaacctgcagcggcagaaagctctcccgtattctggaaagttctgagactctgtaactcatggcccttcctgcctcattgccatcagcttcttttcctttctccctcctctctccacccacaaaacacagtttgccggaaggacatctttcaacctgatgcctgttagccagtgaccttcccttacagaaaagaaggaacatgggagagaagcagttatgtgtataattactgtctgctggctcttcagttaaaaagattgaaaggcacaatattaaaatttgatttatgggcaccactatctacctaataatgaggctgggaggaaaaaaagaaccacagtcgttagagaaaaccgtagcctttttttttttctccgccaggagataaattgcctctcattttcttattgctaaagaaatgtgaaatggttttaagcatatgtgatatgttcttccaatatgttgaaatccagaacttagtaatttaggagtcatctggctccgacgtttccaggaagcttcctgagagacgtagcagcttcagcagcaggggctgctgccatggtccacggggctcccagacccagactaagccacaggtaccaccgctggtaacagaaacttcctccaggtcctggggcatcaagctggctgatgccacagaacctgagagagaaggggagaagcaccgactctagttccaagtcccaattttgtggcctattcgttctctgatccttggtttcttcatctgtaaaataggagcaatacccttacttattgcatgatgctgggcaagtgcccaggttttcccaccttgaaggtataatagtccctccctgagagggttgtaggaaggattaagtcagtgaatctgtgtaaagtgcatagttgggtacctgccatgtagcaagtgcgcagtagatattttttacaatcgtcatcatcaccactgcagatgcctttccgtagtttttggaagggttggaattcaaacccaagtcttccaattctagggtgctggctgatgaggggtggatagacagatgcttggctctgtctctctccaactgatgcccaaggcaagtcagagtacttctctgagccccatcctgtttatctctaagatatccatttctactttgcaaggtgatggtgtcagatttaaagattattggaaacaaagtgtccaggacataattagttctgggctgacagatggtaaaaacccttgaaaaggaaagatctttccttgaaacctatttggggagggggggaatgctgtcccccccggaggagagatctgtttctagttggtgccctcgcacctcactggggctgcacagaactcccctgccccaggagtggagaggggagggtgcaaaatattccctggctctaaaaataatagctgcaaagaggaaaacaaaggaacagccaatgtgccaggaactgtgtggagcttcacctgaagggtcacaggtcagtctcagagcagcctggggcaagctggccttatcttcagggggcagatcagatatggggaca

SEQ ID NO: 39753 - DNA, 1223 bp, Bovine  19866880690740
  misc_feature (1)..(1): n is a, c, g, or t
naggcagacccagcatgggctctcttggaccccggctggagggatcagctcacgcagaactgattactccttcctgagggttgtgtgtcagtactcatgatggccaggctgtttcgtgtggcttgtgctgcatgcaaggatgcttagcagggagaatcatctcttcctggagtctgtctagctctgggcagaagctgctgctgagggcctcctgacctggctccacctctgtgtacatcatttttactcttgggagggccattaaatagtgagccataattttctctttcaaaagagggggattttagaagatgaactatcagcttactccctcctattcagggaaagaacttgagcacaactcgaagtaacccctttacactcgagccccagaccctgtccttcttctataaaatctgcattttcagacagatgctgagggtgtgaaggctgcaaggcctccctgttacacatgcctcttcctagagctgtctttgtagaggctttctagccatctcttatgaacacttgtcatgttaggagagtaactctacctagttcaatttttggctggaagtatttccctggctcttggaaccctttagaagaaaactacttttccaagtaaatatttaactcttcaagtcccaagagaagaacagagctcacatcacttttagaatcacagggactcaaaatctttagcaaccaagattcctctggttcttttctaggaaagagaagaggcaaaaatctgtcagaaacgaaatctcactgtctcccacgatccgggccccactcctgtattggcggagatgactgatgtatgttatgggaaagaagtgattttacctggaagaagaggattatgttccaaatcagcccaagaaccaaagaggggttgccatctgctatttccgctgcatcaatgctaaccagctttacctggagagaagcaatgtacgagcttaaagacggggtccaagtaggttgcagcactttatttcctgatgcccttgtgggcctgtttctctttctcacctgtgctgtttggtgatgccacaggccacctcttggggaccccaacatgcaaaagtgtacataagtgtgtctcataaacaatacacagtacttcccattatcagacactattcttagagtattagctctgtttattttcacaacaaccccacaacacagattcttttattatctctgtattt

SEQ ID NO: 39754 - DNA, 1678 bp, Bovine  19866880753087
  misc_feature (1)..(1): n is a, c, g, or t
ntgtgaccagccagcctcacggtgactgtgtctgttttatttgtgtcctaaagacgttcttgacgtcacccggcaagaccaagtgctgcgtctttccagatggagtagggctaatcctcctttgaaaatcctcaaagtgctaactctgggaccagaaaaatcaaactgcccttctccaagaaacagggaggcccagagcatttggaaagatcccccctctgtgaagaagactcggaactctgtgaagtcggaatcccagctgctcgtttcatctgaagatgttccgaccgaaggccagatggctgggacataaggggatgtgcctgttcaacattgttttgtatttgaggaataaatatttaaatctgaaaccaagtgaatcactttctactcaagtgggcagggatggaaaggggtgtgtgtgtgtgtgtgtgtgtgtgtgtgtgtgaggatgctccctccccctccaccacccatcctaaccataaccgggcgtgaagagctgtcccgttctgctggtgcaggatgtcagaagtggggtggcgctagctacctctgtttcagggttgccgtttttgttccatgtctgctttagctgcaagaagattcctaatgtgcatgttttgaaatggagaccccatccttttgtccttagcgtggtaaatggcaccctactccagtactcttgcctggaaaatcccatggacggaggggtctggtaggctgcagtccatggggtcggtaagagtccgacacaactgagcgacttcactttcacttttcactttcacgcattggagaaggaaatggcaacctactccagtgttcttgcctggagaatcccagggacagcggagcctggtgagctgccgtctatggggtcgcacagagttggacacgactgaagcaacttagcagcagcagcagcagcaaggacaacctgctccctccccacttggttttgtttcggtttcagcctgtatggcaactggactctgatataaatgtgagcagatggaaatgaaacccttttcttgactacaattaaagctctgaaaagatcataggtctttatggtttatttttgtctttatggaagaggttcctatgtagttttgttttgttttttttttctgcctttttgttttgtttgtttgtttgtttttataagagggggaaatttttctgcagtgcttggagggtgtggtcaaaaaatgcatcttatgtttgggggaggattgacagtttcataatcgtgtccttatctgatcccttcttagccttatgaggctgggtggaggtggctgctgtcattttgttatataaggacagctacctcgatggctttttgccatgtccagcgctgttctgactgccttattgcctgtgtcttatttaatcctgttcctgcctttgtgaacttgacattattgtcgctattttgcagaaagcgaagtgacattgtccatcaagtaagattgcatctgagactccatgtccagtgccgtttccacactgccaggctacctcccttaggaaggacccaccaggaggtctgggttccagtttctctccggtcaccagcaggcaatgtcacctgtgaacttcaccctcctcatttccgatgtgggaggctaatcaggtcctgcaacacatgaaaatcacctggggtattgca

SEQ ID NO: 39755 - DNA, 3951 bp, Bovine  19866880825210
  misc_feature (1)..(1): n is a, c, g, or t
ntttctgcaaggtgctgagaccagcaccacgcggagacttcagtggcagatctcagagtgcctccgaatttttaaataaggcaacctccccgcttactggcaacacatagcatggtcttgcctccttctgctggatacagagttctctttaataatcagatttagcaaacccctaagcttcgccccttggttttctgtagccttcccactgtgccatccgcttcctggaagaagagcgtggtaagagcaagtgagtctggagcttccgagttctagaccgtacattgccaccttgcaattcaaccctccttctccaggcctcagggttgtttttttttttaagtttttgagccaatggcaacattcattgggtcccttacgacctgaacgtttaacgaggctgggcgattgcccccgcttgccaaggagcctggggtggaattaggagttttttagtacttttcactgggacaaaggagtgtgctgtccctgcccccacccgagggcagggtgtctgtaggagctgggtcttagatgaggaaatgcaagtgcgaaagctctgtcctgcagtgcgtgatggctttactgtgagaagtcacagggactccagggtcactccgctccagttatgcagcgggctttcggggagctcaccccatgggacggggcctcttcctccagctttccgctcaatcccaagacgctccactgagtcggtagggaggcgaaagccgagggaggcagtcaggggcgctgcgcccgcgctgcgcctcctttgcgggctgaaacccacaagtgtccacaacgcgcactaaacaatcagtaggctcctgttgaccggtgcaattggaataacaaatgcgacgcacgcaaattgcccgcctcgtgttgctaagcgattgtttgtcgccctgcaagcaccgctcagcatgggaggaccgggagcgtctggaggcggccggccagagcttaggtcggaaatgcagtaaacacgctcctgattttctctattatcacccaaacacgatttcacacaaagcaatcaccatacagaagtctatgaagatgtgtttgttgaagagtcagtcgccctggtaatagccttcatttttaaaatattaaagactagatcagctgattccacatgggtaaggtgtatttgcggttcaacatctctcaagatgcatttgcactgtggtcatcgttagattgattcacagagtgtggattaaattgcttctctgatttaaaaccgagtgcccaagtttggaatgtgcatctgggtatctcctcctgcccaaagatattttcatcatggggaaaactgttgtcccactacacacacacacgcacgattataaaaagaaaaacgcgtttgtggtccccaacttcttacggttcggttccaggaacttttcttatttctttcagtctcttgcccggtcacagagcagagttcacaattggatgcgtttaagtaggctttttcgtggcatgtgcaaaaagctggcgtgtccttttcaaaagcgtgtagccccctcgcagggcgaattagccgagtctgaagaattaggcacaacgggcagatgcggctgccgccttgggcgcagagtagagacccgcgcagtctgcacagagcttgtcagttttattgtttacatttagacttaaagaaaaaaaatccagagtctcgaaattagtgctcaaaaccagctccattaccctgcggctccctggaggacaccttccggagccccaggggattttccgtatgagattgggtggatggagttgaacacgaaggcaaatgccacccggctaagaagcagcgcttaggagggctgggactctgactttccagtcggatttaggaacgcttactagctgaattttgatagaggttttggaacattccatataaacccccctagcccctgaggatgaaattatcaaggtgttaggaaaactcgtaacattgggggagaagaagagggtatcgaaaagtaacgcgttcccaaggcatcagggaaaaaaaaaattccagttttccagggttggttacagaaattctctttcaggcgagctatttaccaaagtttgtttcaaagtgactgcaccgttgcttttgcaaatcacagaatgcaaatgatgataatttgttctcagtggaactttctcttgaaatgattagcaaagtcagtcatttgaaaattagagcgattgcacagacggttttcgaagccccgcgctaaccgatatcagcttctaaagttttcattcatgtaaacctcattaatgaggatcttttatttaaacgtcaaggggatttgaaatttagagtaaattatgaagcttgtatgtctagccaagtcatgggtcaaatgcatttgtgaaaaactgctaaaagagcatatggttttgaatttttctacaatgactagtgtttaaataaattgcttgtactgcttaacttcatgtgtaattttgacagaaattggcctatagccttttgatatgtaaacatttcagccttttatgcggtataaaaaagacacttgctttttaggatcagttcaggcagtcaccctgtaattcagaaagctggcacctaccattacattcttgctagatttcaactttcaagtggcagcctcggggagaaaaaaaaggaaggaaagaaaaaaaaacgaaaaaggatatttcaaaagcaatgtccatttgggattaaaagctgcaaatgaggtgagaacgtgccacttactatctgagagaaatggataaaccatagttattaaagaacattttctgtcatctttctttaagccagcctggctgaggggacacttaagtagagctgggactgactggcatgttattaaatgcttgtcttagtccaacacacaaataggtgttaaaaatctaggtatcacttcaggatgctaccaggaaaatgacttcatgtcacagaagccattaagatgcaaaaaaaaaaaaaaatcactcagtcttggtagagaatcagccttgggcacaaaatcgctggacatgaatgacagcactgggccagcacaggggtctttctaagtgaggggctgttcgtgggggatgcagagctgctgtagagcactatttagagactgccctgggctgccagggtacctgaaacacctttaagtctgcatacactcatttgttgctagtatatcgtctcctataaataagcattggaatgtggattggagggtgggttacccaagtgctagacggggtctacacattgacttccagatcgctgtggcagggcaaatgctactcttttcccctctgtgctaagggccctgcccgtatttgtcctacaagtcggctttgtcatgtacagactttctgagagacatcgccctttttgtgaatgtgaagttttggaggaattgcagaacaggaggctatggaagtgtttggtttgtatacatttgagccttagagcaaactgagattctctttataaagcttgtgccagggagaaatgcaattaagaaaaaagacctgccgagagaaagagagagagagagagagagaggaggaggaggtgttttatttacattttttaatgcattccaacacatcaaattgtggtcagcaaaccggaaaggaaaggacatatttcatgccataaagaaggcaccaagtgaatttttttttgtttgctttttctcctaagaagactacactcctgcctagcctttctgtccattttgaaatgaatatgggtataatttttttcgtttgctatagttttgaggattttttttaaaataattgatttgctaataaaatagttctgtaccatttagctacttaactttgagaaacttacccccaaagtgtgtttgtgatcaaagttagctagtcaagatttgtattttgggtaaaagaaggacacagtatttaaca

SEQ ID NO: 39756 - DNA, 1805 bp, Bovine  19866880863750
  misc_feature (1)..(1): n is a, c, g, or t
ncaacccacttatttaagacatgttcatggatcagacctgtcctcatcctatgtacagctggaaatgaatgactatactgaaatgtatgaatgaaatgtcctacttcagttgaaaaggacagagagtgaaaccctggttatattaagaaaaaaaaatcagggtgctaggtaactttaattttatgccatatctgatatgtgatgaggtacatgatatttcccccacccccagagaatgtaaccctttcccaaacaaggacctatgaccaggagctgaccattttgaccttctcagaacttgataaggactctgttacagttttatttaatttcagctctctgatttcaactagttttagaatgagaccaatccactctccccaccagtacattgggagccaagcactgcagaaccaccaagattgctctctactttcagccctgctctcagctgcatcttttttttaaattgaaatataattgctttacaatgttgtgttagtttctcttatacagcaaagtgattcagttatatatgtatatggatctctgtacatacatattctttaaattctttgccattatggtttattacaagatactatagttccctatattaagtgctataaagtagatcctgttgcttatctgttttatctattttatatatagtagtttgtatctgctagtgctaaattcctaatttatccctcccccacttccctctttggaaaccacgagtttgttttctgtggccgtgggtctgtttctgatttgtaaataagtccgtttatgtaacatttgagattacacatataagtggtatcacatggtatttgcctttctctgcctttgcttaatatgataatgtctaggtccattcctgttgctgcaaatagcattatgtcatttgtttatatggctgagtagtattccattgtatagatgtaccacgtcttctttatccattcatctgtctatggacacttaggttgcttctgtgtcttggcttctgtaaatagttcagccgcaccgtgcttaacagaagtccctgtgtgggaaaactagtatatgaacagaagtggtttttcgtgtttgaggcccttccggattcaatgtctcacaccagcccgacaatcagtaaagatttagctgctctttccttatcttaggtgggttcacttctcatccgtacccagactaggcagtggcccacaggtatgaggttgccgataatctccttgcttagaaagggcccatccttctccagagttcagttcattgagatgtctttgcagtcatagcttcgaaaatgaccttctctttaacttatctgacgttttcacatttcagcaggaacaacagtcatttgcccatctatacttccattcattctgaagtgctcttgctggtttgtttttgtgttttgagaggggactctacgtggcacttagacactgataatttcatggtgccctgtgtttcttggtaggaggattttgtggattctgacaaagaagcccctatagaatccaccttcgttcgcatcaaagaaaccccttcggaacaagagagtgccatcttccttctgaccgaggacggggagcgagcctacaccatcaaccatgaggccagccacccgcctccctccaaagtcttcgtctgtgacaagcctgaggacgctaaggagccctggctgggtggcgtttccagccaggagctgatggacagctcctccgagttcatgaaccagatcatcgagcaggttctccaagggatccccgggaagctcaacagcaccagtg

SEQ ID NO: 39757 - DNA, 1273 bp, Bovine  19866880943580
  misc_feature (1)..(1): n is a, c, g, or t
naaaagagaaaagcatgagaaatatagtgaatagcaaacgcagagcccaaaggcagaagtcagcccaaatacatgcagcagatgtaaatggatcaaactcatctattaaagcactgagattttttcctggtgaatttttcacaagtgaattctacgacgtttaagagatcaggctaaaatagaatgccacggaaatacagaaagtaaagatatagagaaagacagataaggcaaataaataccaatagaaagaaaccttgtgtcagaacagataaaacagtctcagagatgttatttaatggtgcctcagttaatacaaaaagcaaaaagcccaatcagctgtatgaaaaatctaaacttataaaatagacgaacgccgatatattagtcccagacttcacattacaagggaaattgtctgctaatgtatctatattggcctctagactctaagctcctgggaggaaacaagctgtgtcttattagtagtcactcaattcccagcacttagtccgggtctgacttagaggattcttaataaatgtttattgaataaaccagtggttctcgagcctggccgcacatcagaatcttctgggagtttttaaaaatactgagacctgggccccacccccagaccaattaaaaggaagcctctaggggtggagcctcaatatggtatattttttaaaagctccccaggtgattctgatgtttggccagagctgaggactgctggaataaataaacgacggaatgaccaaatgaatgagtgtctctttgatttacaaaagaattcgttgcaggatttcttttaaaagcacattcccagggtgcattttcaatgtaattcgattttaagaaatttgatttacacccaatattgccaggacagtctattttgtaaagtaaggaacatctgtgttatctatcaaatttttttttttttttatggatttgggaatattctgtttctccatttagaagtgagctggaggcttgagcaaaaaaaaaaaaaaaaaaaaaacctgtatcatttcctgtactctgaaaactgctttctcccactctggcatttaaagactatttcccagcaatattaagcatgcaattacttaacgagacactgaaagcagttttgagaagtataaaaacatcattgtctgggcttgctgctcctgacgttatgcgagtgacagatgaggaaccagactgagtccagccaaggcgtgcttgggtgctcccgtgtgccgggcgctttgtccagggatgg

SEQ ID NO: 39758 - DNA, 1905 bp, Bovine  19866881011655
  misc_feature (1)..(1): n is a, c, g, or t
nttcctactgtgtgccaggctcagtgctgctgctgctgctgctaagtcgcgtcagtcgtgtctgactctatgcgaccccagagacggcaggcccaccagggctcccccgtccctgggattctccaggcaagaacactggagtgggctgccatttccttctccaatgcatgaaagtaaaaagtgaaagtgaagtctctcagtcgtgtccgactcttagcgaccccatggactacagtctatcaggctcctccgtccacgggattttccaggcaagattactggagtggggtgccattgccttctctgaggctcagtgctagggatgaccaatacctaaccccttccccaaagagttcacagttcagagttttcttttttcacttcaggggtcccctttcaccctggattcttcagctttaagattctataattctatcattctaaaactctgttattttaagatttcatgattccatgactcccctcatgagccctggacatctgcctttattttggatcctcgattggactagttatctaaataagaatcttctcagttcatttatttgtgaatgtgtatcaagcgtcgatgaagaggtcacctctaagaaatttgtagattcagttcaaggtcaattgaagctaactgtattaaagcaagatcttatctctccccatgaaatattagccgctctctttgtaaagaaaaaaaaaaaaaaagaattaggccaaaatagttcacataaagaaaaaaaagacttcattgctgcatatacttccgtatatgctcatttggtggtttcttctcttaattacgaacaggaggcagagatctagggtcacgtagagggcatgctgtgtatggacttggccacaggcaaagtttacagagggtagcccccgagaagtggaaggaagcagagaccactgagtcagtggccctcctcactcaagggcccaccgggaggttgagggcagagaaaatatcccaagctctttccggcctcccagtctaatactcttccttccgcttctatcctgagtctgtccaggcaggtggttgatgaacagacatggcataaggatgtggaggcaccacagcctctctgtctcctctttttggtgttcagtcactccattgtatctgactctttgtgaccccatggactgcagcatgccaggcttccctgtccttcactatctgctgggagtttgctcaaattcatgtccgttgagttcactgagttggtgatgctatctaactatctcatcctctgccaccctcttctccttttgccttcaatctttcctagcatcagggtcttttccaatgagttggctctgtctcctgggcattgtctaacgctgagaggataggtcagtggcctcagcttggggtgacagtgtgacatggtagggagactttgggctagaattctgctgggttcagtacaaactccccacccaagtacaaacctcgggccagtcacttgcattccctgagtcttggtttcttcaactctaaattaagaatgttgaaattaatgacctcagaattaaatcactatgaatctctatttaccttcatggtggttatttttaaacactatgtaatatatctataatcctgaatgttttatagtcaaggctgaagtccattttgaccccttcctgggtccaatcttagtccctgtttcattttttcagaagaaatcacaataggatataataatcatattctctgaacaatatcataaaatatcatattctctgcatgcatgcttgtattttttaaaaattaatttattttaattggaggataactacgttaccatattgtgatggtttctgccatacatcgacatgaatcagccatggtgcacatgtcctcccatttctgaaccc

SEQ ID NO: 39759 - DNA, 1097 bp, Bovine  19866881076687
  misc_feature (1)..(1): n is a, c, g, or t
ngcagacaccatccccaccaacttccggaactcagaaaatgctcagaagcagatcaataactatgtcagtcagaaaacccaggggaaaatcaacaacctagtcaagaatatagaccctggcactgtgatgcttcttatcaactatattttctttcgaggtaaggcttagagtatgttggcatgtagacttgagtcagattcaatggttgtccacttacttgctctgtgaccctgaagtcacatgtaattgctctctttgaatcctacttctcgtgtctgaaaaaggagtaccttgatacatagctgatagggtggttattaggattcaaagtgaaaatgaatgataaatgaatgcctcatatgtgcatttttatggttactgattatcctaagacaacattggttgtagaggttgaagtgtcatccttttccccatttcttagatcaggaaagtgaaattcagagcgagattaattaatttactcaaagctacaaagccagctaatgaaagtcaggagtagaatccacttctcttgacctgatggctatggttttcataactccaagtagatgcccaggatggtgaccgtgttgatggtcacactgtgaccatgatcacattggtaggtgccttggtcttctcaccatatgttatagactccacaagtctgagggtgaggtattgaaaaagaagatgaaagtatattccctaattcaagctgcatctaccacacgatacacacccagtcacagcacacacacacaaatgttggccaacataggtgagaatgagaagccaacatccctaggaccaggcaaggctgttggggctgtcaacaacatgatcctgaatatggaagttcagctctcccaaaatccacaaggagattgatggttatggggtaaaacaggagggctaatggtagactgtccaaagcagggaagaaaggaaaattaggaatttcccaaagtccctacgtcctctgtatgacagcaagaaccatagcgacagtgatgtgacggtgcctagcatccactcaacacttacctacccgcagtcactgagctgtgctgcccttccccaccgagtctcacag

SEQ ID NO: 39760 - DNA, 1383 bp, Bovine  19866881182095
  misc_feature (1)..(1): n is a, c, g, or t
nctttcaacacagaggctcggtagccggctccagaggcggccgcacggctccctgaaaggttcttttgttggctggtgaaattctccctggtcgggcacatggccttttcccgatcagtccttttaattaccgggagcaccttcagccccagcgaacagaggaaaagctgagcagccctctcgccacagctggttaaatagcagcccagcagggcttccacacagtcggctatgcttttgtcggcaatgcactgctcggtgtgcaggtcgtaagagatggactgcttccctgtgtccacaccacagttttcttctgatggattccagaaccccaccacaaagtcatcctcttcaacggctttgctcggatccagatagcacatcgcatcccaggagctgtagtcgaaatcctcaaaatcggatgagaatggcagactaccaagggaggactttttgggcattttccactcgtatgcagaatcggtggcagaaaaaggagaaagagagattttcttgacgaaagcccctgaccccatcagcatgttatctatgaacttgatgtgctcctgatcgtattccaggaagtcgtcctcatcgtccgcatcctccttgtgagccctccacatcaggtcctcctcctcctcttcctcctcctcgaagtcatcgtccagtttgccattagccaacatgcagtcttttgtctggaaaagggggaatggggaaggaggggagacatagctgctgtttttaaaagggtttgagactcaataaaagcaagggttatggataatttcaaatgacaaccacaaatactaaaaggcaactttcaaatcacggccatttgttttcaattaacataaaataagttatttaatcatataaacaaagtaaaacatgttctttgaatgttcgttttctaagttataaaatgacctttatctagtatgaagctttaagttaaggattttatacatggatataaagtttaaaattaaggctcacaaggcaaaacttcagctaagaattattactctggcaagatacacaatgaaagctctcatatgccgatcacagagctcttcgattttgctgacagtttaaaaaaaatttttttaagattttcaaattaacaaaattaaattccaggtgtagaaaaagcataacttctgcaattcagtaagagtataacatataaacagataaaattattttctttataacattaacatgtacagtggggcttcacgatgaaggtctgtccctactgccacttcaaatccaagcacatttgctacaatgtaaaaccaaactgccttgcttggaaactaaaagtgatcaccatgaagctatgaaattatgcttttcccttcagggtaacagatt

SEQ ID NO: 39761 - DNA, 1841 bp, Bovine  19866881212498
  misc_feature (1)..(1): n is a, c, g, or t
ngcatagtacattagcatagcttaagacaaacatttccataagaaaaaggcattggttatttctagactcgagaatagctaacttcaggcgaagcccgggtgtcattatggcaacacaatattttaagagaaacctccctttaaatttgtatagagaaggaaaaaatattgctagtttgtttcctcctgccgcttaagagagataaaaatgtctgacacttgcaggctatttcctctatttggagacccctggccttcctgcctgttaccctctcactggtatcccacagcttgttgcccacaggtgtagctcttggaccctgaggggcagaagtgtgttttgggaggaggtgaccctgtggccggctcaccaagctggctggtggccgagagtccagccccacccctggccccactctcaactgaaattgaaatcttcacctgaaccttagaggagctggggacagacagcaggtctgcattgcccttgacacagaagctcatccctgcagggggattgtgacagtctggtctcctgggatgaccaggactgttctgaggctcccttggcccatcacccaccctcagcaccaccaacagtgagaacaaccagcacctcaatgtagggtgtgtgggaatccataggtggaggataaagagctgtgagactgggaggtgctgggcttgaggctgaggtcctgcgctgaggctcagggatttgcagtcctactccttgagtctcagtttcctcctttgcccccctgaccactcagggtggccatggagctgaaaccagagatgcagatggaccttctttacaccagggaaggctgagctcatgggagccacactccagcctctcctgggtcattctctcctctgggacacctcctgctgtgatactgtgcctgtcacaggagtgtagcccaggtcattgaacttgcctcctaggagcttctcttatgactttttcaaatgtcatgatggcctgattactttcctggagtggtttttaaaatagcaagtacaagtcaacagaactttccacttttatgcagcatgaacagaaaagttaatatgtagtcaacagaaagagtgtttgcaaaacttttgcaattcaaaaaccttgtccttcttgagctggcttggtggcaggcatggcacagagtgacctgcagactgagagcagagacaggatgcacaggggttaataggtcgatgccagacttcattatctctgaatttaatgtctgggcattttatgtaaatggagccatacaacatgagatcttgtgtgtctgccttctttcacttagcatgatgtcttcaaggttcatccacgttgtgtacatgtcagtggatgtgtatatgtgtcacttcattcctttatacggctggataatggtccattgagtataccatactctgcttattcattcgttagctgatggacagttgcctgtttcattttggggggtattatgaatatgctactctagccattcttgttcaggtatttttgcggacatatgttttcattttgctggggtgtacacctagggatggaattgctgggtcatatggtaactctacctttagctctttgaggaaacaacaagctgatttccacagcagctgcgccattttacatttcatcagcaatttataagggttcaaatatctccatattcttgacaacactggttatttctattattgctagttatttttaccattatggtagatgcaaggtggtatctcattgtggttttgatttacatttccctgaggatgaatgatggttcagtgcttcttggacttttgtgtatcttcctggaaaa

SEQ ID NO: 39762 - DNA, 1171 bp, Bovine  19866881213173
  misc_feature (1)..(1): n is a, c, g, or t
ngcccacacagaggcacatggtacgggggcacagctggtgcagggagggtcttccccactgagggatcagggcagaagagggagaggacacagtccttgtactcacagagtcctcatctgtcacttctcctccagcccagtggaagacgccatttaatcctaaccatacttacgaatcagagttccacgtgagcgagaacgagagggtgaaggtacccatgatgacccttggcctggaaaccccttacttccgggacgaggagctgggctgcacgctggtggagctcacgtacaccagcaatgacagcgccctcttcatcctccccgatgagggcaaaatgcaggacctggaagccaagctgaccccggagacgctgacgcggtggcgaaactccctgcagcccaggtgactccccaggacccggagctgtgggttcacttgccctcttggtccttccccctcttcctggactcctgactcccagcagcagggcctcaggaatgtcagggggcgggacagtggtgggagaacctgtactgagatgactttgccctttgctaccttagggactttggggcaaaatttttccttccataggatgatgacattagaggaggggacggcaaggggagctgagggttcctctcacatcaacatgtattgagtcagtaggatcctcaacagaacacccaacgctcacgcagttctttctttggctccacctttcgacggtggagaggaagggatagaatcgggatcaggtgagggctctggtgagacaggctctgaggaccagcttgacactgtctttccatcatagccactcatttattcatttatccacttggcactggttgaattaattaatgaagatcgtgttatgtctaagggcatgatttagatcccgagtcggcaaataaaacactaaattcccaccttcatggtgcttaatttgtgactgggggagaccgataagaaataaataactaaataagtttgtactcagagagatgggaaatggtgaggtgagggaaaataaaggaaaaagagaaggaaaattggatccaggggtagtttgtgattataattaggatagcacttaggtgatgtgtgaggtgagggactgagtcatgtggatgttgtggggaaaagcattgctgaccaaaggaa

SEQ ID NO: 39763 - DNA, 875 bp, Bovine  19866881236302
  misc_feature (1)..(1): n is a, c, g, or t
ncttgttaagcccataaaaattagtaccttatgagaaatatcatccctttaaaaacaccctgactaaatatttcataaatgcaatgcacaccaaattcctaccgtagattcactggatttacaaccatcaaactatattaaacttacaatatcaagatttatcacctattaaatggagtctcgttttagtaatatctcgcatttgatcccaaaggatctcaaataccttcgacccttcaccagggcactgtgccgtaattcataacgaggtaatcaaaaccctcattgtaaggctgccgccgtcacattcagggattagctcacctatcaaggaaaagtagccagagctgggagagaaggcagctgctttacagagagcagaagtggtaccaagatgcaggcctcggggaaaaaccctgcagagaaccacagatgtaaagtcagagggtccaagccagcttctggctcattggttttcaaacgttagttttggcagtacggccctttcttcccacgccccattgtaagaaagctcactaaacagaacagattctattgcaatggctccgccttctgcagggcacaggggagaccctgtttctactcctgtggcccctcaccttggctacactttgcaatcatctgggcaacatgttttttaaaacgcagatgcctgggcctcaccacagacattctgatttcagtgatgctaactcagattcactggtgtggctgaacccccccccccagtgtgtgaggaacccgaggaacccaagactctgtgagatttgcttaaggaaacacaggtttaaagctacaaggcagaaaaatacagcctgctcctcagtatgtttgcaaggatgtcattatctaca

SEQ ID NO: 39764 - DNA, 1024 bp, Bovine  19866881253716
  misc_feature (1)..(1): n is a, c, g, or t
nactgtatggcatggggaactctagtcagtactctgtaatgacctgtatggaaaaggaatctaaaaaagagtggatagctaattcactttgctgtacggcataaactaacacaacattggaaatcaactatactccaataaaaattaattttaaaataccccccacttctttctctgtctctgtgtctctccgccgtttccttttccctcctcttgcaaaatacaaaaccagaaatgaactgaacacagaagtctgtaaacacgccggcttggctccttccaaggctctgggtttctggacacaatcttgaatcctaattaagccgttagagaaaagcttgttgctggcaacagggttggggagaaatagtttccatcacgcagtatctggaattagaattggctagaaggcccccgctcgctgctttcgatacctaatagacagaatctcaaatgttattaatctaagtgaaccatgcgagacacagggggagagtagtgaatagttatttggttttaagaaagaaaaccaggcaaagaacactctgtagtgtcctggagtccctgcaacaggccgttagatgagaaatatgtctgaggtatgtggcgcgggacttaatgaaactgcaagataaattgagaagctcaggccaaggtgaaaacacagaattcctgacacacttagcttggagcccctgtgccctgggggaccaggaaatgagcacagtgcgttcttgatggcagaaagggagagtgtttgatgcaattaccagtcaggaccgggcctgcccacttacacattcaaggctagttttgtgccagcacagaccaaggaagagcaaccattttgctaaaaaagaaaaaaaattttggtgaccatgcagggcttggttgccccatgaggttgctctttgactccctggtgtgactgactctccatctctcagcacctcctcagtgtttctctaacctccactcccttgaactagtgtagcaggcaaagttgtctcatgacccaccagcc

SEQ ID NO: 39765 - DNA, 775 bp, Bovine  19866881299031
  misc_feature (1)..(1): n is a, c, g, or t
nttttctctctctccttcctttttagaagtagtctcagaaagcatactaatcctcagtgtatcccaaaggaggatggagcaggctttacacctctgggagtttcacatcctagcacaaaattccagcagctctggtgaggaccttccaggtggaggaggccactgcgtaatttgtttggtggtcagccctggtgctctgatgccacccaagctgtgctttcctcctgttctcacgggcctgttttttcccctccccgtccctcctgtccccaggcatgtgggcgcactccttcgacctggaaagcaccagagaagaaaacttccatgtgaacgaggcaaccacagtgcaggtgcccatgatgttccagtcgaacaccatcaagtacctgaacgactcggtgctcccctgccagctggtacagctggactatacaggcaatgagactgtcttcttcgtgctcccagtcaaggggaagatggactcggtcatcaccgcgctgagccgggacaccattcagaggtggtccaagtccctaaccatgaggtaagcccttagccaactgagtttctgcagttcccagaaagtggggtgagtagaaaagggagccatctagctatccttctacccctacacttgccctccagggcttattgtttccctgtgtgctgggttctctgacctaaagtcacacttgtttatccacctgttgattgacactgggatgctctggggcgttccacaaagggaggtccttctcaatcaggaagttgatag

SEQ ID NO: 39766 - DNA, 1995 bp, Bovine  19866881329887
  misc_feature (1)..(1): n is a, c, g, or t
nacctgcccgtacgtttgcctgctcacgtagccattaatctgcttcctagttgcatcagagtttgtgaagttggcagaaaaggcaaaaactccatacagctccctgatgttgtccaaaatgtgctgctgaggcttcagctgtgtgtccaggaacagagagttgcctagtttcagttccaatttggggctgggtaggtcaagggtgtggatgaggctctggaaaccccggtggatgtcggcttctggggtctcggtgaggttgaagccaaggccctccaggatctgagtccgggtattagcttgcacccccagagagagcagggccagggtgctggagaggctcactggggagaagaagatgtttcctggggtttctgctgccagctgcttgtacagacgcaaagcgaagctggtaagggtgggtgtgattttctggtaggcggggagggactctgagagctgaccacgcggggcttcaggcaccctcaggctcttatctccatgggcaggaaggggctgacagtggacagaggccaggatcccagctcccagcagccacagccatgctggccccatcctctgaaaacaagatggggaacacgtcatccttcttcataaacagcctcgtgtttacacagtaaacccacatccaggctggatcccacagagatgtcaagtggggcactgcagagggtgaggagggagtgagcaagctggctccagacactttcccccagggcttcagtcacagcaggagccccttctcagctttatgtacatattcatctataacattttgttgatttttctgaacgattaaccccccttccccctccccaaaataaaccccaacaacttccatggtctttaccctttgccttccttctccctgccttccttccttcttccttccttcccttctttcctttttctttctactttctagtcattctttcaatcattcattaactttcaaagactggggtgaccctcaacagtataggacaaaagtcaggacactgtgacaggagggatgctggcctcccctgcacttgggtgtgacctttaactagcatcttgcctactggaagggtaagatgctgcatgaacctcctggccaggctgtcccagaaggaggcatgccctctactcttctggtctccatgagctggagtgtggatgtgacaatcggcctcagagaccttatggatgagggcagctcatgaggcggggcaaagccacaggatgaatggggcccgggggttgggggagaggagagagatttactccatctctgttatctccagtagctcttgtcacttgcaggggctgaaacctctatcttaactgatggagagatttaggaaagacatctgctgaattgagtctcccacccacaaattcaaatgttgaagtcctaatcctcagcatatcagaaagtggtcttgttgggaaatagagtcattgagttgtaattagttaatatgaggttgtgtgcattcaggctaagttggctcaagtcatgtctgactctttgcaaccctacaggctgtggcccgctaggctcctctgtccatgggattctccaggcaagaatactagagtgggttgccatgtcctcctccaggggaatctttctgacccagggatcgaacctgcgtctcttatgtctctgaagctctaatctatatgaatggttgcatgggccctaatctatataactgatgtccttataaaaaggggaactgaacacagggacacacacagggagaaggagatgtaaggatgaaggcagagatcaatcagggtgatgattctacaagccaaggaacacctaagattataggagcaaagagagcagcctggagcagactcccaccttggagcctcaggacccagccttgctgacaccttgatcttggatttcttgtcctcagaactgtgagaatccgtttctgttgtgtaagccacccagtttgtgaaaggttgttaatg

SEQ ID NO: 39767 - DNA, 1907 bp, Bovine  19866881969667
  misc_feature (1)..(1): n is a, c, g, or t
naaggtgagtagaagcccgcaggacaaaccaccccatgttgtcttttttttttttaagaatttatttttaattcttatccaagtaatacatattcatagttttaaaagaaacaaatacaagaaggcttttaatggaaactagcaatctcctgtgtcttgcttcctggaagtaaccctttcaactcttcctatttcttctaatatttacctttgcatttctatataacatgcttatatttctttttatttttagaataccaagatacctgctggcttgctaccatggtcgagaaggatcttgctcttagcctaaccccactttgtttttccagcatggttagattttgttgtttggtgcatctctcttcatcgtgagcctacgaggtctgtttacttctgaaccaaatggtgtactatagttgcttgtcttttctcgtcaaatttttttctccttgatgatgatgatgatgatgatgattttggtgtggtaccttccttaataacttcctgagaaaagaacatgggaagtaaatttttgagattttgcataacttaaaatgtccttattctgcccttacccaggggtagctggatatagaattgtgggtggaaaataagaccctcccaccactcccacctccaacgtggttgttgagattcttaatgtcattctgattcccaggcctttagctgtgacctgggtttctccaccttcccaggaaacatttcagatcccttcattctctgtgttctgaacagtcccagtgacggtgtgcccttgatggtgtgcctcgttctgggctctcgtgggaaatttcttaagttttcttcaaattgttcacattttttctttctggaccacctgttgttccaatgttggacctcccaggctaatcctctaatagtttttctgtttctcatctcttaattttttatctgcttgcaaagacagttaacttctcagtgttcctggtgaatggtttttaatttccaagacattttgtggctgttctcttgtttctgttttatagggtcctgttcttgtttcttggctgcagaacttctctccctggatgttcatgatagtggggttttgaggaacttcttttctgctgttttgcttttatttcctctaagttccctttcttttggttagtttcagtctttcatgttacacgttttcttgagatatctagtgatcctgtggatctgttcttgtgtaagagtgatatttcaaaaaatggattggaaactctgtctgtcaactcgtggatttttctgtagggtcaccaggtgggcacctgaactcttcaggggagaaccacacatatcagtaggtcttatgcaggtcttttctcattgtgtttctttagagatatttccacttctctctgagcatacacagggctgctactagcctatgcagagccctcgtgcagtttcaaaagggcattccctctgagtggatgacttccagataggtgcccctctggggcagaagccacccgtgggcatgtggccaaactggcaggcgcattttttgcctctttctccagtgaaaggctcaaggaacagagcaagggctagagttaactcccagtttccccttagccttgcctctttgtgcagcacacagactgtagggccgtacccagacatgctggcgcacacctgagtgcccgcaccctgacctctgagcaggcgtctcatcaccatcagtatgtagacacagtgaatcggtcccgccgcactgtgcctggtgtccctgggttggacctcctctgcttcccctgaggagtggctgcagctcggtaccgcacctctcctctgcacatacgaggtgttgggattccttggccctgcccgtctgcctccactctgcccctgccataaatgggttggcatct

SEQ ID NO: 39768 - DNA, 767 bp, Bovine  19866880649321
  misc_feature (1)..(1): n is a, c, g, or t
ncacattaaattcccattacaaatttccctctaggtgacaaaatcattgcaaatttaaaatgtggccctaagtaatttaaccatctcttgtattgccatagtgatacagacaaagcaagagatagctacttttcatactgtatttggatctgaatcctcttatgctcagagctgagaagaggggccatatgtttggcctggacaggcaggagctttggaaatcaaccattgtagttggcaggggtgtggatccctggactggtcagggcagagtgttcatataattgaaagtaattatgttaacaaaaaggggaagtgtaagggcacctcataattgcaaacagatgtgtgtaaataatggcagccagtctttcaggggccccacggactgatgcctcagcaggaatccatatccccagtgggacagtgaggcttcagcatctctgatggcccaaacatggcaagtcagagtgactgagctattttcagagaaaattgtacaccagacaatcagataaggagggtattatagtcaggaaaacactggttttagaaccagatcgtctgatttaaatagaagatatttacttaatggcacaagtatgtctcagcagctatataaacagtctgccttgcttttcttgcctctaaaatgggtagaataatatccatcttatggagttgttagtagaacttgtaaattataggtaagttgtctaacatataacaggcacacaacagttactagtccaaccaacatcatcata

SEQ ID NO: 39769 - DNA, 817 bp, Bovine  19866880754297
  misc_feature (1)..(1): n is a, c, g, or t
nttttctttccccatggacatattttaaatgtgtattatgttagatgactgctggaaaaaatgacaagtgtctgttttcattagactcccccaagtgcatggatctaactgacagcctttccgagacatggaggaacttccagcttcagggtttccatagaaacgtgtccccactgctaggatggcactctagctccagctcaagtcatcgttcacagaaacccacattccagacactctgttaagttatccaggaatttcaatatccaaaaggttaacaaatccaattttccaagtaggtaaaatgttctgctttgcaggctaagcttccacttcagagctccaagaattctttgttcaaattttgtttattccagtctggctctgtagcatactgattgtatattttaaagctaggaggtttaaattgtcctggttctctctccacctctctccaaaggaataacattgtacccttcctctcttctgggaggtattgcttaccactttaatcatctaagatgagcatagccacatcaataaactccaggttcacaagtttgcaggtaaagtggaatgaagagagaggaggcatggttaccacaagggcacttggcccaggaagtggctggtggcggctgcagcccagtccactctccactcaccatgccagtctgtggggctccagagtgatgcctttttctaagacaggtatacagcctaaccatatgtaacctacttagcacacattatttcacttaatcctcagagcctgatgacagagttcttattaatcctaaattatattgagcaaaat

SEQ ID NO: 39770 - DNA, 4186 bp, Bovine  19866880758468
  misc_feature (1)..(1): n is a, c, g, or t
nacgggggagcctggtgggctgcctctctggggtcgcacagagtcggacacgactgaagcgactcagcagcagcaacagcagtgttgttccccaggtaccatagaaaggcctcatggtttcttttgcagaatacaccaaaaaagcctgtctactgtaaaccctaatccatgctctggaaacatggggaaaagagatcagaaaccaaactaaaatcagaaacttgcctttcttgttactcttccctccatttctgaaaacactgtaagtgttttgtgtattgtcaacacaatgctttgacatatacatatagtgaaataatcagcacgataagtttagttggcacattcactgccttacatagttacatcatgtgtgtatgtatgtgtaatgagaacttttaagatctactatctcagctacttcacatatatgatatagtattgctaactacagtcactatgctatatattacatgcgcagggcttatttttgactgcaagtttattcccgttgactctcttccctcacctccaaccccctccctttgtttctgacagctagcatcctccatctgtttctatgaatgtgtttttttagattccacatataagtgattaaagagtagttgtcgtctctgacttattttatttagcataatgccctcaagatacaaccgtgttgtcataaatggctagatttgtttcctttttatgctacatgtgtatatgtggcacatcttcctgatgccctcatccatcgatggacgcttaggtcacttctccatttgcttttgggtctctggactacggagtccctcggaccttttggtttaactcagtcatgcattcatttctacaaaggttcattgtgccaaactttctcctggtggtggtacaacaggaaaaactgcaagtctcctaccctcagaagtcacagtcgtgcagggctgtggattgtaagaacctactgtagcaataggtttattgtggcaaaatgagtcctatgccgaggcaagtgcaaggtgttacgggaggagatagaagggtcacctcacacggcctaaattattaagatactgctgtttggaaacataactttcattcttacacctttagcaattttttaacttcagaaattgggagcatctggaagggtgaaagatgattggaaaagagaccatcaccctccagtcagagttgggtgaaccgctgagctggctcagactacctctgctggtgctgctgctaagtcgcttcagtcgtgtccgactctgtgcaaccccatagatggcaggacagtcctaaatgggacgcagtctagaatcttgacgctaaatattttgcagggggatcaatcttgaaatgaaaaaaaaaaggccccatattttccattctcatccacacattctcatctcctccccaaaaatgccaatctccactttattcctcatggtcttagaatagccaggattatgtcaaccactgtgttcaggaatttcaaagactggatatcatttaatcctcctgacagtgctctgaaggagttatatcttcacttatagataaataaactgagataggtagcagtttgttaacttacctaaggccacactacttaaaaatgactgtacattcttttacaaaagcctaggaaccattgggctagcatgggttagtgtttgtgagcaaggggttttccctaataggtatgggggaaacaccaggacccctggggtattggtggtaataggcaggaaggtgtagtgacatggcagtactaaatttatttctatcaggagcaaatggaaccagacctgccatgcacatgagaggaaagaggggtggagaggacagtgaaagccaagaagatgagggggcttggagacatgtttgtggcaggagtccagactcaaccaatacctgcgtacaaccagacttggacacatctggggtgtctggttggaaggctgtccttctatctgttgaggtccactgaagacccattctaagctcacctgcctggtaaggagtctctgaacagacaaccaagccttcctagaaatttgttagaaaagttagatatgacactaacttgaacttcttatcctggcattggcacaggttgtagtccatagaccgtaagttgccagtgcccaagctttgtgagacagaatccagtgtctccttaccggtgatgcccctggttgatcactgcctgataatcgtactccctttctgcaaaatgttatcccatggtcaagattctttctttctgaacaagaggagaatcagccccttctgctttgccagagacactgcttttggggtcctctgttggttccttgatgtgaccctgaagacagagatttcttgtgcaactagatactttaaactctgacatgtttcccaataatcccattctaaatctttaatctggttgcgtagccaaagaatcacttaacagttgaaagtacttgcctggaaagactcacagtagggctttgggtctatgcctcacctagtgtcataaggatacaaagatcagagtgagacaaggagaaacagagtcatcattcttactcttaaatgggtgaacactcctgctgaactcccaggctattgatcctctacatgggcactggagaagtttcgtgaagtccttttccagggaaattttgagattccttgttatgcaaagaatgtagtcccaagccaagaatactgtccaggctacttagaattcaagcctttctattatcagctaatgttgttttaaaattcaaaaccatttttctagcctctgctcttctccagtctccttctgcttcctctgatgcggtgtcccccaaatacttgcttgttcctgactgtgtccttcaggcttcgagcctctaatcattgttcatgtggttctcactgcttgaaaggtcctatgtatttcttgaaatttcttgaaactttattccatttcttaaaattgccattccttcagagaccaggttttacagtaaaactgtcttttatgcctcccaggagaataaaagacatcaagtcttttattgtcataaatctctgcaacaagcctttattatcccccttcttatggtttgcttttgactctactgagcctttctcactagatcaggagcttctggagggcaggggcaatatgtaattttgtatcctgcaatgcagatcacagtgtcagccctgaacataataattcaatacatgtcttggggtggtaaccacaacctactacctggctcttgtcagacatcttcctagactgaagctgagagggtggtgagaaagataatgggctttagatttcgaaaggctctgcaatcctggtgcaagctcttactggtttcatgctacttatttctcagagccctcaatttcctcctgtgttggagcaggattataaatatgtgatgagagagaatgctagaatctagtgtctgaatactgaatccctgtcctgatgtgtccctccacatgggggaacgatgtatgcatggagtgttgcgggaaacacagttttgttttagaggctctagctccagatgctcacatggttcctactcccctgacctgattggcccttatgttgactaaacagggtggctgttatctcatttcaagatcagcatgtaaaggcattcttcagaggctcattgcatagacatctttctctaaatctccctactggtgacccttcactctcccaagaaaggggcagagggtagccatgggtcccatcatagatactggatgcagaagataagaccccccccacccctaacaagaaaaggagagtgttctgcagccagattctgtttaggatcttctcagttttcccagaaaagttcctaacccctgcccacaccagcctgtttgactaactgtatgacattttgttttctaccagtttcaaagcttccctttgttagtgaggtagtagctgtctatgtgtttgggggataaatcaattgttaaaacaatatcatcataacctaggttaggcagatatagagtggaaaacaacaaaataaaaagaaagaatgtactgaaattggtgtcaggttttgcctcttatcaaccgtagcacattttaggttcaactataaaatagagccaagactatctaccacctaggggaggtagagcatcaagtaagaca

SEQ ID NO: 39771 - DNA, 1430 bp, Bovine  19866881208065
  misc_feature (1)..(1): n is a, c, g, or t
nctttttcacaaccattggtcttttgttgtgactctggtctccctggacttgaaggctgcaagttctcctccctctgtcttagtctgtgccccaaccctctcctgaagattcaaagaccaaaaatggtcactaccttgccctggagatggaacctcagaatttatatggttgacgcctttcaagacaggacttagacagtttaatatttagacaggacttctctgaaagggcttccctggtagcccagatggtaaagaatttgccttaatgcaggagaccccagtttgaatcctgaatcaggaagattctctggagaagggagtggctacccattccagtattcttgcctggagaattccatggacagaggaccctggagggctatagtccattgggtcacaaagaatcagacacaactgaacgactaacactttcactttctctgaaaagggggtgcttgaaccgagttcttttagatatatgtctatggtcaacccactgtgtcctgaaacctccagagaacagtatccctgccactcaggaaaggcatcagtcaagtggaagatgctgggaaatgctccaagtgagctccaatactccagggaggtgtcaaggagctccctggacctagagctctcaacagtgagagcaggaagcaaggggtcttctgggctgtggcatttctgaaggatggtgtgaccctgttctcagaagccccaagatcctgtccataagtgattagaggaagcaggtctcttgtgtctacctccacatggggggatataaatataaatggcaccagtgttaggtggcagggggcaaaaccatcattcaactgctgattatgtggaaatcaagtgctattttctaatatgaaaaattacaggttgataatgtgaccccaatggaaacaaaatatagtggctgatcacatctgtcatttaaatccttgtgtcagcagggaatccccatgctgagggttaaaatatgatggcttgaaaggggagacattaaagcataaatataaggtatttgtgttttactttatggaaattcttgaccatttagctgtttggtaattgctaggcacagctgagtaaatatacagtgagtttcaagtctttcaatgttaagagaaaggaaccatatatataagtaaaacttttccttacaacaactcttgacaccgaggtttgccgttccttctagctgtgacttggaggtcagctagagtgttgtgaaatgtcagaactgccaagcattctctttaatttctaattcagaaatgttggccaaagtgatgagaaatagaacactagatctcactgagcactcttatttttttgttccctcaaccccctgatctttcctctctgagcagactgggcatctctacaaataaatgcatccacccctccttttctcccct

SEQ ID NO: 39772 - DNA, 1966 bp, Bovine  19866881230102
  misc_feature (1)..(1): n is a, c, g, or t
ncttgccgttttgtgcctctggacctttgcacacaccgtgctttacgaccaggagtcaaacctcaccttccactcttctgaccaagtcttccctcatccttcagatgtcatgttaaatgtcactttcccagataggctttatctgtcccaatagaccaggccatatctcctgtgattggttctttctctataccagacttcttttgtataggttatcacaaggaaaaacaaagcagtcgtgaggaggccaagggatccaactggcatccaataaatacgcatacaatggttcaacttctaggagtcacggtcaaagtaaaccatagggggcaacttccaattaaagaagctaggatagacctttgggcaaacttatttttgtcttcttgttctgtgaatatgctcatactctaaggtgacagaatttaaaatattgtattttcaaccaaattctgctagattatatgcagctatagctatagatatattcttctgcctttaagataatttcccggcatggatctatttcaaattcctggctcttcttctttacctttgttctgagaatctgtgacctcttaccagttaactcagttcctctcccctggtcttctttctgaatggctctgaacacatatcttagactttgacatctgtcctgtctcagctggcttctgacctgccaccatcctttctctgctggtccttaaatataagtgttcaggccttactttgtattctggggaagagttaaaatctccagcaaagaaaaaaaaaaaaaacaccttatctttaggaggaatgaactttcgaatgtgaacgtgttaatcgctcagtcgtgtccgactctttgcgaccctatggaccatagtccgccagattcctctgtccatgtaatttttcagcaaaaaatactggagtcagatgccatgccctcttccagggcatcttcctgacccagggattgaacccacgtctattatgtctcctgcgttggcaggtgggttttttgggaataagtagctttatttctctacaatgaggcagacactttacttttgaatttaataaccagagctccaaacccacctagagcaagagagtcttgatgatgagttcagaggatggcacaggaagcttcaattccctttggcctaaattgaaaattaatctcaatgatgaaggatgggcctgggtctggagtttcaagtttgatgtctccgtctctgggtaaagacagatggtttgttcttaggatgccagcagattcatatcccaggcctgctcccatttcctgatgtctgtaacttcaaaagatgagaagcctcagccagtgtcatctctgaagcaacatatgctttctgagggaaattatggcagctgacatcagggactttactgctacctctgaggactggtagtgtgtatggaaatgtgcttaccttaccctgtaagaattgctacccaatggctcctttgggctttcacagctcattatcacctcgttagacaggactgcagggtcaaactctggcaccaaaaatccactacaggtaggtccttagtggcatgactatttgtgctctccttttcagaatcccatttacatgctaattaccttttgtgcatctaagcacgtttaagacacttacctgcatatagtagtccctctctccttcctccttgagctccacttctgttgcattactataccgctgagaagaaatcatactcatgggcctttgtagcccagaatgggaggccctcctgtttcaaaactcaagaagccatgttcactcatttagtttccagagttgaggagcgaggacagaactgcctgcattcctcaacataaaagagggttttttccctgcctgactcattttgcagggcaatatggaaatcggctgtctgacattcaatacggagatcaagtacttccgtctatccaaatgggctccaaagt

SEQ ID NO: 39773 - DNA, 1791 bp, Bovine  19866880538329
  misc_feature (1)..(1): n is a, c, g, or t
natgaaatctgttctgaagcatgtctccaaagttgtcaccgtgctcaactaattagtcaaacgtttccatctgcctcgcggctcaccacacttttcatattaattttttatgcaaatatgattctggggaagaatgatgtcaagcagaatggtaggtacctcactgcagccagaacaagatacatgcaatctgcaaaatctccagaaaggtcaagttgaactaagcatttttatttgggctcccctgaggcttaaaaataactttaattaaagtcatgaaaatgtctgagagatatatatataatatatataatggagatattgacataacccccccactataatcttaactgtataagaagctggccaaaaaaccaatcattcaaagcacagttcaattaatttctcattccttcttctttgattcaccctcattttttgcttagccatgtaattttattctttctgtctttatattatttgcttccttcttttttaaaaatctaagttatctttcaataacaaattccattgtatccgtgacctcgaggatgataaggcagtagattaaatcccgggagtagcttgaaatgtcagggatgacttgaaagaaagggtcaattgtctagtattaattcagtaataactggagaaacatgactcttattgcctccttccaggcagaactatctgggatctgatgaagttcaacaccactgcaggggaaaggaaagcaaatcttggatacgggccaattctgactccagtactgaccccatattcaaattctagctacagataggtctttgctgggatgaaaatgagacccagggttctgatcatttcttttcctctgtatcagggagctaatgctgcatacatagcatgccaacacttaatgcctcaaaacaacagtcatttattaaagatctgggggtctaccccatggctctgctggtctgggctgggctccaccacgtgtcaccactatgcggtcacctggtgggtcgcctatgaactcactggtctaggttggcctcgctttctgttcattcagctgcctacagagccgaccttgtttctggggagactcacaaagatggtatggcagaaactgttggctccctgcctcataccctaggatcccttcagttggtgggttccccgagcccacccccttgggtgagttgtactttgttgctgaggagtggccccagggaatcttctcaggggtgcccttgagctcctggagctggcagttgcaagagttacatcctccttttttgttcctgactactctgtgcagcttgcatgatctaagtgctcaaccaaggacagaactcagggctagcaacgaaagtacagagtcctactcaccagactggacaaggaattcccgagtgacagggaattcccgaattacaccctcctaaccgcttctacccaaagcatgaaaactgagctgccttactcaatggagataaactccggggcatcattaatacttcaggacagccctcggagtcaggatgaagcaggcagtttgccggaaattgaatctttgttgggtctcttcccagctccttcctgctctcctgactccctcctgggagcactccctcaagagactgttggctcacgtaccctcacctcaggggctgctccaaagagaccgtctaactccaactgcctacccagatcatagagcagccctgctcatctgtgggctggacatatggcttcttcccataagttcacatgaaggggaagtttcctagctgataagagttt

SEQ ID NO: 39774 - DNA, 1415 bp, Bovine  19866880625428
  misc_feature (1)..(1): n is a, c, g, or t
ntggattgattaccttgacacttgaggaatggatgggagctagtgggcaaatgtagatattcttttagctcagagcatagggcttcagacatccaaataggagaaaagttaaataaaaaggcaggaatgcagacaggtgcatgttagtgttaatgggagagcacaggagtacttttctgaatgtttccattttcattatggcatggaaagtatggccatcatcggagagtaacgatgaggagagaggtgtagaagcttagagatgagagggtacagaatggttttctagaaagttgggagcataaatgaacgggataaatataagcaccacattgtggtaagatacacttgacgctaatgaccatgaatgaatgagacccatctgtatgctatatatttttctccagccacattcagctataggtgagaaggtacaggggagggtgctctagaatgttatataaatggaatcatgtagcatgaactctttttttgtctggcttctttccacaaaatactccacaaaatataagattcatcaatattggtgcatgtatcacttttatggcttttctttaattctggcctttcagttcttagcaagagctctagaggtcaagttcattgtcaatgtgtaaattaaacaattatacagatacaaggacagaaggacaagttaaaggtgagaaattccaaagaggttgaaactcaactagggtaaaccttgccatgagaaaagaaggaatccttcaaggtcaaccccagcagaatctccaggggtaaatcagagcacatgcttcacaccaaaaccaccaccgccaccaagaaatctaatttttttcaaagcaaccttcatgaattgcgcatatgctaatatttgagaaccattgctgtgaactctaaagagagtgtagacaaggggcttttattaatggagttgcccacaggctgcttaacaaaagctcaggttttgaaatttggctacagggattacgacctggaaggtctgggtttgatgtaacagtgagtttaagtcagcactttttccacctcttcattgaaagctgtctgccctagggtaaaaacgtttttgcatatgacttaagagagcattttttaacctgaaggattaaagaaaaagatgggccaaacaagaacagtactgacttcttttaaagcataaggtcaaagctgattattaaagccactctcaggggttccagggaggacagccttcaacaaagccacaggagccctctgttagcctctgtggtccgctgtgcttcaacaacaaaggccaacaaatacacccacaacggaaccactaggctctactgagccctatgacaataaaagagcaggagtctcaaatactgtcaaaattctttgtgaaacaccatggctgcccttctctg

SEQ ID NO: 39775 - DNA, 780 bp, Bovine  19866880703674
  misc_feature (1)..(1): n is a, c, g, or t
nagtactttataaggctggagcattagatgcataattctcatttacttattagcttggaatgaaatgttttactgctgaagaagtatttatgcacatatattttgaaagtgaatactactgaatcttgaatagctctagaaatgtgaaatcagagaaatatttgctttaccattgtccaaaaatttagatggctactttgtgctcaaaaatacagcatagcattccaatgcagaatataggtgtttaaagagccaaataactgctgacaatggcaagattttgagttgaagttacttcgtaaacattcaaattcagtggaaagtcatattaaataaagtcacttggagtctgatgcttccttgtaaccccattatatgggcacagaaaggtcagtctcctttcaaagtgggatggcatctgagcagtattaactgcccacagaaccagggtctgtgcatcttgcaatcaacaataaactgaaaagttcagcacaactgcccaccttactgcataaaatatcaacacaaagatttacccaatctttgtatatcctcaaatcaatacaaagatttataaacaaatatttttgtatcttgaaatcaacactataggggaaaagttcctcagtgatcatccacttttaatgtctctctctcaaatatcattttgaatgtcaaggaaaggaataacgttgcttttaaaggacacacctagagctcattaaatcactttcagtgacaatccctttagacgtccttctccatactaacaggatacaa

SEQ ID NO: 39776 - DNA, 1500 bp, Bovine  19866880713577
  misc_feature (1)..(1): n is a, c, g, or t
naaaatctgcctgcagtgcggagacccaggtttgatccctgggtccggaagatcccctggagaagggaatggcagcccattccaggattcttgcctggagcatcccatggacagaccatgtagttgcaaagtgtcagacacgactgagcaaccaacacgttcgttttctttcatggggttagtggctctgctgcatgtggaatcatcctggaccagggattaaactgctgtcccctgcactgcaaggtggattcttaaccactggaccaccagggaagcctgactcctcttcttgatggaagatgcaggagagacacatgcaaagaccattgagggacttccctggttgtccagaggttaaggttctgaactcagcactcccaatgaggggtgtcttggatttgatccctagtcagggaactagatcccatatcccataactaagagtttgcatgctgcaactaaggatcccatatgctgcaactaagaccccgaaccaccaaataaataaattaattaaatattaaaaaccaaaccaacaaagagcgtggatgggggaagcacattcaattgtggccatttttataatcaaccacactgaggcccccaggggtccagtgctgggcctgaggtcacaaaagaataataatagatctggtctgggacatgggacccttgaccctcagaccaggactgggccttggttcatttcttggattttctatatatgctttgttttgtgtgcctcatctttctcagaaaggtggagagacacgatgatttctctgacttctccagctctcagtgtaaaggatgagcttggtggttgcccttgagtggggtgcaggggaaggggtagaaacatggccatggatgatctggaggggcccaggcagaattcctgaaagatgccccttttgcaaaggactgttggaaaaccagaaattaaggcacactcgaccaacataaggtatttaccatctagctcaaccttttaaaaaaaagttcttaaaagactgagtttggaaagaatagaatttttccttccaagtttttcaaatttacaatccacccactatcttttcctttcataaatatgatgtacatgaggggagtgatctaaatatcttcctagttccagaagcttgacagtattttcacattgatctcctgttagataaatcaagccttgcggatctgcaaaatgcaagaccaataaaaatcccagtggaaaagggctgctgcttctgcgttttcagttttggggccgtgaatctccgagatgacattcctgctgatggaaacgcctcagagcagctacctcgctactgtcaggccaaatttgtgtgttgagccagattgctggctcacaagcccttactggtgaccataaacagaaactgatagaaagaaaagtcttctaggggaaagcaccttctagaagatgacaatgatgacgaacatggagatgatgatgaagagctgagctggggagtgggg

SEQ ID NO: 39777 - DNA, 1113 bp, Bovine  19866880716706
  misc_feature (1)..(1): n is a, c, g, or t
ncctgacatatgaaaaagcccaagctagcctgctagaggatgagagactgcacagggcctaaacaaagaggtctacagaggtgactgtgaacagctagcccccagccaagccaccagttgaccacaaacatgccaactaaggccagaggaactgcccaaataagccaagaatcctgtgctaaataaatatgctttgctacagagtagaacacaggagatgcttgtttgatactgcctgtaaatcaaacccagcaatgtacttagtatcataacagaggaagaaggaaagagttgtaaggagttagcttccttcttcctcaactacttttgatcttaacactacagtctaaagtaatgagtgctgtgtccttaaagacgcacctttctacaaaggagttaaaacattctgataaaggagaaagatcagtgtgtgtgtgtgtgtgtgtttcttaaacaatattaattccctctatgtaccttccctaggctgagttgcaaggctacccaagttggattgagcaacaagtcctcttcgtttctggatctggtgatgggtggtcactgatgctgccaggaaagtaactgtataggcattctgaccctgagaggtaatattctgtgaactgcctgatgtgcccaagttaacagtgttatccaacgagctattttctgctctaggcattagctttagatttgcagctctggtttagcgaagccagcctccttgtgtcctctgagcttcctctatttggtaagtctataaataaaagtcagtttctcccgcccacatttctctgtgttgccatcaaaatctagcagccaattgaacctttctcctagactcttgctttttgctataacagtgcatctccgactttaatgtacctaggaatcacctagggatcttgctaatctgcagattctgactcagtaggactgggatcgggaccaagaatttgcatttctaacaagtccccaggtgatgatgctgctcacagcaaaacgttttgaatattaagtggctacaggacaaatgaactcaatgctagtaaccaatggctggttgatggataaccagagttagagagtgcctgatctcagaatcttcctatt

SEQ ID NO: 39778 - DNA, 886 bp, Bovine  19866880818100
  misc_feature (1)..(1): n is a, c, g, or t
naatcgatgggtgggaagagagagaaaataagctgaatgcctttcaaaagacataatttaaaagaaaaaaaaaacagcttgagtaactgtctactgaaacatgtaattttttttccataagagacagtaaattataactgaaaattttaagtgacccgttcagactcttgaatattccataaatataggattaaagtcacagatgtgagcttctgttgagtaagatattttactctttaatttataggaaactttgtccaactaagaacagtctcccgcgtatctctgcattcttttgattttcatagatgcactagcagctgaatttcttgggggtaagggcagttttaaggtagcaaaaaaaagctattgttcagttgaattgcagtatcatttaggtatctttttgttccacgtagaaaaccccaatcatacaggctggtgtgatatcagaatttacttaatttggcttaagtatctgtaaagtccaggaggagagttggcttgattcagatgtccacaccatcatgagggctgtggaactttgcttctgcaattctggtggttctgtccttgttttgagactggcttcaagcagttcttccatctacttccttgttgagaaagagaagtgagacagacagagtaatagtcaatcttgacatttcactctggctccagtagactgattataaaaaggatcccagttctccacttctccctgaaaccatgccccttgcaatgtgagcctatagttcctcccatcatgaagtggagtctatatctctatttcttgaatttgggccggcttcctgatttgctttagacaacagaataggaataagtgacaaggttagttctgagcgtgagcctcatagaaacattg

SEQ ID NO: 39779 - DNA, 1158 bp, Bovine  19866880826536
  misc_feature (1)..(1): n is a, c, g, or t
ncagttgtaactactggcatcctgaccaatggagttaaaaatcagagtaggcaagaaagaggcagaggctgaactgctacaagggaggaagacacatgtctctttaggaggctgtgggcatctgaggccagtgctgaaacttggtttgaaagctgcccaagctccgaggcctttaggtagtgagattaacaagcttagctgtataaatcaaacctacattattagaaaagtttgacatttgctaaattacctatgaaaacttaccctggttgttaagaagaacccaaaaaaagtatattcatttccaagctaaatgtcaagctcccttaaagatctaacacctacagatgagggaaggggcaggggaggaaatgccatcaaattaagggcaataaactttccagacatcttcatctccataactgctcagagatgtctcctggcatttcttactgggtaattctgtctttgtattatgtctgtctatgggcaactcattttttaaaggtatgctcacagagcagcatttaaaagctaaattcaaaccctggaagacagacgttacaaaagtgactcagagttattttatttacagacatcacccagaggtatactagcagggaaagccaccaaagcaatgattccaaaatactaaaccagcagttctagatctgtgagacttgggcaaatagcccaaacaactttttacaaaactagaatgaagaagcccccaccccatatgcttcaatgaatcaattattcattaccaaactgtaacatttatcaggaggaatatgggacaagcaaacatacttgaaatacatcactgaattacttcaggcaatatttccaagtcttacgataatctgtaagaaaatttgcctgctaaagtacgtcatataaaagtacatcagttttacataagaatgattattcatggacatttataaataacagctatactgtttatctacagccagaaaatgcatacatgtgtaatgatatacatgtacatacatatacagtgagtctgttttatgcaaatatatgaaaaggtgcctcaaaatacaaccaattttggcaccagccttagacttacatgagaacctccatttattccctaatgtatcagctaaggtagtgagaactgtgggttgg

SEQ ID NO: 39780 - DNA, 1868 bp, Bovine  19866880832869
  misc_feature (1)..(1): n is a, c, g, or t
ncatcatcaactcccggagttcactcaaactcatgtccattgagtcagtgatgccatccaaccatctcatcctctgtcattcccttctcctcctgccttcaatctttcccagcatcagggtcttttcatatgagtcagctcttcacatcaggtggccaaagtattggagtttcactttcagcagcagtccttccaaaggatattcaggactaaattcctttaggatagactagttggatctccttgcgtccaagggactctcaagagtcttctccaacaccacagttcaaaagcatcaattctttcatgctcagctttctttacagtccaactctcacatccatagatgactaatggaaaaaccatagctttgacagatagacctttgttggcaaaataatgtctctgctttttaatatgctatctaggttggtcataacttttcttccaaggagtaagggtggctatgggagtataattctcacatccagaacatgcagtgaattccccgattatcacccactccaagcacaaacaacattccctggctatttacatacaatgacacacattggcttgtatactttttaatataagtaccaattttattttatttttaaaagatttttttgatgtagacattttttaaatcgttattgcatttattactacattgccagtgttttatgttttggttttttggccacaaggcatgtgggatctcagttccctgatcaggaatcgaatgtacacctgccccctgcatcggaagaagtgttaaccactggactatcagggaagtccctgtaagtaccaattttaggattcttatactctttggttaattcagcagcatagatttacagtacacaatatattttcaaatttcctcctatttaccatataaatagcattcatgggatctgtgactgaattgctgtttcctaactcttattgacattttggagaaggataatattggcatattctattgccaacttgcatcactttttcttccattatgacatgtaaacataaaaaataatgctgttagttcaacaaaagaccccattgtcttatgctttgcatctgcttcctccccatttcctgtctgttgcatttaatctgcctgcaaacttcacgcctggaagaagccaatacatcttgtcaaattatttgccggggtcaattctgtattcaaactgccttttcatccgccttaaattttacaaaaagagtggcttctttctgtttcaatttccctaaagcattaccactcagtttttgcatttgacaatcctggattaataactacacaaggtgcctgtgttctccaagcctaccgctctcaaatgtaaaattacatttttttttcaaaacggatgtgtatagttgatccagtgacacataacaaattacatagataaatgaaaaattaaggtacattatttcaaagaatatatgcctttctctgataatagtaacagttttatgtattcaacatattttagctgaaccgaaggtgaaatgtgcattgcatggaaatcatcctctgtccccagtcagcaatatttctttggcatacttcatgaattgtaactcactggcttatgagtaaggccatgaggactattatggcctgagcccatccacctgctgggatgttttggggaagagactcttctcacttcaaaaggtgccctggctacttctgggagtttttcatggcactgtgagatgggcactcaaagcctttatgttcctgctcctcacctttctcatgtaccatcttgggggttttctcttttcccagacatcctcttagaataacctactctaatatcagcccccactgctggttgaggcta

SEQ ID NO: 39781 - DNA, 683 bp, Bovine  19866880839576
  misc_feature (1)..(1): n is a, c, g, or t
nggttttctatgttagggagggggtgttacaatgctgtgaactaatgaattgcctctgtttatagaaatgcggtgatgttcaataatgatctgatggcagatgtacattttgtggttgggccaccaggtgggactcagcggttgccaggacacaaagtaagcaacagctgcattactggtttcgccctgagctctccacagagggaccctctccctgatcccggaacagggctgggcagctcgcaggcagtgcttggtttccccccatcacagagtaggcacaacctttccagagggccctggccacgcttgctttttttttttttgcctttgtttccttctaccctgctttatatcccccacaaaagcatgccctcttcactccccagtcatgggaagttgttgtgataggtttggaaagtcatatgctgacccttctcctagaaatcagttagatatgcttttatttattttataatgagggaccttgtgtattaatctgtgaaagccttgataattagcagcacagagactagtttgcatgaacttctgtcttttgctttcacagccagatcctctggaccttggctttgtcagtagagcaggtgttaggtactctgtgttcactaaagctgatcactttagagtgtttttctggaataatttgctgaaaatgttttcaa

SEQ ID NO: 39782 - DNA, 1605 bp, Bovine  19866880877660
  misc_feature (1)..(1): n is a, c, g, or t
ntttaattttattttatttttaacctttaccaatattgtattggttctgccatatatcaaaatgaaaaagaattacaaaagcactggaagaagctttcaaatttgcatatactataaatctctgaataaattagaaattagcaaacactctcaaattccttgtatgcttaaaatactattttatctccattttactcatacatatcaaatagattatgcatactttgtgtgagatatatgacctaagagtgtcctaatttatcaatagaactactcattctactaacatgataactttgtgctcatactatttttaaggtatgaatattattggtcttgaaaataaaaatatacatcaacttccctttctcagcctgttccccccgtgcaaaccacatttccctacagctagataacctacagggaactggaaaagttaaaaataaaataaggaggcaacactggcccagggttgatgagtcagtgattcaattgtcagtctccacctgtatcggaaaccactctggtaaattataaggcataaagtattcccatgttacgcctctttttaatcaaaatttatttcctcagcctaaaacgcatcagttccaaggtgtgatggttattgtccattttgcctatgcagttctgtctcccattctctgccctgattggtaaccctaggaggtctttccctctggacaactgctcccacccacttggcagctggctttcccttgagctgggccactaggaagtactggcaggagatgagaggacggcagatgataaaggtcagaggaattctccccccccttcctgcttttatacctggtctcctccatctacagcttctctccagctctccatggactccaggacacctagtcccccataggtggtaatgacctcccactgctggtgctctcgtttgcatctttatccctccattgttccctgagtcctacttacatttctgcaattaatcttcccaccaatgaccctttggttgaactattttgatgagttgttactgggagggaccttcacagatacaatagatttcagaaagggtgtagcttaaatcttataggcagtgcttttcttagatggtatttctactgtgagtccttctaccccacagttagacagtctattgatgtcccttgattggtgagattttctgatgactcagttcagttcagtcgctcagtcgtgtccaactccatgcgaccccatggactgcagcactccaggcttccctgtccatcaccaacttccagaccttgctcaaactcatgtccattgagtcagtgatgccaagtctttctgatgactaagaagatatatttattttaaaattactgtggctaaaggtcacttttacactgcccttaaaatatgatagatttagtccagtagttttcactttcagctgagtagttgtttaataccaatgatggtaagcaaagttctaagatggtcctaagattttcaatcctagtttacatattctgcataatctctaggactgtgagtttgatggctttcatttttatgattactttttataaccacagttgactttaaggaaggggagataat

SEQ ID NO: 39783 - DNA, 1268 bp, Bovine  19866880904025
  misc_feature (1)..(1): n is a, c, g, or t
nacgaatgacctacaaccaaacccaaaatctgaatggagttcagaaacttaacactgagaaaagaaaaccagaaaagatatacagtgtatgattacatttatagaaaatctaaaaataggcaaaaaaaaccaatactgtcagaaacaagtaaggtgttaccctggggaattgtgcagtggtgttcaaaatgggtatgtggtgggcttttgggatgatggtcatgctctgcgtcttggtctgagtgctagttacatggatgcttctaggctgcgaaaattaattgctttgcacaattatgatctgcatacttttccatgcgtatgttatacttcaataacatttttaaaatttgatattaaacactgtcatagaaatatgatgtgatatgatgtgataaaaatttgcttgtcttacaaatagcaacaccgtatggttttgataaaagagaaagtgttagttgctcagtcgtgtctgactccctgtgacaccatggactgtagcccaccaggttcctctaatcatggaattctccaggcaagaatgttggagtgggtagtcattcccttcaccaggggatcttctcaacccagggatcaaacccacgtctcctgcattgcaggggaagtctttaccatctgagccagcagggaagccttagtgtttgctatttgtaagacaaccagtgtttttttttctttttggtggctgctcgacttgcaggatataggatcttatttcccaggtaagggattgaacctgcacactcggcactgaaagtagagtcctaacctctggactgccagtgaattcccgacaaccaaatttttatttcagtacactatgttctctgaattttagcttcctaattttaaaaatgggaaaaatgatatctactccattcacagagttaatttgaaaatcaagtgagttaacaggtatgaaaaaaagaaactctgtaaactgtgaaaatgcatacacaaggaagacattcttgttgtaataaagcaaagagggttttaattttaatttttaaatgattttccactgttaaggataactctctttggcatatgacagtaattgtgttttagatcaagttttaaaaagcaggtttgtcaattatataatggtctttaatgtactcagattgttgcttttgtttcagaaaacagaaatttacatgatggcttgtaagtggcacattcaatttcacacactgagaatgccgaaaagcaaaaggtccgcatatagtgcaggaactcaaatt

SEQ ID NO: 39784 - DNA, 921 bp, Bovine  19866880926738
  misc_feature (1)..(1): n is a, c, g, or t
ntcatatcaacctatgattcttcatatatatgtcactgcctcactgtcaaacagcaatcaacaaggtgtcgacctattcctccaggccagaaagcaatttcgcttaatgatcctggcttgcaactaattttatttaatcactgtacattgttttacagttgaatcatctgaaatgctcctcctagcactggaatcatgacagacatttatgaactaaatgccccatgagttggtaatgctgaagcaagctctttgacccctcaggccacctcttcagatctggcctagataataaattgctctattttcctgaggagaccacaagttgtgttcaaaacccaatgtgtctgggcttccacctgaatgactgagcccgaagttcattttctactttcactgagttgctaatgaagttacaactaatttttatgtcttcttactgggtactgtacatttttctcattttaatttgaatcctcctcaattggaactttccatcttttaaaaaatctttaaaaaacggtagagaaagacactgaggttttgttaaagaagtttttagtgcatgaaaattattacccattttaatttcctctcctgtttggaaaatttatccatgtgcttcctaggagtcagattttctccactctatggagtgatgtagttcaatcgctcagtcatgtctgagtgattgcgaccccatggactgcagcacatcaggcttccctgtttatcaccgactcctggagcttgctcaaactcatatccattgagtcagtgatgccatccaaccatttcatcttctgtcatccccttctcctctgccttcaatctttcctagcatcaggatcttttccaatgagtcagttcttcgcatcaggggccaaagtatgggagtttcagcttcagcatcagtccttc

SEQ ID NO: 39785 - DNA, 758 bp, Bovine  19866880954613
  misc_feature (1)..(1): n is a, c, g, or t
nacggttctactttctgggattgcacttgaagattcccctctagcctttgaatgaactttctgatatttatttttaattttcaaggactctatgttgttttctgatttttcttttgttatacagcattctattcctatctcctaaatgccacgttttcccttatctatctgcatgtatgaaacatagaatttttaaggatttttatcactcattttataatttttttagaaacagccagaaacagataatggggtaatcctattgtatatagaaatgaaggagtgaaagagtctttaatttttcattttatatccattggtattatttgactgccttatatgttatttttataatgatattaatagcaataatgatgaggaagaggagaataaagaagaaaagtcattagataagcaccttaacttttaaccaatacattatcatattcatgcagctcaagaaaaggactatccttaaaatcaccataggcccagacaaaaattcgggtttcatcagacaacttaatgtccctctgcattctatagcagttcttcaatgaataatttagtgtccctgtaatgagttctcctaaccagtgtgcctgtccatccttgtattatctattacagagagagactttgatgaaggaccttaatatgagcttttattcatctgtagtttggtaccttgagtcttgcagtcttgggtcccttcaactggtcaagcagcagtctaaagggtaaatctttcagttatc

SEQ ID NO: 39786 - DNA, 992 bp, Bovine  19866880979348
  misc_feature (1)..(1): n is a, c, g, or t
ncggccccggtagcgccactggttgctccggtaggcgcaggactggaagcggtggcagcgctgaggcaccagccccttgcgggccttgctcacgaactgcagctcgggcttcttggccgccgtgtaccagaggaagatgtcgttggtctcgttcagagtcaagacgccggactgtgcagcaccgttggcgaaatcgtccagggccatggtcgggatgcggatcaagtagagcgccttgcccagcaccttgcgcttgttctcaatgctcaaagccagatcctgtcgctggcattccacctcagcccagttgagagcggcctcgaagaccacaatttctttggcattcagagtttccctgcggaggatgctttccagggtttggaagtcgatgtcgcagaacccctcggacttgagcgctagctcggcctgggcgtcgatcacctcccagcagcgctgggtgaggtccggctcctcgaacaaacagctctgggacaggagcacacaggcgttcttggcactcaggctggtctccaggaaattgacgcaggccctggcgaggtgagggacgatgtactttttggcagcataaagagtggccaagaccgtgtcagcagccaagtcaatttcatcacaatagatgtatctgcaagaaagagtccggcgtgtaaatcgaattttcaccaaatgactgtgtccagcaagaaaagatgcagctactttcaagttagttccaagaaaatcatctttaagtgacagttattacaaaaatgattagacattacagcaacatctgaaatacattcataaatcatcaacacttcaatttagtagaaagtgtgtataattaaagacattaacttcatgtaattattctagcctctattttaaagctatgttccctgtcctctcaaagggtggggggggggggggcggaaattgaggattcgagaactgtttgagaaaggactagaatcaaagacagttagtattag

SEQ ID NO: 39787 - DNA, 1264 bp, Bovine  19866881042571
  misc_feature (1)..(1): n is a, c, g, or t
nacttaaagttttttttttcttttttttaggaatcttcactaaaactgctaaaagcttaccacaattacactcagagtaaaatccaaaactccttatgtcaagtgggcatcaatggttcttatactttttgacttcaggattcttatacttttgaatatttcaagaaacccagagagctcttgtttatgtaatatttactgaaatagaaatgaaaacaaagaaaaaatttaaatattttgtttaaaaataaatgttttgattgaagcttatgaagaaaatatggcctcacacagatagcagctgagcattttaatagtcttttgagataattgtggatattctctgatacctcattgaaacttgaatgataatttcttaaaagttgattgctgtgtggaatcaactgatgaaaccatcagtgaactttctgtattactcttatactaaaatccactggtttgctgtatactttgaatgaaccttttaccaacatgcatgattctttaatgtaattgcagtactattagaaaatattggttcactgagttatgcaaatctttaaaatgttgacgtgtttctttatacagtgttaaaaaactaatgtcaccaactgttcatcagaaatggtctttcagaagtcagtgacagtcttgggaggctatcaagctcatagtggcacaatcaagaattccaaaattccaacttttgctcgaagtttgaattttttcatttgcaataaatagtcagctcattgcattcatttttaagaaatgtcttttaaatacctaagtgtgaataagcatattttgcatattttctcaagtgcattggtgttccatgaactaagtggctggttcagttctcacacaattttttctttttcccatgccaaccattctgtttcagtttcaccagaagtgctttaagcatactttccacttcatcacataaactgttaagaaaatgtatactcaaggattgagatttaataaaatcaaaagtttttactgctgcatctcccagagattccccgtgagatggtccattgattatggcagaagaacacacagtagctaatctgccttcacacaagctgtttcatcagggttcctgagtcccccaagtcccccaagtatgagttggggaggcatgggggaagtcaagaccacttgacatgcctttcgggggatgttcactctggctgctgagggtccactggagtgaccatccaggtttaggaaccagcaacttcagctgtgaaag

SEQ ID NO: 39788 - DNA, 722 bp, Bovine  19866881045679
  misc_feature (1)..(1): n is a, c, g, or t
ngtcagtcagccagccagggcctcctgaggctctagggcttttctatttgccccgtcagcgcaggggaggagatggggcctctttcccattagtgttaatggaggcaatcacgtgaatccactacgtagcaatgtgtgtcctcttgtgttctgatatcttaatgcacgaaattgcatctctagggaaaggtttgcctcctcttaagtgctcccaattcccattaatgataatggaacagaaagaaatatacccatcattgctcaacagtggggggcaaaagtgaaagatgattaggtttggggagtgtcagtggaaacccttaggaactgcaagcataatctgaaatggcccctctttcatcatttgtagagatgtaggtggacctagagtctgtcttacagagtaagtaagtcagagagagaaaagcaaatatcacatgttaatgcctatatgtggaacgtagaaaaaagcgtacagatgaagctatttccaaggcaggaatagagatgcagacatagagaatggacatggagacacaggcatggtgggggcagaggagagcaggatgaattgagagagtagggccaacatatacacaccatcacctgtaaaatagatagctagtgggcacctgctgtccagcacagggagctcaccttggtgctttgtaatgacttggggggagggagaggtccaagagggaagggatatatgtgcacat

SEQ ID NO: 39789 - DNA, 979 bp, Bovine  19866881066293
  misc_feature (1)..(1): n is a, c, g, or t
naaaagctgacgttactcaagaaggtgagaagacagagtattgaaactccagccaacttttaagtccactgatctcagggttcattcaggcattttcctgatcacccttttatctcacatccagcctggtgttaagacagggcacccatttaaaacctttaattgagttaaaaataaagtggatttttaccagcatttgaaaagccatcaatgccagttaacccattgaccttggcctaggaaataacttgcttgtcttctacttgtggctgtgtgggtgtaaatatacaggaaacccatttaaggatatttgtttctatgactgatggatgtaactaagagatatgaaactgacagtgtggaaaatgtgtctcttttctcttttctgcactaaaacaaaaaagcaagcagaatttttcatctgaagatgagcgagagatttcataaagaaagaagttggagcatgtgatgtaaatacatgagattatcttttgtgcattttcaaccagagtcaaagaaatatattttcataaattagagcagatatctgattttaagcaagcattcttgtttaacatagagctagagagagatgggtatgcatttgatgggcagatgctgactcagcaactcatgtctcttggctcttattaataggatggggaatgggaggtacttggggctttcggaaggcaaaggctgagtcttggaaatgagtgaagggagcaaacaggagaagagaaagctaaaaatatggtgtagtttcagctgaagtccagcctcattgtaatcccacgagttgctatggaagtaaacgtgaccacaggcttctttcatctcgaggtaagagggctgggttttaccctgaatcagtcactcattggctgtcggtggattcttggaggtaggggaggaagtgtgtaatacatcaaatgaggagactcccatcagagtaatgccattccctagaagggggcag

SEQ ID NO: 39790 - DNA, 1215 bp, Bovine  19866881135058
  misc_feature (1)..(1): n is a, c, g, or t
nattccttcgaatgtaggggacttactgtaattggttggtggcattccaggaatcttgggccttagttcctgcagaagaaaaatatatcagtattttgctctgcatattcattgaggaggaactaggaccctggccaagggctgcactattatttcttgattgcccttccctttgtttctgtatcacctcccttctctgattagcaactctttgaatctgcctttttgaacagattcaaggtttggaaggtcacggaggctgaatgaagcatatttcctgcaaacaggaaatgaaggatttgtacttgagagggacccacagggttctgtttcgtttcaaggatggcaaactaaaaatatatatatttcattttttcccattagcatggttctgtttttacaaggatacatgtattttaaaattgggtagtggggtgcatttcctatttgggcaaattggtcgattcggtgttaatactttaagcatacaaatgcagactgcacaagtcatttaccatagaaacagagaaaaagtccatcttccaccaacttaaaataaaacaggctctatataaatatgcacaaccatatgacacacggtttctggggcacagtactacattttatttcctgtaaaaatgtcaatacagtcaacagagcactgttgggaagcacggctccctcctttctgtgctgggctcaggctggttggccagtatcttatccttgggtcagtccattttctcatttttctatttgttgaatgatggttgtagaaaggagcaaagtgcaaagacatttctaatatttgtcatttacttactttctatatcttagaaataaacactgacaaagtaatattgattttgttgattttgtccaacgcttttccaggaaaaataagtattagataggatgtgatattatgatttgtaataataaatatatattaatatctgggacttccttggtagtctagtggttaagattctgtgcttccaatgcaggcaggcaggttgggtcccttgttaggaaactaagatcccacatgtggcatggccaataagtaacttaaaaaaataaaattatatatatggtgtgatcactgacctagagccagacatcctggaacgtgaagtcaagtgggccttagaaagcatcactatgaacaaagctagtggaggtgatggaattccagttgagctattccaaatc

SEQ ID NO: 39791 - DNA, 1376 bp, Bovine  19866881155916
  misc_feature (1)..(1): n is a, c, g, or t
ntggagaaggatatggcatgcactccgtattcttgcctggagaattcctggacaaggaacctggcgagtgacagtccatgggatcacaaggaatcagacattactgagtgactaaacaacaacaaattctgataatttttacacacttcagcatttgagcctttgatttgtttctcctacaaaataaagctcaggaataaaagcaagtacttgcttttgttctgaattgttctcaaactgctttgatgtgtagagagtagaactctttttcataaaatcttttaaaaaataagttttactaactagagtttacaggtaataaattcatcaattttaactgtgtaggttggttagtatgatcttgtaatcaccaccgaagttgaaacaaagcacatttccatcatcccccaaagtttactcgtatcatacacacttttaaggaaagtatttagtgaagtaaaatatacacgcagaaaaaagcaccggcgatacttgcgtagctgatgaattttcacaaagtgtatctgtcattcaaatcaagaaacagaacatgactgacattccaggggtgcccacatgtcccctttccccagcggtaaccactaatctggctttcatcaccataaatcggttgtctgcttttgaactttaatgtaattgaagtattatgataaatattccactccatctggtttcttttgttaaacatcatccttgtgagattgtctcctattgttgcctgtagttgtagttcgtttattctcattgctactattgcattgtgtacatatgtctcgatgtatttatccagtctatttcctgatgaacatttgggttgtttccaggttttggttattaggaatagacctgctgtgaacgttctgacgcatgttggcttgcatttttcgttatctttgctttcgtttgtggacagtaggaatataagaatcaaacactgcccgttcattttgatcaaatttattagctggggcacttgccaaagacttttcagaggagaatttacctgatagaagattaggcctcaaacttacttttgttttattatatgagaaaaaaaaaaagagtgggtttcaagacttgagaggcatgttaccaagatggtcaaatgttgttcacattctgggctcggtaccagcctttgatccctttctccctcccatttttctttgcttttcccctcttccttccttcctttcaatcatttttagatggatatgaatttcaaagactgagttgaattgtcctcagttggggatttttttttttttttttttttcataaaagtgaagatgaagtcaagtgctttcaatttgctctaaatgacttcttttcctgggaaatagtttgggctttca

SEQ ID NO: 39792 - DNA, 1387 bp, Bovine  19866881157187
  misc_feature (1)..(1): n is a, c, g, or t
ncccttcctgtaagatcccattgtccaataaactatagatatatctgcccctgtctccaggctctttctctggtcttgagcctgggcaactgcaaggcttgcagggtgcagcccaactaagggatgaccattagatgctagaattctgcttagagatgtttcaattgaataaggaattcagaacgttgactacccagactgggtacacctctcagctttttcttctttgcccaaaggcaaaattaactccaggactttccaacaggacctcagctctaagaggcagaagactgcagtgtcagcactttctggcagcctttcaaccaggcttttacttctagccacgctatgataccctcttctatttttatttttaaagtcaaaatgtatgagattttttctctttgctgtctctattttgattttgaaaggtacacaaatatgtaacagcacctttttcttattcctaacatgcatagtttatattttaagagaagacaatcaaactaaacaataatgataaagacacacaggtatgtccatttgggaccagacacaccacctccctggaaactcccactcaccctggtttctatggaaggtctggcatcaatgagaaaggtacttaacactctgcttgtggggcaggggtgggggagcaagggccaagttatgtgctgatgtgcaggggcttgattcttagtgatttctccagcaactccaagatggattgtgtcttctatttttggattcacactgggaagccaattaaattaaagcgctattcatttcactatatttgtctccaggctgctcaaacagaaatgcaagtggcttctattgagtgagttttctgcctcaacgagaacaagattgtaacaccaaaccccgcgtacttcagagtcccacgtgccttaagggggagaaacacaaatcccaaccctggacgctacctgaaagctcctgtgaatgcaaatagatattatcctaaatgaaggcgtacttagcgtctatggccactcacgggtccttagaacagttgtcagaaatgagtctgcttactgatatggacataactgggagaaaggaagaagaaattctttttttccaacttcactcaggagagtgaagaaatgacagaaggtaaatacattgctctgtatgataataaatagtaaacataaaataaatagtaagtacataaacatcacttctctgatgttccttccttacacagcagcaggtagccttgcatcagagagagttgccagcaagcccatggctcccagctcccacaaaatggaaacagtaaactgtctcaaaatttcaaaccaaaggtccagaaatgagttgtgctggcatgattggcctgacttacaatgagcag

SEQ ID NO: 39793 - DNA, 1383 bp, Bovine  19866881192255
  misc_feature (1)..(1): n is a, c, g, or t
ngaaggagtctggtttgggtttacatgccttaaagttattctctctctctgcctctctcccttactctacaaagaatatcataaaacttccacatctttccacattatggaaagtcaatttgataagaatgttgttatgtctgtaacctgtcaggggtaaattgagtagaaaattatgcatttccccagtaaaaccaagtgttaatatggaaattctcattaaaagccctaagaagctacagatgtttgagaaaatgtcactgattgctttgacctgaccttttttttttttttttttacagtgctttccttcagcccatcttaccccatgttatcagtttcagaccaggaggcttttttagaaccactggatatggcattaactcattttatccacaccgtctcctcttctgtcccctgcctgctgacaacagctctctgcatggtgctgtgggcaggaaaaatgcagcaagtttctccttcagtaaataggacatcccattcaggtcactcatgcagctcattttaaataaattgaatcaacttctgcctattatctgcttgtccttgaactaagataacattggacattcagttatcactcaaagaaggaattatgagggtgacaaaatttgctgagtgctccaaggccaggtttcacagaactttatttgggtaggactggggaagggaacttccattgctccagtcaagtagtgtgttcactgttaacagtgtgcccttgctgaaaagtttcagaaagtttgaaaatttgagaatattttcaacccagatttattcttgtgaaatgactgaggttaacagccttactgattcaacagacatgaatttgttagtgaaggacagggaagcctggtgtgctacagtccataaggtcacaaagagtcagacatgaattagcgactgaacacacacaagagctggtgcttatcccagaagtctggggatgcctagctccttcgcagaggacctcttttcattggaatttgccctctatagtactagcaaatcaagagacttaataactcaaattcttatccagaagttacataaggagtaacagaaagacttttttattttttgtgactactcggtctttgttgtggcatgtgcaggccttccccagtgtggctcatgggcttagctgccccgaagcatatgggatcttagttccctgaccagatatctaaaacccttgtcccttgcattggaaggtagattctggaccaccagggaagtcctgcataaagactgctttattcaagaagggattaaatttgattgaaataaatcatctctgagcttccgttctctggtgatggatttgttctagaagttttgcatctaaggctttaaatttag

SEQ ID NO: 39794 - DNA, 1214 bp, Bovine  19866881338168
  misc_feature (1)..(1): n is a, c, g, or t
ngaccagctgcagagcgctcactgggtagaggatggctctgccaccccccattacctcaggtgcttcagcccccagaggccccctgccaagagatgagcactgaccaagccaaagggtagccattgatcactggcagccaggagccctgatcttgtacgacgtctgatgtgagtgagattcacccagatttagcaattcagcactgttttagtggcccgaattcatgcagtcccacaaaagaaattctgctgttctgactgccagcaaaatggtttattcatcacatcaccctcctggaacccccaggacaaccccatggacaagagtccttgaagtcttagggacgtctggtcaactctgtggactaaaggattagaaagtgctatgaagggagagactgtgactaggtccccatgggtcctgccctttgtgaacttggccagtttcttaatacagttttcatttccctgtctgtaaaatggaaataatcatggttcttattttgattatttattttggtgaagattaaatgagctatttcatgcacagctcttagaaaactgcctaccacaaattgaagagtttgctatttgtcttgagctatttgccacgatctgtgtcatgctcttcctcctggcatttccttgttatttttggctcccactgaacaatgtttgcctcattgaaatgcacaacctctccatttcacaacacaacaaacttcctgagttcttagccagcagtagggtaggaaatgtgaagctttcagaacaaagggatatcctaaaatacatgtgtgttgttctaacagaaaaatgaagacacaccaaggcctttccttaggaggtataggtgacagaaaatagaaatcagcatggctattgttctaggagaaagaaaggttgtaaaatgagatcacaagtgatattatgtttttcttcatccaccttctggtactattacttctaatgctattaggacttttattgcctttttttttttttttttttttaccatccaataaatgtcaggcactgtacaagatatgtgtcatagaaaggaaatgaagggacaatgctttacagttccagtgagggaacaaaatgtataaatactttcagaggctctgaagaaatttcagggtaatgttcatgaagaaaagggtccctgggatatcggaaaatacgattaaaaatatttatacccccaaagc

SEQ ID NO: 39795 - DNA, 1269 bp, Bovine  19866881515421
  misc_feature (1)..(1): n is a, c, g, or t
natgaaggttcaaaatgaagttattttgaattatttgtccattcatttgaaaatggaatgtgatatgtggccccagatgttgagaagaccttacaacattcccttattccgttatacaaacctcatctgtatgaggttttctcagacttgaatgtcatggaaatggcttggagggttttgttgaaaacgcagattctgatgcagaagctggccgagaccgaggtttccagcagcacccccaggagatgctgctgctgcaccccggaccacatgagcaggcgcaagtgccatgtattaactgcctcatcatcgtggtaagagggagctctcggcaagcttttgtcatggttttattagcgttttcatgcctttccaaactggctacaaacattaaaatgtctttcttgttttttaaaaactggattagtttttgtagtgaaagacacgtcttgaaaacagccacgctcctcagtccccacagccgagaggaagggcagggcccctcttggcagcgctgttctaggtgattccaggttaacacacttttccaagcttctccgcaaaacttaactttctaaataaagagcattttctaaaatattatataattttctttcttaaattattacgtgcactttctcctttattctagccacataagagcagtgtttttttgtaggcacaggtgaaggctgttgaactatatgcaaaaaatgaataaaacccacaaaactacatgcttgtgtctgcctattatactttttctattttgtctttccagccgctggtaagtctgtctcaaaagccttcatttcccttccattctaatagattacttctgacctaaaaagccagctactagatttgttagaaatacgcagggaattatccccagtcaaaaggagctgcctggcatggagcctgttcctgggagggtggtggtcaggaagctcagtagcgcggagcctgcgcgagaccctctggctctagttgtattctgagaaggcagctctggaggaacgcgctcgctccttctccgtgcccttctgcatgagttttgctccctccctctctgtcgttctggctcacacacacactctggtgaagtgaattggaagtgtgtttgcgtgggcgcacgttcatgtgtgtgttcaccctgtgactgagaaggcagtacatgtggcacaacaaaccaggggtgaagaacctgtgctaaaaaggccatgggttctctgctcacagtctgtcctgcagaggctttgtaaacag

SEQ ID NO: 39796 - DNA, 571 bp, Bovine  19866881945391
  misc_feature (1)..(1): n is a, c, g, or t
nctcttctcttatgtcctttcctcgcacttctctgtaattgcagtgaatttagtggctttcttaaatcagtgacattcacatatatcataggcttgttctttttgctgaaatatttatttgccttgagttggactgtatgaaacattaaccacagacttagtaactgacacttaatgttctcttgttttgctggaagccactgcccagggattaaagacctctggggtgggtagagccccttctgatgccttgaacattcccagagatgctgcagccagaccccagactctggtggtggctggctcaagttcccttctacaactatcgcacccgtaagcctctgagatgtgctctgagatccagcatttttcctttgtttcttcttcatttaatttattaactgtaagattaagagagcacacttacaaaaattctggtaaaagcagagtggtggaaagagtgagcagatttataaatatgatttcatcataagcttcccaggggagctggaaatcctttgctattgctctataaggagactacagaagggctcacgggaaagatgtcaca

SEQ ID NO: 39797 - DNA, 962 bp, Bovine  19866880479910
  misc_feature (1)..(1): n is a, c, g, or t
ngtagagaagatggatgctgctctgacttacagaacctctgagtagttctggaggtaagacagtctgggaaggcattgtgttgaccacaggttccaagggactattgcatccacaggattaatagtacttataattctatctgcatgattctctgcaatatactggtctttagcaatctgcagcaacacaatgcagtgtttaattgattctaccatgctatttgttgtctctttgagggtttcaatttcctttctctgttcatcatctttgtttgcagttttgaagtctgtcatcaaaaagcttcaactgttctatcaagatctgtaggtaagcatcagcctctgtaagtttcttattaaagttttggacactaggaacaaatcctgaatccaaacccccagggggcgacgggatggaggcaaggagagaatcacactcatgcccaaggcctgggcaagtagcagagtccctgggaactcagggatgggagccagaccctctcccagaccctccagaagtgggtctaatcattccgcaagtggccagcaagaaagccattcaccaaggccccagccctctctgcctccaggggagccgagggccccttccaagcacccctcttcgcccccttctgctgaatcaacccacaacatgatttgtaatgattcaatggcattccttgtagaaatgatataatttcaaccctattccttgacaatctggttgattttcaaaatttgattattatacctgcttctaagattttgtaactctagtttcttctttgggattaattcttaagagaaagctaggtcaaagctattccttttaaaaataccttttataccagtgagcaaaattttgacaatttatatttctaatagtggagtataaacacatcaattttactggatccttggcacattttctaaatctttgcattatattaatctgcagttct

SEQ ID NO: 39798 - DNA, 1701 bp, Bovine  19866880487013
  misc_feature (1)..(1): n is a, c, g, or t
ncagtactctaagatattaataacttaggctaggctgtgtcagggctgcccaggtagcgctggtggtaaagaacacgcctgccaatgcaggagacataagagacctgggtttgatccctgggtcaggaagaatgcctggagaagggcatggcaacccattccagtattcttgtctggagaatccccagggacagaggagcctgatgggctacagtccatagggtcgcacagtcgaacacaactgaagtgatttaacactcaggttgtgccaacaaatgcaaaaatgaataatggtccaaccacaaaagaagcttatttcactcacacggaagcctgagccgggtgggtgttcccaatcagcagccttctctgcttcacatggagatgcggggatctgtgttttcttccattttgtgcctctgtcatcccccagggctctggttcccaaactgtgcacaaggcgccccacggttccaaagtgaactcacagaactacgggtgaactatctttaaaatgcgagggaattacagccatacttggtatcagttggatacaataccacctactagatacagacagttttgctcaacattagaacacagccctgctttttttgatagcctatctttccaaagcttttttcttttttaggtggtggtttctgtgacaagaaagaaaggtccatgtggcacgatgtggaacaggaaatgaacttgtcaatgtttcatttgatttgaaggtttgagaaacagcaatgcccaacaaacatatcattactaagtacttaagcgccgaagaactgatgcttttgaactgtggtgttggagaagactcttaagagtcccttggactgcaaggagatccaaccagtccattctgaaggagatcagccctggcatttctttggaaagaatgatgctaaagctgaaactccagtactttggccacctcatgcgaagagttgactcattggaaaagtctctgatgctgggagggattgggggccggaggagaaggggacgacaaaggatgagatggctggatggcatcactgactcgatggacgtgagtctgagtgaactctgggagttggtgatggacagggaggcctggtgtgctgcaattcatggggttgcaaagagtcggacacgactgagcaactgaactgaactctggttctttaaatttatccatggtaatggttaggagataatatggattatattgcttggacctagatactaataagtggggctactgatatttcatttgacctagaagtacaatgcaaaaactactgagatgtcaagggctctgtgaacaaagggagtttggaaacttttgccttaggacagtatcttgtctgcatttccctgggggaaggagataaataactctcttaacagccaccactggcctgcttctgttcacatcccaagggcaagaactgattccatatctacatctaattgtaagggaagctaagaactggagtgtggacagatgctaaggcaaaaagggaggcatggacttgaggggacaggtgggtaaaacgtgagaaactgcaatccatcagtagctgtgtggatggcactaactccagatacaccgggatgaatttccctgagttagacatgcattagtgtgtggggagcaaggaactgggagggatgatggatctcaaggtttccaccttgttt

SEQ ID NO: 39799 - DNA, 3253 bp, Bovine  19866880488612
  misc_feature (1)..(1): n is a, c, g, or t
nctagagaattccagggacagaggaactttgcaggctacagtccatggggttgcagagagtcctacacgactgtgactaactcacatagtgtatatatgcaaatcctaatctcctaattcatcccaccctctctccctcctttgtccacatatccattctctctgtctgcatctctgttcctccccttgaaataagttcatctgtatcctgtttctagattctgcatatatgcattaatatcagtattatttttctctttctgacttacttccctctgtatgacagatgttagactcgtccacatctctaaaatgacccagttttgttcctttttatgaccaagtaatatatctttgtatatatgtgctgcatgttctttatccatttatctgtcattggacatataagttgtttccatgttctggctattttaatgcaagcatactattaattaaaagattgccatttattatgaatattaacatattcatttaagataaaccaaacttatgattcaaaataatatttttacttgctgtgcataatgaatcgcactttggtgctggatttgggcttctttgtatagtcattgagtctataaaatcacccaagtgtgctatataataagggcaaccagctgtatttgatgctgtaggcgaacctgaccaggcctgactctgcctgtctttcactttgtgaattgtttttgcctgactgcccctttctaagcctcatgacattgtaaaattagagggtttattataatttctaagacccttcctagttcttgacctctctgacccaggagcatgattttattattttaaattattataaagaattttagttgttatgtttgaatctaatatatggtatatctctactacattagatatatgtgatggtcaggaatgcattcagaatattcattcaccactaatttattgcatatccactatgtgccaagacatataggcaatatatccaaggcccctggctcttacggagtttatattctagtggaggaaccaggtattagaaaagcaaataaatggacacttcagataattttaggtgttgagaggaaaataagaataagttaatggatagagagtgacttgagaagagaggacttgggaaaggatgctcgggaatgaagagatgacattttagcaagatcagaagaagaagggactagttgttcaaagacctggtggatatcatgttacatttagaaggaatagcaaaaggaaaagctctaggtgagaatgaccttggtatggttgaggagcaggaggagtgcccacgtggccggagtggacagaagaaatatgcaagacaaggtgagaaagatggctgagggcagattatagctgacaccatgctcacgtgtctggatagttccctaagtatagtgggaagcctctggataactttaaagccaaagagtaatgtgatattggtggggaggaggttaaaaattctggcagccatgtggatggtagaaaggcaagttacagggtctgtttgcatagtgcagagaggtgatggtggcttagaccagagtggtagcagtgtaggtgataagaactaaatgaattggggaaacagtcgaaaaatgaaccagaagcattttcttagagattcaaggtagaatggaagggcaagaggaaatccaagataattcagaggtttctggcctgagtacctggttgaacagggatgttatggggttggagtgagggggatcaatcattctgttttggacaagttaaaattaaaatgcctttttgatattcaagcagagatgccagatagacagttgtgtattatgagtctggagctcagggcgaggtcacggctgcagatataaatgtgggagtcattagcattttagaaatggatgagttaaggagagaggggtggagataagtcaaagagggtcatatccatatttcaaggtctgaaataaggaagaataaaagagagggaggcaccaatagaggctgagaaggtgtggtcactgaggtaggggaaaaccaagaccaactgctacatccagagccaagaagacagagtgactccagtaatactgccaaaatgtcaggaataaagagatcagggaagattttaaaaataatagcaatgctaatatgtcgtaagacatgatttctggagaaccttccgactagaagtgaatgctacctgtacccattttaagtgtgtaataattctatagttttaaactccaggatgcagaagcattttttaaatgcttgtgcaaagtaaacctaaagccaatgaaaagtaattgcccctaatagtgattcaaggaaaagaacatatctgtgtgccctgggcagccttccagccgatctcttttcctagctgggagagagatgatttataatacccaagagtactagctttttgccatatttcacttttgaaaataaagttttatagaaagaaatttaaaagttcttttttttccccacagttgttgccaaattgcataggaatttcacccctgtcctttgtctttatttatcatgtgaagcaaggagtctagtgtatattcattctttaaaagctgtggattctttgctattggactgtttctcatctacttcctaaaaattttgaactgaattgtaagaagttggaaacttcccgtatgtagacagagtgtgcatctcagcattgggctgtgtgcaaagcactgtcattggaggtactttgatgcaacaaatacaaacccgatttgtgcagtttgtgataattatgcataaaagatcagatgaacaaatcatctccctcattctaactaaaacctttacaaggagcattagttccaagccaccagagggctctgaaagtggtaatttaataaatggtatcttagtaccataaaagaattggcatttgcccacctgatgtgtctggtttaggggactgagttatgcttctgggaggatttaccctataacattataaagacatgttttatacttaataggtttcttatgtatttttcggattatttagctaagcttttaaggagccatttttagtgctctcagagctcatctctaattaattcaattatgtgtgaacagcagtggttttgtattctgttattgggttctgtcttttccacatcaaaaaataaaaacatatgaaaaaaattttaggtttttaaaaactctatttccattattttattcctaccaagtaagatcaagtaacatg

SEQ ID NO: 39800 - DNA, 1054 bp, Bovine  19866880529957
  misc_feature (1)..(1): n is a, c, g, or t
nttttcaatggatagcattcagaacaggtcagtgaaagaaattttaggagtggttgaaatatgggtatattcaccattatacaactttgtgaaggagaaatgagtaaaaaggaatttcgtcaaaaaagcctacctctttttaaaataaatagtatttgaagtgcccaagagggttattaaagacaatgtcaattgctctaaataggccagaacaaatttgcacacttttaaaaaaatcagtcatgaacttggccataaaatcataggttgctgcttctcagagaaaaatgatcgtgtttactcttttaaaaagacattgtaaagtataagttgttttatccacattgcttatttacatggtatgttttaactcatcaaaataagtgtgtaaatttgcagaagtaataaataattcctgagatggctaaatctgggacgtgctcagagcagcagctacaacttagaaaccgcagcaagcaggttctgaagttggccgtctctaagaatgtgtggactttgggaccgagggaaggttccagagttgtccgagcacgaacagtcccatgcatgggaaccagctttcaagtggtagttcagtgtgttttcatttttctccaattgaaaagttaaatatgaatctgaaacagatgttttcattagttttaaatcctctgtagtatctcacagtttatttatagcattaatttttcagtgcagtaggctaattgtatggaaggatgctgttattttatagcttttattgtaggtattctgaatggaaaagtcatgtaagagcaacttcagatcttaggggaaaaaagaaaagtaagcatggttgtgtcaggggagtgttatctcctcggttctgtcttgtctcaacaaaaatttgaagtgacagacattaagccctcggcaggtcacagctcttggacagtccgtgttatagttcttggactgatcagttttatttagaaaataaaggaaaatacatcctcgaggcgtgagggcatttcaacccaaaaggtgtgaagagaagagagagagagtgcacgcg

SEQ ID NO: 39801 - DNA, 1176 bp, Bovine  19866880748557
  misc_feature (1)..(1): n is a, c, g, or t
ntgtttcgaacattaaattggatgctttggcaaatctgtcagtaaagggagaattttccacttgagcaaagagcaagacaagtccagtttctgccctgttcatgattattacttataagaactacctgtggttatttcttcttcttatgaagactttgatttattatgaaagtacatggcttataaagaggcatattgtgaatgatccatatctttgtttgtgtgctttgaagattctaaagtaatttgaaacctctaattatatggcttcacccagtgctgagatttcttctattccaacctataaaatttcattcttagtgctggtcatgtttagaaaaactactgcaatcagctatgggccatcttctctgctttctccttgtcagcaataaggaagtcctgaaagtttgaaattcaagaatgccagttatctatcaattccttttcagcttctctaattagctggtactcagtaatcctctgctgggaggggtaaagagacttcccattgtcctttccactttatatggtactaaacaaaagcactgactgtgtgaatgcgtgcttggtcattcagttttgtctgaatctttgtgatcccatggactgtagcccatcaggcttatctgttcatgggattctctaggctagaatgctggagtgggtagccattcccttctccagggggtcttccagagacagggatcaaaccaggctcttctgcattgcagtggattctttaccatctgagccacaagggaagccctgaactactctcatattttcctttcatgggttttccagtgttacatactaaattacaacacaggtttatgggctagggtttaccttaaaatcagtaagtagtttttaaagttacatgttaggtacacagaagttgttaattacaatccttagttcatgacacacagtgattctttgtaaaagaatgtttccttttgttcttccttatgtcacgtttttttttttaattggtaggttttttggtttttgtttttgttttctggttgtgccacacagcacatgggatcttagttccccaacctgggatggaacctgcaccttctgcattggaagcagagtctaagccattggaccccctagggaagtcccttatatcaatttaaagttactgaaatcaaggaacctttt

SEQ ID NO: 39802 - DNA, 1863 bp, Bovine  19866880941777
  misc_feature (1)..(1): n is a, c, g, or t
nccaccctccactttccccccttggtaacattttagaactaatttcacatgctcaactccagggctgctgctactaaaactgcactttctaaagcaattctgatagtgtcatttctgaccagaagggttttctttaagcaacaggcattcagttgcttgcatctgtggtcctggctaaataaggacacaaactagtagaaacattaggtttgtgaaaatcccgtaatgtgtgtttaggcccaataggagaaagtatcaaatggacacactagatttttctttcataaaaaaggcaaaaaaattctaaatatttaatcaaaaataaaataggaaaagtttactttcaagtccttacaagatttaagagaatatatacacttttcaaagggtacttagatccatcaatttctgccttcccagtgtgtagatttctgaatggtttttaatggttggctgtaaaatcaagcctggaattctacaatgcccccagaatgcccttgctcactcactctttcatatttttggttgtgagttccaacagtcaataaaagttctctttactggcatcttttaaattccaaatttaccctcctcttggcttcatatctcagaagtgatatgaagttaaagtgaaataaaatatagttttacttcagaagtaacagtaaagctagtccccagtaagaaaaggtcttctgcagacctgctctctgaacttgtctggagagggaattacaggagcttaattgaccaaaagggagccacaggaggaggaaatatttcgcagaagcataagctaatggatgtgcaccaactaagtcctactgcttacgggaagcatcatgagctgatggaaatgcaaagttgtaaagcagtaggcaaatctaagggacatcttctaggcaggaaattagagactcattgatataattcacggcatatgacagctttggagtaaattcacaccctgtcctttccctctctccctccctctgctttccattatcagtctctcagcagggtttggatttcaactttggcaccagtagacagaactggaaatgagtgtgcattgcaaatcagcatatgccctcatgtcataatctcatccttgtacatcagacacggattccacgtgtactgctgcacttcaagtcaattctctatcattacagctgtaatttctcacctatttcaggagtttattttgtgtaaactttcagaaagcctcacttgtttgaggaggttcagatgaaacaaaaatctgagtagagagctaagtgggtgctttcttctctggcactgcaatctcactctcattccaccccttccaccgctcagatgatgtcagtcagggctaaacttgttgagagacaaaacgcaaggccatctatcaccattacttagaaatctcatctagcaaaggatttacgatctgctcatttcagaggagattaaaaatactccaaagattgaataaagcacgtctggtgatgcataaaaatgagatggatttcaaaaaagacccagggctgacagcacttggtcagaaatgccacattgccatgccaacatggacagggtttttctgggacagctaggcaccacagctgagaggtatttgaagagtggccagttcccagagcactgcagaggcagtcagaacagcatagcggttaagagttgcaggctttggagacagactgccagggttggaataagggtatgactgggaccatgtattaagtagccccagtatgcctagttattcataggattattataaggattaaatgacctaaggcttataccttagaagtccctagaacagtatctgacatgtagtaaagctatacgtgtgtg

SEQ ID NO: 39803 - DNA, 1763 bp, Bovine  19866880967390
  misc_feature (1)..(1): n is a, c, g, or t
nagtggggcaggcatggttagcctcccagatcttacctgtctgggatccaaacgtctgtgttcatcatatatgcgtccacttagaggtgagccttctcaaagatgtgatcccgaaacagattttccacctcgtaggttatgggagtcccccagagcttgtataaacctgcagattcccgagcttctttcagagcccgatttccaagatcagaagtgacctgggcatctctatgtctccaggagcctgtattaaacatccaggtcacaaaaccaataatcaaaacatctaagtcgcttccctactgatcaaaaatcctgttttcctcaaatcagttaaactcaacaaaggggaaaaaaatacaaattaaataaactcacataagctgggggtaaaaataataaagtatatttgatatttttaattcttctcaaagtagtttcacttcatcatattagaactttatagcagaagggaaaaaaaggagattatcatcattttttagataaggaaacttgccttgtatatcagcaatagcaaatctttcttaccacaaaataaaaataaatccttctcaaaatcatcatcaatgataggaattatagatgagagagtgggatcttcagaccagctgaacaatgtaccttttggtcacagggatacccagagactgactgggcctattgagtgttcttctgtgggaaaagcctgttaagtcattccaaatggtcagtttcttcccttctgaagcctctaagatctacagtgtcttcatcaaagctcccacagcagaatcagtgaggacaggcaaggaggagagagatgattagagatgggtaaattaagctctttataactctgcctgtattcccacttactacatgttttcgtgttttcatagtttctggcacaactgtgagcaggaccagttttaggtatgggtgaagtaaactgctgttcatttattcaacctgtgtttactggttttcttccttatgccaggcactcctcttgacataagggcaacaaagatgaaaagaaatactcatagccataaggtgtttaatctagaggagagagagacacaaaagcaaaaactacagtcataagattgctgtggtggacttatgctgaagcttagatctgatggataaaataggagtttgtcagtccaataagcgagaaggttctagagacagggatcgtgtgctctgctaaggaggagtgagaccaagtgacaagttccagaaagtgcaagtataatgagcgctgtctgagggaccagagccaagtataaattttgcctgggaggcagatcataaaagattctgtgtacctcgctgaagagttcagattttcatacccttgtcaattgaaaagaattgaagactttttagctgggaaattagaaagatcagtggccgcagctgaggagggaggagctagagacaggaaggcctgcactggagcaacagaagtaggcataggagagagctgggagttaggtgagatacttgtgggttgtgaaatatggaacctccgtttaactgatgggtgaggttggtggtatgcatggatggatggatggtaagggaagaatctaggctcactctctgttttcttacttaatcatctggaagattgataacactttaccaagtgaatatagaagaagagacacttgaagaagtcatataaataattgctcatcaaataaaacttgatgtacaattttctcatagtatactaataagataatgctcat

SEQ ID NO: 39804 - DNA, 739 bp, Bovine  19866880990750
  misc_feature (1)..(1): n is a, c, g, or t
naaaattgaaaccctcaaagagacaacaaatagcttggtagaatcaattaaacactacattatatcgctgcagatcgctaaaagcactattaatcctgtggatgcaatatatcaacctggtcccttggaagctgtggtcaacacagtgccttcccagactgtcttacctccagaacctactctgagttgtgtgattcagagcagcgtctgtcttctctaccagttggacctgtattaacaaccttgggacatcatcagactccaacaccaaatagtacaggcagtggccactcaccacctagtagcagtctgacttctccaagccatgtcaacctgtctccaaacacattcccagagttctcttactctagcagtgaagatgaattctatgatgcagatgaattccttcagagtggctcatccccaaagcgcttaatagatctgcctgcatctgcctcagtcttgacacacagtggctcaggaaatagtctaaagttcctagataccacaaatcacttaattcttccatgtccaatggaacaagcgatcctgacctttttgattcacatgattatagaaatgaccaaggggaggcagggtcgatggaaaagcacaagagtgttatcatgcatctgttgtcacaagttagacttgaaatggatcttatgaaggtagttctttcaacatttattcttgaaagaagatctcttttagaaatgtacgcagacttttgcacatc

SEQ ID NO: 39805 - DNA, 1381 bp, Bovine  19866880996891
  misc_feature (1)..(1): n is a, c, g, or t
ngaggttaattgttagagtacaaagctctgttgaagatggaatttcaaagttttcttgccatctgtcactgcatataaaaacttttaaacagatgcatcctgttactttagagatgcattatatccttgacaggcgataattatgcttgttaccccagaatctactatcaggatgagtatatatttactactttctttactcacagagtcaagccaaagagagaattcttttacatttcagcatcttttactttgctttttcctgtgttactcttgctgcctctgacttcagtgaaaaactagcttggttgtgtgtttcttcatatttggaaaaggacaccgtctttatgaatcatcttgtcagaagcaccagcaataaatctgagatgtgttctgaaaaggagggtacatggtgcgtctctttttttttcatctgcaaacaagtagtcttcaggaaacatgtttgaaagaatgtgaacttaacaaaagttcaacctgagactttttttaaaaagtgatttgttaacttcatctttttgtagaagagctttagaaatagaattgctgataaaagaagtccactagaggagaaatctcccggaatttagttatttaacacaaaatttatttaacattggccatgtgctattcacacttctaggtaatacaaaaaaacagacccaaaaaaaccccaccctcattaaaaaaaaaaacaagaagaaaatgtatctccaggtacagaaaggcagattaataaataattaaaataatgtgttagatggtgcttggatttgggaaaaaataaagcaatagattgggtgtagagggtatactgagaataaccactttgtcccgcaacaatttcatttcttcccttattctaagttggtttctgtgtatgtaccactccttaccagtagacgtttggattagttgtgtttcttgccttgtcagtaacacataaacttatgaacacatcctggggatgtgggatatgaacattcctttaaatcactttagtctgtgctcctacagttagtctttttactttaataactaggacaaattgggagaatagcactggcacatatacactgccgtgtgtaaaatagacagctagtgggaggctactgtgtagcacagggagctccactcagtgctctgtgatgacctagatgcgtgggatgaagggggtggcagggagactcaaaagggaggggatatgtgtatatatatagatgattcattcattgtacagcagaaactaacacaacatggtaaagcaattacactccaattaaaaaagtaaagaacttctccctattggatttcccactttccttttctttattcttcaaataatatattaatacctatcttc

SEQ ID NO: 39806 - DNA, 883 bp, Bovine  19866881143720
  misc_feature (1)..(1): n is a, c, g, or t
nttgttctcttgacagcttccaatcacagtttaaatatccagagttctgctttcagggtagcaatttttgattctatttttaatgacaacaaaagttctatgaaagggtttatgtatatggcttgctctgtgcattttacaagcctaaagaaaattacatttcagagaaggtacatatccaattacttggaaataagttacaacaaagtgcccttaagaggcagtgtaataaagacaacctcaattaaaagtcaccataacaaagcaaaaaaagacacataaaacaatgcacattaatagcttattcaaaagctaaatacagagtgggtggtggaaaatggaagtttctttcatgtagaagttaatgaatcattctatttaacaagaggtggactgggaaagggtaagggtctcttctatgatcaataggaagtggcagttagaattcaaggaagaaaacaacttccagttaccttgtgaaaaattatttcagacaaatcttgttaacctcaatcagttttaaagaaacactgagatgaatgaagtgagcccatgcatacacttataccctcattctggttacataaatatttattgtgccacaaactaagctcctgagagactgagatcctaccagaaaccttaggggagtggacacaattacacaccaatgtgatgacttccaggatagaggatgtagcagagcttgaaactcaggggcaggatgcctcatagtctggaggtggtggtggggatagagagggaaggagggaggaagaaagaaaggaacaggccaggtttccagacttgagcaaagatatggaaccttgacagaggttggccttcctggatcgtgaatgcaattcagttaggcttaagcttg

SEQ ID NO: 39807 - DNA, 901 bp, Bovine  19866881272854
  misc_feature (1)..(1): n is a, c, g, or t
ntttcccaccttaggtactgatactcattttacaaactatttgcagtactttattaatattttaaagcactatatagtccagcatattttctattaataaaaggtgatttttaaacttttttaaaaaataacagaatttttatccaaaattttatatggaaatctcaatatataaaagagatcaaagccattttgctctaatgaaaggggatggtggtggatggggaacaggtctaccttgcctgccactccgccaccccaggaccttctcagaggcctcaggaagcacctgaaactctctctccaaggcagcaattggggcttctctggtggctgagaaggtaaagactctgcctgcaatgcagaagacctaggttcgatccctgggtcgggaagatcccctagagaagagaatggctacccactccagtattcttgcctggggaactctatggacaaaggagctgggcaggctacagtccatggggtcacaaagagtcagacacgactgagcagttaacactttcacacttttcactttcaaggcaataataacttctgagtctcatttccaacaactacttgggagctggccatgtagccaggttcagatgtccacagcaagttgctatcttacctgtacaaggtgacacttggctctaattttccaggaaagctgattagttcatgttgatgtattcacattagcattatgttaatattattgatattgtcaaggactttgagatatcttacattagcaatttccctcaagaatgacaagagaaagaatgagctggctgggtcaccccaagtttaaagacaggactaatcaagatcttttcaaaatgtcatctgttgatccaaccaacttcatggacatctttcaaagtcataacag

SEQ ID NO: 39808 - DNA, 754 bp, Bovine  19866881681894
  misc_feature (1)..(1): n is a, c, g, or t
ntcacatttctttactgtacaccagcagcttttattggcttctagtttgctcaagacaagcttaacagaacatctgatatttattgtgatagaaagtgtaaacaacacgtaatggctattctgggcaccataaagctcagatatttgcttctttgacaattagggatgtattgcaagcatttgtgcattatctgaaaaacactccatttatgcaaacagatataataaaactgaaatacgtaagcagtgctggtgcttactcctggcagcatcttttctgtaggaaacaatttcaagggacactttaagaaatcccaagtattagaaattttagctaaaaatctatttggtcagaaaaattctttgttaaacgaagtagaaagcttttccaccttttttaaatatctacaaacttaattgaaagaaaaaagactagttggagaagtaccagaaagcttcaagcaatttgcataattaaaacatctttttctcgtttcctttatcttttattcttctgacctcagaatttcctttctgtattgcatatttttgcataattgagacgaaatataaagcaaaggctgaactcttatcctataagccttcagaatcatttgagggctagctgtgttgtgagtaactctaccaaacttcaggactgaatacacattgtctaaatgaggatacacatcctcctcttatcacgactgtgaatcacgagtctattactaattttataaatagaaagaagaca

SEQ ID NO: 39809 - DNA, 633 bp, Bovine  19866881721326
  misc_feature (1)..(1): n is a, c, g, or t
nctggacaaagggctgaagtgccacctaaagctgagtaataattatatacagatcacccatgacagtgctatctgctaagcatgtattatgttctcacattttccaaaagtttgttttatatttttctctgaaaattctctaagtctttccacttgtattcaagtgacacaaattacaaagtagcacagcaaagcacttatattgcctaagaaggcaaatgcagcctgccacaggcagctatgggacatcaagcctctccattctattccatgtgccgagaggactgtgcagctgtgaacgagaaaggcaagagtgatgtggaccacgcagagaggccacctggctgtccaaatgaaaatggcttataaacaatcgcttggaaaatagattccatttgtgctcctggccacagaaaaattgggtggagagtgaaaactaaatgggaaagaatcagagaccactaatacaaggaatggaagatctagtgtaaacattaaagatgaaaggagctgcaattccctgatcctggctctaggctacagccatttcactattaattagtagaccatatagcttggctagagcacctccatactgacattagcctactgcaacctcaatggatgcctcag

SEQ ID NO: 39810 - DNA, 1322 bp, Bovine  19866880250662
  misc_feature (1)..(1): n is a, c, g, or t
ntgttggagaagactcttgagagttccttggacagcaaggagacccaaccagtccatcttaaaggaaatcagtcctgaatattcattggaaggactgatgctgaagctgaaacgccaatactttggccacctgatgcgaagcactgactcattgaaaaagaccctgatgctgggaaagattgagggcaggaggagaaggggatgacagagaatgagatggttggatggcatcaccaacttgatgagtatgagtttgagcaaggtccaggtgctggtgatggacagggaagcctggtgttctgcagttcatggggtcacaaagactcagacatgactgagtgaatgaactgagagaaagggcttagcctacatctcacaatagtaattaggtcattatctagtactcctgcgattataggccccacccagtcatggtccctctggatcatggaaggccaagcatttggaaagaatagcaataatgccatatcatcatcaaatccaggataccaccagttgtcaactgcattctggtttcagaggtagaatttgaaagaatggcttctggtgattattagatgatattaattgttaaatgcatctcaacttcagagatactaaaatgaagggagaaaaggtacatggtacatcttaggaccaacaaatctccccaagtccacctatgcttttggcattaccaaagttcaataggttcttgttggatgacactgccatctcctctaaagttacagaagaccatatttttgccaatgaaatgagagcagcagtgaatggcacttcccaggctatgtacgtaattgccagtgtttgactctctagtgttctccttccacaatgcactaatcatggaagtacatggtccctgcacacagagacagtagcaacacgagaagatggaatctttatcagcttgctctctgagaaacttcaatgagaagagtccccctgccaaccatccaacccattccggacatgaactgtgagaaaaaaaaaaaaagttattactttcagcaactgaaattccaagaatgtttggtatgacaacataacctaaactctcctgactgagaacaccatcttatgtttgaataagacattacctcatctggtcttgataattacacaatgctgctgctgctactgctaagtcgattcagtcgtgtccgactctgtgcgaccccatagacggcagcccaccaggctcccccgtccctgggattctccaggcaagaacactggagtgggttgccatttcctcctccaatgcagaaagtgaaaagtcaaaggaagtcgttcagtcg

SEQ ID NO: 39811 - DNA, 4502 bp, Bovine  19866880419964
  misc_feature (1)..(1): n is a, c, g, or t
ncttgcaggtggctaccttcttgctgtgtcctcacacagtgaagggagagacagagacagagagattaagagagctcttcttctaataagaaaaatcctaccatggtggccccactctcatgacctcatctaatcctaattatctctcaaaggtcccacctacaaataccatcgcgttggggattaaggcttcaactggcagtggggacacagtcagtccataatgatgatatattctgtagcatcttaaaaataaaaatttgacagagacttgaaggtataacagatgtgaaattacagagttagattacgacttgcagagtgtacaaaggaaatagaattgtcaacactaccttatcccccttgagaatataaaatggttgaagcagtggagagggagaagagatgggcaaagagatttctctggagggagctgttgcagtgctctgactccctgccctcagtgtgtgtgtgtgtatatgtgttgtgtgttggtgaagacacacaagacagctagactaaccactccctcccttcccaccaaaggctttcagcccaaagcaaactggagcaggggggtggaaggaagacatgctcttcaatcaagttaaatctttatacagaaacaggcattcagcgtactgaatcaggactctgtctgtcgcttctaatgtcagccacccaagactgaactaaaaagtcatgggatctacaaggagtttttatttcatggtagagaaagactgcccatgtggagtcaagtttaaagggataatgagagacgaaaataaaattgtgctttgattacatcataagtcatgcgtggtcaatatactggttacatataattgctcatcaagcaagaggcaaatctgtagagtcagtggaaggggaggatgatgtgtatttctaggctgcacacaagatacctatggttttccatctaaatgtgatccctgagcaagccagaagtctgtccaaacttagctgtatttacggacttggagattcaccaagaccccctgatgtacctcttctggatgccaaaggtttttactatggtatagtttggaaggttttccactaaaaaaatctagttaaaattgtgccttggcacctgaaagattagccttcatttatccagaaaatgaagctgcctgattggaatttaccgctatagtattttgagattttgctaagccatgctagcccctggaaattcatgaaatcccctctgagtgtttggagaaagcatttaaaagacctgctggacccgctggtcccggggagactctctcctggcaaatctggcaaattcttcctctttttctccttccagattcagctcaaatattacctttgtgaagatttgcccatttctatggccaagtcaattctttctctggatactggctgaacagcctacctagctgttcatacatgtgtgttttacagaacatatttatttacttatctgctcttccataagatcttcagcttcttgaaggttagaaatactgtatttcatcagttttcaataccctcccctccatattcacattgctgaagttagggtggcttttgatggcacgtcataggcaatgtgtattttttagtggtacatagaatggtaatggtatatctcgtaattggtgataacagtgaactatagcatatctaatttactacagtaaccttgaacagctagtacatcacctggcatgtagtacgttctccataaattcatgcaactagcagattttgtaatggtggatttcaccagcaggactcattgatctgagtaattctggcattagagagcaaaaccagaggtggcagactttggggttgcacaactttcagaatgttgaaagggatgtaataattagggtaacctcagctgatataacaactagatgtccaaactgcataatggcacaaacttcagaagttcatatcttgccagcattagctgttcagacccagtgttccttttcagaggtgacagttctcagcgtggtgtttcagggacacaggctcttcccatgttgtggtgccatctcccccatctcatcaccctcccatgcaggcagaacagtaaatagagtgtagaagaagggcccacttttaaggtcttgttctggaaatgattcatatcgtttctgctcatattctgctggtgagaataccacatctagatccaaaccagggagtgagggccaggaaatgtaatcgttagtaggaggtccatttcccagtaacaacgctatgagatggagtaggagcatgtattttggtgggcagttagctggtggctcaaatgctagagaatccacctgccatgcaagagcctcagtagatatgggtttgatccctgggtcaggaagattccctggagaagggaatggcgacccactccagtattcttgcctggagaattccatggacagaggagtctggtgagctacagtccatggggtcacaaaagtcggatacggctgagtgactaacactttcacttttctttagctctttagcccagggaaccactggactcttgcctatttcaggttgggctgtttgcttcttgctgtgaatttaattttggtttccaactctaactgtgctagtcaataatttcttagttgcaagatatggaaacccgactctgatcagttatagtaaacatggaaagaccctggttaggtgtagttggacccatgagctcaaataatgtcagtcatctttctttcctctctgcttttcactgcactgatcttaattcacaaacaaaaactctctataagatgggaaagagaaggatgccttactgggtcctttcagtctatgatcttaggaggaaggagaatgctctttttcacagattcctattaccaaccccgctcttccaaaccaaatcagaccatattaaaccaaaccaaaattttttttggttctctggacttccctgttaactcagctggtaaagaatccatctgtaatgcaggagaccctggttcaattcctgggttgggaagatgcactgagcaagggataggccacctattccagtattcttgggctttcctggtagctcagctggtaaagaatctgcctgcaatgcagaagacttggcttcaatccctgggtcaggaagatcccctggaggagggcatggcaacccattccagttcttgcctggagaacccccatggacagaggtgcctggccagctacagttcatggggttgcaaagagtcagacacaactgagcaactaagcatggcacaaactctgtttggctttaactgggtcatgtgaccattcttgggccaatggctgggtccaggggggtggtgacgtattctgaatggagagcttgacagccccaccagaatcacctggaatgaatgcagtgggggatgaacagacaaaaaataaaagttgtttactgttcccagcacctctcccaactttatctccagttgttcctcctttgcagctgcccctaattgatgctatttctcaaaatatatcagaaccctttcgtaattccctgttgtaccctctttctgaaatgccctctcccatgcctctcccgtattcatccattaagaccagataacaatcatctttgcaaagctatttttgacaccccagtcttactccagccagcctggttacagctaccaaacagggtttgcattcaaaatgactgagctttgagtagagttctctgtgctatacagttggttcttatggattatctactttatacacatagtgtgtgtatattaattccaaactcctaatttatccctcccccgaccttttcccttgggtaaccctaggtttgttttcgaagtctgtgagtctgtttctgttttgtaaataaattcattttttttttagattcctcatataagtgatatcatatgatatttgtctttgtctgtctaactcacttcacttagtatgataatctctaggtctatccatgttgctgtgaatgaatttcttgttcaaggttttgcctattttctattggattttacatctttctcattgatatgtaggaattctttagatgttccaaatactattcctttggcccttatatttggtgcacccatttcatactctgaggcttgcgtttgtactcttcttttaatataaacaagtaatgtgtcttttttttttttttaaaaaaggagctttgaggctacatctcaggctcaaaaaaagtggacttgtggttctgccatgctggtcgcacctgcaatttggagctggctggatggggagcagcccgtgatatgtcgtgttggctgaggtgtaaaatgccatcttgtccaaaacaaacacccgtgccggggaaaccctcaaccgcgccacacagggacacagggagagggctgcaaggagtcggctgcccacaaagctccaattagcccccaaattatctcctgtgtcacgtgtacaaggatttctaaccaaaattt

SEQ ID NO: 39812 - DNA, 880 bp, Bovine  19866880551298
  misc_feature (1)..(1): n is a, c, g, or t
ncactccagtgttcttgcctggagaatcccagggacggcagagcctggtgggctgccgtctaaggggttgcacagagtcggacacgactgaagcgacttagcagcagcctagaacaatatctaagaacaataacttcttggtggcaattttaatatttcagtttaatctagagctatttttcatggggtcagaataaagaggccacatttaatgcctgaatgcgactcggtttattttaaaaatttatattaaacattttgaagtctgttagttttgtgtttttaaaaaatctgttcatttgaaaggaaatccaatagtttcagaaaactgttaagtaacctttagtcacttaaatcacagataattgaatgcttttcttttttaggctctttggtttttgctcacgccacaatttttatacttttagatgcatctgctgttacgacaaggagtaacttttgcaggagatttgatgttgatcgttatgaatagttatctaaacaactgtttctaggctctagtttaattgcactgcactgaggcatagccagcagagataaatgaaatagtcattcagcctgatacagaccaatcctcttcattgtgttacgcagagagttttgactttagatactcataagtctgagtttacaatctcagcatcaaagccctttcaagtcactgtgcctccttaacatgccccaaagtacacttttctagttttagcagtctttattagagattaaaaaaataatttgtgttttatattccaggccccaggtatggtcgaaaaatacattcgccatttaagtcatttgaagaacaaatgctaaccccatttgatgaacagacaagacctcaaatctactttcatatttt

SEQ ID NO: 39813 - DNA, 2923 bp, Bovine  19866880556562
  misc_feature (1)..(1): n is a, c, g, or t
naagtgaacttaggaagtttccaggctgagccagagataagcgagagacattatattgggttggccagaaagttttgtttggatttttctctaacattgtatggaaaaacccaaaactttttggctaacccaatataattaatggcattatatgtgataaatgctaaagctgactttacactgggggcttgagtgtgtgtgtgtgtgtgtgtgtgtgtctttatcagtgactttgtgtgtgagagtgtgagttatatgtatatgagtgtgtcatctgtgagtgtataagtgtatgttgatgtgatgtgagcatgtgagtgtgtgtgattgaatgtatgtgtgagtgtgcaactgtgtgtatgatgctgtggtatgggagtatacaggtgtgtgtgcacaagcgtgggtcagtgatatgttgtaggaccgggctaggggaacactggggactgttgcaaagggtagaagtgccctgagaagggatggtatctgcgtgtgctgagcatacacagatcatacaggagatgatcaatacacatttactgattgaagagcagtcttcccagaaggccaggaaatagaatcgggtaggctagcatcagctgtggccttggtttcttttcaggaggttttgtcctcctagacaaacaaagggaacaggagttttgtttttccatctagatgttagtaactgaacctacagggtaaaaggataaattcttgaaataattaaatgctagtaacatcttgcctctttacgtgaccgtaagtcaataggttgtagttaattttaatttgcttctacaaactttttattctttgtaaatattcttcatttttttttaatcagtaaaaatgtttattaaaagggatatggcttttccatgaacttatactgaaagggtgtgaaagctgcttggggtgctggcacctggaccccgggattacttcagaccactcgccccctgtctgcctgccccgacctgaagtttcctgtcggcctcccccgctcctgccgtccagcttttgggctttgtgtctcagccctggttatttgtcttgctccgccttgattgacagcctattttggagtcacatttctagactgacctctgcctttcccaacagagcacagctctgcagcttacctaaggcctcatgctctgaaatcccaccttccctgcctcacatttagctttgcagcccttgggtcacaggctggggacctctacagcctttcagggtcaggtggaagctggagttaaattggaatgaaaaatgctggtgtgtctttacaaagctatcttctctgtaaaaagctagcatcttcctttggattcttctagcttttcttagaagctagcaattattcatcatttataaattgaaggtaatccatttcctgatgactcctggcagaccaagggttggggtgggagagtttcttgagaactttcatccctgtctgctgtttgtagaggaaataactaaaatgtctctatttctcagtcgtccacttctgagatctggttctttccaaatagatttctgtgtattaaatcctttaataatggtaagagtctcctatcagatttttaaacccaaaggacaattgtgtagggcatgtttcaaggtacaaattgcagacagctgttggtcaaggccaccagattgtggggcagcgaagagaatctgtcttttttttgacataaggtgcagtttgaattggagttaaatttagggcaggataaaactgtttggagtggaagctggtgtgggagttattttagttattttatttagtgttagcgttgggttacatgaggcctgggctggggttcagatggttgtgtgttagcaaagagggggaggggcaggtgggatttgggtgagcacgtggtttgctattggtgtcggaattagggctgggtcaggcgctttgctgaactctgggaagcacactggtggggaccgtccatctgagggctgtgctgtgactcagttttcatgcccactggaatcagacccccggtcctggcgtgcaactgtgggttgactaagataaggatgcgttgttctccctctgggagtgtctgggagttgaagggccacacacaggaacaccacacagcctccagcagagcccgaaagacccagggtgggcatctccctcttctgaggctggagggcaggtagaggccataggccctgctattcatctgtcctcctgcactgctgggcagtggggaccggactcggtctcaggatctgaggttcagggtcagccagctgggttctggggccacctctggccagaaatgaaccccacctggtgttcagtggacccgttttctcccatagcatcagtgaagaaatatctgattccatttcaacagtagactgattctattcctttgcctcaggaggagacaggctgggagcattccagtgccattctgggctatttgtctgagctcttgcaggaagaaatgtctttcatccccttggtttctttatttagaagcttttgataaaggtttattgattggaaagccagtgattccagtttaatattgtatgcagtttaggaagcatgccaataatatccttatttacatcatgcataaaaagtttaaacggagtaagacaagggtgaatcccgaaacatgtatgtaccttccaacaacattttcatccaatatttcttcttgtccattataagcaattttatcaagaatttgaagaaatatgtctgcttccttcccctaatctggcagggtagaggatctatgaaaaaagtgaaattaacttggcaggagagaggagcttagtgaaccccactatacgcccagagaattcctttctgactccctggaaaggaactccaaatactctttaaaggatatatatctccagtcagcct

SEQ ID NO: 39814 - DNA, 1301 bp, Bovine  19866880592604
  misc_feature (1)..(1): n is a, c, g, or t
ngaatacaacaggatgagcaagcctcccatgaagcaaaggggaaataagactagaatatagcattgtgtatgctaaaactgaaaaagtccaaagtattggaaataaatgacaccatggaaagaaattgccacagctcactaaaacagctaactgaaaatttgtcgatgaaaactgtcagttcatatacccagccatcattataaacactataaaggaaatagctagaggaggtgagaggtgggacaaaaaaaaactctgtcctttgattcttttttgaagccccctgtgactcactgagcttctatttaagcttgaagactcagttcaactttcaccttctgcatgaagacttctcactcctccaggaaaagctatttgctatcattctcccccaagaaggaggggattaagtatatcttctttgctgcttcatcatgcatacctggtagcatgccaggcatatagtcgaagctcaataattataactgaattaattaaatcattatccagtctcctctttgtgttcccattatacaaaatcatatcagagcagcccttttctcatattttgaccctggattttgctctttccacctgactggcagacagtcttttgagaggcaagaggaatcaggatctagtgatttaggcagccaaacatttatcacagcacttttatggaaaaccaatctacagatgcttcttggatggagtaaaaataaatatcctctaaagtaattcaattctaacattctactatattaataaaacaagtttttataaaacatggtgcttgagaagtgtaaaatctagttgcaaagcaagtagaataccgataaaatgatcagcagtgatatgcaaggcaggccattgaattgtaattaggcactcactattttgtacccttctatatttaaataaagtcagtgggaaataagactcgggcaggtaactattttaaaccaatgaacacagtatgcattcctaagaaggaaattctgatacagagtctatttccttacactgtattcactgcactccctaatctccggtcccattcactgcactccccaatctttggtctgattataaggccaagtacacttttatttgaaattagctctgaagtcagaaattttttaatgctacaaaggtaacctggcaagtagtcttcatattaagaagcacaaactaagtaagagctaatagcaggtagctgcactgcctatgaaaagggagcctgatgatcagcaaaatttaaagaagggaaggtttcagaccatcagcaattcatgtttct

SEQ ID NO: 39815 - DNA, 1629 bp, Bovine  19866880603200
  misc_feature (1)..(1): n is a, c, g, or t
ntttggacacaggaacagaactgattcaaatctgaaagtaggcccaagggtagaaatccaaggctgttttgtgcccaccattcatagtcctgttgctctttgtggacatcaatagagtcagcacacattttagttttttttctgatatgttcctgttaacctagaactcagcagaatagctggacacatagagtgctgttctctgaatttaaccacaaataggagttgaaagtgaggtggcagttctctgtctgtggttgggcttgaaatggtaccagacaagtttggtgtatccagaactttgttttcctcagcttttaaaaaactgtttcctgagatgagcaagctatagattcagaggtttatttatctctcagagatgtcagcagtaaagcccttgtttgggggggagtgccaactgttcttgagatttcttcataaggctaaaaaaaaagtataaacggattctagggtagctctctgaactacttttagaagttaaagaaggaaatcttagtacctcaccattgtataatttaaccttttttctttgtgttagagacttgctaggtattaataaatcccatttccttttcctggacacacagaaaggctgaatttaccatcatcccttgcatttggtttggggccaagtacctgggtttcgttcagtgaaatatggttgggagtaatgtgtgctatctgtaggcctagtcataaaatcttccacatttgtctttccctttctgggaaaggccatgtgttggagatgataatatcaaaagctacaaggggacaacctctgagtaatttagttcagttcttaattattccataattatttcttacatcaaagccattatcattttatttatgcaattaaaacttaaagaccctccttatttctttaccttattacataggtattttaattttgtaagtgaaacaggaaataaaaaacatgggaagttgggaattttttaaaaaatgacataattctaaaggaaatgaccttttatatttgagatagaggattggggaaaaaactaaaaaaatttaatgttcaaaggttggataaatgaaatactgacaaattgcctttcaaagataattttgatttgaatgtttctaaaacttgattatatgctccagtattaaaatcaatgctttttttttttttcaaatgctaaagcaaatgattcctgaagggtccactttgttttccagtatagcttaaaattgaaaggaaaatattagtgcagtaaagcatgtactactgtaatagaattttcccctccatttactgcagtggcagtgcttgaatggagtggtatgaaagccatatacgatatattatttttatacatcttaataaaaatatcatacatttttttcaccagcttttttcaagattgatgtatcctgatcaatatgatacgaatcttattgagaaatcacaggcaagatacaagataaacacactttcaatttaaagtacagtttctcctggtaaacagttggcaatgactaatctgtaggaaccttaattactcagtagaatccatgtacttacctggaatggcaccaggcttcctgctcatccacgtccgtctgcccactcggttgatg

SEQ ID NO: 39816 - DNA, 1991 bp, Bovine  19866880639840
  misc_feature (1)..(1): n is a, c, g, or t
naaaaacgaagatcatggcatccagtccccatcacttcatggcaaatagatggggaaacaatggaaacagtgacagattttattttcttgggctccaaaatcactatggacagtgactgcagccatgaaattaaaagacacttgctccttggaagaaaaactatcacaaacctagacagtttattaaaaagcagagacataactttgccgacaaaggtctgtatagtcaaagctatggtttttccagtagtcatgtatggatgtgagagttggaccataaagaaggctgagtgctgaagaactgacacttttaaagtgtggtgcaggagaagactcttgagagtcccttggactgcaaggagatcaaatcagggaaatcaaccctgaatattcattggaaggactgatgctgaagctgaagctccaatactttggccacctgatacaaagagccacctcattgaaaaaggccctgatgctaggaaagattgagggcaggaggagaaggggatgacaaaggatgagatggttggatggcatcatcgactcaatggagatgagtttgggcaaattctgggagacagtgaagggcagggaggcctggcatgctgtagtccatggggtcacgaagagtcagacacgactgagcaaccgaacaacaacacatgaggaaaatgaggggaggaaaggcgagatagtaccctcagctccagtgctaagtaagagaaagaaccgtgattcaaaccagcctgtttgactctggaagctcgactccttccccttggcgaatggaggagagggaaagagaagagagctgcatggagctgggggcaggaggaaggagagaagacaccctaggaacacggtctaaaaatcctggtaaactacacaatgaagtctgagccgtggtgctaagcctgcccctggtacccctagccctcagacaccatgcagtctgcaagtctgctctctcccaacacccccacttatctctcttccctgtctccctctttacctgccgggatgactatttgtctggtgttggaatctgcatctccgcatctgtacattaaatagtctttaggacttaggggctactgctagggcagggggcaagaccccagtccctgtcccaagtggggttacctgtgggagggtgacggagcgctggggtggagtgggactggagaggccactctgcctgtgtctgctctcagcatctcggggcagccagcctgcatccatctgcctcatttcctgtgcagcctccagtggtggcagcgcagcctctcagctgcaggctgttggttctccttctctagtcactggcactcgatgcaagtcatccagaagtagctgggatgatgcggctctcatcttcctcctagagggcctcgtgggagggaagtccctttactccctgcgagcccacaccgctcttcccaggacagcacactgtcacccaggaggcgaggctggtgtgcgcactcctgtcggctgcttccctgggctgggaacctctgcagaaccttccccaccccagccctcctgagcaaagagccaagccagggtaaagcctgtgcatatagggcctcaatttcagatcagattcacaaatttaatttcctattccttaatttaattctgcattttagttttgtttttattatttacatgggttccctttaatgattccaaattgctgctgccctctagcagtattttgtcttaggttaacttcttgaaaaccgatcagtgttggagtttattccgcgctgggttgagttattttctgaaacgaagcacaattaaattagaataatgaacatgctctttagaggattaattcataataagcaggccatgtgctacagctcacagaagaaagggcacgaggaccgaaagctgtttttttctgcctaaatagaaaagtacattctgcagagcagaacaaatcagctaatatatccagagcgcggccagccccagag

SEQ ID NO: 39817 - DNA, 2963 bp, Bovine  19866880643157
  misc_feature (1)..(1): n is a, c, g, or t
nccttgttttacttgccttccttctctgatttttcccttggaagagactccaggggtgtgcaaagcgggaagtcctgctggtgtgtaactgaaaacactttgttctcctttagatctgcaacggggcccctgtctcttctgattttcttgtggcgcccgtcacctccactatggaaagaaaaacgaaccatgatggtgtgatgggccaggctgccatgttttaccctatttacaggtcatgttaagtattgcttctacacttcagatggcctttcatgtttaatttcattcgagtagggctgtgcgaggctttcctctaggtagcaatgaaaattaaacacaattgagtttgatgtgtaccttattgattccagacccatttcagtagactgggacacttcagcgacctgcaaattctacacattagagttcagaatttacacaaacatcatgcactcaagacatggacttaaatgtttctcccagcagcacccaactcccaaccaaagacacaggctctgtcagaaaatggaagttgctaatgaaaatgcattccagatgatattgttggtcatcccctaggggaaaaaatgattcatgaataatttcatgtagaaaagggagtcatcatttcctcagttctatgttgtcttattttggttctctgtagtccacttcttatcccataggtccccacaacttcatttcaaaaagatgagggaagagaggggagaggttgtgtgttaagctggcttgggagctaccaagtaatgaaaactgctcagcaccttggattgattgcatcctgttacagcactgtttctcctctttgggtgtgatggtgagggtgcagcacactcgagaggcatccttagagaaggccacttgagcaaaaggagcaatcggtaacagagcaaggctgggtgagcgggttcccaccagtcattggtttcagggcatcgtgtcagtcatttctcttttgcaactgagctgggaattagaggctttgttcagtccgaagtgggagaaagggaattttaacaagagagcatggccttcggaggcaagagaaaaaagtgtcttccctggggcagggaccagaggtgagtcagaaatgactgggggagagtggtgttccccgctggggtcacagggccacttgtaaaatgatgcctagattctggtctccagccaaagttctcaaccttggctgcacatggaatcacctgggaggcttttacaacctggatggccaagccctgctgtagacccattagatcagaatctctggggtgggatccgggctgggagaagttgtcaaagctccaaggtgattacaatatgcctctaggctcgaggcccactagtctaggacctggctaatccaagagtggcctgaggaccagcagctttggtatcacctgagacttgtaagacttgcagcttcccaggctccatcccagacttactgagtcagcatctgcattttagtgaggtccctggaagagctgaagtctattaaagcatgaggaactgtggttctccagcttggctacacgttaaaatctcccagggagtgtttaaaaatcccagtgctcaggctgcacctcgtgccaattaaatcagaatttttgagggtgggatgcaaacatcagtagctttttatgggttttcaggtgactccgatgtatatgagttagcaaccctggctacatatcagaattgtctggggagcttttacatctccagatacttgagtcctactcagaaattctgatttaattggtctagaataggctacaaaaagcttcctaggtgattttaatatatagccagtgagagcctctgttccagaatgttggtccagcttcagtgagtagacaaccttgctacaagtcaattaatccaagaaccagtgatggaaaagaatgataagaccatgtctggcaccccactccagtactcttgcctggaaaatcccatggacggaggagcctgttaggctgcaatccatgaggttgcgaagagtcagacacgactgagcgccttcactttcactttttactttcatgcattggagaaggaaatggcaacccactccagtgttcttgcctggagaatcccagggacgggggagcctggtgggctgctgtctatggggtcgtacagagtcgggcacgactgaagcgacttagcagcagcagcagtcaccatgttggaaaagaccctgatgctgggaaagattgaaggcaaaagaaggcagcagaggataagctggttagatagcatgactgactcaatggacataaattgagcaaactcaaggatatagtggaggatagagaaacctggcacgctgtagtccatggggtcacaaagagtcagacatgacttagcagctgaacaagaacagtcaccattgggttgcaccaataaagtatatgtaaatccagtgacatttgcctctggccagcaagcaaggggatatatgtatatatggttatataagtacatgtggacttccctggtggctcaggcagatgcctgcaatgcgggagacctgggtttcatccctggtttgggaagatcccctagaagaggacatggcaacctactccagtattcttgtctggagaatccccatggacagaggagtctggcaggttgcagtccatgggattgcaaagagttggacatgactgagcaactaggcacacattctattttatttttggaaaaccagaaaagtgatcaaaacatttaaaatttctcttgagtgcttaagagccttgttggtttttgctccatggcatggggccagggtagggagttaagaaggagttaaatgaggattaaaaaaatcggggaggtctgggaaactgacttttgattgggaagtgaggaaagctggcattgaatgtttcctagagtaccaacattttttattaaaacgtttttgtggg

SEQ ID NO: 39818 - DNA, 1093 bp, Bovine  19866880680789
  misc_feature (1)..(1): n is a, c, g, or t
nttgttattctcccaaaacttctctgttacacaaaactgcatttcccagagttatgcactaagtagaaagaatgaagtagcagcaggtcagaccctctaataggacagtcctttctataaccaaggggttgattatatctatttgcaagagtcaactgaaaaggtaaaatacttgctttcctcttcttttcaataattagaccacctgatgcaaagagccgactcattggaaaagaccctgatgctgggacagattgagggcaggagaagaagagggcaaaggggatcagatggtggatagcatagcctactcaatgaacgtgagtttgagcaaactccaggagatagtgaaggacagggaagcctggcttgctgcagtccatggggtaacaaagagttggacatgacttagcgactcaacaacaacttcttttctactaggaaaacaagctgtgatttgtgcgctctggttcatattctttgtcactttgagaatggaaatttcttttttttttttctccaagtggtacaatggaaactgatattttcctttttattgactcttactaaaaaatttctatatttcttcccagagtgatcatttaagctagaaaacatgtcagcatgatcatcatcaactacatatgcttgactaaaatttttacttttacatttgtgtttgcttttctgaaataatcttccatttaaaaaatctttaaattccataatgtcaacactacttaagatcacattatttaaagagattttaatacattgactgataggactagatccttaaaaagatgacactgaaatcttttgaaatatatgtaaactatattttgtaatcctacatagtgtcaaagtgaactgatttagtcaggtcaacagttacattagcttagaatttgtaaatatcagcaattcattttgtcactagcggaatttgctgtcagggattttgactttagccagcaaagtgaaggggcccggcatgcaatcagatacttaaaatgcaatgtgaggtaatgtccccaaagaaattgtaaaagcatagaaagggggtttctaatatagtaagtcattcttctcc

SEQ ID NO: 39819 - DNA, 876 bp, Bovine  19866880826868
  misc_feature (1)..(1): n is a, c, g, or t
ngaagcctggtaggctgtagtccatggggtcgttaagagtcggacacgattgaagcgacttagcagtagcagttaattcatttttgaacaaataatatagtcacaaagttcaaaactcaaaaaagtatgaaaatgcccacagtgacagcaactcccccagtctggccctctgtctatgcagccccttccacaacttcaaacaggatgattggctattataagtaactgtgtgtatgtgtccttccaaaaaatgtttatatacacaaaaaccaaatactaatatgaatttacctatcccctcccattttgcacacatgtaaatattctatacatgctagtcacaaacttgctttttttttttttttttttgcttaatataccttggaatatttattaaacttgtcacctggtatgtgctggacacccttacaggaagcattaagtgaaatacacaaatattctacttctaattttcatcaaagcattcttctagaaattgtcataaactaagacattaattggactgcatttctccatattaacagtactgtaactggaggattgcatctctgattaatgaccaacatcaaataaattatagccatgaccaaaatattaagtcaaagatagaaaagaaacttttatattagtattaaatagttgatatttccccaaatcataaattatacacatataaatacaaatttccaaatgattatataagcctcagtgcatgtaaacagcagtatatatgcttttaccataaattttatctatctaaaaatgtgctcatgacaaatacatttgatgatatttttcttgtcttcttagaatttttaaggggatatattggaggggcagatttgatgcccaaat

SEQ ID NO: 39820 - DNA, 2460 bp, Bovine  19866880843918
  misc_feature (1)..(1): n is a, c, g, or t
natagtgaaggatagggaagcccagtgtgctgcagttcatggggttgcaaagagtgggacatgacttagtgatgagaaacagcaaccaatatgataacataattcttacagaagttggtaagacctacttggtcttattctgtgacctataacaaagtgtgagtggtgttttttacaactagttttacaagtacatgattgttttcaatattgctaaaaatcctcaaaaatacaatcctggtcaatactattactttagaaattacactcttaaactcaaagaacaaaagatggaaattaaaactttcctttagaaaatgtcttaaaaagctgtcactgagtcaaagaagtaatttgataaagacagtagtcgactagaaatagaaactgctatttagctcctggaataaagccctggaaacaagcagctacacagctacattttatagactttaactgggctattagctttattgttcagagaatattgatttatacaaaagaatcagcaaccttaactatttcttggatgaaatgaacaattatttcatattaaaacttaagaaaaaattacacaactcatttaaattcatggtactgccttggtaattttcattacactgatttgcaaatataactcattcctgaaatccccttgtctggcacttacttcttagcaaaatctaatagtacagaatttcactaaagtctcatgtcacaatgatttctctccttttcttacttggggaagattttgttctcaacctactttaaagcagtcaggaaaacaagtgattaaagcatatccagtgacacagcatccttagttttgtagcataagttgctctcctaagttatgtacaaaatattcattgtaaatttattgtaaggggacatatgcattgaaattggcacactataactcagaaatgtgaagaaaaccatctatcttcctttattttatagctgatctcatttgttctcaaacccttctgctcataaagggaaagaaaagcttaattgttctattacaagtaatcccattttccttcagtttaaaccagtttttcagtaaggagattgacaaatgcttcaacatcttttctccctccttttctggcctttgcaagatggttctcatcttgggaaatagagaacggtccatccatgcatgatgttgaatgacagcccatgcacaactgtttttcttcttttgaggtatttatcttgatagtttctgggtagcaaagcctgatgtcattgctatcttttatctgctgtgatgatggtccatgatgggtttgattcttgtttcgtttgtttgtgtggttaaatgcaatgatagcttttctcttgggtgactctgtcattctcctgatgactgtgacctagcttcagctcttgttggcagtggtttccctggttttggctaagcttccgatttgctcattttcttagactctcttatgaacattctgctacagatttcctcatcttctttttgcaataatcttattagagagctcactagctagaatactcagctattttttgcattcttcctgggacctgctgggagttttcatcctcaacgtacctggcataggccaaaacacagcatcctgattctgtttgctttatgttaatgtaaggccttcttcaagatggtctccttatagagtctcaaatgggagtgatgacacagaaccctctgcttttggcttctctggcctctctgggatcttcctatcattttcccttagagttggccccagtgcagaaggtaccttggaaacagagcaggagacaggaggacactcatgaataacctctcattcctttctctctctactcgatcctttccttttggccagaagggctttattcttagtcctcttgtcttgctttagttcttgcttgacttccattagttaaatccttctactttcttctgtagatttgctctttttaatggggacagaagatggttaaggattgcaagaaaagaaatcaaaagggaaaatatatcaatagatatttaaaaaatgctcattacattcttcaaaatatccttaaaatttcatggaatgctatgcctatttttgaagtaaacagccagtgagagaaattaagggaagtgagatacaagcttataccttggtttccctgctgtagaaacacaccaactaagaatatttattggagtccctatactgtgcttgaagtttggggaatagtaacaaagcacaggacattgaaacctatccttaaagaacttatcatgtagttatggagataagactgatgtgctgttgattaaaggtggcaaatgaatgcttaatgaatcaacactattatagtacatatacaaagtgattgattttggctgagctggtgaaagaacatttaattgaaggagggggtgaaatgtcaactattttagagatatgataggactca

SEQ ID NO: 39821 - DNA, 1204 bp, Bovine  19866880853743
  misc_feature (1)..(1): n is a, c, g, or t
nacccaaactcttgctgatgctcttactatatatcataaggaaaaaaatatattcattcttcagctcactttttaaaaaaactgaagtatagctgatttacaatgttgtgttaatttctgctgtacagcaaagtgattcagttatacatatatatatattatttttatggtttatcataggatattgaatatagttgtctgtgctatacagtaggaccttgttcatccattctatatgtaaaagtgtatatctgttaacctcctcccccttggcaaccacaagtctgatctctatgtccttgagtctatttctgtttcattggtagatttatttgtatcacatcttaaattccacatgtaagtgatgtcatttggcatttgtctttctctttctgacttacttcacttagtataatacatccatgttgcttcaaatagcattatttcattctcttttgactagcattccactgcatacatgtatcatttcctctctatctattcatctgtcaatggacattgaggttgtttccatgtcttggatactacgaatagtacttctgtgaacacagaagtgcatgtatctctttgaattggagttttgtccagatatatgtccaggagtgggattgctggatcatatggtaattctacttttagttttctgaggaggctccatactgttttccatagtggctgtgccagcttatattcccaccaacagtgttggagggttcccttttatccacatctcctccagtgtttgttatttgtagagtttttccttcacttaactatttagtcattatggacatctaatttggacaatattctttatctttggaagtaaatacagacaatcaagtgcaggatgttgctcggaaggaaaggtaccccttgactggcaaaggcaatggattgtgcactcgcattatactatagaggcagggccaatagctttggccttgagaactttggaaagtgaaagagttgaaaattaaagtaggaaaaagaagtttgttgcaattctgagcaatgagtattacaaatatttcaaagtagctgtaccatttctgtgacagctgcatctggggaacgcctctaaacctaattatatacttttcctttctcttctaactgaagagatgattagagacagaggtagaaagacagtgatacagacataattttcacaaaaagatta

SEQ ID NO: 39822 - DNA, 2047 bp, Bovine  19866880879499
  misc_feature (1)..(1): n is a, c, g, or t
ntgatgcagttaatacgcgcatatgttaatcactttgtgtgtgtttctgtaaattcacagaagtgaaattacttggtcaaaggtatttgcatttttattactgttagactgcacctggggaaatgtaattcaaaggatgctggaactagatccattttaggaagatccattttggaggaaacaggaagatgggaaggaggggacgagacaagtttggaggttgttatgattacatcaggtgagatgtgatgaaggccagaacagagcagggcctgagagaaagcgggcagggcaagggtggaagagacactagtgaccagtttgataattcccggggagagaggaggaatcacagacagaggtccagagcctcacatggggagggattaactgagaaacagaaggagtggctttgatcagattctctaaaaccaggaatgtgtctgcatagacatgaaagtggaaagctaagaaatcaccatctcaggcctggtagagatagataggaagaatgagactcaaaaaaagttagagggtcttaatgtctcctggggagggttgatcagacctagtgcagttccagacaaggaagggccaagagcatggactttggagttcaggctttctgctggaaccaacaatcactaaacttcagtgctttagcacaattgattatttccagctcacatcaccctctcctgcaggagcagtgatgaggaagctactctgctcaaagcaattgtggagattcttagattcttacatattcagattctgcccttctccaggtcctcctctctcacattcagccattgggtgggagaagagagaatctgttgtacaggcaggttttatgggccagacctggaaatggcttatgccatttctactcagttgctattggttagaattgagtcgtatggctgcacctgcctgcaagggggcctgggaatggcatctagcagagagtccagaaggaagagggtgatgcttgatgaacaactaaccaacctctgcctcccaaactgtgtgtcctgggcaagtcatataacttttcatagtcttggtgttcacatctgtcaaatgggaataatcacttcataggtaggattgttgatcttttgaggattagatgagcttatgtacatgacccacttaggatggcatacgtagatggataaataaccaccatagtgaatattcatacatattcatagtatgtgctccttggttgggatgctatggttttccctgtctttctctgcccactccaggtctacacaggcagaggaaaactcagtctgcctatgactgacctggatcattctggccccaaagtagatttcttttcttgaaagaaatcacttggtttggtgaactccatagattaaattcatgagattatttcaaatctccctatgcctggtccgtgtagacccagccacagcctctgccagccagcttcagtctgaggataggcaggctgcagaatgattcttgttcattctttcatgttattcccacacttcagaagtctggagggaagcagaatgtttgctgttctgggatcatttgaagccgggcatgcaaagagttccgagtcactttcaagtctgcccgtaggaaatctttcttggcaaccagacaactagaattagttattaaaggcatgccaaatgaataaagacacctctgtgaggaaaaccgcaagagtagttactttttctaatatgaataggaggctaatatcaaatcacctttaattttccactctttctttgctgtttcgttggtaggtcaaatctaataatacagatactccagaaaaccgttcatctatcgcaatatataggcccactgcaaatgtgtgtcttaaaaaccagggtctggaatttaaacaagtatctgcacactgacaagcctgtttcctctaggaacattctcctagatgccaaacctgtgttgccctcacaggctgtaaggagccgacctgtgaaacagaataaagcctggtcttgtctataaaccatacatcccacagaacaca

SEQ ID NO: 39823 - DNA, 730 bp, Bovine  19866880955611
  misc_feature (1)..(1): n is a, c, g, or t
ngtcattaaaaatattgggttaaccccactggtaaaccacagtctaggctttgtgccactcaaagatttaatagaaagaaaatatcttactcatagaagaaaagaaaatagtctttacccttatgtattctacagaagtgctgttaataaattgcaaagactttacaaccaatgaagaataaatcattgagctagatgaaaattcaaaacatgaatagtgaaagaatatacaagcaaggagataagaatagttatctctcagtagagatgatagtatttttactctttattagaataaacttctactttttcaacaaaaaggtatttattgcttatgtaaaaagaaaaaaacaataaatgtaacatttaatttcaaaaatatacagccagaccttagtccataacagaattgcaagactatttttttgctcaatcctatggtcttgcaagatgatcatgatttaggaaaaatttcacaaatataaaaagatcagctagatataaatttagtgcagtggttcaaagcatggattttgaggtcagatagacttattttggaactacacctctgcttctcactctgtgggcttagttgggtttcctaagctctctcaactgtggtctcatccatagtaaaatggaattaatgataacttcttacttccactgtataatcataagggatttgatttaggtcatacctgaatggtctagtggttttccctacttt

SEQ ID NO: 39824 - DNA, 1596 bp, Bovine  19866880989098
  misc_feature (1)..(1): n is a, c, g, or t
ntgagaagggtctacctagcctttgctagtgaacttggccagttcgagtttaaaggtcaaccctgggtctctggtcactaattgctatctcagtatccaggataaaggcacaaaggttggatcttgttgaagaaactagattgctggatcccaagaagagaagactcttgatggaaaatgccaggctcccagtgaattttctagttctgaaatgctaatatttctcatatggaggctcacagacattcacggggttttcaatttcaaggccatttcagttttttatggggcttgatgttctctgcacaaacataggttcaataattgacagagtgccaggctgcccactctggcactcacaagcctgtcatgcaggacagcaaagccacgcagttcctacagcccccaaagccacgccgtctgctccctggcacagagaccttgccaattgcaggaagttgggaaataaaagaaaagtttcaaataaaaagatgtcaatttaacagccagggacctggaaacagatgttcctcgcgtagccccagagacgcccactggcccgcccatccgtcctccgggttttcaaagtcacttcttgtcaggtgccctggttaagagggagaattaatgagctgtgctccattttacggctgtcgtctgatgtgggagccgtgcacggagctgctccgcggacaggccagcccgactcccagcagctcagcctggatcaaagcagagagcagctcggcttttatagcaaaatgattaaaaccgcgtggggcttgtttcctcccacgtgacctctgacaaagtgcagaggagggagcagaggaaaggtgaacccagaggtctccagcctcagggaagagcaggacctgagatgcaggcatcacagaagataagcctggatatacgggcacacacacaagcaatgccttttctcctgcaagttgaaacctaccctcagaatgagaggccagagggcctaattagccaggttaagaggaccacagagcaccatgtagacgatagcaagctagctagctagctttcctacttattcaattactcctagttcttgaaggaagtagtagcactggattgaactgacaaagtattaattctcaaatgttcctgttgcatctggacaaataacttctcatccgactatagtctttggcaattctgccactgctgaccatcacagtgcccagtagcaggcaacctcacctctgacctcccacctgttctgctcctctggcattcccaagtagtctcctatttctatagcgaatagaccaaagcagaagtcctgagatgccacttccaagtttatgttttggaaagactgtggtttccttcttgggcgtgctctggctctgaaggaagccagtggccagcctgaggctgaactaggagaagcccatgtggcagagacttaaaacagacctcttgtcagcagcctggaaggagctgaactctgtccccaaccacaggagtgagggtagaagcagactctctctcaggtaacaagtcttcagattactacagcccggtcaccttgactgtagacatcagagagacctaagcggtgcc

SEQ ID NO: 39825 - DNA, 1088 bp, Bovine  19866880996062
  misc_feature (1)..(1): n is a, c, g, or t
ntctgggtcgtgccagtgcaccagccccaagcatccagtatcgtgcatcgaacctggactggtgactcatttcatatatgatattattcatgtttcaatgccattctcccaaatcattccactctctccctctcccacagagtccaaaagactgttctatacatcagtgtctcttttgctgtctcgtatacagggttattgttaccatctttctaaattccatatatatgcgttagtatactgtattggtgtttttctttctggcttacttcactctgtataataggctccagtttcatccacctcattagaacggattcaaatgtattctttttaatggctgagtaatactccattgtgtatatgtaccatagctttcttatccattcatctgctgacggacatctaggttgcttctatgaggctgtttttttaaaaggtttcccaatggtttttttcttggttagaccatccttgggcttctctggtagctcagctggtaaagaatcctcctgcaaggcaggagaccctggttctattcctgggtcagaaagatcccctggagaagggataggctaaccactccagtattcttgggtttccctggtggctcagctggtaaagaatccacctacaatgtgggagacctgggtttgatctctgggttgcaaagatcccctggaggcgggcatggcaacacactccagtattcttgcctggacaattgcatgaacagaggagcctggtggtctatagtccattgggtcgcaaagagttggacacaactgagcaactaagcacagcatagcacacagaccatccttacattgattaggaactaagacagattgtgttttcttcttctcttccttctgtgcatatgagaataaagatttgattgggcgctctggtgtaggcacttataataggatcaagtacagaataaaaataccctctgcatgaaattaaaagataataaggccccaatgtatactaaaagcaatttattacgttctaacaacttgattatctcctttggaaagagtgaacacttctgcctacttcttttccattactgcccagacttg

SEQ ID NO: 39826 - DNA, 1670 bp, Bovine  19866881027802
  misc_feature (1)..(1): n is a, c, g, or t
nagataccaagagaatatttcatacaaagatgggcacaataaaggacaggaatggtatggacctaactgaagcagaagatattaagaggtggcaagaatacacagaagaactatacagaaaaggtcttcatgacccagataaccacgatggtgtgatcagggtctgtttacataacctaattttgctcccacttttcttaataaacaaccaggatcactcatcagcacaagaaactcaaggcataatataattctaggcacaagcaaagaaagtctatgttccccttgactggacaaacttatcacgagacactgacaatggtttccccctccccaatatgtttacagactcctgaagatccgtggggtccaggctgagaactactatttgatgatcatccccaaggtctcttccaagcagggctctctgaaccgtgatgcacagcctccctgtggtcaggcatgggggaaatgagcaggagatgtgaactaaaggagtgagggaaagctttctggaaaaagaaaatcttgaaatgagccttgaaggatgggcaagctttagataggtggggaaaggatctcatcatgcaggaaaagcagagaaagctctaagatgagtgaagcaaccagccaggctgcagcacagcgtcaggaagtacttgtggaaacaagactagaagatgtcggttgtgactgactctaaatgccaagctgaattatccttcaaatgctggggaatcatcaacgattttagagcaggaaaatgatgggctggaagcagtgttcttggcagatgtatctggtgcctgtacatgctttgaggtgggaggagagcatcgaggcgacccagacaacagaccagatgtgtgaggaagagcctggtctggggaggatgtcggtgaagaaataaaggggcaaatctaagagattttttttttaagcacaggattaagtttgagtttggaagcatggaagagactgagatgtcttggagcctgctggtgcagaaatgagacagccaccaagggaagtctgtgggaggaaggagatgatgagttcatagggcatcttagggagtccgcacatagcatctttcagaagggttacttctgcaggtggggttggaggggcaggcaaggtggctttcacatcttatgatatataatctcttttaatggagggattttgtgtaatttttacttcctttttgtgctttttggaatttttcaactaattattttaattccatgcagattccaagagtctcattaaccctttataaaccatcttctcccagaaggaaagaggagagagtggtttacagcagcgatccccaatccctttggcaccagggacaagtttcatggaagacaatttttccggggactggggtggagtagggtgatgctttcgggatgattcaagagcattacattcattgtgcactttatttctactcttatgacatcagttccacttcagatcattagtcattagatcctggagggtggggacccctgatttacagagactgctggggtccaaacacttcataggggtttcctcttggcctccgagtctgtggtttttctatgggtgggtagaggatcccccctccttctctcctctctgccctctgcttctgtcctttaaagcctcaaacatcatca

SEQ ID NO: 39827 - DNA, 995 bp, Bovine  19866881045670
  misc_feature (1)..(1): n is a, c, g, or t
ncagaactccaacatatgcattaaggcaagggggtgggtacacaatttagcccatcacagcctgtctttatggaaagtttccaaattaaatgaaagaataaagaaacctatcccaagcttcagagccccgtggttttggggggttgcatagaaagacacggttagatctaacatgtggtttaattttagggactgcatgcttcttgttccccaaaaatacctcacatgccttcagattcccttattagagcctcatatttttttacttatatcaaacagaggctttcttctgttaaaatgcaagcagccttagatggagcctcgcctgtcactgagactttagtagaaccatcacttccttcctaagagtagttgcagatgaaggacagatgactgggcacctacagggactgggaggaagtgaaaggaggatcgtggagggagacaagaggaacagagaccagaagcttgggtctgagaagacagacctcactggcttcacccttcaccctggataacagaagagactaaacattcatgccacaggccatacggctagagttgtttcggggaagtggttgctcagagactatattctctatcacactcccccttgcctctaagtgaggccatgtgatggatttctagacagtggattgtgagctatgatgtactatagttcaagaaagcaagcatgcatgttcagtcaagcccaactctttgcaaccccatggactgtagcctgccaggctcctgtgtccattgaattctccaagcaagaatactggaatgagttgccatttccttctccagggcatcttcccaacccagggatgtaatcctcttgcatctcctgcactggcaggcagattcttaaccaccagagccacccgtgagacctggcctataaaaatattctacacagcttctgccctgccctcatggcaaaggactctgaaacccaaagaaatagcagagccacaaaaggaaagagc

SEQ ID NO: 39828 - DNA, 1794 bp, Bovine  19866881087555
  misc_feature (1)..(1): n is a, c, g, or t
ngactacccaccccagtgctcttgcctgggaaatcccatggacagaggagcctggtgggcttacagtccttgggttcacaaaagagttggacatgattagcaactaaatgaggagtgaccaaggtgggagtgggaaggcacgtcacttattgtccaaacaatactgacatagaagagggaagaaggaaaggaaagagtagtggaaaggtctaatattgctataagtcaaaaccatggcgttacaatcagaggcaaactttgataaagattgaaaagagtttattgcgtggtacagaggagatacatcacctacatcctgtgggccaaatatggcctgttgaccttttctgcaaatacagtttattggctattgactagggcggcttttgttttacagtggcagagctgagcattttcgacaggaattgtatggcgtacaaagcctgacatatttactatctagtctttcacagaaaatgtttgttgactcatgatgtagcagaaagaacacattgttctaagtcctgggtccaccactttgaatccacactagcttttataatctaattttcagagtataatttctcatctgtgaaatggggtactatatgatagagtgccaactaaccacttaactcagtaattatgatcatttatgatgctgaataaaatagtgaatgtgaaatgcatgctaagttgtaaagaattatacacatactaaatattattagggttgttttaggagtatctggcaaaagagaggagtcaaagaaagttgttttttcctgaacagaggtaaagaacaaataataagtgattgcaaagcacacatgagcctttttgtttgtgtcagttaccgtgtggttctgaaacaatctaaactagattattaaagttatggagaaagaagtaaaaaccacaggcttgatgataaattgaagaaatctttttggtgtgaagtacaacagtgtattatggccaccagatgggaaggcagagtgggactttgggaaaggaagaataagacgacaaatccaggtaatagtgcatggagtagctttatactaacaattatacattgtttatctgaaattcaaatctagctggacgtcctgtgtttttactttctctatctggcaaccagtcccccacacagtgtagttctggtggggcagctgatcatagagctctgctcgctggtcacaaagattgtgcagattctaggaaactgaatctttagcagagatgaataaggatagagctgatcatctgatggcaatattctagaaagaccatcagagttgctttgtttcatatgggtagtttagcccttcttttaatctacccctttctgtttcttaaaccagagttggtttctgttgtctgcagtcaaagagccctaacctatatacatacatacacacactccagatagtttccaacaaaaccgctgtgaggatgggtggctggtaaagttgagggctgatgaaaagattaactagggacagctttctgacggaggatctggacaaaggcagagtggagtaggcaggcaaagtgcactctggacccagaatctggcgagtgtttacatttgctgtcctgtatagcaacagggagctactcagggctcttaagaaagggaaggatgtgataaaaatgacatttgatttaaaaaattatttccaaagctggcttttaagggttttgcctggataagacggccagcaggaaagctggctggaggcctgttctcatggccccatagactggggggtctcaggcccaggtggg

SEQ ID NO: 39829 - DNA, 1759 bp, Bovine  19866881140562
  misc_feature (1)..(1): n is a, c, g, or t
ncaggaagatcccctagagaagggaatagctaccccctccaatattcttgcctggaaaatcccaaggacagaggagcctggtggactatagtctatggggtcacaaagagttagacacaaccgagtgactaacactcacatttttttcgtatatgtatacatatataactgattttctttgctgtatacctgaaactaacacaacattccaaatcaactatgctccaataaaaattttttaaaaaagattgccaacttttgcatgctttgaggggaaaaaaaatcagtatttaattgtgacctttgatttcttttaattttttaaaaatacatgcaactttgaaagaaaaaaagtagctgctagcctgggccttccctgacctgaaaggtcacttcaggtcagaagtcctcctgtgccccagggagtccttgctccctgcaaagtccattagctcaggcttaatgccgtcttaaagcctgtggccctctttattagggttgtgtttgtcacctggtaacttgtttattgccccagctctggggtgggaaggggaggatgggcgtgaaggttacaagtaggtgggaattgcacacctcaggccagagcctccccttggtcattattttcccagaatgacctctgggggtggggagtaccaagccctccttgagctaacacatgacaagctggcacaaaagaactgcaaacaggcccctaattaatgggtttgcttagagctgttcctctgtttaggaacttcatcccaataattgcaggctccataatcattaatcagtcactactacttttctgggtgctgaccataggcccagctccattccaaccaccgtgaggccagaagaacagaaaacaggaattcagacctatgccaagggcttcatcgtgggagcccacgaatcctcatgacaatccagagaggagggtattattattcctcttttcagatgaggaaaccaagtctcaataaaactaattagctcaaggtgatcagctcatcagcaagaaaatcagaattttcacctgagtctgattgattccaaagcgggggctctgggaagcaacagactaactgttcaaaactggttcagaccacactggctgggttgtgccaggcacatcgtctagaccctaggagcccaggaagggaacatacagggaaggggtcctgagaggagacaacattctaaaggactggtagcgtgggctgggccctgaagggtggagagaatcatacgtgtttaataagttgtactcgggcactttctccaaccactaagtccaggattggaaaggattgtggaatctgtgcctcactcagggccaataaatgattagtcaaatgtccgaggaggacgtgtagacacactcacacacaggcacacacacgcagacccacctcggcagctccaaacagtgcctggaatgggcacaagaaaagaggacctcagcaggcagtgagacgttggcaacaggcaccggcagggattagggcgagggccaaacgcagagaagacgtggagccagcgagtcctgtgaccaccctgggcccgggaggttggcagctcctggaatgtctcaatttagaccttatcccagaacatgagaaatgccaggggcggaggagaggggccaggagaggatgaagagcagggactgactgaggactgggctctttctcctcttaatcagccacctcccctcctctgagctccccccaccttaccctcaaaacacaca

SEQ ID NO: 39830 - DNA, 1082 bp, Bovine  19866881164984
  misc_feature (1)..(1): n is a, c, g, or t
ntaatatatgctgaattgctaccatctttcaagtactgcttctggtacttttacaactatttccttattttatattgagtatagccctagtgctatgaactaggttctttttgttgttgttgactttgtcttatttgcttccattatgcagttgaggatactgaagctcacaaagggaaagtatacactaaaaacaacaaaaatcagaaccaggcttcaaatccaaggctctgaatctctaaacagaataaggaaaaaaatattttctcccccaccaacctaagttcatgttgattctgccctggtttgctgacaactgcattcataagatggatgaaatcctgtttaagaatgacaattacaaaaaatcttttatagtgcttttcaagaactttttacaacaaatacccagcatcagcaaaaaggaacaattctagaatgggggcagagaaagaaaagataaaaccttataagtaaacattaatagtgaagtcaaattgttatagtgatgatgtttaaatcagacacttttcaaatgtgcatttcctttgttgcattgctgctgccagcactatagcactgtattttttctcatcctctaattcctactgtatttaggaaagaccccagcagagtgcctacttggagcccatttgatgaatggcagtgctgtgcaagtgacatgggggagcagcatgtggtacagatacacccagggattggcaggagacaatgggcctttgtggcagccaccaggtcaggtggacacaacagatcagcttccttagacacaacagatcagctgccctcaccatgcaggtttgttgatactgtggaagtcatcccagcctgtctccaaaacagcatgatattgacaaggtttttagttcctgctgctgaatggactacactcagtgtctcctcagcttgcagcagtggtaaaagaactcttagcccagcttccgttatgtagggatgttggcaggtaggggtttccatggtagctcagctggtaaagaatctgcctgcaatgcaggagacctgggttcaatccctgagtcaggaagatcccctggaagagg

SEQ ID NO: 39831 - DNA, 1547 bp, Bovine  19866881191012
  misc_feature (1)..(1): n is a, c, g, or t
natacttttaattattgaccagaaaatagtcatatggccacacctagctgcaggggagactaaaatttctactactgtggctatgggtggatgactagatgtctctgtcccaaggattaaataagtgagtgtttgtaaagcaattagcacagtggcttgcacagagtagacactcaatgtgaactattgtttctacctcttagttaacatcaggagcagacagtatcaaagggaggatggggtgagggtgggaagtgagccctgtgctacttgttaaaaaactgttttattggagtatagtggatttacagtattgtgttaatttctactatagagcaaagtgactcagttatatgtatacattcttcatattcttttccgctatggtttatcataggatactgaatatagttatctgtgctatacaggtggacttcattgtttatccattgtatgtataatagtttgcatctgctaattccaaactcccactccatctctcctttactcctccctagcagtcctgtgctatttttaaagtgagagaagcttcttctacactccttgtgatggaggtatggaaaggaagtaagtttggccagagatgggaggtttacagttgctcttttaggtttctgtcttgaaaattggtgttttagagatacatagtcaaaacggaaatgtgctaccccgggcacagggtataaataagactgaaatgtgttctgatgtcttaaagaactttaatgtatatttacatagtgacctgggaatgtttttctactaaaaattctgagagagaattagatactatgtatgaagggctttaaactcttaggaggaatggagctatgcaaatctaaaggctgggcattattaataacaacagtagttttaatgtatgtcatgcactttgcccttcaaaagactgggatttaacgcgcacaaggcaaggtggtggaaacatgagttcccagtggggtaactcaccctttcccagtgattagtgcacctcctttatctggggcaaaatggaggattagcggccacttagttatctcactgatcactggcccagaaacactccccttttctctgtttccttttatcctctttgcttctcctctaccagcgggaaagaatacatgtccctttaagccccaatttccttttttcctcctttcaaatcctttgaggagttctggctcttgctagaggcctaacttcgactagcaaagccagtattttctcagagctcctgtttttcttctttgaaaatggagcaatagagcctgtccctggtgtatgctcggaactaggactctgatcgtgcgaggggtggaggggagaacattgaatctggaggtagaataagtgtttcctgcttattggtgcagcaattttgggtaagccatgctatgaaagtgcttcggcatccacaaggggctatacaaattttatcatctcacagggcagagtggcttccagctggccaggcaagtggcgatacagaacacactgtaatgatccacttacaaatgccagag

SEQ ID NO: 39832 - DNA, 788 bp, Bovine  19866881240058
  misc_feature (1)..(1): n is a, c, g, or t
ncctgttgagaaataacactattcagagaggattgcatgaaggataagcagtccatccacccttccagatttcctaacaccaatccctggatcctgccagagcgtctgaaacacggatgcctggagtgcatcacgttggccccggcagaattgcttttactgaactgcttttggtgtgatgccatcagcatttttaaatgtaattacaagaaacagtcccatgaaaagcattattacgtttcgggtaagaaggctgttgaagacattgttccttacgtcacacagtgttttcattattaagtatcctccggggtaactctgaatttactactaaaaatattagtgcttctcctgggcaattggtttccttatccatggcatgatttttctagaggatactgtgaggaacactagggcaaaaggcaattaattggttttccatgaaaaagggcttccatagtaaaaaaaaaaaaaaaaaaaaggtaaaaatctacagggcaaatttgtttttgcttttaaagcaagacttctcgtcactaatatgcattacacatatattgttatgatataacatttatgtccctggtgacccataggatcataattagccagtgcttgtgttgggtccgaacatagagctgatgtggatatttacttgcttaaatcaccttctcttccccactctgagacttctgattgcactgcccagctgccctgcagccaggtatggaaacctttagaagtactaaaatgtgacatgataactactggttgagtctccttttttg

SEQ ID NO: 39833 - DNA, 881 bp, Bovine  19866881330856
  misc_feature (1)..(1): n is a, c, g, or t
ntactcttgcctggaaaatcccatggacggaggagcctggtaggctgcagtccatggggtcgcaaagagtcggacacgactgaagtgacttagcagcagcagcagcagggggagatggtgggctcttaagatatgagatgcaaaatcaaagcaggatgaggctccaaccacctcactcttgccctggaacttcctctatcttgagacacactgctctccccaaatcatccacccaaattaggtcaaaagcctgaggaaaccgtcaagagacaaggtaggaacaggggtcagattttctctttcattgattattttctgatgactttaggtctggtctggttaagccgaatccatcactcttagggggtggtgggtgaggagaggtgcagatgtaggagtttacctaggatgtttaaaacctcagggcaaaaagaaaggcatgagaagctaacctgaaggagatgtagttgcatacagtaggggggatctaaagagcctcctaggtaccagaaagactaacatagtaagaattttaagaggtaagatgaaggtaacttgctgtcaaaggatgcagatatggctaaagaaacaggggaacttaattcctttctcaagccatataggtgaatggctaccagatggtcagacagaaatacctgtctacaggctgctagagaaaaataaataaataaatgcaggaagaaatcagatcctccaatgagcaggtaagcgggaaattaaaatatctgtacactgacaatgcaggaccacacgtgttttcaaagagacggttaggaagacagtgtgaatatgtgttagcatctgtcctctgtcggccagcctacacccagagagggcagttacaaaccccacagcactgg

SEQ ID NO: 39834 - DNA, 805 bp, Bovine  19866881368088
  misc_feature (1)..(1): n is a, c, g, or t
natagtaaagaacctgtaagtttgcctttaactataagcctactcactctgtttgagccttcatagaggcagccctgaatcccagatgattaagtgggacctgtgctttttgagtatctactacagttattagttccactgtggaagctgaggacaacaggaaattttgagcttagaaggtcattttccaaaatatttccaaatatcattaaagtgaatgctttattcctcacaatttttttaatccagtaaacattatagcctagatatcctaagaaatcaaaaattaaatttcttattagaaactatcaaacctaacaatggaatttattttctggtatgctgtgctgtgctgtgctcagttgctcagtcgtgtccaactctttgcagccccatggactgtaacctgccagattcctctgctgatggaattttccaggcaagaatactggagtgggtgccgttttctacaccagttatcttcccaaccagggatggaacctgagtctcttgcgtctcctgcattggtaggcagattctttaccactagtgccacctgggtccgatctttctggtatatttatcctatagaattttgaaaaccattagcaataccaaaagtattcatctcacgacattctccaaggacctacttcaggaagtagtagggtaaatagatcaagcaaagatgcaaattcattttatgaggttagataaaatttcattcattaatttcaacacatcatcctttgtgaaaatgtgtactaaaagacaaaatatacatttccaagtgaatgtcttgagt

SEQ ID NO: 39835 - DNA, 970 bp, Bovine  19866881445259
  misc_feature (1)..(1): n is a, c, g, or t
nactgtctattccttacatgttttgttactctaaatataattcttttccaaaactctgagttgattttgaagcttctatttattgctgagaggatcatttctcagatgtttgtagggatgtactggtttatctcattaccagaaggcaccattaaaagagaaattttaatcattctgccataaggatatctatttttctaattttgcataatgaataaatcaatcacttaaatagcactcattaaataaccagaaggttctgtctctgtagcattagcatacatattaattcagatggatgaatactgttaagaaatatttattgtgtactataggctctgttttggagaggaatgaagagggataaaattataagcaaataaatatatatagtctttacctttgtgaagttgctatcaagcataggtgccatttattagatattatgaaataatgtagttaaaggtataaatattatgaacatattttgaatatgcctgatgacacacatgctgtgatagttatctatgcagcaggataaattactccaaaatgtatcaacttaaaacacacgtatttattatcttacagtgaaagcttcaggcttcccaggtggcacagtggtaaatcccctgcagtaggaaatggctacccactccagtattcttgcctggaaaattccatggacagaggagcctgctgggctagagtccatgaagtcacgaagagtcacacgtgcaattgagtgactgagcacacacacagtgaaatctgagattggcccagctggttggcactggctcagggtgtctcacgagactgcagacttatgctgactagggaggttgttagggaagttctggaactgaaggatctactttaaagaagatttactcacgtggtttatggcaagagggctcagttccttaccacattggcttctccataaggctgctgaatattctcacgg

SEQ ID NO: 39836 - DNA, 1105 bp, Bovine  19866881449843
  misc_feature (1)..(1): n is a, c, g, or t
ncccagcctcaaacccactccagcttgagctgttaacaagagaagcaaacaggtggacagtaaccaaccatgaggtttgtaatagatgagccatctcacacacacacacacacacacacatgcacctttgagcatttgggagctacagtactggggtatcctcttccatcatatttttcctattgctcctttcccaggcaggatcctctgagctagatccatggatgctcacagatcctgagccaatgctgaccaagctgggaggggatgcgggagtggagtataaagtttgaacacacctgatggcttcaaataatgtcaccaggttggttacaattgcttggctcctatgttcctcctgatttaccttcaagccagatgaccaatgaggtgacagatattttccccagaccactctcatttccctcttccaatcagacatgtatctggtgccctctggaatgacctggaagagctcccattactgctcatgttgcctctgagtctgagctctcccttccctgctccagaatttgcccatctagtgtaccagactccttctgccttgactcttagtccttaattttgcttagaattcagctctcctctgtatcagtcatctattgctataataatactatgtaataaatgatcctaaaatcttactggtttataaaaacagttaattttctcacttacagtctgtggattggtagagtgctctgattcagcctgtggctcagatacagatcaattccacatgctactcattggggggccaccagctccctgaggctggctcatctcattatggatggaagaagcataagaaaaagctagtagaaatttcccatgacccttaaggccttcactcaaaactggatactgtccaatctacccatgtccattgtccaaggcaagtcaactggccaagcccaaagtcaaataaatggggatgcatgatcgatccactgattctagtagggtatgtgcaaagtcatatggcaaagggcatggataattctattacagggaaggtgcaaagaattgagaataataacccaatctccaatatttctcaaacaagaatgctataatgagctta

SEQ ID NO: 39837 - DNA, 1148 bp, Bovine  19866880421029
  misc_feature (1)..(1): n is a, c, g, or t
nctctgcatatctgaggttattgatatttctcccggcaatcttgattccgcttgtgcttcttccgctcagcgtttctcatgatgtactctgaatagaagttaaataagcagggtgacaatatacagccttgacgtactccttttcctatttggaaccagtctgttattccatgtccagttctaactgttgcttcctgacctgcatacagatttctcaagaggcaggtcagatggtctgctattcccatctctacaccccaagaaagcccggcctgcagaatggcccctgaggagggtccacagcaattgcccagtggaatttgctttctgctctcatgcacttccatcctctctcttcaattagttagacagcagagtagcaactcaatcagtgtgttccaggagatcacactttgggaaggctagcaataaattaaattttcattttagacccttaatagcccaatcaataatttagggagcaaagaaaacattttctgggaaagcattagcttaaaactgaaaagtagctgcttcatcccttggaaatgacacaattttagtaagggtggggtagagggagcagaggctgacaaccacacttcacatattcttactccttctatctttgtatgtctgtctatctgtctctctctctctctctctcactttcactctcccttttctctccttatttatgccctttccttcctccttcctctctcttatttagtcttgcctctttcttgcccccactatactttggccacctgatgtgaagaactgactcattgaaaaacaccctgattctgggaaagatggaaggcaaaatgagaatggggcagcagaggaggagacagttagatagcatcaccaactcaatgattcatatgaatttgagcaaactccagactatctcctggaggacacaggagcctggtgtctgcagtccatggagttgcacagagtcggacacaacttagtaactgaaccattactactactactactaataataataatgttttgtattttctcatcttttttaatattgtgcttgctggtgcaataactaattagcattgtaacaaatctgcagctatgaattattttttcttggaaacaaatcaaaaccattacccactaat

SEQ ID NO: 39838 - DNA, 2825 bp, Bovine  19866880706597
  misc_feature (1)..(1): n is a, c, g, or t
ntttttctatgaaagaaaaataaaattctctcttgtttaaaacattttttgttatagctaagtatatagcctaacccatgcctcctgtagccagtagcttactcttccatctcaaagaaatctggaaaaccccctttgttactataacatgtggaagttatgaagttctgtgttttaccatatatttataaacagatttggacacaccgctgcactaattattagctctcaggaaatataaaatgaaaatgatgaatactattacccacatgtctgtaaccacagggcaagtttgatcctgccctaccttggcttctgttggaaatccaatgtatttagagctatgagtttaaacaatgtaaccactgaaatgaccaatattgccaataaggggggaagtccaaagctggccagcagggaactcaatgtttataatggaaattgccccaggtgaggttaaaaagcaagagatacatattgcaaagcctttgtggaattagcaagtgtgcaatcagatgtaattacaatgccttaaattaagaaactgcccatttctgcaattaaataatttcccaaacaaagtcacttaaacagtatacacttgcaaagtccttgtgtaattgtatcatttatgagggcatcagaaagactgcaaattttcaagaaaagaaatcacaacacaaattgaattaaacaaacaaagaaaaataactctttcctctggaaaactgggtaaggcttcaggaaaagcttgatccaacagccaagactgaccaaaaactggtttatctatctccatttctggacacattttcaggtgttggctacaatctctaaggcagtgcccccatcccacctcccatcttgggatggagaactacatgtccctttatttgtctccattaagaaagagtatgccacccaatcacaacaaaaatcgggagtcccagtgtgcctgaactagtgtcggtcatacatctgtccctgagcagaacagatgagagctgagatacacactgtatcttttttgggtggagtcaatatcttctgaaacatggggaagtgagagagatctgcagcataaactgctagttccttttcctcccacacagccaactagaatgcatttctgacttttcttgcagctatatgtgatcatgtgacagaactgtagccaatggtatgaaagctttgcccatgacacacttccacatgtgatattctctcttttcctacttaactgttaaaaaatgactctaaacatttagaggagggcagagtcaagaagatggaaggagtggagatttccaaatgaggaaatagaagccactttattaggactacctgcatcacacaatgaaatgagtgggaagtatattttataatacttaggcagtgaaattagactgtttatttactgcaacagtaagtattactttaactatgatactacaaagaatactagagtgatgtttctaagagagggtcaaacgggagtaggacagcccaaaataagcaatgtccactgcaacaatggtttttaaacttggggttgtctttaaataaaatagaagcaattgtgctgccagagaaatctgagtctatgtgcattttccttcttagaagagcattgtgatgacttcgccacaaaccaaataaacaaagcagcaattgcctcttctactataataagcctttgcaaacatgccctgcatttgcacatggcttccttaataaatggatgctattttcttatgttcaccagcagtcgtatcaaacaagagatgcaatttaaatttgctctacatctcagggaaccactcttcactacaactagcattatctaaaatgaaaaatgtcatttttgtaaaatctcttcccttcaattttgacatgtaagcagaaagcaagcaaaagaaagcaaaaacaagaggcatagagaaggtagtagagaagaagctgtgaaaaagttccaaagccaatgagaaaggcaagtgagaatgactggttgaagcccaagtcaattaccttctatccgaagtgaaatatgcccagagtggagtaagactggtaccaagataaaagtatgagcaggtgttcaaaaaaagagatcagaaacagacatgccagacagacaagtaagcctagagagttccttcctttttaactggataaattctacttatcttgcagggttcagctgaaatatcacaaccttaggatagatttggatgacaatcctctcctcacctccatgtagttatttgtcctcttaaaataacttaatgacttttactcttctcccaaagttcttctgtatattgcaattaaagacttttctgtgtaattatttagtgcctatattcccatctagaatgaaagttctatgaaggcaaagaccatgctgacttcttcatgtgtatatttccagggcctaacacaatgcttggcagatagtaagaactcattaatttgaatggctttctggtgaatggtagggccaagtgcctgagtacatattcagttcagttcagtcgctcagtcatgtccgactctttgcgaccccatgaatcgcagcacgccaggcctcccagtccatcaccaactcccagagttcacccaaactcacgtccatcaagtcagtgatgccatccagccatctcatcctctgtcgttccgcttctcctcctgcccctaatccctcccagaatcagagtcttttccaatgagtcaactcttcccatgaggtggccgaagtactggagtttcagctttagcatcattccttccaaagaacacccaggactaatccccttgagaatgga

SEQ ID NO: 39839 - DNA, 2947 bp, Bovine  19866880727544
  misc_feature (1)..(1): n is a, c, g, or t
natcctgggaaaaatgaaaccctttcaagtagacatggaaatcacaaagtctgatattccacaaggtggtgtgcaatcttatggacactagaaatatcatgtacaggtcatcagtaacattaatgatatttccctctgggtgctttctgacaacactggcttgtttcatcttattatcacaatgaaacagtatgaaatgttaatataagaatttgttttagctatatatgtaaatcatgttacaagcaagttatttggttggttggctttttagttcattccttcagtcaggtgtttcaaaagaaatgtttttcaaatatcctctttatgcaatcccaaggatcagtttagaaggaaaaatatttggtaaaccattcctggtgtgctgaaccttgcttctgttgggcttctttgggttgggctgtatcatcatcttgtgtcctaaaaacaaacaagttttcttagatggttttgaaaactattcagtaaacaacttaatatgccatcatcttttcagggaaagataactaccactttactcttaaaaagatatagaatgtgatgggttgatactggtagctagaaacaagttgtgaaggatgaagatgaggagagagcatctaattccattgtggaaacaatgctccccattatttcacttaaaatgaatgaggcatattttgcaacatttactatttaaaagaaaaaatatatatataggctgagctgggtcttggttgctgatgggggccttctttagttgtggcaagcggggctactctgtagttgcagcgtgcgggcttctaactgcagtggcttctcttgtggtgctcgggcttagctgcctcatggcatgtggaatcttcccagaccaggaaccgaacccgtgtctcctgcactggcaggtgggctcaacctctggctcccagagaagtccgaaacatttactatttatttcaggcacaaattaaataataaacccctttcaaaaaaaagtaaaagaagaaatggttaatgaatataaaattacacttatggcctcttcaaaagttacctaatgtgctctggcctttcagtgaggctgtgaaattagtctaataaactgaaaaagagagatgataagtaagtacagtgtgtacctatctgaaaagtctctatctgtacttgtgaagcttcttataaaacagtgggaacacagctttagaaaggtgtgtgataatgagatgaacagtggccaggatcaggctggctctggctctggcagttaatagaccatgtgcttgggattctaggcctcagtgtcctcagcttcgaaacaaagggctggacttgctcaatgactggcagggggtccttccagctccacattcatttttgttcatagtcttgggcaggcagggcctttggaaaaggaacatttcagaagaggcctcttctgaaaagcaaactcaagagtccataattcaagatttagctctgaacaaaaattgggcaagaaggaaaatcaataataggggaaatcacacatttctggaagagaagcatgctgtaagggtttctggaaaacaaagcagtatcagagagcaccatacgtgatcaaccaaacccacagattaagaataaaattacaagattatataatgaatattgagaaataaccttttaataatagtgggaaattgctgaatagttctatgccaagtcttgtgctgagcatgttctatggattaattcctttagtttcacatgaatctgaagaggtaagtggtatattatcttcattttagaggtgaggaaacagagatgtcaagtgagctgcccaaagccacacaagctaagaatgaggaggaccagaatttgaatccagactcaaggccagatgatgacagcccattgtttgtgtgaaccactctgaagtcattggctaagtgattcagtgtcccctgtctactcatcccatggaaaagaaaaaaaaaaaaaaaaggttttctggaatttgttatcaggaatagtatctcttctaaagaatgacctatttcccttctcatagataatctttctttttggctgagttgcaatttgtccaaagcaaggcttgttttgttattctttgtatcagcccaaatgctgggtatttaacaggtgccagaaaggaattctaatttccctcttgtctacagaaaaatggaataatagctttggccctctgcgtgcatgctgagtcacttcagtagtgtctgactctttgcaacccatgtatcatagtctgccagcctcctctgtccatgggataatccaggcaagaatgctggagtgggttgccatgcccttctccaggagatcttcccaaacccagggatcaaccccgcctctcttacgtctcctgcattggcaggaaggttctttgccactagcaccacctgggaagcccagctctggccccctaccttgtggcagtttgcacatctagagatggcgtgggtttgtagggccggccacagctgggacctgggtccaagctgggtgacttagttatcggaggggcattgatcctggagctcaggtcaccactcagaaagttcttagcataggaagcgaggtttggcacactgaccactcggctgggcacttcctccatcttctttttctgttggtattaaaagaaaggcctgttagtgccacctaaaagaagcattattgtaaaagtaggtaagcctgccatgccagaattatgtgagccagagacaatacttttatcttatatattgcatgttgttgtgctttaaaaaaggctcacaatctctatccaaaacttctggcagcaaatgtatgttttcatttaaagtttttagattttaaaaggcaccctcagcagaagctggcccacgctgtcctcaaatacattaatatttctggaggaaccttacatttgtcacataagagggat

SEQ ID NO: 39840 - DNA, 2032 bp, Bovine  19866880732894
  misc_feature (1)..(1): n is a, c, g, or t
nattttgcacttttaaattattgctgtgtccttgtgtttttatgacatgctaaccattatttctgtgatgtatttgttgacaaatccttggtcgaaagtacgtcaattataacattgtttgcataagaatcaaatatcactttataacatgtgtttttaaaaatacactcaaaaatacattcaaatttggaggctgcctatatcctaaattcaatttttgagatcaggcactaagaccttgacaaatagatatttgcccaaataaaccaaagcatgacatctgaagcaaataaggaactgaatgtccttaaaattctatatatcatggctctgaggttgtgtttattataatcaaatatgcatttttctttgtccccaaaggagaaattacctcattaatgaatcatttatttatcattcatttgatgagcatttattgcatagtcacaaagatatgaacaatttttaaaatgtcagatgaattaatgatgtagcccctgcccttgaagatctctcagaaataaacattccctgggtcaggatacaatgtcaaggagagctcatcagaaaaacagaaatagcctagtctctggctggaccaccatatcaactctgaaatgccaacctccaaacatttaagtagaaaaataaaactcctaattagtttcagccattttgggcaagtttctataattcatggctgaatgcattttctaacacataaacatcactgactcatttgtagcccaaaagacagacttttttttcctttgggcagaagcaaaggtagaaatgtgctataattttgaaaggatggtaagaagctgggacaggcttcataaagcactggaaacttctaaagtgtgacttgtaaggaggcttaatatctgtctagaagcaaagtgaaggtcaaacgtctcaggaaaaagcaaaggcagaagtgaggtcgtgaggtctgagagaacaaggctttgcaggaacactggctgtgcctggtgtggctggtatgcagggaattgccagcggcagctattgcctgaaatgccaagctaaagatttgggactttacatctcaggcactgaggttttgatcccgagtagtccaggaccgcattgcgttcctcctcactggtgctaacagccttgatgagagagacctgagcactgtgggatagtgagggcttgggactgtggctcctagaaaggcttattaaggaatggcccaattgtcctgccaaacagaaaggctatacactccgtacagttacagcagcacagcacctgccatcacctagcctttccagaggctgcccacagtgctgcctctcagcttctctaaatatgaagtttgttccttttcagcatatgggataaatcagactcacatggtcatcccactggaaccaactgacgcacacaggtctcgatccatcaggagaccagcactattgtctaaggaaaacagagtgtcagattgtccttatttatgttgctttctctgtatttgcttttcagtttgtaatctctaactttcttcaaataaaagaaaatagagcaaacatttcttgagcatctactgtgtgccaagcactgtgctgagaatacagagaatttcaactttatggtgaggaagttggacacaacatttaggtcaggacagtataatttggggtgagacacagtaaatagggttgccagattgtgcaaacaaaaaggcaggatgcccagctgactctgaatttcagatgaacaaggtgtcatttaacttcatgtcccatgccttatttgagacatactctaaaagattcattgtttatctgaaattcaaattcaactgggtgtctaatatttaacctggcaatattaatagcaaacaatttgtataaagaaaaggaaactatgaaaaaaaaaagatattttttgtccctaataggggcccaaaagagtgtcatagtagcttccattattgaatgcttattcagtgggaacacccgactacaactaaacaaattccatatttctaacactcatg

SEQ ID NO: 39841 - DNA, 1854 bp, Bovine  19866880762126
  misc_feature (1)..(1): n is a, c, g, or t
ncctaactgggtgagttaaactgtgatacgaacgtattgctgaaaagtatctgcaaatcagacacttaaaatcaacctgatagatgaaggctgcttcccaaatcaatggggagaaatactcagtaatttttctgtttctgttcacttgcttccagctccctggaaaccaaagacaaggatatccttccccccaaaaggagatgagtcctctcgctccctgcaaatatggcaacccactccagtgttcttgcctggagaatcccagggacgggggagcctggtgggctgccgtctatggggtcgcacagagtcggacacgactgaagcgacttagcagccgtagcagcagcagtgttcctttaaatcatcctctggccaaggctaatttttgaaggtgttcctaatccagcttgaaacagtaccctcagctccattcattcagctggcatgtcatggatcagttaatatacaaggaggtgcaaacatctgccacatgtgggtatgttaggtgctggaaagacagagattaataagagatataattcttgatttcaacaaactaatggttcagcagaggggaccaatagaccacataaatggcaagcattcacctccttcaccacccccaccttctgtacctcgtattttgggtcaaagtgtatcattccaaaggaagtggggtgccatctgaatatttctcaaatgaacctgaccgtggaaatgaacagtaggctgaaagagcactttcaagctcaccaatactcatttctctgaatttcaaatagggcagactctccagcatcccttttctggttttctgcttgggatcccagtgagcgcctcccaggaccaacactgagccactctgggtgtatcctgagttaatcgcccctaatatacgctcttgcattccccatcaggcatttctcaggttctgtccaggactctctccatcactaaagtatgcacagaaaataaatagctctgcttctcccctaaccatccactgcaaaagcctcctcccaactcctcccaagcaaatggctggttattttaaacccacagtcacattaggtcttcatctttcatcttctaggcagtgaacctcatctgggttgtttctattttaaaggaacacccacgcccaggaaatcttcaggaaggaaatagtgaaagtctttctcaagttcatttgacaatttttcaaaggcagcattatgtgcatcttaaaaatagaacacctaatgcaatggggttttgctgaaatgattacaagggagtgtaataggtactacaaagtcaccttacattatagactcttttaacagttttgaaaagtgacttcatgtgctttcttccgtttattacaagtctctggggtggaggacaggaatcatgtctgccactttcctaatgaaaagcagtacagaactgtaatttggacactggtgttcctctttgggcctcagtttccctatctgtaaagtgaagataataatacttgcctcatagggttgttgtttgggactgtgtacagcactatgttcttggtacttgatctgtttgccactagcaacagtgaggaaactgatcccagagaggtaattatgtaatatttactttgctctctgaagaccacccttactcatctagccctgggcctctcttaacaacagcactcagaaatagttgttgaggcgaaatgacttgaataataatgaccaccagtgactttcctgtttcttctggagaaggtgcaggcaaggatctatgaaaacttcaccgcttctctgtccccggctcatccagacaccagaaacttccacaaaaaaagtttctgtaaaattaccaaga

SEQ ID NO: 39842 - DNA, 2928 bp, Bovine  19866880775971
  misc_feature (1)..(1): n is a, c, g, or t
ntgctgtacagtatatccttgtagtttattttataaatagtagtctgtgtctcttaatcccttatctctgtcttatccctcccctctcttctctgataaccactagtctctactttatatccgtttgtcatattcattctttttattttttagattccacaaataagtaattaacagagtatttgtcttttgtctgaattatttcaaattatttcagacaaaacactctctaggtcccccgacacagttgcaaaagacatttttcttttcttagtgttatgtactaccacatacgccagaaattttaagatcaatatgcagcctctctattttaaagaaactatcagaaggattattttaccaaaacaacagtgacctgcatgctagttactacccttaccatccataggctaatatactcacccacctgataatctgggggattcttggcctgaggatttaacccacttggtcttgtcaaatctacaagtaactcagcaacattagttatatctatttcagctagaggagatgacgcaggggcattggccagtgtttgcagagttggaagaaaggcttcttcaaaacattcctggttagtcctattgaaaaacaattcaaggtatgttaccaaagaaaaagcatatgattctttaaaaacattatatgcaaaattcaccttatcaagacatactacatgtttatctaggaaagagccaaataattcaggtagatagaatctaggtaaattcttctcatttaccactgaagaaaaagaaaactaacagcaaaatactataactatgactcatgaggagcctggattcaatttcaagctagactttggtttatcaatatgactaaatacctgcttgcataagcaaacatggggaagaacacgccgaggcaatgtcgaagtcgaatgtcctcttcagtcacagggttgtaccataacaagacaagatgagaaagaatcctgctgctgaccaaaagtccagagaacatcagcttggctagtccttctgcagctcctgttctgagttcagacacctattaaaaatgactttcattaaaagaaaatttttatttgtattaatacctcccttttaggccttacattgtagcccatcctacagtacttttatataaatttatccaaaagcattcatgttattatgattatttaaaggcacataagaggattttatttcttctttttaggttaaggctatgtgacaaactattagtctagctataaattccctttcaattcttcagaagaacaaaaagaaccaaaaggtaatattgtgaaaccagaaaccaaaaccatatgtattaaacacttaccatggtgctaaaatatagaaaactttcaataacagtctctaccatcagagaaggtgtctataaatgaaagttccagaggcaggagtggcattatgtgtgaataacatgtaaaatgtgaatagaaggtgtacaagaagaaaaaggcattcctaaaaaagggtaaccaaaacaaaactagataaaaaaatgaaaaagaggtagtggtattcaaacagagatacaggtataaaagagtagtagtttaaaatactggctattaagcctgaattaaattcaagcctctgatacttcctagctgcatgatctgatcttatgcgtattacttaacttctttgtgactcacttttttcatatataaaaaatgggataacagaagtacttatcacaaaagacaaagaatatatgtaaaactcttagaagtgccatccacatagtaaacccttaacaaatgtcagtgattatttttattacaaatagaaagtaagttttcttagcaatcaggttagagagaccttgaaagttaggtaaagaaattcaccctcaatgaggtaggatatcgttgaagatttttgaaagagtacttagacaaatgagatttcaggaaaattaggttgacaggtcatagattatttaactagattctgtgatgtatatgcagactacatcatccgatatgtcaggctggatgaagcacaagctgggatcaagactgccgggagaaatatcaataacctcagatatgcagatgacaccacctttagggcaaaaaaaaaacagaggaactaaagagccgcttgataaaaagaggacagtgaaaaagctgacttaaaactcaacattcaaaaaatgaagatcatggcctccagtcccaacacttcatggcaaatagatggggaaacgatgggaacagtgacagactttatcttcttgggcttcaaaatcactgcagatgtgactacagccatgatattaaagacaattgctccttggaagaaaagctatgaccaacctagacagcatattaaaaagcagacacatttctttgacaacaaaggtccatatagtcaaagctatggtttttccagcagtcatgtggatgtaagagtaggaccataaagaaagctgagcactgaagaattgacgcttttgagctgtggtgttagagaagacgcttgagagtcccttggatagcaaggagatcaaaccagtcaatccaaaaggaattcaatcctgaatagtttgcccaactgatgcaaagacctgattcactgaaaaagaccctgatgctgggaaagattgaaggcaggaggagaaggggatgacagaggatgagatggttggatggcatcactgattcaatggacatgagcttgagcaagctccaagagttggtgatggacagggaagcctggtgtgcctgcagtccatagggtcacaaaaagtcaagacacgacagagcgactgaacaacagcaacaatgctgacaggccataatctgggaatgaaagacaagtctaaactagagggggcagaagggaaatccagtggaatgaggaaatacaaaaactatttcagaaatat

SEQ ID NO: 39843 - DNA, 3082 bp, Bovine  19866880799119
  misc_feature (1)..(1): n is a, c, g, or t
ngtcgtgagaagccagaacacgtaaccttccttttggctgttgtaaggctctgacttgtcctgcgtggttaatcatcagaaggtttggaacagtggggagacatgatttgactgacttttaacagaccttagatggcaaagtagaaacaagggtcgaggtcattgtaatggttcaagtgagatgtattcatgactcaaattaagggtaggatgggatggtgagaaatggcaagattcaggattagatgttggaatggctttggaatgtcagagacagatttgggacacagatagctgtaaactttttattctggtaaaatataaataacatagaacttgtcatttttaagtgtaaagttcagtgatgttaaatacattcaccttgttgtgcagccatcaccaccgtctgtctcgagaactttttcatcttcccaaatgaaaactctgtactcattaaacactagctccctagtaccctcttcttgcagcccctggcaaacagccttctgctttctatctctgtgaattttactactctaggtacctcatataagtggaatcatataccatatctgtccatttgtgactggcttatctgacttagcttaatatctttaaggttcatccatgtggttgcatgtgtcagaatctttctcttcttaaagctgagtaatatatcattgcaggtatatatcacattttgtttatccatttacctatcaacgggcacttgggttgtttccacattttggctagtgttaataatgctgtgaacgtgggtgtacaagtatctattcaagttcccgttttcaattattttgaaattgaaattccaaaatggaatagctggatcacatggtaattctgtgtttaattttttgaggaaccaccacaccattttccatagcagttgcactattttatgttcccactcacaatacagctgcaatttctccacatcctcatcacttattttttgttttttgatgatgatcatcctaatgggcatgaagtggtgttttcattgcagttttgatttgtattttccaaataattagtaatgttcagcttcctttcacatgtttattaatagactccaaactttgacctaagcagctgaaagaaggggttgccatggagcaagatggggattaatgtacaaagagcaagttttgaaggaaaaatctccagaattaaatttgaggtacatattaggtaatggggatattgataagcaacaggacataaatctgacattcaggtgacaggtccagcctagacatataaatttgacagtcactaaccaaaagagcgtacataaaatcatgagattgaatgagatctcaagaaaatgtttgtagaggagagaaagtctgaggcctaagttctggggcccttttatttgaaggatgggagatgaggaagaacttgccaatcagatgagaagcaccatgctgagcatgtagtaaatgctgtaaaaatacttaatgaaagaatatcaccagtttttttataaacaaatttatttttctgtttcttttaatttggggatccaaaaggatttgggtttcaatcctagcatctgtacttttaagcattattttatttattttattatttatttttagcattgtcttggcaataataatggggttccccagtggctcagacagtaaagaatctgcctgcaatgtaggagacctgggtttgatccctgggttgggaagatcctctggagaagggaatgacaatccactccagtattcttgcctggagaatttcaaggacagaagcacctggcgagctacagttcatgggtttgcaaaaagtcggacatgactgagcgagtacacttcgcaataatagtaaaaataatgacagaatttcttgatgtttactttgtgctaggaatgctgctaagggtattagattcagtgtgtcattttaatctccaaataagtctatgaaataggcatttctctcccaagtgacagagaatcagagaagttcagtaatgccctcaaggttacagagttagagagaggtagagctacaggtccagcagaatccaaagcctccttttaagcaccatgcttttataaaccctagatgttaaattaaccccgcccaatgtcagtttcctcatctgtaaaataagaagtatgagaatgtccactttgtaaaactgttaaatttattgacaaataatgtatctattacctgacccagagaaggttatattctgagggcacttgataagtattatttcctgttttccttttccattttacttctgactcctgctgccagactcaatggagactttccataggatctgatgctcagaattcattaattatagctttgttaaacctacagtgcgtgcatgtgtgcatgctcagttgctcagttatgtctgactctttgtgaccccatgaacagtaacccaccaggctcctctgtccatggaattttcaacctttaagaccttaacaggtccactgcaaacattgtctctgaaatcaaaccattagcggtggatttctaaaacccttgggaagacattgcaacttgctcagtattgctcttgactgctgaattattcatgtcccttgatggattctgaagttgacttcctcctgagaaggattcacaaatgagacttgggccagctacttgaagtttcagttgagtaagaaggtggtgagtgaacaaaagtgagcaggtggcagaggaagtgttgccaagtggcctgtgaggcaccaggagcagaagggtgggtatattcaaaatctactcaacaatttcaggtgctgagggtggggtggggtgggagggtgggccagattatgtttccaaaaacaaggaatatttctttttgaggacatagtgtgagaaagaagaagaagaagaagaagaaacatttaataagtacctattttgtgccaacacatatttagatgtaatactacttgatcctcaaaaaaaaaaaaacaaaaaactgggtctgggttatctctctcttacaggtaagaaactgaggcttcaagaagtgaaataacataagcaatcttaaaaagag

SEQ ID NO: 39844 - DNA, 1277 bp, Bovine  19866880813029
  misc_feature (1)..(1): n is a, c, g, or t
ntatttgtggagctcatctctttatgttagatttatggctactctgtgatttaatcctagtatttctttttttagaattgaggagttgttctgtaagctctgtgtcacaatatcattatttacaatgtggtgctttttacaatttgatttttttttcctgcaatcctgtactgtgctaactttcgagaaggttcatctaacaaatatttgagtgcttgttggatataattagtagtatttgatccctgggtcgggaagatcccctggagaaggaaatggcaacccactccagtattcttgcctggagaatcccatggacggtggagcctggtaggttacagtctgcgggatcgcaaagagttggacacgactgagtgacatcacttcacttcactcagcatgatattgagtgataatagatatagacctggattgtatgaaatacataattagtatctgataagtcataaaatttaaagcaaagtctaggataaaagaaacgcattaatatatttttaaactttatcaggacttgtatagtctattaggatatttgatctgggaaatgcaagttttttgttttaacttttaattttgatataatctcaaatttacaagaaaagttggaagaatagtacaagggactcctctatatccttccccacattcagcaaatgtattacattttgaagtatttgctttatcattcttgccctgtatttatctatatctttttttttctggaccattcaaagggtgatttggagacatgatgcctctttatccctaaattcttcagttatacttcctaaaaccaaggacattgtcttgcctaaccatagtatagttattaaaaccaggtaatataacattgacatactttaatattactgaattcataattcatgttcattttgtcaattttattttatagcttttccccccagcgaggatcatacattgcatttggttgtcatatttctttagtctctttaaatctggaacatttcctcagcctttcctgtatttcttgaccttgacatttttgaaaagtacaggacagttattttgtcgaatgtccctcaatttgaatttgtctgttgttacctcatgattagattggttatgcatttttggcaggaatatcttctgtccttcttaataccttgtatattaaggttcatgatgttggtttgtcccaacgttggtgatggtacctttgaaagtttggtttatgtggtattctctgtatttctccctaaaagttactgtttgtc

SEQ ID NO: 39845 - DNA, 2090 bp, Bovine  19866880828615
  misc_feature (1)..(1): n is a, c, g, or t
naacatgtgtatgagacgccccaaagttatattctgaaaaaagataccaacattccagcataatcatcaaaataacttgtaagaaaaagcaaacttttcacacaaatcctatatttaaagatgccttccttccaataacatttgttaagcgaccatctgtttgcctttgattatcatctggaccactaataagcgagtttaatctgagcagtgttatttgcatgctatttctaaatttagtgcctttcaaagaagtcagcaaggctggcctccaggaaatattgcctttgatgtaacatctggttttcagggaatttctgtgtagtgcccaatcagagggcggactaaagggcagagaaaccaagtgacttgcccagagtcatgtaagtagttactgacttaacctggattacctgcagtttctatttgttgcttaaagtcctagcctgcttatttccattctgtaagttgtatagagactgtacacatagatatagtcattcccctcccttcatgaatagatgtgtgtggatctttacgactaattacagatttatttgcatctttctttttgatgtttcctccctgtaacttgagaagaaaggaaaatttcctgttatcctctgctttgttaaaaaaatgatttgaagtaacagtgagttgttattgattgcaaaatcttctttagaagtgaactgatctttttccttgcaaggaaaatggagagttaaattgtatggacaactcacttgatttgagggcaactggaaggcatcatcactggcatcatcaatgttcaacctttcccccttgtcttggcttctccatttttccctcctttctccttccctgggctggagatcacaaagctgtcaacacctcaaatgcaagattataatgaaagttcaaggttacgatgctttattataaaagcaattctttttgttactttactgagtcaatacattttataatcattatatgattttaatagcctttgatcaattataaaaatatattcaatctaattagttcttttagctttaaaggtattttcacacttaagatttatttttaatcttcttaggtttctgttataaaacaatttgcattttatgtatcttagaattgttttttcatcacctaaagatcattctagtttttgtacaggggaagcataacttaatatcttataaattaaaaaattaaaattttaatttgacaaattggggtttaagtctcagctctaccagctacatgaccttgggcaaatcactagatctttctaaacttcaatgtcatttaaaatatctatctcataacactgaaagaatgaaatgagattatatgtaaagctgttagcacagtgctctgatacacattaaaaggtcaggaaatagtcctcaattttctttcttttttttcccttacaaagtgcattagtgttctgtgcttgttcttgcctgactattaagagattttatgaaaatcacaatcacatgtgattgggagtgagtgggatcttggaaacttgagaaactgtgattagaagattaaatgaaatgaagtactagagacttctgtgtttggctggagatccatttcttttgctttgggtgatgctgccctcattccatttaagggagttccttttgctctcttctgagtaatcttcagagtacagtcaggcaagtgacaggccttcctttagccaagggctgagcatgagattcaaaccattgcaattctgccacctcttttttttaggactttgaatcctggtgaaagaacacaaatgcaggaaaattgttaaatcacttggggccctgaagtgactatcagaggtcagagtatgctgagtggctaagagcagagactaagccagatagcctgagttcagaccccttactagctaaatgaccgtaactaggacaagttacttaacctctttaggccaggtttccttatttctacaatggagtcattaatagtacctaactcatagggttattatgagaattaaataagttagaatatctaaagggtttaggatgtgcctgatacatcttaaatacagtatatattataat

SEQ ID NO: 39846 - DNA, 1362 bp, Bovine  19866880939028
  misc_feature (1)..(1): n is a, c, g, or t
ncttaggaaaaatgtagctgggcagaggacaccaaagtggaatcctaactatctgctctcttttatatttcctgtgctggcataggcagacatgtttaaagatatgtgatttttagccagaggagtggaattgagaaggtatggttagagtctgattgaagaagggagagatggattgggaattccaaaatttctcccagtaagaccttgactggttaagactctgttttgaaagaatccagaaagagttcttcctgtttggctattgaattcatgtaataacaaagctgaaaataattctaagagtttctcattattaagcatcagaataaatagcattatactactactctcttatgtggttctgattataccttgtttttaacttaataataccttatgattccatagcacataacagtttcaaaatatttttacttagattatctaatttaatgcttatagtaacaatgtaaggtagttattattatctgttgttactgttctattatagattcagctcagtttaattccactgtacacttattgagcacctattgtgtgcctagcattctgctaggtgttgggggataatgtccttcatacttaagtgaagagtacacagatgagaacaagcaaaacttatttattcagagctcgctatagggaaggagtcagcaccattgcttgcatttggcagaattaaaaggcaagcagaggagtggggaagttttatagtgaaacagaggaaggtttcatctgtgccctgattggaggctcctgtcatgaggaggccggaggtgagctgtttacatgcagggcaacctatattattgattggtggagcataatcggcttattctgattggtcctaagttgaaagctgggccaaaacttagggaagctgtcagttattgatcaaatgctaattgttgtgggcagattgctacagaggttgtggtttaatttctggaactggttgttgtgggacttgtcattcagtatactatctatcggtggtctgtttgtatactttctctcaggtgatgagcacttaacaacatgagagtatgaattttagagtcagagagataaacattcaaataaatctcctgatgtgtaatctggagcaaattacaccatctctgtggacctgagtagccttatctgaggctacttatcttttggaggtgatgaagaaactggggtaaccagatctttaaccagctgtcctggagtcatgaaaagtggggtgaagaacttgagtttaatccgggtttttcaactctcttcagtgctctttctggtcatgactttcagagtttatcatcgactttaggaaaggggtgagcatagatcttt
